United States Patent Application Publication US 2020/0095579 A1 - sequence listing, part 4

SEQ ID NO: 31950 - DNA, 20 bp, Artificial Sequence
  Description of Artificial Sequence: Synthetic oligonucleotide
  Target: LAMA2; (+) strand; PAM type: NNGRRT; PAM sequence: TAGGAT
aagatgcttagtagtggact

SEQ ID NO: 31951 - DNA, 20 bp, Artificial Sequence
  Description of Artificial Sequence: Synthetic oligonucleotide
  Target: LAMA2; (+) strand; PAM type: NNGRRT; PAM sequence: TAGGAT
attttaattttatctgatat

SEQ ID NO: 31952 - DNA, 20 bp, Artificial Sequence
  Description of Artificial Sequence: Synthetic oligonucleotide
  Target: LAMA2; (+) strand; PAM type: NNGRRT; PAM sequence: TTGAAT
aaaattacctaaatcctcct

SEQ ID NO: 31953 - DNA, 20 bp, Artificial Sequence
  Description of Artificial Sequence: Synthetic oligonucleotide
  Target: LAMA2; (+) strand; PAM type: NNGRRT; PAM sequence: TTGAAT
tgaagtgatagtgcatactt

SEQ ID NO: 31954 - DNA, 20 bp, Artificial Sequence
  Description of Artificial Sequence: Synthetic oligonucleotide
  Target: LAMA2; (+) strand; PAM type: NNGRRT; PAM sequence: AAGAAT
tgaaaaacacattcatcttt

SEQ ID NO: 31955 - DNA, 20 bp, Artificial Sequence
  Description of Artificial Sequence: Synthetic oligonucleotide
  Target: LAMA2; (+) strand; PAM type: NNGRRT; PAM sequence: TAGGAT
ttccagatcctatttataca

SEQ ID NO: 31956 - DNA, 20 bp, Artificial Sequence
  Description of Artificial Sequence: Synthetic oligonucleotide
  Target: LAMA2; (+) strand; PAM type: NNGRRT; PAM sequence: AAGAGT
tatgtttatatatgtctata

SEQ ID NO: 31957 - DNA, 20 bp, Artificial Sequence
  Description of Artificial Sequence: Synthetic oligonucleotide
  Target: LAMA2; (+) strand; PAM type: NNGRRT; PAM sequence: GAGGGT
atacaaaaataatgttaaat

SEQ ID NO: 31958 - DNA, 20 bp, Artificial Sequence
  Description of Artificial Sequence: Synthetic oligonucleotide
  Target: LAMA2; (+) strand; PAM type: NNGRRT; PAM sequence: ATGGGT
ttgtattttttttacataac

SEQ ID NO: 31959 - DNA, 20 bp, Artificial Sequence
  Description of Artificial Sequence: Synthetic oligonucleotide
  Target: LAMA2; (+) strand; PAM type: NNGRRT; PAM sequence: TGGAAT
ttgcaacaaaaagctggcca

SEQ ID NO: 31960 - DNA, 20 bp, Artificial Sequence
  Description of Artificial Sequence: Synthetic oligonucleotide
  Target: LAMA2; (+) strand; PAM type: NNGRRT; PAM sequence: TGGGGT
gatgtcctatagaaacttta

SEQ ID NO: 31961 - DNA, 20 bp, Artificial Sequence
  Description of Artificial Sequence: Synthetic oligonucleotide
  Target: LAMA2; (+) strand; PAM type: NNGRRT; PAM sequence: TGGGAT
ttcctttttactttaagttc

SEQ ID NO: 31962 - DNA, 20 bp, Artificial Sequence
  Description of Artificial Sequence: Synthetic oligonucleotide
  Target: LAMA2; (+) strand; PAM type: NNGRRT; PAM sequence: CAGAAT
taagttctgggatgcatgca

SEQ ID NO: 31963 - DNA, 20 bp, Artificial Sequence
  Description of Artificial Sequence: Synthetic oligonucleotide
  Target: LAMA2; (+) strand; PAM type: NNGRRT; PAM sequence: GGGAAT
aacacttttacactgttggt

SEQ ID NO: 31964 - DNA, 20 bp, Artificial Sequence
  Description of Artificial Sequence: Synthetic oligonucleotide
  Target: LAMA2; (+) strand; PAM type: NNGRRT; PAM sequence: AAGGAT
agacagtgtggcgattcctc

SEQ ID NO: 31965 - DNA, 20 bp, Artificial Sequence
  Description of Artificial Sequence: Synthetic oligonucleotide
  Target: LAMA2; (+) strand; PAM type: NNGRRT; PAM sequence: CTGGGT
ttgacccagcaaccccataa

SEQ ID NO: 31966 - DNA, 20 bp, Artificial Sequence
  Description of Artificial Sequence: Synthetic oligonucleotide
  Target: LAMA2; (+) strand; PAM type: NNGRRT; PAM sequence: AGGAAT
ataactgggtatatacccaa

SEQ ID NO: 31967 - DNA, 20 bp, Artificial Sequence
  Description of Artificial Sequence: Synthetic oligonucleotide
  Target: LAMA2; (+) strand; PAM type: NNGRRT; PAM sequence: TGGAAT
aatgtggtacatatacacca

SEQ ID NO: 31968 - DNA, 20 bp, Artificial Sequence
  Description of Artificial Sequence: Synthetic oligonucleotide
  Target: LAMA2; (+) strand; PAM type: NNGRRT; PAM sequence: AAGAAT
aatactatgcagccataaaa

SEQ ID NO: 31969 - DNA, 20 bp, Artificial Sequence
  Description of Artificial Sequence: Synthetic oligonucleotide
  Target: LAMA2; (+) strand; PAM type: NNGRRT; PAM sequence: AGGGAT
aatgatatcatgtcctttgc

SEQ ID NO: 31970 - DNA, 20 bp, Artificial Sequence
  Description of Artificial Sequence: Synthetic oligonucleotide
  Target: LAMA2; (+) strand; PAM type: NNGRRT; PAM sequence: ATGGAT
atcatgtcctttgcagggat

SEQ ID NO: 31971 - DNA, 20 bp, Artificial Sequence
  Description of Artificial Sequence: Synthetic oligonucleotide
  Target: LAMA2; (+) strand; PAM type: NNGRRT; PAM sequence: AGGAAT
catcctcagcaaactaatcc

SEQ ID NO: 31972 - DNA, 20 bp, Artificial Sequence
  Description of Artificial Sequence: Synthetic oligonucleotide
  Target: LAMA2; (+) strand; PAM type: NNGRRT; PAM sequence: GGGAGT
acatgttctcgctcataagt

SEQ ID NO: 31973 - DNA, 20 bp, Artificial Sequence
  Description of Artificial Sequence: Synthetic oligonucleotide
  Target: LAMA2; (+) strand; PAM type: NNGRRT; PAM sequence: TGGAGT
aggaggggaacaacacacac

SEQ ID NO: 31974 - DNA, 20 bp, Artificial Sequence
  Description of Artificial Sequence: Synthetic oligonucleotide
  Target: LAMA2; (+) strand; PAM type: NNGRRT; PAM sequence: GGGGGT
aacacacactggagtctatt

SEQ ID NO: 31975 - DNA, 20 bp, Artificial Sequence
  Description of Artificial Sequence: Synthetic oligonucleotide
  Target: LAMA2; (+) strand; PAM type: NNGRRT; PAM sequence: TAGAAT
tactcgggaggctgagacag

SEQ ID NO: 31976 - DNA, 20 bp, Artificial Sequence
  Description of Artificial Sequence: Synthetic oligonucleotide
  Target: LAMA2; (+) strand; PAM type: NNGRRT; PAM sequence: ACGGGT
aacaaacaaaaaactggttg

SEQ ID NO: 31977 - DNA, 20 bp, Artificial Sequence
  Description of Artificial Sequence: Synthetic oligonucleotide
  Target: LAMA2; (+) strand; PAM type: NNGRRT; PAM sequence: CAGAAT
tcctctatactgcctaggcc

SEQ ID NO: 31978 - DNA, 20 bp, Artificial Sequence
  Description of Artificial Sequence: Synthetic oligonucleotide
  Target: LAMA2; (+) strand; PAM type: NNGRRT; PAM sequence: GTGAGT
tatcatcttcattttaaaaa

SEQ ID NO: 31979 - DNA, 20 bp, Artificial Sequence
  Description of Artificial Sequence: Synthetic oligonucleotide
  Target: LAMA2; (+) strand; PAM type: NNGRRT; PAM sequence: AAGGAT
gatagcatgcactcagacta

SEQ ID NO: 31980 - DNA, 20 bp, Artificial Sequence
  Description of Artificial Sequence: Synthetic oligonucleotide
  Target: LAMA2; (+) strand; PAM type: NNGRRT; PAM sequence: GAGGAT
caatagtggtgaaatattgg

SEQ ID NO: 31981 - DNA, 20 bp, Artificial Sequence
  Description of Artificial Sequence: Synthetic oligonucleotide
  Target: LAMA2; (+) strand; PAM type: NNGRRT; PAM sequence: GTGGGT
caaggtataactgttaggca

SEQ ID NO: 31982 - DNA, 20 bp, Artificial Sequence
  Description of Artificial Sequence: Synthetic oligonucleotide
  Target: LAMA2; (+) strand; PAM type: NNGRRT; PAM sequence: AGGAAT
agccaccctcactaacttct

SEQ ID NO: 31983 - DNA, 20 bp, Artificial Sequence
  Description of Artificial Sequence: Synthetic oligonucleotide
  Target: LAMA2; (+) strand; PAM type: NNGRRT; PAM sequence: AGGAAT
ataacttctaccacagggct

SEQ ID NO: 31984 - DNA, 20 bp, Artificial Sequence
  Description of Artificial Sequence: Synthetic oligonucleotide
  Target: LAMA2; (+) strand; PAM type: NNGRRT; PAM sequence: GGGGGT
tcatgtggtagaaagggcaa

SEQ ID NO: 31985 - DNA, 20 bp, Artificial Sequence
  Description of Artificial Sequence: Synthetic oligonucleotide
  Target: LAMA2; (+) strand; PAM type: NNGRRT; PAM sequence: CTGGGT
ctataaagaactacctgaga

SEQ ID NO: 31986 - DNA, 20 bp, Artificial Sequence
  Description of Artificial Sequence: Synthetic oligonucleotide
  Target: LAMA2; (+) strand; PAM type: NNGRRT; PAM sequence: GAGAAT
acatagtggcaggaaagaga

SEQ ID NO: 31987 - DNA, 20 bp, Artificial Sequence
  Description of Artificial Sequence: Synthetic oligonucleotide
  Target: LAMA2; (+) strand; PAM type: NNGRRT; PAM sequence: GAGAAT
ttcgaacaacctgatcttgt

SEQ ID NO: 31988 - DNA, 20 bp, Artificial Sequence
  Description of Artificial Sequence: Synthetic oligonucleotide
  Target: LAMA2; (+) strand; PAM type: NNGRRT; PAM sequence: GTGGGT
ccaggcccctccctcaacat

SEQ ID NO: 31989 - DNA, 20 bp, Artificial Sequence
  Description of Artificial Sequence: Synthetic oligonucleotide
  Target: LAMA2; (+) strand; PAM type: NNGRRT; PAM sequence: GGGAAT
cctccaaataccatcacatt

SEQ ID NO: 31990 - DNA, 20 bp, Artificial Sequence
  Description of Artificial Sequence: Synthetic oligonucleotide
  Target: LAMA2; (+) strand; PAM type: NNGRRT; PAM sequence: ATGAAT
tgggaattaggtttcaacat

SEQ ID NO: 31991 - DNA, 20 bp, Artificial Sequence
  Description of Artificial Sequence: Synthetic oligonucleotide
  Target: LAMA2; (+) strand; PAM type: NNGRRT; PAM sequence: CAGGGT
caatctacagcattggctat

SEQ ID NO: 31992 - DNA, 20 bp, Artificial Sequence
  Description of Artificial Sequence: Synthetic oligonucleotide
  Target: LAMA2; (+) strand; PAM type: NNGRRT; PAM sequence: AAGAAT
aaagacatatataacgaaaa

SEQ ID NO: 31993 - DNA, 20 bp, Artificial Sequence
  Description of Artificial Sequence: Synthetic oligonucleotide
  Target: LAMA2; (+) strand; PAM type: NNGRRT; PAM sequence: AAGGGT
ttataaagatgcattgtgga

SEQ ID NO: 31994 - DNA, 20 bp, Artificial Sequence
  Description of Artificial Sequence: Synthetic oligonucleotide
  Target: LAMA2; (+) strand; PAM type: NNGRRT; PAM sequence: TAGGGT
tcccagtgtttctcaagctc

SEQ ID NO: 31995 - DNA, 20 bp, Artificial Sequence
  Description of Artificial Sequence: Synthetic oligonucleotide
  Target: LAMA2; (+) strand; PAM type: NNGRRT; PAM sequence: CAGAAT
agattgctggtcctcacccc

SEQ ID NO: 31996 - DNA, 20 bp, Artificial Sequence
  Description of Artificial Sequence: Synthetic oligonucleotide
  Target: LAMA2; (+) strand; PAM type: NNGRRT; PAM sequence: CTGAGT
ggtcctcacccccagaattt

SEQ ID NO: 31997 - DNA, 20 bp, Artificial Sequence
  Description of Artificial Sequence: Synthetic oligonucleotide
  Target: LAMA2; (+) strand; PAM type: NNGRRT; PAM sequence: GAGAAT
gtaggtttgtggcagggcct

SEQ ID NO: 31998 - DNA, 20 bp, Artificial Sequence
  Description of Artificial Sequence: Synthetic oligonucleotide
  Target: LAMA2; (+) strand; PAM type: NNGRRT; PAM sequence: AAGAAT
cccagtgcaaaactctctcc

SEQ ID NO: 31999 - DNA, 20 bp, Artificial Sequence
  Description of Artificial Sequence: Synthetic oligonucleotide
  Target: LAMA2; (+) strand; PAM type: NNGRRT; PAM sequence: AGGAAT
aagaatagaaattaattttc

SEQ ID NO: 32000 - DNA, 20 bp, Artificial Sequence
  Description of Artificial Sequence: Synthetic oligonucleotide
  Target: LAMA2; (+) strand; PAM type: NNGRRT; PAM sequence: TCGGAT
tctatgtcataaggagatct

SEQ ID NO: 32001 - DNA, 20 bp, Artificial Sequence
  Description of Artificial Sequence: Synthetic oligonucleotide
  Target: LAMA2; (+) strand; PAM type: NNGRRT; PAM sequence: TTGAAT
ggagatcttcggatacaccc

SEQ ID NO: 32002 - DNA, 20 bp, Artificial Sequence
  Description of Artificial Sequence: Synthetic oligonucleotide
  Target: LAMA2; (+) strand; PAM type: NNGRRT; PAM sequence: AGGAGT
caaccgagacccctcattct

SEQ ID NO: 32003 - DNA, 20 bp, Artificial Sequence
  Description of Artificial Sequence: Synthetic oligonucleotide
  Target: LAMA2; (+) strand; PAM type: NNGRRT; PAM sequence: AAGAGT
aataagtattcagctgacaa

SEQ ID NO: 32004 - DNA, 20 bp, Artificial Sequence
  Description of Artificial Sequence: Synthetic oligonucleotide
  Target: LAMA2; (+) strand; PAM type: NNGRRT; PAM sequence: TAGAAT
ttttaaacttttatttgacg

SEQ ID NO: 32005 - DNA, 20 bp, Artificial Sequence
  Description of Artificial Sequence: Synthetic oligonucleotide
  Target: LAMA2; (+) strand; PAM type: NNGRRT; PAM sequence: CAGAAT
cctataaagcagactcttgg

SEQ ID NO: 32006 - DNA, 20 bp, Artificial Sequence
  Description of Artificial Sequence: Synthetic oligonucleotide
  Target: LAMA2; (+) strand; PAM type: NNGRRT; PAM sequence: GAGAAT
tagaaaacctgaagcacctg

SEQ ID NO: 32007 - DNA, 20 bp, Artificial Sequence
  Description of Artificial Sequence: Synthetic oligonucleotide
  Target: LAMA2; (+) strand; PAM type: NNGRRT; PAM sequence: AGGAGT
tggagaatcctacgattcca

SEQ ID NO: 32008 - DNA, 20 bp, Artificial Sequence
  Description of Artificial Sequence: Synthetic oligonucleotide
  Target: LAMA2; (+) strand; PAM type: NNGRRT; PAM sequence: AAGGAT
aataaacacagacccttgtg

SEQ ID NO: 32009 - DNA, 20 bp, Artificial Sequence
  Description of Artificial Sequence: Synthetic oligonucleotide
  Target: LAMA2; (+) strand; PAM type: NNGRRT; PAM sequence: AAGGGT
atttataacccttctcctag

SEQ ID NO: 32010 - DNA, 20 bp, Artificial Sequence
  Description of Artificial Sequence: Synthetic oligonucleotide
  Target: LAMA2; (+) strand; PAM type: NNGRRT; PAM sequence: CTGAGT
cattttcagagatctcatca

SEQ ID NO: 32011 - DNA, 20 bp, Artificial Sequence
  Description of Artificial Sequence: Synthetic oligonucleotide
  Target: LAMA2; (+) strand; PAM type: NNGRRT; PAM sequence: CTGAGT
tgttttttttaaactcttac

SEQ ID NO: 32012 - DNA, 20 bp, Artificial Sequence
  Description of Artificial Sequence: Synthetic oligonucleotide
  Target: LAMA2; (+) strand; PAM type: NNGRRT; PAM sequence: CTGAAT
atggtggtgcccagcagatg

SEQ ID NO: 32013 - DNA, 20 bp, Artificial Sequence
  Description of Artificial Sequence: Synthetic oligonucleotide
  Target: LAMA2; (+) strand; PAM type: NNGRRT; PAM sequence: ATGAGT
acaaaaggaaattgctgaag

SEQ ID NO: 32014 - DNA, 20 bp, Artificial Sequence
  Description of Artificial Sequence: Synthetic oligonucleotide
  Target: LAMA2; (+) strand; PAM type: NNGRRT; PAM sequence: GTGAGT
attgctgaagatgagttggt

SEQ ID NO: 32015 - DNA, 20 bp, Artificial Sequence
  Description of Artificial Sequence: Synthetic oligonucleotide
  Target: LAMA2; (+) strand; PAM type: NNGRRT; PAM sequence: ATGAGT
agatgagttggtgtgagtag

SEQ ID NO: 32016 - DNA, 20 bp, Artificial Sequence
  Description of Artificial Sequence: Synthetic oligonucleotide
  Target: LAMA2; (+) strand; PAM type: NNGRRT; PAM sequence: ATGAAT
tactttaccattgttccaaa

SEQ ID NO: 32017 - DNA, 20 bp, Artificial Sequence
  Description of Artificial Sequence: Synthetic oligonucleotide
  Target: LAMA2; (+) strand; PAM type: NNGRRT; PAM sequence: ATGAGT
ctccttctgtaattaggcta

SEQ ID NO: 32018 - DNA, 20 bp, Artificial Sequence
  Description of Artificial Sequence: Synthetic oligonucleotide
  Target: LAMA2; (+) strand; PAM type: NNGRRT; PAM sequence: TTGGAT
ttgttttaataaaaatacct

SEQ ID NO: 32019 - DNA, 20 bp, Artificial Sequence
  Description of Artificial Sequence: Synthetic oligonucleotide
  Target: LAMA2; (+) strand; PAM type: NNGRRT; PAM sequence: AAGAGT
aacacctaatactttcaaat

SEQ ID NO: 32020 - DNA, 20 bp, Artificial Sequence
  Description of Artificial Sequence: Synthetic oligonucleotide
  Target: LAMA2; (+) strand; PAM type: NNGRRT; PAM sequence: GCGAAT
aatactttcaaataagagtt

SEQ ID NO: 32021 - DNA, 20 bp, Artificial Sequence
  Description of Artificial Sequence: Synthetic oligonucleotide
  Target: LAMA2; (+) strand; PAM type: NNGRRT; PAM sequence: GAGGGT
caaataagagttgcgaatat

SEQ ID NO: 32022 - DNA, 20 bp, Artificial Sequence
  Description of Artificial Sequence: Synthetic oligonucleotide
  Target: LAMA2; (+) strand; PAM type: NNGRRT; PAM sequence: CTGAAT
cagaccccctcccagacctc

SEQ ID NO: 32023 - DNA, 20 bp, Artificial Sequence
  Description of Artificial Sequence: Synthetic oligonucleotide
  Target: LAMA2; (+) strand; PAM type: NNGRRT; PAM sequence: GGGGAT
cctcctgaatcagaaacttt

SEQ ID NO: 32024 - DNA, 20 bp, Artificial Sequence
  Description of Artificial Sequence: Synthetic oligonucleotide
  Target: LAMA2; (+) strand; PAM type: NNGRRT; PAM sequence: GGGGAT
atgtattaacaagcccttca

SEQ ID NO: 32025 - DNA, 20 bp, Artificial Sequence
  Description of Artificial Sequence: Synthetic oligonucleotide
  Target: LAMA2; (+) strand; PAM type: NNGRRT; PAM sequence: GAGAAT
attatgaggcatgttagttt

SEQ ID NO: 32026 - DNA, 20 bp, Artificial Sequence
  Description of Artificial Sequence: Synthetic oligonucleotide
  Target: LAMA2; (+) strand; PAM type: NNGRRT; PAM sequence: TAGAGT
attactgtctttcaagtatt

SEQ ID NO: 32027 - DNA, 20 bp, Artificial Sequence
  Description of Artificial Sequence: Synthetic oligonucleotide
  Target: LAMA2; (+) strand; PAM type: NNGRRT; PAM sequence: TAGAAT
ctactagcatgacaatgacc

SEQ ID NO: 32028 - DNA, 20 bp, Artificial Sequence
  Description of Artificial Sequence: Synthetic oligonucleotide
  Target: LAMA2; (+) strand; PAM type: NNGRRT; PAM sequence: GTGGAT
gtctcagtacaatgaaacaa

SEQ ID NO: 32029 - DNA, 20 bp, Artificial Sequence
  Description of Artificial Sequence: Synthetic oligonucleotide
  Target: LAMA2; (+) strand; PAM type: NNGRRT; PAM sequence: GTGAAT
gtttgattttggtatgtgaa

SEQ ID NO: 32030 - DNA, 20 bp, Artificial Sequence
  Description of Artificial Sequence: Synthetic oligonucleotide
  Target: LAMA2; (+) strand; PAM type: NNGRRT; PAM sequence: TAGAAT
catttcatcaatcagattcc

SEQ ID NO: 32031 - DNA, 20 bp, Artificial Sequence
  Description of Artificial Sequence: Synthetic oligonucleotide
  Target: LAMA2; (+) strand; PAM type: NNGRRT; PAM sequence: GTGAAT
tcaacttgatttagcacaca

SEQ ID NO: 32032 - DNA, 20 bp, Artificial Sequence
  Description of Artificial Sequence: Synthetic oligonucleotide
  Target: LAMA2; (+) strand; PAM type: NNGRRT; PAM sequence: GGGGGT
tcattgtctattattgggct

SEQ ID NO: 32033 - DNA, 20 bp, Artificial Sequence
  Description of Artificial Sequence: Synthetic oligonucleotide
  Target: LAMA2; (+) strand; PAM type: NNGRRT; PAM sequence: GAGAGT
aaaagtgaagaagctgtttg

SEQ ID NO: 32034 - DNA, 20 bp, Artificial Sequence
  Description of Artificial Sequence: Synthetic oligonucleotide
  Target: LAMA2; (+) strand; PAM type: NNGRRT; PAM sequence: AAGGAT
gggaaaatgaagaaatggag

SEQ ID NO: 32035 - DNA, 20 bp, Artificial Sequence
  Description of Artificial Sequence: Synthetic oligonucleotide
  Target: LAMA2; (+) strand; PAM type: NNGRRT; PAM sequence: GTGAGT
aaaacatgactgcattggag

SEQ ID NO: 32036 - DNA, 20 bp, Artificial Sequence
  Description of Artificial Sequence: Synthetic oligonucleotide
  Target: LAMA2; (+) strand; PAM type: NNGRRT; PAM sequence: AAGAGT
gatgcacatttacaaaagtc

SEQ ID NO: 32037 - DNA, 20 bp, Artificial Sequence
  Description of Artificial Sequence: Synthetic oligonucleotide
  Target: LAMA2; (+) strand; PAM type: NNGRRT; PAM sequence: AAGAAT
tgaccagttaccatcgccca

SEQ ID NO: 32038 - DNA, 20 bp, Artificial Sequence
  Description of Artificial Sequence: Synthetic oligonucleotide
  Target: LAMA2; (+) strand; PAM type: NNGRRT; PAM sequence: GGGAGT
agtggaagaagttctttaca

SEQ ID NO: 32039 - DNA, 20 bp, Artificial Sequence
  Description of Artificial Sequence: Synthetic oligonucleotide
  Target: LAMA2; (+) strand; PAM type: NNGRRT; PAM sequence: TAGGGT
attatactatagcatacata

SEQ ID NO: 32040 - DNA, 20 bp, Artificial Sequence
  Description of Artificial Sequence: Synthetic oligonucleotide
  Target: LAMA2; (+) strand; PAM type: NNGRRT; PAM sequence: ATGAAT
agcacatgacaaatagctca

SEQ ID NO: 32041 - DNA, 20 bp, Artificial Sequence
  Description of Artificial Sequence: Synthetic oligonucleotide
  Target: LAMA2; (+) strand; PAM type: NNGRRT; PAM sequence: ATGAAT
atcttttagaaggaactaac

SEQ ID NO: 32042 - DNA, 20 bp, Artificial Sequence
  Description of Artificial Sequence: Synthetic oligonucleotide
  Target: LAMA2; (+) strand; PAM type: NNGRRT; PAM sequence: AAGAGT
tgggcagcctctatcttttt

SEQ ID NO: 32043 - DNA, 20 bp, Artificial Sequence
  Description of Artificial Sequence: Synthetic oligonucleotide
  Target: LAMA2; (+) strand; PAM type: NNGRRT; PAM sequence: AAGAGT
agtaaattatcacttttcct

SEQ ID NO: 32044 - DNA, 20 bp, Artificial Sequence
  Description of Artificial Sequence: Synthetic oligonucleotide
  Target: LAMA2; (+) strand; PAM type: NNGRRT; PAM sequence: TTGAAT
tatgtatgtagaaatgtttg

SEQ ID NO: 32045 - DNA, 20 bp, Artificial Sequence
  Description of Artificial Sequence: Synthetic oligonucleotide
  Target: LAMA2; (+) strand; PAM type: NNGRRT; PAM sequence: TTGAAT
ttgttgaatgacagtaacaa

SEQ ID NO: 32046 - DNA, 20 bp, Artificial Sequence
  Description of Artificial Sequence: Synthetic oligonucleotide
  Target: LAMA2; (+) strand; PAM type: NNGRRT; PAM sequence: CAGGAT
aacaattgaatacaatcaac

SEQ ID NO: 32047 - DNA, 20 bp, Artificial Sequence
  Description of Artificial Sequence: Synthetic oligonucleotide
  Target: LAMA2; (+) strand; PAM type: NNGRRT; PAM sequence: AAGAAT
ttagattaagtagtaagagg

SEQ ID NO: 32048 - DNA, 20 bp, Artificial Sequence
  Description of Artificial Sequence: Synthetic oligonucleotide
  Target: LAMA2; (+) strand; PAM type: NNGRRT; PAM sequence: TAGAAT
acttagccttgtcattctgg

SEQ ID NO: 32049 - DNA, 20 bp, Artificial Sequence
  Description of Artificial Sequence: Synthetic oligonucleotide
  Target: LAMA2; (+) strand; PAM type: NNGRRT; PAM sequence: TGGAGT
actgatgcacctaaccaatt

SEQ ID NO: 32050 - DNA, 20 bp, Artificial Sequence
  Description of Artificial Sequence: Synthetic oligonucleotide
  Target: LAMA2; (+) strand; PAM type: NNGRRT; PAM sequence: CAGGAT
ccagaaatactgctgtgagg

SEQ ID NO: 32051 - DNA, 20 bp, Artificial Sequence
  Description of Artificial Sequence: Synthetic oligonucleotide
  Target: LAMA2; (+) strand; PAM type: NNGRRT; PAM sequence: AAGAGT
tatttgagaaatatttcaag

SEQ ID NO: 32052 - DNA, 20 bp, Artificial Sequence
  Description of Artificial Sequence: Synthetic oligonucleotide
  Target: LAMA2; (+) strand; PAM type: NNGRRT; PAM sequence: CTGAGT
gtatagtcggtattgaaatt

SEQ ID NO: 32053 - DNA, 20 bp, Artificial Sequence
  Description of Artificial Sequence: Synthetic oligonucleotide
  Target: LAMA2; (+) strand; PAM type: NNGRRT; PAM sequence: TTGGAT
gaaattctgagtggtcctgt

SEQ ID NO: 32054 - DNA, 20 bp, Artificial Sequence
  Description of Artificial Sequence: Synthetic oligonucleotide
  Target: LAMA2; (+) strand; PAM type: NNGRRT; PAM sequence: CTGGAT
aaagacttgtttaaaagtta

SEQ ID NO: 32055 - DNA, 20 bp, Artificial Sequence
  Description of Artificial Sequence: Synthetic oligonucleotide
  Target: LAMA2; (+) strand; PAM type: NNGRRT; PAM sequence: CTGAAT
ggataaaatagataaactaa

SEQ ID NO: 32056 - DNA, 20 bp, Artificial Sequence
  Description of Artificial Sequence: Synthetic oligonucleotide
  Target: LAMA2; (+) strand; PAM type: NNGRRT; PAM sequence: ATGAAT
gataaactaactgaatcaat

SEQ ID NO: 32057 - DNA, 20 bp, Artificial Sequence
  Description of Artificial Sequence: Synthetic oligonucleotide
  Target: LAMA2; (+) strand; PAM type: NNGRRT; PAM sequence: TGGGGT
caaaatggctgaaaatcaca

SEQ ID NO: 32058 - DNA, 20 bp, Artificial Sequence
  Description of Artificial Sequence: Synthetic oligonucleotide
  Target: LAMA2; (+) strand; PAM type: NNGRRT; PAM sequence: GAGAGT
gtttcatgggctcccaccta

SEQ ID NO: 32059 - DNA, 20 bp, Artificial Sequence
  Description of Artificial Sequence: Synthetic oligonucleotide
  Target: LAMA2; (+) strand; PAM type: NNGRRT; PAM sequence: TGGGGT
agagtctgtgtaggctgctc

SEQ ID NO: 32060 - DNA, 20 bp, Artificial Sequence
  Description of Artificial Sequence: Synthetic oligonucleotide
  Target: LAMA2; (+) strand; PAM type: NNGRRT; PAM sequence: TTGAAT
gacacattgcatctatttga

SEQ ID NO: 32061 - DNA, 20 bp, Artificial Sequence
  Description of Artificial Sequence: Synthetic oligonucleotide
  Target: LAMA2; (+) strand; PAM type: NNGRRT; PAM sequence: GAGAAT
atgaccaactcagaaactct

SEQ ID NO: 32062 - DNA, 20 bp, Artificial Sequence
  Description of Artificial Sequence: Synthetic oligonucleotide
  Target: LAMA2; (+) strand; PAM type: NNGRRT; PAM sequence: ACGGGT
cagcttcaaggttgagaacc

SEQ ID NO: 32063 - DNA, 20 bp, Artificial Sequence
  Description of Artificial Sequence: Synthetic oligonucleotide
  Target: LAMA2; (+) strand; PAM type: NNGRRT; PAM sequence: GGGAGT
tcacaggcgtaagcaaagga

SEQ ID NO: 32064 - DNA, 20 bp, Artificial Sequence
  Description of Artificial Sequence: Synthetic oligonucleotide
  Target: LAMA2; (+) strand; PAM type: NNGRRT; PAM sequence: CTGAGT
ggagggagtctaagtcaccc

SEQ ID NO: 32065 - DNA, 20 bp, Artificial Sequence
  Description of Artificial Sequence: Synthetic oligonucleotide
  Target: LAMA2; (+) strand; PAM type: NNGRRT; PAM sequence: AAGGAT
gacacttgtgctagatccta

SEQ ID NO: 32066 - DNA, 20 bp, Artificial Sequence
  Description of Artificial Sequence: Synthetic oligonucleotide
  Target: LAMA2; (+) strand; PAM type: NNGRRT; PAM sequence: CTGGGT
tagatcctaaaggataagca

SEQ ID NO: 32067 - DNA, 20 bp, Artificial Sequence
  Description of Artificial Sequence: Synthetic oligonucleotide
  Target: LAMA2; (+) strand; PAM type: NNGRRT; PAM sequence: AAGAAT
ggataagcactgggtcacag

SEQ ID NO: 32068 - DNA, 20 bp, Artificial Sequence
  Description of Artificial Sequence: Synthetic oligonucleotide
  Target: LAMA2; (+) strand; PAM type: NNGRRT; PAM sequence: AGGGAT
gactgcatgtgaacgactga

SEQ ID NO: 32069 - DNA, 20 bp, Artificial Sequence
  Description of Artificial Sequence: Synthetic oligonucleotide
  Target: LAMA2; (+) strand; PAM type: NNGRRT; PAM sequence: CAGAGT
agaaagaaagagaagatagg

SEQ ID NO: 32070 - DNA, 20 bp, Artificial Sequence
  Description of Artificial Sequence: Synthetic oligonucleotide
  Target: LAMA2; (+) strand; PAM type: NNGRRT; PAM sequence: GAGAAT
gtgcagaccttcagttataa

SEQ ID NO: 32071 - DNA, 20 bp, Artificial Sequence
  Description of Artificial Sequence: Synthetic oligonucleotide
  Target: LAMA2; (+) strand; PAM type: NNGRRT; PAM sequence: AGGAAT
cgcattgtgagactaagcta

SEQ ID NO: 32072 - DNA, 20 bp, Artificial Sequence
  Description of Artificial Sequence: Synthetic oligonucleotide
  Target: LAMA2; (+) strand; PAM type: NNGRRT; PAM sequence: ATGGGT
gcaattgaaatattgcagtc

SEQ ID NO: 32073 - DNA, 20 bp, Artificial Sequence
  Description of Artificial Sequence: Synthetic oligonucleotide
  Target: LAMA2; (+) strand; PAM type: NNGRRT; PAM sequence: CAGAAT
tgggttaaaataaaatgttg

SEQ ID NO: 32074 - DNA, 20 bp, Artificial Sequence
  Description of Artificial Sequence: Synthetic oligonucleotide
  Target: LAMA2; (+) strand; PAM type: NNGRRT; PAM sequence: TTGAGT
aaaataaaatgttgcagaat

SEQ ID NO: 32075 - DNA, 20 bp, Artificial Sequence
  Description of Artificial Sequence: Synthetic oligonucleotide
  Target: LAMA2; (+) strand; PAM type: NNGRRT; PAM sequence: CTGAAT
atttgagtggctcacttaaa

SEQ ID NO: 32076 - DNA, 20 bp, Artificial Sequence
  Description of Artificial Sequence: Synthetic oligonucleotide
  Target: LAMA2; (+) strand; PAM type: NNGRRT; PAM sequence: TGGGAT
attaggctagaaaagtaggc

SEQ ID NO: 32077 - DNA, 20 bp, Artificial Sequence
  Description of Artificial Sequence: Synthetic oligonucleotide
  Target: LAMA2; (+) strand; PAM type: NNGRRT; PAM sequence: CAGGGT
atcaaggtactgttggtaac

SEQ ID NO: 32078 - DNA, 20 bp, Artificial Sequence
  Description of Artificial Sequence: Synthetic oligonucleotide
  Target: LAMA2; (+) strand; PAM type: NNGRRT; PAM sequence: TTGAAT
ggtaaccagggtatttgagg

SEQ ID NO: 32079 - DNA, 20 bp, Artificial Sequence
  Description of Artificial Sequence: Synthetic oligonucleotide
  Target: LAMA2; (+) strand; PAM type: NNGRRT; PAM sequence: AAGAAT
agaaatgattcctggcctca

SEQ ID NO: 32080 - DNA, 20 bp, Artificial Sequence
  Description of Artificial Sequence: Synthetic oligonucleotide
  Target: LAMA2; (+) strand; PAM type: NNGRRT; PAM sequence: AGGAAT
gcatcatagcagaagtggag

SEQ ID NO: 32081 - DNA, 20 bp, Artificial Sequence
  Description of Artificial Sequence: Synthetic oligonucleotide
  Target: LAMA2; (+) strand; PAM type: NNGRRT; PAM sequence: TGGAAT
atctgtagcagagaaggctc

SEQ ID NO: 32082 - DNA, 20 bp, Artificial Sequence
  Description of Artificial Sequence: Synthetic oligonucleotide
  Target: LAMA2; (+) strand; PAM type: NNGRRT; PAM sequence: TTGGAT
gagccagatcatagaaggct

SEQ ID NO: 32083 - DNA, 20 bp, Artificial Sequence
  Description of Artificial Sequence: Synthetic oligonucleotide
  Target: LAMA2; (+) strand; PAM type: NNGRRT; PAM sequence: TGGAGT
tgcagccaactagatggtga

SEQ ID NO: 32084 - DNA, 20 bp, Artificial Sequence
  Description of Artificial Sequence: Synthetic oligonucleotide
  Target: LAMA2; (+) strand; PAM type: NNGRRT; PAM sequence: GCGGAT
tccttgccaaagaaggcagt

SEQ ID NO: 32085 - DNA, 20 bp, Artificial Sequence
  Description of Artificial Sequence: Synthetic oligonucleotide
  Target: LAMA2; (+) strand; PAM type: NNGRRT; PAM sequence: AAGAGT
aaggcagtgcggatcaagta

SEQ ID NO: 32086 - DNA, 20 bp, Artificial Sequence
  Description of Artificial Sequence: Synthetic oligonucleotide
  Target: LAMA2; (+) strand; PAM type: NNGRRT; PAM sequence: AAGAAT
aaagagtaagttgctacata

SEQ ID NO: 32087 - DNA, 20 bp, Artificial Sequence
  Description of Artificial Sequence: Synthetic oligonucleotide
  Target: LAMA2; (+) strand; PAM type: NNGRRT; PAM sequence: GAGGAT
ctacttggaggctgaggtgg

SEQ ID NO: 32088 - DNA, 20 bp, Artificial Sequence
  Description of Artificial Sequence: Synthetic oligonucleotide
  Target: LAMA2; (+) strand; PAM type: NNGRRT; PAM sequence: CTGGAT
tcatgccacagcactccagc

SEQ ID NO: 32089 - DNA, 20 bp, Artificial Sequence
  Description of Artificial Sequence: Synthetic oligonucleotide
  Target: LAMA2; (+) strand; PAM type: NNGRRT; PAM sequence: AAGAAT
atagcttttgcaggttcctg

SEQ ID NO: 32090 - DNA, 20 bp, Artificial Sequence
  Description of Artificial Sequence: Synthetic oligonucleotide
  Target: LAMA2; (+) strand; PAM type: NNGRRT; PAM sequence: TGGAAT
gtgtccaatttgcaaagctc

SEQ ID NO: 32091 - DNA, 20 bp, Artificial Sequence
  Description of Artificial Sequence: Synthetic oligonucleotide
  Target: LAMA2; (+) strand; PAM type: NNGRRT; PAM sequence: TAGAAT
tacttatgccatactttttg

SEQ ID NO: 32092 - DNA, 20 bp, Artificial Sequence
  Description of Artificial Sequence: Synthetic oligonucleotide
  Target: LAMA2; (+) strand; PAM type: NNGRRT; PAM sequence: AAGAAT
tactcatctaatctttcttt

SEQ ID NO: 32093 - DNA, 20 bp, Artificial Sequence
  Description of Artificial Sequence: Synthetic oligonucleotide
  Target: LAMA2; (+) strand; PAM type: NNGRRT; PAM sequence: GTGAAT
ggcaaaacagattgttttcc

SEQ ID NO: 32094 - DNA, 20 bp, Artificial Sequence
  Description of Artificial Sequence: Synthetic oligonucleotide
  Target: LAMA2; (+) strand; PAM type: NNGRRT; PAM sequence: GAGGAT
actctgggaggctgaggcag

SEQ ID NO: 32095 - DNA, 20 bp, Artificial Sequence
  Description of Artificial Sequence: Synthetic oligonucleotide
  Target: LAMA2; (+) strand; PAM type: NNGRRT; PAM sequence: GAGAAT
tactcgggaggctgaggcag

SEQ ID NO: 32096 - DNA, 20 bp, Artificial Sequence
  Description of Artificial Sequence: Synthetic oligonucleotide
  Target: LAMA2; (+) strand; PAM type: NNGRRT; PAM sequence: CAGAGT
ctgcactccagcctgggcga

SEQ ID NO: 32097 - DNA, 20 bp, Artificial Sequence
  Description of Artificial Sequence: Synthetic oligonucleotide
  Target: LAMA2; (+) strand; PAM type: NNGRRT; PAM sequence: TTGAGT
ctcttgatcatcatttctga

SEQ ID NO: 32098 - DNA, 20 bp, Artificial Sequence
  Description of Artificial Sequence: Synthetic oligonucleotide
  Target: LAMA2; (+) strand; PAM type: NNGRRT; PAM sequence: AAGAAT
taaaattggcagttgtgtaa

SEQ ID NO: 32099 - DNA, 20 bp, Artificial Sequence
  Description of Artificial Sequence: Synthetic oligonucleotide
  Target: LAMA2; (+) strand; PAM type: NNGRRT; PAM sequence: AAGAGT
tcccacatttgttgtctgtg

SEQ ID NO: 32100 - DNA, 20 bp, Artificial Sequence
  Description of Artificial Sequence: Synthetic oligonucleotide
  Target: LAMA2; (+) strand; PAM type: NNGRRT; PAM sequence: GTGAAT
acatttgttgtctgtgaaga

SEQ ID NO: 32101 - DNA, 20 bp, Artificial Sequence
  Description of Artificial Sequence: Synthetic oligonucleotide
  Target: LAMA2; (+) strand; PAM type: NNGRRT; PAM sequence: CTGAAT
atgacatatcaaaacttccc

SEQ ID NO: 32102 - DNA, 20 bp, Artificial Sequence
  Description of Artificial Sequence: Synthetic oligonucleotide
  Target: LAMA2; (+) strand; PAM type: NNGRRT; PAM sequence: GGGAGT
acttcccctgaattagtgat

SEQ ID NO: 32103 - DNA, 20 bp, Artificial Sequence
  Description of Artificial Sequence: Synthetic oligonucleotide
  Target: LAMA2; (+) strand; PAM type: NNGRRT; PAM sequence: CTGAAT
tgaattagtgatgggagtag

SEQ ID NO: 32104 - DNA, 20 bp, Artificial Sequence
  Description of Artificial Sequence: Synthetic oligonucleotide
  Target: LAMA2; (+) strand; PAM type: NNGRRT; PAM sequence: AGGAAT
gtgtcagcagcacaagtccc

SEQ ID NO: 32105 - DNA, 20 bp, Artificial Sequence
  Description of Artificial Sequence: Synthetic oligonucleotide
  Target: LAMA2; (+) strand; PAM type: NNGRRT; PAM sequence: CAGAGT
ttttttttttttttttgaga

SEQ ID NO: 32106 - DNA, 20 bp, Artificial Sequence
  Description of Artificial Sequence: Synthetic oligonucleotide
  Target: LAMA2; (+) strand; PAM type: NNGRRT; PAM sequence: CTGGAT
tttcgctcttgtcacccagg

SEQ ID NO: 32107 - DNA, 20 bp, Artificial Sequence
  Description of Artificial Sequence: Synthetic oligonucleotide
  Target: LAMA2; (+) strand; PAM type: NNGRRT; PAM sequence: TGGGAT
gccttggcctcccaaagtgc

SEQ ID NO: 32108 - DNA, 20 bp, Artificial Sequence
  Description of Artificial Sequence: Synthetic oligonucleotide
  Target: LAMA2; (+) strand; PAM type: NNGRRT; PAM sequence: TGGAAT
gatatataaaactgtcttta

SEQ ID NO: 32109 - DNA, 20 bp, Artificial Sequence
  Description of Artificial Sequence: Synthetic oligonucleotide
  Target: LAMA2; (+) strand; PAM type: NNGRRT; PAM sequence: CTGGAT
ataagctacgaccataaagt

SEQ ID NO: 32110 - DNA, 20 bp, Artificial Sequence
  Description of Artificial Sequence: Synthetic oligonucleotide
  Target: LAMA2; (+) strand; PAM type: NNGRRT; PAM sequence: ACGAAT
tcccggcaaaagtaatcaag

SEQ ID NO: 32111 - DNA, 20 bp, Artificial Sequence
  Description of Artificial Sequence: Synthetic oligonucleotide
  Target: LAMA2; (+) strand; PAM type: NNGRRT; PAM sequence: TAGAAT
tctatgtttctaccactctg

SEQ ID NO: 32112 - DNA, 20 bp, Artificial Sequence
  Description of Artificial Sequence: Synthetic oligonucleotide
  Target: LAMA2; (+) strand; PAM type: NNGRRT; PAM sequence: ATGGGT
gtagaatataattcagataa

SEQ ID NO: 32113 - DNA, 20 bp, Artificial Sequence
  Description of Artificial Sequence: Synthetic oligonucleotide
  Target: LAMA2; (+) strand; PAM type: NNGRRT; PAM sequence: CTGGGT
tagttaaaattacagtgtta

SEQ ID NO: 32114 - DNA, 20 bp, Artificial Sequence
  Description of Artificial Sequence: Synthetic oligonucleotide
  Target: LAMA2; (+) strand; PAM type: NNGRRT; PAM sequence: TGGGGT
tacaatgtctatcaatcatg

SEQ ID NO: 32115 - DNA, 20 bp, Artificial Sequence
  Description of Artificial Sequence: Synthetic oligonucleotide
  Target: LAMA2; (+) strand; PAM type: NNGRRT; PAM sequence: CTGAGT
ttcttgttaaagtgcagatt

SEQ ID NO: 32116 - DNA, 20 bp, Artificial Sequence
  Description of Artificial Sequence: Synthetic oligonucleotide
  Target: LAMA2; (+) strand; PAM type: NNGRRT; PAM sequence: AGGAAT
attctgagtcagtagttccc

SEQ ID NO: 32117 - DNA, 20 bp, Artificial Sequence
  Description of Artificial Sequence: Synthetic oligonucleotide
  Target: LAMA2; (+) strand; PAM type: NNGRRT; PAM sequence: ATGGAT
tgagtcagtagttcccagga

SEQ ID NO: 32118 - DNA, 20 bp, Artificial Sequence
  Description of Artificial Sequence: Synthetic oligonucleotide
  Target: LAMA2; (+) strand; PAM type: NNGRRT; PAM sequence: GTGAAT
aggtgacgctgatgctgctg

SEQ ID NO: 32119 - DNA, 20 bp, Artificial Sequence
  Description of Artificial Sequence: Synthetic oligonucleotide
  Target: LAMA2; (+) strand; PAM type: NNGRRT; PAM sequence: TTGAGT
gctggtgaatgggctgcaca

SEQ ID NO: 32120 - DNA, 20 bp, Artificial Sequence
  Description of Artificial Sequence: Synthetic oligonucleotide
  Target: LAMA2; (+) strand; PAM type: NNGRRT; PAM sequence: GGGAGT
tccttaaggtttcatagctt

SEQ ID NO: 32121 - DNA, 20 bp, Artificial Sequence
  Description of Artificial Sequence: Synthetic oligonucleotide
  Target: LAMA2; (+) strand; PAM type: NNGRRT; PAM sequence: TTGGAT
caaaccagaagggctgtcac

SEQ ID NO: 32122 - DNA, 20 bp, Artificial Sequence
  Description of Artificial Sequence: Synthetic oligonucleotide
  Target: LAMA2; (+) strand; PAM type: NNGRRT; PAM sequence: GAGAAT
tcactgtgccctagtacata

SEQ ID NO: 32123 - DNA, 20 bp, Artificial Sequence
  Description of Artificial Sequence: Synthetic oligonucleotide
  Target: LAMA2; (+) strand; PAM type: NNGRRT; PAM sequence: AAGGAT
acatagagaatgattgagac

SEQ ID NO: 32124 - DNA, 20 bp, Artificial Sequence
  Description of Artificial Sequence: Synthetic oligonucleotide
  Target: LAMA2; (+) strand; PAM type: NNGRRT; PAM sequence: AGGAGT
tattttagataggtaatcag

SEQ ID NO: 32125 - DNA, 20 bp, Artificial Sequence
  Description of Artificial Sequence: Synthetic oligonucleotide
  Target: LAMA2; (+) strand; PAM type: NNGRRT; PAM sequence: CAGAAT
atcagaggagtggctattac

SEQ ID NO: 32126 - DNA, 20 bp, Artificial Sequence
  Description of Artificial Sequence: Synthetic oligonucleotide
  Target: LAMA2; (+) strand; PAM type: NNGRRT; PAM sequence: AAGAGT
tggagggaggacacaagcca

SEQ ID NO: 32127 - DNA, 20 bp, Artificial Sequence
  Description of Artificial Sequence: Synthetic oligonucleotide
  Target: LAMA2; (+) strand; PAM type: NNGRRT; PAM sequence: GGGAAT
gagtaggaagagcacatagt

SEQ ID NO: 32128 - DNA, 20 bp, Artificial Sequence
  Description of Artificial Sequence: Synthetic oligonucleotide
  Target: LAMA2; (+) strand; PAM type: NNGRRT; PAM sequence: CTGAAT
tgtatgtacctggcaacata

SEQ ID NO: 32129 - DNA, 20 bp, Artificial Sequence
  Description of Artificial Sequence: Synthetic oligonucleotide
  Target: LAMA2; (+) strand; PAM type: NNGRRT; PAM sequence: AAGGGT
gtcggtgaagggaaggaaag

SEQ ID NO: 32130 - DNA, 20 bp, Artificial Sequence
  Description of Artificial Sequence: Synthetic oligonucleotide
  Target: LAMA2; (+) strand; PAM type: NNGRRT; PAM sequence: CAGGAT
tattttcgtagtcaaggacc

SEQ ID NO: 32131 - DNA, 20 bp, Artificial Sequence
  Description of Artificial Sequence: Synthetic oligonucleotide
  Target: LAMA2; (+) strand; PAM type: NNGRRT; PAM sequence: AGGGGT
ggatctatcattaagtagac

SEQ ID NO: 32132 - DNA, 20 bp, Artificial Sequence
  Description of Artificial Sequence: Synthetic oligonucleotide
  Target: LAMA2; (+) strand; PAM type: NNGRRT; PAM sequence: AGGAAT
actgtactatgtgaccttaa

SEQ ID NO: 32133 - DNA, 20 bp, Artificial Sequence
  Description of Artificial Sequence: Synthetic oligonucleotide
  Target: LAMA2; (+) strand; PAM type: NNGRRT; PAM sequence: CTGAGT
ctatagcaagagaccaaaaa

SEQ ID NO: 32134 - DNA, 20 bp, Artificial Sequence
  Description of Artificial Sequence: Synthetic oligonucleotide
  Target: LAMA2; (+) strand; PAM type: NNGRRT; PAM sequence: AAGGAT
actgtgtcctcacatggtaa

SEQ ID NO: 32135 - DNA, 20 bp, Artificial Sequence
  Description of Artificial Sequence: Synthetic oligonucleotide
  Target: LAMA2; (+) strand; PAM type: NNGRRT; PAM sequence: GAGGAT
cttcctaatcctatcacctt

SEQ ID NO: 32136 - DNA, 20 bp, Artificial Sequence
  Description of Artificial Sequence: Synthetic oligonucleotide
  Target: LAMA2; (+) strand; PAM type: NNGRRT; PAM sequence: TAGGAT
aatcctatcaccttgaggat

SEQ ID NO: 32137 - DNA, 20 bp, Artificial Sequence
  Description of Artificial Sequence: Synthetic oligonucleotide
  Target: LAMA2; (+) strand; PAM type: NNGRRT; PAM sequence: ATGAAT
gaggattaggatttcaacat

SEQ ID NO: 32138 - DNA, 20 bp, Artificial Sequence
  Description of Artificial Sequence: Synthetic oligonucleotide
  Target: LAMA2; (+) strand; PAM type: NNGRRT; PAM sequence: TGGGAT
tatgtaaaaagtgatcaaca

SEQ ID NO: 32139 - DNA, 20 bp, Artificial Sequence
  Description of Artificial Sequence: Synthetic oligonucleotide
  Target: LAMA2; (+) strand; PAM type: NNGRRT; PAM sequence: TGGAAT
tcaacatgggatccaaagat

SEQ ID NO: 32140 - DNA, 20 bp, Artificial Sequence
  Description of Artificial Sequence: Synthetic oligonucleotide
  Target: LAMA2; (+) strand; PAM type: NNGRRT; PAM sequence: ATGAAT
tggcacatattgagatctaa

SEQ ID NO: 32141 - DNA, 20 bp, Artificial Sequence
  Description of Artificial Sequence: Synthetic oligonucleotide
  Target: LAMA2; (+) strand; PAM type: NNGRRT; PAM sequence: TAGAAT
gatgcagttaaatctgtagg

SEQ ID NO: 32142 - DNA, 20 bp, Artificial Sequence
  Description of Artificial Sequence: Synthetic oligonucleotide
  Target: LAMA2; (+) strand; PAM type: NNGRRT; PAM sequence: AGGAAT
gtaggtagaatggtgatttc

SEQ ID NO: 32143 - DNA, 20 bp, Artificial Sequence
  Description of Artificial Sequence: Synthetic oligonucleotide
  Target: LAMA2; (+) strand; PAM type: NNGRRT; PAM sequence: AGGAAT
agaatggtgatttcaggaat

SEQ ID NO: 32144 - DNA, 20 bp, Artificial Sequence
  Description of Artificial Sequence: Synthetic oligonucleotide
  Target: LAMA2; (+) strand; PAM type: NNGRRT; PAM sequence: ATGAAT
tggtgatttcaggaatagga

SEQ ID NO: 32145 - DNA, 20 bp, Artificial Sequence
  Description of Artificial Sequence: Synthetic oligonucleotide
  Target: LAMA2; (+) strand; PAM type: NNGRRT; PAM sequence: AAGAAT
aggaatgaatcagaagtata

SEQ ID NO: 32146 - DNA, 20 bp, Artificial Sequence
  Description of Artificial Sequence: Synthetic oligonucleotide
  Target: LAMA2; (+) strand; PAM type: NNGRRT; PAM sequence: CAGGAT
ctgattttactcttctaggc

SEQ ID NO: 32147 - DNA, 20 bp, Artificial Sequence
  Description of Artificial Sequence: Synthetic oligonucleotide
  Target: LAMA2; (+) strand; PAM type: NNGRRT; PAM sequence: TTGAGT
tttactcttctaggccagga

SEQ ID NO: 32148 - DNA, 20 bp, Artificial Sequence
  Description of Artificial Sequence: Synthetic oligonucleotide
  Target: LAMA2; (+) strand; PAM type: NNGRRT; PAM sequence: TTGAAT
caaatttcacagaactccca

SEQ ID NO: 32149 - DNA, 20 bp, Artificial Sequence
  Description of Artificial Sequence: Synthetic oligonucleotide
  Target: LAMA2; (+) strand; PAM type: NNGRRT; PAM sequence: TAGAAT
actcatttgtatatagattc

SEQ ID NO: 32150 - DNA, 20 bp, Artificial Sequence
  Description of Artificial Sequence: Synthetic oligonucleotide
  Target: LAMA2; (+) strand; PAM type: NNGRRT; PAM sequence: ATGGAT
cacttatattttagttagaa

SEQ ID NO: 32151 - DNA, 20 bp, Artificial Sequence
  Description of Artificial Sequence: Synthetic oligonucleotide
  Target: LAMA2; (+) strand; PAM type: NNGRRT; PAM sequence: TTGGAT
atcgcataacttttcttcgc

SEQ ID NO: 32152 - DNA, 20 bp, Artificial Sequence
  Description of Artificial Sequence: Synthetic oligonucleotide
  Target: LAMA2; (+) strand; PAM type: NNGRRT; PAM sequence: AGGAAT
tcaaacagctcaggaaagtc

SEQ ID NO: 32153 - DNA, 20 bp, Artificial Sequence
  Description of Artificial Sequence: Synthetic oligonucleotide
  Target: LAMA2; (+) strand; PAM type: NNGRRT; PAM sequence: AGGGGT
tcaggaaagtcaggaataca

SEQ ID NO: 32154 - DNA, 20 bp, Artificial Sequence
  Description of Artificial Sequence: Synthetic oligonucleotide
  Target: LAMA2; (+) strand; PAM type: NNGRRT; PAM sequence: TAGGAT
aaagtcaggaatacaagggg

SEQ ID NO: 32155 - DNA, 20 bp, Artificial Sequence
  Description of Artificial Sequence: Synthetic oligonucleotide
  Target: LAMA2; (+) strand; PAM type: NNGRRT; PAM sequence: GTGAGT
aaatcaactccatcatagac

SEQ ID NO: 32156 - DNA, 20 bp, Artificial Sequence
  Description of Artificial Sequence: Synthetic oligonucleotide
  Target: LAMA2; (+) strand; PAM type: NNGRRT; PAM sequence: TTGGGT
ctccatcatagacgtgagta

SEQ ID NO: 32157 - DNA, 20 bp, Artificial Sequence
  Description of Artificial Sequence: Synthetic oligonucleotide
  Target: LAMA2; (+) strand; PAM type: NNGRRT; PAM sequence: ATGAAT
aactcaaaagagagatgata

SEQ ID NO: 32158 - DNA, 20 bp, Artificial Sequence
  Description of Artificial Sequence: Synthetic oligonucleotide
  Target: LAMA2; (+) strand; PAM type: NNGRRT; PAM sequence: TGGAAT
gcctatctattggtgacaac

SEQ ID NO: 32159 - DNA, 20 bp, Artificial Sequence
  Description of Artificial Sequence: Synthetic oligonucleotide
  Target: LAMA2; (+) strand; PAM type: NNGRRT; PAM sequence: ATGAGT
actttgttctcccaatggac

SEQ ID NO: 32160 - DNA, 20 bp, Artificial Sequence
  Description of Artificial Sequence: Synthetic oligonucleotide
  Target: LAMA2; (+) strand; PAM type: NNGRRT; PAM sequence: TAGAGT
gtaatgtctaatgcattaca

SEQ ID NO: 32161 - DNA, 20 bp, Artificial Sequence
  Description of Artificial Sequence: Synthetic oligonucleotide
  Target: LAMA2; (+) strand; PAM type: NNGRRT; PAM sequence: GGGAGT
tgggcagactgcctgagctc

SEQ ID NO: 32162 - DNA, 20 bp, Artificial Sequence
  Description of Artificial Sequence: Synthetic oligonucleotide
  Target: LAMA2; (+) strand; PAM type: NNGRRT; PAM sequence: CTGGGT
ttaaatattcaaaaaattag

SEQ ID NO: 32163 - DNA, 20 bp, Artificial Sequence
  Description of Artificial Sequence: Synthetic oligonucleotide
  Target: LAMA2; (+) strand; PAM type: NNGRRT; PAM sequence: GAGAAT
tactcaggaggctgaggcag

SEQ ID NO: 32164 - DNA, 20 bp, Artificial Sequence
  Description of Artificial Sequence: Synthetic oligonucleotide
  Target: LAMA2; (+) strand; PAM type: NNGRRT; PAM sequence: CTGGGT
tcgcaccactgcattccagc

SEQ ID NO: 32165 - DNA, 20 bp, Artificial Sequence
  Description of Artificial Sequence: Synthetic oligonucleotide
  Target: LAMA2; (+) strand; PAM type: NNGRRT; PAM sequence: TTGAAT
attagtaaaagagaggaggc

SEQ ID NO: 32166 - DNA, 20 bp, Artificial Sequence
  Description of Artificial Sequence: Synthetic oligonucleotide
  Target: LAMA2; (+) strand; PAM type: NNGRRT; PAM sequence: TTGAAT
ctgagagccacgcagctcag

SEQ ID NO: 32167 - DNA, 20 bp, Artificial Sequence
  Description of Artificial Sequence: Synthetic oligonucleotide
  Target: LAMA2; (+) strand; PAM type: NNGRRT; PAM sequence: ATGGGT
tgactcatctgctgtccttg

SEQ ID NO: 32168 - DNA, 20 bp, Artificial Sequence
  Description of Artificial Sequence: Synthetic oligonucleotide
  Target: LAMA2; (+) strand; PAM type: NNGRRT; PAM sequence: GAGAAT
tttgactagcataaatagta

SEQ ID NO: 32169 - DNA, 20 bp, Artificial Sequence
  Description of Artificial Sequence: Synthetic oligonucleotide
  Target: LAMA2; (+) strand; PAM type: NNGRRT; PAM sequence: GTGGAT
actagctatatggcctttct

SEQ ID NO: 32170 - DNA, 20 bp, Artificial Sequence
  Description of Artificial Sequence: Synthetic oligonucleotide
  Target: LAMA2; (+) strand; PAM type: NNGRRT; PAM sequence: GAGGGT
ctgtggataggcttaattag

SEQ ID NO: 32171 - DNA, 20 bp, Artificial Sequence
  Description of Artificial Sequence: Synthetic oligonucleotide
  Target: LAMA2; (+) strand; PAM type: NNGRRT; PAM sequence: TGGAAT
tttcagtttcatgtttctaa

SEQ ID NO: 32172 - DNA, 20 bp, Artificial Sequence
  Description of Artificial Sequence: Synthetic oligonucleotide
  Target: LAMA2; (+) strand; PAM type: NNGRRT; PAM sequence: AAGGAT
tcaaaacaatttattgttaa

SEQ ID NO: 32173 - DNA, 20 bp, Artificial Sequence
  Description of Artificial Sequence: Synthetic oligonucleotide
  Target: LAMA2; (+) strand; PAM type: NNGRRT; PAM sequence: TGGGAT
aaatagcagcttattctagc

SEQ ID NO: 32174 - DNA, 20 bp, Artificial Sequence
  Description of Artificial Sequence: Synthetic oligonucleotide
  Target: LAMA2; (+) strand; PAM type: NNGRRT; PAM sequence: GAGAGT
attacaaaggtcataggagg

SEQ ID NO: 32175 - DNA, 20 bp, Artificial Sequence
  Description of Artificial Sequence: Synthetic oligonucleotide
  Target: LAMA2; (+) strand; PAM type: NNGRRT; PAM sequence: TGGGAT
atatgcttttcctacaattt

SEQ ID NO: 32176 - DNA, 20 bp, Artificial Sequence
  Description of Artificial Sequence: Synthetic oligonucleotide
  Target: LAMA2; (+) strand; PAM type: NNGRRT; PAM sequence: AAGAAT
atagcggtgctattagcccc

SEQ ID NO: 32177 - DNA, 20 bp, Artificial Sequence
  Description of Artificial Sequence: Synthetic oligonucleotide
  Target: LAMA2; (+) strand; PAM type: NNGRRT; PAM sequence: AAGGGT
acttttgccactttataatg

SEQ ID NO: 32178 - DNA, 20 bp, Artificial Sequence
  Description of Artificial Sequence: Synthetic oligonucleotide
  Target: LAMA2; (+) strand; PAM type: NNGRRT; PAM sequence: GTGGGT
ttgccactttataatgaagg

SEQ ID NO: 32179 - DNA, 20 bp, Artificial Sequence
  Description of Artificial Sequence: Synthetic oligonucleotide
  Target: LAMA2; (+) strand; PAM type: NNGRRT; PAM sequence: CTGAAT
agtaatgtagtacaagtgct

SEQ ID NO: 32180 - DNA, 20 bp, Artificial Sequence
  Description of Artificial Sequence: Synthetic oligonucleotide
  Target: LAMA2; (+) strand; PAM type: NNGRRT; PAM sequence: AAGAAT
catgcttcacaaataaggtg

SEQ ID NO: 32181 - DNA, 20 bp, Artificial Sequence
  Description of Artificial Sequence: Synthetic oligonucleotide
  Target: LAMA2; (+) strand; PAM type: NNGRRT; PAM sequence: GAGGAT
cctggttgcagagacttttg

SEQ ID NO: 32182 - DNA, 20 bp, Artificial Sequence
  Description of Artificial Sequence: Synthetic oligonucleotide
  Target: LAMA2; (+) strand; PAM type: NNGRRT; PAM sequence: ATGGGT
agagacttttggaggatgct

SEQ ID NO: 32183 - DNA, 20 bp, Artificial Sequence
  Description of Artificial Sequence: Synthetic oligonucleotide
  Target: LAMA2; (+) strand; PAM type: NNGRRT; PAM sequence: CTGAAT
atgttggtagtatttcatag

SEQ ID NO: 32184 - DNA, 20 bp, Artificial Sequence
  Description of Artificial Sequence: Synthetic oligonucleotide
  Target: LAMA2; (+) strand; PAM type: NNGRRT; PAM sequence: TGGAAT
gtagatacttcactattatt

SEQ ID NO: 32185 - DNA, 20 bp, Artificial Sequence
  Description of Artificial Sequence: Synthetic oligonucleotide
  Target: LAMA2; (+) strand; PAM type: NNGRRT; PAM sequence: TTGAGT
ataattaggacgttcttcat

SEQ ID NO: 32186 - DNA, 20 bp, Artificial Sequence
  Description of Artificial Sequence: Synthetic oligonucleotide
  Target: LAMA2; (+) strand; PAM type: NNGRRT; PAM sequence: TTGAGT
cgttcttcatttgagtacca

SEQ ID NO: 32187 - DNA, 20 bp, Artificial Sequence
  Description of Artificial Sequence: Synthetic oligonucleotide
  Target: LAMA2; (+) strand; PAM type: NNGRRT; PAM sequence: TTGAAT
agtgccctgacattcctttt

SEQ ID NO: 32188 - DNA, 20 bp, Artificial Sequence
  Description of Artificial Sequence: Synthetic oligonucleotide
  Target: LAMA2; (+) strand; PAM type: NNGRRT; PAM sequence: CAGAAT
ccttttttgaatcatcccac

SEQ ID NO: 32189 - DNA, 20 bp, Artificial Sequence
  Description of Artificial Sequence: Synthetic oligonucleotide
  Target: LAMA2; (+) strand; PAM type: NNGRRT; PAM sequence: GGGAAT
aaacaaatggcacatgtgct

SEQ ID NO: 32190 - DNA, 20 bp, Artificial Sequence
  Description of Artificial Sequence: Synthetic oligonucleotide
  Target: LAMA2; (+) strand; PAM type: NNGRRT; PAM sequence: TTGAAT
gggaatggaagtcaaccttt

SEQ ID NO: 32191 - DNA, 20 bp, Artificial Sequence
  Description of Artificial Sequence: Synthetic oligonucleotide
  Target: LAMA2; (+) strand; PAM type: NNGRRT; PAM sequence: TTGGGT
agtaaattggtatatttgtt

SEQ ID NO: 32192 - DNA, 20 bp, Artificial Sequence
  Description of Artificial Sequence: Synthetic oligonucleotide
  Target: LAMA2; (+) strand; PAM type: NNGRRT; PAM sequence: TAGGGT
cagtcacccactaccactgt

SEQ ID NO: 32193 - DNA, 20 bp, Artificial Sequence
  Description of Artificial Sequence: Synthetic oligonucleotide
  Target: LAMA2; (+) strand; PAM type: NNGRRT; PAM sequence: CTGGAT
aaacaggcaaagacaacact

SEQ ID NO: 32194 - DNA, 20 bp, Artificial Sequence
  Description of Artificial Sequence: Synthetic oligonucleotide
  Target: LAMA2; (+) strand; PAM type: NNGRRT; PAM sequence: GGGAAT
caaagacaacactctggata

SEQ ID NO: 32195 - DNA, 20 bp, Artificial Sequence
  Description of Artificial Sequence: Synthetic oligonucleotide
  Target: LAMA2; (+) strand; PAM type: NNGRRT; PAM sequence: CTGGAT
cactttttaataaaaacata

SEQ ID NO: 32196 - DNA, 20 bp, Artificial Sequence
  Description of Artificial Sequence: Synthetic oligonucleotide
  Target: LAMA2; (+) strand; PAM type: NNGRRT; PAM sequence: ATGAAT
aaacaatttataccatgttt

SEQ ID NO: 32197 - DNA, 20 bp, Artificial Sequence
  Description of Artificial Sequence: Synthetic oligonucleotide
  Target: LAMA2; (+) strand; PAM type: NNGRRT; PAM sequence: ATGAAT
tataccatgtttatgaatta

SEQ ID NO: 32198 - DNA, 20 bp, Artificial Sequence
  Description of Artificial Sequence: Synthetic oligonucleotide
  Target: LAMA2; (+) strand; PAM type: NNGRRT; PAM sequence: ATGAAT
ttatgaattaatgaattttt

SEQ ID NO: 32199 - DNA, 20 bp, Artificial Sequence
  Description of Artificial Sequence: Synthetic oligonucleotide
  Target: LAMA2; (+) strand; PAM type: NNGRRT; PAM sequence: TTGAAT
taatgaatttttatgaattt

SEQ ID NO: 32200 - DNA, 20 bp, Artificial Sequence
  Description of Artificial Sequence: Synthetic oligonucleotide
  Target: LAMA2; (+) strand; PAM type: NNGRRT; PAM sequence: TAGAGT
tacatttggaacaagtattt

SEQ ID NO: 32201 - DNA, 20 bp, Artificial Sequence
  Description of Artificial Sequence: Synthetic oligonucleotide
  Target: LAMA2; (+) strand; PAM type: NNGRRT; PAM sequence: TTGAAT
tccaagttctatcacattat

SEQ ID NO: 32202 - DNA, 20 bp, Artificial Sequence
  Description of Artificial Sequence: Synthetic oligonucleotide
  Target: LAMA2; (+) strand; PAM type: NNGRRT; PAM sequence: ATGAGT
tgtaaagcaacattttgtac

SEQ ID NO: 32203 - DNA, 20 bp, Artificial Sequence
  Description of Artificial Sequence: Synthetic oligonucleotide
  Target: LAMA2; (+) strand; PAM type: NNGRRT; PAM sequence: AGGAAT
tcaggttaaaaaaatctcat

SEQ ID NO: 32204 - DNA, 20 bp, Artificial Sequence
  Description of Artificial Sequence: Synthetic oligonucleotide
  Target: LAMA2; (+) strand; PAM type: NNGRRT; PAM sequence: CTGAAT
aaaatctcataggaatcatc

SEQ ID NO: 32205 - DNA, 20 bp, Artificial Sequence
  Description of Artificial Sequence: Synthetic oligonucleotide
  Target: LAMA2; (+) strand; PAM type: NNGRRT; PAM sequence: GAGAAT
atagaacctaccaaacacat

SEQ ID NO: 32206 - DNA, 20 bp, Artificial Sequence
  Description of Artificial Sequence: Synthetic oligonucleotide
  Target: LAMA2; (+) strand; PAM type: NNGRRT; PAM sequence: GTGAGT
atctgattggacatttgact

SEQ ID NO: 32207 - DNA, 20 bp, Artificial Sequence
  Description of Artificial Sequence: Synthetic oligonucleotide
  Target: LAMA2; (+) strand; PAM type: NNGRRT; PAM sequence: TAGGAT
tgttgggcaaaaatactttc

SEQ ID NO: 32208 - DNA, 20 bp, Artificial Sequence
  Description of Artificial Sequence: Synthetic oligonucleotide
  Target: LAMA2; (+) strand; PAM type: NNGRRT; PAM sequence: GGGGAT
aaaatactttctaggattta

SEQ ID NO: 32209 - DNA, 20 bp, Artificial Sequence
  Description of Artificial Sequence: Synthetic oligonucleotide
  Target: LAMA2; (+) strand; PAM type: NNGRRT; PAM sequence: TTGAGT
tgtactgtttttggtttctc

SEQ ID NO: 32210 - DNA, 20 bp, Artificial Sequence
  Description of Artificial Sequence: Synthetic oligonucleotide
  Target: LAMA2; (+) strand; PAM type: NNGRRT; PAM sequence: CAGAAT
tctatgttcagttatccttt

SEQ ID NO: 32211 - DNA, 20 bp, Artificial Sequence
  Description of Artificial Sequence: Synthetic oligonucleotide
  Target: LAMA2; (+) strand; PAM type: NNGRRT; PAM sequence: ATGAAT
tgttcagttatcctttcaga

SEQ ID NO: 32212 - DNA, 20 bp, Artificial Sequence
  Description of Artificial Sequence: Synthetic oligonucleotide
  Target: LAMA2; (+) strand; PAM type: NNGRRT; PAM sequence: ATGAAT
caaatagtaggcacttataa

SEQ ID NO: 32213 - DNA, 20 bp, Artificial Sequence
  Description of Artificial Sequence: Synthetic oligonucleotide
  Target: LAMA2; (+) strand; PAM type: NNGRRT; PAM sequence: ATGAGT
tagtaggcacttataaatga

SEQ ID NO: 32214 - DNA, 20 bp, Artificial Sequence
  Description of Artificial Sequence: Synthetic oligonucleotide
  Target: LAMA2; (+) strand; PAM type: NNGRRT; PAM sequence: GAGAGT
aggctaaccaacctcaaaca

SEQ ID NO: 32215 - DNA, 20 bp, Artificial Sequence
  Description of Artificial Sequence: Synthetic oligonucleotide
  Target: LAMA2; (+) strand; PAM type: NNGRRT; PAM sequence: GTGAGT
acctcaaacagagagtgatg

SEQ ID NO: 32216 - DNA, 20 bp, Artificial Sequence
  Description of Artificial Sequence: Synthetic oligonucleotide
  Target: LAMA2; (+) strand; PAM type: NNGRRT; PAM sequence: GAGAAT
attacaaaataagtgctata

SEQ ID NO: 32217 - DNA, 20 bp, Artificial Sequence
  Description of Artificial Sequence: Synthetic oligonucleotide
  Target: LAMA2; (+) strand; PAM type: NNGRRT; PAM sequence: TTGGAT
agtgatttattaaatgacta

SEQ ID NO: 32218 - DNA, 20 bp, Artificial Sequence
  Description of Artificial Sequence: Synthetic oligonucleotide
  Target: LAMA2; (+) strand; PAM type: NNGRRT; PAM sequence: TGGAAT
atctgtcccagaaattttgt

SEQ ID NO: 32219 - DNA, 20 bp, Artificial Sequence
  Description of Artificial Sequence: Synthetic oligonucleotide
  Target: LAMA2; (+) strand; PAM type: NNGRRT; PAM sequence: CAGAAT
gttggaatgtttttcatgaa

SEQ ID NO: 32220 - DNA, 20 bp, Artificial Sequence
  Description of Artificial Sequence: Synthetic oligonucleotide
  Target: LAMA2; (+) strand; PAM type: NNGRRT; PAM sequence: ATGAAT
gaatgtttttcatgaacaga

SEQ ID NO: 32221 - DNA, 20 bp, Artificial Sequence
  Description of Artificial Sequence: Synthetic oligonucleotide
  Target: LAMA2; (+) strand; PAM type: NNGRRT; PAM sequence: TTGAGT
tatatttgaaaagcattacg

SEQ ID NO: 32222 - DNA, 20 bp, Artificial Sequence
  Description of Artificial Sequence: Synthetic oligonucleotide
  Target: LAMA2; (+) strand; PAM type: NNGRRT; PAM sequence: AAGAAT
aaagctatagctcaacagag

SEQ ID NO: 32223 - DNA, 20 bp, Artificial Sequence
  Description of Artificial Sequence: Synthetic oligonucleotide
  Target: LAMA2; (+) strand; PAM type: NNGRRT; PAM sequence: AAGAGT
aaatgtattattaagtatag

SEQ ID NO: 32224 - DNA, 20 bp, Artificial Sequence
  Description of Artificial Sequence: Synthetic oligonucleotide
  Target: LAMA2; (+) strand; PAM type: NNGRRT; PAM sequence: AAGAGT
ttcaaagcttaacaatacag

SEQ ID NO: 32225 - DNA, 20 bp, Artificial Sequence
  Description of Artificial Sequence: Synthetic oligonucleotide
  Target: LAMA2; (+) strand; PAM type: NNGRRT; PAM sequence: TTGAGT
cagaagagtcctctactcct

SEQ ID NO: 32226 - DNA, 20 bp, Artificial Sequence
  Description of Artificial Sequence: Synthetic oligonucleotide
  Target: LAMA2; (+) strand; PAM type: NNGRRT; PAM sequence: AAGAAT
gtctagccctataaagaagg

SEQ ID NO: 32227 - DNA, 20 bp, Artificial Sequence
  Description of Artificial Sequence: Synthetic oligonucleotide
  Target: LAMA2; (+) strand; PAM type: NNGRRT; PAM sequence: AAGAAT
ataaacacacatagacaatc

SEQ ID NO: 32228 - DNA, 20 bp, Artificial Sequence
  Description of Artificial Sequence: Synthetic oligonucleotide
  Target: LAMA2; (+) strand; PAM type: NNGRRT; PAM sequence: ATGAGT
aatcacactgaaaggaaaat

SEQ ID NO: 32229 - DNA, 20 bp, Artificial Sequence
  Description of Artificial Sequence: Synthetic oligonucleotide
  Target: LAMA2; (+) strand; PAM type: NNGRRT; PAM sequence: GTGGAT
aaaatatgagtgagaaggaa

SEQ ID NO: 32230 - DNA, 20 bp, Artificial Sequence
  Description of Artificial Sequence: Synthetic oligonucleotide
  Target: LAMA2; (+) strand; PAM type: NNGRRT; PAM sequence: AAGAGT
tactgcagtattattttgta

SEQ ID NO: 32231 - DNA, 20 bp, Artificial Sequence
  Description of Artificial Sequence: Synthetic oligonucleotide
  Target: LAMA2; (+) strand; PAM type: NNGRRT; PAM sequence: CAGAAT
taactaatttctttaaatat

SEQ ID NO: 32232 - DNA, 20 bp, Artificial Sequence
  Description of Artificial Sequence: Synthetic oligonucleotide
  Target: LAMA2; (+) strand; PAM type: NNGRRT; PAM sequence: AAGAAT
tcagaatgaaatgttatttt

SEQ ID NO: 32233 - DNA, 20 bp, Artificial Sequence
  Description of Artificial Sequence: Synthetic oligonucleotide
  Target: LAMA2; (+) strand; PAM type: NNGRRT; PAM sequence: TCGGGT
atgctatttttctattggtg

SEQ ID NO: 32234 - DNA, 20 bp, Artificial Sequence
  Description of Artificial Sequence: Synthetic oligonucleotide
  Target: LAMA2; (+) strand; PAM type: NNGRRT; PAM sequence: GAGGGT
tctcatttagtacttctcta

SEQ ID NO: 32235 - DNA, 20 bp, Artificial Sequence
  Description of Artificial Sequence: Synthetic oligonucleotide
  Target: LAMA2; (+) strand; PAM type: NNGRRT; PAM sequence: TGGAAT
gagatatgtcactcataaaa

SEQ ID NO: 32236 - DNA, 20 bp, Artificial Sequence
  Description of Artificial Sequence: Synthetic oligonucleotide
  Target: LAMA2; (+) strand; PAM type: NNGRRT; PAM sequence: TGGAAT
ctcataaaatggaataaaaa

SEQ ID NO: 32237 - DNA, 20 bp, Artificial Sequence
  Description of Artificial Sequence: Synthetic oligonucleotide
  Target: LAMA2; (+) strand; PAM type: NNGRRT; PAM sequence: GAGAAT
taagagactctaaaataaca

SEQ ID NO: 32238 - DNA, 20 bp, Artificial Sequence
  Description of Artificial Sequence: Synthetic oligonucleotide
  Target: LAMA2; (+) strand; PAM type: NNGRRT; PAM sequence: ATGAAT
agatcagatttttaaaattg

SEQ ID NO: 32239 - DNA, 20 bp, Artificial Sequence
  Description of Artificial Sequence: Synthetic oligonucleotide
  Target: LAMA2; (+) strand; PAM type: NNGRRT; PAM sequence: TAGGAT
ctctagaaggacagaactaa

SEQ ID NO: 32240 - DNA, 20 bp, Artificial Sequence
  Description of Artificial Sequence: Synthetic oligonucleotide
  Target: LAMA2; (+) strand; PAM type: NNGRRT; PAM sequence: GGGGGT
ggatagatgtatacaagaag

SEQ ID NO: 32241 - DNA, 20 bp, Artificial Sequence
  Description of Artificial Sequence: Synthetic oligonucleotide
  Target: LAMA2; (+) strand; PAM type: NNGRRT; PAM sequence: AGGAAT
acaagaaggggggtttacta

SEQ ID NO: 32242 - DNA, 20 bp, Artificial Sequence
  Description of Artificial Sequence: Synthetic oligonucleotide
  Target: LAMA2; (+) strand; PAM type: NNGRRT; PAM sequence: CCGAGT
tgaggagcagggaagccagc

SEQ ID NO: 32243 - DNA, 20 bp, Artificial Sequence
  Description of Artificial Sequence: Synthetic oligonucleotide
  Target: LAMA2; (+) strand; PAM type: NNGRRT; PAM sequence: AGGAAT
caaacccctggtgtaagtcc

SEQ ID NO: 32244 - DNA, 20 bp, Artificial Sequence
  Description of Artificial Sequence: Synthetic oligonucleotide
  Target: LAMA2; (+) strand; PAM type: NNGRRT; PAM sequence: TGGAGT
aatccaaaagctgaagaact

SEQ ID NO: 32245 - DNA, 20 bp, Artificial Sequence
  Description of Artificial Sequence: Synthetic oligonucleotide
  Target: LAMA2; (+) strand; PAM type: NNGRRT; PAM sequence: ATGGGT
aagggcaggaagtatccagc

SEQ ID NO: 32246 - DNA, 20 bp, Artificial Sequence
  Description of Artificial Sequence: Synthetic oligonucleotide
  Target: LAMA2; (+) strand; PAM type: NNGRRT; PAM sequence: AAGAGT
gggtgaaagatgaaggctgg

SEQ ID NO: 32247 - DNA, 20 bp, Artificial Sequence
  Description of Artificial Sequence: Synthetic oligonucleotide
  Target: LAMA2; (+) strand; PAM type: NNGRRT; PAM sequence: GAGGGT
agatggtgcccacccacatt

SEQ ID NO: 32248 - DNA, 20 bp, Artificial Sequence
  Description of Artificial Sequence: Synthetic oligonucleotide
  Target: LAMA2; (+) strand; PAM type: NNGRRT; PAM sequence: GTGGGT
ggtgcccacccacattgagg

SEQ ID NO: 32249 - DNA, 20 bp, Artificial Sequence
  Description of Artificial Sequence: Synthetic oligonucleotide
  Target: LAMA2; (+) strand; PAM type: NNGRRT; PAM sequence: CAGAAT
atgcacaaacatattcttaa

SEQ ID NO: 32250 - DNA, 20 bp, Artificial Sequence
  Description of Artificial Sequence: Synthetic oligonucleotide
  Target: LAMA2; (+) strand; PAM type: NNGRRT; PAM sequence: GCGGGT
tgccttctgcaagcacctca

SEQ ID NO: 32251 - DNA, 20 bp, Artificial Sequence
  Description of Artificial Sequence: Synthetic oligonucleotide
  Target: LAMA2; (+) strand; PAM type: NNGRRT; PAM sequence: TGGGGT
ggtcatggctttttacctgg

SEQ ID NO: 32252 - DNA, 20 bp, Artificial Sequence
  Description of Artificial Sequence: Synthetic oligonucleotide
  Target: LAMA2; (+) strand; PAM type: NNGRRT; PAM sequence: CTGGAT
tgtgccatttgtagtcctgt

SEQ ID NO: 32253 - DNA, 20 bp, Artificial Sequence
  Description of Artificial Sequence: Synthetic oligonucleotide
  Target: LAMA2; (+) strand; PAM type: NNGRRT; PAM sequence: TTGGGT
catttgtagtcctgtctgga

SEQ ID NO: 32254 - DNA, 20 bp, Artificial Sequence
  Description of Artificial Sequence: Synthetic oligonucleotide
  Target: LAMA2; (+) strand; PAM type: NNGRRT; PAM sequence: TTGGAT
gtagtcctgtctggattggg

SEQ ID NO: 32255 - DNA, 20 bp, Artificial Sequence
  Description of Artificial Sequence: Synthetic oligonucleotide
  Target: LAMA2; (+) strand; PAM type: NNGRRT; PAM sequence: TTGGGT
cctgtctggattgggttgga

SEQ ID NO: 32256 - DNA, 20 bp, Artificial Sequence
  Description of Artificial Sequence: Synthetic oligonucleotide
  Target: LAMA2; (+) strand; PAM type: NNGRRT; PAM sequence: GAGGAT
tcccattgaccttaaacaca

SEQ ID NO: 32257 - DNA, 20 bp, Artificial Sequence
  Description of Artificial Sequence: Synthetic oligonucleotide
  Target: LAMA2; (+) strand; PAM type: NNGRRT; PAM sequence: TGGGAT
taatattaagagatgcccta

SEQ ID NO: 32258 - DNA, 20 bp, Artificial Sequence
  Description of Artificial Sequence: Synthetic oligonucleotide
  Target: LAMA2; (+) strand; PAM type: NNGRRT; PAM sequence: TGGAAT
gctcttccttgccttcattg

SEQ ID NO: 32259 - DNA, 20 bp, Artificial Sequence
  Description of Artificial Sequence: Synthetic oligonucleotide
  Target: LAMA2; (+) strand; PAM type: NNGRRT; PAM sequence: CTGGGT
actgatttcaccttgatatt

SEQ ID NO: 32260 - DNA, 20 bp, Artificial Sequence
  Description of Artificial Sequence: Synthetic oligonucleotide
  Target: LAMA2; (+) strand; PAM type: NNGRRT; PAM sequence: TGGAAT
aatcttaacttccagtttaa

SEQ ID NO: 32261 - DNA, 20 bp, Artificial Sequence
  Description of Artificial Sequence: Synthetic oligonucleotide
  Target: LAMA2; (+) strand; PAM type: NNGRRT; PAM sequence: GTGGGT
caggaagcaaaattttgcta

SEQ ID NO: 32262 - DNA, 20 bp, Artificial Sequence
  Description of Artificial Sequence: Synthetic oligonucleotide
  Target: LAMA2; (+) strand; PAM type: NNGRRT; PAM sequence: GTGAGT
gtgggtcactagtggtgatg

SEQ ID NO: 32263 - DNA, 20 bp, Artificial Sequence
  Description of Artificial Sequence: Synthetic oligonucleotide
  Target: LAMA2; (+) strand; PAM type: NNGRRT; PAM sequence: CAGGAT
ttctatcaatccacctgctt

SEQ ID NO: 32264 - DNA, 20 bp, Artificial Sequence
  Description of Artificial Sequence: Synthetic oligonucleotide
  Target: LAMA2; (+) strand; PAM type: NNGRRT; PAM sequence: GTGAAT
tgggaaacatgataagacca

SEQ ID NO: 32265 - DNA, 20 bp, Artificial Sequence
  Description of Artificial Sequence: Synthetic oligonucleotide
  Target: LAMA2; (+) strand; PAM type: NNGRRT; PAM sequence: GTGAGT
tgcacttctttagctgtaaa

SEQ ID NO: 32266 - DNA, 20 bp, Artificial Sequence
  Description of Artificial Sequence: Synthetic oligonucleotide
  Target: LAMA2; (+) strand; PAM type: NNGRRT; PAM sequence: TGGAAT
tgttcagaggcaatgctgtg

SEQ ID NO: 32267 - DNA, 20 bp, Artificial Sequence
  Description of Artificial Sequence: Synthetic oligonucleotide
  Target: LAMA2; (+) strand; PAM type: NNGRRT; PAM sequence: GCGAAT
ctgtgtggaataccatgaca

SEQ ID NO: 32268 - DNA, 20 bp, Artificial Sequence
  Description of Artificial Sequence: Synthetic oligonucleotide
  Target: LAMA2; (+) strand; PAM type: NNGRRT; PAM sequence: GGGAGT
gacagcgaataaggcattct

SEQ ID NO: 32269 - DNA, 20 bp, Artificial Sequence
  Description of Artificial Sequence: Synthetic oligonucleotide
  Target: LAMA2; (+) strand; PAM type: NNGRRT; PAM sequence: ACGGAT
ataaggcattctgggagttc

SEQ ID NO: 32270 - DNA, 20 bp, Artificial Sequence
  Description of Artificial Sequence: Synthetic oligonucleotide
  Target: LAMA2; (+) strand; PAM type: NNGRRT; PAM sequence: TAGGAT
cttggcagaaacattgggcg

SEQ ID NO: 32271 - DNA, 20 bp, Artificial Sequence
  Description of Artificial Sequence: Synthetic oligonucleotide
  Target: LAMA2; (+) strand; PAM type: NNGRRT; PAM sequence: CAGAAT
aggatgggcaaatccatatc

SEQ ID NO: 32272 - DNA, 20 bp, Artificial Sequence
  Description of Artificial Sequence: Synthetic oligonucleotide
  Target: LAMA2; (+) strand; PAM type: NNGRRT; PAM sequence: AAGGAT
gctggctgatcaccctgagg

SEQ ID NO: 32273 - DNA, 20 bp, Artificial Sequence
  Description of Artificial Sequence: Synthetic oligonucleotide
  Target: LAMA2; (+) strand; PAM type: NNGRRT; PAM sequence: CAGGGT
atgagcccattgagcgatga

SEQ ID NO: 32274 - DNA, 20 bp, Artificial Sequence
  Description of Artificial Sequence: Synthetic oligonucleotide
  Target: LAMA2; (+) strand; PAM type: NNGRRT; PAM sequence: CTGAGT
agggtggctggggaaagagg

SEQ ID NO: 32275 - DNA, 20 bp, Artificial Sequence
  Description of Artificial Sequence: Synthetic oligonucleotide
  Target: LAMA2; (+) strand; PAM type: NNGRRT; PAM sequence: CAGAAT
aagaggctgagtggtgtaca

SEQ ID NO: 32276 - DNA, 20 bp, Artificial Sequence
  Description of Artificial Sequence: Synthetic oligonucleotide
  Target: LAMA2; (+) strand; PAM type: NNGRRT; PAM sequence: ATGAGT
ggctgagtggtgtacacaga

SEQ ID NO: 32277 - DNA, 20 bp, Artificial Sequence
  Description of Artificial Sequence: Synthetic oligonucleotide
  Target: LAMA2; (+) strand; PAM type: NNGRRT; PAM sequence: TAGGAT
cccgttggtgagcactcaca

SEQ ID NO: 32278 - DNA, 20 bp, Artificial Sequence
  Description of Artificial Sequence: Synthetic oligonucleotide
  Target: LAMA2; (+) strand; PAM type: NNGRRT; PAM sequence: AGGGAT
tccctttgctactgtccttc

SEQ ID NO: 32279 - DNA, 20 bp, Artificial Sequence
  Description of Artificial Sequence: Synthetic oligonucleotide
  Target: LAMA2; (+) strand; PAM type: NNGRRT; PAM sequence: TTGGGT
agtgctgcagctgtccactt

SEQ ID NO: 32280 - DNA, 20 bp, Artificial Sequence
  Description of Artificial Sequence: Synthetic oligonucleotide
  Target: LAMA2; (+) strand; PAM type: NNGRRT; PAM sequence: CAGAAT
ggtgctacctgcatatcttg

SEQ ID NO: 32281 - DNA, 20 bp, Artificial Sequence
  Description of Artificial Sequence: Synthetic oligonucleotide
  Target: LAMA2; (+) strand; PAM type: NNGRRT; PAM sequence: CAGGGT
gcaggcttggggagagaagg

SEQ ID NO: 32282 - DNA, 20 bp, Artificial Sequence
  Description of Artificial Sequence: Synthetic oligonucleotide
  Target: LAMA2; (+) strand; PAM type: NNGRRT; PAM sequence: AGGAGT
gggagagaaggcagggtggc

SEQ ID NO: 32283 - DNA, 20 bp, Artificial Sequence
  Description of Artificial Sequence: Synthetic oligonucleotide
  Target: LAMA2; (+) strand; PAM type: NNGRRT; PAM sequence: ATGGGT
atgcccaactttatggctag

SEQ ID NO: 32284 - DNA, 20 bp, Artificial Sequence
  Description of Artificial Sequence: Synthetic oligonucleotide
  Target: LAMA2; (+) strand; PAM type: NNGRRT; PAM sequence: AAGAGT
ccaaagcccagtaacaggcc

SEQ ID NO: 32285 - DNA, 20 bp, Artificial Sequence
  Description of Artificial Sequence: Synthetic oligonucleotide
  Target: LAMA2; (+) strand; PAM type: NNGRRT; PAM sequence: GAGAGT
caagagttgtctctcaaatg

SEQ ID NO: 32286 - DNA, 20 bp, Artificial Sequence
  Description of Artificial Sequence: Synthetic oligonucleotide
  Target: LAMA2; (+) strand; PAM type: NNGRRT; PAM sequence: AGGAGT
tcctagaggcttccacctct

SEQ ID NO: 32287 - DNA, 20 bp, Artificial Sequence
  Description of Artificial Sequence: Synthetic oligonucleotide
  Target: LAMA2; (+) strand; PAM type: NNGRRT; PAM sequence: CAGGAT
agcctgccaaaggcttcaaa

SEQ ID NO: 32288 - DNA, 20 bp, Artificial Sequence
  Description of Artificial Sequence: Synthetic oligonucleotide
  Target: LAMA2; (+) strand; PAM type: NNGRRT; PAM sequence: TTGGAT
cattgacacctcaaggacta

SEQ ID NO: 32289 - DNA, 20 bp, Artificial Sequence
  Description of Artificial Sequence: Synthetic oligonucleotide
  Target: LAMA2; (+) strand; PAM type: NNGRRT; PAM sequence: GTGAAT
actcagtattaaccatcaca

SEQ ID NO: 32290 - DNA, 20 bp, Artificial Sequence
  Description of Artificial Sequence: Synthetic oligonucleotide
  Target: LAMA2; (+) strand; PAM type: NNGRRT; PAM sequence: ATGAAT
agtattaaccatcacagtga

SEQ ID NO: 32291 - DNA, 20 bp, Artificial Sequence
  Description of Artificial Sequence: Synthetic oligonucleotide
  Target: LAMA2; (+) strand; PAM type: NNGRRT; PAM sequence: TGGAAT
tttctatgacgttgactcct

SEQ ID NO: 32292 - DNA, 20 bp, Artificial Sequence
  Description of Artificial Sequence: Synthetic oligonucleotide
  Target: LAMA2; (+) strand; PAM type: NNGRRT; PAM sequence: GAGGAT
aagcacactctcagtgacac

SEQ ID NO: 32293 - DNA, 20 bp, Artificial Sequence
  Description of Artificial Sequence: Synthetic oligonucleotide
  Target: LAMA2; (+) strand; PAM type: NNGRRT; PAM sequence: CAGAAT
caaataaaataagactaatg

SEQ ID NO: 32294 - DNA, 20 bp, Artificial Sequence
  Description of Artificial Sequence: Synthetic oligonucleotide
  Target: LAMA2; (+) strand; PAM type: NNGRRT; PAM sequence: ATGAAT
taaaataagactaatgcaga

SEQ ID NO: 32295 - DNA, 20 bp, Artificial Sequence
  Description of Artificial Sequence: Synthetic oligonucleotide
  Target: LAMA2; (+) strand; PAM type: NNGRRT; PAM sequence: TGGAAT
tctccctttctctaagtcag

SEQ ID NO: 32296 - DNA, 20 bp, Artificial Sequence
  Description of Artificial Sequence: Synthetic oligonucleotide
  Target: LAMA2; (+) strand; PAM type: NNGRRT; PAM sequence: CTGAAT
cctcaacctctctaggtatg

SEQ ID NO: 32297 - DNA, 20 bp, Artificial Sequence
  Description of Artificial Sequence: Synthetic oligonucleotide
  Target: LAMA2; (+) strand; PAM type: NNGRRT; PAM sequence: AAGAAT
atgctgaattaaaaaaaaaa

SEQ ID NO: 32298 - DNA, 20 bp, Artificial Sequence
  Description of Artificial Sequence: Synthetic oligonucleotide
  Target: LAMA2; (+) strand; PAM type: NNGRRT; PAM sequence: TGGAGT
tttttaattcccatggcaaa

SEQ ID NO: 32299 - DNA, 20 bp, Artificial Sequence
  Description of Artificial Sequence: Synthetic oligonucleotide
  Target: LAMA2; (+) strand; PAM type: NNGRRT; PAM sequence: CTGAAT
ttccttaatatcttctaatc

SEQ ID NO: 32300 - DNA, 20 bp, Artificial Sequence
  Description of Artificial Sequence: Synthetic oligonucleotide
  Target: LAMA2; (+) strand; PAM type: NNGRRT; PAM sequence: TAGGGT
aaagtttatactggttgtat

SEQ ID NO: 32301 - DNA, 20 bp, Artificial Sequence
  Description of Artificial Sequence: Synthetic oligonucleotide
  Target: LAMA2; (+) strand; PAM type: NNGRRT; PAM sequence: ATGGAT
ataaacagaactattaggag

SEQ ID NO: 32302 - DNA, 20 bp, Artificial Sequence
  Description of Artificial Sequence: Synthetic oligonucleotide
  Target: LAMA2; (+) strand; PAM type: NNGRRT; PAM sequence: ATGAAT
gattgatagatgacagatag

SEQ ID NO: 32303 - DNA, 20 bp, Artificial Sequence
  Description of Artificial Sequence: Synthetic oligonucleotide
  Target: LAMA2; (+) strand; PAM type: NNGRRT; PAM sequence: ATGGAT
gatagatgacagatagatga

SEQ ID NO: 32304 - DNA, 20 bp, Artificial Sequence
  Description of Artificial Sequence: Synthetic oligonucleotide
  Target: LAMA2; (+) strand; PAM type: NNGRRT; PAM sequence: ATGGAT
gatgacagatagatgaatgg

SEQ ID NO: 32305 - DNA, 20 bp, Artificial Sequence
  Description of Artificial Sequence: Synthetic oligonucleotide
  Target: LAMA2; (+) strand; PAM type: NNGRRT; PAM sequence: GTGGAT
atagatgaatggatggatag

SEQ ID NO: 32306 - DNA, 20 bp, Artificial Sequence
  Description of Artificial Sequence: Synthetic oligonucleotide
  Target: LAMA2; (+) strand; PAM type: NNGRRT; PAM sequence: ATGGAT
aataggctggtagatgatag

SEQ ID NO: 32307 - DNA, 20 bp, Artificial Sequence
  Description of Artificial Sequence: Synthetic oligonucleotide
  Target: LAMA2; (+) strand; PAM type: NNGRRT; PAM sequence: AAGAAT
tagattagatgatagacaga

SEQ ID NO: 32308 - DNA, 20 bp, Artificial Sequence
  Description of Artificial Sequence: Synthetic oligonucleotide
  Target: LAMA2; (+) strand; PAM type: NNGRRT; PAM sequence: AAGAAT
agaataagagatttattatg

SEQ ID NO: 32309 - DNA, 20 bp, Artificial Sequence
  Description of Artificial Sequence: Synthetic oligonucleotide
  Target: LAMA2; (+) strand; PAM type: NNGRRT; PAM sequence: TTGAGT
gatccatgatatagttcact

SEQ ID NO: 32310 - DNA, 20 bp, Artificial Sequence
  Description of Artificial Sequence: Synthetic oligonucleotide
  Target: LAMA2; (+) strand; PAM type: NNGRRT; PAM sequence: GAGAAT
cactttgagtccaaaggcca

SEQ ID NO: 32311 - DNA, 20 bp, Artificial Sequence
  Description of Artificial Sequence: Synthetic oligonucleotide
  Target: LAMA2; (+) strand; PAM type: NNGRRT; PAM sequence: AGGAAT
gtaaggcagaaaagaaggga

SEQ ID NO: 32312 - DNA, 20 bp, Artificial Sequence
  Description of Artificial Sequence: Synthetic oligonucleotide
  Target: LAMA2; (+) strand; PAM type: NNGRRT; PAM sequence: TTGGGT
tctattcagccctcaagaga

SEQ ID NO: 32313 - DNA, 20 bp, Artificial Sequence
  Description of Artificial Sequence: Synthetic oligonucleotide
  Target: LAMA2; (+) strand; PAM type: NNGRRT; PAM sequence: CAGAAT
aggaaaaataatataaaata

SEQ ID NO: 32314 - DNA, 20 bp, Artificial Sequence
  Description of Artificial Sequence: Synthetic oligonucleotide
  Target: LAMA2; (+) strand; PAM type: NNGRRT; PAM sequence: GGGAGT
aaaatacagaataaagtgag

SEQ ID NO: 32315 - DNA, 20 bp, Artificial Sequence
  Description of Artificial Sequence: Synthetic oligonucleotide
  Target: LAMA2; (+) strand; PAM type: NNGRRT; PAM sequence: TGGGAT
tctcatagaaaaaatgatag

SEQ ID NO: 32316 - DNA, 20 bp, Artificial Sequence
  Description of Artificial Sequence: Synthetic oligonucleotide
  Target: LAMA2; (+) strand; PAM type: NNGRRT; PAM sequence: GAGAAT
aaaataacattatacagaaa

SEQ ID NO: 32317 - DNA, 20 bp, Artificial Sequence
  Description of Artificial Sequence: Synthetic oligonucleotide
  Target: LAMA2; (+) strand; PAM type: NNGRRT; PAM sequence: GAGAGT
gtgttcattcctaatacaag

SEQ ID NO: 32318 - DNA, 20 bp, Artificial Sequence
  Description of Artificial Sequence: Synthetic oligonucleotide
  Target: LAMA2; (+) strand; PAM type: NNGRRT; PAM sequence: TGGGGT
aaaagagctttttcttgcaa

SEQ ID NO: 32319 - DNA, 20 bp, Artificial Sequence
  Description of Artificial Sequence: Synthetic oligonucleotide
  Target: LAMA2; (+) strand; PAM type: NNGRRT; PAM sequence: AGGAAT
gcaatggggttaggtgtcta

SEQ ID NO: 32320 - DNA, 20 bp, Artificial Sequence
  Description of Artificial Sequence: Synthetic oligonucleotide
  Target: LAMA2; (+) strand; PAM type: NNGRRT; PAM sequence: AGGAAT
ataataaaattcacttcaaa

SEQ ID NO: 32321 - DNA, 20 bp, Artificial Sequence
  Description of Artificial Sequence: Synthetic oligonucleotide
  Target: LAMA2; (+) strand; PAM type: NNGRRT; PAM sequence: TTGGAT
tgtgaacaaaatgaaagaac

SEQ ID NO: 32322 - DNA, 20 bp, Artificial Sequence
  Description of Artificial Sequence: Synthetic oligonucleotide
  Target: LAMA2; (+) strand; PAM type: NNGRRT; PAM sequence: TGGAAT
gataataattattaaatatg

SEQ ID NO: 32323 - DNA, 20 bp, Artificial Sequence
  Description of Artificial Sequence: Synthetic oligonucleotide
  Target: LAMA2; (+) strand; PAM type: NNGRRT; PAM sequence: TTGAAT
aataaaagtttttaatattc

SEQ ID NO: 32324 - DNA, 20 bp, Artificial Sequence
  Description of Artificial Sequence: Synthetic oligonucleotide
  Target: LAMA2; (+) strand; PAM type: NNGRRT; PAM sequence: AAGAAT
aattaactttagttttcact

SEQ ID NO: 32325 - DNA, 20 bp, Artificial Sequence
  Description of Artificial Sequence: Synthetic oligonucleotide
  Target: LAMA2; (+) strand; PAM type: NNGRRT; PAM sequence: TCGAGT
aaaaataaaattgacaatat

SEQ ID NO: 32326 - DNA, 20 bp, Artificial Sequence
  Description of Artificial Sequence: Synthetic oligonucleotide
  Target: LAMA2; (+) strand; PAM type: NNGRRT; PAM sequence: AAGAAT
cagatatattatatatttta

SEQ ID NO: 32327 - DNA, 20 bp, Artificial Sequence
  Description of Artificial Sequence: Synthetic oligonucleotide
  Target: LAMA2; (+) strand; PAM type: NNGRRT; PAM sequence: TGGGGT
agaattgactcatgagattg

SEQ ID NO: 32328 - DNA, 20 bp, Artificial Sequence
  Description of Artificial Sequence: Synthetic oligonucleotide
  Target: LAMA2; (+) strand; PAM type: NNGRRT; PAM sequence: GGGAAT
gattgtggggtctggctgca

SEQ ID NO: 32329 - DNA, 20 bp, Artificial Sequence
  Description of Artificial Sequence: Synthetic oligonucleotide
  Target: LAMA2; (+) strand; PAM type: NNGRRT; PAM sequence: GTGAAT
ggtctggctgcagggaatag

SEQ ID NO: 32330 - DNA, 20 bp, Artificial Sequence
  Description of Artificial Sequence: Synthetic oligonucleotide
  Target: LAMA2; (+) strand; PAM type: NNGRRT; PAM sequence: TTGAAT
aataggtgaatattgccgtc

SEQ ID NO: 32331 - DNA, 20 bp, Artificial Sequence
  Description of Artificial Sequence: Synthetic oligonucleotide
  Target: LAMA2; (+) strand; PAM type: NNGRRT; PAM sequence: CAGAAT
atccaaaggcagtttggagg

SEQ ID NO: 32332 - DNA, 20 bp, Artificial Sequence
  Description of Artificial Sequence: Synthetic oligonucleotide
  Target: LAMA2; (+) strand; PAM type: NNGRRT; PAM sequence: TTGGAT
cttcttaaggcctctgactg

SEQ ID NO: 32333 - DNA, 20 bp, Artificial Sequence
  Description of Artificial Sequence: Synthetic oligonucleotide
  Target: LAMA2; (+) strand; PAM type: NNGRRT; PAM sequence: GAGGGT
tgaggttccccaacatcatg

SEQ ID NO: 32334 - DNA, 20 bp, Artificial Sequence
  Description of Artificial Sequence: Synthetic oligonucleotide
  Target: LAMA2; (+) strand; PAM type: NNGRRT; PAM sequence: GTGGAT
aagtaccatagcctagccaa

SEQ ID NO: 32335 - DNA, 20 bp, Artificial Sequence
  Description of Artificial Sequence: Synthetic oligonucleotide
  Target: LAMA2; (+) strand; PAM type: NNGRRT; PAM sequence: GAGAAT
taaagaaatgtgaaggggag

SEQ ID NO: 32336 - DNA, 20 bp, Artificial Sequence
  Description of Artificial Sequence: Synthetic oligonucleotide
  Target: LAMA2; (+) strand; PAM type: NNGRRT; PAM sequence: TGGAAT
atcataaatataaaatataa

SEQ ID NO: 32337 - DNA, 20 bp, Artificial Sequence
  Description of Artificial Sequence: Synthetic oligonucleotide
  Target: LAMA2; (+) strand; PAM type: NNGRRT; PAM sequence: CAGGGT
ttaaatccatatacaacaat

SEQ ID NO: 32338 - DNA, 20 bp, Artificial Sequence
  Description of Artificial Sequence: Synthetic oligonucleotide
  Target: LAMA2; (+) strand; PAM type: NNGRRT; PAM sequence: GTGAGT
gtctcacatcacaacacaat

SEQ ID NO: 32339 - DNA, 20 bp, Artificial Sequence
  Description of Artificial Sequence: Synthetic oligonucleotide
  Target: LAMA2; (+) strand; PAM type: NNGRRT; PAM sequence: CTGAGT
aagcctggaccacgtctggt

SEQ ID NO: 32340 - DNA, 20 bp, Artificial Sequence
  Description of Artificial Sequence: Synthetic oligonucleotide
  Target: LAMA2; (+) strand; PAM type: NNGRRT; PAM sequence: TAGGAT
ctggaaaagtaggaggcaca

SEQ ID NO: 32341 - DNA, 20 bp, Artificial Sequence
  Description of Artificial Sequence: Synthetic oligonucleotide
  Target: LAMA2; (+) strand; PAM type: NNGRRT; PAM sequence: TTGGAT
aggttactatgattttcata

SEQ ID NO: 32342 - DNA, 20 bp, Artificial Sequence
  Description of Artificial Sequence: Synthetic oligonucleotide
  Target: LAMA2; (+) strand; PAM type: NNGRRT; PAM sequence: AGGGAT
gattaaaatgtctaaaacaa

SEQ ID NO: 32343 - DNA, 20 bp, Artificial Sequence
  Description of Artificial Sequence: Synthetic oligonucleotide
  Target: LAMA2; (+) strand; PAM type: NNGRRT; PAM sequence: AAGAAT
aaagactttaatttttttaa

SEQ ID NO: 32344 - DNA, 20 bp, Artificial Sequence
  Description of Artificial Sequence: Synthetic oligonucleotide
  Target: LAMA2; (+) strand; PAM type: NNGRRT; PAM sequence: TAGAAT
gacaaagaaagtgatcatga

SEQ ID NO: 32345 - DNA, 20 bp, Artificial Sequence
  Description of Artificial Sequence: Synthetic oligonucleotide
  Target: LAMA2; (+) strand; PAM type: NNGRRT; PAM sequence: ATGGAT
aggtcataataacaaagcct

SEQ ID NO: 32346 - DNA, 20 bp, Artificial Sequence
  Description of Artificial Sequence: Synthetic oligonucleotide
  Target: LAMA2; (+) strand; PAM type: NNGRRT; PAM sequence: CAGAAT
ataaataaagataaatatat

SEQ ID NO: 32347 - DNA, 20 bp, Artificial Sequence
  Description of Artificial Sequence: Synthetic oligonucleotide
  Target: LAMA2; (+) strand; PAM type: NNGRRT; PAM sequence: GGGAAT
acattttcatatatataata

SEQ ID NO: 32348 - DNA, 20 bp, Artificial Sequence
  Description of Artificial Sequence: Synthetic oligonucleotide
  Target: LAMA2; (+) strand; PAM type: NNGRRT; PAM sequence: CAGAAT
atttacgaagtatttaataa

SEQ ID NO: 32349 - DNA, 20 bp, Artificial Sequence
  Description of Artificial Sequence: Synthetic oligonucleotide
  Target: LAMA2; (+) strand; PAM type: NNGRRT; PAM sequence: TGGAAT
caacaggaaaatgtacagtt

SEQ ID NO: 32350 - DNA, 20 bp, Artificial Sequence
  Description of Artificial Sequence: Synthetic oligonucleotide
  Target: LAMA2; (+) strand; PAM type: NNGRRT; PAM sequence: AAGGGT
ttggaatgcagatattaggc

SEQ ID NO: 32351 - DNA, 20 bp, Artificial Sequence
  Description of Artificial Sequence: Synthetic oligonucleotide
  Target: LAMA2; (+) strand; PAM type: NNGRRT; PAM sequence: CAGGGT
acctaaggaaaggcattaga

SEQ ID NO: 32352 - DNA, 20 bp, Artificial Sequence
  Description of Artificial Sequence: Synthetic oligonucleotide
  Target: LAMA2; (+) strand; PAM type: NNGRRT; PAM sequence: TAGAAT
caaaacagcaagttgattct

SEQ ID NO: 32353 - DNA, 20 bp, Artificial Sequence
  Description of Artificial Sequence: Synthetic oligonucleotide
  Target: LAMA2; (+) strand; PAM type: NNGRRT; PAM sequence: ATGAAT
agcaaagagagacaacacaa

SEQ ID NO: 32354 - DNA, 20 bp, Artificial Sequence
  Description of Artificial Sequence: Synthetic oligonucleotide
  Target: LAMA2; (+) strand; PAM type: NNGRRT; PAM sequence: TAGGAT
agagagacaacacaaatgaa

SEQ ID NO: 32355 - DNA, 20 bp, Artificial Sequence
  Description of Artificial Sequence: Synthetic oligonucleotide
  Target: LAMA2; (+) strand; PAM type: NNGRRT; PAM sequence: AAGAAT
caacacaaatgaataggatc

SEQ ID NO: 32356 - DNA, 20 bp, Artificial Sequence
  Description of Artificial Sequence: Synthetic oligonucleotide
  Target: LAMA2; (+) strand; PAM type: NNGRRT; PAM sequence: GGGGAT
aataggatcaagaatgaaaa

SEQ ID NO: 32357 - DNA, 20 bp, Artificial Sequence
  Description of Artificial Sequence: Synthetic oligonucleotide
  Target: LAMA2; (+) strand; PAM type: NNGRRT; PAM sequence: ATGGAT
ttatagattgaaaaataaaa

SEQ ID NO: 32358 - DNA, 20 bp, Artificial Sequence
  Description of Artificial Sequence: Synthetic oligonucleotide
  Target: LAMA2; (+) strand; PAM type: NNGRRT; PAM sequence: GAGGAT
aaataaaaatggatatattg

SEQ ID NO: 32359 - DNA, 20 bp, Artificial Sequence
  Description of Artificial Sequence: Synthetic oligonucleotide
  Target: LAMA2; (+) strand; PAM type: NNGRRT; PAM sequence: TTGAAT
gcaattttattcaaacacat

SEQ ID NO: 32360 - DNA, 20 bp, Artificial Sequence
  Description of Artificial Sequence: Synthetic oligonucleotide
  Target: LAMA2; (+) strand; PAM type: NNGRRT; PAM sequence: AAGAAT
ccattatgcaatttgttccc

SEQ ID NO: 32361 - DNA, 20 bp, Artificial Sequence
  Description of Artificial Sequence: Synthetic oligonucleotide
  Target: LAMA2; (+) strand; PAM type: NNGRRT; PAM sequence: GGGAAT
atttgccagatacagatgat

SEQ ID NO: 32362 - DNA, 20 bp, Artificial Sequence
  Description of Artificial Sequence: Synthetic oligonucleotide
  Target: LAMA2; (+) strand; PAM type: NNGRRT; PAM sequence: ATGGGT
ataaagaaaataggtctaaa

SEQ ID NO: 32363 - DNA, 20 bp, Artificial Sequence
  Description of Artificial Sequence: Synthetic oligonucleotide
  Target: LAMA2; (+) strand; PAM type: NNGRRT; PAM sequence: CAGGAT
ctcaactaagctcacagctc

SEQ ID NO: 32364 - DNA, 20 bp, Artificial Sequence
  Description of Artificial Sequence: Synthetic oligonucleotide
  Target: LAMA2; (+) strand; PAM type: NNGRRT; PAM sequence: CAGAAT
aaggagatgtagttcactta

SEQ ID NO: 32365 - DNA, 20 bp, Artificial Sequence
  Description of Artificial Sequence: Synthetic oligonucleotide
  Target: LAMA2; (+) strand; PAM type: NNGRRT; PAM sequence: CAGAAT
taaccataattgtgccatgg

SEQ ID NO: 32366 - DNA, 20 bp, Artificial Sequence
  Description of Artificial Sequence: Synthetic oligonucleotide
  Target: LAMA2; (+) strand; PAM type: NNGRRT; PAM sequence: AGGGGT
gttgctctgtgcagaagaga

SEQ ID NO: 32367 - DNA, 20 bp, Artificial Sequence
  Description of Artificial Sequence: Synthetic oligonucleotide
  Target: LAMA2; (+) strand; PAM type: NNGRRT; PAM sequence: GTGAAT
attccataaaataacttgca

SEQ ID NO: 32368 - DNA, 20 bp, Artificial Sequence
  Description of Artificial Sequence: Synthetic oligonucleotide
  Target: LAMA2; (+) strand; PAM type: NNGRRT; PAM sequence: GTGGGT
tataccctatagtgcaagtt

SEQ ID NO: 32369 - DNA, 20 bp, Artificial Sequence
  Description of Artificial Sequence: Synthetic oligonucleotide
  Target: LAMA2; (+) strand; PAM type: NNGRRT; PAM sequence: CTGGGT
tatctaaataaccatggtgg

SEQ ID NO: 32370 - DNA, 20 bp, Artificial Sequence
  Description of Artificial Sequence: Synthetic oligonucleotide
  Target: LAMA2; (+) strand; PAM type: NNGRRT; PAM sequence: AGGAGT
tgggaagattgcttgagccc

SEQ ID NO: 32371 - DNA, 20 bp, Artificial Sequence
  Description of Artificial Sequence: Synthetic oligonucleotide
  Target: LAMA2; (+) strand; PAM type: NNGRRT; PAM sequence: GAGGAT
tactcaggaggctgaggtgg

SEQ ID NO: 32372 - DNA, 20 bp, Artificial Sequence
  Description of Artificial Sequence: Synthetic oligonucleotide
  Target: LAMA2; (+) strand; PAM type: NNGRRT; PAM sequence: AAGAGT
ccatggtggtgtggctagga

SEQ ID NO: 32373 - DNA, 20 bp, Artificial Sequence
  Description of Artificial Sequence: Synthetic oligonucleotide
  Target: LAMA2; (+) strand; PAM type: NNGRRT; PAM sequence: CGGAGT
ttttttttttttttttgaga

SEQ ID NO: 32374 - DNA, 20 bp, Artificial Sequence
  Description of Artificial Sequence: Synthetic oligonucleotide
  Target: LAMA2; (+) strand; PAM type: NNGRRT; PAM sequence: TGGAGT
tctcgctctgtcgcccaggc

SEQ ID NO: 32375 - DNA, 20 bp, Artificial Sequence
  Description of Artificial Sequence: Synthetic oligonucleotide
  Target: LAMA2; (+) strand; PAM type: NNGRRT; PAM sequence: CGGGAT
cccaggctggagtgcagtgg

SEQ ID NO: 32376 - DNA, 20 bp, Artificial Sequence
  Description of Artificial Sequence: Synthetic oligonucleotide
  Target: LAMA2; (+) strand; PAM type: NNGRRT; PAM sequence: CCGGGT
ctcactgcaagctccgcctc

SEQ ID NO: 32377 - DNA, 20 bp, Artificial Sequence
  Description of Artificial Sequence: Synthetic oligonucleotide
  Target: LAMA2; (+) strand; PAM type: NNGRRT; PAM sequence: CGGGGT
ttttgtatttttagtagaga

SEQ ID NO: 32378 - DNA, 20 bp, Artificial Sequence
  Description of Artificial Sequence: Synthetic oligonucleotide
  Target: LAMA2; (+) strand; PAM type: NNGRRT; PAM sequence: CGGGAT
cggggtttcaccgttttagc

SEQ ID NO: 32379 - DNA, 20 bp, Artificial Sequence
  Description of Artificial Sequence: Synthetic oligonucleotide
  Target: LAMA2; (+) strand; PAM type: NNGRRT; PAM sequence: TGGGAT
gatccgcccgcccaaagtgc

SEQ ID NO: 32380 - DNA, 20 bp, Artificial Sequence
  Description of Artificial Sequence: Synthetic oligonucleotide
  Target: LAMA2; (+) strand; PAM type: NNGRRT; PAM sequence: CAGAAT
tagtctcttggtactattct

SEQ ID NO: 32381 - DNA, 20 bp, Artificial Sequence
  Description of Artificial Sequence: Synthetic oligonucleotide
  Target: LAMA2; (+) strand; PAM type: NNGRRT; PAM sequence: GGGAGT
gagcctcatgcagtcttggt

SEQ ID NO: 32382 - DNA, 20 bp, Artificial Sequence
  Description of Artificial Sequence: Synthetic oligonucleotide
  Target: LAMA2; (+) strand; PAM type: NNGRRT; PAM sequence: CAGGAT
taagggaagttctgatgtca

SEQ ID NO: 32383 - DNA, 20 bp, Artificial Sequence
  Description of Artificial Sequence: Synthetic oligonucleotide
  Target: LAMA2; (+) strand; PAM type: NNGRRT; PAM sequence: TGGGGT
ttctgatgtcacaggatcct

SEQ ID NO: 32384 - DNA, 20 bp, Artificial Sequence
  Description of Artificial Sequence: Synthetic oligonucleotide
  Target: LAMA2; (+) strand; PAM type: NNGRRT; PAM sequence: CTGAGT
gtggccagtggcacctttgc

SEQ ID NO: 32385 - DNA, 20 bp, Artificial Sequence
  Description of Artificial Sequence: Synthetic oligonucleotide
  Target: LAMA2; (+) strand; PAM type: NNGRRT; PAM sequence: CTGGAT
ctcacactaccactactggg

SEQ ID NO: 32386 - DNA, 20 bp, Artificial Sequence
  Description of Artificial Sequence: Synthetic oligonucleotide
  Target: LAMA2; (+) strand; PAM type: NNGRRT; PAM sequence: AAGGGT
ggctggatcccacacctgcc

SEQ ID NO: 32387 - DNA, 20 bp, Artificial Sequence
  Description of Artificial Sequence: Synthetic oligonucleotide
  Target: LAMA2; (+) strand; PAM type: NNGRRT; PAM sequence: CAGAGT
ctgccaagggtgattcaggg

SEQ ID NO: 32388 - DNA, 20 bp, Artificial Sequence
  Description of Artificial Sequence: Synthetic oligonucleotide
  Target: LAMA2; (+) strand; PAM type: NNGRRT; PAM sequence: AGGGGT
tgattcagggcagagtggcg

SEQ ID NO: 32389 - DNA, 20 bp, Artificial Sequence
  Description of Artificial Sequence: Synthetic oligonucleotide
  Target: LAMA2; (+) strand; PAM type: NNGRRT; PAM sequence: GTGAGT
ggcagagtggcgaggggtgt

SEQ ID NO: 32390 - DNA, 20 bp, Artificial Sequence
  Description of Artificial Sequence: Synthetic oligonucleotide
  Target: LAMA2; (+) strand; PAM type: NNGRRT; PAM sequence: GGGAAT
ggcttccaccactggtacca

SEQ ID NO: 32391 - DNA, 20 bp, Artificial Sequence
  Description of Artificial Sequence: Synthetic oligonucleotide
  Target: LAMA2; (+) strand; PAM type: NNGRRT; PAM sequence: CAGAGT
cttggagatgccaggaacca

SEQ ID NO: 32392 - DNA, 20 bp, Artificial Sequence
  Description of Artificial Sequence: Synthetic oligonucleotide
  Target: LAMA2; (+) strand; PAM type: NNGRRT; PAM sequence: GAGGGT
aggaaccacagagtctgaaa

SEQ ID NO: 32393 - DNA, 20 bp, Artificial Sequence
  Description of Artificial Sequence: Synthetic oligonucleotide
  Target: LAMA2; (+) strand; PAM type: NNGRRT; PAM sequence: GGGAGT
ggtctcacagccctggctca

SEQ ID NO: 32394 - DNA, 20 bp, Artificial Sequence
  Description of Artificial Sequence: Synthetic oligonucleotide
  Target: LAMA2; (+) strand; PAM type: NNGRRT; PAM sequence: GGGGGT
caacatggtgagctggggaa

SEQ ID NO: 32395 - DNA, 20 bp, Artificial Sequence
  Description of Artificial Sequence: Synthetic oligonucleotide
  Target: LAMA2; (+) strand; PAM type: NNGRRT; PAM sequence: GGGGGT
ctcatttccaccatttgcgg

SEQ ID NO: 32396 - DNA, 20 bp, Artificial Sequence
  Description of Artificial Sequence: Synthetic oligonucleotide
  Target: LAMA2; (+) strand; PAM type: NNGRRT; PAM sequence: AAGAAT
gttcttgtcccacatcctgg

SEQ ID NO: 32397 - DNA, 20 bp, Artificial Sequence
  Description of Artificial Sequence: Synthetic oligonucleotide
  Target: LAMA2; (+) strand; PAM type: NNGRRT; PAM sequence: GAGGGT
atgaggtttgcagacaactg

SEQ ID NO: 32398 - DNA, 20 bp, Artificial Sequence
  Description of Artificial Sequence: Synthetic oligonucleotide
  Target: LAMA2; (+) strand; PAM type: NNGRRT; PAM sequence: TTGAGT
caaggtgaagaggtgcttta

SEQ ID NO: 32399 - DNA, 20 bp, Artificial Sequence
  Description of Artificial Sequence: Synthetic oligonucleotide
  Target: LAMA2; (+) strand; PAM type: NNGRRT; PAM sequence: ATGGGT
caactctcaggaggcctgaa

SEQ ID NO: 32400 - DNA, 20 bp, Artificial Sequence
  Description of Artificial Sequence: Synthetic oligonucleotide
  Target: LAMA2; (+) strand; PAM type: NNGRRT; PAM sequence: GTGGGT
caacagaggtgagacacaca

SEQ ID NO: 32401 - DNA, 20 bp, Artificial Sequence
  Description of Artificial Sequence: Synthetic oligonucleotide
  Target: LAMA2; (+) strand; PAM type: NNGRRT; PAM sequence: CTGAGT
tgttgtctgcccacgtctgg

SEQ ID NO: 32402 - DNA, 20 bp, Artificial Sequence
  Description of Artificial Sequence: Synthetic oligonucleotide
  Target: LAMA2; (+) strand; PAM type: NNGRRT; PAM sequence: CGGGGT
tgcccacgtctggctgagtc

SEQ ID NO: 32403 - DNA, 20 bp, Artificial Sequence
  Description of Artificial Sequence: Synthetic oligonucleotide
  Target: LAMA2; (+) strand; PAM type: NNGRRT; PAM sequence: ATGGGT
aagtgtatgctgattggtcc

SEQ ID NO: 32404 - DNA, 20 bp, Artificial Sequence
  Description of Artificial Sequence: Synthetic oligonucleotide
  Target: LAMA2; (+) strand; PAM type: NNGRRT; PAM sequence: TAGGGT
gcacccaggctgttcatgcc

SEQ ID NO: 32405 - DNA, 20 bp, Artificial Sequence
  Description of Artificial Sequence: Synthetic oligonucleotide
  Target: LAMA2; (+) strand; PAM type: NNGRRT; PAM sequence: TAGAGT
gggccaagatagtagggggc

SEQ ID NO: 32406 - DNA, 20 bp, Artificial Sequence
  Description of Artificial Sequence: Synthetic oligonucleotide
  Target: LAMA2; (+) strand; PAM type: NNGRRT; PAM sequence: CTGGGT
ccgagcatatgcacacctgg

SEQ ID NO: 32407 - DNA, 20 bp, Artificial Sequence
  Description of Artificial Sequence: Synthetic oligonucleotide
  Target: LAMA2; (+) strand; PAM type: NNGRRT; PAM sequence: CTGGGT
agctttgctctgaaatcagc

SEQ ID NO: 32408 - DNA, 20 bp, Artificial Sequence
  Description of Artificial Sequence: Synthetic oligonucleotide
  Target: LAMA2; (+) strand; PAM type: NNGRRT; PAM sequence: AGGGAT
agagaggtggctgagggcac

SEQ ID NO: 32409 - DNA, 20 bp, Artificial Sequence
  Description of Artificial Sequence: Synthetic oligonucleotide
  Target: LAMA2; (+) strand; PAM type: NNGRRT; PAM sequence: CTGGGT
ggctgagggcacagggatgc

SEQ ID NO: 32410 - DNA, 20 bp, Artificial Sequence
  Description of Artificial Sequence: Synthetic oligonucleotide
  Target: LAMA2; (+) strand; PAM type: NNGRRT; PAM sequence: CTGGGT
atgcctgggtccacagctgg

SEQ ID NO: 32411 - DNA, 20 bp, Artificial Sequence
  Description of Artificial Sequence: Synthetic oligonucleotide
  Target: LAMA2; (+) strand; PAM type: NNGRRT; PAM sequence: CAGGGT
tgcagctgcacccagtaggg

SEQ ID NO: 32412 - DNA, 20 bp, Artificial Sequence
  Description of Artificial Sequence: Synthetic oligonucleotide
  Target: LAMA2; (+) strand; PAM type: NNGRRT; PAM sequence: AAGAGT
tgagaccctcttgctctcag

SEQ ID NO: 32413 - DNA, 20 bp, Artificial Sequence
  Description of Artificial Sequence: Synthetic oligonucleotide
  Target: LAMA2; (+) strand; PAM type: NNGRRT; PAM sequence: TAGAAT
ttctcagaaaagaaagtctt

SEQ ID NO: 32414 - DNA, 20 bp, Artificial Sequence
  Description of Artificial Sequence: Synthetic oligonucleotide
  Target: LAMA2; (+) strand; PAM type: NNGRRT; PAM sequence: ATGGAT
tctccccagggagcagaaat

SEQ ID NO: 32415 - DNA, 20 bp, Artificial Sequence
  Description of Artificial Sequence: Synthetic oligonucleotide
  Target: LAMA2; (+) strand; PAM type: NNGRRT; PAM sequence: TTGAGT
tatggatatccctaaaggtc

SEQ ID NO: 32416 - DNA, 20 bp, Artificial Sequence
  Description of Artificial Sequence: Synthetic oligonucleotide
  Target: LAMA2; (+) strand; PAM type: NNGRRT; PAM sequence: AGGAAT
aaattctgatgctagaaatc

SEQ ID NO: 32417 - DNA, 20 bp, Artificial Sequence
  Description of Artificial Sequence: Synthetic oligonucleotide
  Target: LAMA2; (+) strand; PAM type: NNGRRT; PAM sequence: CAGAAT
gctatgatagtccagatttt

SEQ ID NO: 32418 - DNA, 20 bp, Artificial Sequence
  Description of Artificial Sequence: Synthetic oligonucleotide
  Target: LAMA2; (+) strand; PAM type: NNGRRT; PAM sequence: CAGAAT
taagagatacggaagttgaa

SEQ ID NO: 32419 - DNA, 20 bp, Artificial Sequence
  Description of Artificial Sequence: Synthetic oligonucleotide
  Target: LAMA2; (+) strand; PAM type: NNGRRT; PAM sequence: TAGGAT
tcagtgaacgtgatgtcata

SEQ ID NO: 32420 - DNA, 20 bp, Artificial Sequence
  Description of Artificial Sequence: Synthetic oligonucleotide
  Target: LAMA2; (+) strand; PAM type: NNGRRT; PAM sequence: CAGAAT
taggatttttttttattgat

SEQ ID NO: 32421 - DNA, 20 bp, Artificial Sequence
  Description of Artificial Sequence: Synthetic oligonucleotide
  Target: LAMA2; (+) strand; PAM type: NNGRRT; PAM sequence: CAGAAT
gagggaagatgctagcaggc

SEQ ID NO: 32422 - DNA, 20 bp, Artificial Sequence
  Description of Artificial Sequence: Synthetic oligonucleotide
  Target: LAMA2; (+) strand; PAM type: NNGRRT; PAM sequence: GGGAAT
atgctagcaggccagaattt

SEQ ID NO: 32423 - DNA, 20 bp, Artificial Sequence
  Description of Artificial Sequence: Synthetic oligonucleotide
  Target: LAMA2; (+) strand; PAM type: NNGRRT; PAM sequence: CAGAAT
aaagtttataacttaatttt

SEQ ID NO: 32424 - DNA, 20 bp, Artificial Sequence
  Description of Artificial Sequence: Synthetic oligonucleotide
  Target: LAMA2; (+) strand; PAM type: NNGRRT; PAM sequence: TGGAAT
tttgaaataagtatacattg

SEQ ID NO: 32425 - DNA, 20 bp, Artificial Sequence
  Description of Artificial Sequence: Synthetic oligonucleotide
  Target: LAMA2; (+) strand; PAM type: NNGRRT; PAM sequence: TTGGGT
tttgtacatgatactctcat

SEQ ID NO: 32426 - DNA, 20 bp, Artificial Sequence
  Description of Artificial Sequence: Synthetic oligonucleotide
  Target: LAMA2; (+) strand; PAM type: NNGRRT; PAM sequence: CAGGGT
gcataaaatgatagatgtct

SEQ ID NO: 32427 - DNA, 20 bp, Artificial Sequence
  Description of Artificial Sequence: Synthetic oligonucleotide
  Target: LAMA2; (+) strand; PAM type: NNGRRT; PAM sequence: TAGAAT
ttatgatttctacccgtagg

SEQ ID NO: 32428 - DNA, 20 bp, Artificial Sequence
  Description of Artificial Sequence: Synthetic oligonucleotide
  Target: LAMA2; (+) strand; PAM type: NNGRRT; PAM sequence: AAGAAT
gggaaaattcgaagccctct

SEQ ID NO: 32429 - DNA, 20 bp, Artificial Sequence
  Description of Artificial Sequence: Synthetic oligonucleotide
  Target: LAMA2; (+) strand; PAM type: NNGRRT; PAM sequence: TTGAAT
ccttacttcattttatattt

SEQ ID NO: 32430 - DNA, 20 bp, Artificial Sequence
  Description of Artificial Sequence: Synthetic oligonucleotide
  Target: LAMA2; (+) strand; PAM type: NNGRRT; PAM sequence: ACGAAT
aaagctaaaaattcacactc

SEQ ID NO: 32431 - DNA, 20 bp, Artificial Sequence
  Description of Artificial Sequence: Synthetic oligonucleotide
  Target: LAMA2; (+) strand; PAM type: NNGRRT; PAM sequence: GGGGAT
aaattatcatgagcaatttg

SEQ ID NO: 32432 - DNA, 20 bp, Artificial Sequence
  Description of Artificial Sequence: Synthetic oligonucleotide
  Target: LAMA2; (+) strand; PAM type: NNGRRT; PAM sequence: CTGAGT
ggggatttcctattttatca

SEQ ID NO: 32433 - DNA, 20 bp, Artificial Sequence
  Description of Artificial Sequence: Synthetic oligonucleotide
  Target: LAMA2; (+) strand; PAM type: NNGRRT; PAM sequence: TTGAGT
attttatcactgagtctcct

SEQ ID NO: 32434 - DNA, 20 bp, Artificial Sequence
  Description of Artificial Sequence: Synthetic oligonucleotide
  Target: LAMA2; (+) strand; PAM type: NNGRRT; PAM sequence: TAGGGT
tctgacccatctaccaccct

SEQ ID NO: 32435 - DNA, 20 bp, Artificial Sequence
  Description of Artificial Sequence: Synthetic oligonucleotide
  Target: LAMA2; (+) strand; PAM type: NNGRRT; PAM sequence: TGGGGT
tttgaccaaagccgtctctt

SEQ ID NO: 32436 - DNA, 20 bp, Artificial Sequence
  Description of Artificial Sequence: Synthetic oligonucleotide
  Target: LAMA2; (+) strand; PAM type: NNGRRT; PAM sequence: ACGAGT
agaaaatataaaatgtgcat

SEQ ID NO: 32437 - DNA, 20 bp, Artificial Sequence
  Description of Artificial Sequence: Synthetic oligonucleotide
  Target: LAMA2; (+) strand; PAM type: NNGRRT; PAM sequence: ATGGGT
tgcaaatagtttttctacaa

SEQ ID NO: 32438 - DNA, 20 bp, Artificial Sequence
  Description of Artificial Sequence: Synthetic oligonucleotide
  Target: LAMA2; (+) strand; PAM type: NNGRRT; PAM sequence: GGGAAT
actgtttcataacttactat

SEQ ID NO: 32439 - DNA, 20 bp, Artificial Sequence
  Description of Artificial Sequence: Synthetic oligonucleotide
  Target: LAMA2; (+) strand; PAM type: NNGRRT; PAM sequence: GAGAAT
tgtatattgaactagattct

SEQ ID NO: 32440 - DNA, 20 bp, Artificial Sequence
  Description of Artificial Sequence: Synthetic oligonucleotide
  Target: LAMA2; (+) strand; PAM type: NNGRRT; PAM sequence: GAGAGT
taaattatttcataaagaga

SEQ ID NO: 32441 - DNA, 20 bp, Artificial Sequence
  Description of Artificial Sequence: Synthetic oligonucleotide
  Target: LAMA2; (+) strand; PAM type: NNGRRT; PAM sequence: TAGAAT
ttcataaagagagagagtaa

SEQ ID NO: 32442 - DNA, 20 bp, Artificial Sequence
  Description of Artificial Sequence: Synthetic oligonucleotide
  Target: LAMA2; (+) strand; PAM type: NNGRRT; PAM sequence: ATGAAT
ataagtcataaaccatgctg

SEQ ID NO: 32443 - DNA, 20 bp, Artificial Sequence
  Description of Artificial Sequence: Synthetic oligonucleotide
  Target: LAMA2; (+) strand; PAM type: NNGRRT; PAM sequence: ATGAGT
ttttacagccaactctttca

SEQ ID NO: 32444 - DNA, 20 bp, Artificial Sequence
  Description of Artificial Sequence: Synthetic oligonucleotide
  Target: LAMA2; (+) strand; PAM type: NNGRRT; PAM sequence: TGGGGT
ttgcttgtttagaaaatcac

SEQ ID NO: 32445 - DNA, 20 bp, Artificial Sequence
  Description of Artificial Sequence: Synthetic oligonucleotide
  Target: LAMA2; (+) strand; PAM type: NNGRRT; PAM sequence: TTGAAT
gaaggcatagtctttccatt

SEQ ID NO: 32446 - DNA, 20 bp, Artificial Sequence
  Description of Artificial Sequence: Synthetic oligonucleotide
  Target: LAMA2; (+) strand; PAM type: NNGRRT; PAM sequence: TTGGGT
gagataaataaaaagttttg

SEQ ID NO: 32447 - DNA, 20 bp, Artificial Sequence
  Description of Artificial Sequence: Synthetic oligonucleotide
  Target: LAMA2; (+) strand; PAM type: NNGRRT; PAM sequence: AAGAGT
caatggcagtatgctttagc

SEQ ID NO: 32448 - DNA, 20 bp, Artificial Sequence
  Description of Artificial Sequence: Synthetic oligonucleotide
  Target: LAMA2; (+) strand; PAM type: NNGRRT; PAM sequence: ATGAAT
atgctttagcaagagtaatt

SEQ ID NO: 32449 - DNA, 20 bp, Artificial Sequence
  Description of Artificial Sequence: Synthetic oligonucleotide
  Target: LAMA2; (+) strand; PAM type: NNGRRT; PAM sequence: TTGAAT
attacatgccaagtcatctg

SEQ ID NO: 32450 - DNA, 20 bp, Artificial Sequence
  Description of Artificial Sequence: Synthetic oligonucleotide
  Target: LAMA2; (+) strand; PAM type: NNGRRT; PAM sequence: ATGAAT
taacttgtatatccatatgt

SEQ ID NO: 32451 - DNA, 20 bp, Artificial Sequence
  Description of Artificial Sequence: Synthetic oligonucleotide
  Target: LAMA2; (+) strand; PAM type: NNGRRT; PAM sequence: GAGAAT
tatgtacacagactcagaaa

SEQ ID NO: 32452 - DNA, 20 bp, Artificial Sequence
  Description of Artificial Sequence: Synthetic oligonucleotide
  Target: LAMA2; (+) strand; PAM type: NNGRRT; PAM sequence: AAGAAT
agactcagaaagagaatacc

SEQ ID NO: 32453 - DNA, 20 bp, Artificial Sequence
  Description of Artificial Sequence: Synthetic oligonucleotide
  Target: LAMA2; (+) strand; PAM type: NNGRRT; PAM sequence: AAGAAT
acaaaatatcttgcaactca

SEQ ID NO: 32454 - DNA, 20 bp, Artificial Sequence
  Description of Artificial Sequence: Synthetic oligonucleotide
  Target: LAMA2; (+) strand; PAM type: NNGRRT; PAM sequence: ATGAAT
ggaactcagatgtgatgctt

SEQ ID NO: 32455 - DNA, 20 bp, Artificial Sequence
  Description of Artificial Sequence: Synthetic oligonucleotide
  Target: LAMA2; (+) strand; PAM type: NNGRRT; PAM sequence: GTGAGT
aaggttctctccaaattcca

SEQ ID NO: 32456 - DNA, 20 bp, Artificial Sequence
  Description of Artificial Sequence: Synthetic oligonucleotide
  Target: LAMA2; (+) strand; PAM type: NNGRRT; PAM sequence: AGGAAT
tgtctcctttcatctgagca

SEQ ID NO: 32457 - DNA, 20 bp, Artificial Sequence
  Description of Artificial Sequence: Synthetic oligonucleotide
  Target: LAMA2; (+) strand; PAM type: NNGRRT; PAM sequence: AAGGAT
tgagcaaggaatggttgact

SEQ ID NO: 32458 - DNA, 20 bp, Artificial Sequence
  Description of Artificial Sequence: Synthetic oligonucleotide
  Target: LAMA2; (+) strand; PAM type: NNGRRT; PAM sequence: CTGGAT
cagtcagggctgtcatgttt

SEQ ID NO: 32459 - DNA, 20 bp, Artificial Sequence
  Description of Artificial Sequence: Synthetic oligonucleotide
  Target: LAMA2; (+) strand; PAM type: NNGRRT; PAM sequence: AGGAAT
agtcaccaactaccaatatc

SEQ ID NO: 32460 - DNA, 20 bp, Artificial Sequence
  Description of Artificial Sequence: Synthetic oligonucleotide
  Target: LAMA2; (+) strand; PAM type: NNGRRT; PAM sequence: AAGGAT
tacaacttctgcagatagta

SEQ ID NO: 32461 - DNA, 20 bp, Artificial Sequence
  Description of Artificial Sequence: Synthetic oligonucleotide
  Target: LAMA2; (+) strand; PAM type: NNGRRT; PAM sequence: GAGGAT
cagatagtaaaggatgttaa

SEQ ID NO: 32462 - DNA, 20 bp, Artificial Sequence
  Description of Artificial Sequence: Synthetic oligonucleotide
  Target: LAMA2; (+) strand; PAM type: NNGRRT; PAM sequence: TTGGAT
tatggcaataattcaacaat

SEQ ID NO: 32463 - DNA, 20 bp, Artificial Sequence
  Description of Artificial Sequence: Synthetic oligonucleotide
  Target: LAMA2; (+) strand; PAM type: NNGRRT; PAM sequence: CTGAAT
aaaactcacagataaataat

SEQ ID NO: 32464 - DNA, 20 bp, Artificial Sequence
  Description of Artificial Sequence: Synthetic oligonucleotide
  Target: LAMA2; (+) strand; PAM type: NNGRRT; PAM sequence: GAGAAT
gaatagttctatattcatta

SEQ ID NO: 32465 - DNA, 20 bp, Artificial Sequence
  Description of Artificial Sequence: Synthetic oligonucleotide
  Target: LAMA2; (+) strand; PAM type: NNGRRT; PAM sequence: GTGAAT
agttccagatgactttactt

SEQ ID NO: 32466 - DNA, 20 bp, Artificial Sequence
  Description of Artificial Sequence: Synthetic oligonucleotide
  Target: LAMA2; (+) strand; PAM type: NNGRRT; PAM sequence: AAGGAT
caaatctaatgatttactca

SEQ ID NO: 32467 - DNA, 20 bp, Artificial Sequence
  Description of Artificial Sequence: Synthetic oligonucleotide
  Target: LAMA2; (+) strand; PAM type: NNGRRT; PAM sequence: CAGGAT
tcactaaatgatattaatgc

SEQ ID NO: 32468 - DNA, 20 bp, Artificial Sequence
  Description of Artificial Sequence: Synthetic oligonucleotide
  Target: LAMA2; (+) strand; PAM type: NNGRRT; PAM sequence: AAGAGT
ttttttaaaaactgcctact

SEQ ID NO: 32469 - DNA, 20 bp, Artificial Sequence
  Description of Artificial Sequence: Synthetic oligonucleotide
  Target: LAMA2; (+) strand; PAM type: NNGRRT; PAM sequence: AAGGAT
actaagattaggaagaaggc

SEQ ID NO: 32470 - DNA, 20 bp, Artificial Sequence
  Description of Artificial Sequence: Synthetic oligonucleotide
  Target: LAMA2; (+) strand; PAM type: NNGRRT; PAM sequence: GTGGAT
gctttaggaggctgaggcag

SEQ ID NO: 32471 - DNA, 20 bp, Artificial Sequence
  Description of Artificial Sequence: Synthetic oligonucleotide
  Target: LAMA2; (+) strand; PAM type: NNGRRT; PAM sequence: AAGAGT
caggtggattgcttgaggcc

SEQ ID NO: 32472 - DNA, 20 bp, Artificial Sequence
  Description of Artificial Sequence: Synthetic oligonucleotide
  Target: LAMA2; (+) strand; PAM type: NNGRRT; PAM sequence: AAGGAT
cagtcatttcaaagactggc

SEQ ID NO: 32473 - DNA, 20 bp, Artificial Sequence
  Description of Artificial Sequence: Synthetic oligonucleotide
  Target: LAMA2; (+) strand; PAM type: NNGRRT; PAM sequence: CTGAAT
aatgtaaaagaccccctaca

SEQ ID NO: 32474 - DNA, 20 bp, Artificial Sequence
  Description of Artificial Sequence: Synthetic oligonucleotide
  Target: LAMA2; (+) strand; PAM type: NNGRRT; PAM sequence: TGGAAT
gatatgttttacaattcata

SEQ ID NO: 32475 - DNA, 20 bp, Artificial Sequence
  Description of Artificial Sequence: Synthetic oligonucleotide
  Target: LAMA2; (+) strand; PAM type: NNGRRT; PAM sequence: GAGAAT
ctaccaagctatggtaatca

SEQ ID NO: 32476 - DNA, 20 bp, Artificial Sequence
  Description of Artificial Sequence: Synthetic oligonucleotide
  Target: LAMA2; (+) strand; PAM type: NNGRRT; PAM sequence: TAGAAT
aatattgacaaatagattat

SEQ ID NO: 32477 - DNA, 20 bp, Artificial Sequence
  Description of Artificial Sequence: Synthetic oligonucleotide
  Target: LAMA2; (+) strand; PAM type: NNGRRT; PAM sequence: AAGAGT
tagattattagaatagatta

SEQ ID NO: 32478 - DNA, 20 bp, Artificial Sequence
  Description of Artificial Sequence: Synthetic oligonucleotide
  Target: LAMA2; (+) strand; PAM type: NNGRRT; PAM sequence: AGGAAT
tatttaacaaattctactag

SEQ ID NO: 32479 - DNA, 20 bp, Artificial Sequence
  Description of Artificial Sequence: Synthetic oligonucleotide
  Target: LAMA2; (+) strand; PAM type: NNGRRT; PAM sequence: TTGAAT
aacaaattctactagaggaa

SEQ ID NO: 32480 - DNA, 20 bp, Artificial Sequence
  Description of Artificial Sequence: Synthetic oligonucleotide
  Target: LAMA2; (+) strand; PAM type: NNGRRT; PAM sequence: TTGGGT
taagaaaaatctttgtgatc

SEQ ID NO: 32481 - DNA, 20 bp, Artificial Sequence
  Description of Artificial Sequence: Synthetic oligonucleotide
  Target: LAMA2; (+) strand; PAM type: NNGRRT; PAM sequence: TAGAAT
aaaagataactacaaactag

SEQ ID NO: 32482 - DNA, 20 bp, Artificial Sequence
  Description of Artificial Sequence: Synthetic oligonucleotide
  Target: LAMA2; (+) strand; PAM type: NNGRRT; PAM sequence: TAGAAT
aaaccaaaatgatgaccagt

SEQ ID NO: 32483 - DNA, 20 bp, Artificial Sequence
  Description of Artificial Sequence: Synthetic oligonucleotide
  Target: LAMA2; (+) strand; PAM type: NNGRRT; PAM sequence: GGGAAT
agctctcatacactggtgat

SEQ ID NO: 32484 - DNA, 20 bp, Artificial Sequence
  Description of Artificial Sequence: Synthetic oligonucleotide
  Target: LAMA2; (+) strand; PAM type: NNGRRT; PAM sequence: AAGGAT
atgaaataattaccaataaa

SEQ ID NO: 32485 - DNA, 20 bp, Artificial Sequence
  Description of Artificial Sequence: Synthetic oligonucleotide
  Target: LAMA2; (+) strand; PAM type: NNGRRT; PAM sequence: ATGGAT
accaataaaaaggatcaaat

SEQ ID NO: 32486 - DNA, 20 bp, Artificial Sequence
  Description of Artificial Sequence: Synthetic oligonucleotide
  Target: LAMA2; (+) strand; PAM type: NNGRRT; PAM sequence: TTGAGT
agataaatgttgaaactatg

SEQ ID NO: 32487 - DNA, 20 bp, Artificial Sequence
  Description of Artificial Sequence: Synthetic oligonucleotide
  Target: LAMA2; (+) strand; PAM type: NNGRRT; PAM sequence: GAGAGT
tgaaagaagccagacaaaaa

SEQ ID NO: 32488 - DNA, 20 bp, Artificial Sequence
  Description of Artificial Sequence: Synthetic oligonucleotide
  Target: LAMA2; (+) strand; PAM type: NNGRRT; PAM sequence: CAGAAT
agacaaaaagagagtacatg

SEQ ID NO: 32489 - DNA, 20 bp, Artificial Sequence
  Description of Artificial Sequence: Synthetic oligonucleotide
  Target: LAMA2; (+) strand; PAM type: NNGRRT; PAM sequence: AAGGAT
gggacagagggaagagaagg

SEQ ID NO: 32490 - DNA, 20 bp, Artificial Sequence
  Description of Artificial Sequence: Synthetic oligonucleotide
  Target: LAMA2; (+) strand; PAM type: NNGRRT; PAM sequence: ATGGAT
aaagagattcaaaagaaatg

SEQ ID NO: 32491 - DNA, 20 bp, Artificial Sequence
  Description of Artificial Sequence: Synthetic oligonucleotide
  Target: LAMA2; (+) strand; PAM type: NNGRRT; PAM sequence: ATGGGT
atggttgtggtaatggtctc

SEQ ID NO: 32492 - DNA, 20 bp, Artificial Sequence
  Description of Artificial Sequence: Synthetic oligonucleotide
  Target: LAMA2; (+) strand; PAM type: NNGRRT; PAM sequence: AAGAAT
tgttcctgcattagtttgct

SEQ ID NO: 32493 - DNA, 20 bp, Artificial Sequence
  Description of Artificial Sequence: Synthetic oligonucleotide
  Target: LAMA2; (+) strand; PAM type: NNGRRT; PAM sequence: CAGGAT
cctatattatcttgacaatt

SEQ ID NO: 32494 - DNA, 20 bp, Artificial Sequence
  Description of Artificial Sequence: Synthetic oligonucleotide
  Target: LAMA2; (+) strand; PAM type: NNGRRT; PAM sequence: TAGAGT
aaattcctctctccactttt

SEQ ID NO: 32495 - DNA, 20 bp, Artificial Sequence
  Description of Artificial Sequence: Synthetic oligonucleotide
  Target: LAMA2; (+) strand; PAM type: NNGRRT; PAM sequence: GAGAAT
tgttttcatgtgtttgttta

SEQ ID NO: 32496 - DNA, 20 bp, Artificial Sequence
  Description of Artificial Sequence: Synthetic oligonucleotide
  Target: LAMA2; (+) strand; PAM type: NNGRRT; PAM sequence: GGGAGT
ttcagaaaacctataaccaa

SEQ ID NO: 32497 - DNA, 20 bp, Artificial Sequence
  Description of Artificial Sequence: Synthetic oligonucleotide
  Target: LAMA2; (+) strand; PAM type: NNGRRT; PAM sequence: TAGAAT
gtgtaaatttggaacaaata

SEQ ID NO: 32498 - DNA, 20 bp, Artificial Sequence
  Description of Artificial Sequence: Synthetic oligonucleotide
  Target: LAMA2; (+) strand; PAM type: NNGRRT; PAM sequence: CTGAGT
atttggaacaaatatagaat

SEQ ID NO: 32499 - DNA, 20 bp, Artificial Sequence
  Description of Artificial Sequence: Synthetic oligonucleotide
  Target: LAMA2; (+) strand; PAM type: NNGRRT; PAM sequence: GTGGGT
ggaacaaatatagaatctga

SEQ ID NO: 32500 - DNA, 20 bp, Artificial Sequence
  Description of Artificial Sequence: Synthetic oligonucleotide
  Target: LAMA2; (+) strand; PAM type: NNGRRT; PAM sequence: GTGAGT
ggtaacctgaggcttacttc

SEQ ID NO: 32501 - DNA, 20 bp, Artificial Sequence
  Description of Artificial Sequence: Synthetic oligonucleotide
  Target: LAMA2; (+) strand; PAM type: NNGRRT; PAM sequence: ATGAAT
ctcttttttttttttccaag

SEQ ID NO: 32502 - DNA, 20 bp, Artificial Sequence
  Description of Artificial Sequence: Synthetic oligonucleotide
  Target: LAMA2; (+) strand; PAM type: NNGRRT; PAM sequence: GAGAAT
cccaagagaactgtagcaat

SEQ ID NO: 32503 - DNA, 20 bp, Artificial Sequence
  Description of Artificial Sequence: Synthetic oligonucleotide
  Target: LAMA2; (+) strand; PAM type: NNGRRT; PAM sequence: GAGAAT
aaaacatcatcagttttctg

SEQ ID NO: 32504 - DNA, 20 bp, Artificial Sequence
  Description of Artificial Sequence: Synthetic oligonucleotide
  Target: LAMA2; (+) strand; PAM type: NNGRRT; PAM sequence: TAGAAT
attatttacctgaaagctgt

SEQ ID NO: 32505 - DNA, 20 bp, Artificial Sequence
  Description of Artificial Sequence: Synthetic oligonucleotide
  Target: LAMA2; (+) strand; PAM type: NNGRRT; PAM sequence: ACGAGT
aggcagtccagatgccttta

SEQ ID NO: 32506 - DNA, 20 bp, Artificial Sequence
  Description of Artificial Sequence: Synthetic oligonucleotide
  Target: LAMA2; (+) strand; PAM type: NNGRRT; PAM sequence: CTGAGT
agtgttatgtctgtgataat

SEQ ID NO: 32507 - DNA, 20 bp, Artificial Sequence
  Description of Artificial Sequence: Synthetic oligonucleotide
  Target: LAMA2; (+) strand; PAM type: NNGRRT; PAM sequence: ATGAAT
tgatttatctcttggtatat

SEQ ID NO: 32508 - DNA, 20 bp, Artificial Sequence
  Description of Artificial Sequence: Synthetic oligonucleotide
  Target: LAMA2; (+) strand; PAM type: NNGRRT; PAM sequence: ATGGGT
gaggagcaaacactattaaa

SEQ ID NO: 32509 - DNA, 20 bp, Artificial Sequence
  Description of Artificial Sequence: Synthetic oligonucleotide
  Target: LAMA2; (+) strand; PAM type: NNGRRT; PAM sequence: CTGAGT
tttgtgtcaccttttttaat

SEQ ID NO: 32510 - DNA, 20 bp, Artificial Sequence
  Description of Artificial Sequence: Synthetic oligonucleotide
  Target: LAMA2; (+) strand; PAM type: NNGRRT; PAM sequence: TAGAGT
ctcccctctcagtccacaac

SEQ ID NO: 32511 - DNA, 20 bp, Artificial Sequence
  Description of Artificial Sequence: Synthetic oligonucleotide
  Target: LAMA2; (+) strand; PAM type: NNGRRT; PAM sequence: AAGGAT
aactagagtgaaatttgctt

SEQ ID NO: 32512 - DNA, 20 bp, Artificial Sequence
  Description of Artificial Sequence: Synthetic oligonucleotide
  Target: LAMA2; (+) strand; PAM type: NNGRRT; PAM sequence: GGGGAT
tttgcttaaggataaagtca

SEQ ID NO: 32513 - DNA, 20 bp, Artificial Sequence
  Description of Artificial Sequence: Synthetic oligonucleotide
  Target: LAMA2; (+) strand; PAM type: NNGRRT; PAM sequence: TCGAGT
acaccgccagttatcatgca

SEQ ID NO: 32514 - DNA, 20 bp, Artificial Sequence
  Description of Artificial Sequence: Synthetic oligonucleotide
  Target: LAMA2; (+) strand; PAM type: NNGRRT; PAM sequence: TGGAAT
taatttctccttttcctctg

SEQ ID NO: 32515 - DNA, 20 bp, Artificial Sequence
  Description of Artificial Sequence: Synthetic oligonucleotide
  Target: LAMA2; (+) strand; PAM type: NNGRRT; PAM sequence: CCGAAT
cagtctcctaactttaacta

SEQ ID NO: 32516 - DNA, 20 bp, Artificial Sequence
  Description of Artificial Sequence: Synthetic oligonucleotide
  Target: LAMA2; (+) strand; PAM type: NNGRRT; PAM sequence: CTGGAT
ctctgtgtaccaactgcctt

SEQ ID NO: 32517 - DNA, 20 bp, Artificial Sequence
  Description of Artificial Sequence: Synthetic oligonucleotide
  Target: LAMA2; (+) strand; PAM type: NNGRRT; PAM sequence: CGGGGT
gtccacaggcaacaggtcct

SEQ ID NO: 32518 - DNA, 20 bp, Artificial Sequence
  Description of Artificial Sequence: Synthetic oligonucleotide
  Target: LAMA2; (+) strand; PAM type: NNGRRT; PAM sequence: CAGGAT
ggctgtcttcagaaaagctt

SEQ ID NO: 32519 - DNA, 20 bp, Artificial Sequence
  Description of Artificial Sequence: Synthetic oligonucleotide
  Target: LAMA2; (+) strand; PAM type: NNGRRT; PAM sequence: TCGGGT
ttttattatattccagttaa

SEQ ID NO: 32520 - DNA, 20 bp, Artificial Sequence
  Description of Artificial Sequence: Synthetic oligonucleotide
  Target: LAMA2; (+) strand; PAM type: NNGRRT; PAM sequence: GAGAAT
gatattctatcacactattg

SEQ ID NO: 32521 - DNA, 20 bp, Artificial Sequence
  Description of Artificial Sequence: Synthetic oligonucleotide
  Target: LAMA2; (+) strand; PAM type: NNGRRT; PAM sequence: TAGGGT
tctacctatctcacttcaag

SEQ ID NO: 32522 - DNA, 20 bp, Artificial Sequence
  Description of Artificial Sequence: Synthetic oligonucleotide
  Target: LAMA2; (+) strand; PAM type: NNGRRT; PAM sequence: AAGAGT
ttttagtgtaataagttttt

SEQ ID NO: 32523 - DNA, 20 bp, Artificial Sequence
  Description of Artificial Sequence: Synthetic oligonucleotide
  Target: LAMA2; (+) strand; PAM type: NNGRRT; PAM sequence: GAGGAT
gcttagggaggccgaggcag

SEQ ID NO: 32524 - DNA, 20 bp, Artificial Sequence
  Description of Artificial Sequence: Synthetic oligonucleotide
  Target: LAMA2; (+) strand; PAM type: NNGRRT; PAM sequence: AAGAAT
caggaggatcccttggtgcc

SEQ ID NO: 32525 - DNA, 20 bp, Artificial Sequence
  Description of Artificial Sequence: Synthetic oligonucleotide
  Target: LAMA2; (+) strand; PAM type: NNGRRT; PAM sequence: GAGGAT
tacttggaaggctgagccag

SEQ ID NO: 32526 - DNA, 20 bp, Artificial Sequence
  Description of Artificial Sequence: Synthetic oligonucleotide
  Target: LAMA2; (+) strand; PAM type: NNGRRT; PAM sequence: GTGAGT
cccaggggcgtgaagttacc

SEQ ID NO: 32527 - DNA, 20 bp, Artificial Sequence
  Description of Artificial Sequence: Synthetic oligonucleotide
  Target: LAMA2; (+) strand; PAM type: NNGRRT; PAM sequence: CTGGGT
tcacactactgtacaccagc

SEQ ID NO: 32528 - DNA, 20 bp, Artificial Sequence
  Description of Artificial Sequence: Synthetic oligonucleotide
  Target: LAMA2; (+) strand; PAM type: NNGRRT; PAM sequence: CAGAGT
ctgtacaccagcctgggtaa

SEQ ID NO: 32529 - DNA, 20 bp, Artificial Sequence
  Description of Artificial Sequence: Synthetic oligonucleotide
  Target: LAMA2; (+) strand; PAM type: NNGRRT; PAM sequence: TGGAGT
tctcgctctgtcaaccaggc

SEQ ID NO: 32530 - DNA, 20 bp, Artificial Sequence
  Description of Artificial Sequence: Synthetic oligonucleotide
  Target: LAMA2; (+) strand; PAM type: NNGRRT; PAM sequence: TGGGAT
tgattgtcctgcctcatatc

SEQ ID NO: 32531 - DNA, 20 bp, Artificial Sequence
  Description of Artificial Sequence: Synthetic oligonucleotide
  Target: LAMA2; (+) strand; PAM type: NNGRRT; PAM sequence: TTGAGT
acctggctaatctttgcatt

SEQ ID NO: 32532 - DNA, 20 bp, Artificial Sequence
  Description of Artificial Sequence: Synthetic oligonucleotide
  Target: LAMA2; (+) strand; PAM type: NNGRRT; PAM sequence: CAGGGT
ctttgcattttgagtagaga

SEQ ID NO: 32533 - DNA, 20 bp, Artificial Sequence
  Description of Artificial Sequence: Synthetic oligonucleotide
  Target: LAMA2; (+) strand; PAM type: NNGRRT; PAM sequence: AGGAAT
ttgtattttatttctgattc

SEQ ID NO: 32534 - DNA, 20 bp, Artificial Sequence
  Description of Artificial Sequence: Synthetic oligonucleotide
  Target: LAMA2; (+) strand; PAM type: NNGRRT; PAM sequence: ATGGGT
aaaatatctactgccatatt

SEQ ID NO: 32535 - DNA, 20 bp, Artificial Sequence
  Description of Artificial Sequence: Synthetic oligonucleotide
  Target: LAMA2; (+) strand; PAM type: NNGRRT; PAM sequence: AAGAAT
catattatgggttttatgtt

SEQ ID NO: 32536 - DNA, 20 bp, Artificial Sequence
  Description of Artificial Sequence: Synthetic oligonucleotide
  Target: LAMA2; (+) strand; PAM type: NNGRRT; PAM sequence: TTGAAT
acttatctcttgtctcccat

SEQ ID NO: 32537 - DNA, 20 bp, Artificial Sequence
  Description of Artificial Sequence: Synthetic oligonucleotide
  Target: LAMA2; (+) strand; PAM type: NNGRRT; PAM sequence: TGGAAT
tcagtattatttcttcccct

SEQ ID NO: 32538 - DNA, 20 bp, Artificial Sequence
  Description of Artificial Sequence: Synthetic oligonucleotide
  Target: LAMA2; (+) strand; PAM type: NNGRRT; PAM sequence: CAGGAT
actgctttcttccagacctt

SEQ ID NO: 32539 - DNA, 20 bp, Artificial Sequence
  Description of Artificial Sequence: Synthetic oligonucleotide
  Target: LAMA2; (+) strand; PAM type: NNGRRT; PAM sequence: TGGGGT
catcttcttgaggaaagaca

SEQ ID NO: 32540 - DNA, 20 bp, Artificial Sequence
  Description of Artificial Sequence: Synthetic oligonucleotide
  Target: LAMA2; (+) strand; PAM type: NNGRRT; PAM sequence: AAGAAT
gtacctcttattacaatctg

SEQ ID NO: 32541 - DNA, 20 bp, Artificial Sequence
  Description of Artificial Sequence: Synthetic oligonucleotide
  Target: LAMA2; (+) strand; PAM type: NNGRRT; PAM sequence: GGGAAT
tcatacccttgcccagggct

SEQ ID NO: 32542 - DNA, 20 bp, Artificial Sequence
  Description of Artificial Sequence: Synthetic oligonucleotide
  Target: LAMA2; (+) strand; PAM type: NNGRRT; PAM sequence: AAGAAT
tggtattataaaaatgaaga

SEQ ID NO: 32543 - DNA, 20 bp, Artificial Sequence
  Description of Artificial Sequence: Synthetic oligonucleotide
  Target: LAMA2; (+) strand; PAM type: NNGRRT; PAM sequence: AAGGGT
ctaaagacaagcattgtagg

SEQ ID NO: 32544 - DNA, 20 bp, Artificial Sequence
  Description of Artificial Sequence: Synthetic oligonucleotide
  Target: LAMA2; (+) strand; PAM type: NNGRRT; PAM sequence: GGGAAT
gccaaggctatgacggagat

SEQ ID NO: 32545 - DNA, 20 bp, Artificial Sequence
  Description of Artificial Sequence: Synthetic oligonucleotide
  Target: LAMA2; (+) strand; PAM type: NNGRRT; PAM sequence: TGGAGT
atttctctctctatggtgcc

SEQ ID NO: 32546 - DNA, 20 bp, Artificial Sequence
  Description of Artificial Sequence: Synthetic oligonucleotide
  Target: LAMA2; (+) strand; PAM type: NNGRRT; PAM sequence: AGGAAT
ctatggtgcctggagttaga

SEQ ID NO: 32547 - DNA, 20 bp, Artificial Sequence
  Description of Artificial Sequence: Synthetic oligonucleotide
  Target: LAMA2; (+) strand; PAM type: NNGRRT; PAM sequence: ATGAAT
ttagtttgtgagcttcagtc

SEQ ID NO: 32548 - DNA, 20 bp, Artificial Sequence
  Description of Artificial Sequence: Synthetic oligonucleotide
  Target: LAMA2; (+) strand; PAM type: NNGRRT; PAM sequence: GGGAAT
ttatgctgtccttgccttga

SEQ ID NO: 32549 - DNA, 20 bp, Artificial Sequence
  Description of Artificial Sequence: Synthetic oligonucleotide
  Target: LAMA2; (+) strand; PAM type: NNGRRT; PAM sequence: TTGAAT
tttgttttgctttttaattt

SEQ ID NO: 32550 - DNA, 20 bp, Artificial Sequence
  Description of Artificial Sequence: Synthetic oligonucleotide
  Target: LAMA2; (+) strand; PAM type: NNGRRT; PAM sequence: GTGAGT
aaaagtaaatttgcccttgt

SEQ ID NO: 32551 - DNA, 20 bp, Artificial Sequence
  Description of Artificial Sequence: Synthetic oligonucleotide
  Target: LAMA2; (+) strand; PAM type: NNGRRT; PAM sequence: TCGAAT
gcctgtctacattgcactga

SEQ ID NO: 32552 - DNA, 20 bp, Artificial Sequence
  Description of Artificial Sequence: Synthetic oligonucleotide
  Target: LAMA2; (+) strand; PAM type: NNGRRT; PAM sequence: ATGGAT
agataaaaagtattttgttg

SEQ ID NO: 32553 - DNA, 20 bp, Artificial Sequence
  Description of Artificial Sequence: Synthetic oligonucleotide
  Target: LAMA2; (+) strand; PAM type: NNGRRT; PAM sequence: AAGAGT
tggtacaaattgatgactga

SEQ ID NO: 32554 - DNA, 20 bp, Artificial Sequence
  Description of Artificial Sequence: Synthetic oligonucleotide
  Target: LAMA2; (+) strand; PAM type: NNGRRT; PAM sequence: ATGAAT
atgactgaaagagtgaaaag

SEQ ID NO: 32555 - DNA, 20 bp, Artificial Sequence
  Description of Artificial Sequence: Synthetic oligonucleotide
  Target: LAMA2; (+) strand; PAM type: NNGRRT; PAM sequence: GTGAAT
agatgaattagtaccaccag

SEQ ID NO: 32556 - DNA, 20 bp, Artificial Sequence
  Description of Artificial Sequence: Synthetic oligonucleotide
  Target: LAMA2; (+) strand; PAM type: NNGRRT; PAM sequence: GAGAAT
cgaggcaggcagagaagtgg

SEQ ID NO: 32557 - DNA, 20 bp, Artificial Sequence
  Description of Artificial Sequence: Synthetic oligonucleotide
  Target: LAMA2; (+) strand; PAM type: NNGRRT; PAM sequence: CTGGGT
tcgctccattgcactctagc

SEQ ID NO: 32558 - DNA, 20 bp, Artificial Sequence
  Description of Artificial Sequence: Synthetic oligonucleotide
  Target: LAMA2; (+) strand; PAM type: NNGRRT; PAM sequence: CAGAGT
ttgcactctagcctgggtga

SEQ ID NO: 32559 - DNA, 20 bp, Artificial Sequence
  Description of Artificial Sequence: Synthetic oligonucleotide
  Target: LAMA2; (+) strand; PAM type: NNGRRT; PAM sequence: TGGAAT
atgccaacttcattttctca

SEQ ID NO: 32560 - DNA, 20 bp, Artificial Sequence
  Description of Artificial Sequence: Synthetic oligonucleotide
  Target: LAMA2; (+) strand; PAM type: NNGRRT; PAM sequence: GAGAAT
ccttggtttattaaaagttt

SEQ ID NO: 32561 - DNA, 20 bp, Artificial Sequence
  Description of Artificial Sequence: Synthetic oligonucleotide
  Target: LAMA2; (+) strand; PAM type: NNGRRT; PAM sequence: AGGAGT
tgggcagatcacctgaggta

SEQ ID NO: 32562 - DNA, 20 bp, Artificial Sequence
  Description of Artificial Sequence: Synthetic oligonucleotide
  Target: LAMA2; (+) strand; PAM type: NNGRRT; PAM sequence: GTGGGT
aaaattagctgggcatggtg

SEQ ID NO: 32563 - DNA, 20 bp, Artificial Sequence
  Description of Artificial Sequence: Synthetic oligonucleotide
  Target: LAMA2; (+) strand; PAM type: NNGRRT; PAM sequence: GAGAAT
tactcaggaggctgaggtag

SEQ ID NO: 32564 - DNA, 20 bp, Artificial Sequence
  Description of Artificial Sequence: Synthetic oligonucleotide
  Target: LAMA2; (+) strand; PAM type: NNGRRT; PAM sequence: CAGGAT
gtaggagaattgctggaacc

SEQ ID NO: 32565 - DNA, 20 bp, Artificial Sequence
  Description of Artificial Sequence: Synthetic oligonucleotide
  Target: LAMA2; (+) strand; PAM type: NNGRRT; PAM sequence: CAGAGT
ctgcacttcagcctgggcaa

SEQ ID NO: 32566 - DNA, 20 bp, Artificial Sequence
  Description of Artificial Sequence: Synthetic oligonucleotide
  Target: LAMA2; (+) strand; PAM type: NNGRRT; PAM sequence: AGGGGT
agttaacccttgaccaatgc

SEQ ID NO: 32567 - DNA, 20 bp, Artificial Sequence
  Description of Artificial Sequence: Synthetic oligonucleotide
  Target: LAMA2; (+) strand; PAM type: NNGRRT; PAM sequence: AAGAAT
taaactttataaactaaaaa

SEQ ID NO: 32568 - DNA, 20 bp, Artificial Sequence
  Description of Artificial Sequence: Synthetic oligonucleotide
  Target: LAMA2; (+) strand; PAM type: NNGRRT; PAM sequence: ATGAAT
tctattcccaagcccaaata

SEQ ID NO: 32569 - DNA, 20 bp, Artificial Sequence
  Description of Artificial Sequence: Synthetic oligonucleotide
  Target: LAMA2; (+) strand; PAM type: NNGRRT; PAM sequence: GTGGGT
cagtcattccgttcagacaa

SEQ ID NO: 32570 - DNA, 20 bp, Artificial Sequence
  Description of Artificial Sequence: Synthetic oligonucleotide
  Target: LAMA2; (+) strand; PAM type: NNGRRT; PAM sequence: ATGGAT
gtcttgaagattctgagatc

SEQ ID NO: 32571 - DNA, 20 bp, Artificial Sequence
  Description of Artificial Sequence: Synthetic oligonucleotide
  Target: LAMA2; (+) strand; PAM type: NNGRRT; PAM sequence: GAGAAT
attttatattttaaaaataa

SEQ ID NO: 32572 - DNA, 20 bp, Artificial Sequence
  Description of Artificial Sequence: Synthetic oligonucleotide
  Target: LAMA2; (+) strand; PAM type: NNGRRT; PAM sequence: TGGAAT
ttaaaaataagagaataaac

SEQ ID NO: 32573 - DNA, 20 bp, Artificial Sequence
  Description of Artificial Sequence: Synthetic oligonucleotide
  Target: LAMA2; (+) strand; PAM type: NNGRRT; PAM sequence: AGGAGT
gctaaaccaaagtatgatat

SEQ ID NO: 32574 - DNA, 20 bp, Artificial Sequence
  Description of Artificial Sequence: Synthetic oligonucleotide
  Target: LAMA2; (+) strand; PAM type: NNGRRT; PAM sequence: AGGGAT
taggagtgcaattgtgacta

SEQ ID NO: 32575 - DNA, 20 bp, Artificial Sequence
  Description of Artificial Sequence: Synthetic oligonucleotide
  Target: LAMA2; (+) strand; PAM type: NNGRRT; PAM sequence: TTGAAT
ttattaaagatatactcctt

SEQ ID NO: 32576 - DNA, 20 bp, Artificial Sequence
  Description of Artificial Sequence: Synthetic oligonucleotide
  Target: LAMA2; (+) strand; PAM type: NNGRRT; PAM sequence: CTGAAT
atttgcatattaccctttgc

SEQ ID NO: 32577 - DNA, 20 bp, Artificial Sequence
  Description of Artificial Sequence: Synthetic oligonucleotide
  Target: LAMA2; (+) strand; PAM type: NNGRRT; PAM sequence: AAGGAT
tgaccacaattttagactaa

SEQ ID NO: 32578 - DNA, 20 bp, Artificial Sequence
  Description of Artificial Sequence: Synthetic oligonucleotide
  Target: LAMA2; (+) strand; PAM type: NNGRRT; PAM sequence: CTGGGT
ctaaaaggatgaaattaagc

SEQ ID NO: 32579 - DNA, 20 bp, Artificial Sequence
  Description of Artificial Sequence: Synthetic oligonucleotide
  Target: LAMA2; (+) strand; PAM type: NNGRRT; PAM sequence: TAGAGT
caaagttttgattcctcctt

SEQ ID NO: 32580 - DNA, 20 bp, Artificial Sequence
  Description of Artificial Sequence: Synthetic oligonucleotide
  Target: LAMA2; (+) strand; PAM type: NNGRRT; PAM sequence: GTGAAT
tttgattcctcctttagagt

SEQ ID NO: 32581 - DNA, 20 bp, Artificial Sequence
  Description of Artificial Sequence: Synthetic oligonucleotide
  Target: LAMA2; (+) strand; PAM type: NNGRRT; PAM sequence: CAGGGT
tggaaataaaaaaataaaac

SEQ ID NO: 32582 - DNA, 20 bp, Artificial Sequence
  Description of Artificial Sequence: Synthetic oligonucleotide
  Target: LAMA2; (+) strand; PAM type: NNGRRT; PAM sequence: GTGAGT
gtcatatccaaccccaccat

SEQ ID NO: 32583 - DNA, 20 bp, Artificial Sequence
  Description of Artificial Sequence: Synthetic oligonucleotide
  Target: LAMA2; (+) strand; PAM type: NNGRRT; PAM sequence: CAGAAT
tctgggctttgttgtgtgtt

SEQ ID NO: 32584 - DNA, 20 bp, Artificial Sequence
  Description of Artificial Sequence: Synthetic oligonucleotide
  Target: LAMA2; (+) strand; PAM type: NNGRRT; PAM sequence: CAGAGT
ctttgttgtgtgttcagaat

SEQ ID NO: 32585 - DNA, 20 bp, Artificial Sequence
  Description of Artificial Sequence: Synthetic oligonucleotide
  Target: LAMA2; (+) strand; PAM type: NNGRRT; PAM sequence: AGGGAT
gagacttacagataacataa

SEQ ID NO: 32586 - DNA, 20 bp, Artificial Sequence
  Description of Artificial Sequence: Synthetic oligonucleotide
  Target: LAMA2; (+) strand; PAM type: NNGRRT; PAM sequence: CTGAAT
ctcccttttatcccaatatc

SEQ ID NO: 32587 - DNA, 20 bp, Artificial Sequence
  Description of Artificial Sequence: Synthetic oligonucleotide
  Target: LAMA2; (+) strand; PAM type: NNGRRT; PAM sequence: GAGGGT
ttcttactttcagatcagaa

SEQ ID NO: 32588 - DNA, 20 bp, Artificial Sequence
  Description of Artificial Sequence: Synthetic oligonucleotide
  Target: LAMA2; (+) strand; PAM type: NNGRRT; PAM sequence: CAGAAT
agtatgtatgtctgtctgtg

SEQ ID NO: 32589 - DNA, 20 bp, Artificial Sequence
  Description of Artificial Sequence: Synthetic oligonucleotide
  Target: LAMA2; (+) strand; PAM type: NNGRRT; PAM sequence: AGGAGT
tactagggaaagggaagcac

SEQ ID NO: 32590 - DNA, 20 bp, Artificial Sequence
  Description of Artificial Sequence: Synthetic oligonucleotide
  Target: LAMA2; (+) strand; PAM type: NNGRRT; PAM sequence: CCGAAT
gttcaggaaatgataccgtt

SEQ ID NO: 32591 - DNA, 20 bp, Artificial Sequence
  Description of Artificial Sequence: Synthetic oligonucleotide
  Target: LAMA2; (+) strand; PAM type: NNGRRT; PAM sequence: AGGGAT
tgcataatgcagaaaattgg

SEQ ID NO: 32592 - DNA, 20 bp, Artificial Sequence
  Description of Artificial Sequence: Synthetic oligonucleotide
  Target: LAMA2; (+) strand; PAM type: NNGRRT; PAM sequence: TTGGGT
ttttctaagaagtacaaaga

SEQ ID NO: 32593 - DNA, 20 bp, Artificial Sequence
  Description of Artificial Sequence: Synthetic oligonucleotide
  Target: LAMA2; (+) strand; PAM type: NNGRRT; PAM sequence: TCGGGT
caacttctattcttcctcac

SEQ ID NO: 32594 - DNA, 20 bp, Artificial Sequence
  Description of Artificial Sequence: Synthetic oligonucleotide
  Target: LAMA2; (+) strand; PAM type: NNGRRT; PAM sequence: CTGGGT
ccaggtctcaagatcctgca

SEQ ID NO: 32595 - DNA, 20 bp, Artificial Sequence
  Description of Artificial Sequence: Synthetic oligonucleotide
  Target: LAMA2; (+) strand; PAM type: NNGRRT; PAM sequence: CAGGGT
atttaggttgacttagggga

SEQ ID NO: 32596 - DNA, 20 bp, Artificial Sequence
  Description of Artificial Sequence: Synthetic oligonucleotide
  Target: LAMA2; (+) strand; PAM type: NNGRRT; PAM sequence: ATGAAT
tcaaaagtaatcacatttcc

SEQ ID NO: 32597 - DNA, 20 bp, Artificial Sequence
  Description of Artificial Sequence: Synthetic oligonucleotide
  Target: LAMA2; (+) strand; PAM type: NNGRRT; PAM sequence: GTGAAT
tttccatgaatttcaccctt

SEQ ID NO: 32598 - DNA, 20 bp, Artificial Sequence
  Description of Artificial Sequence: Synthetic oligonucleotide
  Target: LAMA2; (+) strand; PAM type: NNGRRT; PAM sequence: CTGGAT
attccatttgagaaactcaa

SEQ ID NO: 32599 - DNA, 20 bp, Artificial Sequence
  Description of Artificial Sequence: Synthetic oligonucleotide
  Target: LAMA2; (+) strand; PAM type: NNGRRT; PAM sequence: TGGAAT
atttgagaaactcaactgga

SEQ ID NO: 32600 - DNA, 20 bp, Artificial Sequence
  Description of Artificial Sequence: Synthetic oligonucleotide
  Target: LAMA2; (+) strand; PAM type: NNGRRT; PAM sequence: TTGAAT
gaaactcaactggatggaat

SEQ ID NO: 32601 - DNA, 20 bp, Artificial Sequence
  Description of Artificial Sequence: Synthetic oligonucleotide
  Target: LAMA2; (+) strand; PAM type: NNGRRT; PAM sequence: AGGAAT
cgatatttagttgaaaagtg

SEQ ID NO: 32602 - DNA, 20 bp, Artificial Sequence
  Description of Artificial Sequence: Synthetic oligonucleotide
  Target: LAMA2; (+) strand; PAM type: NNGRRT; PAM sequence: AGGAAT
ccaagtaatttaaataaaaa

SEQ ID NO: 32603 - DNA, 20 bp, Artificial Sequence
  Description of Artificial Sequence: Synthetic oligonucleotide
  Target: LAMA2; (+) strand; PAM type: NNGRRT; PAM sequence: AAGAGT
atgtcagaaacatgataaac

SEQ ID NO: 32604 - DNA, 20 bp, Artificial Sequence
  Description of Artificial Sequence: Synthetic oligonucleotide
  Target: LAMA2; (+) strand; PAM type: NNGRRT; PAM sequence: CTGGAT
tctgccctgcgatttttatt

SEQ ID NO: 32605 - DNA, 20 bp, Artificial Sequence
  Description of Artificial Sequence: Synthetic oligonucleotide
  Target: LAMA2; (+) strand; PAM type: NNGRRT; PAM sequence: GTGAGT
gctgcttccattccctcatt

SEQ ID NO: 32606 - DNA, 20 bp, Artificial Sequence
  Description of Artificial Sequence: Synthetic oligonucleotide
  Target: LAMA2; (+) strand; PAM type: NNGRRT; PAM sequence: TTGAGT
gacgtatgtgtgtgtagcct

SEQ ID NO: 32607 - DNA, 20 bp, Artificial Sequence
  Description of Artificial Sequence: Synthetic oligonucleotide
  Target: LAMA2; (+) strand; PAM type: NNGRRT; PAM sequence: GTGGAT
tgtgtagcctttgagttttg

SEQ ID NO: 32608 - DNA, 20 bp, Artificial Sequence
  Description of Artificial Sequence: Synthetic oligonucleotide
  Target: LAMA2; (+) strand; PAM type: NNGRRT; PAM sequence: TAGAAT
tgtgatctttagagagaaag

SEQ ID NO: 32609 - DNA, 20 bp, Artificial Sequence
  Description of Artificial Sequence: Synthetic oligonucleotide
  Target: LAMA2; (+) strand; PAM type: NNGRRT; PAM sequence: TTGGGT
gaatgactaggcttctgtta

SEQ ID NO: 32610 - DNA, 20 bp, Artificial Sequence
  Description of Artificial Sequence: Synthetic oligonucleotide
  Target: LAMA2; (+) strand; PAM type: NNGRRT; PAM sequence: AGGAAT
ttattgggtttgagagctga

SEQ ID NO: 32611 - DNA, 20 bp, Artificial Sequence
  Description of Artificial Sequence: Synthetic oligonucleotide
  Target: LAMA2; (+) strand; PAM type: NNGRRT; PAM sequence: GGGAAT
gagctgaaggaataaggaga

SEQ ID NO: 32612 - DNA, 20 bp, Artificial Sequence
  Description of Artificial Sequence: Synthetic oligonucleotide
  Target: LAMA2; (+) strand; PAM type: NNGRRT; PAM sequence: ATGGAT
ggaatctagaaaataaaact

SEQ ID NO: 32613 - DNA, 20 bp, Artificial Sequence
  Description of Artificial Sequence: Synthetic oligonucleotide
  Target: LAMA2; (+) strand; PAM type: NNGRRT; PAM sequence: TTGGAT
tcacaagtaaaaaaattcag

SEQ ID NO: 32614 - DNA, 20 bp, Artificial Sequence
  Description of Artificial Sequence: Synthetic oligonucleotide
  Target: LAMA2; (+) strand; PAM type: NNGRRT; PAM sequence: CTGAAT
cacccttgttacaattcaaa

SEQ ID NO: 32615 - DNA, 20 bp, Artificial Sequence
  Description of Artificial Sequence: Synthetic oligonucleotide
  Target: LAMA2; (+) strand; PAM type: NNGRRT; PAM sequence: AAGAGT
tacaattcaaactgaatcac

SEQ ID NO: 32616 - DNA, 20 bp, Artificial Sequence
  Description of Artificial Sequence: Synthetic oligonucleotide
  Target: LAMA2; (+) strand; PAM type: NNGRRT; PAM sequence: ATGGAT
gttctttcttacttttagtt

SEQ ID NO: 32617 - DNA, 20 bp, Artificial Sequence
  Description of Artificial Sequence: Synthetic oligonucleotide
  Target: LAMA2; (+) strand; PAM type: NNGRRT; PAM sequence: AGGAGT
cttttatttaaaatcagccc

SEQ ID NO: 32618 - DNA, 20 bp, Artificial Sequence
  Description of Artificial Sequence: Synthetic oligonucleotide
  Target: LAMA2; (+) strand; PAM type: NNGRRT; PAM sequence: CTGAAT
ttgaaatctgcaattcttct

SEQ ID NO: 32619 - DNA, 20 bp, Artificial Sequence
  Description of Artificial Sequence: Synthetic oligonucleotide
  Target: LAMA2; (+) strand; PAM type: NNGRRT; PAM sequence: AAGGAT
gtaagaaagggcaaattaat

SEQ ID NO: 32620 - DNA, 20 bp, Artificial Sequence
  Description of Artificial Sequence: Synthetic oligonucleotide
  Target: LAMA2; (+) strand; PAM type: NNGRRT; PAM sequence: CAGAGT
aagggcaaattaataaggat

SEQ ID NO: 32621 - DNA, 20 bp, Artificial Sequence
  Description of Artificial Sequence: Synthetic oligonucleotide
  Target: LAMA2; (+) strand; PAM type: NNGRRT; PAM sequence: CAGGGT
acattaaaaaaaaatcagaa

SEQ ID NO: 32622 - DNA, 20 bp, Artificial Sequence
  Description of Artificial Sequence: Synthetic oligonucleotide
  Target: LAMA2; (+) strand; PAM type: NNGRRT; PAM sequence: TGGAAT
aaaaaaaatcagaacagggt

SEQ ID NO: 32623 - DNA, 20 bp, Artificial Sequence
  Description of Artificial Sequence: Synthetic oligonucleotide
  Target: LAMA2; (+) strand; PAM type: NNGRRT; PAM sequence: GAGAAT
tagtacaaaaaaaaaatgca

SEQ ID NO: 32624 - DNA, 20 bp, Artificial Sequence
  Description of Artificial Sequence: Synthetic oligonucleotide
  Target: LAMA2; (+) strand; PAM type: NNGRRT; PAM sequence: CTGAAT
atattcttcaggtcagtctt

SEQ ID NO: 32625 - DNA, 20 bp, Artificial Sequence
  Description of Artificial Sequence: Synthetic oligonucleotide
  Target: LAMA2; (+) strand; PAM type: NNGRRT; PAM sequence: CAGAAT
ttcagccagcattttgctat

SEQ ID NO: 32626 - DNA, 20 bp, Artificial Sequence
  Description of Artificial Sequence: Synthetic oligonucleotide
  Target: LAMA2; (+) strand; PAM type: NNGRRT; PAM sequence: AGGGAT
gcagaaagtggtataaaccc

SEQ ID NO: 32627 - DNA, 20 bp, Artificial Sequence
  Description of Artificial Sequence: Synthetic oligonucleotide
  Target: LAMA2; (+) strand; PAM type: NNGRRT; PAM sequence: ATGAAT
aatgatctttctcaccatac

SEQ ID NO: 32628 - DNA, 20 bp, Artificial Sequence
  Description of Artificial Sequence: Synthetic oligonucleotide
  Target: LAMA2; (+) strand; PAM type: NNGRRT; PAM sequence: TTGAAT
tatcttgcttgccagaacat

SEQ ID NO: 32629 - DNA, 20 bp, Artificial Sequence
  Description of Artificial Sequence: Synthetic oligonucleotide
  Target: LAMA2; (+) strand; PAM type: NNGRRT; PAM sequence: AAGAAT
agagcagccctttattctca

SEQ ID NO: 32630 - DNA, 20 bp, Artificial Sequence
  Description of Artificial Sequence: Synthetic oligonucleotide
  Target: LAMA2; (+) strand; PAM type: NNGRRT; PAM sequence: GAGAGT
atcagactggctttatttca

SEQ ID NO: 32631 - DNA, 20 bp, Artificial Sequence
  Description of Artificial Sequence: Synthetic oligonucleotide
  Target: LAMA2; (+) strand; PAM type: NNGRRT; PAM sequence: ATGAAT
acagaagtattataagaaag

SEQ ID NO: 32632 - DNA, 20 bp, Artificial Sequence
  Description of Artificial Sequence: Synthetic oligonucleotide
  Target: LAMA2; (+) strand; PAM type: NNGRRT; PAM sequence: TAGAAT
gaaagtatattttgtgggct

SEQ ID NO: 32633 - DNA, 20 bp, Artificial Sequence
  Description of Artificial Sequence: Synthetic oligonucleotide
  Target: LAMA2; (+) strand; PAM type: NNGRRT; PAM sequence: TGGAAT
gttttagagccgtgctttgc

SEQ ID NO: 32634 - DNA, 20 bp, Artificial Sequence
  Description of Artificial Sequence: Synthetic oligonucleotide
  Target: LAMA2; (+) strand; PAM type: NNGRRT; PAM sequence: TGGAAT
gtgatgtcaggtctttggct

SEQ ID NO: 32635 - DNA, 20 bp, Artificial Sequence
  Description of Artificial Sequence: Synthetic oligonucleotide
  Target: LAMA2; (+) strand; PAM type: NNGRRT; PAM sequence: TGGAGT
ataaaaccctttatatgaag

SEQ ID NO: 32636 - DNA, 20 bp, Artificial Sequence
  Description of Artificial Sequence: Synthetic oligonucleotide
  Target: LAMA2; (+) strand; PAM type: NNGRRT; PAM sequence: GTGAAT
aaccctttatatgaagtgga

SEQ ID NO: 32637 - DNA, 20 bp, Artificial Sequence
  Description of Artificial Sequence: Synthetic oligonucleotide
  Target: LAMA2; (+) strand; PAM type: NNGRRT; PAM sequence: CAGAAT
acatccagacaccgatagtt

SEQ ID NO: 32638 - DNA, 20 bp, Artificial Sequence
  Description of Artificial Sequence: Synthetic oligonucleotide
  Target: LAMA2; (+) strand; PAM type: NNGRRT; PAM sequence: GAGGAT
agatgcaggccaacaaagat

SEQ ID NO: 32639 - DNA, 20 bp, Artificial Sequence
  Description of Artificial Sequence: Synthetic oligonucleotide
  Target: LAMA2; (+) strand; PAM type: NNGRRT; PAM sequence: AGGGGT
ccacatgcacaacctctgag

SEQ ID NO: 32640 - DNA, 20 bp, Artificial Sequence
  Description of Artificial Sequence: Synthetic oligonucleotide
  Target: LAMA2; (+) strand; PAM type: NNGRRT; PAM sequence: CTGGGT
ttctctcccacctgccttct

SEQ ID NO: 32641 - DNA, 20 bp, Artificial Sequence
  Description of Artificial Sequence: Synthetic oligonucleotide
  Target: LAMA2; (+) strand; PAM type: NNGRRT; PAM sequence: CCGGGT
aagcaatttagccagcacaa

SEQ ID NO: 32642 - DNA, 20 bp, Artificial Sequence
  Description of Artificial Sequence: Synthetic oligonucleotide
  Target: LAMA2; (+) strand; PAM type: NNGRRT; PAM sequence: GTGGAT
ccattgtatgaacatgctgt

SEQ ID NO: 32643 - DNA, 20 bp, Artificial Sequence
  Description of Artificial Sequence: Synthetic oligonucleotide
  Target: LAMA2; (+) strand; PAM type: NNGRRT; PAM sequence: TAGGGT
aaacagcactttaatcttat

SEQ ID NO: 32644 - DNA, 20 bp, Artificial Sequence
  Description of Artificial Sequence: Synthetic oligonucleotide
  Target: LAMA2; (+) strand; PAM type: NNGRRT; PAM sequence: ATGAGT
ttattacaaatgaagagcta

SEQ ID NO: 32645 - DNA, 20 bp, Artificial Sequence
  Description of Artificial Sequence: Synthetic oligonucleotide
  Target: LAMA2; (+) strand; PAM type: NNGRRT; PAM sequence: AAGGGT
aatcttttacaggtatattg

SEQ ID NO: 32646 - DNA, 20 bp, Artificial Sequence
  Description of Artificial Sequence: Synthetic oligonucleotide
  Target: LAMA2; (+) strand; PAM type: NNGRRT; PAM sequence: TAGAAT
gaagggtaaatttctatcag

SEQ ID NO: 32647 - DNA, 20 bp, Artificial Sequence
  Description of Artificial Sequence: Synthetic oligonucleotide
  Target: LAMA2; (+) strand; PAM type: NNGRRT; PAM sequence: TGGAAT
ttaacttgctcttcaaacaa

SEQ ID NO: 32648 - DNA, 20 bp, Artificial Sequence
  Description of Artificial Sequence: Synthetic oligonucleotide
  Target: LAMA2; (+) strand; PAM type: NNGRRT; PAM sequence: TTGAGT
tacagttctttatgataatc

SEQ ID NO: 32649 - DNA, 20 bp, Artificial Sequence
  Description of Artificial Sequence: Synthetic oligonucleotide
  Target: LAMA2; (+) strand; PAM type: NNGRRT; PAM sequence: ACGAAT
gataatcttgagtgcttttt

SEQ ID NO: 32650 - DNA, 20 bp, Artificial Sequence
  Description of Artificial Sequence: Synthetic oligonucleotide
  Target: LAMA2; (+) strand; PAM type: NNGRRT; PAM sequence: CTGAAT
atagacaatgctattctact

SEQ ID NO: 32651 - DNA, 20 bp, Artificial Sequence
  Description of Artificial Sequence: Synthetic oligonucleotide
  Target: LAMA2; (+) strand; PAM type: NNGRRT; PAM sequence: GAGGGT
gaggacaggaagaaaaggtt

SEQ ID NO: 32652 - DNA, 20 bp, Artificial Sequence
  Description of Artificial Sequence: Synthetic oligonucleotide
  Target: LAMA2; (+) strand; PAM type: NNGRRT; PAM sequence: TAGAAT
ttttgactatcaatccttgg

SEQ ID NO: 32653 - DNA, 20 bp, Artificial Sequence
  Description of Artificial Sequence: Synthetic oligonucleotide
  Target: LAMA2; (+) strand; PAM type: NNGRRT; PAM sequence: TGGAAT
gcagtagttagcattgttta

SEQ ID NO: 32654 - DNA, 20 bp, Artificial Sequence
  Description of Artificial Sequence: Synthetic oligonucleotide
  Target: LAMA2; (+) strand; PAM type: NNGRRT; PAM sequence: GTGGAT
tgtttatggaatgggactat

SEQ ID NO: 32655 - DNA, 20 bp, Artificial Sequence
  Description of Artificial Sequence: Synthetic oligonucleotide
  Target: LAMA2; (+) strand; PAM type: NNGRRT; PAM sequence: TTGAAT
tggaatgggactatgtggat

SEQ ID NO: 32656 - DNA, 20 bp, Artificial Sequence
  Description of Artificial Sequence: Synthetic oligonucleotide
  Target: LAMA2; (+) strand; PAM type: NNGRRT; PAM sequence: AAGGAT
tcatacatcaatgttattgt

SEQ ID NO: 32657 - DNA, 20 bp, Artificial Sequence
  Description of Artificial Sequence: Synthetic oligonucleotide
  Target: LAMA2; (+) strand; PAM type: NNGRRT; PAM sequence: TAGGAT
aaataatattgtgggaagta

SEQ ID NO: 32658 - DNA, 20 bp, Artificial Sequence
  Description of Artificial Sequence: Synthetic oligonucleotide
  Target: LAMA2; (+) strand; PAM type: NNGRRT; PAM sequence: TTGAAT
tcatattttgttttttcaat

SEQ ID NO: 32659 - DNA, 20 bp, Artificial Sequence
  Description of Artificial Sequence: Synthetic oligonucleotide
  Target: LAMA2; (+) strand; PAM type: NNGRRT; PAM sequence: CTGAGT
atttgcagtttaatgcatac

SEQ ID NO: 32660 - DNA, 20 bp, Artificial Sequence
  Description of Artificial Sequence: Synthetic oligonucleotide
  Target: LAMA2; (+) strand; PAM type: NNGRRT; PAM sequence: TTGGAT
tctaaacttatatcaacaga

SEQ ID NO: 32661 - DNA, 20 bp, Artificial Sequence
  Description of Artificial Sequence: Synthetic oligonucleotide
  Target: LAMA2; (+) strand; PAM type: NNGRRT; PAM sequence: TCGAAT
tactctttatattgttgtac

SEQ ID NO: 32662 - DNA, 20 bp, Artificial Sequence
  Description of Artificial Sequence: Synthetic oligonucleotide
  Target: LAMA2; (+) strand; PAM type: NNGRRT; PAM sequence: GAGAAT
ataaattaatctaaagttta

SEQ ID NO: 32663 - DNA, 20 bp, Artificial Sequence
  Description of Artificial Sequence: Synthetic oligonucleotide
  Target: LAMA2; (+) strand; PAM type: NNGRRT; PAM sequence: TTGAAT
atctctagcaaatggcattt

SEQ ID NO: 32664 - DNA, 20 bp, Artificial Sequence
  Description of Artificial Sequence: Synthetic oligonucleotide
  Target: LAMA2; (+) strand; PAM type: NNGRRT; PAM sequence: GAGGAT
atattattatactgaagttg

SEQ ID NO: 32665 - DNA, 20 bp, Artificial Sequence
  Description of Artificial Sequence: Synthetic oligonucleotide
  Target: LAMA2; (+) strand; PAM type: NNGRRT; PAM sequence: TGGAAT
aataaaagtttttaaataag

SEQ ID NO: 32666 - DNA, 20 bp, Artificial Sequence
  Description of Artificial Sequence: Synthetic oligonucleotide
  Target: LAMA2; (+) strand; PAM type: NNGRRT; PAM sequence: GGGAGT
tttaaataagtggaatcaat

SEQ ID NO: 32667 - DNA, 20 bp, Artificial Sequence
  Description of Artificial Sequence: Synthetic oligonucleotide
  Target: LAMA2; (+) strand; PAM type: NNGRRT; PAM sequence: TGGAAT
caagagggcataattacaaa

SEQ ID NO: 32668 - DNA, 20 bp, Artificial Sequence
  Description of Artificial Sequence: Synthetic oligonucleotide
  Target: LAMA2; (+) strand; PAM type: NNGRRT; PAM sequence: AGGGAT
gcacatccaagtataagctc

SEQ ID NO: 32669 - DNA, 20 bp, Artificial Sequence
  Description of Artificial Sequence: Synthetic oligonucleotide
  Target: LAMA2; (+) strand; PAM type: NNGRRT; PAM sequence: CAGGAT
catctaaatggcttaaaaac

SEQ ID NO: 32670 - DNA, 20 bp, Artificial Sequence
  Description of Artificial Sequence: Synthetic oligonucleotide
  Target: LAMA2; (+) strand; PAM type: NNGRRT; PAM sequence: GGGGAT
aaaatgctgatgctagaaat

SEQ ID NO: 32671 - DNA, 20 bp, Artificial Sequence
  Description of Artificial Sequence: Synthetic oligonucleotide
  Target: LAMA2; (+) strand; PAM type: NNGRRT; PAM sequence: TTGAAT
atggggatctcttgagaact

SEQ ID NO: 32672 - DNA, 20 bp, Artificial Sequence
  Description of Artificial Sequence: Synthetic oligonucleotide
  Target: LAMA2; (+) strand; PAM type: NNGRRT; PAM sequence: ATGAAT
agatactgtttttcttactc

SEQ ID NO: 32673 - DNA, 20 bp, Artificial Sequence
  Description of Artificial Sequence: Synthetic oligonucleotide
  Target: LAMA2; (+) strand; PAM type: NNGRRT; PAM sequence: GAGAAT
actcatgaattcttctttgt

SEQ ID NO: 32674 - DNA, 20 bp, Artificial Sequence
  Description of Artificial Sequence: Synthetic oligonucleotide
  Target: LAMA2; (+) strand; PAM type: NNGRRT; PAM sequence: AGGAAT
tgcctttagccagtatcctt

SEQ ID NO: 32675 - DNA, 20 bp, Artificial Sequence
  Description of Artificial Sequence: Synthetic oligonucleotide
  Target: LAMA2; (+) strand; PAM type: NNGRRT; PAM sequence: GGGGAT
ctcatccttcagtattggca

SEQ ID NO: 32676 - DNA, 20 bp, Artificial Sequence
  Description of Artificial Sequence: Synthetic oligonucleotide
  Target: LAMA2; (+) strand; PAM type: NNGRRT; PAM sequence: TTGAAT
ccccacagatatcaaaattc

SEQ ID NO: 32677 - DNA, 20 bp, Artificial Sequence
  Description of Artificial Sequence: Synthetic oligonucleotide
  Target: LAMA2; (+) strand; PAM type: NNGRRT; PAM sequence: TTGAAT
atccaactctccaaggttgg

SEQ ID NO: 32678 - DNA, 20 bp, Artificial Sequence
  Description of Artificial Sequence: Synthetic oligonucleotide
  Target: LAMA2; (+) strand; PAM type: NNGRRT; PAM sequence: TAGAAT
gaaatcgtgtattagtgaaa

SEQ ID NO: 32679 - DNA, 20 bp, Artificial Sequence
  Description of Artificial Sequence: Synthetic oligonucleotide
  Target: LAMA2; (+) strand; PAM type: NNGRRT; PAM sequence: TTGAGT
acaaagattataaacactta

SEQ ID NO: 32680 - DNA, 20 bp, Artificial Sequence
  Description of Artificial Sequence: Synthetic oligonucleotide
  Target: LAMA2; (+) strand; PAM type: NNGRRT; PAM sequence: CAGAAT
tagataacataggtaacatt

SEQ ID NO: 32681 - DNA, 20 bp, Artificial Sequence
  Description of Artificial Sequence: Synthetic oligonucleotide
  Target: LAMA2; (+) strand; PAM type: NNGRRT; PAM sequence: GAGGAT
ttacaggtgagaaacagaca

SEQ ID NO: 32682 - DNA, 20 bp, Artificial Sequence
  Description of Artificial Sequence: Synthetic oligonucleotide
  Target: LAMA2; (+) strand; PAM type: NNGRRT; PAM sequence: TAGGAT
tataggtacaatatacaaat

SEQ ID NO: 32683 - DNA, 20 bp, Artificial Sequence
  Description of Artificial Sequence: Synthetic oligonucleotide
  Target: LAMA2; (+) strand; PAM type: NNGRRT; PAM sequence: CTGAGT
cttttttaacgtttaaaaac

SEQ ID NO: 32684 - DNA, 20 bp, Artificial Sequence
  Description of Artificial Sequence: Synthetic oligonucleotide
  Target: LAMA2; (+) strand; PAM type: NNGRRT; PAM sequence: GTGGAT
ctcgttttcatgaagctcat

SEQ ID NO: 32685 - DNA, 20 bp, Artificial Sequence
  Description of Artificial Sequence: Synthetic oligonucleotide
  Target: LAMA2; (+) strand; PAM type: NNGRRT; PAM sequence: GTGAAT
catgtggataaatttatctc

SEQ ID NO: 32686 - DNA, 20 bp, Artificial Sequence
  Description of Artificial Sequence: Synthetic oligonucleotide
  Target: LAMA2; (+) strand; PAM type: NNGRRT; PAM sequence: TAGAAT
gatcttatacaatgaacatt

SEQ ID NO: 32687 - DNA, 20 bp, Artificial Sequence
  Description of Artificial Sequence: Synthetic oligonucleotide
  Target: LAMA2; (+) strand; PAM type: NNGRRT; PAM sequence: CTGAAT
atttgcttcatttgctacac

SEQ ID NO: 32688 - DNA, 20 bp, Artificial Sequence
  Description of Artificial Sequence: Synthetic oligonucleotide
  Target: LAMA2; (+) strand; PAM type: NNGRRT; PAM sequence: ATGGAT
acagcctcgctttgtcaagc

SEQ ID NO: 32689 - DNA, 20 bp, Artificial Sequence
  Description of Artificial Sequence: Synthetic oligonucleotide
  Target: LAMA2; (+) strand; PAM type: NNGRRT; PAM sequence: AAGAAT
agaacctcgatggcctgaag

SEQ ID NO: 32690 - DNA, 20 bp, Artificial Sequence
  Description of Artificial Sequence: Synthetic oligonucleotide
  Target: LAMA2; (+) strand; PAM type: NNGRRT; PAM sequence: ACGAAT
tagcagacagcgtcgccaaa

SEQ ID NO: 32691 - DNA, 20 bp, Artificial Sequence
  Description of Artificial Sequence: Synthetic oligonucleotide
  Target: LAMA2; (+) strand; PAM type: NNGRRT; PAM sequence: TCGAGT
tatcccagacctgtaaatgc

SEQ ID NO: 32692 - DNA, 20 bp, Artificial Sequence
  Description of Artificial Sequence: Synthetic oligonucleotide
  Target: LAMA2; (+) strand; PAM type: NNGRRT; PAM sequence: TTGAGT
tcatagattggcctcagaaa

SEQ ID NO: 32693 - DNA, 20 bp, Artificial Sequence
  Description of Artificial Sequence: Synthetic oligonucleotide
  Target: LAMA2; (+) strand; PAM type: NNGRRT; PAM sequence: TGGAAT
gtgtcatgcagttccaaagc

SEQ ID NO: 32694 - DNA, 20 bp, Artificial Sequence
  Description of Artificial Sequence: Synthetic oligonucleotide
  Target: LAMA2; (+) strand; PAM type: NNGRRT; PAM sequence: AGGAAT
tttccagttgagaagagatt

SEQ ID NO: 32695 - DNA, 20 bp, Artificial Sequence
  Description of Artificial Sequence: Synthetic oligonucleotide
  Target: LAMA2; (+) strand; PAM type: NNGRRT; PAM sequence: TTGGGT
aattaaaaacacagttgtac

SEQ ID NO: 32696 - DNA, 20 bp, Artificial Sequence
  Description of Artificial Sequence: Synthetic oligonucleotide
  Target: LAMA2; (+) strand; PAM type: NNGRRT; PAM sequence: CAGGAT
catgaacagacttgttagaa

SEQ ID NO: 32697 - DNA, 20 bp, Artificial Sequence
  Description of Artificial Sequence: Synthetic oligonucleotide
  Target: LAMA2; (+) strand; PAM type: NNGRRT; PAM sequence: AAGGAT
atataaaattatattgactt

SEQ ID NO: 32698 - DNA, 20 bp, Artificial Sequence
  Description of Artificial Sequence: Synthetic oligonucleotide
  Target: LAMA2; (+) strand; PAM type: NNGRRT; PAM sequence: GAGGAT
actttgggagcctgaggcga

SEQ ID NO: 32699 - DNA, 20 bp, Artificial Sequence
  Description of Artificial Sequence: Synthetic oligonucleotide
  Target: LAMA2; (+) strand; PAM type: NNGRRT; PAM sequence: AGGAAT
cgagaggatcacttgagcct

SEQ ID NO: 32700 - DNA, 20 bp, Artificial Sequence
  Description of Artificial Sequence: Synthetic oligonucleotide
  Target: LAMA2; (+) strand; PAM type: NNGRRT; PAM sequence: GGGAGT
acctgtgttcccagccactt

SEQ ID NO: 32701 - DNA, 20 bp, Artificial Sequence
  Description of Artificial Sequence: Synthetic oligonucleotide
  Target: LAMA2; (+) strand; PAM type: NNGRRT; PAM sequence: GAGGAT
cacttgggagtctgaggctg

SEQ ID NO: 32702 - DNA, 20 bp, Artificial Sequence
  Description of Artificial Sequence: Synthetic oligonucleotide
  Target: LAMA2; (+) strand; PAM type: NNGRRT; PAM sequence: AAGGGT
ggaggatcccttgaacccag

SEQ ID NO: 32703 - DNA, 20 bp, Artificial Sequence
  Description of Artificial Sequence: Synthetic oligonucleotide
  Target: LAMA2; (+) strand; PAM type: NNGRRT; PAM sequence: CTGGGT
tcacgccactgcactccagc

SEQ ID NO: 32704 - DNA, 20 bp, Artificial Sequence
  Description of Artificial Sequence: Synthetic oligonucleotide
  Target: LAMA2; (+) strand; PAM type: NNGRRT; PAM sequence: GGGGGT
gctgtctcaaaaaaaaaaaa

SEQ ID NO: 32705 - DNA, 20 bp, Artificial Sequence
  Description of Artificial Sequence: Synthetic oligonucleotide
  Target: LAMA2; (+) strand; PAM type: NNGRRT; PAM sequence: TTGGGT
ggtttcaccaaaggagatgc

SEQ ID NO: 32706 - DNA, 20 bp, Artificial Sequence
  Description of Artificial Sequence: Synthetic oligonucleotide
  Target: LAMA2; (+) strand; PAM type: NNGRRT; PAM sequence: GGGGGT
ttatatgccaacatttttgg

SEQ ID NO: 32707 - DNA, 20 bp, Artificial Sequence
  Description of Artificial Sequence: Synthetic oligonucleotide
  Target: LAMA2; (+) strand; PAM type: NNGRRT; PAM sequence: TGGAGT
tgggggggtatcaaaatatt

SEQ ID NO: 32708 - DNA, 20 bp, Artificial Sequence
  Description of Artificial Sequence: Synthetic oligonucleotide
  Target: LAMA2; (+) strand; PAM type: NNGRRT; PAM sequence: TTGAGT
ccataaaattcaaatgctgt

SEQ ID NO: 32709 - DNA, 20 bp, Artificial Sequence
  Description of Artificial Sequence: Synthetic oligonucleotide
  Target: LAMA2; (+) strand; PAM type: NNGRRT; PAM sequence: GGGAAT
attcaaatgctgtttgagtg

SEQ ID NO: 32710 - DNA, 20 bp, Artificial Sequence
  Description of Artificial Sequence: Synthetic oligonucleotide
  Target: LAMA2; (+) strand; PAM type: NNGRRT; PAM sequence: ATGGAT
ctagcctcaaatcaaatcct

SEQ ID NO: 32711 - DNA, 20 bp, Artificial Sequence
  Description of Artificial Sequence: Synthetic oligonucleotide
  Target: LAMA2; (+) strand; PAM type: NNGRRT; PAM sequence: AAGAGT
cgactccttcatgagcaagg

SEQ ID NO: 32712 - DNA, 20 bp, Artificial Sequence
  Description of Artificial Sequence: Synthetic oligonucleotide
  Target: LAMA2; (+) strand; PAM type: NNGRRT; PAM sequence: CAGGGT
tataacataaacttcagagc

SEQ ID NO: 32713 - DNA, 20 bp, Artificial Sequence
  Description of Artificial Sequence: Synthetic oligonucleotide
  Target: LAMA2; (+) strand; PAM type: NNGRRT; PAM sequence: ATGAAT
tcacaatattcccactaaaa

SEQ ID NO: 32714 - DNA, 20 bp, Artificial Sequence
  Description of Artificial Sequence: Synthetic oligonucleotide
  Target: LAMA2; (+) strand; PAM type: NNGRRT; PAM sequence: GGGGGT
cataggtaaacctgtgtcat

SEQ ID NO: 32715 - DNA, 20 bp, Artificial Sequence
  Description of Artificial Sequence: Synthetic oligonucleotide
  Target: LAMA2; (+) strand; PAM type: NNGRRT; PAM sequence: ATGAAT
gtgtcatgggggtttgtttt

SEQ ID NO: 32716 - DNA, 20 bp, Artificial Sequence
  Description of Artificial Sequence: Synthetic oligonucleotide
  Target: LAMA2; (+) strand; PAM type: NNGRRT; PAM sequence: AAGAAT
tcctgctctccaccctccaa

SEQ ID NO: 32717 - DNA, 20 bp, Artificial Sequence
  Description of Artificial Sequence: Synthetic oligonucleotide
  Target: LAMA2; (+) strand; PAM type: NNGRRT; PAM sequence: TTGGGT
atctataaatattaattaaa

SEQ ID NO: 32718 - DNA, 20 bp, Artificial Sequence
  Description of Artificial Sequence: Synthetic oligonucleotide
  Target: LAMA2; (+) strand; PAM type: NNGRRT; PAM sequence: TGGGGT
aacaattgcttcagttaaaa

SEQ ID NO: 32719 - DNA, 20 bp, Artificial Sequence
  Description of Artificial Sequence: Synthetic oligonucleotide
  Target: LAMA2; (+) strand; PAM type: NNGRRT; PAM sequence: ATGAAT
tttatagaaaatacttcctc

SEQ ID NO: 32720 - DNA, 20 bp, Artificial Sequence
  Description of Artificial Sequence: Synthetic oligonucleotide
  Target: LAMA2; (+) strand; PAM type: NNGRRT; PAM sequence: AGGAAT
attaatggtagatgcgtaaa

SEQ ID NO: 32721 - DNA, 20 bp, Artificial Sequence
  Description of Artificial Sequence: Synthetic oligonucleotide
  Target: LAMA2; (+) strand; PAM type: NNGRRT; PAM sequence: GTGGAT
cctttataaaaaggtcatat

SEQ ID NO: 32722 - DNA, 20 bp, Artificial Sequence
  Description of Artificial Sequence: Synthetic oligonucleotide
  Target: LAMA2; (+) strand; PAM type: NNGRRT; PAM sequence: GAGGAT
aatttgggaggtcaaggtgg

SEQ ID NO: 32723 - DNA, 20 bp, Artificial Sequence
  Description of Artificial Sequence: Synthetic oligonucleotide
  Target: LAMA2; (+) strand; PAM type: NNGRRT; PAM sequence: ATGAGT
tatctctacaaaaaggaaaa

SEQ ID NO: 32724 - DNA, 20 bp, Artificial Sequence
  Description of Artificial Sequence: Synthetic oligonucleotide
  Target: LAMA2; (+) strand; PAM type: NNGRRT; PAM sequence: CTGAAT
agccacataaaagtggaaaa

SEQ ID NO: 32725 - DNA, 20 bp, Artificial Sequence
  Description of Artificial Sequence: Synthetic oligonucleotide
  Target: LAMA2; (+) strand; PAM type: NNGRRT; PAM sequence: TAGAAT
tggaaaactgaatttctcta

SEQ ID NO: 32726 - DNA, 20 bp, Artificial Sequence
  Description of Artificial Sequence: Synthetic oligonucleotide
  Target: LAMA2; (+) strand; PAM type: NNGRRT; PAM sequence: ACGAAT
acacaaattcaccccaacac

SEQ ID NO: 32727 - DNA, 20 bp, Artificial Sequence
  Description of Artificial Sequence: Synthetic oligonucleotide
  Target: LAMA2; (+) strand; PAM type: NNGRRT; PAM sequence: GAGGAT
cacgaatgacttaattgcaa

SEQ ID NO: 32728 - DNA, 20 bp, Artificial Sequence
  Description of Artificial Sequence: Synthetic oligonucleotide
  Target: LAMA2; (+) strand; PAM type: NNGRRT; PAM sequence: TAGAAT
gtaattattctcaacttctg

SEQ ID NO: 32729 - DNA, 20 bp, Artificial Sequence
  Description of Artificial Sequence: Synthetic oligonucleotide
  Target: LAMA2; (+) strand; PAM type: NNGRRT; PAM sequence: TGGGAT
cttaacaaatgaacaactac

SEQ ID NO: 32730 - DNA, 20 bp, Artificial Sequence
  Description of Artificial Sequence: Synthetic oligonucleotide
  Target: LAMA2; (+) strand; PAM type: NNGRRT; PAM sequence: AAGAAT
tagctacaaaaaataataac

SEQ ID NO: 32731 - DNA, 20 bp, Artificial Sequence
  Description of Artificial Sequence: Synthetic oligonucleotide
  Target: LAMA2; (+) strand; PAM type: NNGRRT; PAM sequence: AAGAGT
actatttgaaaaatatgacc

SEQ ID NO: 32732 - DNA, 20 bp, Artificial Sequence
  Description of Artificial Sequence: Synthetic oligonucleotide
  Target: LAMA2; (+) strand; PAM type: NNGRRT; PAM sequence: CAGAGT
tttgctgactttagaaaaag

SEQ ID NO: 32733 - DNA, 20 bp, Artificial Sequence
  Description of Artificial Sequence: Synthetic oligonucleotide
  Target: LAMA2; (+) strand; PAM type: NNGRRT; PAM sequence: AAGAAT
gaaaaagcagagttaactta

SEQ ID NO: 32734 - DNA, 20 bp, Artificial Sequence
  Description of Artificial Sequence: Synthetic oligonucleotide
  Target: LAMA2; (+) strand; PAM type: NNGRRT; PAM sequence: ATGAAT
tgaaaaagatggaaaaatta

SEQ ID NO: 32735 - DNA, 20 bp, Artificial Sequence
  Description of Artificial Sequence: Synthetic oligonucleotide
  Target: LAMA2; (+) strand; PAM type: NNGRRT; PAM sequence: AGGAAT
aatcaaaaaggtgactcctt

SEQ ID NO: 32736 - DNA, 20 bp, Artificial Sequence
  Description of Artificial Sequence: Synthetic oligonucleotide
  Target: LAMA2; (+) strand; PAM type: NNGRRT; PAM sequence: GAGAAT
gaaaaacttcaactgctccg

SEQ ID NO: 32737 - DNA, 20 bp, Artificial Sequence
  Description of Artificial Sequence: Synthetic oligonucleotide
  Target: LAMA2; (+) strand; PAM type: NNGRRT; PAM sequence: GTGAAT
gcaaaaacttctgagaactt

SEQ ID NO: 32738 - DNA, 20 bp, Artificial Sequence
  Description of Artificial Sequence: Synthetic oligonucleotide
  Target: LAMA2; (+) strand; PAM type: NNGRRT; PAM sequence: AAGGGT
ttctgagaacttgtgaataa

SEQ ID NO: 32739 - DNA, 20 bp, Artificial Sequence
  Description of Artificial Sequence: Synthetic oligonucleotide
  Target: LAMA2; (+) strand; PAM type: NNGRRT; PAM sequence: TAGAAT
aaatcattttgcctcagttt

SEQ ID NO: 32740 - DNA, 20 bp, Artificial Sequence
  Description of Artificial Sequence: Synthetic oligonucleotide
  Target: LAMA2; (+) strand; PAM type: NNGRRT; PAM sequence: TAGAAT
ctcagttttagaataatttg

SEQ ID NO: 32741 - DNA, 20 bp, Artificial Sequence
  Description of Artificial Sequence: Synthetic oligonucleotide
  Target: LAMA2; (+) strand; PAM type: NNGRRT; PAM sequence: CAGAAT
tagaataatttgtagaatgt

SEQ ID NO: 32742 - DNA, 20 bp, Artificial Sequence
  Description of Artificial Sequence: Synthetic oligonucleotide
  Target: LAMA2; (+) strand; PAM type: NNGRRT; PAM sequence: GAGAAT
agaatgtcagaataacaatg

SEQ ID NO: 32743 - DNA, 20 bp, Artificial Sequence
  Description of Artificial Sequence: Synthetic oligonucleotide
  Target: LAMA2; (+) strand; PAM type: NNGRRT; PAM sequence: AGGGAT
attaaaagcatacaaaataa

SEQ ID NO: 32744 - DNA, 20 bp, Artificial Sequence
  Description of Artificial Sequence: Synthetic oligonucleotide
  Target: LAMA2; (+) strand; PAM type: NNGRRT; PAM sequence: ATGAGT
taacagcataagtcatactt

SEQ ID NO: 32745 - DNA, 20 bp, Artificial Sequence
  Description of Artificial Sequence: Synthetic oligonucleotide
  Target: LAMA2; (+) strand; PAM type: NNGRRT; PAM sequence: GAGGGT
agcacatgtgattcgttcct

SEQ ID NO: 32746 - DNA, 20 bp, Artificial Sequence
  Description of Artificial Sequence: Synthetic oligonucleotide
  Target: LAMA2; (+) strand; PAM type: NNGRRT; PAM sequence: CAGAGT
cagccgcaaagcagatcatt

SEQ ID NO: 32747 - DNA, 20 bp, Artificial Sequence
  Description of Artificial Sequence: Synthetic oligonucleotide
  Target: LAMA2; (+) strand; PAM type: NNGRRT; PAM sequence: CAGAGT
aagcagtttaactttttcat

SEQ ID NO: 32748 - DNA, 20 bp, Artificial Sequence
  Description of Artificial Sequence: Synthetic oligonucleotide
  Target: LAMA2; (+) strand; PAM type: NNGRRT; PAM sequence: GTGGAT
cagataataaatgacatagt

SEQ ID NO: 32749 - DNA, 20 bp, Artificial Sequence
  Description of Artificial Sequence: Synthetic oligonucleotide
  Target: LAMA2; (+) strand; PAM type: NNGRRT; PAM sequence: TAGAAT
gactgccagcatcccagcaa

SEQ ID NO: 32750 - DNA, 20 bp, Artificial Sequence
  Description of Artificial Sequence: Synthetic oligonucleotide
  Target: LAMA2; (+) strand; PAM type: NNGRRT; PAM sequence: ATGGAT
aaagcacatactgaaagtct

SEQ ID NO: 32751 - DNA, 20 bp, Artificial Sequence
  Description of Artificial Sequence: Synthetic oligonucleotide
  Target: LAMA2; (+) strand; PAM type: NNGRRT; PAM sequence: TAGGGT
gtgatgaccttcaactattt

SEQ ID NO: 32752 - DNA, 20 bp, Artificial Sequence
  Description of Artificial Sequence: Synthetic oligonucleotide
  Target: LAMA2; (+) strand; PAM type: NNGRRT; PAM sequence: CAGGGT
ggtcaacctaatatgtaaca

SEQ ID NO: 32753 - DNA, 20 bp, Artificial Sequence
  Description of Artificial Sequence: Synthetic oligonucleotide
  Target: LAMA2; (+) strand; PAM type: NNGRRT; PAM sequence: AAGGGT
taaatgtaggcctttagtct

SEQ ID NO: 32754 - DNA, 20 bp, Artificial Sequence
  Description of Artificial Sequence: Synthetic oligonucleotide
  Target: LAMA2; (+) strand; PAM type: NNGRRT; PAM sequence: TTGAAT
ctgaagttagaaattaagca

SEQ ID NO: 32755 - DNA, 20 bp, Artificial Sequence
  Description of Artificial Sequence: Synthetic oligonucleotide
  Target: LAMA2; (+) strand; PAM type: NNGRRT; PAM sequence: TTGAGT
catctactcccctggcctgc

SEQ ID NO: 32756 - DNA, 20 bp, Artificial Sequence
  Description of Artificial Sequence: Synthetic oligonucleotide
  Target: LAMA2; (+) strand; PAM type: NNGRRT; PAM sequence: GAGGAT
tcaaacccatcaaggaactt

SEQ ID NO: 32757 - DNA, 20 bp, Artificial Sequence
  Description of Artificial Sequence: Synthetic oligonucleotide
  Target: LAMA2; (+) strand; PAM type: NNGRRT; PAM sequence: AGGAAT
gaaaaacatctctgagataa

SEQ ID NO: 32758 - DNA, 20 bp, Artificial Sequence
  Description of Artificial Sequence: Synthetic oligonucleotide
  Target: LAMA2; (+) strand; PAM type: NNGRRT; PAM sequence: TTGGAT
tcagtaactgattgtaattg

SEQ ID NO: 32759 - DNA, 20 bp, Artificial Sequence
  Description of Artificial Sequence: Synthetic oligonucleotide
  Target: LAMA2; (+) strand; PAM type: NNGRRT; PAM sequence: GGGAAT
attgttggattattcataga

SEQ ID NO: 32760 - DNA, 20 bp, Artificial Sequence
  Description of Artificial Sequence: Synthetic oligonucleotide
  Target: LAMA2; (+) strand; PAM type: NNGRRT; PAM sequence: CAGGAT
atagagggaatgtctttccc

SEQ ID NO: 32761 - DNA, 20 bp, Artificial Sequence
  Description of Artificial Sequence: Synthetic oligonucleotide
  Target: LAMA2; (+) strand; PAM type: NNGRRT; PAM sequence: TTGAAT
tctttccccaggattccccg

SEQ ID NO: 32762 - DNA, 20 bp, Artificial Sequence
  Description of Artificial Sequence: Synthetic oligonucleotide
  Target: LAMA2; (+) strand; PAM type: NNGRRT; PAM sequence: TTGGGT
ggattccccgttgaatgatc

SEQ ID NO: 32763 - DNA, 20 bp, Artificial Sequence
  Description of Artificial Sequence: Synthetic oligonucleotide
  Target: LAMA2; (+) strand; PAM type: NNGRRT; PAM sequence: TGGGGT
tcctttaactcgaagcgatt

SEQ ID NO: 32764 - DNA, 20 bp, Artificial Sequence
  Description of Artificial Sequence: Synthetic oligonucleotide
  Target: LAMA2; (+) strand; PAM type: NNGRRT; PAM sequence: AGGGGT
tcgaagcgatttggggtagg

SEQ ID NO: 32765 - DNA, 20 bp, Artificial Sequence
  Description of Artificial Sequence: Synthetic oligonucleotide
  Target: LAMA2; (+) strand; PAM type: NNGRRT; PAM sequence: TGGAGT
cgatttggggtaggaggggt

SEQ ID NO: 32766 - DNA, 20 bp, Artificial Sequence
  Description of Artificial Sequence: Synthetic oligonucleotide
  Target: LAMA2; (+) strand; PAM type: NNGRRT; PAM sequence: GAGAAT
aatttcaaaagacatttcat

SEQ ID NO: 32767 - DNA, 20 bp, Artificial Sequence
  Description of Artificial Sequence: Synthetic oligonucleotide
  Target: LAMA2; (+) strand; PAM type: NNGRRT; PAM sequence: GGGAAT
ccacttattgttttaaaact

SEQ ID NO: 32768 - DNA, 20 bp, Artificial Sequence
  Description of Artificial Sequence: Synthetic oligonucleotide
  Target: LAMA2; (+) strand; PAM type: NNGRRT; PAM sequence: TAGAAT
atattctattactatttgca

SEQ ID NO: 32769 - DNA, 20 bp, Artificial Sequence
  Description of Artificial Sequence: Synthetic oligonucleotide
  Target: LAMA2; (+) strand; PAM type: NNGRRT; PAM sequence: ATGGAT
ttattgtatactaaaaagcc

SEQ ID NO: 32770 - DNA, 20 bp, Artificial Sequence
  Description of Artificial Sequence: Synthetic oligonucleotide
  Target: LAMA2; (+) strand; PAM type: NNGRRT; PAM sequence: GAGAGT
tatactaaaaagccatggat

SEQ ID NO: 32771 - DNA, 20 bp, Artificial Sequence
  Description of Artificial Sequence: Synthetic oligonucleotide
  Target: LAMA2; (+) strand; PAM type: NNGRRT; PAM sequence: TGGGGT
caaaaaaaaaggccaactaa

SEQ ID NO: 32772 - DNA, 20 bp, Artificial Sequence
  Description of Artificial Sequence: Synthetic oligonucleotide
  Target: LAMA2; (+) strand; PAM type: NNGRRT; PAM sequence: AGGAAT
ccaactaatggggttatggc

SEQ ID NO: 32773 - DNA, 20 bp, Artificial Sequence
  Description of Artificial Sequence: Synthetic oligonucleotide
  Target: LAMA2; (+) strand; PAM type: NNGRRT; PAM sequence: CAGAAT
aggaatgaaggaacaatata

SEQ ID NO: 32774 - DNA, 20 bp, Artificial Sequence
  Description of Artificial Sequence: Synthetic oligonucleotide
  Target: LAMA2; (+) strand; PAM type: NNGRRT; PAM sequence: TGGAGT
tttacatttattttttgttt

SEQ ID NO: 32775 - DNA, 20 bp, Artificial Sequence
  Description of Artificial Sequence: Synthetic oligonucleotide
  Target: LAMA2; (+) strand; PAM type: NNGRRT; PAM sequence: TAGGAT
ttacccaattagaagtttac

SEQ ID NO: 32776 - DNA, 20 bp, Artificial Sequence
  Description of Artificial Sequence: Synthetic oligonucleotide
  Target: LAMA2; (+) strand; PAM type: NNGRRT; PAM sequence: CAGAGT
agcatgctaatgagccaggg

SEQ ID NO: 32777 - DNA, 20 bp, Artificial Sequence
  Description of Artificial Sequence: Synthetic oligonucleotide
  Target: LAMA2; (+) strand; PAM type: NNGRRT; PAM sequence: AGGGGT
aggggaggggaggggagggg

SEQ ID NO: 32778 - DNA, 20 bp, Artificial Sequence
  Description of Artificial Sequence: Synthetic oligonucleotide
  Target: LAMA2; (+) strand; PAM type: NNGRRT; PAM sequence: TAGGAT
tttttgaacaactttggaac

SEQ ID NO: 32779 - DNA, 20 bp, Artificial Sequence
  Description of Artificial Sequence: Synthetic oligonucleotide
  Target: LAMA2; (+) strand; PAM type: NNGRRT; PAM sequence: AAGAAT
ttatatttttagtagtattt

SEQ ID NO: 32780 - DNA, 20 bp, Artificial Sequence
  Description of Artificial Sequence: Synthetic oligonucleotide
  Target: LAMA2; (+) strand; PAM type: NNGRRT; PAM sequence: AGGAAT
gttcaaggtgaacattgaaa

SEQ ID NO: 32781 - DNA, 20 bp, Artificial Sequence
  Description of Artificial Sequence: Synthetic oligonucleotide
  Target: LAMA2; (+) strand; PAM type: NNGRRT; PAM sequence: CAGAGT
aagatgatgttacataagat

SEQ ID NO: 32782 - DNA, 20 bp, Artificial Sequence
  Description of Artificial Sequence: Synthetic oligonucleotide
  Target: LAMA2; (+) strand; PAM type: NNGRRT; PAM sequence: TAGAAT
tgagaaaacatatattcagc

SEQ ID NO: 32783 - DNA, 20 bp, Artificial Sequence
  Description of Artificial Sequence: Synthetic oligonucleotide
  Target: LAMA2; (+) strand; PAM type: NNGRRT; PAM sequence: ACGAAT
tttccgtaaggtacacaaag

SEQ ID NO: 32784 - DNA, 20 bp, Artificial Sequence
  Description of Artificial Sequence: Synthetic oligonucleotide
  Target: LAMA2; (+) strand; PAM type: NNGRRT; PAM sequence: AGGAGT
aggtacacaaagacgaataa

SEQ ID NO: 32785 - DNA, 20 bp, Artificial Sequence
  Description of Artificial Sequence: Synthetic oligonucleotide
  Target: LAMA2; (+) strand; PAM type: NNGRRT; PAM sequence: CAGAAT
acgtaccttgtcacacaatg

SEQ ID NO: 32786 - DNA, 20 bp, Artificial Sequence
  Description of Artificial Sequence: Synthetic oligonucleotide
  Target: LAMA2; (+) strand; PAM type: NNGRRT; PAM sequence: AAGGAT
cctgaagatttcctgaaggg

SEQ ID NO: 32787 - DNA, 20 bp, Artificial Sequence
  Description of Artificial Sequence: Synthetic oligonucleotide
  Target: LAMA2; (+) strand; PAM type: NNGRRT; PAM sequence: TGGGAT
atttgagccaggcattgagg

SEQ ID NO: 32788 - DNA, 20 bp, Artificial Sequence
  Description of Artificial Sequence: Synthetic oligonucleotide
  Target: LAMA2; (+) strand; PAM type: NNGRRT; PAM sequence: GGGAGT
attgaggtgggatagtgctg

SEQ ID NO: 32789 - DNA, 20 bp, Artificial Sequence
  Description of Artificial Sequence: Synthetic oligonucleotide
  Target: LAMA2; (+) strand; PAM type: NNGRRT; PAM sequence: GGGGGT
tgggatagtgctggggagtt

SEQ ID NO: 32790 - DNA, 20 bp, Artificial Sequence
  Description of Artificial Sequence: Synthetic oligonucleotide
  Target: LAMA2; (+) strand; PAM type: NNGRRT; PAM sequence: TGGAGT
tagtgctggggagttggggg

SEQ ID NO: 32791 - DNA, 20 bp, Artificial Sequence
  Description of Artificial Sequence: Synthetic oligonucleotide
  Target: LAMA2; (+) strand; PAM type: NNGRRT; PAM sequence: GAGAGT
gggtggagtcaggtaacagg

SEQ ID NO: 32792 - DNA, 20 bp, Artificial Sequence
  Description of Artificial Sequence: Synthetic oligonucleotide
  Target: LAMA2; (+) strand; PAM type: NNGRRT; PAM sequence: GGGAAT
gggagagtattctgagaaga

SEQ ID NO: 32793 - DNA, 20 bp, Artificial Sequence
  Description of Artificial Sequence: Synthetic oligonucleotide
  Target: LAMA2; (+) strand; PAM type: NNGRRT; PAM sequence: TAGGGT
gcagtgggagaaggaagttt

SEQ ID NO: 32794 - DNA, 20 bp, Artificial Sequence
  Description of Artificial Sequence: Synthetic oligonucleotide
  Target: LAMA2; (+) strand; PAM type: NNGRRT; PAM sequence: CAGAGT
aaaaagaagtccagtttgcc

SEQ ID NO: 32795 - DNA, 20 bp, Artificial Sequence
  Description of Artificial Sequence: Synthetic oligonucleotide
  Target: LAMA2; (+) strand; PAM type: NNGRRT; PAM sequence: TGGGAT
catttaacaacactggtact

SEQ ID NO: 32796 - DNA, 20 bp, Artificial Sequence
  Description of Artificial Sequence: Synthetic oligonucleotide
  Target: LAMA2; (+) strand; PAM type: NNGRRT; PAM sequence: TAGGAT
ttgggataagcctcactggt

SEQ ID NO: 32797 - DNA, 20 bp, Artificial Sequence
  Description of Artificial Sequence: Synthetic oligonucleotide
  Target: LAMA2; (+) strand; PAM type: NNGRRT; PAM sequence: TGGGGT
ataaatccagaagcagtgta

SEQ ID NO: 32798 - DNA, 20 bp, Artificial Sequence
  Description of Artificial Sequence: Synthetic oligonucleotide
  Target: LAMA2; (+) strand; PAM type: NNGRRT; PAM sequence: AAGAAT
atggggtagatgaaagaaag

SEQ ID NO: 32799 - DNA, 20 bp, Artificial Sequence
  Description of Artificial Sequence: Synthetic oligonucleotide
  Target: LAMA2; (+) strand; PAM type: NNGRRT; PAM sequence: AAGAGT
gttaacttggaagaagcaat

SEQ ID NO: 32800 - DNA, 20 bp, Artificial Sequence
  Description of Artificial Sequence: Synthetic oligonucleotide
  Target: LAMA2; (+) strand; PAM type: NNGRRT; PAM sequence: GTGAAT
ataagagtaaatattatttt

SEQ ID NO: 32801 - DNA, 20 bp, Artificial Sequence
  Description of Artificial Sequence: Synthetic oligonucleotide
  Target: LAMA2; (+) strand; PAM type: NNGRRT; PAM sequence: CTGAGT
tttcttcattgtaaagattt

SEQ ID NO: 32802 - DNA, 20 bp, Artificial Sequence
  Description of Artificial Sequence: Synthetic oligonucleotide
  Target: LAMA2; (+) strand; PAM type: NNGRRT; PAM sequence: AGGAGT
caggcagattgcatgaactc

SEQ ID NO: 32803 - DNA, 20 bp, Artificial Sequence
  Description of Artificial Sequence: Synthetic oligonucleotide
  Target: LAMA2; (+) strand; PAM type: NNGRRT; PAM sequence: GAGGAT
tacttggggagatgaggtgg

SEQ ID NO: 32804 - DNA, 20 bp, Artificial Sequence
  Description of Artificial Sequence: Synthetic oligonucleotide
  Target: LAMA2; (+) strand; PAM type: NNGRRT; PAM sequence: GAGGAT
tgggaggatcacttgctctg

SEQ ID NO: 32805 - DNA, 20 bp, Artificial Sequence
  Description of Artificial Sequence: Synthetic oligonucleotide
  Target: LAMA2; (+) strand; PAM type: NNGRRT; PAM sequence: CTGGGT
ttgcaccatggcactccagc

SEQ ID NO: 32806 - DNA, 20 bp, Artificial Sequence
  Description of Artificial Sequence: Synthetic oligonucleotide
  Target: LAMA2; (+) strand; PAM type: NNGRRT; PAM sequence: TGGAAT
ttcccaatcagttttggaaa

SEQ ID NO: 32807 - DNA, 20 bp, Artificial Sequence
  Description of Artificial Sequence: Synthetic oligonucleotide
  Target: LAMA2; (+) strand; PAM type: NNGRRT; PAM sequence: ATGAGT
agtagccaatttttttccaa

SEQ ID NO: 32808 - DNA, 20 bp, Artificial Sequence
  Description of Artificial Sequence: Synthetic oligonucleotide
  Target: LAMA2; (+) strand; PAM type: NNGRRT; PAM sequence: ATGAAT
ccaaatgagttttgtactaa

SEQ ID NO: 32809 - DNA, 20 bp, Artificial Sequence
  Description of Artificial Sequence: Synthetic oligonucleotide
  Target: LAMA2; (+) strand; PAM type: NNGRRT; PAM sequence: ATGGAT
acattttctgatttgtaaat

SEQ ID NO: 32810 - DNA, 20 bp, Artificial Sequence
  Description of Artificial Sequence: Synthetic oligonucleotide
  Target: LAMA2; (+) strand; PAM type: NNGRRT; PAM sequence: CTGGAT
tgatttgtaaatatggatat

SEQ ID NO: 32811 - DNA, 20 bp, Artificial Sequence
  Description of Artificial Sequence: Synthetic oligonucleotide
  Target: LAMA2; (+) strand; PAM type: NNGRRT; PAM sequence: CTGGGT
ttattttaaagtagctttct

SEQ ID NO: 32812 - DNA, 20 bp, Artificial Sequence
  Description of Artificial Sequence: Synthetic oligonucleotide
  Target: LAMA2; (+) strand; PAM type: NNGRRT; PAM sequence: TTGAGT
tgggtttgttgattctgaaa

SEQ ID NO: 32813 - DNA, 20 bp, Artificial Sequence
  Description of Artificial Sequence: Synthetic oligonucleotide
  Target: LAMA2; (+) strand; PAM type: NNGRRT; PAM sequence: ATGAAT
agtggctgatactcctttaa

SEQ ID NO: 32814 - DNA, 20 bp, Artificial Sequence
  Description of Artificial Sequence: Synthetic oligonucleotide
  Target: LAMA2; (+) strand; PAM type: NNGRRT; PAM sequence: CTGGAT
ttaaatgaatgacctactta

SEQ ID NO: 32815 - DNA, 20 bp, Artificial Sequence
  Description of Artificial Sequence: Synthetic oligonucleotide
  Target: LAMA2; (+) strand; PAM type: NNGRRT; PAM sequence: TGGGAT
aaatccaatagatataataa

SEQ ID NO: 32816 - DNA, 20 bp, Artificial Sequence
  Description of Artificial Sequence: Synthetic oligonucleotide
  Target: LAMA2; (+) strand; PAM type: NNGRRT; PAM sequence: TTGAGT
aatgggatactcaataatgt

SEQ ID NO: 32817 - DNA, 20 bp, Artificial Sequence
  Description of Artificial Sequence: Synthetic oligonucleotide
  Target: LAMA2; (+) strand; PAM type: NNGRRT; PAM sequence: AAGGAT
ttttctttagatgtcttact

SEQ ID NO: 32818 - DNA, 20 bp, Artificial Sequence
  Description of Artificial Sequence: Synthetic oligonucleotide
  Target: LAMA2; (+) strand; PAM type: NNGRRT; PAM sequence: AAGGAT
gatagagccaaacattctaa

SEQ ID NO: 32819 - DNA, 20 bp, Artificial Sequence
  Description of Artificial Sequence: Synthetic oligonucleotide
  Target: LAMA2; (+) strand; PAM type: NNGRRT; PAM sequence: TTGAAT
caaacattctaaaaggatgt

SEQ ID NO: 32820 - DNA, 20 bp, Artificial Sequence
  Description of Artificial Sequence: Synthetic oligonucleotide
  Target: LAMA2; (+) strand; PAM type: NNGRRT; PAM sequence: AAGAGT
agaaatttctttcctcttac

SEQ ID NO: 32821 - DNA, 20 bp, Artificial Sequence
  Description of Artificial Sequence: Synthetic oligonucleotide
  Target: LAMA2; (+) strand; PAM type: NNGRRT; PAM sequence: GTGAAT
ctgtcaacagtttgggctaa

SEQ ID NO: 32822 - DNA, 20 bp, Artificial Sequence
  Description of Artificial Sequence: Synthetic oligonucleotide
  Target: LAMA2; (+) strand; PAM type: NNGRRT; PAM sequence: GAGAGT
aagtgaatgtttcagtttct

SEQ ID NO: 32823 - DNA, 20 bp, Artificial Sequence
  Description of Artificial Sequence: Synthetic oligonucleotide
  Target: LAMA2; (+) strand; PAM type: NNGRRT; PAM sequence: AAGAGT
aaacagaaagcaggtaatcc

SEQ ID NO: 32824 - DNA, 20 bp, Artificial Sequence
  Description of Artificial Sequence: Synthetic oligonucleotide
  Target: LAMA2; (+) strand; PAM type: NNGRRT; PAM sequence: ATGAAT
aatccaagagtattttctat

SEQ ID NO: 32825 - DNA, 20 bp, Artificial Sequence
  Description of Artificial Sequence: Synthetic oligonucleotide
  Target: LAMA2; (+) strand; PAM type: NNGRRT; PAM sequence: CAGAGT
tccacttcatgctgctgtga

SEQ ID NO: 32826 - DNA, 20 bp, Artificial Sequence
  Description of Artificial Sequence: Synthetic oligonucleotide
  Target: LAMA2; (+) strand; PAM type: NNGRRT; PAM sequence: CTGGGT
ctgtgacagagtattacaga

SEQ ID NO: 32827 - DNA, 20 bp, Artificial Sequence
  Description of Artificial Sequence: Synthetic oligonucleotide
  Target: LAMA2; (+) strand; PAM type: NNGRRT; PAM sequence: TTGAAT
tatgcttccaagatggcact

SEQ ID NO: 32828 - DNA, 20 bp, Artificial Sequence
  Description of Artificial Sequence: Synthetic oligonucleotide
  Target: LAMA2; (+) strand; PAM type: NNGRRT; PAM sequence: GAGGAT
cctcccaacactgttgcact

SEQ ID NO: 32829 - DNA, 20 bp, Artificial Sequence
  Description of Artificial Sequence: Synthetic oligonucleotide
  Target: LAMA2; (+) strand; PAM type: NNGRRT; PAM sequence: ATGAAT
gaggattaaatttcaagcaa

SEQ ID NO: 32830 - DNA, 20 bp, Artificial Sequence
  Description of Artificial Sequence: Synthetic oligonucleotide
  Target: LAMA2; (+) strand; PAM type: NNGRRT; PAM sequence: TAGGAT
aagccatagcagttactctg

SEQ ID NO: 32831 - DNA, 20 bp, Artificial Sequence
  Description of Artificial Sequence: Synthetic oligonucleotide
  Target: LAMA2; (+) strand; PAM type: NNGRRT; PAM sequence: TTGGGT
taggattaattgccggcata

SEQ ID NO: 32832 - DNA, 20 bp, Artificial Sequence
  Description of Artificial Sequence: Synthetic oligonucleotide
  Target: LAMA2; (+) strand; PAM type: NNGRRT; PAM sequence: AAGAAT
taacaacatcattttgcttc

SEQ ID NO: 32833 - DNA, 20 bp, Artificial Sequence
  Description of Artificial Sequence: Synthetic oligonucleotide
  Target: LAMA2; (+) strand; PAM type: NNGRRT; PAM sequence: TGGAGT
aatggcttctctcttagact

SEQ ID NO: 32834 - DNA, 20 bp, Artificial Sequence
  Description of Artificial Sequence: Synthetic oligonucleotide
  Target: LAMA2; (+) strand; PAM type: NNGRRT; PAM sequence: TGGAAT
ttttttttttttttttgaga

SEQ ID NO: 32835 - DNA, 20 bp, Artificial Sequence
  Description of Artificial Sequence: Synthetic oligonucleotide
  Target: LAMA2; (+) strand; PAM type: NNGRRT; PAM sequence: TGGAGT
atctcactctgtggccaggc

SEQ ID NO: 32836 - DNA, 20 bp, Artificial Sequence
  Description of Artificial Sequence: Synthetic oligonucleotide
  Target: LAMA2; (+) strand; PAM type: NNGRRT; PAM sequence: CTGAGT
aattctcctgcctcagcctc

SEQ ID NO: 32837 - DNA, 20 bp, Artificial Sequence
  Description of Artificial Sequence: Synthetic oligonucleotide
  Target: LAMA2; (+) strand; PAM type: NNGRRT; PAM sequence: CAGGAT
cagggcttcaccatgttggc

SEQ ID NO: 32838 - DNA, 20 bp, Artificial Sequence
  Description of Artificial Sequence: Synthetic oligonucleotide
  Target: LAMA2; (+) strand; PAM type: NNGRRT; PAM sequence: TGGGAT
gccttggcctcccaaagttc

SEQ ID NO: 32839 - DNA, 20 bp, Artificial Sequence
  Description of Artificial Sequence: Synthetic oligonucleotide
  Target: LAMA2; (+) strand; PAM type: NNGRRT; PAM sequence: TGGAAT
ccttttcaacacactaatca

SEQ ID NO: 32840 - DNA, 20 bp, Artificial Sequence
  Description of Artificial Sequence: Synthetic oligonucleotide
  Target: LAMA2; (+) strand; PAM type: NNGRRT; PAM sequence: TTGAGT
gatcacatattacatttata

SEQ ID NO: 32841 - DNA, 20 bp, Artificial Sequence
  Description of Artificial Sequence: Synthetic oligonucleotide
  Target: LAMA2; (+) strand; PAM type: NNGRRT; PAM sequence: AGGGAT
tcttctctaaataataactg

SEQ ID NO: 32842 - DNA, 20 bp, Artificial Sequence
  Description of Artificial Sequence: Synthetic oligonucleotide
  Target: LAMA2; (+) strand; PAM type: NNGRRT; PAM sequence: TGGAGT
tgttttgttttgttttgaca

SEQ ID NO: 32843 - DNA, 20 bp, Artificial Sequence
  Description of Artificial Sequence: Synthetic oligonucleotide
  Target: LAMA2; (+) strand; PAM type: NNGRRT; PAM sequence: TGGAGT
tctcactttgtcacccaggc

SEQ ID NO: 32844 - DNA, 20 bp, Artificial Sequence
  Description of Artificial Sequence: Synthetic oligonucleotide
  Target: LAMA2; (+) strand; PAM type: NNGRRT; PAM sequence: TTGGGT
ctcactgcaacctctgcctc

SEQ ID NO: 32845 - DNA, 20 bp, Artificial Sequence
  Description of Artificial Sequence: Synthetic oligonucleotide
  Target: LAMA2; (+) strand; PAM type: NNGRRT; PAM sequence: CTGAGT
aattctcctgactcagcctc

SEQ ID NO: 32846 - DNA, 20 bp, Artificial Sequence
  Description of Artificial Sequence: Synthetic oligonucleotide
  Target: LAMA2; (+) strand; PAM type: NNGRRT; PAM sequence: CAGGGT
ttttgtatttttagtagaga

SEQ ID NO: 32847 - DNA, 20 bp, Artificial Sequence
  Description of Artificial Sequence: Synthetic oligonucleotide
  Target: LAMA2; (+) strand; PAM type: NNGRRT; PAM sequence: CAGGAT
cagggtttcaccatgttggc

SEQ ID NO: 32848 - DNA, 20 bp, Artificial Sequence
  Description of Artificial Sequence: Synthetic oligonucleotide
  Target: LAMA2; (+) strand; PAM type: NNGRRT; PAM sequence: CTGGAT
accatgttggccaggatggt

SEQ ID NO: 32849 - DNA, 20 bp, Artificial Sequence
  Description of Artificial Sequence: Synthetic oligonucleotide
  Target: LAMA2; (+) strand; PAM type: NNGRRT; PAM sequence: TGGGAT
atctcagcctcccaaagtgc

SEQ ID NO: 32850 - DNA, 20 bp, Artificial Sequence
  Description of Artificial Sequence: Synthetic oligonucleotide
  Target: LAMA2; (+) strand; PAM type: NNGRRT; PAM sequence: AGGAAT
ttaaacaaaactgatttatt

SEQ ID NO: 32851 - DNA, 20 bp, Artificial Sequence
  Description of Artificial Sequence: Synthetic oligonucleotide
  Target: LAMA2; (+) strand; PAM type: NNGRRT; PAM sequence: CAGAAT
actactaattcagccccatt

SEQ ID NO: 32852 - DNA, 20 bp, Artificial Sequence
  Description of Artificial Sequence: Synthetic oligonucleotide
  Target: LAMA2; (+) strand; PAM type: NNGRRT; PAM sequence: TTGGAT
taattcagccccattcagaa

SEQ ID NO: 32853 - DNA, 20 bp, Artificial Sequence
  Description of Artificial Sequence: Synthetic oligonucleotide
  Target: LAMA2; (+) strand; PAM type: NNGRRT; PAM sequence: AGGGAT
attggatatgattgtctgcc

SEQ ID NO: 32854 - DNA, 20 bp, Artificial Sequence
  Description of Artificial Sequence: Synthetic oligonucleotide
  Target: LAMA2; (+) strand; PAM type: NNGRRT; PAM sequence: ATGAAT
tatgctattcagttctactc

SEQ ID NO: 32855 - DNA, 20 bp, Artificial Sequence
  Description of Artificial Sequence: Synthetic oligonucleotide
  Target: LAMA2; (+) strand; PAM type: NNGRRT; PAM sequence: TTGGAT
ctctttttatctctaatccc

SEQ ID NO: 32856 - DNA, 20 bp, Artificial Sequence
  Description of Artificial Sequence: Synthetic oligonucleotide
  Target: LAMA2; (+) strand; PAM type: NNGRRT; PAM sequence: CTGAGT
tctgaggaccatagttggcc

SEQ ID NO: 32857 - DNA, 20 bp, Artificial Sequence
  Description of Artificial Sequence: Synthetic oligonucleotide
  Target: LAMA2; (+) strand; PAM type: NNGRRT; PAM sequence: AAGAAT
cccacctttttggggaaggc

SEQ ID NO: 32858 - DNA, 20 bp, Artificial Sequence
  Description of Artificial Sequence: Synthetic oligonucleotide
  Target: LAMA2; (+) strand; PAM type: NNGRRT; PAM sequence: TGGAAT
ggtttaagcagtaggcttcc

SEQ ID NO: 32859 - DNA, 20 bp, Artificial Sequence
  Description of Artificial Sequence: Synthetic oligonucleotide
  Target: LAMA2; (+) strand; PAM type: NNGRRT; PAM sequence: CTGGGT
cctccagcagtcaccctcct

SEQ ID NO: 32860 - DNA, 20 bp, Artificial Sequence
  Description of Artificial Sequence: Synthetic oligonucleotide
  Target: LAMA2; (+) strand; PAM type: NNGRRT; PAM sequence: ATGAAT
ccagaaggtctcaaatctat

SEQ ID NO: 32861 - DNA, 20 bp, Artificial Sequence
  Description of Artificial Sequence: Synthetic oligonucleotide
  Target: LAMA2; (+) strand; PAM type: NNGRRT; PAM sequence: TTGAAT
tccctctttagccttctctt

SEQ ID NO: 32862 - DNA, 20 bp, Artificial Sequence
  Description of Artificial Sequence: Synthetic oligonucleotide
  Target: LAMA2; (+) strand; PAM type: NNGRRT; PAM sequence: GGGAGT
ggtttctaggctatcttgtt

SEQ ID NO: 32863 - DNA, 20 bp, Artificial Sequence
  Description of Artificial Sequence: Synthetic oligonucleotide
  Target: LAMA2; (+) strand; PAM type: NNGRRT; PAM sequence: ATGAGT
cttccaaatgtgcaaattac

SEQ ID NO: 32864 - DNA, 20 bp, Artificial Sequence
  Description of Artificial Sequence: Synthetic oligonucleotide
  Target: LAMA2; (+) strand; PAM type: NNGRRT; PAM sequence: CTGAGT
aacaaagttacagattctct

SEQ ID NO: 32865 - DNA, 20 bp, Artificial Sequence
  Description of Artificial Sequence: Synthetic oligonucleotide
  Target: LAMA2; (+) strand; PAM type: NNGRRT; PAM sequence: CTGAGT
tttattctgaaatgtatgtt

SEQ ID NO: 32866 - DNA, 20 bp, Artificial Sequence
  Description of Artificial Sequence: Synthetic oligonucleotide
  Target: LAMA2; (+) strand; PAM type: NNGRRT; PAM sequence: TAGAAT
tctgaaatgtatgttctgag

SEQ ID NO: 32867 - DNA, 20 bp, Artificial Sequence
  Description of Artificial Sequence: Synthetic oligonucleotide
  Target: LAMA2; (+) strand; PAM type: NNGRRT; PAM sequence: AAGAGT
atttgtcctctttcaactgt

SEQ ID NO: 32868 - DNA, 20 bp, Artificial Sequence
  Description of Artificial Sequence: Synthetic oligonucleotide
  Target: LAMA2; (+) strand; PAM type: NNGRRT; PAM sequence: GAGGGT
tttcaactgtaagagtatag

SEQ ID NO: 32869 - DNA, 20 bp, Artificial Sequence
  Description of Artificial Sequence: Synthetic oligonucleotide
  Target: LAMA2; (+) strand; PAM type: NNGRRT; PAM sequence: ATGAGT
gctcttctgtgccctcatta

SEQ ID NO: 32870 - DNA, 20 bp, Artificial Sequence
  Description of Artificial Sequence: Synthetic oligonucleotide
  Target: LAMA2; (+) strand; PAM type: NNGRRT; PAM sequence: ATGGGT
gagtataatggtgtctgcat

SEQ ID NO: 32871 - DNA, 20 bp, Artificial Sequence
  Description of Artificial Sequence: Synthetic oligonucleotide
  Target: LAMA2; (+) strand; PAM type: NNGRRT; PAM sequence: TAGAAT
gaggttaatctgaaaatgta

SEQ ID NO: 32872 - DNA, 20 bp, Artificial Sequence
  Description of Artificial Sequence: Synthetic oligonucleotide
  Target: LAMA2; (+) strand; PAM type: NNGRRT; PAM sequence: AAGAGT
tcttaccttacaaaattctg

SEQ ID NO: 32873 - DNA, 20 bp, Artificial Sequence
  Description of Artificial Sequence: Synthetic oligonucleotide
  Target: LAMA2; (+) strand; PAM type: NNGRRT; PAM sequence: AAGAAT
actttcagatccagtgattt

SEQ ID NO: 32874 - DNA, 20 bp, Artificial Sequence
  Description of Artificial Sequence: Synthetic oligonucleotide
  Target: LAMA2; (+) strand; PAM type: NNGRRT; PAM sequence: GAGAAT
agtgatttaagaatgctaat

SEQ ID NO: 32875 - DNA, 20 bp, Artificial Sequence
  Description of Artificial Sequence: Synthetic oligonucleotide
  Target: LAMA2; (+) strand; PAM type: NNGRRT; PAM sequence: TTGAAT
ggaaactcttctaacttgtg

SEQ ID NO: 32876 - DNA, 20 bp, Artificial Sequence
  Description of Artificial Sequence: Synthetic oligonucleotide
  Target: LAMA2; (+) strand; PAM type: NNGRRT; PAM sequence: GGGGAT
ctatttgactttgcatgcat

SEQ ID NO: 32877 - DNA, 20 bp, Artificial Sequence
  Description of Artificial Sequence: Synthetic oligonucleotide
  Target: LAMA2; (+) strand; PAM type: NNGRRT; PAM sequence: ATGAAT
atgcatggggattttccaaa

SEQ ID NO: 32878 - DNA, 20 bp, Artificial Sequence
  Description of Artificial Sequence: Synthetic oligonucleotide
  Target: LAMA2; (+) strand; PAM type: NNGRRT; PAM sequence: TTGGGT
cataagtcaatatttgccat

SEQ ID NO: 32879 - DNA, 20 bp, Artificial Sequence
  Description of Artificial Sequence: Synthetic oligonucleotide
  Target: LAMA2; (+) strand; PAM type: NNGRRT; PAM sequence: AGGAAT
caatatttgccatttgggta

SEQ ID NO: 32880 - DNA, 20 bp, Artificial Sequence
  Description of Artificial Sequence: Synthetic oligonucleotide
  Target: LAMA2; (+) strand; PAM type: NNGRRT; PAM sequence: CTGGGT
tgccatttgggtaaggaatt

SEQ ID NO: 32881 - DNA, 20 bp, Artificial Sequence
  Description of Artificial Sequence: Synthetic oligonucleotide
  Target: LAMA2; (+) strand; PAM type: NNGRRT; PAM sequence: ATGGAT
tgtccttggtgaaaataata

SEQ ID NO: 32882 - DNA, 20 bp, Artificial Sequence
  Description of Artificial Sequence: Synthetic oligonucleotide
  Target: LAMA2; (+) strand; PAM type: NNGRRT; PAM sequence: CTGAAT
ggtgaaaataataatggatt

SEQ ID NO: 32883 - DNA, 20 bp, Artificial Sequence
  Description of Artificial Sequence: Synthetic oligonucleotide
  Target: LAMA2; (+) strand; PAM type: NNGRRT; PAM sequence: CAGAGT
tttatctttaccacaagtat

SEQ ID NO: 32884 - DNA, 20 bp, Artificial Sequence
  Description of Artificial Sequence: Synthetic oligonucleotide
  Target: LAMA2; (+) strand; PAM type: NNGRRT; PAM sequence: TTGAAT
gtctcaaaattagacttaat

SEQ ID NO: 32885 - DNA, 20 bp, Artificial Sequence
  Description of Artificial Sequence: Synthetic oligonucleotide
  Target: LAMA2; (+) strand; PAM type: NNGRRT; PAM sequence: AAGGAT
actttttttttttttgcttt

SEQ ID NO: 32886 - DNA, 20 bp, Artificial Sequence
  Description of Artificial Sequence: Synthetic oligonucleotide
  Target: LAMA2; (+) strand; PAM type: NNGRRT; PAM sequence: TGGGAT
aaggcaaagtcagcttcctc

SEQ ID NO: 32887 - DNA, 20 bp, Artificial Sequence
  Description of Artificial Sequence: Synthetic oligonucleotide
  Target: LAMA2; (+) strand; PAM type: NNGRRT; PAM sequence: TTGGAT
agtcagcttcctctgggatg

SEQ ID NO: 32888 - DNA, 20 bp, Artificial Sequence
  Description of Artificial Sequence: Synthetic oligonucleotide
  Target: LAMA2; (+) strand; PAM type: NNGRRT; PAM sequence: TGGAGT
ttcctctgggatgttggatc

SEQ ID NO: 32889 - DNA, 20 bp, Artificial Sequence
  Description of Artificial Sequence: Synthetic oligonucleotide
  Target: LAMA2; (+) strand; PAM type: NNGRRT; PAM sequence: TAGAGT
tggatctggagttggacgtg

SEQ ID NO: 32890 - DNA, 20 bp, Artificial Sequence
  Description of Artificial Sequence: Synthetic oligonucleotide
  Target: LAMA2; (+) strand; PAM type: NNGRRT; PAM sequence: TAGAAT
agattaagataattaaatga

SEQ ID NO: 32891 - DNA, 20 bp, Artificial Sequence
  Description of Artificial Sequence: Synthetic oligonucleotide
  Target: LAMA2; (+) strand; PAM type: NNGRRT; PAM sequence: ATGAAT
atgcatgtaaacacatgtgt

SEQ ID NO: 32892 - DNA, 20 bp, Artificial Sequence
  Description of Artificial Sequence: Synthetic oligonucleotide
  Target: LAMA2; (+) strand; PAM type: NNGRRT; PAM sequence: GGGAGT
tatgaattttatacatgtct

SEQ ID NO: 32893 - DNA, 20 bp, Artificial Sequence
  Description of Artificial Sequence: Synthetic oligonucleotide
  Target: LAMA2; (+) strand; PAM type: NNGRRT; PAM sequence: GTGGGT
aattttatacatgtctggga

SEQ ID NO: 32894 - DNA, 20 bp, Artificial Sequence
  Description of Artificial Sequence: Synthetic oligonucleotide
  Target: LAMA2; (+) strand; PAM type: NNGRRT; PAM sequence: AGGAAT
cccttcatcttgtgtctggt

SEQ ID NO: 32895 - DNA, 20 bp, Artificial Sequence
  Description of Artificial Sequence: Synthetic oligonucleotide
  Target: LAMA2; (+) strand; PAM type: NNGRRT; PAM sequence: GGGGGT
cttgtgtctggtaggaattt

SEQ ID NO: 32896 - DNA, 20 bp, Artificial Sequence
  Description of Artificial Sequence: Synthetic oligonucleotide
  Target: LAMA2; (+) strand; PAM type: NNGRRT; PAM sequence: CTGGGT
gaactggttaattgttgact

SEQ ID NO: 32897 - DNA, 20 bp, Artificial Sequence
  Description of Artificial Sequence: Synthetic oligonucleotide
  Target: LAMA2; (+) strand; PAM type: NNGRRT; PAM sequence: TAGAGT
tgttgactctgggtgataca

SEQ ID NO: 32898 - DNA, 20 bp, Artificial Sequence
  Description of Artificial Sequence: Synthetic oligonucleotide
  Target: LAMA2; (+) strand; PAM type: NNGRRT; PAM sequence: GAGGAT
tacttgggaggctgaggcag

SEQ ID NO: 32899 - DNA, 20 bp, Artificial Sequence
  Description of Artificial Sequence: Synthetic oligonucleotide
  Target: LAMA2; (+) strand; PAM type: NNGRRT; PAM sequence: AGGAAT
caggaggatcacttcagccc

SEQ ID NO: 32900 - DNA, 20 bp, Artificial Sequence
  Description of Artificial Sequence: Synthetic oligonucleotide
  Target: LAMA2; (+) strand; PAM type: NNGRRT; PAM sequence: GTGAAT
ggtccatgatgatcatgcct

SEQ ID NO: 32901 - DNA, 20 bp, Artificial Sequence
  Description of Artificial Sequence: Synthetic oligonucleotide
  Target: LAMA2; (+) strand; PAM type: NNGRRT; PAM sequence: GAGAGT
gtgtgtgtgcatgtgtgaga

SEQ ID NO: 32902 - DNA, 20 bp, Artificial Sequence
  Description of Artificial Sequence: Synthetic oligonucleotide
  Target: LAMA2; (+) strand; PAM type: NNGRRT; PAM sequence: CAGAGT
gcatgtgtgagagagagtga

SEQ ID NO: 32903 - DNA, 20 bp, Artificial Sequence
  Description of Artificial Sequence: Synthetic oligonucleotide
  Target: LAMA2; (+) strand; PAM type: NNGRRT; PAM sequence: GGGAAT
tgcgtgtttggtggtgttga

SEQ ID NO: 32904 - DNA, 20 bp, Artificial Sequence
  Description of Artificial Sequence: Synthetic oligonucleotide
  Target: LAMA2; (+) strand; PAM type: NNGRRT; PAM sequence: CCGGGT
tgagggaattaagtacttaa

SEQ ID NO: 32905 - DNA, 20 bp, Artificial Sequence
  Description of Artificial Sequence: Synthetic oligonucleotide
  Target: LAMA2; (+) strand; PAM type: NNGRRT; PAM sequence: TTGAAT
agctttcaaaattctgttaa

SEQ ID NO: 32906 - DNA, 20 bp, Artificial Sequence
  Description of Artificial Sequence: Synthetic oligonucleotide
  Target: LAMA2; (+) strand; PAM type: NNGRRT; PAM sequence: AAGGGT
aatttgtacactgaaatctg

SEQ ID NO: 32907 - DNA, 20 bp, Artificial Sequence
  Description of Artificial Sequence: Synthetic oligonucleotide
  Target: LAMA2; (+) strand; PAM type: NNGRRT; PAM sequence: GTGGAT
tgtacactgaaatctgaagg

SEQ ID NO: 32908 - DNA, 20 bp, Artificial Sequence
  Description of Artificial Sequence: Synthetic oligonucleotide
  Target: LAMA2; (+) strand; PAM type: NNGRRT; PAM sequence: TGGGAT
ggaagactacttcaacaaac

SEQ ID NO: 32909 - DNA, 20 bp, Artificial Sequence
  Description of Artificial Sequence: Synthetic oligonucleotide
  Target: LAMA2; (+) strand; PAM type: NNGRRT; PAM sequence: AAGAAT
ctgggatccaagatattata

SEQ ID NO: 32910 - DNA, 20 bp, Artificial Sequence
  Description of Artificial Sequence: Synthetic oligonucleotide
  Target: LAMA2; (+) strand; PAM type: NNGRRT; PAM sequence: AAGGGT
tcatgcagcttatgatatga

SEQ ID NO: 32911 - DNA, 20 bp, Artificial Sequence
  Description of Artificial Sequence: Synthetic oligonucleotide
  Target: LAMA2; (+) strand; PAM type: NNGRRT; PAM sequence: TGGGGT
atatgaaagggtggctcatt

SEQ ID NO: 32912 - DNA, 20 bp, Artificial Sequence
  Description of Artificial Sequence: Synthetic oligonucleotide
  Target: LAMA2; (+) strand; PAM type: NNGRRT; PAM sequence: CTGAAT
gctcatttggggtccactag

SEQ ID NO: 32913 - DNA, 20 bp, Artificial Sequence
  Description of Artificial Sequence: Synthetic oligonucleotide
  Target: LAMA2; (+) strand; PAM type: NNGRRT; PAM sequence: CTGAAT
gaattaaattagacaaaatg

SEQ ID NO: 32914 - DNA, 20 bp, Artificial Sequence
  Description of Artificial Sequence: Synthetic oligonucleotide
  Target: LAMA2; (+) strand; PAM type: NNGRRT; PAM sequence: CAGAAT
ttcatgtcaatgaacacaca

SEQ ID NO: 32915 - DNA, 20 bp, Artificial Sequence
  Description of Artificial Sequence: Synthetic oligonucleotide
  Target: LAMA2; (+) strand; PAM type: NNGRRT; PAM sequence: CTGAGT
tgttgagccaagatcagact

SEQ ID NO: 32916 - DNA, 20 bp, Artificial Sequence
  Description of Artificial Sequence: Synthetic oligonucleotide
  Target: LAMA2; (+) strand; PAM type: NNGRRT; PAM sequence: ATGAAT
gagtattgattcgagatcta

SEQ ID NO: 32917 - DNA, 20 bp, Artificial Sequence
  Description of Artificial Sequence: Synthetic oligonucleotide
  Target: LAMA2; (+) strand; PAM type: NNGRRT; PAM sequence: TGGAAT
gattcgagatctaatgaatt

SEQ ID NO: 32918 - DNA, 20 bp, Artificial Sequence
  Description of Artificial Sequence: Synthetic oligonucleotide
  Target: LAMA2; (+) strand; PAM type: NNGRRT; PAM sequence: TGGAAT
cattttatatcttttaaatc

SEQ ID NO: 32919 - DNA, 20 bp, Artificial Sequence
  Description of Artificial Sequence: Synthetic oligonucleotide
  Target: LAMA2; (+) strand; PAM type: NNGRRT; PAM sequence: CTGGAT
gaactatttctgtgagagcc

SEQ ID NO: 32920 - DNA, 20 bp, Artificial Sequence
  Description of Artificial Sequence: Synthetic oligonucleotide
  Target: LAMA2; (+) strand; PAM type: NNGRRT; PAM sequence: CAGGGT
acaccattcgacgtctcctc

SEQ ID NO: 32921 - DNA, 20 bp, Artificial Sequence
  Description of Artificial Sequence: Synthetic oligonucleotide
  Target: LAMA2; (+) strand; PAM type: NNGRRT; PAM sequence: GTGGAT
cagggtacacgattctagat

SEQ ID NO: 32922 - DNA, 20 bp, Artificial Sequence
  Description of Artificial Sequence: Synthetic oligonucleotide
  Target: LAMA2; (+) strand; PAM type: NNGRRT; PAM sequence: ATGAAT
taacttgcatttatgaaaac

SEQ ID NO: 32923 - DNA, 20 bp, Artificial Sequence
  Description of Artificial Sequence: Synthetic oligonucleotide
  Target: LAMA2; (+) strand; PAM type: NNGRRT; PAM sequence: TTGAGT
tatgaaaacatgaatttact

SEQ ID NO: 32924 - DNA, 20 bp, Artificial Sequence
  Description of Artificial Sequence: Synthetic oligonucleotide
  Target: LAMA2; (+) strand; PAM type: NNGRRT; PAM sequence: AAGAAT
aacatgaatttactttgagt

SEQ ID NO: 32925 - DNA, 20 bp, Artificial Sequence
  Description of Artificial Sequence: Synthetic oligonucleotide
  Target: LAMA2; (+) strand; PAM type: NNGRRT; PAM sequence: CTGAAT
ttttaagtatacctcatctt

SEQ ID NO: 32926 - DNA, 20 bp, Artificial Sequence
  Description of Artificial Sequence: Synthetic oligonucleotide
  Target: LAMA2; (+) strand; PAM type: NNGRRT; PAM sequence: ATGAAT
cacatctaattaaaagattt

SEQ ID NO: 32927 - DNA, 20 bp, Artificial Sequence
  Description of Artificial Sequence: Synthetic oligonucleotide
  Target: LAMA2; (+) strand; PAM type: NNGRRT; PAM sequence: TAGGAT
tcaagttgctcttattctta

SEQ ID NO: 32928 - DNA, 20 bp, Artificial Sequence
  Description of Artificial Sequence: Synthetic oligonucleotide
  Target: LAMA2; (+) strand; PAM type: NNGRRT; PAM sequence: CAGAAT
tccttgcgcatttcaaattg

SEQ ID NO: 32929 - DNA, 20 bp, Artificial Sequence
  Description of Artificial Sequence: Synthetic oligonucleotide
  Target: LAMA2; (+) strand; PAM type: NNGRRT; PAM sequence: TGGAAT
agaagcttgtgttgattaaa

SEQ ID NO: 32930 - DNA, 20 bp, Artificial Sequence
  Description of Artificial Sequence: Synthetic oligonucleotide
  Target: LAMA2; (+) strand; PAM type: NNGRRT; PAM sequence: ATGGGT
ttaggtgttgggaaaccact

SEQ ID NO: 32931 - DNA, 20 bp, Artificial Sequence
  Description of Artificial Sequence: Synthetic oligonucleotide
  Target: LAMA2; (+) strand; PAM type: NNGRRT; PAM sequence: ATGGAT
caggagcacaaccaaatata

SEQ ID NO: 32932 - DNA, 20 bp, Artificial Sequence
  Description of Artificial Sequence: Synthetic oligonucleotide
  Target: LAMA2; (+) strand; PAM type: NNGRRT; PAM sequence: CAGAAT
atggataatcctgggcttgt

SEQ ID NO: 32933 - DNA, 20 bp, Artificial Sequence
  Description of Artificial Sequence: Synthetic oligonucleotide
  Target: LAMA2; (+) strand; PAM type: NNGRRT; PAM sequence: CTGAGT
ctgggcttgtcagaatcatc

SEQ ID NO: 32934 - DNA, 20 bp, Artificial Sequence
  Description of Artificial Sequence: Synthetic oligonucleotide
  Target: LAMA2; (+) strand; PAM type: NNGRRT; PAM sequence: CAGGGT
agtcagaaaatgtgaaaagc

SEQ ID NO: 32935 - DNA, 20 bp, Artificial Sequence
  Description of Artificial Sequence: Synthetic oligonucleotide
  Target: LAMA2; (+) strand; PAM type: NNGRRT; PAM sequence: TAGAAT
atgaggactcaaccttcata

SEQ ID NO: 32936 - DNA, 20 bp, Artificial Sequence
  Description of Artificial Sequence: Synthetic oligonucleotide
  Target: LAMA2; (+) strand; PAM type: NNGRRT; PAM sequence: TTGAGT
atgaggttattttatttact

SEQ ID NO: 32937 - DNA, 20 bp, Artificial Sequence
  Description of Artificial Sequence: Synthetic oligonucleotide
  Target: LAMA2; (+) strand; PAM type: NNGRRT; PAM sequence: GAGAAT
gagatgtgactctaaagtat

SEQ ID NO: 32938 - DNA, 20 bp, Artificial Sequence
  Description of Artificial Sequence: Synthetic oligonucleotide
  Target: LAMA2; (+) strand; PAM type: NNGRRT; PAM sequence: AGGGAT
cttcacagatagataaatat

SEQ ID NO: 32939 - DNA, 20 bp, Artificial Sequence
  Description of Artificial Sequence: Synthetic oligonucleotide
  Target: LAMA2; (+) strand; PAM type: NNGRRT; PAM sequence: ATGAAT
cacacagtagtacaaaagcc

SEQ ID NO: 32940 - DNA, 20 bp, Artificial Sequence
  Description of Artificial Sequence: Synthetic oligonucleotide
  Target: LAMA2; (+) strand; PAM type: NNGRRT; PAM sequence: TTGGAT
attttgaaatcaaatccagg

SEQ ID NO: 32941 - DNA, 20 bp, Artificial Sequence
  Description of Artificial Sequence: Synthetic oligonucleotide
  Target: LAMA2; (+) strand; PAM type: NNGRRT; PAM sequence: AAGAAT
tttggttatctcaactagaa

SEQ ID NO: 32942 - DNA, 20 bp, Artificial Sequence
  Description of Artificial Sequence: Synthetic oligonucleotide
  Target: LAMA2; (+) strand; PAM type: NNGRRT; PAM sequence: TAGGAT
tctaccttgcttgcatattg

SEQ ID NO: 32943 - DNA, 20 bp, Artificial Sequence
  Description of Artificial Sequence: Synthetic oligonucleotide
  Target: LAMA2; (+) strand; PAM type: NNGRRT; PAM sequence: ATGAAT
taatgttctcagtaatttac

SEQ ID NO: 32944 - DNA, 20 bp, Artificial Sequence
  Description of Artificial Sequence: Synthetic oligonucleotide
  Target: LAMA2; (+) strand; PAM type: NNGRRT; PAM sequence: CTGGGT
ataagaaaaataccatgaaa

SEQ ID NO: 32945 - DNA, 20 bp, Artificial Sequence
  Description of Artificial Sequence: Synthetic oligonucleotide
  Target: LAMA2; (+) strand; PAM type: NNGRRT; PAM sequence: AAGAGT
tgctgttctcacatagtaga

SEQ ID NO: 32946 - DNA, 20 bp, Artificial Sequence
  Description of Artificial Sequence: Synthetic oligonucleotide
  Target: LAMA2; (+) strand; PAM type: NNGRRT; PAM sequence: GCGGGT
ctgctaataccatcactttg

SEQ ID NO: 32947 - DNA, 20 bp, Artificial Sequence
  Description of Artificial Sequence: Synthetic oligonucleotide
  Target: LAMA2; (+) strand; PAM type: NNGRRT; PAM sequence: TAGGAT
aataccatcactttggcggg

SEQ ID NO: 32948 - DNA, 20 bp, Artificial Sequence
  Description of Artificial Sequence: Synthetic oligonucleotide
  Target: LAMA2; (+) strand; PAM type: NNGRRT; PAM sequence: AAGAAT
ggcgggtaggattttaacat

SEQ ID NO: 32949 - DNA, 20 bp, Artificial Sequence
  Description of Artificial Sequence: Synthetic oligonucleotide
  Target: LAMA2; (+) strand; PAM type: NNGRRT; PAM sequence: AGGAAT
atattctcattctgtagtta

SEQ ID NO: 32950 - DNA, 20 bp, Artificial Sequence
  Description of Artificial Sequence: Synthetic oligonucleotide
  Target: LAMA2; (+) strand; PAM type: NNGRRT; PAM sequence: TGGGAT
cacacagtaattagcagagc

SEQ ID NO: 32951 - DNA, 20 bp, Artificial Sequence
  Description of Artificial Sequence: Synthetic oligonucleotide
  Target: LAMA2; (+) strand; PAM type: NNGRRT; PAM sequence: ATGAAT
catcttgcttcactgccaca

SEQ ID NO: 32952 - DNA, 20 bp, Artificial Sequence
  Description of Artificial Sequence: Synthetic oligonucleotide
  Target: LAMA2; (+) strand; PAM type: NNGRRT; PAM sequence: TAGAGT
tagtgagacacacactacca

SEQ ID NO: 32953 - DNA, 20 bp, Artificial Sequence
  Description of Artificial Sequence: Synthetic oligonucleotide
  Target: LAMA2; (+) strand; PAM type: NNGRRT; PAM sequence: AAGAAT
cttaggaaatcattttggcc

SEQ ID NO: 32954 - DNA, 20 bp, Artificial Sequence
  Description of Artificial Sequence: Synthetic oligonucleotide
  Target: LAMA2; (+) strand; PAM type: NNGRRT; PAM sequence: CAGAAT
tttcaagactactgccacac

SEQ ID NO: 32955 - DNA, 20 bp, Artificial Sequence
  Description of Artificial Sequence: Synthetic oligonucleotide
  Target: LAMA2; (+) strand; PAM type: NNGRRT; PAM sequence: GAGAAT
aactaaatgaacttgctcat

SEQ ID NO: 32956 - DNA, 20 bp, Artificial Sequence
  Description of Artificial Sequence: Synthetic oligonucleotide
  Target: LAMA2; (+) strand; PAM type: NNGRRT; PAM sequence: CAGGAT
atctctcaaatatagctttt

SEQ ID NO: 32957 - DNA, 20 bp, Artificial Sequence
  Description of Artificial Sequence: Synthetic oligonucleotide
  Target: LAMA2; (+) strand; PAM type: NNGRRT; PAM sequence: CAGAAT
aagaagaagcaaaaagcaag

SEQ ID NO: 32958 - DNA, 20 bp, Artificial Sequence
  Description of Artificial Sequence: Synthetic oligonucleotide
  Target: LAMA2; (+) strand; PAM type: NNGRRT; PAM sequence: TAGGAT
aagcaagcagaattcacaag

SEQ ID NO: 32959 - DNA, 20 bp, Artificial Sequence
  Description of Artificial Sequence: Synthetic oligonucleotide
  Target: LAMA2; (+) strand; PAM type: NNGRRT; PAM sequence: CAGAGT
ctctagaaaattaagaggtt

SEQ ID NO: 32960 - DNA, 20 bp, Artificial Sequence
  Description of Artificial Sequence: Synthetic oligonucleotide
  Target: LAMA2; (+) strand; PAM type: NNGRRT; PAM sequence: ATGGGT
agtgggaaatgtacatgttg

SEQ ID NO: 32961 - DNA, 20 bp, Artificial Sequence
  Description of Artificial Sequence: Synthetic oligonucleotide
  Target: LAMA2; (+) strand; PAM type: NNGRRT; PAM sequence: ATGAGT
atgtgtgttctaaaaaccaa

SEQ ID NO: 32962 - DNA, 20 bp, Artificial Sequence
  Description of Artificial Sequence: Synthetic oligonucleotide
  Target: LAMA2; (+) strand; PAM type: NNGRRT; PAM sequence: CTGAGT
gcatgtttttcccagataat

SEQ ID NO: 32963 - DNA, 20 bp, Artificial Sequence
  Description of Artificial Sequence: Synthetic oligonucleotide
  Target: LAMA2; (+) strand; PAM type: NNGRRT; PAM sequence: ATGGGT
cccagataatctgagtaaat

SEQ ID NO: 32964 - DNA, 20 bp, Artificial Sequence
  Description of Artificial Sequence: Synthetic oligonucleotide
  Target: LAMA2; (+) strand; PAM type: NNGRRT; PAM sequence: CAGAGT
aatatgggttcactttggca

SEQ ID NO: 32965 - DNA, 20 bp, Artificial Sequence
  Description of Artificial Sequence: Synthetic oligonucleotide
  Target: LAMA2; (+) strand; PAM type: NNGRRT; PAM sequence: CAGAAT
gtttttaaagttgtaggcac

SEQ ID NO: 32966 - DNA, 20 bp, Artificial Sequence
  Description of Artificial Sequence: Synthetic oligonucleotide
  Target: LAMA2; (+) strand; PAM type: NNGRRT; PAM sequence: AAGAAT
gtcatgtgtcactcaatgac

SEQ ID NO: 32967 - DNA, 20 bp, Artificial Sequence
  Description of Artificial Sequence: Synthetic oligonucleotide
  Target: LAMA2; (+) strand; PAM type: NNGRRT; PAM sequence: TGGAAT
agaatacattctgagaaagt

SEQ ID NO: 32968 - DNA, 20 bp, Artificial Sequence
  Description of Artificial Sequence: Synthetic oligonucleotide
  Target: LAMA2; (+) strand; PAM type: NNGRRT; PAM sequence: CTGAAT
ctgtacagcatgttcctcca

SEQ ID NO: 32969 - DNA, 20 bp, Artificial Sequence
  Description of Artificial Sequence: Synthetic oligonucleotide
  Target: LAMA2; (+) strand; PAM type: NNGRRT; PAM sequence: CAGGAT
ttttcctgtgaaaatgacac

SEQ ID NO: 32970 - DNA, 20 bp, Artificial Sequence
  Description of Artificial Sequence: Synthetic oligonucleotide
  Target: LAMA2; (+) strand; PAM type: NNGRRT; PAM sequence: TTGAAT
ctgtgaaaatgacaccagga

SEQ ID NO: 32971 - DNA, 20 bp, Artificial Sequence
  Description of Artificial Sequence: Synthetic oligonucleotide
  Target: LAMA2; (+) strand; PAM type: NNGRRT; PAM sequence: TAGAGT
aatttacagcagcactacca

SEQ ID NO: 32972 - DNA, 20 bp, Artificial Sequence
  Description of Artificial Sequence: Synthetic oligonucleotide
  Target: LAMA2; (+) strand; PAM type: NNGRRT; PAM sequence: AAGAAT
aaattccacattacagacaa

SEQ ID NO: 32973 - DNA, 20 bp, Artificial Sequence
  Description of Artificial Sequence: Synthetic oligonucleotide
  Target: LAMA2; (+) strand; PAM type: NNGRRT; PAM sequence: TAGAAT
ccacattacagacaaaagaa

SEQ ID NO: 32974 - DNA, 20 bp, Artificial Sequence
  Description of Artificial Sequence: Synthetic oligonucleotide
  Target: LAMA2; (+) strand; PAM type: NNGRRT; PAM sequence: GTGGAT
gcaaaaagtaatcagcattc

SEQ ID NO: 32975 - DNA, 20 bp, Artificial Sequence
  Description of Artificial Sequence: Synthetic oligonucleotide
  Target: LAMA2; (+) strand; PAM type: NNGRRT; PAM sequence: AAGGAT
actcatcctgtagtagctct

SEQ ID NO: 32976 - DNA, 20 bp, Artificial Sequence
  Description of Artificial Sequence: Synthetic oligonucleotide
  Target: LAMA2; (+) strand; PAM type: NNGRRT; PAM sequence: ATGAAT
ggacagactatgatgaaaag

SEQ ID NO: 32977 - DNA, 20 bp, Artificial Sequence
  Description of Artificial Sequence: Synthetic oligonucleotide
  Target: LAMA2; (+) strand; PAM type: NNGRRT; PAM sequence: AAGAAT
acatatgccaaaatatcaga

SEQ ID NO: 32978 - DNA, 20 bp, Artificial Sequence
  Description of Artificial Sequence: Synthetic oligonucleotide
  Target: LAMA2; (+) strand; PAM type: NNGRRT; PAM sequence: ATGGAT
atgccaaaatatcagaaaga

SEQ ID NO: 32979 - DNA, 20 bp, Artificial Sequence
  Description of Artificial Sequence: Synthetic oligonucleotide
  Target: LAMA2; (+) strand; PAM type: NNGRRT; PAM sequence: ATGGAT
ttctgctgataataactctc

SEQ ID NO: 32980 - DNA, 20 bp, Artificial Sequence
  Description of Artificial Sequence: Synthetic oligonucleotide
  Target: LAMA2; (+) strand; PAM type: NNGRRT; PAM sequence: TGGAAT
acaacaaacctataggtttg

SEQ ID NO: 32981 - DNA, 20 bp, Artificial Sequence
  Description of Artificial Sequence: Synthetic oligonucleotide
  Target: LAMA2; (+) strand; PAM type: NNGRRT; PAM sequence: AAGGAT
agaaaaagaaggtgactgca

SEQ ID NO: 32982 - DNA, 20 bp, Artificial Sequence
  Description of Artificial Sequence: Synthetic oligonucleotide
  Target: LAMA2; (+) strand; PAM type: NNGRRT; PAM sequence: CAGGGT
agttgagatgagaactctcc

SEQ ID NO: 32983 - DNA, 20 bp, Artificial Sequence
  Description of Artificial Sequence: Synthetic oligonucleotide
  Target: LAMA2; (+) strand; PAM type: NNGRRT; PAM sequence: GTGGAT
gcataatattctattatcat

SEQ ID NO: 32984 - DNA, 20 bp, Artificial Sequence
  Description of Artificial Sequence: Synthetic oligonucleotide
  Target: LAMA2; (+) strand; PAM type: NNGRRT; PAM sequence: AAGGAT
atgatgtggagcaggtttga

SEQ ID NO: 32985 - DNA, 20 bp, Artificial Sequence
  Description of Artificial Sequence: Synthetic oligonucleotide
  Target: LAMA2; (+) strand; PAM type: NNGRRT; PAM sequence: TGGAAT
gaaaggattatactcagagg

SEQ ID NO: 32986 - DNA, 20 bp, Artificial Sequence
  Description of Artificial Sequence: Synthetic oligonucleotide
  Target: LAMA2; (+) strand; PAM type: NNGRRT; PAM sequence: ATGAAT
gtggaattaccacaaaacta

SEQ ID NO: 32987 - DNA, 20 bp, Artificial Sequence
  Description of Artificial Sequence: Synthetic oligonucleotide
  Target: LAMA2; (+) strand; PAM type: NNGRRT; PAM sequence: AGGGGT
tccaatgttctttcatgtcg

SEQ ID NO: 32988 - DNA, 20 bp, Artificial Sequence
  Description of Artificial Sequence: Synthetic oligonucleotide
  Target: LAMA2; (+) strand; PAM type: NNGRRT; PAM sequence: GTGAGT
cgaggggtttttttgtgtct

SEQ ID NO: 32989 - DNA, 20 bp, Artificial Sequence
  Description of Artificial Sequence: Synthetic oligonucleotide
  Target: LAMA2; (+) strand; PAM type: NNGRRT; PAM sequence: ATGAAT
agtttcaggtcttgctgagc

SEQ ID NO: 32990 - DNA, 20 bp, Artificial Sequence
  Description of Artificial Sequence: Synthetic oligonucleotide
  Target: LAMA2; (+) strand; PAM type: NNGRRT; PAM sequence: CAGGAT
agcctaggttttatctctta

SEQ ID NO: 32991 - DNA, 20 bp, Artificial Sequence
  Description of Artificial Sequence: Synthetic oligonucleotide
  Target: LAMA2; (+) strand; PAM type: NNGRRT; PAM sequence: TAGGAT
atttttttttaattgacaca

SEQ ID NO: 32992 - DNA, 20 bp, Artificial Sequence
  Description of Artificial Sequence: Synthetic oligonucleotide
  Target: LAMA2; (+) strand; PAM type: NNGRRT; PAM sequence: TGGGAT
gtgcttcaactggaaaccta

SEQ ID NO: 32993 - DNA, 20 bp, Artificial Sequence
  Description of Artificial Sequence: Synthetic oligonucleotide
  Target: LAMA2; (+) strand; PAM type: NNGRRT; PAM sequence: GAGGGT
atgacctcaattataagata

SEQ ID NO: 32994 - DNA, 20 bp, Artificial Sequence
  Description of Artificial Sequence: Synthetic oligonucleotide
  Target: LAMA2; (+) strand; PAM type: NNGRRT; PAM sequence: TAGAAT
ctcaattataagatagaggg

SEQ ID NO: 32995 - DNA, 20 bp, Artificial Sequence
  Description of Artificial Sequence: Synthetic oligonucleotide
  Target: LAMA2; (+) strand; PAM type: NNGRRT; PAM sequence: ATGAAT
attataagatagagggtaga

SEQ ID NO: 32996 - DNA, 20 bp, Artificial Sequence
  Description of Artificial Sequence: Synthetic oligonucleotide
  Target: LAMA2; (+) strand; PAM type: NNGRRT; PAM sequence: AGGAAT
agatagagggtagaatgaat

SEQ ID NO: 32997 - DNA, 20 bp, Artificial Sequence
  Description of Artificial Sequence: Synthetic oligonucleotide
  Target: LAMA2; (+) strand; PAM type: NNGRRT; PAM sequence: GAGAAT
tatcatactaagcatgtgta

SEQ ID NO: 32998 - DNA, 20 bp, Artificial Sequence
  Description of Artificial Sequence: Synthetic oligonucleotide
  Target: LAMA2; (+) strand; PAM type: NNGRRT; PAM sequence: ATGAAT
ataaacacttttatataaaa

SEQ ID NO: 32999 - DNA, 20 bp, Artificial Sequence
  Description of Artificial Sequence: Synthetic oligonucleotide
  Target: LAMA2; (+) strand; PAM type: NNGRRT; PAM sequence: CAGGAT
cttttatataaaaatgaata

SEQ ID NO: 33000 - DNA, 20 bp, Artificial Sequence
  Description of Artificial Sequence: Synthetic oligonucleotide
  Target: LAMA2; (+) strand; PAM type: NNGRRT; PAM sequence: GAGGAT
aaaatatttagctataagta

SEQ ID NO: 33001 - DNA, 20 bp, Artificial Sequence
  Description of Artificial Sequence: Synthetic oligonucleotide
  Target: LAMA2; (+) strand; PAM type: NNGRRT; PAM sequence: AGGAGT
tcaaaaaccattaagtgcta

SEQ ID NO: 33002 - DNA, 20 bp, Artificial Sequence
  Description of Artificial Sequence: Synthetic oligonucleotide
  Target: LAMA2; (+) strand; PAM type: NNGRRT; PAM sequence: AAGGAT
tttgtgttattttccattta

SEQ ID NO: 33003 - DNA, 20 bp, Artificial Sequence
  Description of Artificial Sequence: Synthetic oligonucleotide
  Target: LAMA2; (+) strand; PAM type: NNGRRT; PAM sequence: TAGAGT
catttctttctctacatctc

SEQ ID NO: 33004 - DNA, 20 bp, Artificial Sequence
  Description of Artificial Sequence: Synthetic oligonucleotide
  Target: LAMA2; (+) strand; PAM type: NNGRRT; PAM sequence: GAGGAT
ggacttgtcaacatgaaatt

SEQ ID NO: 33005 - DNA, 20 bp, Artificial Sequence
  Description of Artificial Sequence: Synthetic oligonucleotide
  Target: LAMA2; (+) strand; PAM type: NNGRRT; PAM sequence: TAGGAT
ttctttggtaaacttctaag

SEQ ID NO: 33006 - DNA, 20 bp, Artificial Sequence
  Description of Artificial Sequence: Synthetic oligonucleotide
  Target: LAMA2; (+) strand; PAM type: NNGRRT; PAM sequence: AAGAGT
ttatgctaatttatgattat

SEQ ID NO: 33007 - DNA, 20 bp, Artificial Sequence
  Description of Artificial Sequence: Synthetic oligonucleotide
  Target: LAMA2; (+) strand; PAM type: NNGRRT; PAM sequence: TAGGGT
agagtattcctatgtatacg

SEQ ID NO: 33008 - DNA, 20 bp, Artificial Sequence
  Description of Artificial Sequence: Synthetic oligonucleotide
  Target: LAMA2; (+) strand; PAM type: NNGRRT; PAM sequence: TAGAAT
tttacaacttctcctgatgc

SEQ ID NO: 33009 - DNA, 20 bp, Artificial Sequence
  Description of Artificial Sequence: Synthetic oligonucleotide
  Target: LAMA2; (+) strand; PAM type: NNGRRT; PAM sequence: ATGAAT
caacttctcctgatgctaga

SEQ ID NO: 33010 - DNA, 20 bp, Artificial Sequence
  Description of Artificial Sequence: Synthetic oligonucleotide
  Target: LAMA2; (+) strand; PAM type: NNGRRT; PAM sequence: TGGAGT
tccctttaaaaaggcacatt

SEQ ID NO: 33011 - DNA, 20 bp, Artificial Sequence
  Description of Artificial Sequence: Synthetic oligonucleotide
  Target: LAMA2; (+) strand; PAM type: NNGRRT; PAM sequence: AAGAGT
aaatggtcttgacctgaggt

SEQ ID NO: 33012 - DNA, 20 bp, Artificial Sequence
  Description of Artificial Sequence: Synthetic oligonucleotide
  Target: LAMA2; (+) strand; PAM type: NNGRRT; PAM sequence: AAGAGT
ccagtaagagcaaagggagg

SEQ ID NO: 33013 - DNA, 20 bp, Artificial Sequence
  Description of Artificial Sequence: Synthetic oligonucleotide
  Target: LAMA2; (+) strand; PAM type: NNGRRT; PAM sequence: CGGAGT
agggaggaagagtgggaagc

SEQ ID NO: 33014 - DNA, 20 bp, Artificial Sequence
  Description of Artificial Sequence: Synthetic oligonucleotide
  Target: LAMA2; (+) strand; PAM type: NNGRRT; PAM sequence: GTGAAT
gtttttagaaaagaacaagt

SEQ ID NO: 33015 - DNA, 20 bp, Artificial Sequence
  Description of Artificial Sequence: Synthetic oligonucleotide
  Target: LAMA2; (+) strand; PAM type: NNGRRT; PAM sequence: GAGAAT
catacaagattggcaaatgg

SEQ ID NO: 33016 - DNA, 20 bp, Artificial Sequence
  Description of Artificial Sequence: Synthetic oligonucleotide
  Target: LAMA2; (+) strand; PAM type: NNGRRT; PAM sequence: TCGGGT
ttggcaaatgggagaatgat

SEQ ID NO: 33017 - DNA, 20 bp, Artificial Sequence
  Description of Artificial Sequence: Synthetic oligonucleotide
  Target: LAMA2; (+) strand; PAM type: NNGRRT; PAM sequence: CTGAAT
tttctaccctataacggtag

SEQ ID NO: 33018 - DNA, 20 bp, Artificial Sequence
  Description of Artificial Sequence: Synthetic oligonucleotide
  Target: LAMA2; (+) strand; PAM type: NNGRRT; PAM sequence: CAGGAT
agctgtgctaatactttgat

SEQ ID NO: 33019 - DNA, 20 bp, Artificial Sequence
  Description of Artificial Sequence: Synthetic oligonucleotide
  Target: LAMA2; (+) strand; PAM type: NNGRRT; PAM sequence: GTGAGT
atcaggattgttattgtttt

SEQ ID NO: 33020 - DNA, 20 bp, Artificial Sequence
  Description of Artificial Sequence: Synthetic oligonucleotide
  Target: LAMA2; (+) strand; PAM type: NNGRRT; PAM sequence: AAGAAT
ccataagccctgttatttgt

SEQ ID NO: 33021 - DNA, 20 bp, Artificial Sequence
  Description of Artificial Sequence: Synthetic oligonucleotide
  Target: LAMA2; (+) strand; PAM type: NNGRRT; PAM sequence: AGGAGT
aatcattcctactaaagagc

SEQ ID NO: 33022 - DNA, 20 bp, Artificial Sequence
  Description of Artificial Sequence: Synthetic oligonucleotide
  Target: LAMA2; (+) strand; PAM type: NNGRRT; PAM sequence: TAGAAT
agaaaatgtcataaagacct

SEQ ID NO: 33023 - DNA, 20 bp, Artificial Sequence
  Description of Artificial Sequence: Synthetic oligonucleotide
  Target: LAMA2; (+) strand; PAM type: NNGRRT; PAM sequence: AAGAGT
aattgttgttatgctttaga

SEQ ID NO: 33024 - DNA, 20 bp, Artificial Sequence
  Description of Artificial Sequence: Synthetic oligonucleotide
  Target: LAMA2; (+) strand; PAM type: NNGRRT; PAM sequence: AAGAAT
ctagcatttattaattatga

SEQ ID NO: 33025 - DNA, 20 bp, Artificial Sequence
  Description of Artificial Sequence: Synthetic oligonucleotide
  Target: LAMA2; (+) strand; PAM type: NNGRRT; PAM sequence: CAGAAT
gcttttttagtaaatgcatt

SEQ ID NO: 33026 - DNA, 20 bp, Artificial Sequence
  Description of Artificial Sequence: Synthetic oligonucleotide
  Target: LAMA2; (+) strand; PAM type: NNGRRT; PAM sequence: ATGAAT
ttttagtaaatgcattcaga

SEQ ID NO: 33027 - DNA, 20 bp, Artificial Sequence
  Description of Artificial Sequence: Synthetic oligonucleotide
  Target: LAMA2; (+) strand; PAM type: NNGRRT; PAM sequence: TAGGAT
gtaaatgcattcagaatgaa

SEQ ID NO: 33028 - DNA, 20 bp, Artificial Sequence
  Description of Artificial Sequence: Synthetic oligonucleotide
  Target: LAMA2; (+) strand; PAM type: NNGRRT; PAM sequence: TAGAGT
tattctatgtcgaaatatta

SEQ ID NO: 33029 - DNA, 20 bp, Artificial Sequence
  Description of Artificial Sequence: Synthetic oligonucleotide
  Target: LAMA2; (+) strand; PAM type: NNGRRT; PAM sequence: ATGAAT
gtttctcctagtgttttcta

SEQ ID NO: 33030 - DNA, 20 bp, Artificial Sequence
  Description of Artificial Sequence: Synthetic oligonucleotide
  Target: LAMA2; (+) strand; PAM type: NNGRRT; PAM sequence: GGGGAT
taatgaattaaatgaactgg

SEQ ID NO: 33031 - DNA, 20 bp, Artificial Sequence
  Description of Artificial Sequence: Synthetic oligonucleotide
  Target: LAMA2; (+) strand; PAM type: NNGRRT; PAM sequence: CTGGAT
tgtcatcctacaaacatcaa

SEQ ID NO: 33032 - DNA, 20 bp, Artificial Sequence
  Description of Artificial Sequence: Synthetic oligonucleotide
  Target: LAMA2; (+) strand; PAM type: NNGRRT; PAM sequence: TAGGAT
tacaaacatcaactggattc

SEQ ID NO: 33033 - DNA, 20 bp, Artificial Sequence
  Description of Artificial Sequence: Synthetic oligonucleotide
  Target: LAMA2; (+) strand; PAM type: NNGRRT; PAM sequence: TTGAGT
tattgtatgtactagatgtt

SEQ ID NO: 33034 - DNA, 20 bp, Artificial Sequence
  Description of Artificial Sequence: Synthetic oligonucleotide
  Target: LAMA2; (+) strand; PAM type: NNGRRT; PAM sequence: CTGAAT
atacaggcctccttaatcgt

SEQ ID NO: 33035 - DNA, 20 bp, Artificial Sequence
  Description of Artificial Sequence: Synthetic oligonucleotide
  Target: LAMA2; (+) strand; PAM type: NNGRRT; PAM sequence: CAGAGT
tttgttggaaggcaaatatt

SEQ ID NO: 33036 - DNA, 20 bp, Artificial Sequence
  Description of Artificial Sequence: Synthetic oligonucleotide
  Target: LAMA2; (+) strand; PAM type: NNGRRT; PAM sequence: TAGGAT
tggaaggcaaatattcagag

SEQ ID NO: 33037 - DNA, 20 bp, Artificial Sequence
  Description of Artificial Sequence: Synthetic oligonucleotide
  Target: LAMA2; (+) strand; PAM type: NNGRRT; PAM sequence: AGGAAT
tagagatggagataagtgga

SEQ ID NO: 33038 - DNA, 20 bp, Artificial Sequence
  Description of Artificial Sequence: Synthetic oligonucleotide
  Target: LAMA2; (+) strand; PAM type: NNGRRT; PAM sequence: TAGGGT
ggaaggaatgaagatgtatt

SEQ ID NO: 33039 - DNA, 20 bp, Artificial Sequence
  Description of Artificial Sequence: Synthetic oligonucleotide
  Target: LAMA2; (+) strand; PAM type: NNGRRT; PAM sequence: TTGAAT
cattgctattcagtgatgca

SEQ ID NO: 33040 - DNA, 20 bp, Artificial Sequence
  Description of Artificial Sequence: Synthetic oligonucleotide
  Target: LAMA2; (+) strand; PAM type: NNGRRT; PAM sequence: CTGAAT
atgcattgaataatgacaga

SEQ ID NO: 33041 - DNA, 20 bp, Artificial Sequence
  Description of Artificial Sequence: Synthetic oligonucleotide
  Target: LAMA2; (+) strand; PAM type: NNGRRT; PAM sequence: TCGAGT
tcaagttcagaacattttct

SEQ ID NO: 33042 - DNA, 20 bp, Artificial Sequence
  Description of Artificial Sequence: Synthetic oligonucleotide
  Target: LAMA2; (+) strand; PAM type: NNGRRT; PAM sequence: CAGAGT
ggtaaagatcatatgcatag

SEQ ID NO: 33043 - DNA, 20 bp, Artificial Sequence
  Description of Artificial Sequence: Synthetic oligonucleotide
  Target: LAMA2; (+) strand; PAM type: NNGRRT; PAM sequence: TGGGAT
cagttattttctaaaaagcc

SEQ ID NO: 33044 - DNA, 20 bp, Artificial Sequence
  Description of Artificial Sequence: Synthetic oligonucleotide
  Target: LAMA2; (+) strand; PAM type: NNGRRT; PAM sequence: AAGAAT
gggatgattgtctggcagcc

SEQ ID NO: 33045 - DNA, 20 bp, Artificial Sequence
  Description of Artificial Sequence: Synthetic oligonucleotide
  Target: LAMA2; (+) strand; PAM type: NNGRRT; PAM sequence: ATGGGT
tgattgtctggcagccaaga

SEQ ID NO: 33046 - DNA, 20 bp, Artificial Sequence
  Description of Artificial Sequence: Synthetic oligonucleotide
  Target: LAMA2; (+) strand; PAM type: NNGRRT; PAM sequence: CTGAGT
cttaatcttctttcagagac

SEQ ID NO: 33047 - DNA, 20 bp, Artificial Sequence
  Description of Artificial Sequence: Synthetic oligonucleotide
  Target: LAMA2; (+) strand; PAM type: NNGRRT; PAM sequence: CTGAAT
tttctggtcagtatttctta

SEQ ID NO: 33048 - DNA, 20 bp, Artificial Sequence
  Description of Artificial Sequence: Synthetic oligonucleotide
  Target: LAMA2; (+) strand; PAM type: NNGRRT; PAM sequence: AAGGAT
acattttacgactgtaataa

SEQ ID NO: 33049 - DNA, 20 bp, Artificial Sequence
  Description of Artificial Sequence: Synthetic oligonucleotide
  Target: LAMA2; (+) strand; PAM type: NNGRRT; PAM sequence: ATGGAT
acaccaattctattttcaaa

SEQ ID NO: 33050 - DNA, 20 bp, Artificial Sequence
  Description of Artificial Sequence: Synthetic oligonucleotide
  Target: LAMA2; (+) strand; PAM type: NNGRRT; PAM sequence: CAGAGT
ttcaaaatggatttctgcaa

SEQ ID NO: 33051 - DNA, 20 bp, Artificial Sequence
  Description of Artificial Sequence: Synthetic oligonucleotide
  Target: LAMA2; (+) strand; PAM type: NNGRRT; PAM sequence: TGGGGT
ttctctgtgtatctaaccac

SEQ ID NO: 33052 - DNA, 20 bp, Artificial Sequence
  Description of Artificial Sequence: Synthetic oligonucleotide
  Target: LAMA2; (+) strand; PAM type: NNGRRT; PAM sequence: ATGAGT
tctattaatagagagatttc

SEQ ID NO: 33053 - DNA, 20 bp, Artificial Sequence
  Description of Artificial Sequence: Synthetic oligonucleotide
  Target: LAMA2; (+) strand; PAM type: NNGRRT; PAM sequence: AGGAAT
gtcagttacgatctgggctc

SEQ ID NO: 33054 - DNA, 20 bp, Artificial Sequence
  Description of Artificial Sequence: Synthetic oligonucleotide
  Target: LAMA2; (+) strand; PAM type: NNGRRT; PAM sequence: AAGAAT
tggaaatcattcactctgtc

SEQ ID NO: 33055 - DNA, 20 bp, Artificial Sequence
  Description of Artificial Sequence: Synthetic oligonucleotide
  Target: LAMA2; (+) strand; PAM type: NNGRRT; PAM sequence: GTGAGT
gtcaagaattcaaaaacaag

SEQ ID NO: 33056 - DNA, 20 bp, Artificial Sequence
  Description of Artificial Sequence: Synthetic oligonucleotide
  Target: LAMA2; (+) strand; PAM type: NNGRRT; PAM sequence: ACGAGT
gtctataattttagctactc

SEQ ID NO: 33057 - DNA, 20 bp, Artificial Sequence
  Description of Artificial Sequence: Synthetic oligonucleotide
  Target: LAMA2; (+) strand; PAM type: NNGRRT; PAM sequence: TTGGGT
tggcttagattataggtgat

SEQ ID NO: 33058 - DNA, 20 bp, Artificial Sequence
  Description of Artificial Sequence: Synthetic oligonucleotide
  Target: LAMA2; (+) strand; PAM type: NNGRRT; PAM sequence: TTGGGT
tgtaatatgtttgaaaaatg

SEQ ID NO: 33059 - DNA, 20 bp, Artificial Sequence
  Description of Artificial Sequence: Synthetic oligonucleotide
  Target: LAMA2; (+) strand; PAM type: NNGRRT; PAM sequence: TGGAAT
tcctttaaagtggcccacag

SEQ ID NO: 33060 - DNA, 20 bp, Artificial Sequence
  Description of Artificial Sequence: Synthetic oligonucleotide
  Target: LAMA2; (+) strand; PAM type: NNGRRT; PAM sequence: AGGAGT
tggcccacagtggaatctat

SEQ ID NO: 33061 - DNA, 20 bp, Artificial Sequence
  Description of Artificial Sequence: Synthetic oligonucleotide
  Target: LAMA2; (+) strand; PAM type: NNGRRT; PAM sequence: CTGAGT
gaaatccaagtctattaatt

SEQ ID NO: 33062 - DNA, 20 bp, Artificial Sequence
  Description of Artificial Sequence: Synthetic oligonucleotide
  Target: LAMA2; (+) strand; PAM type: NNGRRT; PAM sequence: GAGGAT
tagacaagtatcaatggtta

SEQ ID NO: 33063 - DNA, 20 bp, Artificial Sequence
  Description of Artificial Sequence: Synthetic oligonucleotide
  Target: LAMA2; (+) strand; PAM type: NNGRRT; PAM sequence: TTGAGT
caatctcagaagagagacac

SEQ ID NO: 33064 - DNA, 20 bp, Artificial Sequence
  Description of Artificial Sequence: Synthetic oligonucleotide
  Target: LAMA2; (+) strand; PAM type: NNGRRT; PAM sequence: TGGAGT
acagagaggtcagtttccac

SEQ ID NO: 33065 - DNA, 20 bp, Artificial Sequence
  Description of Artificial Sequence: Synthetic oligonucleotide
  Target: LAMA2; (+) strand; PAM type: NNGRRT; PAM sequence: CTGGAT
gagtgaccctgaggcacaag

SEQ ID NO: 33066 - DNA, 20 bp, Artificial Sequence
  Description of Artificial Sequence: Synthetic oligonucleotide
  Target: LAMA2; (+) strand; PAM type: NNGRRT; PAM sequence: AGGAGT
cctgaggcacaagctggatg

SEQ ID NO: 33067 - DNA, 20 bp, Artificial Sequence
  Description of Artificial Sequence: Synthetic oligonucleotide
  Target: LAMA2; (+) strand; PAM type: NNGRRT; PAM sequence: CTGGAT
caagctggatgaggagttag

SEQ ID NO: 33068 - DNA, 20 bp, Artificial Sequence
  Description of Artificial Sequence: Synthetic oligonucleotide
  Target: LAMA2; (+) strand; PAM type: NNGRRT; PAM sequence: CAGAGT
aaaagcatgtatggacattt

SEQ ID NO: 33069 - DNA, 20 bp, Artificial Sequence
  Description of Artificial Sequence: Synthetic oligonucleotide
  Target: LAMA2; (+) strand; PAM type: NNGRRT; PAM sequence: TGGAGT
gtgaaagttgtgtgaaagcc

SEQ ID NO: 33070 - DNA, 20 bp, Artificial Sequence
  Description of Artificial Sequence: Synthetic oligonucleotide
  Target: LAMA2; (+) strand; PAM type: NNGRRT; PAM sequence: GAGAAT
gaaagcctggagtcatcaga

SEQ ID NO: 33071 - DNA, 20 bp, Artificial Sequence
  Description of Artificial Sequence: Synthetic oligonucleotide
  Target: LAMA2; (+) strand; PAM type: NNGRRT; PAM sequence: TGGAGT
ggctttgcaattctttattt

SEQ ID NO: 33072 - DNA, 20 bp, Artificial Sequence
  Description of Artificial Sequence: Synthetic oligonucleotide
  Target: LAMA2; (+) strand; PAM type: NNGRRT; PAM sequence: AAGAAT
gtagttagttgttcagtaag

SEQ ID NO: 33073 - DNA, 20 bp, Artificial Sequence
  Description of Artificial Sequence: Synthetic oligonucleotide
  Target: LAMA2; (+) strand; PAM type: NNGRRT; PAM sequence: GGGAAT
attctgctgaacacactttg

SEQ ID NO: 33074 - DNA, 20 bp, Artificial Sequence
  Description of Artificial Sequence: Synthetic oligonucleotide
  Target: LAMA2; (+) strand; PAM type: NNGRRT; PAM sequence: GTGAAT
gaatgctttagtaactacaa

SEQ ID NO: 33075 - DNA, 20 bp, Artificial Sequence
  Description of Artificial Sequence: Synthetic oligonucleotide
  Target: LAMA2; (+) strand; PAM type: NNGRRT; PAM sequence: ACGAAT
caagtgaatccatagcctac

SEQ ID NO: 33076 - DNA, 20 bp, Artificial Sequence
  Description of Artificial Sequence: Synthetic oligonucleotide
  Target: LAMA2; (+) strand; PAM type: NNGRRT; PAM sequence: ATGAAT
tgaatccatagcctacacga

SEQ ID NO: 33077 - DNA, 20 bp, Artificial Sequence
  Description of Artificial Sequence: Synthetic oligonucleotide
  Target: LAMA2; (+) strand; PAM type: NNGRRT; PAM sequence: GTGAGT
taaggggacatatgagctaa

SEQ ID NO: 33078 - DNA, 20 bp, Artificial Sequence
  Description of Artificial Sequence: Synthetic oligonucleotide
  Target: LAMA2; (+) strand; PAM type: NNGRRT; PAM sequence: GTGAGT
gggacatatgagctaagtga

SEQ ID NO: 33079 - DNA, 20 bp, Artificial Sequence
  Description of Artificial Sequence: Synthetic oligonucleotide
  Target: LAMA2; (+) strand; PAM type: NNGRRT; PAM sequence: AGGGAT
agctttatcctgaaagccat

SEQ ID NO: 33080 - DNA, 20 bp, Artificial Sequence
  Description of Artificial Sequence: Synthetic oligonucleotide
  Target: LAMA2; (+) strand; PAM type: NNGRRT; PAM sequence: AAGAGT
atagggataccgagaactct

SEQ ID NO: 33081 - DNA, 20 bp, Artificial Sequence
  Description of Artificial Sequence: Synthetic oligonucleotide
  Target: LAMA2; (+) strand; PAM type: NNGRRT; PAM sequence: AAGGGT
gaactctaagagttttaaga

SEQ ID NO: 33082 - DNA, 20 bp, Artificial Sequence
  Description of Artificial Sequence: Synthetic oligonucleotide
  Target: LAMA2; (+) strand; PAM type: NNGRRT; PAM sequence: TAGGAT
tttggagatatgtaacaatt

SEQ ID NO: 33083 - DNA, 20 bp, Artificial Sequence
  Description of Artificial Sequence: Synthetic oligonucleotide
  Target: LAMA2; (+) strand; PAM type: NNGRRT; PAM sequence: CGGAGT
tgtaacaatttaggatgcta

SEQ ID NO: 33084 - DNA, 20 bp, Artificial Sequence
  Description of Artificial Sequence: Synthetic oligonucleotide
  Target: LAMA2; (+) strand; PAM type: NNGRRT; PAM sequence: TAGAAT
caacttctcttctatagtag

SEQ ID NO: 33085 - DNA, 20 bp, Artificial Sequence
  Description of Artificial Sequence: Synthetic oligonucleotide
  Target: LAMA2; (+) strand; PAM type: NNGRRT; PAM sequence: ATGGAT
tttgaagaaagaaggagaag

SEQ ID NO: 33086 - DNA, 20 bp, Artificial Sequence
  Description of Artificial Sequence: Synthetic oligonucleotide
  Target: LAMA2; (+) strand; PAM type: NNGRRT; PAM sequence: CAGAAT
aatgtggtatatatacacca

SEQ ID NO: 33087 - DNA, 20 bp, Artificial Sequence
  Description of Artificial Sequence: Synthetic oligonucleotide
  Target: LAMA2; (+) strand; PAM type: NNGRRT; PAM sequence: AGGAAT
atcatgtcttttgcagcaac

SEQ ID NO: 33088 - DNA, 20 bp, Artificial Sequence
  Description of Artificial Sequence: Synthetic oligonucleotide
  Target: LAMA2; (+) strand; PAM type: NNGRRT; PAM sequence: ATGGAT
acaaggcgagaagctaaaca

SEQ ID NO: 33089 - DNA, 20 bp, Artificial Sequence
  Description of Artificial Sequence: Synthetic oligonucleotide
  Target: LAMA2; (+) strand; PAM type: NNGRRT; PAM sequence: AGGGGT
aaaaggggggagggaggaga

SEQ ID NO: 33090 - DNA, 20 bp, Artificial Sequence
  Description of Artificial Sequence: Synthetic oligonucleotide
  Target: LAMA2; (+) strand; PAM type: NNGRRT; PAM sequence: TTGGGT
gaagatttaaaaatcgcctg

SEQ ID NO: 33091 - DNA, 20 bp, Artificial Sequence
  Description of Artificial Sequence: Synthetic oligonucleotide
  Target: LAMA2; (+) strand; PAM type: NNGRRT; PAM sequence: GTGGGT
ttgggtacagtgttcactgt

SEQ ID NO: 33092 - DNA, 20 bp, Artificial Sequence
  Description of Artificial Sequence: Synthetic oligonucleotide
  Target: LAMA2; (+) strand; PAM type: NNGRRT; PAM sequence: ATGGGT
cagtgttcactgtgtgggtg

SEQ ID NO: 33093 - DNA, 20 bp, Artificial Sequence
  Description of Artificial Sequence: Synthetic oligonucleotide
  Target: LAMA2; (+) strand; PAM type: NNGRRT; PAM sequence: CTGGAT
caaaccttcatatgcaccac

SEQ ID NO: 33094 - DNA, 20 bp, Artificial Sequence
  Description of Artificial Sequence: Synthetic oligonucleotide
  Target: LAMA2; (+) strand; PAM type: NNGRRT; PAM sequence: CTGAAT
aagacattcggaacactaag

SEQ ID NO: 33095 - DNA, 20 bp, Artificial Sequence
  Description of Artificial Sequence: Synthetic oligonucleotide
  Target: LAMA2; (+) strand; PAM type: NNGRRT; PAM sequence: AGGGAT
agatgtacggtataacaaac

SEQ ID NO: 33096 - DNA, 20 bp, Artificial Sequence
  Description of Artificial Sequence: Synthetic oligonucleotide
  Target: LAMA2; (+) strand; PAM type: NNGRRT; PAM sequence: CTGAAT
ataaacaaaagatctgtgct

SEQ ID NO: 33097 - DNA, 20 bp, Artificial Sequence
  Description of Artificial Sequence: Synthetic oligonucleotide
  Target: LAMA2; (+) strand; PAM type: NNGRRT; PAM sequence: CAGAAT
attagtcaaaggtcaagtta

SEQ ID NO: 33098 - DNA, 20 bp, Artificial Sequence
  Description of Artificial Sequence: Synthetic oligonucleotide
  Target: LAMA2; (+) strand; PAM type: NNGRRT; PAM sequence: AAGAAT
tctgtggtccagaaatcaga

SEQ ID NO: 33099 - DNA, 20 bp, Artificial Sequence
  Description of Artificial Sequence: Synthetic oligonucleotide
  Target: LAMA2; (+) strand; PAM type: NNGRRT; PAM sequence: CTGAAT
tcacattgctttttgccttt

SEQ ID NO: 33100 - DNA, 20 bp, Artificial Sequence
  Description of Artificial Sequence: Synthetic oligonucleotide
  Target: LAMA2; (+) strand; PAM type: NNGRRT; PAM sequence: TTGGGT
cagtcattctcacttttatt

SEQ ID NO: 33101 - DNA, 20 bp, Artificial Sequence
  Description of Artificial Sequence: Synthetic oligonucleotide
  Target: LAMA2; (+) strand; PAM type: NNGRRT; PAM sequence: ATGAAT
ttattttgggtattaatgac

SEQ ID NO: 33102 - DNA, 20 bp, Artificial Sequence
  Description of Artificial Sequence: Synthetic oligonucleotide
  Target: LAMA2; (+) strand; PAM type: NNGRRT; PAM sequence: CAGAAT
ccctatgaggtttagttgtt

SEQ ID NO: 33103 - DNA, 20 bp, Artificial Sequence
  Description of Artificial Sequence: Synthetic oligonucleotide
  Target: LAMA2; (+) strand; PAM type: NNGRRT; PAM sequence: TTGAGT
gatgcatacggttcctaccc

SEQ ID NO: 33104 - DNA, 20 bp, Artificial Sequence
  Description of Artificial Sequence: Synthetic oligonucleotide
  Target: LAMA2; (+) strand; PAM type: NNGRRT; PAM sequence: TAGGAT
agcaaattactgtatctgtt

SEQ ID NO: 33105 - DNA, 20 bp, Artificial Sequence
  Description of Artificial Sequence: Synthetic oligonucleotide
  Target: LAMA2; (+) strand; PAM type: NNGRRT; PAM sequence: GGGGGT
ctaagtccttttttagttga

SEQ ID NO: 33106 - DNA, 20 bp, Artificial Sequence
  Description of Artificial Sequence: Synthetic oligonucleotide
  Target: LAMA2; (+) strand; PAM type: NNGRRT; PAM sequence: AGGGGT
tttttagttgagggggtagg

SEQ ID NO: 33107 - DNA, 20 bp, Artificial Sequence
  Description of Artificial Sequence: Synthetic oligonucleotide
  Target: LAMA2; (+) strand; PAM type: NNGRRT; PAM sequence: ATGAAT
agataaacatgtataaaaac

SEQ ID NO: 33108 - DNA, 20 bp, Artificial Sequence
  Description of Artificial Sequence: Synthetic oligonucleotide
  Target: LAMA2; (+) strand; PAM type: NNGRRT; PAM sequence: TTGAAT
gggcagctgttgtaatcagt

SEQ ID NO: 33109 - DNA, 20 bp, Artificial Sequence
  Description of Artificial Sequence: Synthetic oligonucleotide
  Target: LAMA2; (+) strand; PAM type: NNGRRT; PAM sequence: TGGAGT
ttgtaatcagtttgaattat

SEQ ID NO: 33110 - DNA, 20 bp, Artificial Sequence
  Description of Artificial Sequence: Synthetic oligonucleotide
  Target: LAMA2; (+) strand; PAM type: NNGRRT; PAM sequence: AAGAGT
tattggagtttaaatttcaa

SEQ ID NO: 33111 - DNA, 20 bp, Artificial Sequence
  Description of Artificial Sequence: Synthetic oligonucleotide
  Target: LAMA2; (+) strand; PAM type: NNGRRT; PAM sequence: AGGAGT
aagctgtttaaactgtgttg

SEQ ID NO: 33112 - DNA, 20 bp, Artificial Sequence
  Description of Artificial Sequence: Synthetic oligonucleotide
  Target: LAMA2; (+) strand; PAM type: NNGRRT; PAM sequence: CAGGGT
gattttaagtagagatgtga

SEQ ID NO: 33113 - DNA, 20 bp, Artificial Sequence
  Description of Artificial Sequence: Synthetic oligonucleotide
  Target: LAMA2; (+) strand; PAM type: NNGRRT; PAM sequence: TTGGAT
actgaagacaaagcgaacaa

SEQ ID NO: 33114 - DNA, 20 bp, Artificial Sequence
  Description of Artificial Sequence: Synthetic oligonucleotide
  Target: LAMA2; (+) strand; PAM type: NNGRRT; PAM sequence: GGGAAT
cttgaagtaagagatgcagt

SEQ ID NO: 33115 - DNA, 20 bp, Artificial Sequence
  Description of Artificial Sequence: Synthetic oligonucleotide
  Target: LAMA2; (+) strand; PAM type: NNGRRT; PAM sequence: CAGAAT
gaattgacatcaaagaaatg

SEQ ID NO: 33116 - DNA, 20 bp, Artificial Sequence
  Description of Artificial Sequence: Synthetic oligonucleotide
  Target: LAMA2; (+) strand; PAM type: NNGRRT; PAM sequence: TAGAAT
tgataccattacacagctat

SEQ ID NO: 33117 - DNA, 20 bp, Artificial Sequence
  Description of Artificial Sequence: Synthetic oligonucleotide
  Target: LAMA2; (+) strand; PAM type: NNGRRT; PAM sequence: GAGGAT
ggaactcatacactgctgct

SEQ ID NO: 33118 - DNA, 20 bp, Artificial Sequence
  Description of Artificial Sequence: Synthetic oligonucleotide
  Target: LAMA2; (+) strand; PAM type: NNGRRT; PAM sequence: TGGAAT
attgtggtatactcatacaa

SEQ ID NO: 33119 - DNA, 20 bp, Artificial Sequence
  Description of Artificial Sequence: Synthetic oligonucleotide
  Target: LAMA2; (+) strand; PAM type: NNGRRT; PAM sequence: ATGGAT
agtattaatatagatacaaa

SEQ ID NO: 33120 - DNA, 20 bp, Artificial Sequence
  Description of Artificial Sequence: Synthetic oligonucleotide
  Target: LAMA2; (+) strand; PAM type: NNGRRT; PAM sequence: ATGAAT
ttaatatagatacaaaatgg

SEQ ID NO: 33121 - DNA, 20 bp, Artificial Sequence
  Description of Artificial Sequence: Synthetic oligonucleotide
  Target: LAMA2; (+) strand; PAM type: NNGRRT; PAM sequence: ACGGAT
tctatagtcacagaaagcag

SEQ ID NO: 33122 - DNA, 20 bp, Artificial Sequence
  Description of Artificial Sequence: Synthetic oligonucleotide
  Target: LAMA2; (+) strand; PAM type: NNGRRT; PAM sequence: GTGAAT
aaagcagacggatgctactt

SEQ ID NO: 33123 - DNA, 20 bp, Artificial Sequence
  Description of Artificial Sequence: Synthetic oligonucleotide
  Target: LAMA2; (+) strand; PAM type: NNGRRT; PAM sequence: AGGGAT
tgtacgaaaaggcaaaaagg

SEQ ID NO: 33124 - DNA, 20 bp, Artificial Sequence
  Description of Artificial Sequence: Synthetic oligonucleotide
  Target: LAMA2; (+) strand; PAM type: NNGRRT; PAM sequence: TGGGGT
aatgagcataaagaaacttc

SEQ ID NO: 33125 - DNA, 20 bp, Artificial Sequence
  Description of Artificial Sequence: Synthetic oligonucleotide
  Target: LAMA2; (+) strand; PAM type: NNGRRT; PAM sequence: ATGGAT
ataaagaaacttctggggtg

SEQ ID NO: 33126 - DNA, 20 bp, Artificial Sequence
  Description of Artificial Sequence: Synthetic oligonucleotide
  Target: LAMA2; (+) strand; PAM type: NNGRRT; PAM sequence: TTGAGT
tggggtgatggatgtgttca

SEQ ID NO: 33127 - DNA, 20 bp, Artificial Sequence
  Description of Artificial Sequence: Synthetic oligonucleotide
  Target: LAMA2; (+) strand; PAM type: NNGRRT; PAM sequence: CAGGAT
agatgtggtgaggagaaagt

SEQ ID NO: 33128 - DNA, 20 bp, Artificial Sequence
  Description of Artificial Sequence: Synthetic oligonucleotide
  Target: LAMA2; (+) strand; PAM type: NNGRRT; PAM sequence: TTGGGT
tgactctctagtttagtaga

SEQ ID NO: 33129 - DNA, 20 bp, Artificial Sequence
  Description of Artificial Sequence: Synthetic oligonucleotide
  Target: LAMA2; (+) strand; PAM type: NNGRRT; PAM sequence: GGGGGT
tagtttagtagattgggtgg

SEQ ID NO: 33130 - DNA, 20 bp, Artificial Sequence
  Description of Artificial Sequence: Synthetic oligonucleotide
  Target: LAMA2; (+) strand; PAM type: NNGRRT; PAM sequence: GGGAGT
aagttaagtaatacagattt

SEQ ID NO: 33131 - DNA, 20 bp, Artificial Sequence
  Description of Artificial Sequence: Synthetic oligonucleotide
  Target: LAMA2; (+) strand; PAM type: NNGRRT; PAM sequence: TGGAAT
agatgataattattttgatt

SEQ ID NO: 33132 - DNA, 20 bp, Artificial Sequence
  Description of Artificial Sequence: Synthetic oligonucleotide
  Target: LAMA2; (+) strand; PAM type: NNGRRT; PAM sequence: TTGAAT
agatgatggtgtctcacctg

SEQ ID NO: 33133 - DNA, 20 bp, Artificial Sequence
  Description of Artificial Sequence: Synthetic oligonucleotide
  Target: LAMA2; (+) strand; PAM type: NNGRRT; PAM sequence: TTGAGT
cattgtaagtagatataaac

SEQ ID NO: 33134 - DNA, 20 bp, Artificial Sequence
  Description of Artificial Sequence: Synthetic oligonucleotide
  Target: LAMA2; (+) strand; PAM type: NNGRRT; PAM sequence: AGGGAT
cctgagatgtgggcaaagga

SEQ ID NO: 33135 - DNA, 20 bp, Artificial Sequence
  Description of Artificial Sequence: Synthetic oligonucleotide
  Target: LAMA2; (+) strand; PAM type: NNGRRT; PAM sequence: CAGGGT
aagtgttcaaaaatagaccc

SEQ ID NO: 33136 - DNA, 20 bp, Artificial Sequence
  Description of Artificial Sequence: Synthetic oligonucleotide
  Target: LAMA2; (+) strand; PAM type: NNGRRT; PAM sequence: GAGAAT
agaccccagggtaggagatt

SEQ ID NO: 33137 - DNA, 20 bp, Artificial Sequence
  Description of Artificial Sequence: Synthetic oligonucleotide
  Target: LAMA2; (+) strand; PAM type: NNGRRT; PAM sequence: ATGAAT
gcattaaatattgcacaaac

SEQ ID NO: 33138 - DNA, 20 bp, Artificial Sequence
  Description of Artificial Sequence: Synthetic oligonucleotide
  Target: LAMA2; (+) strand; PAM type: NNGRRT; PAM sequence: CTGAGT
taaagtttaaaagaactcca

SEQ ID NO: 33139 - DNA, 20 bp, Artificial Sequence
  Description of Artificial Sequence: Synthetic oligonucleotide
  Target: LAMA2; (+) strand; PAM type: NNGRRT; PAM sequence: TTGGGT
ttaaaagaactccactgagt

SEQ ID NO: 33140 - DNA, 20 bp, Artificial Sequence
  Description of Artificial Sequence: Synthetic oligonucleotide
  Target: LAMA2; (+) strand; PAM type: NNGRRT; PAM sequence: CAGAGT
tttagcaagaccagagatga

SEQ ID NO: 33141 - DNA, 20 bp, Artificial Sequence
  Description of Artificial Sequence: Synthetic oligonucleotide
  Target: LAMA2; (+) strand; PAM type: NNGRRT; PAM sequence: AGGAAT
agatgacagagtagtgggag

SEQ ID NO: 33142 - DNA, 20 bp, Artificial Sequence
  Description of Artificial Sequence: Synthetic oligonucleotide
  Target: LAMA2; (+) strand; PAM type: NNGRRT; PAM sequence: GTGGAT
tgaaataaggctccagcaat

SEQ ID NO: 33143 - DNA, 20 bp, Artificial Sequence
  Description of Artificial Sequence: Synthetic oligonucleotide
  Target: LAMA2; (+) strand; PAM type: NNGRRT; PAM sequence: ATGAAT
gaccagattatttgttttat

SEQ ID NO: 33144 - DNA, 20 bp, Artificial Sequence
  Description of Artificial Sequence: Synthetic oligonucleotide
  Target: LAMA2; (+) strand; PAM type: NNGRRT; PAM sequence: AGGAGT
aaattcaagtacagtccttc

SEQ ID NO: 33145 - DNA, 20 bp, Artificial Sequence
  Description of Artificial Sequence: Synthetic oligonucleotide
  Target: LAMA2; (+) strand; PAM type: NNGRRT; PAM sequence: TTGAGT
aggagtgttccccatctttc

SEQ ID NO: 33146 - DNA, 20 bp, Artificial Sequence
  Description of Artificial Sequence: Synthetic oligonucleotide
  Target: LAMA2; (+) strand; PAM type: NNGRRT; PAM sequence: TAGGAT
tatcccctaaatgcatcaag

SEQ ID NO: 33147 - DNA, 20 bp, Artificial Sequence
  Description of Artificial Sequence: Synthetic oligonucleotide
  Target: LAMA2; (+) strand; PAM type: NNGRRT; PAM sequence: GTGGAT
aacactcaattagattttca

SEQ ID NO: 33148 - DNA, 20 bp, Artificial Sequence
  Description of Artificial Sequence: Synthetic oligonucleotide
  Target: LAMA2; (+) strand; PAM type: NNGRRT; PAM sequence: AAGAAT
tggatcaagaaagagaacaa

SEQ ID NO: 33149 - DNA, 20 bp, Artificial Sequence
  Description of Artificial Sequence: Synthetic oligonucleotide
  Target: LAMA2; (+) strand; PAM type: NNGRRT; PAM sequence: TAGGGT
tattttgtaaagaaaagaaa

SEQ ID NO: 33150 - DNA, 20 bp, Artificial Sequence
  Description of Artificial Sequence: Synthetic oligonucleotide
  Target: LAMA2; (+) strand; PAM type: NNGRRT; PAM sequence: AAGGAT
cttcatcgctatcactcatg

SEQ ID NO: 33151 - DNA, 20 bp, Artificial Sequence
  Description of Artificial Sequence: Synthetic oligonucleotide
  Target: LAMA2; (+) strand; PAM type: NNGRRT; PAM sequence: TAGAGT
tcgctatcactcatgaagga

SEQ ID NO: 33152 - DNA, 20 bp, Artificial Sequence
  Description of Artificial Sequence: Synthetic oligonucleotide
  Target: LAMA2; (+) strand; PAM type: NNGRRT; PAM sequence: GTGAAT
gccagttaccttttgggcca

SEQ ID NO: 33153 - DNA, 20 bp, Artificial Sequence
  Description of Artificial Sequence: Synthetic oligonucleotide
  Target: LAMA2; (+) strand; PAM type: NNGRRT; PAM sequence: TAGAAT
gctctttaatcatgttttct

SEQ ID NO: 33154 - DNA, 20 bp, Artificial Sequence
  Description of Artificial Sequence: Synthetic oligonucleotide
  Target: LAMA2; (+) strand; PAM type: NNGRRT; PAM sequence: ATGGAT
aaaaatgcatatattcattc

SEQ ID NO: 33155 - DNA, 20 bp, Artificial Sequence
  Description of Artificial Sequence: Synthetic oligonucleotide
  Target: LAMA2; (+) strand; PAM type: NNGRRT; PAM sequence: CAGAAT
gcttgcctgtgatagagagg

SEQ ID NO: 33156 - DNA, 20 bp, Artificial Sequence
  Description of Artificial Sequence: Synthetic oligonucleotide
  Target: LAMA2; (+) strand; PAM type: NNGRRT; PAM sequence: AGGAAT
ctttgccgatctagataaaa

SEQ ID NO: 33157 - DNA, 20 bp, Artificial Sequence
  Description of Artificial Sequence: Synthetic oligonucleotide
  Target: LAMA2; (+) strand; PAM type: NNGRRT; PAM sequence: GGGAAT
gatagggctataaacttcaa

SEQ ID NO: 33158 - DNA, 20 bp, Artificial Sequence
  Description of Artificial Sequence: Synthetic oligonucleotide
  Target: LAMA2; (+) strand; PAM type: NNGRRT; PAM sequence: TGGAAT
tataaacttcaagggaattt

SEQ ID NO: 33159 - DNA, 20 bp, Artificial Sequence
  Description of Artificial Sequence: Synthetic oligonucleotide
  Target: LAMA2; (+) strand; PAM type: NNGRRT; PAM sequence: ATGAGT
aacactgattctgaaagatg

SEQ ID NO: 33160 - DNA, 20 bp, Artificial Sequence
  Description of Artificial Sequence: Synthetic oligonucleotide
  Target: LAMA2; (+) strand; PAM type: NNGRRT; PAM sequence: TTGAGT
tgattctgaaagatgatgag

SEQ ID NO: 33161 - DNA, 20 bp, Artificial Sequence
  Description of Artificial Sequence: Synthetic oligonucleotide
  Target: LAMA2; (+) strand; PAM type: NNGRRT; PAM sequence: AAGAAT
tccaagaaactagcatccta

SEQ ID NO: 33162 - DNA, 20 bp, Artificial Sequence
  Description of Artificial Sequence: Synthetic oligonucleotide
  Target: LAMA2; (+) strand; PAM type: NNGRRT; PAM sequence: AAGGAT
gactgatgtcaatacgcatc

SEQ ID NO: 33163 - DNA, 20 bp, Artificial Sequence
  Description of Artificial Sequence: Synthetic oligonucleotide
  Target: LAMA2; (+) strand; PAM type: NNGRRT; PAM sequence: AGGGAT
aagaagggggcggtagtgag

SEQ ID NO: 33164 - DNA, 20 bp, Artificial Sequence
  Description of Artificial Sequence: Synthetic oligonucleotide
  Target: LAMA2; (+) strand; PAM type: NNGRRT; PAM sequence: AGGAGT
tgagagggatcaatgagata

SEQ ID NO: 33165 - DNA, 20 bp, Artificial Sequence
  Description of Artificial Sequence: Synthetic oligonucleotide
  Target: LAMA2; (+) strand; PAM type: NNGRRT; PAM sequence: CTGAAT
ttccttttttccatctattt

SEQ ID NO: 33166 - DNA, 20 bp, Artificial Sequence
  Description of Artificial Sequence: Synthetic oligonucleotide
  Target: LAMA2; (+) strand; PAM type: NNGRRT; PAM sequence: CTGGAT
aaatgtaatttacagtgtac

SEQ ID NO: 33167 - DNA, 20 bp, Artificial Sequence
  Description of Artificial Sequence: Synthetic oligonucleotide
  Target: LAMA2; (+) strand; PAM type: NNGRRT; PAM sequence: ATGAGT
acaacagtgacactttgcag

SEQ ID NO: 33168 - DNA, 20 bp, Artificial Sequence
  Description of Artificial Sequence: Synthetic oligonucleotide
  Target: LAMA2; (+) strand; PAM type: NNGRRT; PAM sequence: GTGGAT
tctaaatcccagtagttcct

SEQ ID NO: 33169 - DNA, 20 bp, Artificial Sequence
  Description of Artificial Sequence: Synthetic oligonucleotide
  Target: LAMA2; (+) strand; PAM type: NNGRRT; PAM sequence: ATGGAT
attatagaaaactacatcaa

SEQ ID NO: 33170 - DNA, 20 bp, Artificial Sequence
  Description of Artificial Sequence: Synthetic oligonucleotide
  Target: LAMA2; (+) strand; PAM type: NNGRRT; PAM sequence: GGGGAT
tattattttcatgctctttg

SEQ ID NO: 33171 - DNA, 20 bp, Artificial Sequence
  Description of Artificial Sequence: Synthetic oligonucleotide
  Target: LAMA2; (+) strand; PAM type: NNGRRT; PAM sequence: TCGAAT
gagaaagtcaatgttaattc

SEQ ID NO: 33172 - DNA, 20 bp, Artificial Sequence
  Description of Artificial Sequence: Synthetic oligonucleotide
  Target: LAMA2; (+) strand; PAM type: NNGRRT; PAM sequence: GAGAAT
atatagatactaatcaggag

SEQ ID NO: 33173 - DNA, 20 bp, Artificial Sequence
  Description of Artificial Sequence: Synthetic oligonucleotide
  Target: LAMA2; (+) strand; PAM type: NNGRRT; PAM sequence: AAGGAT
tttagtttatatgtaaagct

SEQ ID NO: 33174 - DNA, 20 bp, Artificial Sequence
  Description of Artificial Sequence: Synthetic oligonucleotide
  Target: LAMA2; (+) strand; PAM type: NNGRRT; PAM sequence: TAGAGT
taaatgaccactatgctcac

SEQ ID NO: 33175 - DNA, 20 bp, Artificial Sequence
  Description of Artificial Sequence: Synthetic oligonucleotide
  Target: LAMA2; (+) strand; PAM type: NNGRRT; PAM sequence: AAGAAT
ttctgaagtttaattacaat

SEQ ID NO: 33176 - DNA, 20 bp, Artificial Sequence
  Description of Artificial Sequence: Synthetic oligonucleotide
  Target: LAMA2; (+) strand; PAM type: NNGRRT; PAM sequence: CAGGAT
gttgcatgttagaacaacac

SEQ ID NO: 33177 - DNA, 20 bp, Artificial Sequence
  Description of Artificial Sequence: Synthetic oligonucleotide
  Target: LAMA2; (+) strand; PAM type: NNGRRT; PAM sequence: ATGGAT
ttgacatctttgttgaagag

SEQ ID NO: 33178 - DNA, 20 bp, Artificial Sequence
  Description of Artificial Sequence: Synthetic oligonucleotide
  Target: LAMA2; (+) strand; PAM type: NNGRRT; PAM sequence: TGGAGT
tctttgttgaagagatggat

SEQ ID NO: 33179 - DNA, 20 bp, Artificial Sequence
  Description of Artificial Sequence: Synthetic oligonucleotide
  Target: LAMA2; (+) strand; PAM type: NNGRRT; PAM sequence: AAGAAT
ctttatatgcacctgctgaa

SEQ ID NO: 33180 - DNA, 20 bp, Artificial Sequence
  Description of Artificial Sequence: Synthetic oligonucleotide
  Target: LAMA2; (+) strand; PAM type: NNGRRT; PAM sequence: CAGAGT
aagtaattaaaggtagaagc

SEQ ID NO: 33181 - DNA, 20 bp, Artificial Sequence
  Description of Artificial Sequence: Synthetic oligonucleotide
  Target: LAMA2; (+) strand; PAM type: NNGRRT; PAM sequence: TTGAAT
attaaaggtagaagccagag

SEQ ID NO: 33182 - DNA, 20 bp, Artificial Sequence
  Description of Artificial Sequence: Synthetic oligonucleotide
  Target: LAMA2; (+) strand; PAM type: NNGRRT; PAM sequence: GTGGAT
ggtagaagccagagttgaat

SEQ ID NO: 33183 - DNA, 20 bp, Artificial Sequence
  Description of Artificial Sequence: Synthetic oligonucleotide
  Target: LAMA2; (+) strand; PAM type: NNGRRT; PAM sequence: CAGGAT
ccgaaaattagtcagtgttc

SEQ ID NO: 33184 - DNA, 20 bp, Artificial Sequence
  Description of Artificial Sequence: Synthetic oligonucleotide
  Target: LAMA2; (+) strand; PAM type: NNGRRT; PAM sequence: ATGAGT
agtcagtgttccaggatgct

SEQ ID NO: 33185 - DNA, 20 bp, Artificial Sequence
  Description of Artificial Sequence: Synthetic oligonucleotide
  Target: LAMA2; (+) strand; PAM type: NNGRRT; PAM sequence: AAGGAT
taaaacataacatagtctat

SEQ ID NO: 33186 - DNA, 20 bp, Artificial Sequence
  Description of Artificial Sequence: Synthetic oligonucleotide
  Target: LAMA2; (+) strand; PAM type: NNGRRT; PAM sequence: TAGAAT
aatgttaattacactctaat

SEQ ID NO: 33187 - DNA, 20 bp, Artificial Sequence
  Description of Artificial Sequence: Synthetic oligonucleotide
  Target: LAMA2; (+) strand; PAM type: NNGRRT; PAM sequence: TGGGAT
taattacactctaattagaa

SEQ ID NO: 33188 - DNA, 20 bp, Artificial Sequence
  Description of Artificial Sequence: Synthetic oligonucleotide
  Target: LAMA2; (+) strand; PAM type: NNGRRT; PAM sequence: AAGAGT
aattgatttggttaaaccgt

SEQ ID NO: 33189 - DNA, 20 bp, Artificial Sequence
  Description of Artificial Sequence: Synthetic oligonucleotide
  Target: LAMA2; (+) strand; PAM type: NNGRRT; PAM sequence: AAGGGT
aattagtttggtatttttta

SEQ ID NO: 33190 - DNA, 20 bp, Artificial Sequence
  Description of Artificial Sequence: Synthetic oligonucleotide
  Target: LAMA2; (+) strand; PAM type: NNGRRT; PAM sequence: CAGAAT
gattatgtttggaaaaatcc

SEQ ID NO: 33191 - DNA, 20 bp, Artificial Sequence
  Description of Artificial Sequence: Synthetic oligonucleotide
  Target: LAMA2; (+) strand; PAM type: NNGRRT; PAM sequence: TTGAGT
agtcattcaccaaaagtttg

SEQ ID NO: 33192 - DNA, 20 bp, Artificial Sequence
  Description of Artificial Sequence: Synthetic oligonucleotide
  Target: LAMA2; (+) strand; PAM type: NNGRRT; PAM sequence: AGGAAT
caggctccataccaaatact

SEQ ID NO: 33193 - DNA, 20 bp, Artificial Sequence
  Description of Artificial Sequence: Synthetic oligonucleotide
  Target: LAMA2; (+) strand; PAM type: NNGRRT; PAM sequence: TTGAGT
agatcattaaccatatatta

SEQ ID NO: 33194 - DNA, 20 bp, Artificial Sequence
  Description of Artificial Sequence: Synthetic oligonucleotide
  Target: LAMA2; (+) strand; PAM type: NNGRRT; PAM sequence: GTGAAT
cattaaccatatattattga

SEQ ID NO: 33195 - DNA, 20 bp, Artificial Sequence
  Description of Artificial Sequence: Synthetic oligonucleotide
  Target: LAMA2; (+) strand; PAM type: NNGRRT; PAM sequence: AGGAAT
attatcataaaataattttt

SEQ ID NO: 33196 - DNA, 20 bp, Artificial Sequence
  Description of Artificial Sequence: Synthetic oligonucleotide
  Target: LAMA2; (+) strand; PAM type: NNGRRT; PAM sequence: CTGAAT
tctataaaatctgttaaaat

SEQ ID NO: 33197 - DNA, 20 bp, Artificial Sequence
  Description of Artificial Sequence: Synthetic oligonucleotide
  Target: LAMA2; (+) strand; PAM type: NNGRRT; PAM sequence: ATGAAT
ttaaaatctgaatctgttaa

SEQ ID NO: 33198 - DNA, 20 bp, Artificial Sequence
  Description of Artificial Sequence: Synthetic oligonucleotide
  Target: LAMA2; (+) strand; PAM type: NNGRRT; PAM sequence: CAGAAT
taagccattcatgaacacta

SEQ ID NO: 33199 - DNA, 20 bp, Artificial Sequence
  Description of Artificial Sequence: Synthetic oligonucleotide
  Target: LAMA2; (+) strand; PAM type: NNGRRT; PAM sequence: AAGGGT
attctaatttcactgccgtc

SEQ ID NO: 33200 - DNA, 20 bp, Artificial Sequence
  Description of Artificial Sequence: Synthetic oligonucleotide
  Target: LAMA2; (+) strand; PAM type: NNGRRT; PAM sequence: TCGAGT
taaatttatgcatgccttct

SEQ ID NO: 33201 - DNA, 20 bp, Artificial Sequence
  Description of Artificial Sequence: Synthetic oligonucleotide
  Target: LAMA2; (+) strand; PAM type: NNGRRT; PAM sequence: ATGGGT
tgcatgccttcttcgagtgc

SEQ ID NO: 33202 - DNA, 20 bp, Artificial Sequence
  Description of Artificial Sequence: Synthetic oligonucleotide
  Target: LAMA2; (+) strand; PAM type: NNGRRT; PAM sequence: TTGGGT
gccttcttcgagtgcatggg

SEQ ID NO: 33203 - DNA, 20 bp, Artificial Sequence
  Description of Artificial Sequence: Synthetic oligonucleotide
  Target: LAMA2; (+) strand; PAM type: NNGRRT; PAM sequence: GAGAGT
gagcaagccgtgcattctgt

SEQ ID NO: 33204 - DNA, 20 bp, Artificial Sequence
  Description of Artificial Sequence: Synthetic oligonucleotide
  Target: LAMA2; (+) strand; PAM type: NNGRRT; PAM sequence: TTGAGT
accatcagttgggctgcaat

SEQ ID NO: 33205 - DNA, 20 bp, Artificial Sequence
  Description of Artificial Sequence: Synthetic oligonucleotide
  Target: LAMA2; (+) strand; PAM type: NNGRRT; PAM sequence: TTGAGT
aaacacggtaaagtggtctc

SEQ ID NO: 33206 - DNA, 20 bp, Artificial Sequence
  Description of Artificial Sequence: Synthetic oligonucleotide
  Target: LAMA2; (+) strand; PAM type: NNGRRT; PAM sequence: AAGAAT
tagtgccatgctgtctgctg

SEQ ID NO: 33207 - DNA, 20 bp, Artificial Sequence
  Description of Artificial Sequence: Synthetic oligonucleotide
  Target: LAMA2; (+) strand; PAM type: NNGRRT; PAM sequence: AGGAAT
ctagctatggtgccagatga

SEQ ID NO: 33208 - DNA, 20 bp, Artificial Sequence
  Description of Artificial Sequence: Synthetic oligonucleotide
  Target: LAMA2; (+) strand; PAM type: NNGRRT; PAM sequence: TAGAAT
tagatttttaataagagaaa

SEQ ID NO: 33209 - DNA, 20 bp, Artificial Sequence
  Description of Artificial Sequence: Synthetic oligonucleotide
  Target: LAMA2; (+) strand; PAM type: NNGRRT; PAM sequence: TGGGAT
aatatatgttaataaaattc

SEQ ID NO: 33210 - DNA, 20 bp, Artificial Sequence
  Description of Artificial Sequence: Synthetic oligonucleotide
  Target: LAMA2; (+) strand; PAM type: NNGRRT; PAM sequence: TTGAGT
gtaggtttgtaattttgcct

SEQ ID NO: 33211 - DNA, 20 bp, Artificial Sequence
  Description of Artificial Sequence: Synthetic oligonucleotide
  Target: LAMA2; (+) strand; PAM type: NNGRRT; PAM sequence: TTGAGT
acagggacccgtggttacca

SEQ ID NO: 33212 - DNA, 20 bp, Artificial Sequence
  Description of Artificial Sequence: Synthetic oligonucleotide
  Target: LAMA2; (+) strand; PAM type: NNGRRT; PAM sequence: TGGAAT
gaggttgctaaatcatattt

SEQ ID NO: 33213 - DNA, 20 bp, Artificial Sequence
  Description of Artificial Sequence: Synthetic oligonucleotide
  Target: LAMA2; (+) strand; PAM type: NNGRRT; PAM sequence: AGGAGT
caataaactatataacttgt

SEQ ID NO: 33214 - DNA, 20 bp, Artificial Sequence
  Description of Artificial Sequence: Synthetic oligonucleotide
  Target: LAMA2; (+) strand; PAM type: NNGRRT; PAM sequence: CAGAAT
ttatgcaagaaaaatataag

SEQ ID NO: 33215 - DNA, 20 bp, Artificial Sequence
  Description of Artificial Sequence: Synthetic oligonucleotide
  Target: LAMA2; (+) strand; PAM type: NNGRRT; PAM sequence: AGGAGT
aaaataaagaagttccagaa

SEQ ID NO: 33216 - DNA, 20 bp, Artificial Sequence
  Description of Artificial Sequence: Synthetic oligonucleotide
  Target: LAMA2; (+) strand; PAM type: NNGRRT; PAM sequence: GGGGGT
gaagttccagaaaggagtgc

SEQ ID NO: 33217 - DNA, 20 bp, Artificial Sequence
  Description of Artificial Sequence: Synthetic oligonucleotide
  Target: LAMA2; (+) strand; PAM type: NNGRRT; PAM sequence: GAGAAT
gcatcatgggacaatgagga

SEQ ID NO: 33218 - DNA, 20 bp, Artificial Sequence
  Description of Artificial Sequence: Synthetic oligonucleotide
  Target: LAMA2; (+) strand; PAM type: NNGRRT; PAM sequence: AAGAAT
atgctgattaccaccacata

SEQ ID NO: 33219 - DNA, 20 bp, Artificial Sequence
  Description of Artificial Sequence: Synthetic oligonucleotide
  Target: LAMA2; (+) strand; PAM type: NNGRRT; PAM sequence: TGGAAT
catcatcacaggaagttctg

SEQ ID NO: 33220 - DNA, 20 bp, Artificial Sequence
  Description of Artificial Sequence: Synthetic oligonucleotide
  Target: LAMA2; (+) strand; PAM type: NNGRRT; PAM sequence: CTGAGT
ccatttcacatataagaaca

SEQ ID NO: 33221 - DNA, 20 bp, Artificial Sequence
  Description of Artificial Sequence: Synthetic oligonucleotide
  Target: LAMA2; (+) strand; PAM type: NNGRRT; PAM sequence: TTGAGT
agtaaacattcaagtgtagt

SEQ ID NO: 33222 - DNA, 20 bp, Artificial Sequence
  Description of Artificial Sequence: Synthetic oligonucleotide
  Target: LAMA2; (+) strand; PAM type: NNGRRT; PAM sequence: ATGGGT
ttattgaaaaaataaaatgt

SEQ ID NO: 33223 - DNA, 20 bp, Artificial Sequence
  Description of Artificial Sequence: Synthetic oligonucleotide
  Target: LAMA2; (+) strand; PAM type: NNGRRT; PAM sequence: TAGAAT
attttgttattgttctaatg

SEQ ID NO: 33224 - DNA, 20 bp, Artificial Sequence
  Description of Artificial Sequence: Synthetic oligonucleotide
  Target: LAMA2; (+) strand; PAM type: NNGRRT; PAM sequence: TGGGGT
ctaatgtagaatacagactt

SEQ ID NO: 33225 - DNA, 20 bp, Artificial Sequence
  Description of Artificial Sequence: Synthetic oligonucleotide
  Target: LAMA2; (+) strand; PAM type: NNGRRT; PAM sequence: AGGGAT
acatttttttattttgagac

SEQ ID NO: 33226 - DNA, 20 bp, Artificial Sequence
  Description of Artificial Sequence: Synthetic oligonucleotide
  Target: LAMA2; (+) strand; PAM type: NNGRRT; PAM sequence: TGGAGT
tctcactctgtagcccaggc

SEQ ID NO: 33227 - DNA, 20 bp, Artificial Sequence
  Description of Artificial Sequence: Synthetic oligonucleotide
  Target: LAMA2; (+) strand; PAM type: NNGRRT; PAM sequence: CAGGGT
tttggaggggagggcaaaga

SEQ ID NO: 33228 - DNA, 20 bp, Artificial Sequence
  Description of Artificial Sequence: Synthetic oligonucleotide
  Target: LAMA2; (+) strand; PAM type: NNGRRT; PAM sequence: AGGGAT
tcttcggcctcccaaaatgc

SEQ ID NO: 33229 - DNA, 20 bp, Artificial Sequence
  Description of Artificial Sequence: Synthetic oligonucleotide
  Target: LAMA2; (+) strand; PAM type: NNGRRT; PAM sequence: AGGAAT
tcccaaaatgcagggattac

SEQ ID NO: 33230 - DNA, 20 bp, Artificial Sequence
  Description of Artificial Sequence: Synthetic oligonucleotide
  Target: LAMA2; (+) strand; PAM type: NNGRRT; PAM sequence: AAGAAT
ttttagactatataatccaa

SEQ ID NO: 33231 - DNA, 20 bp, Artificial Sequence
  Description of Artificial Sequence: Synthetic oligonucleotide
  Target: LAMA2; (+) strand; PAM type: NNGRRT; PAM sequence: GTGGGT
gtacctcatgtttaaatgct

SEQ ID NO: 33232 - DNA, 20 bp, Artificial Sequence
  Description of Artificial Sequence: Synthetic oligonucleotide
  Target: LAMA2; (+) strand; PAM type: NNGRRT; PAM sequence: CAGGAT
ctacaaaaagactccttctg

SEQ ID NO: 33233 - DNA, 20 bp, Artificial Sequence
  Description of Artificial Sequence: Synthetic oligonucleotide
  Target: LAMA2; (+) strand; PAM type: NNGRRT; PAM sequence: CAGAGT
aaccagtagacaatggaaac

SEQ ID NO: 33234 - DNA, 20 bp, Artificial Sequence
  Description of Artificial Sequence: Synthetic oligonucleotide
  Target: LAMA2; (+) strand; PAM type: NNGRRT; PAM sequence: CTGGGT
acaatggaaaccagagtttg

SEQ ID NO: 33235 - DNA, 20 bp, Artificial Sequence
  Description of Artificial Sequence: Synthetic oligonucleotide
  Target: LAMA2; (+) strand; PAM type: NNGRRT; PAM sequence: AAGGAT
cgattatgttggtgttacca

SEQ ID NO: 33236 - DNA, 20 bp, Artificial Sequence
  Description of Artificial Sequence: Synthetic oligonucleotide
  Target: LAMA2; (+) strand; PAM type: NNGRRT; PAM sequence: AAGGAT
cttagtgtggctgctcctac

SEQ ID NO: 33237 - DNA, 20 bp, Artificial Sequence
  Description of Artificial Sequence: Synthetic oligonucleotide
  Target: LAMA2; (+) strand; PAM type: NNGRRT; PAM sequence: TAGAAT
aaaatggtattatgaagtcc

SEQ ID NO: 33238 - DNA, 20 bp, Artificial Sequence
  Description of Artificial Sequence: Synthetic oligonucleotide
  Target: LAMA2; (+) strand; PAM type: NNGRRT; PAM sequence: AAGAGT
ctcttaaaatatccataagc

SEQ ID NO: 33239 - DNA, 20 bp, Artificial Sequence
  Description of Artificial Sequence: Synthetic oligonucleotide
  Target: LAMA2; (+) strand; PAM type: NNGRRT; PAM sequence: AAGAAT
agtcaacagcaaatattagc

SEQ ID NO: 33240 - DNA, 20 bp, Artificial Sequence
  Description of Artificial Sequence: Synthetic oligonucleotide
  Target: LAMA2; (+) strand; PAM type: NNGRRT; PAM sequence: TAGAAT
attatcttaaaccactccaa

SEQ ID NO: 33241 - DNA, 20 bp, Artificial Sequence
  Description of Artificial Sequence: Synthetic oligonucleotide
  Target: LAMA2; (+) strand; PAM type: NNGRRT; PAM sequence: GTGGGT
tagggaaatgaagggaaaat

SEQ ID NO: 33242 - DNA, 20 bp, Artificial Sequence
  Description of Artificial Sequence: Synthetic oligonucleotide
  Target: LAMA2; (+) strand; PAM type: NNGRRT; PAM sequence: TTGAAT
gaaaaaagtaaatccaccac

SEQ ID NO: 33243 - DNA, 20 bp, Artificial Sequence
  Description of Artificial Sequence: Synthetic oligonucleotide
  Target: LAMA2; (+) strand; PAM type: NNGRRT; PAM sequence: CAGGAT
aaagactggaacagaacttt

SEQ ID NO: 33244 - DNA, 20 bp, Artificial Sequence
  Description of Artificial Sequence: Synthetic oligonucleotide
  Target: LAMA2; (+) strand; PAM type: NNGRRT; PAM sequence: TGGAAT
catagctacaggctccaatt

SEQ ID NO: 33245 - DNA, 20 bp, Artificial Sequence
  Description of Artificial Sequence: Synthetic oligonucleotide
  Target: LAMA2; (+) strand; PAM type: NNGRRT; PAM sequence: GGGAAT
acacccactctgagaagttt

SEQ ID NO: 33246 - DNA, 20 bp, Artificial Sequence
  Description of Artificial Sequence: Synthetic oligonucleotide
  Target: LAMA2; (+) strand; PAM type: NNGRRT; PAM sequence: GAGAAT
ttcttaaaggaagttttact

SEQ ID NO: 33247 - DNA, 20 bp, Artificial Sequence
  Description of Artificial Sequence: Synthetic oligonucleotide
  Target: LAMA2; (+) strand; PAM type: NNGRRT; PAM sequence: GAGGAT
cattcaaaagatatatacat

SEQ ID NO: 33248 - DNA, 20 bp, Artificial Sequence
  Description of Artificial Sequence: Synthetic oligonucleotide
  Target: LAMA2; (+) strand; PAM type: NNGRRT; PAM sequence: ATGAAT
ggatggaaactgtccggaaa

SEQ ID NO: 33249 - DNA, 20 bp, Artificial Sequence
  Description of Artificial Sequence: Synthetic oligonucleotide
  Target: LAMA2; (+) strand; PAM type: NNGRRT; PAM sequence: AGGAAT
aaaggcactttgcagtaacc

SEQ ID NO: 33250 - DNA, 20 bp, Artificial Sequence
  Description of Artificial Sequence: Synthetic oligonucleotide
  Target: LAMA2; (+) strand; PAM type: NNGRRT; PAM sequence: GTGGAT
atatgaggcagaaatttgat

SEQ ID NO: 33251 - DNA, 20 bp, Artificial Sequence
  Description of Artificial Sequence: Synthetic oligonucleotide
  Target: LAMA2; (+) strand; PAM type: NNGRRT; PAM sequence: TGGAAT
aaactccatgatttgaaaat

SEQ ID NO: 33252 - DNA, 20 bp, Artificial Sequence
  Description of Artificial Sequence: Synthetic oligonucleotide
  Target: LAMA2; (+) strand; PAM type: NNGRRT; PAM sequence: AAGGAT
gaggaaaatagcctacatta

SEQ ID NO: 33253 - DNA, 20 bp, Artificial Sequence
  Description of Artificial Sequence: Synthetic oligonucleotide
  Target: LAMA2; (+) strand; PAM type: NNGRRT; PAM sequence: ATGAAT
caaaatctaggactttaaaa

SEQ ID NO: 33254 - DNA, 20 bp, Artificial Sequence
  Description of Artificial Sequence: Synthetic oligonucleotide
  Target: LAMA2; (+) strand; PAM type: NNGRRT; PAM sequence: GAGAGT
tgactatctacatttactga

SEQ ID NO: 33255 - DNA, 20 bp, Artificial Sequence
  Description of Artificial Sequence: Synthetic oligonucleotide
  Target: LAMA2; (+) strand; PAM type: NNGRRT; PAM sequence: AGGAAT
tgtaagaaaaaaaagtcatt

SEQ ID NO: 33256 - DNA, 20 bp, Artificial Sequence
  Description of Artificial Sequence: Synthetic oligonucleotide
  Target: LAMA2; (+) strand; PAM type: NNGRRT; PAM sequence: AAGAGT
ggaagatggcaaggttgtga

SEQ ID NO: 33257 - DNA, 20 bp, Artificial Sequence
  Description of Artificial Sequence: Synthetic oligonucleotide
  Target: LAMA2; (+) strand; PAM type: NNGRRT; PAM sequence: GTGAAT
gatggcaaggttgtgaaaga

SEQ ID NO: 33258 - DNA, 20 bp, Artificial Sequence
  Description of Artificial Sequence: Synthetic oligonucleotide
  Target: LAMA2; (+) strand; PAM type: NNGRRT; PAM sequence: ATGAAT
gcaaggttgtgaaagagtga

SEQ ID NO: 33259 - DNA, 20 bp, Artificial Sequence
  Description of Artificial Sequence: Synthetic oligonucleotide
  Target: LAMA2; (+) strand; PAM type: NNGRRT; PAM sequence: ATGAAT
ggttgtgaaagagtgaatga

SEQ ID NO: 33260 - DNA, 20 bp, Artificial Sequence
  Description of Artificial Sequence: Synthetic oligonucleotide
  Target: LAMA2; (+) strand; PAM type: NNGRRT; PAM sequence: ATGAAT
gtgaaagagtgaatgaatga

SEQ ID NO: 33261 - DNA, 20 bp, Artificial Sequence
  Description of Artificial Sequence: Synthetic oligonucleotide
  Target: LAMA2; (+) strand; PAM type: NNGRRT; PAM sequence: ATGAAT
aagagtgaatgaatgaatga

SEQ ID NO: 33262 - DNA, 20 bp, Artificial Sequence
  Description of Artificial Sequence: Synthetic oligonucleotide
  Target: LAMA2; (+) strand; PAM type: NNGRRT; PAM sequence: ATGAAT
gtgaatgaatgaatgaatga

SEQ ID NO: 33263 - DNA, 20 bp, Artificial Sequence
  Description of Artificial Sequence: Synthetic oligonucleotide
  Target: LAMA2; (+) strand; PAM type: NNGRRT; PAM sequence: TAGAGT
aaacataaacaattaagtga

SEQ ID NO: 33264 - DNA, 20 bp, Artificial Sequence
  Description of Artificial Sequence: Synthetic oligonucleotide
  Target: LAMA2; (+) strand; PAM type: NNGRRT; PAM sequence: TAGAAT
atatttaaaatcaaaagctc

SEQ ID NO: 33265 - DNA, 20 bp, Artificial Sequence
  Description of Artificial Sequence: Synthetic oligonucleotide
  Target: LAMA2; (+) strand; PAM type: NNGRRT; PAM sequence: GAGGGT
atcacattaattgcatcgag

SEQ ID NO: 33266 - DNA, 20 bp, Artificial Sequence
  Description of Artificial Sequence: Synthetic oligonucleotide
  Target: LAMA2; (+) strand; PAM type: NNGRRT; PAM sequence: GTGAGT
cattaattgcatcgaggagg

SEQ ID NO: 33267 - DNA, 20 bp, Artificial Sequence
  Description of Artificial Sequence: Synthetic oligonucleotide
  Target: LAMA2; (+) strand; PAM type: NNGRRT; PAM sequence: CAGAAT
ctcttcttttcctttactca

SEQ ID NO: 33268 - DNA, 20 bp, Artificial Sequence
  Description of Artificial Sequence: Synthetic oligonucleotide
  Target: LAMA2; (+) strand; PAM type: NNGRRT; PAM sequence: AAGAAT
tcaacctgtcattcagcacc

SEQ ID NO: 33269 - DNA, 20 bp, Artificial Sequence
  Description of Artificial Sequence: Synthetic oligonucleotide
  Target: LAMA2; (+) strand; PAM type: NNGRRT; PAM sequence: ATGAGT
cctgtcattcagcaccaaga

SEQ ID NO: 33270 - DNA, 20 bp, Artificial Sequence
  Description of Artificial Sequence: Synthetic oligonucleotide
  Target: LAMA2; (+) strand; PAM type: NNGRRT; PAM sequence: TAGGAT
cccaggacaattgtcttctc

SEQ ID NO: 33271 - DNA, 20 bp, Artificial Sequence
  Description of Artificial Sequence: Synthetic oligonucleotide
  Target: LAMA2; (+) strand; PAM type: NNGRRT; PAM sequence: ATGGGT
tatttgcacctatatttcct

SEQ ID NO: 33272 - DNA, 20 bp, Artificial Sequence
  Description of Artificial Sequence: Synthetic oligonucleotide
  Target: LAMA2; (+) strand; PAM type: NNGRRT; PAM sequence: ATGGAT
gacacaaagaagggcagaaa

SEQ ID NO: 33273 - DNA, 20 bp, Artificial Sequence
  Description of Artificial Sequence: Synthetic oligonucleotide
  Target: LAMA2; (+) strand; PAM type: NNGRRT; PAM sequence: AAGGAT
attttatcccaatagcattc

SEQ ID NO: 33274 - DNA, 20 bp, Artificial Sequence
  Description of Artificial Sequence: Synthetic oligonucleotide
  Target: LAMA2; (+) strand; PAM type: NNGRRT; PAM sequence: AAGAAT
ttcaaggatgttaaagccta

SEQ ID NO: 33275 - DNA, 20 bp, Artificial Sequence
  Description of Artificial Sequence: Synthetic oligonucleotide
  Target: LAMA2; (+) strand; PAM type: NNGRRT; PAM sequence: CCGGGT
gcctaaagaatgtcaaccag

SEQ ID NO: 33276 - DNA, 20 bp, Artificial Sequence
  Description of Artificial Sequence: Synthetic oligonucleotide
  Target: LAMA2; (+) strand; PAM type: NNGRRT; PAM sequence: GAGGAT
actttggcaggtcaaagcag

SEQ ID NO: 33277 - DNA, 20 bp, Artificial Sequence
  Description of Artificial Sequence: Synthetic oligonucleotide
  Target: LAMA2; (+) strand; PAM type: NNGRRT; PAM sequence: AGGAGT
caggaggatcgtttgagccc

SEQ ID NO: 33278 - DNA, 20 bp, Artificial Sequence
  Description of Artificial Sequence: Synthetic oligonucleotide
  Target: LAMA2; (+) strand; PAM type: NNGRRT; PAM sequence: CTGGAT
tcacgccaccacactctagc

SEQ ID NO: 33279 - DNA, 20 bp, Artificial Sequence
  Description of Artificial Sequence: Synthetic oligonucleotide
  Target: LAMA2; (+) strand; PAM type: NNGRRT; PAM sequence: CAGAGT
ccacactctagcctggatga

SEQ ID NO: 33280 - DNA, 20 bp, Artificial Sequence
  Description of Artificial Sequence: Synthetic oligonucleotide
  Target: LAMA2; (+) strand; PAM type: NNGRRT; PAM sequence: AAGAGT
tctcaaaactttttttaaaa

SEQ ID NO: 33281 - DNA, 20 bp, Artificial Sequence
  Description of Artificial Sequence: Synthetic oligonucleotide
  Target: LAMA2; (+) strand; PAM type: NNGRRT; PAM sequence: AAGGGT
aatctagtttttctcaatga

SEQ ID NO: 33282 - DNA, 20 bp, Artificial Sequence
  Description of Artificial Sequence: Synthetic oligonucleotide
  Target: LAMA2; (+) strand; PAM type: NNGRRT; PAM sequence: AGGAAT
ttctcaatgaaagggttcat

SEQ ID NO: 33283 - DNA, 20 bp, Artificial Sequence
  Description of Artificial Sequence: Synthetic oligonucleotide
  Target: LAMA2; (+) strand; PAM type: NNGRRT; PAM sequence: ACGAGT
gaacccaaagatgtataacc

SEQ ID NO: 33284 - DNA, 20 bp, Artificial Sequence
  Description of Artificial Sequence: Synthetic oligonucleotide
  Target: LAMA2; (+) strand; PAM type: NNGRRT; PAM sequence: TTGGAT
gatgtataaccacgagtaac

SEQ ID NO: 33285 - DNA, 20 bp, Artificial Sequence
  Description of Artificial Sequence: Synthetic oligonucleotide
  Target: LAMA2; (+) strand; PAM type: NNGRRT; PAM sequence: AGGAAT
cgagtaacttggattatttc

SEQ ID NO: 33286 - DNA, 20 bp, Artificial Sequence
  Description of Artificial Sequence: Synthetic oligonucleotide
  Target: LAMA2; (+) strand; PAM type: NNGRRT; PAM sequence: GTGGGT
cagcactttgggaggccaag

SEQ ID NO: 33287 - DNA, 20 bp, Artificial Sequence
  Description of Artificial Sequence: Synthetic oligonucleotide
  Target: LAMA2; (+) strand; PAM type: NNGRRT; PAM sequence: CAGGAT
aggtgggtagatcacaaggt

SEQ ID NO: 33288 - DNA, 20 bp, Artificial Sequence
  Description of Artificial Sequence: Synthetic oligonucleotide
  Target: LAMA2; (+) strand; PAM type: NNGRRT; PAM sequence: GAGAAT
tacttgggaggctgaggcag

SEQ ID NO: 33289 - DNA, 20 bp, Artificial Sequence
  Description of Artificial Sequence: Synthetic oligonucleotide
  Target: LAMA2; (+) strand; PAM type: NNGRRT; PAM sequence: AAGAAT
agtaaatatagcacaagaac

SEQ ID NO: 33290 - DNA, 20 bp, Artificial Sequence
  Description of Artificial Sequence: Synthetic oligonucleotide
  Target: LAMA2; (+) strand; PAM type: NNGRRT; PAM sequence: AAGAAT
taagaacaaatatataattt

SEQ ID NO: 33291 - DNA, 20 bp, Artificial Sequence
  Description of Artificial Sequence: Synthetic oligonucleotide
  Target: LAMA2; (+) strand; PAM type: NNGRRT; PAM sequence: TTGAAT
gagaaaattataaaatttca

SEQ ID NO: 33292 - DNA, 20 bp, Artificial Sequence
  Description of Artificial Sequence: Synthetic oligonucleotide
  Target: LAMA2; (+) strand; PAM type: NNGRRT; PAM sequence: GTGAAT
aaatatcaccttatttttct

SEQ ID NO: 33293 - DNA, 20 bp, Artificial Sequence
  Description of Artificial Sequence: Synthetic oligonucleotide
  Target: LAMA2; (+) strand; PAM type: NNGRRT; PAM sequence: TAGAAT
tatatcaaagatgaaattcc

SEQ ID NO: 33294 - DNA, 20 bp, Artificial Sequence
  Description of Artificial Sequence: Synthetic oligonucleotide
  Target: LAMA2; (+) strand; PAM type: NNGRRT; PAM sequence: AAGAAT
agatgaaattcctagaatag

SEQ ID NO: 33295 - DNA, 20 bp, Artificial Sequence
  Description of Artificial Sequence: Synthetic oligonucleotide
  Target: LAMA2; (+) strand; PAM type: NNGRRT; PAM sequence: AAGAAT
gtataactgtgcaaatagga

SEQ ID NO: 33296 - DNA, 20 bp, Artificial Sequence
  Description of Artificial Sequence: Synthetic oligonucleotide
  Target: LAMA2; (+) strand; PAM type: NNGRRT; PAM sequence: GTGAAT
agacaacagtgaactgttca

SEQ ID NO: 33297 - DNA, 20 bp, Artificial Sequence
  Description of Artificial Sequence: Synthetic oligonucleotide
  Target: LAMA2; (+) strand; PAM type: NNGRRT; PAM sequence: CAGGAT
attcttagaagaaaatatac

SEQ ID NO: 33298 - DNA, 20 bp, Artificial Sequence
  Description of Artificial Sequence: Synthetic oligonucleotide
  Target: LAMA2; (+) strand; PAM type: NNGRRT; PAM sequence: ATGAGT
tgattgaacaaaacaagatt

SEQ ID NO: 33299 - DNA, 20 bp, Artificial Sequence
  Description of Artificial Sequence: Synthetic oligonucleotide
  Target: LAMA2; (+) strand; PAM type: NNGRRT; PAM sequence: GGGAAT
tacagtatatataatctaca

SEQ ID NO: 33300 - DNA, 20 bp, Artificial Sequence
  Description of Artificial Sequence: Synthetic oligonucleotide
  Target: LAMA2; (+) strand; PAM type: NNGRRT; PAM sequence: TGGGAT
aagctcactgcagtttataa

SEQ ID NO: 33301 - DNA, 20 bp, Artificial Sequence
  Description of Artificial Sequence: Synthetic oligonucleotide
  Target: LAMA2; (+) strand; PAM type: NNGRRT; PAM sequence: GTGAAT
aagaacagtattggaaagat

SEQ ID NO: 33302 - DNA, 20 bp, Artificial Sequence
  Description of Artificial Sequence: Synthetic oligonucleotide
  Target: LAMA2; (+) strand; PAM type: NNGRRT; PAM sequence: AAGAGT
tattggaaagatgtgaatca

SEQ ID NO: 33303 - DNA, 20 bp, Artificial Sequence
  Description of Artificial Sequence: Synthetic oligonucleotide
  Target: LAMA2; (+) strand; PAM type: NNGRRT; PAM sequence: CTGGGT
acaagccagcaattccactc

SEQ ID NO: 33304 - DNA, 20 bp, Artificial Sequence
  Description of Artificial Sequence: Synthetic oligonucleotide
  Target: LAMA2; (+) strand; PAM type: NNGRRT; PAM sequence: AAGAAT
gggcataataagacatgtac

SEQ ID NO: 33305 - DNA, 20 bp, Artificial Sequence
  Description of Artificial Sequence: Synthetic oligonucleotide
  Target: LAMA2; (+) strand; PAM type: NNGRRT; PAM sequence: TGGGAT
actgtggcacttttgcataa

SEQ ID NO: 33306 - DNA, 20 bp, Artificial Sequence
  Description of Artificial Sequence: Synthetic oligonucleotide
  Target: LAMA2; (+) strand; PAM type: NNGRRT; PAM sequence: AGGAAT
ttttgcataatgggatatca

SEQ ID NO: 33307 - DNA, 20 bp, Artificial Sequence
  Description of Artificial Sequence: Synthetic oligonucleotide
  Target: LAMA2; (+) strand; PAM type: NNGRRT; PAM sequence: AGGAAT
gatatcaaggaataagaaaa

SEQ ID NO: 33308 - DNA, 20 bp, Artificial Sequence
  Description of Artificial Sequence: Synthetic oligonucleotide
  Target: LAMA2; (+) strand; PAM type: NNGRRT; PAM sequence: GTGAAT
catattgtttacagacacat

SEQ ID NO: 33309 - DNA, 20 bp, Artificial Sequence
  Description of Artificial Sequence: Synthetic oligonucleotide
  Target: LAMA2; (+) strand; PAM type: NNGRRT; PAM sequence: AAGAAT
tgtatatcactcatattgtg

SEQ ID NO: 33310 - DNA, 20 bp, Artificial Sequence
  Description of Artificial Sequence: Synthetic oligonucleotide
  Target: LAMA2; (+) strand; PAM type: NNGRRT; PAM sequence: AAGAGT
tcgtaataaaaatatttttg

SEQ ID NO: 33311 - DNA, 20 bp, Artificial Sequence
  Description of Artificial Sequence: Synthetic oligonucleotide
  Target: LAMA2; (+) strand; PAM type: NNGRRT; PAM sequence: AAGAAT
aatgataagctagttataat

SEQ ID NO: 33312 - DNA, 20 bp, Artificial Sequence
  Description of Artificial Sequence: Synthetic oligonucleotide
  Target: LAMA2; (+) strand; PAM type: NNGRRT; PAM sequence: AAGGAT
tctgaaatagatttccacta

SEQ ID NO: 33313 - DNA, 20 bp, Artificial Sequence
  Description of Artificial Sequence: Synthetic oligonucleotide
  Target: LAMA2; (+) strand; PAM type: NNGRRT; PAM sequence: ATGAAT
tcctcttcaagataaaagaa

SEQ ID NO: 33314 - DNA, 20 bp, Artificial Sequence
  Description of Artificial Sequence: Synthetic oligonucleotide
  Target: LAMA2; (+) strand; PAM type: NNGRRT; PAM sequence: GTGAAT
tcaagataaaagaaatgaat

SEQ ID NO: 33315 - DNA, 20 bp, Artificial Sequence
  Description of Artificial Sequence: Synthetic oligonucleotide
  Target: LAMA2; (+) strand; PAM type: NNGRRT; PAM sequence: CAGGAT
gaatgtgaatcaccagcttt

SEQ ID NO: 33316 - DNA, 20 bp, Artificial Sequence
  Description of Artificial Sequence: Synthetic oligonucleotide
  Target: LAMA2; (+) strand; PAM type: NNGRRT; PAM sequence: TAGAGT
gctaacggttttgataccca

SEQ ID NO: 33317 - DNA, 20 bp, Artificial Sequence
  Description of Artificial Sequence: Synthetic oligonucleotide
  Target: LAMA2; (+) strand; PAM type: NNGRRT; PAM sequence: ATGGGT
ttgtgattcctttctgctaa

SEQ ID NO: 33318 - DNA, 20 bp, Artificial Sequence
  Description of Artificial Sequence: Synthetic oligonucleotide
  Target: LAMA2; (+) strand; PAM type: NNGRRT; PAM sequence: AGGAAT
ggcaaaccatccatgagcta

SEQ ID NO: 33319 - DNA, 20 bp, Artificial Sequence
  Description of Artificial Sequence: Synthetic oligonucleotide
  Target: LAMA2; (+) strand; PAM type: NNGRRT; PAM sequence: TTGAGT
atgagctaaggaatttttaa

SEQ ID NO: 33320 - DNA, 20 bp, Artificial Sequence
  Description of Artificial Sequence: Synthetic oligonucleotide
  Target: LAMA2; (+) strand; PAM type: NNGRRT; PAM sequence: TGGAAT
tggaacatgatgatgtttga

SEQ ID NO: 33321 - DNA, 20 bp, Artificial Sequence
  Description of Artificial Sequence: Synthetic oligonucleotide
  Target: LAMA2; (+) strand; PAM type: NNGRRT; PAM sequence: TGGGGT
aggactgcattcaggctccc

SEQ ID NO: 33322 - DNA, 20 bp, Artificial Sequence
  Description of Artificial Sequence: Synthetic oligonucleotide
  Target: LAMA2; (+) strand; PAM type: NNGRRT; PAM sequence: TGGGAT
aggctccctggggttcatga

SEQ ID NO: 33323 - DNA, 20 bp, Artificial Sequence
  Description of Artificial Sequence: Synthetic oligonucleotide
  Target: LAMA2; (+) strand; PAM type: NNGRRT; PAM sequence: GTGGAT
agaagaaagcaggcatgctt

SEQ ID NO: 33324 - DNA, 20 bp, Artificial Sequence
  Description of Artificial Sequence: Synthetic oligonucleotide
  Target: LAMA2; (+) strand; PAM type: NNGRRT; PAM sequence: CAGAAT
caaattgaagtctaaatact

SEQ ID NO: 33325 - DNA, 20 bp, Artificial Sequence
  Description of Artificial Sequence: Synthetic oligonucleotide
  Target: LAMA2; (+) strand; PAM type: NNGRRT; PAM sequence: GGGAGT
actcagaatgccacaaggtt

SEQ ID NO: 33326 - DNA, 20 bp, Artificial Sequence
  Description of Artificial Sequence: Synthetic oligonucleotide
  Target: LAMA2; (+) strand; PAM type: NNGRRT; PAM sequence: GTGAAT
cagaagctagctgtccactt

SEQ ID NO: 33327 - DNA, 20 bp, Artificial Sequence
  Description of Artificial Sequence: Synthetic oligonucleotide
  Target: LAMA2; (+) strand; PAM type: NNGRRT; PAM sequence: AGGGAT
cacttgtgaatataagggag

SEQ ID NO: 33328 - DNA, 20 bp, Artificial Sequence
  Description of Artificial Sequence: Synthetic oligonucleotide
  Target: LAMA2; (+) strand; PAM type: NNGRRT; PAM sequence: ATGGGT
ttgacaccctttgtctcctg

SEQ ID NO: 33329 - DNA, 20 bp, Artificial Sequence
  Description of Artificial Sequence: Synthetic oligonucleotide
  Target: LAMA2; (+) strand; PAM type: NNGRRT; PAM sequence: GGGAAT
acgaacctgtggttctgcca

SEQ ID NO: 33330 - DNA, 20 bp, Artificial Sequence
  Description of Artificial Sequence: Synthetic oligonucleotide
  Target: LAMA2; (+) strand; PAM type: NNGRRT; PAM sequence: CCGAAT
aaattgtgatcagaccagag

SEQ ID NO: 33331 - DNA, 20 bp, Artificial Sequence
  Description of Artificial Sequence: Synthetic oligonucleotide
  Target: LAMA2; (+) strand; PAM type: NNGRRT; PAM sequence: GAGGGT
cgttcatgtagagcgaacta

SEQ ID NO: 33332 - DNA, 20 bp, Artificial Sequence
  Description of Artificial Sequence: Synthetic oligonucleotide
  Target: LAMA2; (+) strand; PAM type: NNGRRT; PAM sequence: AAGGAT
ggacctactatgcattgcaa

SEQ ID NO: 33333 - DNA, 20 bp, Artificial Sequence
  Description of Artificial Sequence: Synthetic oligonucleotide
  Target: LAMA2; (+) strand; PAM type: NNGRRT; PAM sequence: AGGAGT
cctcatttgcctcagccctt

SEQ ID NO: 33334 - DNA, 20 bp, Artificial Sequence
  Description of Artificial Sequence: Synthetic oligonucleotide
  Target: LAMA2; (+) strand; PAM type: NNGRRT; PAM sequence: CAGAGT
ctgcttagctgtcacagata

SEQ ID NO: 33335 - DNA, 20 bp, Artificial Sequence
  Description of Artificial Sequence: Synthetic oligonucleotide
  Target: LAMA2; (+) strand; PAM type: NNGRRT; PAM sequence: CAGGGT
gtcccccttcccaaggtttg

SEQ ID NO: 33336 - DNA, 20 bp, Artificial Sequence
  Description of Artificial Sequence: Synthetic oligonucleotide
  Target: LAMA2; (+) strand; PAM type: NNGRRT; PAM sequence: CAGAGT
caaggtttgcagggtccctg

SEQ ID NO: 33337 - DNA, 20 bp, Artificial Sequence
  Description of Artificial Sequence: Synthetic oligonucleotide
  Target: LAMA2; (+) strand; PAM type: NNGRRT; PAM sequence: CAGAAT
agagtggctttctgagggaa

SEQ ID NO: 33338 - DNA, 20 bp, Artificial Sequence
  Description of Artificial Sequence: Synthetic oligonucleotide
  Target: LAMA2; (+) strand; PAM type: NNGRRT; PAM sequence: CAGAGT
ccacctttttacaaatctac

SEQ ID NO: 33339 - DNA, 20 bp, Artificial Sequence
  Description of Artificial Sequence: Synthetic oligonucleotide
  Target: LAMA2; (+) strand; PAM type: NNGRRT; PAM sequence: GGGAAT
cttgccccagccctgggcca

SEQ ID NO: 33340 - DNA, 20 bp, Artificial Sequence
  Description of Artificial Sequence: Synthetic oligonucleotide
  Target: LAMA2; (+) strand; PAM type: NNGRRT; PAM sequence: TAGAAT
cacaaactgatgactttctt

SEQ ID NO: 33341 - DNA, 20 bp, Artificial Sequence
  Description of Artificial Sequence: Synthetic oligonucleotide
  Target: LAMA2; (+) strand; PAM type: NNGRRT; PAM sequence: AGGGGT
aacagaagcccagagacttc

SEQ ID NO: 33342 - DNA, 20 bp, Artificial Sequence
  Description of Artificial Sequence: Synthetic oligonucleotide
  Target: LAMA2; (+) strand; PAM type: NNGRRT; PAM sequence: GAGGAT
tgatgaggcctcaaaacaca

SEQ ID NO: 33343 - DNA, 20 bp, Artificial Sequence
  Description of Artificial Sequence: Synthetic oligonucleotide
  Target: LAMA2; (+) strand; PAM type: NNGRRT; PAM sequence: ACGAGT
agaggatacttttaaatgca

SEQ ID NO: 33344 - DNA, 20 bp, Artificial Sequence
  Description of Artificial Sequence: Synthetic oligonucleotide
  Target: LAMA2; (+) strand; PAM type: NNGRRT; PAM sequence: ATGAAT
tacttttaaatgcaacgagt

SEQ ID NO: 33345 - DNA, 20 bp, Artificial Sequence
  Description of Artificial Sequence: Synthetic oligonucleotide
  Target: LAMA2; (+) strand; PAM type: NNGRRT; PAM sequence: GAGGAT
attattattattattaggta

SEQ ID NO: 33346 - DNA, 20 bp, Artificial Sequence
  Description of Artificial Sequence: Synthetic oligonucleotide
  Target: LAMA2; (+) strand; PAM type: NNGRRT; PAM sequence: TAGGAT
ttaggtagaggattaggctg

SEQ ID NO: 33347 - DNA, 20 bp, Artificial Sequence
  Description of Artificial Sequence: Synthetic oligonucleotide
  Target: LAMA2; (+) strand; PAM type: NNGRRT; PAM sequence: ATGAAT
gtagaggattaggctgtagg

SEQ ID NO: 33348 - DNA, 20 bp, Artificial Sequence
  Description of Artificial Sequence: Synthetic oligonucleotide
  Target: LAMA2; (+) strand; PAM type: NNGRRT; PAM sequence: CAGAAT
attgatacaaagcgttcatg

SEQ ID NO: 33349 - DNA, 20 bp, Artificial Sequence
  Description of Artificial Sequence: Synthetic oligonucleotide
  Target: LAMA2; (+) strand; PAM type: NNGRRT; PAM sequence: AGGGAT
aaccatgatcgagacaaatg

SEQ ID NO: 33350 - DNA, 20 bp, Artificial Sequence
  Description of Artificial Sequence: Synthetic oligonucleotide
  Target: LAMA2; (+) strand; PAM type: NNGRRT; PAM sequence: CTGAAT
tctctgaggagaaatgcaaa

SEQ ID NO: 33351 - DNA, 20 bp, Artificial Sequence
  Description of Artificial Sequence: Synthetic oligonucleotide
  Target: LAMA2; (+) strand; PAM type: NNGRRT; PAM sequence: TTGAAT
tgcaaactgaatgctctcat

SEQ ID NO: 33352 - DNA, 20 bp, Artificial Sequence
  Description of Artificial Sequence: Synthetic oligonucleotide
  Target: LAMA2; (+) strand; PAM type: NNGRRT; PAM sequence: TAGAAT
gaatgctctcatttgaatct

SEQ ID NO: 33353 - DNA, 20 bp, Artificial Sequence
  Description of Artificial Sequence: Synthetic oligonucleotide
  Target: LAMA2; (+) strand; PAM type: NNGRRT; PAM sequence: TAGAAT
atttgaatcttagaatgctt

SEQ ID NO: 33354 - DNA, 20 bp, Artificial Sequence
  Description of Artificial Sequence: Synthetic oligonucleotide
  Target: LAMA2; (+) strand; PAM type: NNGRRT; PAM sequence: GTGGAT
actttgggaggccaaggcag

SEQ ID NO: 33355 - DNA, 20 bp, Artificial Sequence
  Description of Artificial Sequence: Synthetic oligonucleotide
  Target: LAMA2; (+) strand; PAM type: NNGRRT; PAM sequence: AGGAGT
ggcaggtggatcatgaggtc

SEQ ID NO: 33356 - DNA, 20 bp, Artificial Sequence
  Description of Artificial Sequence: Synthetic oligonucleotide
  Target: LAMA2; (+) strand; PAM type: NNGRRT; PAM sequence: AGGAAT
acaaaaacatttaaacttta

SEQ ID NO: 33357 - DNA, 20 bp, Artificial Sequence
  Description of Artificial Sequence: Synthetic oligonucleotide
  Target: LAMA2; (+) strand; PAM type: NNGRRT; PAM sequence: AAGAAT
aatgtgttattttgttgaga

SEQ ID NO: 33358 - DNA, 20 bp, Artificial Sequence
  Description of Artificial Sequence: Synthetic oligonucleotide
  Target: LAMA2; (+) strand; PAM type: NNGRRT; PAM sequence: TGGAAT
attttgttgagaaagaattc

SEQ ID NO: 33359 - DNA, 20 bp, Artificial Sequence
  Description of Artificial Sequence: Synthetic oligonucleotide
  Target: LAMA2; (+) strand; PAM type: NNGRRT; PAM sequence: CAGGAT
ttgccattcattgttaatta

SEQ ID NO: 33360 - DNA, 20 bp, Artificial Sequence
  Description of Artificial Sequence: Synthetic oligonucleotide
  Target: LAMA2; (+) strand; PAM type: NNGRRT; PAM sequence: CTGAAT
gatgatttgttttcattgtt

SEQ ID NO: 33361 - DNA, 20 bp, Artificial Sequence
  Description of Artificial Sequence: Synthetic oligonucleotide
  Target: LAMA2; (+) strand; PAM type: NNGRRT; PAM sequence: TTGGAT
aataccgcctcacaaaataa

SEQ ID NO: 33362 - DNA, 20 bp, Artificial Sequence
  Description of Artificial Sequence: Synthetic oligonucleotide
  Target: LAMA2; (+) strand; PAM type: NNGRRT; PAM sequence: CTGAGT
aaataggacaagcaactgaa

SEQ ID NO: 33363 - DNA, 20 bp, Artificial Sequence
  Description of Artificial Sequence: Synthetic oligonucleotide
  Target: LAMA2; (+) strand; PAM type: NNGRRT; PAM sequence: TAGGGT
ataggctaaaggtcaggaag

SEQ ID NO: 33364 - DNA, 20 bp, Artificial Sequence
  Description of Artificial Sequence: Synthetic oligonucleotide
  Target: LAMA2; (+) strand; PAM type: NNGRRT; PAM sequence: AGGAGT
gaagtagggtgagatatttt

SEQ ID NO: 33365 - DNA, 20 bp, Artificial Sequence
  Description of Artificial Sequence: Synthetic oligonucleotide
  Target: LAMA2; (+) strand; PAM type: NNGRRT; PAM sequence: TGGGGT
gagatattttaggagtcatt

SEQ ID NO: 33366 - DNA, 20 bp, Artificial Sequence
  Description of Artificial Sequence: Synthetic oligonucleotide
  Target: LAMA2; (+) strand; PAM type: NNGRRT; PAM sequence: CAGAAT
taggagtcatttggggtttc

SEQ ID NO: 33367 - DNA, 20 bp, Artificial Sequence
  Description of Artificial Sequence: Synthetic oligonucleotide
  Target: LAMA2; (+) strand; PAM type: NNGRRT; PAM sequence: TAGGGT
cattccaaacaaataagaaa

SEQ ID NO: 33368 - DNA, 20 bp, Artificial Sequence
  Description of Artificial Sequence: Synthetic oligonucleotide
  Target: LAMA2; (+) strand; PAM type: NNGRRT; PAM sequence: AAGAAT
tcaagtaattatgaaactct

SEQ ID NO: 33369 - DNA, 20 bp, Artificial Sequence
  Description of Artificial Sequence: Synthetic oligonucleotide
  Target: LAMA2; (+) strand; PAM type: NNGRRT; PAM sequence: CAGAAT
tttaaaaatggaaaacacac

SEQ ID NO: 33370 - DNA, 20 bp, Artificial Sequence
  Description of Artificial Sequence: Synthetic oligonucleotide
  Target: LAMA2; (+) strand; PAM type: NNGRRT; PAM sequence: CAGGAT
cctaaaaggtaaaataggag

SEQ ID NO: 33371 - DNA, 20 bp, Artificial Sequence
  Description of Artificial Sequence: Synthetic oligonucleotide
  Target: LAMA2; (+) strand; PAM type: NNGRRT; PAM sequence: ATGAAT
tttttatctccatcttataa

SEQ ID NO: 33372 - DNA, 20 bp, Artificial Sequence
  Description of Artificial Sequence: Synthetic oligonucleotide
  Target: LAMA2; (+) strand; PAM type: NNGRRT; PAM sequence: GTGAAT
tcattctccatcaccaccct

SEQ ID NO: 33373 - DNA, 20 bp, Artificial Sequence
  Description of Artificial Sequence: Synthetic oligonucleotide
  Target: LAMA2; (+) strand; PAM type: NNGRRT; PAM sequence: AAGGGT
tgaattggtttaaaaaaaat

SEQ ID NO: 33374 - DNA, 20 bp, Artificial Sequence
  Description of Artificial Sequence: Synthetic oligonucleotide
  Target: LAMA2; (+) strand; PAM type: NNGRRT; PAM sequence: AAGAGT
gctttcagctaaaggggaaa

SEQ ID NO: 33375 - DNA, 20 bp, Artificial Sequence
  Description of Artificial Sequence: Synthetic oligonucleotide
  Target: LAMA2; (+) strand; PAM type: NNGRRT; PAM sequence: GTGAGT
tgtaggggaggggcttctca

SEQ ID NO: 33376 - DNA, 20 bp, Artificial Sequence
  Description of Artificial Sequence: Synthetic oligonucleotide
  Target: LAMA2; (+) strand; PAM type: NNGRRT; PAM sequence: GTGAGT
tgagtcacacatacccggaa

SEQ ID NO: 33377 - DNA, 20 bp, Artificial Sequence
  Description of Artificial Sequence: Synthetic oligonucleotide
  Target: LAMA2; (+) strand; PAM type: NNGRRT; PAM sequence: CTGGGT
tagcaaggaagctgaacctc

SEQ ID NO: 33378 - DNA, 20 bp, Artificial Sequence
  Description of Artificial Sequence: Synthetic oligonucleotide
  Target: LAMA2; (+) strand; PAM type: NNGRRT; PAM sequence: TTGAAT
tttgtccctttctcttactt

SEQ ID NO: 33379 - DNA, 20 bp, Artificial Sequence
  Description of Artificial Sequence: Synthetic oligonucleotide
  Target: LAMA2; (+) strand; PAM type: NNGRRT; PAM sequence: GAGGGT
ttctttataaagtcaagtaa

SEQ ID NO: 33380 - DNA, 20 bp, Artificial Sequence
  Description of Artificial Sequence: Synthetic oligonucleotide
  Target: LAMA2; (+) strand; PAM type: NNGRRT; PAM sequence: AGGGAT
ctccttctgattcttggccc

SEQ ID NO: 33381 - DNA, 20 bp, Artificial Sequence
  Description of Artificial Sequence: Synthetic oligonucleotide
  Target: LAMA2; (+) strand; PAM type: NNGRRT; PAM sequence: AAGGAT
gattcttggcccagggatcc

SEQ ID NO: 33382 - DNA, 20 bp, Artificial Sequence
  Description of Artificial Sequence: Synthetic oligonucleotide
  Target: LAMA2; (+) strand; PAM type: NNGRRT; PAM sequence: GTGAGT
aggttctcaattagcagtgt

SEQ ID NO: 33383 - DNA, 20 bp, Artificial Sequence
  Description of Artificial Sequence: Synthetic oligonucleotide
  Target: LAMA2; (+) strand; PAM type: NNGRRT; PAM sequence: CAGGGT
tcattgcaaggaacaattag

SEQ ID NO: 33384 - DNA, 20 bp, Artificial Sequence
  Description of Artificial Sequence: Synthetic oligonucleotide
  Target: LAMA2; (+) strand; PAM type: NNGRRT; PAM sequence: AAGAGT
ggtttcagtaaactttcagg

SEQ ID NO: 33385 - DNA, 20 bp, Artificial Sequence
  Description of Artificial Sequence: Synthetic oligonucleotide
  Target: LAMA2; (+) strand; PAM type: NNGRRT; PAM sequence: GGGAGT
ctttcaggaagagtgaacga

SEQ ID NO: 33386 - DNA, 20 bp, Artificial Sequence
  Description of Artificial Sequence: Synthetic oligonucleotide
  Target: LAMA2; (+) strand; PAM type: NNGRRT; PAM sequence: TAGAAT
agaacagcgtttgcttagtg

SEQ ID NO: 33387 - DNA, 20 bp, Artificial Sequence
  Description of Artificial Sequence: Synthetic oligonucleotide
  Target: LAMA2; (+) strand; PAM type: NNGRRT; PAM sequence: AGGGGT
ccttaaaagctatggttgag

SEQ ID NO: 33388 - DNA, 20 bp, Artificial Sequence
  Description of Artificial Sequence: Synthetic oligonucleotide
  Target: LAMA2; (+) strand; PAM type: NNGRRT; PAM sequence: AAGGGT
agctatggttgagaggggtg

SEQ ID NO: 33389 - DNA, 20 bp, Artificial Sequence
  Description of Artificial Sequence: Synthetic oligonucleotide
  Target: LAMA2; (+) strand; PAM type: NNGRRT; PAM sequence: AAGAAT
aggggtgaagggtggcagga

SEQ ID NO: 33390 - DNA, 20 bp, Artificial Sequence
  Description of Artificial Sequence: Synthetic oligonucleotide
  Target: LAMA2; (+) strand; PAM type: NNGRRT; PAM sequence: TTGAAT
gaatttgatttccaactgta

SEQ ID NO: 33391 - DNA, 20 bp, Artificial Sequence
  Description of Artificial Sequence: Synthetic oligonucleotide
  Target: LAMA2; (+) strand; PAM type: NNGRRT; PAM sequence: GTGGAT
tcagcatctttacagttcaa

SEQ ID NO: 33392 - DNA, 20 bp, Artificial Sequence
  Description of Artificial Sequence: Synthetic oligonucleotide
  Target: LAMA2; (+) strand; PAM type: NNGRRT; PAM sequence: GGGGGT
aagttaaaaagcttttcgtt

SEQ ID NO: 33393 - DNA, 20 bp, Artificial Sequence
  Description of Artificial Sequence: Synthetic oligonucleotide
  Target: LAMA2; (+) strand; PAM type: NNGRRT; PAM sequence: CTGAAT
tttcgttgggggtgctccac

SEQ ID NO: 33394 - DNA, 20 bp, Artificial Sequence
  Description of Artificial Sequence: Synthetic oligonucleotide
  Target: LAMA2; (+) strand; PAM type: NNGRRT; PAM sequence: TGGAAT
ctccttttgaaggctgcata

SEQ ID NO: 33395 - DNA, 20 bp, Artificial Sequence
  Description of Artificial Sequence: Synthetic oligonucleotide
  Target: LAMA2; (+) strand; PAM type: NNGRRT; PAM sequence: GTGGAT
ttgttattaactctgtgtaa

SEQ ID NO: 33396 - DNA, 20 bp, Artificial Sequence
  Description of Artificial Sequence: Synthetic oligonucleotide
  Target: LAMA2; (+) strand; PAM type: NNGRRT; PAM sequence: AGGGGT
tatttttatttcttgctatt

SEQ ID NO: 33397 - DNA, 20 bp, Artificial Sequence
  Description of Artificial Sequence: Synthetic oligonucleotide
  Target: LAMA2; (+) strand; PAM type: NNGRRT; PAM sequence: GAGGAT
caggggaggagggaaacaat

SEQ ID NO: 33398 - DNA, 20 bp, Artificial Sequence
  Description of Artificial Sequence: Synthetic oligonucleotide
  Target: LAMA2; (+) strand; PAM type: NNGRRT; PAM sequence: GGGGAT
atggacttaaaaaggcatgc

SEQ ID NO: 33399 - DNA, 20 bp, Artificial Sequence
  Description of Artificial Sequence: Synthetic oligonucleotide
  Target: LAMA2; (+) strand; PAM type: NNGRRT; PAM sequence: CTGAGT
tctaatttttacccagtatt

SEQ ID NO: 33400 - DNA, 20 bp, Artificial Sequence
  Description of Artificial Sequence: Synthetic oligonucleotide
  Target: LAMA2; (+) strand; PAM type: NNGRRT; PAM sequence: CAGGAT
atttcagaaggaagattatt

SEQ ID NO: 33401 - DNA, 20 bp, Artificial Sequence
  Description of Artificial Sequence: Synthetic oligonucleotide
  Target: LAMA2; (+) strand; PAM type: NNGRRT; PAM sequence: TAGAAT
tatctagtacactctgatat

SEQ ID NO: 33402 - DNA, 20 bp, Artificial Sequence
  Description of Artificial Sequence: Synthetic oligonucleotide
  Target: LAMA2; (+) strand; PAM type: NNGRRT; PAM sequence: TTGAAT
aacctattcttacatcttca

SEQ ID NO: 33403 - DNA, 20 bp, Artificial Sequence
  Description of Artificial Sequence: Synthetic oligonucleotide
  Target: LAMA2; (+) strand; PAM type: NNGRRT; PAM sequence: CAGAAT
ttggaaaacacagaaatatc

SEQ ID NO: 33404 - DNA, 20 bp, Artificial Sequence
  Description of Artificial Sequence: Synthetic oligonucleotide
  Target: LAMA2; (+) strand; PAM type: NNGRRT; PAM sequence: ATGAAT
acacagaaatatccagaatc

SEQ ID NO: 33405 - DNA, 20 bp, Artificial Sequence
  Description of Artificial Sequence: Synthetic oligonucleotide
  Target: LAMA2; (+) strand; PAM type: NNGRRT; PAM sequence: AGGAGT
caggcagattgcctgagctc

SEQ ID NO: 33406 - DNA, 20 bp, Artificial Sequence
  Description of Artificial Sequence: Synthetic oligonucleotide
  Target: LAMA2; (+) strand; PAM type: NNGRRT; PAM sequence: GAGAAT
tactcagtaggctgaggcag

SEQ ID NO: 33407 - DNA, 20 bp, Artificial Sequence
  Description of Artificial Sequence: Synthetic oligonucleotide
  Target: LAMA2; (+) strand; PAM type: NNGRRT; PAM sequence: GTGAAT
cactgtaaccgaccatctgt

SEQ ID NO: 33408 - DNA, 20 bp, Artificial Sequence
  Description of Artificial Sequence: Synthetic oligonucleotide
  Target: LAMA2; (+) strand; PAM type: NNGRRT; PAM sequence: TCGGAT
gcttttgagatcagaaaaga

SEQ ID NO: 33409 - DNA, 20 bp, Artificial Sequence
  Description of Artificial Sequence: Synthetic oligonucleotide
  Target: LAMA2; (+) strand; PAM type: NNGRRT; PAM sequence: CAGGGT
cagaaaagatcggatgcttt

SEQ ID NO: 33410 - DNA, 20 bp, Artificial Sequence
  Description of Artificial Sequence: Synthetic oligonucleotide
  Target: LAMA2; (+) strand; PAM type: NNGRRT; PAM sequence: GAGGAT
tgtttcctcatctgtcaaat

SEQ ID NO: 33411 - DNA, 20 bp, Artificial Sequence
  Description of Artificial Sequence: Synthetic oligonucleotide
  Target: LAMA2; (+) strand; PAM type: NNGRRT; PAM sequence: CAGAGT
agacatcaaagactttgtat

SEQ ID NO: 33412 - DNA, 20 bp, Artificial Sequence
  Description of Artificial Sequence: Synthetic oligonucleotide
  Target: LAMA2; (+) strand; PAM type: NNGRRT; PAM sequence: ATGAGT
actatgtagtaatgataata

SEQ ID NO: 33413 - DNA, 20 bp, Artificial Sequence
  Description of Artificial Sequence: Synthetic oligonucleotide
  Target: LAMA2; (+) strand; PAM type: NNGRRT; PAM sequence: TCGAGT
tatagtctttctacttttag

SEQ ID NO: 33414 - DNA, 20 bp, Artificial Sequence
  Description of Artificial Sequence: Synthetic oligonucleotide
  Target: LAMA2; (+) strand; PAM type: NNGRRT; PAM sequence: AAGAAT
ctacttttagtcgagttaat

SEQ ID NO: 33415 - DNA, 20 bp, Artificial Sequence
  Description of Artificial Sequence: Synthetic oligonucleotide
  Target: LAMA2; (+) strand; PAM type: NNGRRT; PAM sequence: CAGAGT
ctcacaccactagtaaaagg

SEQ ID NO: 33416 - DNA, 20 bp, Artificial Sequence
  Description of Artificial Sequence: Synthetic oligonucleotide
  Target: LAMA2; (+) strand; PAM type: NNGRRT; PAM sequence: AAGAAT
ccactagtaaaaggcagagt

SEQ ID NO: 33417 - DNA, 20 bp, Artificial Sequence
  Description of Artificial Sequence: Synthetic oligonucleotide
  Target: LAMA2; (+) strand; PAM type: NNGRRT; PAM sequence: GCGAGT
agagtaagaattttattcta

SEQ ID NO: 33418 - DNA, 20 bp, Artificial Sequence
  Description of Artificial Sequence: Synthetic oligonucleotide
  Target: LAMA2; (+) strand; PAM type: NNGRRT; PAM sequence: GAGAGT
atagaccatggtaggctatt

SEQ ID NO: 33419 - DNA, 20 bp, Artificial Sequence
  Description of Artificial Sequence: Synthetic oligonucleotide
  Target: LAMA2; (+) strand; PAM type: NNGRRT; PAM sequence: ATGAAT
ggaaattataaggccaaaag

SEQ ID NO: 33420 - DNA, 20 bp, Artificial Sequence
  Description of Artificial Sequence: Synthetic oligonucleotide
  Target: LAMA2; (+) strand; PAM type: NNGRRT; PAM sequence: CTGAAT
aaggttttcaatacacatac

SEQ ID NO: 33421 - DNA, 20 bp, Artificial Sequence
  Description of Artificial Sequence: Synthetic oligonucleotide
  Target: LAMA2; (+) strand; PAM type: NNGRRT; PAM sequence: ATGGGT
ggttatattccataccagta

SEQ ID NO: 33422 - DNA, 20 bp, Artificial Sequence
  Description of Artificial Sequence: Synthetic oligonucleotide
  Target: LAMA2; (+) strand; PAM type: NNGRRT; PAM sequence: TTGAGT
aatgggtgggcaatgttgtc

SEQ ID NO: 33423 - DNA, 20 bp, Artificial Sequence
  Description of Artificial Sequence: Synthetic oligonucleotide
  Target: LAMA2; (+) strand; PAM type: NNGRRT; PAM sequence: TTGAAT
agtgcagatcttgaaaactc

SEQ ID NO: 33424 - DNA, 20 bp, Artificial Sequence
  Description of Artificial Sequence: Synthetic oligonucleotide
  Target: LAMA2; (+) strand; PAM type: NNGRRT; PAM sequence: TGGAAT
ctcttccttagtgtccacga

SEQ ID NO: 33425 - DNA, 20 bp, Artificial Sequence
  Description of Artificial Sequence: Synthetic oligonucleotide
  Target: LAMA2; (+) strand; PAM type: NNGRRT; PAM sequence: TAGAGT
catctatcttgcctacaaca

SEQ ID NO: 33426 - DNA, 20 bp, Artificial Sequence
  Description of Artificial Sequence: Synthetic oligonucleotide
  Target: LAMA2; (+) strand; PAM type: NNGRRT; PAM sequence: TGGGAT
tagagttatgaaaaatcaaa

SEQ ID NO: 33427 - DNA, 20 bp, Artificial Sequence
  Description of Artificial Sequence: Synthetic oligonucleotide
  Target: LAMA2; (+) strand; PAM type: NNGRRT; PAM sequence: AGGAAT
atacccacatagacactctg

SEQ ID NO: 33428 - DNA, 20 bp, Artificial Sequence
  Description of Artificial Sequence: Synthetic oligonucleotide
  Target: LAMA2; (+) strand; PAM type: NNGRRT; PAM sequence: GTGAAT
ctgaggaatccctgcattta

SEQ ID NO: 33429 - DNA, 20 bp, Artificial Sequence
  Description of Artificial Sequence: Synthetic oligonucleotide
  Target: LAMA2; (+) strand; PAM type: NNGRRT; PAM sequence: GGGGGT
gtggaaagctgtcagtcatg

SEQ ID NO: 33430 - DNA, 20 bp, Artificial Sequence
  Description of Artificial Sequence: Synthetic oligonucleotide
  Target: LAMA2; (+) strand; PAM type: NNGRRT; PAM sequence: AGGAGT
agtcatggggggttagttcc

SEQ ID NO: 33431 - DNA, 20 bp, Artificial Sequence
  Description of Artificial Sequence: Synthetic oligonucleotide
  Target: LAMA2; (+) strand; PAM type: NNGRRT; PAM sequence: ATGGAT
gcattcctgagatctgccac

SEQ ID NO: 33432 - DNA, 20 bp, Artificial Sequence
  Description of Artificial Sequence: Synthetic oligonucleotide
  Target: LAMA2; (+) strand; PAM type: NNGRRT; PAM sequence: CAGAAT
gagatctgccacatggattt

SEQ ID NO: 33433 - DNA, 20 bp, Artificial Sequence
  Description of Artificial Sequence: Synthetic oligonucleotide
  Target: LAMA2; (+) strand; PAM type: NNGRRT; PAM sequence: AAGAAT
cataaacatgttttcagttg

SEQ ID NO: 33434 - DNA, 20 bp, Artificial Sequence
  Description of Artificial Sequence: Synthetic oligonucleotide
  Target: LAMA2; (+) strand; PAM type: NNGRRT; PAM sequence: ATGAGT
ttgaagaattagaaaacatc

SEQ ID NO: 33435 - DNA, 20 bp, Artificial Sequence
  Description of Artificial Sequence: Synthetic oligonucleotide
  Target: LAMA2; (+) strand; PAM type: NNGRRT; PAM sequence: TTGAAT
gaattagaaaacatcatgag

SEQ ID NO: 33436 - DNA, 20 bp, Artificial Sequence
  Description of Artificial Sequence: Synthetic oligonucleotide
  Target: LAMA2; (+) strand; PAM type: NNGRRT; PAM sequence: TTGGAT
ttgaataaacttttttgacc

SEQ ID NO: 33437 - DNA, 20 bp, Artificial Sequence
  Description of Artificial Sequence: Synthetic oligonucleotide
  Target: LAMA2; (+) strand; PAM type: NNGRRT; PAM sequence: ATGGGT
tccaatcaccatcttaatgc

SEQ ID NO: 33438 - DNA, 20 bp, Artificial Sequence
  Description of Artificial Sequence: Synthetic oligonucleotide
  Target: LAMA2; (+) strand; PAM type: NNGRRT; PAM sequence: TCGAGT
agtgttatgacaaggcaggc

SEQ ID NO: 33439 - DNA, 20 bp, Artificial Sequence
  Description of Artificial Sequence: Synthetic oligonucleotide
  Target: LAMA2; (+) strand; PAM type: NNGRRT; PAM sequence: CTGAGT
tcggttacattaagttaaaa

SEQ ID NO: 33440 - DNA, 20 bp, Artificial Sequence
  Description of Artificial Sequence: Synthetic oligonucleotide
  Target: LAMA2; (+) strand; PAM type: NNGRRT; PAM sequence: AAGAAT
atatttctattaatgcacct

SEQ ID NO: 33441 - DNA, 20 bp, Artificial Sequence
  Description of Artificial Sequence: Synthetic oligonucleotide
  Target: LAMA2; (+) strand; PAM type: NNGRRT; PAM sequence: TCGGGT
atcatgctactaattccaaa

SEQ ID NO: 33442 - DNA, 20 bp, Artificial Sequence
  Description of Artificial Sequence: Synthetic oligonucleotide
  Target: LAMA2; (+) strand; PAM type: NNGRRT; PAM sequence: TTGGAT
gtctctcagcctgtgctggt

SEQ ID NO: 33443 - DNA, 20 bp, Artificial Sequence
  Description of Artificial Sequence: Synthetic oligonucleotide
  Target: LAMA2; (+) strand; PAM type: NNGRRT; PAM sequence: AGGGAT
ctgtgctggtttggattttt

SEQ ID NO: 33444 - DNA, 20 bp, Artificial Sequence
  Description of Artificial Sequence: Synthetic oligonucleotide
  Target: LAMA2; (+) strand; PAM type: NNGRRT; PAM sequence: ATGGAT
ggataaccctgccagcctcc

SEQ ID NO: 33445 - DNA, 20 bp, Artificial Sequence
  Description of Artificial Sequence: Synthetic oligonucleotide
  Target: LAMA2; (+) strand; PAM type: NNGRRT; PAM sequence: GGGAAT
ataaagatacttgcccatct

SEQ ID NO: 33446 - DNA, 20 bp, Artificial Sequence
  Description of Artificial Sequence: Synthetic oligonucleotide
  Target: LAMA2; (+) strand; PAM type: NNGRRT; PAM sequence: TTGAGT
gatgagacagaagcaaaaag

SEQ ID NO: 33447 - DNA, 20 bp, Artificial Sequence
  Description of Artificial Sequence: Synthetic oligonucleotide
  Target: LAMA2; (+) strand; PAM type: NNGRRT; PAM sequence: AAGAAT
gccaaattggttggtttaga

SEQ ID NO: 33448 - DNA, 20 bp, Artificial Sequence
  Description of Artificial Sequence: Synthetic oligonucleotide
  Target: LAMA2; (+) strand; PAM type: NNGRRT; PAM sequence: GGGGGT
caaacttacagcatggccca

SEQ ID NO: 33449 - DNA, 20 bp, Artificial Sequence
  Description of Artificial Sequence: Synthetic oligonucleotide
  Target: LAMA2; (+) strand; PAM type: NNGRRT; PAM sequence: TGGAGT
tgtttgtctgttttttgaga

SEQ ID NO: 33450 - DNA, 20 bp, Artificial Sequence
  Description of Artificial Sequence: Synthetic oligonucleotide
  Target: LAMA2; (+) strand; PAM type: NNGRRT; PAM sequence: TGGAGT
ttcactcttgctacccaggc

SEQ ID NO: 33451 - DNA, 20 bp, Artificial Sequence
  Description of Artificial Sequence: Synthetic oligonucleotide
  Target: LAMA2; (+) strand; PAM type: NNGRRT; PAM sequence: CTGGGT
ctcactgcaacctccacctc

SEQ ID NO: 33452 - DNA, 20 bp, Artificial Sequence
  Description of Artificial Sequence: Synthetic oligonucleotide
  Target: LAMA2; (+) strand; PAM type: NNGRRT; PAM sequence: CCGAGT
aattctcctgcttcagcctc

SEQ ID NO: 33453 - DNA, 20 bp, Artificial Sequence
  Description of Artificial Sequence: Synthetic oligonucleotide
  Target: LAMA2; (+) strand; PAM type: NNGRRT; PAM sequence: TGGGAT
gcttcagcctcccgagtagc

SEQ ID NO: 33454 - DNA, 20 bp, Artificial Sequence
  Description of Artificial Sequence: Synthetic oligonucleotide
  Target: LAMA2; (+) strand; PAM type: NNGRRT; PAM sequence: CGGGAT
ttttgtatttttagtagaga

SEQ ID NO: 33455 - DNA, 20 bp, Artificial Sequence
  Description of Artificial Sequence: Synthetic oligonucleotide
  Target: LAMA2; (+) strand; PAM type: NNGRRT; PAM sequence: TGGGAT
acctcagcctcccaaagtgc

SEQ ID NO: 33456 - DNA, 20 bp, Artificial Sequence
  Description of Artificial Sequence: Synthetic oligonucleotide
  Target: LAMA2; (+) strand; PAM type: NNGRRT; PAM sequence: CAGAAT
attagttatgactgtgtggt

SEQ ID NO: 33457 - DNA, 20 bp, Artificial Sequence
  Description of Artificial Sequence: Synthetic oligonucleotide
  Target: LAMA2; (+) strand; PAM type: NNGRRT; PAM sequence: AAGGGT
ttttgtgtgtgtagggggaa

SEQ ID NO: 33458 - DNA, 20 bp, Artificial Sequence
  Description of Artificial Sequence: Synthetic oligonucleotide
  Target: LAMA2; (+) strand; PAM type: NNGRRT; PAM sequence: ATGAAT
agcacctactaagtgcaaag

SEQ ID NO: 33459 - DNA, 20 bp, Artificial Sequence
  Description of Artificial Sequence: Synthetic oligonucleotide
  Target: LAMA2; (+) strand; PAM type: NNGRRT; PAM sequence: GAGAGT
gctagtcagagaaaaagagg

SEQ ID NO: 33460 - DNA, 20 bp, Artificial Sequence
  Description of Artificial Sequence: Synthetic oligonucleotide
  Target: LAMA2; (+) strand; PAM type: NNGRRT; PAM sequence: ATGAAT
agccctcccacttttattcc

SEQ ID NO: 33461 - DNA, 20 bp, Artificial Sequence
  Description of Artificial Sequence: Synthetic oligonucleotide
  Target: LAMA2; (+) strand; PAM type: NNGRRT; PAM sequence: AAGGAT
aaaataattaatggacaaat

SEQ ID NO: 33462 - DNA, 20 bp, Artificial Sequence
  Description of Artificial Sequence: Synthetic oligonucleotide
  Target: LAMA2; (+) strand; PAM type: NNGRRT; PAM sequence: TAGGAT
ggataataatatcttccttc

SEQ ID NO: 33463 - DNA, 20 bp, Artificial Sequence
  Description of Artificial Sequence: Synthetic oligonucleotide
  Target: LAMA2; (+) strand; PAM type: NNGRRT; PAM sequence: GGGAAT
ttctaggattactattatga

SEQ ID NO: 33464 - DNA, 20 bp, Artificial Sequence
  Description of Artificial Sequence: Synthetic oligonucleotide
  Target: LAMA2; (+) strand; PAM type: NNGRRT; PAM sequence: TAGGGT
agtttaacttttcacatttt

SEQ ID NO: 33465 - DNA, 20 bp, Artificial Sequence
  Description of Artificial Sequence: Synthetic oligonucleotide
  Target: LAMA2; (+) strand; PAM type: NNGRRT; PAM sequence: GTGGGT
taacttttcacatttttagg

SEQ ID NO: 33466 - DNA, 20 bp, Artificial Sequence
  Description of Artificial Sequence: Synthetic oligonucleotide
  Target: LAMA2; (+) strand; PAM type: NNGRRT; PAM sequence: AGGGAT
gtggcaggtgctggaaaaaa

SEQ ID NO: 33467 - DNA, 20 bp, Artificial Sequence
  Description of Artificial Sequence: Synthetic oligonucleotide
  Target: LAMA2; (+) strand; PAM type: NNGRRT; PAM sequence: GTGAGT
gctggaaaaaaagggatgtg

SEQ ID NO: 33468 - DNA, 20 bp, Artificial Sequence
  Description of Artificial Sequence: Synthetic oligonucleotide
  Target: LAMA2; (+) strand; PAM type: NNGRRT; PAM sequence: CAGAAT
accattttccatttttgtat

SEQ ID NO: 33469 - DNA, 20 bp, Artificial Sequence
  Description of Artificial Sequence: Synthetic oligonucleotide
  Target: LAMA2; (+) strand; PAM type: NNGRRT; PAM sequence: CTGAGT
gatcctcatgcctcagcctc

SEQ ID NO: 33470 - DNA, 20 bp, Artificial Sequence
  Description of Artificial Sequence: Synthetic oligonucleotide
  Target: LAMA2; (+) strand; PAM type: NNGRRT; PAM sequence: TGGGAT
ttttgtatttttaatagaga

SEQ ID NO: 33471 - DNA, 20 bp, Artificial Sequence
  Description of Artificial Sequence: Synthetic oligonucleotide
  Target: LAMA2; (+) strand; PAM type: NNGRRT; PAM sequence: CAGAAT
ataagccaccacgcctggcc

SEQ ID NO: 33472 - DNA, 20 bp, Artificial Sequence
  Description of Artificial Sequence: Synthetic oligonucleotide
  Target: LAMA2; (+) strand; PAM type: NNGRRT; PAM sequence: AAGAGT
ggcccagaatttagcttttt

SEQ ID NO: 33473 - DNA, 20 bp, Artificial Sequence
  Description of Artificial Sequence: Synthetic oligonucleotide
  Target: LAMA2; (+) strand; PAM type: NNGRRT; PAM sequence: AAGGGT
actatactacagggcaatgt

SEQ ID NO: 33474 - DNA, 20 bp, Artificial Sequence
  Description of Artificial Sequence: Synthetic oligonucleotide
  Target: LAMA2; (+) strand; PAM type: NNGRRT; PAM sequence: ATGGAT
agaaagccctgccttgtgaa

SEQ ID NO: 33475 - DNA, 20 bp, Artificial Sequence
  Description of Artificial Sequence: Synthetic oligonucleotide
  Target: LAMA2; (+) strand; PAM type: NNGRRT; PAM sequence: GTGGAT
catttctacatgttctattt

SEQ ID NO: 33476 - DNA, 20 bp, Artificial Sequence
  Description of Artificial Sequence: Synthetic oligonucleotide
  Target: LAMA2; (+) strand; PAM type: NNGRRT; PAM sequence: GAGGAT
atttgtggatatttttcatg

SEQ ID NO: 33477 - DNA, 20 bp, Artificial Sequence
  Description of Artificial Sequence: Synthetic oligonucleotide
  Target: LAMA2; (+) strand; PAM type: NNGRRT; PAM sequence: AAGGAT
ttagaccaagtctttttaac

SEQ ID NO: 33478 - DNA, 20 bp, Artificial Sequence
  Description of Artificial Sequence: Synthetic oligonucleotide
  Target: LAMA2; (+) strand; PAM type: NNGRRT; PAM sequence: GTGGAT
ttttaacaaggatagcctgt

SEQ ID NO: 33479 - DNA, 20 bp, Artificial Sequence
  Description of Artificial Sequence: Synthetic oligonucleotide
  Target: LAMA2; (+) strand; PAM type: NNGRRT; PAM sequence: TTGAAT
agctggctgcattcttttac

SEQ ID NO: 33480 - DNA, 20 bp, Artificial Sequence
  Description of Artificial Sequence: Synthetic oligonucleotide
  Target: LAMA2; (+) strand; PAM type: NNGRRT; PAM sequence: AAGAGT
cttttacttgaattttattg

SEQ ID NO: 33481 - DNA, 20 bp, Artificial Sequence
  Description of Artificial Sequence: Synthetic oligonucleotide
  Target: LAMA2; (+) strand; PAM type: NNGRRT; PAM sequence: GAGAAT
aaacaatacaagtagccatg

SEQ ID NO: 33482 - DNA, 20 bp, Artificial Sequence
  Description of Artificial Sequence: Synthetic oligonucleotide
  Target: LAMA2; (+) strand; PAM type: NNGRRT; PAM sequence: TGGGAT
ctgtactgatgagctctctt

SEQ ID NO: 33483 - DNA, 20 bp, Artificial Sequence
  Description of Artificial Sequence: Synthetic oligonucleotide
  Target: LAMA2; (+) strand; PAM type: NNGRRT; PAM sequence: AAGAAT
aagaagtgagcacagaagga

SEQ ID NO: 33484 - DNA, 20 bp, Artificial Sequence
  Description of Artificial Sequence: Synthetic oligonucleotide
  Target: LAMA2; (+) strand; PAM type: NNGRRT; PAM sequence: AAGGAT
cctaagtacagtcaaggcca

SEQ ID NO: 33485 - DNA, 20 bp, Artificial Sequence
  Description of Artificial Sequence: Synthetic oligonucleotide
  Target: LAMA2; (+) strand; PAM type: NNGRRT; PAM sequence: TTGGAT
aaggccaaaggataaactga

SEQ ID NO: 33486 - DNA, 20 bp, Artificial Sequence
  Description of Artificial Sequence: Synthetic oligonucleotide
  Target: LAMA2; (+) strand; PAM type: NNGRRT; PAM sequence: AGGAAT
catacattttccacttatca

SEQ ID NO: 33487 - DNA, 20 bp, Artificial Sequence
  Description of Artificial Sequence: Synthetic oligonucleotide
  Target: LAMA2; (+) strand; PAM type: NNGRRT; PAM sequence: TTGAGT
tcagtttctcaataaacatc

SEQ ID NO: 33488 - DNA, 20 bp, Artificial Sequence
  Description of Artificial Sequence: Synthetic oligonucleotide
  Target: LAMA2; (+) strand; PAM type: NNGRRT; PAM sequence: ACGAAT
aattcaagagatgcttatca

SEQ ID NO: 33489 - DNA, 20 bp, Artificial Sequence
  Description of Artificial Sequence: Synthetic oligonucleotide
  Target: LAMA2; (+) strand; PAM type: NNGRRT; PAM sequence: CTGAAT
tcaacgaatcatacgcactc

SEQ ID NO: 33490 - DNA, 20 bp, Artificial Sequence
  Description of Artificial Sequence: Synthetic oligonucleotide
  Target: LAMA2; (+) strand; PAM type: NNGRRT; PAM sequence: ATGAGT
ttattctgacctgaagttaa

SEQ ID NO: 33491 - DNA, 20 bp, Artificial Sequence
  Description of Artificial Sequence: Synthetic oligonucleotide
  Target: LAMA2; (+) strand; PAM type: NNGRRT; PAM sequence: GGGGGT
agttaaatgagtgacagtgt

SEQ ID NO: 33492 - DNA, 20 bp, Artificial Sequence
  Description of Artificial Sequence: Synthetic oligonucleotide
  Target: LAMA2; (+) strand; PAM type: NNGRRT; PAM sequence: CAGAAT
aaaaagtccccacaaggtgg

SEQ ID NO: 33493 - DNA, 20 bp, Artificial Sequence
  Description of Artificial Sequence: Synthetic oligonucleotide
  Target: LAMA2; (+) strand; PAM type: NNGRRT; PAM sequence: GTGAAT
gatgagcctctactgagact

SEQ ID NO: 33494 - DNA, 20 bp, Artificial Sequence
  Description of Artificial Sequence: Synthetic oligonucleotide
  Target: LAMA2; (+) strand; PAM type: NNGRRT; PAM sequence: AAGGAT
aagtatacactagcttagaa

SEQ ID NO: 33495 - DNA, 20 bp, Artificial Sequence
  Description of Artificial Sequence: Synthetic oligonucleotide
  Target: LAMA2; (+) strand; PAM type: NNGRRT; PAM sequence: CAGAGT
gcttagatttcagtggcaag

SEQ ID NO: 33496 - DNA, 20 bp, Artificial Sequence
  Description of Artificial Sequence: Synthetic oligonucleotide
  Target: LAMA2; (+) strand; PAM type: NNGRRT; PAM sequence: CTGGAT
gaaaaaagaagcttgagcag

SEQ ID NO: 33497 - DNA, 20 bp, Artificial Sequence
  Description of Artificial Sequence: Synthetic oligonucleotide
  Target: LAMA2; (+) strand; PAM type: NNGRRT; PAM sequence: TGGAGT
tcttgctctactgtccaggt

SEQ ID NO: 33498 - DNA, 20 bp, Artificial Sequence
  Description of Artificial Sequence: Synthetic oligonucleotide
  Target: LAMA2; (+) strand; PAM type: NNGRRT; PAM sequence: CCGAGT
gattctcctgccttggcctc

SEQ ID NO: 33499 - DNA, 20 bp, Artificial Sequence
  Description of Artificial Sequence: Synthetic oligonucleotide
  Target: LAMA2; (+) strand; PAM type: NNGRRT; PAM sequence: AGGGGT
ttggagagacagaggggggc

SEQ ID NO: 33500 - DNA, 20 bp, Artificial Sequence
  Description of Artificial Sequence: Synthetic oligonucleotide
  Target: LAMA2; (+) strand; PAM type: NNGRRT; PAM sequence: TGGGAT
tgcctcggctttccaaatgc

SEQ ID NO: 33501 - DNA, 20 bp, Artificial Sequence
  Description of Artificial Sequence: Synthetic oligonucleotide
  Target: LAMA2; (+) strand; PAM type: NNGRRT; PAM sequence: GAGGGT
tacaaaacactaccaaatta

SEQ ID NO: 33502 - DNA, 20 bp, Artificial Sequence
  Description of Artificial Sequence: Synthetic oligonucleotide
  Target: LAMA2; (+) strand; PAM type: NNGRRT; PAM sequence: GGGAAT
cactaccaaattagagggtg

SEQ ID NO: 33503 - DNA, 20 bp, Artificial Sequence
  Description of Artificial Sequence: Synthetic oligonucleotide
  Target: LAMA2; (+) strand; PAM type: NNGRRT; PAM sequence: TTGGAT
gattgatagtaaacatcacc

SEQ ID NO: 33504 - DNA, 20 bp, Artificial Sequence
  Description of Artificial Sequence: Synthetic oligonucleotide
  Target: LAMA2; (+) strand; PAM type: NNGRRT; PAM sequence: TAGAGT
taaactttgaggttacatgt

SEQ ID NO: 33505 - DNA, 20 bp, Artificial Sequence
  Description of Artificial Sequence: Synthetic oligonucleotide
  Target: LAMA2; (+) strand; PAM type: NNGRRT; PAM sequence: GAGAAT
tccataacattggctcatct

SEQ ID NO: 33506 - DNA, 20 bp, Artificial Sequence
  Description of Artificial Sequence: Synthetic oligonucleotide
  Target: LAMA2; (+) strand; PAM type: NNGRRT; PAM sequence: GAGGAT
ggctgcccgttgcagaaacg

SEQ ID NO: 33507 - DNA, 20 bp, Artificial Sequence
  Description of Artificial Sequence: Synthetic oligonucleotide
  Target: LAMA2; (+) strand; PAM type: NNGRRT; PAM sequence: GTGGAT
ttcttcttcctaaatttcaa

SEQ ID NO: 33508 - DNA, 20 bp, Artificial Sequence
  Description of Artificial Sequence: Synthetic oligonucleotide
  Target: LAMA2; (+) strand; PAM type: NNGRRT; PAM sequence: TTGGAT
tgcttagctcaggaccagtt

SEQ ID NO: 33509 - DNA, 20 bp, Artificial Sequence
  Description of Artificial Sequence: Synthetic oligonucleotide
  Target: LAMA2; (+) strand; PAM type: NNGRRT; PAM sequence: GGGAGT
cataacatacagctgctacc

SEQ ID NO: 33510 - DNA, 20 bp, Artificial Sequence
  Description of Artificial Sequence: Synthetic oligonucleotide
  Target: LAMA2; (+) strand; PAM type: NNGRRT; PAM sequence: ACGAGT
catttacatatagtaattag

SEQ ID NO: 33511 - DNA, 20 bp, Artificial Sequence
  Description of Artificial Sequence: Synthetic oligonucleotide
  Target: LAMA2; (+) strand; PAM type: NNGRRT; PAM sequence: GAGGGT
atccctcaattttcagagct

SEQ ID NO: 33512 - DNA, 20 bp, Artificial Sequence
  Description of Artificial Sequence: Synthetic oligonucleotide
  Target: LAMA2; (+) strand; PAM type: NNGRRT; PAM sequence: TAGGAT
cccagtggactcacagcaga

SEQ ID NO: 33513 - DNA, 20 bp, Artificial Sequence
  Description of Artificial Sequence: Synthetic oligonucleotide
  Target: LAMA2; (+) strand; PAM type: NNGRRT; PAM sequence: GCGAAT
aaaagaggccattcagctgt

SEQ ID NO: 33514 - DNA, 20 bp, Artificial Sequence
  Description of Artificial Sequence: Synthetic oligonucleotide
  Target: LAMA2; (+) strand; PAM type: NNGRRT; PAM sequence: ATGAAT
gaggccattcagctgtgcga

SEQ ID NO: 33515 - DNA, 20 bp, Artificial Sequence
  Description of Artificial Sequence: Synthetic oligonucleotide
  Target: LAMA2; (+) strand; PAM type: NNGRRT; PAM sequence: CGGGGT
gcattttcctgtcctaccca

SEQ ID NO: 33516 - DNA, 20 bp, Artificial Sequence
  Description of Artificial Sequence: Synthetic oligonucleotide
  Target: LAMA2; (+) strand; PAM type: NNGRRT; PAM sequence: GTGAAT
acggggttttgcatagctgt

SEQ ID NO: 33517 - DNA, 20 bp, Artificial Sequence
  Description of Artificial Sequence: Synthetic oligonucleotide
  Target: LAMA2; (+) strand; PAM type: NNGRRT; PAM sequence: CAGAGT
aagccttttacctgctgtgg

SEQ ID NO: 33518 - DNA, 20 bp, Artificial Sequence
  Description of Artificial Sequence: Synthetic oligonucleotide
  Target: LAMA2; (+) strand; PAM type: NNGRRT; PAM sequence: ATGAGT
taaaaatttcctgtgtgctg

SEQ ID NO: 33519 - DNA, 20 bp, Artificial Sequence
  Description of Artificial Sequence: Synthetic oligonucleotide
  Target: LAMA2; (+) strand; PAM type: NNGRRT; PAM sequence: CTGAGT
gggctgcttgagaacctctg

SEQ ID NO: 33520 - DNA, 20 bp, Artificial Sequence
  Description of Artificial Sequence: Synthetic oligonucleotide
  Target: LAMA2; (+) strand; PAM type: NNGRRT; PAM sequence: GAGAGT
ttaaaaacagatgtgttggt

SEQ ID NO: 33521 - DNA, 20 bp, Artificial Sequence
  Description of Artificial Sequence: Synthetic oligonucleotide
  Target: LAMA2; (+) strand; PAM type: NNGRRT; PAM sequence: AGGAAT
tgaaaatagagaacagggaa

SEQ ID NO: 33522 - DNA, 20 bp, Artificial Sequence
  Description of Artificial Sequence: Synthetic oligonucleotide
  Target: LAMA2; (+) strand; PAM type: NNGRRT; PAM sequence: AAGAAT
cccctcactgaaaaattatt

SEQ ID NO: 33523 - DNA, 20 bp, Artificial Sequence
  Description of Artificial Sequence: Synthetic oligonucleotide
  Target: LAMA2; (+) strand; PAM type: NNGRRT; PAM sequence: GTGGGT
ggcagttgaaatggtgtatg

SEQ ID NO: 33524 - DNA, 20 bp, Artificial Sequence
  Description of Artificial Sequence: Synthetic oligonucleotide
  Target: LAMA2; (+) strand; PAM type: NNGRRT; PAM sequence: CTGGGT
ggttacatttttaaaatgtg

SEQ ID NO: 33525 - DNA, 20 bp, Artificial Sequence
  Description of Artificial Sequence: Synthetic oligonucleotide
  Target: LAMA2; (+) strand; PAM type: NNGRRT; PAM sequence: CTGAAT
gcctagcaactggcaagggc

SEQ ID NO: 33526 - DNA, 20 bp, Artificial Sequence
  Description of Artificial Sequence: Synthetic oligonucleotide
  Target: LAMA2; (+) strand; PAM type: NNGRRT; PAM sequence: AAGAAT
ttttccctgttcgatcttct

SEQ ID NO: 33527 - DNA, 20 bp, Artificial Sequence
  Description of Artificial Sequence: Synthetic oligonucleotide
  Target: LAMA2; (+) strand; PAM type: NNGRRT; PAM sequence: GAGGAT
gaaatatacataaattttta

SEQ ID NO: 33528 - DNA, 20 bp, Artificial Sequence
  Description of Artificial Sequence: Synthetic oligonucleotide
  Target: LAMA2; (+) strand; PAM type: NNGRRT; PAM sequence: ATGAGT
ttttagaggataatgaaact

SEQ ID NO: 33529 - DNA, 20 bp, Artificial Sequence
  Description of Artificial Sequence: Synthetic oligonucleotide
  Target: LAMA2; (+) strand; PAM type: NNGRRT; PAM sequence: CAGGGT
gcacattcctttagccattc

SEQ ID NO: 33530 - DNA, 20 bp, Artificial Sequence
  Description of Artificial Sequence: Synthetic oligonucleotide
  Target: LAMA2; (+) strand; PAM type: NNGRRT; PAM sequence: ATGAAT
ctatgcagtagactacagag

SEQ ID NO: 33531 - DNA, 20 bp, Artificial Sequence
  Description of Artificial Sequence: Synthetic oligonucleotide
  Target: LAMA2; (+) strand; PAM type: NNGRRT; PAM sequence: AAGAAT
taatgtagtttttattctta

SEQ ID NO: 33532 - DNA, 20 bp, Artificial Sequence
  Description of Artificial Sequence: Synthetic oligonucleotide
  Target: LAMA2; (+) strand; PAM type: NNGRRT; PAM sequence: CTGGGT
taatctcctgtttttctctc

SEQ ID NO: 33533 - DNA, 20 bp, Artificial Sequence
  Description of Artificial Sequence: Synthetic oligonucleotide
  Target: LAMA2; (+) strand; PAM type: NNGRRT; PAM sequence: CAGGGT
tttctctcctgggtatttta

SEQ ID NO: 33534 - DNA, 20 bp, Artificial Sequence
  Description of Artificial Sequence: Synthetic oligonucleotide
  Target: LAMA2; (+) strand; PAM type: NNGRRT; PAM sequence: CAGAAT
tttacagggtccttgtgctg

SEQ ID NO: 33535 - DNA, 20 bp, Artificial Sequence
  Description of Artificial Sequence: Synthetic oligonucleotide
  Target: LAMA2; (+) strand; PAM type: NNGRRT; PAM sequence: CTGAGT
aagaaccgataaatgaagaa

SEQ ID NO: 33536 - DNA, 20 bp, Artificial Sequence
  Description of Artificial Sequence: Synthetic oligonucleotide
  Target: LAMA2; (+) strand; PAM type: NNGRRT; PAM sequence: TTGAAT
agtatttgtgtttaatcaag

SEQ ID NO: 33537 - DNA, 20 bp, Artificial Sequence
  Description of Artificial Sequence: Synthetic oligonucleotide
  Target: LAMA2; (+) strand; PAM type: NNGRRT; PAM sequence: CTGAGT
gttagcttttcttttattca

SEQ ID NO: 33538 - DNA, 20 bp, Artificial Sequence
  Description of Artificial Sequence: Synthetic oligonucleotide
  Target: LAMA2; (+) strand; PAM type: NNGRRT; PAM sequence: GAGAAT
tttattcactgagtacaata

SEQ ID NO: 33539 - DNA, 20 bp, Artificial Sequence
  Description of Artificial Sequence: Synthetic oligonucleotide
  Target: LAMA2; (+) strand; PAM type: NNGRRT; PAM sequence: TAGAAT
tcactgagtacaatagagaa

SEQ ID NO: 33540 - DNA, 20 bp, Artificial Sequence
  Description of Artificial Sequence: Synthetic oligonucleotide
  Target: LAMA2; (+) strand; PAM type: NNGRRT; PAM sequence: GAGAAT
ataccgctctattttagcat

SEQ ID NO: 33541 - DNA, 20 bp, Artificial Sequence
  Description of Artificial Sequence: Synthetic oligonucleotide
  Target: LAMA2; (+) strand; PAM type: NNGRRT; PAM sequence: TTGAGT
tttgtttcacagtctcacaa

SEQ ID NO: 33542 - DNA, 20 bp, Artificial Sequence
  Description of Artificial Sequence: Synthetic oligonucleotide
  Target: LAMA2; (+) strand; PAM type: NNGRRT; PAM sequence: CTGAAT
gttggaagtaagaaccgaag

SEQ ID NO: 33543 - DNA, 20 bp, Artificial Sequence
  Description of Artificial Sequence: Synthetic oligonucleotide
  Target: LAMA2; (+) strand; PAM type: NNGRRT; PAM sequence: ATGGAT
tgcaacagttcagctgagaa

SEQ ID NO: 33544 - DNA, 20 bp, Artificial Sequence
  Description of Artificial Sequence: Synthetic oligonucleotide
  Target: LAMA2; (+) strand; PAM type: NNGRRT; PAM sequence: GGGAGT
cctacttcagctatgacttg

SEQ ID NO: 33545 - DNA, 20 bp, Artificial Sequence
  Description of Artificial Sequence: Synthetic oligonucleotide
  Target: LAMA2; (+) strand; PAM type: NNGRRT; PAM sequence: CTGGAT
tggcacaaggtaatagtccc

SEQ ID NO: 33546 - DNA, 20 bp, Artificial Sequence
  Description of Artificial Sequence: Synthetic oligonucleotide
  Target: LAMA2; (+) strand; PAM type: NNGRRT; PAM sequence: GGGAAT
ggatattggcagtaccctaa

SEQ ID NO: 33547 - DNA, 20 bp, Artificial Sequence
  Description of Artificial Sequence: Synthetic oligonucleotide
  Target: LAMA2; (+) strand; PAM type: NNGRRT; PAM sequence: CTGAGT
gcagtaccctaagggaatta

SEQ ID NO: 33548 - DNA, 20 bp, Artificial Sequence
  Description of Artificial Sequence: Synthetic oligonucleotide
  Target: LAMA2; (+) strand; PAM type: NNGRRT; PAM sequence: CAGAGT
tctaagtgagaaacgtagaa

SEQ ID NO: 33549 - DNA, 20 bp, Artificial Sequence
  Description of Artificial Sequence: Synthetic oligonucleotide
  Target: LAMA2; (+) strand; PAM type: NNGRRT; PAM sequence: AGGAAT
gctcgatgtattcaatttta

SEQ ID NO: 33550 - DNA, 20 bp, Artificial Sequence
  Description of Artificial Sequence: Synthetic oligonucleotide
  Target: LAMA2; (+) strand; PAM type: NNGRRT; PAM sequence: ATGGGT
caaaagttggcaacactaaa

SEQ ID NO: 33551 - DNA, 20 bp, Artificial Sequence
  Description of Artificial Sequence: Synthetic oligonucleotide
  Target: LAMA2; (+) strand; PAM type: NNGRRT; PAM sequence: AGGAAT
cacagtggtctgtgaaaacc

SEQ ID NO: 33552 - DNA, 20 bp, Artificial Sequence
  Description of Artificial Sequence: Synthetic oligonucleotide
  Target: LAMA2; (+) strand; PAM type: NNGRRT; PAM sequence: AGGAAT
tctgtgaaaaccaggaatcc

SEQ ID NO: 33553 - DNA, 20 bp, Artificial Sequence
  Description of Artificial Sequence: Synthetic oligonucleotide
  Target: LAMA2; (+) strand; PAM type: NNGRRT; PAM sequence: CAGAGT
ccaataaaatttttaatttt

SEQ ID NO: 33554 - DNA, 20 bp, Artificial Sequence
  Description of Artificial Sequence: Synthetic oligonucleotide
  Target: LAMA2; (+) strand; PAM type: NNGRRT; PAM sequence: AGGAAT
gttatcatggaaataagaaa

SEQ ID NO: 33555 - DNA, 20 bp, Artificial Sequence
  Description of Artificial Sequence: Synthetic oligonucleotide
  Target: LAMA2; (+) strand; PAM type: NNGRRT; PAM sequence: AAGAGT
caaatgaaggagctctcatt

SEQ ID NO: 33556 - DNA, 20 bp, Artificial Sequence
  Description of Artificial Sequence: Synthetic oligonucleotide
  Target: LAMA2; (+) strand; PAM type: NNGRRT; PAM sequence: TAGAAT
gttcttccatctctagctaa

SEQ ID NO: 33557 - DNA, 20 bp, Artificial Sequence
  Description of Artificial Sequence: Synthetic oligonucleotide
  Target: LAMA2; (+) strand; PAM type: NNGRRT; PAM sequence: TGGGAT
ttgttgaaccacaatgaggc

SEQ ID NO: 33558 - DNA, 20 bp, Artificial Sequence
  Description of Artificial Sequence: Synthetic oligonucleotide
  Target: LAMA2; (+) strand; PAM type: NNGRRT; PAM sequence: ACGGAT
tataattagtcaaattaata

SEQ ID NO: 33559 - DNA, 20 bp, Artificial Sequence
  Description of Artificial Sequence: Synthetic oligonucleotide
  Target: LAMA2; (+) strand; PAM type: NNGRRT; PAM sequence: CAGAAT
ttaaaaattacttcccaaac

SEQ ID NO: 33560 - DNA, 20 bp, Artificial Sequence
  Description of Artificial Sequence: Synthetic oligonucleotide
  Target: LAMA2; (+) strand; PAM type: NNGRRT; PAM sequence: AGGGAT
aagaagggcctgttaggcaa

SEQ ID NO: 33561 - DNA, 20 bp, Artificial Sequence
  Description of Artificial Sequence: Synthetic oligonucleotide
  Target: LAMA2; (+) strand; PAM type: NNGRRT; PAM sequence: ATGAAT
atgcacttttaaaactgtgc

SEQ ID NO: 33562 - DNA, 20 bp, Artificial Sequence
  Description of Artificial Sequence: Synthetic oligonucleotide
  Target: LAMA2; (+) strand; PAM type: NNGRRT; PAM sequence: CAGGGT
atgaaagtgctattagtctg

SEQ ID NO: 33563 - DNA, 20 bp, Artificial Sequence
  Description of Artificial Sequence: Synthetic oligonucleotide
  Target: LAMA2; (+) strand; PAM type: NNGRRT; PAM sequence: CAGAAT
gatagtagtcatggaaaaga

SEQ ID NO: 33564 - DNA, 20 bp, Artificial Sequence
  Description of Artificial Sequence: Synthetic oligonucleotide
  Target: LAMA2; (+) strand; PAM type: NNGRRT; PAM sequence: ATGGGT
aatttgagatattctgtaaa

SEQ ID NO: 33565 - DNA, 20 bp, Artificial Sequence
  Description of Artificial Sequence: Synthetic oligonucleotide
  Target: LAMA2; (+) strand; PAM type: NNGRRT; PAM sequence: TAGAGT
atttttcttggtaacatcgt

SEQ ID NO: 33566 - DNA, 20 bp, Artificial Sequence
  Description of Artificial Sequence: Synthetic oligonucleotide
  Target: LAMA2; (+) strand; PAM type: NNGRRT; PAM sequence: CAGGAT
ctgcatatgtgaaatttgtt

SEQ ID NO: 33567 - DNA, 20 bp, Artificial Sequence
  Description of Artificial Sequence: Synthetic oligonucleotide
  Target: LAMA2; (+) strand; PAM type: NNGRRT; PAM sequence: AGGAAT
ataatgagaagtaagcaaga

SEQ ID NO: 33568 - DNA, 20 bp, Artificial Sequence
  Description of Artificial Sequence: Synthetic oligonucleotide
  Target: LAMA2; (+) strand; PAM type: NNGRRT; PAM sequence: CTGGAT
gtcccaaaaaagccgacatc

SEQ ID NO: 33569 - DNA, 20 bp, Artificial Sequence
  Description of Artificial Sequence: Synthetic oligonucleotide
  Target: LAMA2; (+) strand; PAM type: NNGRRT; PAM sequence: GGGAAT
gccgacatcctggatgtcgt

SEQ ID NO: 33570 - DNA, 20 bp, Artificial Sequence
  Description of Artificial Sequence: Synthetic oligonucleotide
  Target: LAMA2; (+) strand; PAM type: NNGRRT; PAM sequence: GTGGGT
cgtgggaatgctgtatgttg

SEQ ID NO: 33571 - DNA, 20 bp, Artificial Sequence
  Description of Artificial Sequence: Synthetic oligonucleotide
  Target: LAMA2; (+) strand; PAM type: NNGRRT; PAM sequence: AAGAAT
cccatcaactacactacccg

SEQ ID NO: 33572 - DNA, 20 bp, Artificial Sequence
  Description of Artificial Sequence: Synthetic oligonucleotide
  Target: LAMA2; (+) strand; PAM type: NNGRRT; PAM sequence: GTGAAT
gggcccatgaaaactgatag

SEQ ID NO: 33573 - DNA, 20 bp, Artificial Sequence
  Description of Artificial Sequence: Synthetic oligonucleotide
  Target: LAMA2; (+) strand; PAM type: NNGRRT; PAM sequence: AAGGGT
tcttttctgataagggacag

SEQ ID NO: 33574 - DNA, 20 bp, Artificial Sequence
  Description of Artificial Sequence: Synthetic oligonucleotide
  Target: LAMA2; (+) strand; PAM type: NNGRRT; PAM sequence: CAGAGT
tttgtttgtttgttttgaga

SEQ ID NO: 33575 - DNA, 20 bp, Artificial Sequence
  Description of Artificial Sequence: Synthetic oligonucleotide
  Target: LAMA2; (+) strand; PAM type: NNGRRT; PAM sequence: TGGAGT
tctcgctctgtcgcccaggc

SEQ ID NO: 33576 - DNA, 20 bp, Artificial Sequence
  Description of Artificial Sequence: Synthetic oligonucleotide
  Target: LAMA2; (+) strand; PAM type: NNGRRT; PAM sequence: CCGGGT
ctcactgcaagctctccctc

SEQ ID NO: 33577 - DNA, 20 bp, Artificial Sequence
  Description of Artificial Sequence: Synthetic oligonucleotide
  Target: LAMA2; (+) strand; PAM type: NNGRRT; PAM sequence: CGGGGT
ttttgtacttttaatagaga

SEQ ID NO: 33578 - DNA, 20 bp, Artificial Sequence
  Description of Artificial Sequence: Synthetic oligonucleotide
  Target: LAMA2; (+) strand; PAM type: NNGRRT; PAM sequence: GGGGGT
gtgtacttttaatagagacg

SEQ ID NO: 33579 - DNA, 20 bp, Artificial Sequence
  Description of Artificial Sequence: Synthetic oligonucleotide
  Target: LAMA2; (+) strand; PAM type: NNGRRT; PAM sequence: CAGGAT
gggggtttcactgtgttagc

SEQ ID NO: 33580 - DNA, 20 bp, Artificial Sequence
  Description of Artificial Sequence: Synthetic oligonucleotide
  Target: LAMA2; (+) strand; PAM type: NNGRRT; PAM sequence: TGGGAT
gcctcggcctcccaaagtgc

SEQ ID NO: 33581 - DNA, 20 bp, Artificial Sequence
  Description of Artificial Sequence: Synthetic oligonucleotide
  Target: LAMA2; (+) strand; PAM type: NNGRRT; PAM sequence: CTGAGT
agagacaatgccacggaaca

SEQ ID NO: 33582 - DNA, 20 bp, Artificial Sequence
  Description of Artificial Sequence: Synthetic oligonucleotide
  Target: LAMA2; (+) strand; PAM type: NNGRRT; PAM sequence: TTGAAT
tggagccaaactgtcttggt

SEQ ID NO: 33583 - DNA, 20 bp, Artificial Sequence
  Description of Artificial Sequence: Synthetic oligonucleotide
  Target: LAMA2; (+) strand; PAM type: NNGRRT; PAM sequence: CAGGGT
aagatttctcttttgcaaaa

SEQ ID NO: 33584 - DNA, 20 bp, Artificial Sequence
  Description of Artificial Sequence: Synthetic oligonucleotide
  Target: LAMA2; (+) strand; PAM type: NNGRRT; PAM sequence: AAGGAT
taatgataatactaaacaaa

SEQ ID NO: 33585 - DNA, 20 bp, Artificial Sequence
  Description of Artificial Sequence: Synthetic oligonucleotide
  Target: LAMA2; (+) strand; PAM type: NNGRRT; PAM sequence: TTGGGT
aggtaatttatttaaagtga

SEQ ID NO: 33586 - DNA, 20 bp, Artificial Sequence
  Description of Artificial Sequence: Synthetic oligonucleotide
  Target: LAMA2; (+) strand; PAM type: NNGRRT; PAM sequence: AGGAGT
caggcagatcacttgagacc

SEQ ID NO: 33587 - DNA, 20 bp, Artificial Sequence
  Description of Artificial Sequence: Synthetic oligonucleotide
  Target: LAMA2; (+) strand; PAM type: NNGRRT; PAM sequence: GAGAAT
tactttggaggctgaggcaa

SEQ ID NO: 33588 - DNA, 20 bp, Artificial Sequence
  Description of Artificial Sequence: Synthetic oligonucleotide
  Target: LAMA2; (+) strand; PAM type: NNGRRT; PAM sequence: GAGGGT
caagagaatcacttgaaccc

SEQ ID NO: 33589 - DNA, 20 bp, Artificial Sequence
  Description of Artificial Sequence: Synthetic oligonucleotide
  Target: LAMA2; (+) strand; PAM type: NNGRRT; PAM sequence: AAGAGT
aataaaaataaagtgattgg

SEQ ID NO: 33590 - DNA, 20 bp, Artificial Sequence
  Description of Artificial Sequence: Synthetic oligonucleotide
  Target: LAMA2; (+) strand; PAM type: NNGRRT; PAM sequence: TTGGAT
tacagtacagttatccaatt

SEQ ID NO: 33591 - DNA, 20 bp, Artificial Sequence
  Description of Artificial Sequence: Synthetic oligonucleotide
  Target: LAMA2; (+) strand; PAM type: NNGRRT; PAM sequence: CAGAAT
cagttatccaattttggatt

SEQ ID NO: 33592 - DNA, 20 bp, Artificial Sequence
  Description of Artificial Sequence: Synthetic oligonucleotide
  Target: LAMA2; (+) strand; PAM type: NNGRRT; PAM sequence: GGGGAT
gttactctgagagaagcacg

SEQ ID NO: 33593 - DNA, 20 bp, Artificial Sequence
  Description of Artificial Sequence: Synthetic oligonucleotide
  Target: LAMA2; (+) strand; PAM type: NNGRRT; PAM sequence: GTGGAT
ctcagtatttggcttctctt

SEQ ID NO: 33594 - DNA, 20 bp, Artificial Sequence
  Description of Artificial Sequence: Synthetic oligonucleotide
  Target: LAMA2; (+) strand; PAM type: NNGRRT; PAM sequence: TTGGAT
ttacttttctttcataggta

SEQ ID NO: 33595 - DNA, 20 bp, Artificial Sequence
  Description of Artificial Sequence: Synthetic oligonucleotide
  Target: LAMA2; (+) strand; PAM type: NNGRRT; PAM sequence: TTGAAT
cactggtacaagcaattcac

SEQ ID NO: 33596 - DNA, 20 bp, Artificial Sequence
  Description of Artificial Sequence: Synthetic oligonucleotide
  Target: LAMA2; (+) strand; PAM type: NNGRRT; PAM sequence: CAGAGT
acagataaaatataatggac

SEQ ID NO: 33597 - DNA, 20 bp, Artificial Sequence
  Description of Artificial Sequence: Synthetic oligonucleotide
  Target: LAMA2; (+) strand; PAM type: NNGRRT; PAM sequence: TTGAGT
tataatggaccagagtgtga

SEQ ID NO: 33598 - DNA, 20 bp, Artificial Sequence
  Description of Artificial Sequence: Synthetic oligonucleotide
  Target: LAMA2; (+) strand; PAM type: NNGRRT; PAM sequence: GAGGGT
atatttgcattttcttaggg

SEQ ID NO: 33599 - DNA, 20 bp, Artificial Sequence
  Description of Artificial Sequence: Synthetic oligonucleotide
  Target: LAMA2; (+) strand; PAM type: NNGRRT; PAM sequence: ATGGGT
tgaacataggctatgacaaa

SEQ ID NO: 33600 - DNA, 20 bp, Artificial Sequence
  Description of Artificial Sequence: Synthetic oligonucleotide
  Target: LAMA2; (+) strand; PAM type: NNGRRT; PAM sequence: CAGGAT
ctatgagaacagtcatattc

SEQ ID NO: 33601 - DNA, 20 bp, Artificial Sequence
  Description of Artificial Sequence: Synthetic oligonucleotide
  Target: LAMA2; (+) strand; PAM type: NNGRRT; PAM sequence: CAGGAT
ccaagttgagaagcacaaca

SEQ ID NO: 33602 - DNA, 20 bp, Artificial Sequence
  Description of Artificial Sequence: Synthetic oligonucleotide
  Target: LAMA2; (+) strand; PAM type: NNGRRT; PAM sequence: GGGGAT
agagaacccaggcagctttg

SEQ ID NO: 33603 - DNA, 20 bp, Artificial Sequence
  Description of Artificial Sequence: Synthetic oligonucleotide
  Target: LAMA2; (+) strand; PAM type: NNGRRT; PAM sequence: CTGGAT
gatatcccatcctaagacaa

SEQ ID NO: 33604 - DNA, 20 bp, Artificial Sequence
  Description of Artificial Sequence: Synthetic oligonucleotide
  Target: LAMA2; (+) strand; PAM type: NNGRRT; PAM sequence: CTGAAT
tgacatttgtttcttctgat

SEQ ID NO: 33605 - DNA, 20 bp, Artificial Sequence
  Description of Artificial Sequence: Synthetic oligonucleotide
  Target: LAMA2; (+) strand; PAM type: NNGRRT; PAM sequence: AGGAAT
atagcattgatggctgcgtc

SEQ ID NO: 33606 - DNA, 20 bp, Artificial Sequence
  Description of Artificial Sequence: Synthetic oligonucleotide
  Target: LAMA2; (+) strand; PAM type: NNGRRT; PAM sequence: TAGAGT
taccaaataataaaagttcc

SEQ ID NO: 33607 - DNA, 20 bp, Artificial Sequence
  Description of Artificial Sequence: Synthetic oligonucleotide
  Target: LAMA2; (+) strand; PAM type: NNGRRT; PAM sequence: AAGAAT
ttcatgtatctgatcctgat

SEQ ID NO: 33608 - DNA, 20 bp, Artificial Sequence
  Description of Artificial Sequence: Synthetic oligonucleotide
  Target: LAMA2; (+) strand; PAM type: NNGRRT; PAM sequence: GAGAAT
taaagtaaaaggtctattta

SEQ ID NO: 33609 - DNA, 20 bp, Artificial Sequence
  Description of Artificial Sequence: Synthetic oligonucleotide
  Target: LAMA2; (+) strand; PAM type: NNGRRT; PAM sequence: GTGGGT
tcctttaatttttaattttt

SEQ ID NO: 33610 - DNA, 20 bp, Artificial Sequence
  Description of Artificial Sequence: Synthetic oligonucleotide
  Target: LAMA2; (+) strand; PAM type: NNGRRT; PAM sequence: GTGGGT
ttaatttttgtgggtacaca

SEQ ID NO: 33611 - DNA, 20 bp, Artificial Sequence
  Description of Artificial Sequence: Synthetic oligonucleotide
  Target: LAMA2; (+) strand; PAM type: NNGRRT; PAM sequence: ATGGGT
cacagtgggtgtatatattt

SEQ ID NO: 33612 - DNA, 20 bp, Artificial Sequence
  Description of Artificial Sequence: Synthetic oligonucleotide
  Target: LAMA2; (+) strand; PAM type: NNGRRT; PAM sequence: CAGGGT
gcaatgcataataatcatat

SEQ ID NO: 33613 - DNA, 20 bp, Artificial Sequence
  Description of Artificial Sequence: Synthetic oligonucleotide
  Target: LAMA2; (+) strand; PAM type: NNGRRT; PAM sequence: TGGGGT
aataatcatatcagggtaaa

SEQ ID NO: 33614 - DNA, 20 bp, Artificial Sequence
  Description of Artificial Sequence: Synthetic oligonucleotide
  Target: LAMA2; (+) strand; PAM type: NNGRRT; PAM sequence: ATGAGT
tctactttctatctatctcc

SEQ ID NO: 33615 - DNA, 20 bp, Artificial Sequence
  Description of Artificial Sequence: Synthetic oligonucleotide
  Target: LAMA2; (+) strand; PAM type: NNGRRT; PAM sequence: TTGAAT
tttctatctatctccatgag

SEQ ID NO: 33616 - DNA, 20 bp, Artificial Sequence
  Description of Artificial Sequence: Synthetic oligonucleotide
  Target: LAMA2; (+) strand; PAM type: NNGRRT; PAM sequence: TAGGAT
acccatgttgttgcagatga

SEQ ID NO: 33617 - DNA, 20 bp, Artificial Sequence
  Description of Artificial Sequence: Synthetic oligonucleotide
  Target: LAMA2; (+) strand; PAM type: NNGRRT; PAM sequence: GGGAGT
actagtgctgcaataaacgt

SEQ ID NO: 33618 - DNA, 20 bp, Artificial Sequence
  Description of Artificial Sequence: Synthetic oligonucleotide
  Target: LAMA2; (+) strand; PAM type: NNGRRT; PAM sequence: TTGGGT
gatatctcttcaatattctt

SEQ ID NO: 33619 - DNA, 20 bp, Artificial Sequence
  Description of Artificial Sequence: Synthetic oligonucleotide
  Target: LAMA2; (+) strand; PAM type: NNGRRT; PAM sequence: AAGAGT
attcttttgggtatatatct

SEQ ID NO: 33620 - DNA, 20 bp, Artificial Sequence
  Description of Artificial Sequence: Synthetic oligonucleotide
  Target: LAMA2; (+) strand; PAM type: NNGRRT; PAM sequence: TGGAAT
tttgggtatatatctaagag

SEQ ID NO: 33621 - DNA, 20 bp, Artificial Sequence
  Description of Artificial Sequence: Synthetic oligonucleotide
  Target: LAMA2; (+) strand; PAM type: NNGRRT; PAM sequence: ATGGAT
tatatctaagagtggaattg

SEQ ID NO: 33622 - DNA, 20 bp, Artificial Sequence
  Description of Artificial Sequence: Synthetic oligonucleotide
  Target: LAMA2; (+) strand; PAM type: NNGRRT; PAM sequence: AAGGGT
cgttcccaccaacagtgtac

SEQ ID NO: 33623 - DNA, 20 bp, Artificial Sequence
  Description of Artificial Sequence: Synthetic oligonucleotide
  Target: LAMA2; (+) strand; PAM type: NNGRRT; PAM sequence: TTGGAT
catttgttattgcctgtctt

SEQ ID NO: 33624 - DNA, 20 bp, Artificial Sequence
  Description of Artificial Sequence: Synthetic oligonucleotide
  Target: LAMA2; (+) strand; PAM type: NNGRRT; PAM sequence: TTGGGT
tggataaaagccattttaac

SEQ ID NO: 33625 - DNA, 20 bp, Artificial Sequence
  Description of Artificial Sequence: Synthetic oligonucleotide
  Target: LAMA2; (+) strand; PAM type: NNGRRT; PAM sequence: CTGAAT
ttgatatacctgtttttcat

SEQ ID NO: 33626 - DNA, 20 bp, Artificial Sequence
  Description of Artificial Sequence: Synthetic oligonucleotide
  Target: LAMA2; (+) strand; PAM type: NNGRRT; PAM sequence: TAGGAT
atcttgtacccatttttaaa

SEQ ID NO: 33627 - DNA, 20 bp, Artificial Sequence
  Description of Artificial Sequence: Synthetic oligonucleotide
  Target: LAMA2; (+) strand; PAM type: NNGRRT; PAM sequence: TAGAAT
attattagatttttttccta

SEQ ID NO: 33628 - DNA, 20 bp, Artificial Sequence
  Description of Artificial Sequence: Synthetic oligonucleotide
  Target: LAMA2; (+) strand; PAM type: NNGRRT; PAM sequence: TTGAAT
tttttttcctatagaattgt

SEQ ID NO: 33629 - DNA, 20 bp, Artificial Sequence
  Description of Artificial Sequence: Synthetic oligonucleotide
  Target: LAMA2; (+) strand; PAM type: NNGRRT; PAM sequence: ATGGGT
ggttattaatcccttctcag

SEQ ID NO: 33630 - DNA, 20 bp, Artificial Sequence
  Description of Artificial Sequence: Synthetic oligonucleotide
  Target: LAMA2; (+) strand; PAM type: NNGRRT; PAM sequence: GTGGGT
caaatattttatcccattct

SEQ ID NO: 33631 - DNA, 20 bp, Artificial Sequence
  Description of Artificial Sequence: Synthetic oligonucleotide
  Target: LAMA2; (+) strand; PAM type: NNGRRT; PAM sequence: GTGGGT
tactttggttgcctgtgctt

SEQ ID NO: 33632 - DNA, 20 bp, Artificial Sequence
  Description of Artificial Sequence: Synthetic oligonucleotide
  Target: LAMA2; (+) strand; PAM type: NNGRRT; PAM sequence: GAGAAT
ttgcccatttcaatgtcctg

SEQ ID NO: 33633 - DNA, 20 bp, Artificial Sequence
  Description of Artificial Sequence: Synthetic oligonucleotide
  Target: LAMA2; (+) strand; PAM type: NNGRRT; PAM sequence: TTGGAT
ttattgtaatagtttcatag

SEQ ID NO: 33634 - DNA, 20 bp, Artificial Sequence
  Description of Artificial Sequence: Synthetic oligonucleotide
  Target: LAMA2; (+) strand; PAM type: NNGRRT; PAM sequence: AGGGAT
ttttgtatatggcgagagat

SEQ ID NO: 33635 - DNA, 20 bp, Artificial Sequence
  Description of Artificial Sequence: Synthetic oligonucleotide
  Target: LAMA2; (+) strand; PAM type: NNGRRT; PAM sequence: ATGAAT
ctagtttcattcttccgcat

SEQ ID NO: 33636 - DNA, 20 bp, Artificial Sequence
  Description of Artificial Sequence: Synthetic oligonucleotide
  Target: LAMA2; (+) strand; PAM type: NNGRRT; PAM sequence: ATGAGT
tcttagaacctttatggaaa

SEQ ID NO: 33637 - DNA, 20 bp, Artificial Sequence
  Description of Artificial Sequence: Synthetic oligonucleotide
  Target: LAMA2; (+) strand; PAM type: NNGRRT; PAM sequence: ATGGAT
aatgagttcactgtagatgt

SEQ ID NO: 33638 - DNA, 20 bp, Artificial Sequence
  Description of Artificial Sequence: Synthetic oligonucleotide
  Target: LAMA2; (+) strand; PAM type: NNGRRT; PAM sequence: TAGGAT
ccaattttgttccttttgca

SEQ ID NO: 33639 - DNA, 20 bp, Artificial Sequence
  Description of Artificial Sequence: Synthetic oligonucleotide
  Target: LAMA2; (+) strand; PAM type: NNGRRT; PAM sequence: CTGGGT
ataggatagctgtggctatt

SEQ ID NO: 33640 - DNA, 20 bp, Artificial Sequence
  Description of Artificial Sequence: Synthetic oligonucleotide
  Target: LAMA2; (+) strand; PAM type: NNGRRT; PAM sequence: ATGAAT
gtggctattctgggtttcat

SEQ ID NO: 33641 - DNA, 20 bp, Artificial Sequence
  Description of Artificial Sequence: Synthetic oligonucleotide
  Target: LAMA2; (+) strand; PAM type: NNGRRT; PAM sequence: AGGAAT
ctgggtttcatatgaatttt

SEQ ID NO: 33642 - DNA, 20 bp, Artificial Sequence
  Description of Artificial Sequence: Synthetic oligonucleotide
  Target: LAMA2; (+) strand; PAM type: NNGRRT; PAM sequence: AAGAAT
gaattttttctatttctgtg

SEQ ID NO: 33643 - DNA, 20 bp, Artificial Sequence
  Description of Artificial Sequence: Synthetic oligonucleotide
  Target: LAMA2; (+) strand; PAM type: NNGRRT; PAM sequence: AGGGAT
aatctcattggtattttaat

SEQ ID NO: 33644 - DNA, 20 bp, Artificial Sequence
  Description of Artificial Sequence: Synthetic oligonucleotide
  Target: LAMA2; (+) strand; PAM type: NNGRRT; PAM sequence: CTGGGT
tattaaatctgcagattgct

SEQ ID NO: 33645 - DNA, 20 bp, Artificial Sequence
  Description of Artificial Sequence: Synthetic oligonucleotide
  Target: LAMA2; (+) strand; PAM type: NNGRRT; PAM sequence: TGGAAT
attcttccaatccattaaca

SEQ ID NO: 33646 - DNA, 20 bp, Artificial Sequence
  Description of Artificial Sequence: Synthetic oligonucleotide
  Target: LAMA2; (+) strand; PAM type: NNGRRT; PAM sequence: TTGAAT
tatcttatttttgtgccctc

SEQ ID NO: 33647 - DNA, 20 bp, Artificial Sequence
  Description of Artificial Sequence: Synthetic oligonucleotide
  Target: LAMA2; (+) strand; PAM type: NNGRRT; PAM sequence: AAGGAT
tctaagatctggaacacgac

SEQ ID NO: 33648 - DNA, 20 bp, Artificial Sequence
  Description of Artificial Sequence: Synthetic oligonucleotide
  Target: LAMA2; (+) strand; PAM type: NNGRRT; PAM sequence: CAGGAT
tgataaattcagtaaagctg

SEQ ID NO: 33649 - DNA, 20 bp, Artificial Sequence
  Description of Artificial Sequence: Synthetic oligonucleotide
  Target: LAMA2; (+) strand; PAM type: NNGRRT; PAM sequence: AGGAAT
acaaataaaataaaatacta

SEQ ID NO: 33650 - DNA, 20 bp, Artificial Sequence
  Description of Artificial Sequence: Synthetic oligonucleotide
  Target: LAMA2; (+) strand; PAM type: NNGRRT; PAM sequence: TAGAAT
gcaattaatgtactttaaga

SEQ ID NO: 33651 - DNA, 20 bp, Artificial Sequence
  Description of Artificial Sequence: Synthetic oligonucleotide
  Target: LAMA2; (+) strand; PAM type: NNGRRT; PAM sequence: AAGAAT
gtaacatagttctttctatc

SEQ ID NO: 33652 - DNA, 20 bp, Artificial Sequence
  Description of Artificial Sequence: Synthetic oligonucleotide
  Target: LAMA2; (+) strand; PAM type: NNGRRT; PAM sequence: GGGGAT
aaaaagattaattttgtttg

SEQ ID NO: 33653 - DNA, 20 bp, Artificial Sequence
  Description of Artificial Sequence: Synthetic oligonucleotide
  Target: LAMA2; (+) strand; PAM type: NNGRRT; PAM sequence: AGGAAT
tatcaggaaacgtttcatgg

SEQ ID NO: 33654 - DNA, 20 bp, Artificial Sequence
  Description of Artificial Sequence: Synthetic oligonucleotide
  Target: LAMA2; (+) strand; PAM type: NNGRRT; PAM sequence: GTGGGT
taacactcccatacaaagta

SEQ ID NO: 33655 - DNA, 20 bp, Artificial Sequence
  Description of Artificial Sequence: Synthetic oligonucleotide
  Target: LAMA2; (+) strand; PAM type: NNGRRT; PAM sequence: AAGAGT
tacaaagtagtgggtgatag

SEQ ID NO: 33656 - DNA, 20 bp, Artificial Sequence
  Description of Artificial Sequence: Synthetic oligonucleotide
  Target: LAMA2; (+) strand; PAM type: NNGRRT; PAM sequence: CAGGAT
aagcagaaaacagaaaaaca

SEQ ID NO: 33657 - DNA, 20 bp, Artificial Sequence
  Description of Artificial Sequence: Synthetic oligonucleotide
  Target: LAMA2; (+) strand; PAM type: NNGRRT; PAM sequence: CCGAAT
gttacaggttatgctgaacc

SEQ ID NO: 33658 - DNA, 20 bp, Artificial Sequence
  Description of Artificial Sequence: Synthetic oligonucleotide
  Target: LAMA2; (+) strand; PAM type: NNGRRT; PAM sequence: ATGGAT
agcttcagcttttgcactta

SEQ ID NO: 33659 - DNA, 20 bp, Artificial Sequence
  Description of Artificial Sequence: Synthetic oligonucleotide
  Target: LAMA2; (+) strand; PAM type: NNGRRT; PAM sequence: CTGGAT
ctgcctgggctcttataatt

SEQ ID NO: 33660 - DNA, 20 bp, Artificial Sequence
  Description of Artificial Sequence: Synthetic oligonucleotide
  Target: LAMA2; (+) strand; PAM type: NNGRRT; PAM sequence: TTGGGT
taatacaatttacataagac

SEQ ID NO: 33661 - DNA, 20 bp, Artificial Sequence
  Description of Artificial Sequence: Synthetic oligonucleotide
  Target: LAMA2; (+) strand; PAM type: NNGRRT; PAM sequence: AGGGGT
ttttttcgtttatttccaga

SEQ ID NO: 33662 - DNA, 20 bp, Artificial Sequence
  Description of Artificial Sequence: Synthetic oligonucleotide
  Target: LAMA2; (+) strand; PAM type: NNGRRT; PAM sequence: CTGAGT
aagacttggagaaaattccc

SEQ ID NO: 33663 - DNA, 20 bp, Artificial Sequence
  Description of Artificial Sequence: Synthetic oligonucleotide
  Target: LAMA2; (+) strand; PAM type: NNGRRT; PAM sequence: AAGAGT
aaagattaaaaaaaaaatca

SEQ ID NO: 33664 - DNA, 20 bp, Artificial Sequence
  Description of Artificial Sequence: Synthetic oligonucleotide
  Target: LAMA2; (+) strand; PAM type: NNGRRT; PAM sequence: AAGAAT
atatggaaaatcatagagga

SEQ ID NO: 33665 - DNA, 20 bp, Artificial Sequence
  Description of Artificial Sequence: Synthetic oligonucleotide
  Target: LAMA2; (+) strand; PAM type: NNGRRT; PAM sequence: CTGGAT
atcatagaggaaagaattaa

SEQ ID NO: 33666 - DNA, 20 bp, Artificial Sequence
  Description of Artificial Sequence: Synthetic oligonucleotide
  Target: LAMA2; (+) strand; PAM type: NNGRRT; PAM sequence: AGGGAT
ccagatactttggtaagcac

SEQ ID NO: 33667 - DNA, 20 bp, Artificial Sequence
  Description of Artificial Sequence: Synthetic oligonucleotide
  Target: LAMA2; (+) strand; PAM type: NNGRRT; PAM sequence: TGGAGT
aaataagcaataactaacta

SEQ ID NO: 33668 - DNA, 20 bp, Artificial Sequence
  Description of Artificial Sequence: Synthetic oligonucleotide
  Target: LAMA2; (+) strand; PAM type: NNGRRT; PAM sequence: CAGGAT
gtggtggaagataggccagg

SEQ ID NO: 33669 - DNA, 20 bp, Artificial Sequence
  Description of Artificial Sequence: Synthetic oligonucleotide
  Target: LAMA2; (+) strand; PAM type: NNGRRT; PAM sequence: TAGAAT
ctgaaacttatagccctcat

SEQ ID NO: 33670 - DNA, 20 bp, Artificial Sequence
  Description of Artificial Sequence: Synthetic oligonucleotide
  Target: LAMA2; (+) strand; PAM type: NNGRRT; PAM sequence: TTGAAT
tcattagaattagctagcat

SEQ ID NO: 33671 - DNA, 20 bp, Artificial Sequence
  Description of Artificial Sequence: Synthetic oligonucleotide
  Target: LAMA2; (+) strand; PAM type: NNGRRT; PAM sequence: TTGAAT
aagtcatgcattgtacacgt

SEQ ID NO: 33672 - DNA, 20 bp, Artificial Sequence
  Description of Artificial Sequence: Synthetic oligonucleotide
  Target: LAMA2; (+) strand; PAM type: NNGRRT; PAM sequence: GTGGAT
aaatcttcattttacagttg

SEQ ID NO: 33673 - DNA, 20 bp, Artificial Sequence
  Description of Artificial Sequence: Synthetic oligonucleotide
  Target: LAMA2; (+) strand; PAM type: NNGRRT; PAM sequence: TGGGAT
tacagttggtggattcaaag

SEQ ID NO: 33674 - DNA, 20 bp, Artificial Sequence
  Description of Artificial Sequence: Synthetic oligonucleotide
  Target: LAMA2; (+) strand; PAM type: NNGRRT; PAM sequence: TAGAAT
agtgggattggaccttcttg

SEQ ID NO: 33675 - DNA, 20 bp, Artificial Sequence
  Description of Artificial Sequence: Synthetic oligonucleotide
  Target: LAMA2; (+) strand; PAM type: NNGRRT; PAM sequence: TTGAAT
attggaccttcttgtagaat

SEQ ID NO: 33676 - DNA, 20 bp, Artificial Sequence
  Description of Artificial Sequence: Synthetic oligonucleotide
  Target: LAMA2; (+) strand; PAM type: NNGRRT; PAM sequence: TGGAGT
ttccgcacaactacaacgac

SEQ ID NO: 33677 - DNA, 20 bp, Artificial Sequence
  Description of Artificial Sequence: Synthetic oligonucleotide
  Target: LAMA2; (+) strand; PAM type: NNGRRT; PAM sequence: GGGGAT
acaacgactggagttcttct

SEQ ID NO: 33678 - DNA, 20 bp, Artificial Sequence
  Description of Artificial Sequence: Synthetic oligonucleotide
  Target: LAMA2; (+) strand; PAM type: NNGRRT; PAM sequence: ATGGAT
tggggatcagtagtcaaaaa

SEQ ID NO: 33679 - DNA, 20 bp, Artificial Sequence
  Description of Artificial Sequence: Synthetic oligonucleotide
  Target: LAMA2; (+) strand; PAM type: NNGRRT; PAM sequence: TGGAAT
atcagtagtcaaaaaatgga

SEQ ID NO: 33680 - DNA, 20 bp, Artificial Sequence
  Description of Artificial Sequence: Synthetic oligonucleotide
  Target: LAMA2; (+) strand; PAM type: NNGRRT; PAM sequence: ATGGGT
gtagtcaaaaaatggatgga

SEQ ID NO: 33681 - DNA, 20 bp, Artificial Sequence
  Description of Artificial Sequence: Synthetic oligonucleotide
  Target: LAMA2; (+) strand; PAM type: NNGRRT; PAM sequence: GTGAGT
ttgaaatgattgatgaaaag

SEQ ID NO: 33682 - DNA, 20 bp, Artificial Sequence
  Description of Artificial Sequence: Synthetic oligonucleotide
  Target: LAMA2; (+) strand; PAM type: NNGRRT; PAM sequence: TCGAAT
atcatccatgtgtgggaaac

SEQ ID NO: 33683 - DNA, 20 bp, Artificial Sequence
  Description of Artificial Sequence: Synthetic oligonucleotide
  Target: LAMA2; (+) strand; PAM type: NNGRRT; PAM sequence: CTGGAT
aattgtatgttttcatcctt

SEQ ID NO: 33684 - DNA, 20 bp, Artificial Sequence
  Description of Artificial Sequence: Synthetic oligonucleotide
  Target: LAMA2; (+) strand; PAM type: NNGRRT; PAM sequence: TCGAGT
gaaccaaatagtttgagatc

SEQ ID NO: 33685 - DNA, 20 bp, Artificial Sequence
  Description of Artificial Sequence: Synthetic oligonucleotide
  Target: LAMA2; (+) strand; PAM type: NNGRRT; PAM sequence: GTGGAT
gtgggagaaaaggcagagag

SEQ ID NO: 33686 - DNA, 20 bp, Artificial Sequence
  Description of Artificial Sequence: Synthetic oligonucleotide
  Target: LAMA2; (+) strand; PAM type: NNGRRT; PAM sequence: AGGAAT
tttctatttggttattaaat

SEQ ID NO: 33687 - DNA, 20 bp, Artificial Sequence
  Description of Artificial Sequence: Synthetic oligonucleotide
  Target: LAMA2; (+) strand; PAM type: NNGRRT; PAM sequence: AGGAGT
ccaccagcttagaggtaaaa

SEQ ID NO: 33688 - DNA, 20 bp, Artificial Sequence
  Description of Artificial Sequence: Synthetic oligonucleotide
  Target: LAMA2; (+) strand; PAM type: NNGRRT; PAM sequence: TAGAGT
ttcattaataattacatcaa

SEQ ID NO: 33689 - DNA, 20 bp, Artificial Sequence
  Description of Artificial Sequence: Synthetic oligonucleotide
  Target: LAMA2; (+) strand; PAM type: NNGRRT; PAM sequence: TCGAAT
atttcttttcttttaccttg

SEQ ID NO: 33690 - DNA, 20 bp, Artificial Sequence
  Description of Artificial Sequence: Synthetic oligonucleotide
  Target: LAMA2; (+) strand; PAM type: NNGRRT; PAM sequence: AAGAAT
cgtttcttcaccagcttcaa

SEQ ID NO: 33691 - DNA, 20 bp, Artificial Sequence
  Description of Artificial Sequence: Synthetic oligonucleotide
  Target: LAMA2; (+) strand; PAM type: NNGRRT; PAM sequence: AGGAAT
agtctaagttcttcattgtt

SEQ ID NO: 33692 - DNA, 20 bp, Artificial Sequence
  Description of Artificial Sequence: Synthetic oligonucleotide
  Target: LAMA2; (+) strand; PAM type: NNGRRT; PAM sequence: TTGAAT
aatttaaaaaatcctttact

SEQ ID NO: 33693 - DNA, 20 bp, Artificial Sequence
  Description of Artificial Sequence: Synthetic oligonucleotide
  Target: LAMA2; (+) strand; PAM type: NNGRRT; PAM sequence: ATGAGT
tgaatttgtaaaccaaatta

SEQ ID NO: 33694 - DNA, 20 bp, Artificial Sequence
  Description of Artificial Sequence: Synthetic oligonucleotide
  Target: LAMA2; (+) strand; PAM type: NNGRRT; PAM sequence: TAGAAT
cattctaaaaagacgtgagg

SEQ ID NO: 33695 - DNA, 20 bp, Artificial Sequence
  Description of Artificial Sequence: Synthetic oligonucleotide
  Target: LAMA2; (+) strand; PAM type: NNGRRT; PAM sequence: CAGAAT
gcctcaaatttttctgaaag

SEQ ID NO: 33696 - DNA, 20 bp, Artificial Sequence
  Description of Artificial Sequence: Synthetic oligonucleotide
  Target: LAMA2; (+) strand; PAM type: NNGRRT; PAM sequence: TGGGGT
ttcactgctgtctatgatgc

SEQ ID NO: 33697 - DNA, 20 bp, Artificial Sequence
  Description of Artificial Sequence: Synthetic oligonucleotide
  Target: LAMA2; (+) strand; PAM type: NNGRRT; PAM sequence: GTGAGT
gtttgttggaggcttcccag

SEQ ID NO: 33698 - DNA, 20 bp, Artificial Sequence
  Description of Artificial Sequence: Synthetic oligonucleotide
  Target: LAMA2; (+) strand; PAM type: NNGRRT; PAM sequence: AAGAAT
atttatatttacgtgtgtct

SEQ ID NO: 33699 - DNA, 20 bp, Artificial Sequence
  Description of Artificial Sequence: Synthetic oligonucleotide
  Target: LAMA2; (+) strand; PAM type: NNGRRT; PAM sequence: TAGAAT
gtgtacttgcttcctagctt

SEQ ID NO: 33700 - DNA, 20 bp, Artificial Sequence
  Description of Artificial Sequence: Synthetic oligonucleotide
  Target: LAMA2; (+) strand; PAM type: NNGRRT; PAM sequence: TAGAAT
tcctagctttagaatctgct

SEQ ID NO: 33701 - DNA, 20 bp, Artificial Sequence
  Description of Artificial Sequence: Synthetic oligonucleotide
  Target: LAMA2; (+) strand; PAM type: NNGRRT; PAM sequence: ATGAAT
agagattgaagctggaggaa

SEQ ID NO: 33702 - DNA, 20 bp, Artificial Sequence
  Description of Artificial Sequence: Synthetic oligonucleotide
  Target: LAMA2; (+) strand; PAM type: NNGRRT; PAM sequence: AGGAAT
ttttaaaattaatataccag

SEQ ID NO: 33703 - DNA, 20 bp, Artificial Sequence
  Description of Artificial Sequence: Synthetic oligonucleotide
  Target: LAMA2; (+) strand; PAM type: NNGRRT; PAM sequence: TTGGGT
tcctcaagttctggaaatca

SEQ ID NO: 33704 - DNA, 20 bp, Artificial Sequence
  Description of Artificial Sequence: Synthetic oligonucleotide
  Target: LAMA2; (+) strand; PAM type: NNGRRT; PAM sequence: TAGAGT
atttcccccttatgttatta

SEQ ID NO: 33705 - DNA, 20 bp, Artificial Sequence
  Description of Artificial Sequence: Synthetic oligonucleotide
  Target: LAMA2; (+) strand; PAM type: NNGRRT; PAM sequence: CAGAAT
gcaagcaataaatcctcatt

SEQ ID NO: 33706 - DNA, 20 bp, Artificial Sequence
  Description of Artificial Sequence: Synthetic oligonucleotide
  Target: LAMA2; (+) strand; PAM type: NNGRRT; PAM sequence: AAGAGT
tacctaaagtgcccataaac

SEQ ID NO: 33707 - DNA, 20 bp, Artificial Sequence
  Description of Artificial Sequence: Synthetic oligonucleotide
  Target: LAMA2; (+) strand; PAM type: NNGRRT; PAM sequence: TGGAAT
actgtaataacatagcctcc

SEQ ID NO: 33708 - DNA, 20 bp, Artificial Sequence
  Description of Artificial Sequence: Synthetic oligonucleotide
  Target: LAMA2; (+) strand; PAM type: NNGRRT; PAM sequence: CAGGAT
aaaagatcttttgcttcaat

SEQ ID NO: 33709 - DNA, 20 bp, Artificial Sequence
  Description of Artificial Sequence: Synthetic oligonucleotide
  Target: LAMA2; (+) strand; PAM type: NNGRRT; PAM sequence: TGGGAT
ctccattcagtctatgataa

SEQ ID NO: 33710 - DNA, 20 bp, Artificial Sequence
  Description of Artificial Sequence: Synthetic oligonucleotide
  Target: LAMA2; (+) strand; PAM type: NNGRRT; PAM sequence: ATGAAT
taataagaggaagattctac

SEQ ID NO: 33711 - DNA, 20 bp, Artificial Sequence
  Description of Artificial Sequence: Synthetic oligonucleotide
  Target: LAMA2; (+) strand; PAM type: NNGRRT; PAM sequence: AGGGAT
atccaacctacttaaccttt

SEQ ID NO: 33712 - DNA, 20 bp, Artificial Sequence
  Description of Artificial Sequence: Synthetic oligonucleotide
  Target: LAMA2; (+) strand; PAM type: NNGRRT; PAM sequence: TGGAAT
tgcctgtaatcccaacactt

SEQ ID NO: 33713 - DNA, 20 bp, Artificial Sequence
  Description of Artificial Sequence: Synthetic oligonucleotide
  Target: LAMA2; (+) strand; PAM type: NNGRRT; PAM sequence: AGGAGT
tggggagatctcttgagccc

SEQ ID NO: 33714 - DNA, 20 bp, Artificial Sequence
  Description of Artificial Sequence: Synthetic oligonucleotide
  Target: LAMA2; (+) strand; PAM type: NNGRRT; PAM sequence: GAGGAT
cctgggcaacacggcgaagg

SEQ ID NO: 33715 - DNA, 20 bp, Artificial Sequence
  Description of Artificial Sequence: Synthetic oligonucleotide
  Target: LAMA2; (+) strand; PAM type: NNGRRT; PAM sequence: AAGAGT
aaaataagtgtaaccccagg

SEQ ID NO: 33716 - DNA, 20 bp, Artificial Sequence
  Description of Artificial Sequence: Synthetic oligonucleotide
  Target: LAMA2; (+) strand; PAM type: NNGRRT; PAM sequence: TAGAAT
aactaatttgtgcatgtaca

SEQ ID NO: 33717 - DNA, 20 bp, Artificial Sequence
  Description of Artificial Sequence: Synthetic oligonucleotide
  Target: LAMA2; (+) strand; PAM type: NNGRRT; PAM sequence: CTGAAT
gtgctaattcagactccaga

SEQ ID NO: 33718 - DNA, 20 bp, Artificial Sequence
  Description of Artificial Sequence: Synthetic oligonucleotide
  Target: LAMA2; (+) strand; PAM type: NNGRRT; PAM sequence: AAGGAT
tgcctgttttgtgtgatttt

SEQ ID NO: 33719 - DNA, 20 bp, Artificial Sequence
  Description of Artificial Sequence: Synthetic oligonucleotide
  Target: LAMA2; (+) strand; PAM type: NNGRRT; PAM sequence: TTGAGT
aggtaactggccataaattg

SEQ ID NO: 33720 - DNA, 20 bp, Artificial Sequence
  Description of Artificial Sequence: Synthetic oligonucleotide
  Target: LAMA2; (+) strand; PAM type: NNGRRT; PAM sequence: AAGAGT
ccctccagtcatctcaagga

SEQ ID NO: 33721 - DNA, 20 bp, Artificial Sequence
  Description of Artificial Sequence: Synthetic oligonucleotide
  Target: LAMA2; (+) strand; PAM type: NNGRRT; PAM sequence: GTGAAT
gtccaagccactgacagcaa

SEQ ID NO: 33722 - DNA, 20 bp, Artificial Sequence
  Description of Artificial Sequence: Synthetic oligonucleotide
  Target: LAMA2; (+) strand; PAM type: NNGRRT; PAM sequence: AAGAAT
ttcccttactctatttatga

SEQ ID NO: 33723 - DNA, 20 bp, Artificial Sequence
  Description of Artificial Sequence: Synthetic oligonucleotide
  Target: LAMA2; (+) strand; PAM type: NNGRRT; PAM sequence: GAGAGT
ctgacccaagttcattatta

SEQ ID NO: 33724 - DNA, 20 bp, Artificial Sequence
  Description of Artificial Sequence: Synthetic oligonucleotide
  Target: LAMA2; (+) strand; PAM type: NNGRRT; PAM sequence: ATGAGT
tagagagtttaactagccgt

SEQ ID NO: 33725 - DNA, 20 bp, Artificial Sequence
  Description of Artificial Sequence: Synthetic oligonucleotide
  Target: LAMA2; (+) strand; PAM type: NNGRRT; PAM sequence: GTGAAT
gagtttaactagccgtatga

SEQ ID NO: 33726 - DNA, 20 bp, Artificial Sequence
  Description of Artificial Sequence: Synthetic oligonucleotide
  Target: LAMA2; (+) strand; PAM type: NNGRRT; PAM sequence: GAGGGT
agctttttatgctgaaggta

SEQ ID NO: 33727 - DNA, 20 bp, Artificial Sequence
  Description of Artificial Sequence: Synthetic oligonucleotide
  Target: LAMA2; (+) strand; PAM type: NNGRRT; PAM sequence: ATGAAT
gagatgccaaaaccaagctt

SEQ ID NO: 33728 - DNA, 20 bp, Artificial Sequence
  Description of Artificial Sequence: Synthetic oligonucleotide
  Target: LAMA2; (+) strand; PAM type: NNGRRT; PAM sequence: GTGAAT
tggggctctctaagcctaca

SEQ ID NO: 33729 - DNA, 20 bp, Artificial Sequence
  Description of Artificial Sequence: Synthetic oligonucleotide
  Target: LAMA2; (+) strand; PAM type: NNGRRT; PAM sequence: AGGAAT
caatttacacctaggtggag

SEQ ID NO: 33730 - DNA, 20 bp, Artificial Sequence
  Description of Artificial Sequence: Synthetic oligonucleotide
  Target: LAMA2; (+) strand; PAM type: NNGRRT; PAM sequence: TTGAGT
aacttaaaaggcatacttca

SEQ ID NO: 33731 - DNA, 20 bp, Artificial Sequence
  Description of Artificial Sequence: Synthetic oligonucleotide
  Target: LAMA2; (+) strand; PAM type: NNGRRT; PAM sequence: AAGAAT
ctatggaaattttagcaaca

SEQ ID NO: 33732 - DNA, 20 bp, Artificial Sequence
  Description of Artificial Sequence: Synthetic oligonucleotide
  Target: LAMA2; (+) strand; PAM type: NNGRRT; PAM sequence: GGGAGT
atgctttagaaaagtgccta

SEQ ID NO: 33733 - DNA, 20 bp, Artificial Sequence
  Description of Artificial Sequence: Synthetic oligonucleotide
  Target: LAMA2; (+) strand; PAM type: NNGRRT; PAM sequence: CAGGGT
gattttttttttttttgaga

SEQ ID NO: 33734 - DNA, 20 bp, Artificial Sequence
  Description of Artificial Sequence: Synthetic oligonucleotide
  Target: LAMA2; (+) strand; PAM type: NNGRRT; PAM sequence: AGGAGT
tctcatgttgtcacccaggc

SEQ ID NO: 33735 - DNA, 20 bp, Artificial Sequence
  Description of Artificial Sequence: Synthetic oligonucleotide
  Target: LAMA2; (+) strand; PAM type: NNGRRT; PAM sequence: ATGGGT
tttttatatttttagtagag

SEQ ID NO: 33736 - DNA, 20 bp, Artificial Sequence
  Description of Artificial Sequence: Synthetic oligonucleotide
  Target: LAMA2; (+) strand; PAM type: NNGRRT; PAM sequence: TAGGAT
gcctcagcctcccaaagtgc

SEQ ID NO: 33737 - DNA, 20 bp, Artificial Sequence
  Description of Artificial Sequence: Synthetic oligonucleotide
  Target: LAMA2; (+) strand; PAM type: NNGRRT; PAM sequence: GAGGAT
cactgtgcccagtcaagcat

SEQ ID NO: 33738 - DNA, 20 bp, Artificial Sequence
  Description of Artificial Sequence: Synthetic oligonucleotide
  Target: LAMA2; (+) strand; PAM type: NNGRRT; PAM sequence: AAGGAT
ggcaattctaatgtgttgtc

SEQ ID NO: 33739 - DNA, 20 bp, Artificial Sequence
  Description of Artificial Sequence: Synthetic oligonucleotide
  Target: LAMA2; (+) strand; PAM type: NNGRRT; PAM sequence: AAGGAT
agaaaaataagcaataggga

SEQ ID NO: 33740 - DNA, 20 bp, Artificial Sequence
  Description of Artificial Sequence: Synthetic oligonucleotide
  Target: LAMA2; (+) strand; PAM type: NNGRRT; PAM sequence: CTGGAT
ccataagtagaaagctgaaa

SEQ ID NO: 33741 - DNA, 20 bp, Artificial Sequence
  Description of Artificial Sequence: Synthetic oligonucleotide
  Target: LAMA2; (+) strand; PAM type: NNGRRT; PAM sequence: ATGGAT
tatacaaaaattaattcaag

SEQ ID NO: 33742 - DNA, 20 bp, Artificial Sequence
  Description of Artificial Sequence: Synthetic oligonucleotide
  Target: LAMA2; (+) strand; PAM type: NNGRRT; PAM sequence: TGGGAT
caaaagccaaaattgacaaa

SEQ ID NO: 33743 - DNA, 20 bp, Artificial Sequence
  Description of Artificial Sequence: Synthetic oligonucleotide
  Target: LAMA2; (+) strand; PAM type: NNGRRT; PAM sequence: CAGAAT
cagagcgaacaggcaaccta

SEQ ID NO: 33744 - DNA, 20 bp, Artificial Sequence
  Description of Artificial Sequence: Synthetic oligonucleotide
  Target: LAMA2; (+) strand; PAM type: NNGRRT; PAM sequence: CAGAAT
tctgacaaagggctaatatc

SEQ ID NO: 33745 - DNA, 20 bp, Artificial Sequence
  Description of Artificial Sequence: Synthetic oligonucleotide
  Target: LAMA2; (+) strand; PAM type: NNGRRT; PAM sequence: AAGGAT
accccatcaaaaagtgggca

SEQ ID NO: 33746 - DNA, 20 bp, Artificial Sequence
  Description of Artificial Sequence: Synthetic oligonucleotide
  Target: LAMA2; (+) strand; PAM type: NNGRRT; PAM sequence: TAGAAT
agataccatctcacaccagt

SEQ ID NO: 33747 - DNA, 20 bp, Artificial Sequence
  Description of Artificial Sequence: Synthetic oligonucleotide
  Target: LAMA2; (+) strand; PAM type: NNGRRT; PAM sequence: GAGGAT
aggaaacaacaggtgctgga

SEQ ID NO: 33748 - DNA, 20 bp, Artificial Sequence
  Description of Artificial Sequence: Synthetic oligonucleotide
  Target: LAMA2; (+) strand; PAM type: NNGRRT; PAM sequence: AGGGAT
agtcagtgtggccattcctc

SEQ ID NO: 33749 - DNA, 20 bp, Artificial Sequence
  Description of Artificial Sequence: Synthetic oligonucleotide
  Target: LAMA2; (+) strand; PAM type: NNGRRT; PAM sequence: CTGGGT
ttgacccagccatcccatta

SEQ ID NO: 33750 - DNA, 20 bp, Artificial Sequence
  Description of Artificial Sequence: Synthetic oligonucleotide
  Target: LAMA2; (+) strand; PAM type: NNGRRT; PAM sequence: CTGGAT
aaatgtccaacaatgataga

SEQ ID NO: 33751 - DNA, 20 bp, Artificial Sequence
  Description of Artificial Sequence: Synthetic oligonucleotide
  Target: LAMA2; (+) strand; PAM type: NNGRRT; PAM sequence: TGGAAT
aatgtggcacatatacacca

SEQ ID NO: 33752 - DNA, 20 bp, Artificial Sequence
  Description of Artificial Sequence: Synthetic oligonucleotide
  Target: LAMA2; (+) strand; PAM type: NNGRRT; PAM sequence: AAGAGT
aatagtatgcataaaaaatg

SEQ ID NO: 33753 - DNA, 20 bp, Artificial Sequence
  Description of Artificial Sequence: Synthetic oligonucleotide
  Target: LAMA2; (+) strand; PAM type: NNGRRT; PAM sequence: ATGGAT
ttcatgtcctttgtagggac

SEQ ID NO: 33754 - DNA, 20 bp, Artificial Sequence
  Description of Artificial Sequence: Synthetic oligonucleotide
  Target: LAMA2; (+) strand; PAM type: NNGRRT; PAM sequence: GGGAAT
gcatgttctcactcatagat

SEQ ID NO: 33755 - DNA, 20 bp, Artificial Sequence
  Description of Artificial Sequence: Synthetic oligonucleotide
  Target: LAMA2; (+) strand; PAM type: NNGRRT; PAM sequence: TGGGGT
tcacactctggggactgttt

SEQ ID NO: 33756 - DNA, 20 bp, Artificial Sequence
  Description of Artificial Sequence: Synthetic oligonucleotide
  Target: LAMA2; (+) strand; PAM type: NNGRRT; PAM sequence: AGGGAT
ttggggtggggggagggggg

SEQ ID NO: 33757 - DNA, 20 bp, Artificial Sequence
  Description of Artificial Sequence: Synthetic oligonucleotide
  Target: LAMA2; (+) strand; PAM type: NNGRRT; PAM sequence: ATGAGT
gatatacctaatgttaaatg

SEQ ID NO: 33758 - DNA, 20 bp, Artificial Sequence
  Description of Artificial Sequence: Synthetic oligonucleotide
  Target: LAMA2; (+) strand; PAM type: NNGRRT; PAM sequence: ATGGGT
taatgttaaatgatgagtta

SEQ ID NO: 33759 - DNA, 20 bp, Artificial Sequence
  Description of Artificial Sequence: Synthetic oligonucleotide
  Target: LAMA2; (+) strand; PAM type: NNGRRT; PAM sequence: AAGGAT
taataaaaaaaagaaaaaaa

SEQ ID NO: 33760 - DNA, 20 bp, Artificial Sequence
  Description of Artificial Sequence: Synthetic oligonucleotide
  Target: LAMA2; (+) strand; PAM type: NNGRRT; PAM sequence: AAGAGT
cattatcctccatgccaaca

SEQ ID NO: 33761 - DNA, 20 bp, Artificial Sequence
  Description of Artificial Sequence: Synthetic oligonucleotide
  Target: LAMA2; (+) strand; PAM type: NNGRRT; PAM sequence: GAGAAT
aaagagttttatagtcattt

SEQ ID NO: 33762 - DNA, 20 bp, Artificial Sequence
  Description of Artificial Sequence: Synthetic oligonucleotide
  Target: LAMA2; (+) strand; PAM type: NNGRRT; PAM sequence: GAGGAT
cactttggtcgctcaggcag

SEQ ID NO: 33763 - DNA, 20 bp, Artificial Sequence
  Description of Artificial Sequence: Synthetic oligonucleotide
  Target: LAMA2; (+) strand; PAM type: NNGRRT; PAM sequence: AGGAGT
caggaggatcagtggaaccc

SEQ ID NO: 33764 - DNA, 20 bp, Artificial Sequence
  Description of Artificial Sequence: Synthetic oligonucleotide
  Target: LAMA2; (+) strand; PAM type: NNGRRT; PAM sequence: TTGAAT
atatctttttatatcaaata

SEQ ID NO: 33765 - DNA, 20 bp, Artificial Sequence
  Description of Artificial Sequence: Synthetic oligonucleotide
  Target: LAMA2; (+) strand; PAM type: NNGRRT; PAM sequence: GTGAAT
tatatcaaatattgaatcta

SEQ ID NO: 33766 - DNA, 20 bp, Artificial Sequence
  Description of Artificial Sequence: Synthetic oligonucleotide
  Target: LAMA2; (+) strand; PAM type: NNGRRT; PAM sequence: TTGAAT
tgaatttaatatataaaaca

SEQ ID NO: 33767 - DNA, 20 bp, Artificial Sequence
  Description of Artificial Sequence: Synthetic oligonucleotide
  Target: LAMA2; (+) strand; PAM type: NNGRRT; PAM sequence: GTGAAT
tatataaaacattgaatcta

SEQ ID NO: 33768 - DNA, 20 bp, Artificial Sequence
  Description of Artificial Sequence: Synthetic oligonucleotide
  Target: LAMA2; (+) strand; PAM type: NNGRRT; PAM sequence: CTGAGT
ttttgggcttaatctggaca

SEQ ID NO: 33769 - DNA, 20 bp, Artificial Sequence
  Description of Artificial Sequence: Synthetic oligonucleotide
  Target: LAMA2; (+) strand; PAM type: NNGRRT; PAM sequence: TGGGAT
ggcttaatctggacactgag

SEQ ID NO: 33770 - DNA, 20 bp, Artificial Sequence
  Description of Artificial Sequence: Synthetic oligonucleotide
  Target: LAMA2; (+) strand; PAM type: NNGRRT; PAM sequence: AGGAAT
ggacactgagtgggataaac

SEQ ID NO: 33771 - DNA, 20 bp, Artificial Sequence
  Description of Artificial Sequence: Synthetic oligonucleotide
  Target: LAMA2; (+) strand; PAM type: NNGRRT; PAM sequence: TTGGGT
gataaacaggaataaagatg

SEQ ID NO: 33772 - DNA, 20 bp, Artificial Sequence
  Description of Artificial Sequence: Synthetic oligonucleotide
  Target: LAMA2; (+) strand; PAM type: NNGRRT; PAM sequence: TTGAGT
aaagctaaagcctttctttc

SEQ ID NO: 33773 - DNA, 20 bp, Artificial Sequence
  Description of Artificial Sequence: Synthetic oligonucleotide
  Target: LAMA2; (+) strand; PAM type: NNGRRT; PAM sequence: CAGAAT
agttaaattggcactcctat

SEQ ID NO: 33774 - DNA, 20 bp, Artificial Sequence
  Description of Artificial Sequence: Synthetic oligonucleotide
  Target: LAMA2; (+) strand; PAM type: NNGRRT; PAM sequence: TAGAAT
caatttgtaggtagatgcct

SEQ ID NO: 33775 - DNA, 20 bp, Artificial Sequence
  Description of Artificial Sequence: Synthetic oligonucleotide
  Target: LAMA2; (+) strand; PAM type: NNGRRT; PAM sequence: TAGAAT
aggtagatgccttagaatga

SEQ ID NO: 33776 - DNA, 20 bp, Artificial Sequence
  Description of Artificial Sequence: Synthetic oligonucleotide
  Target: LAMA2; (+) strand; PAM type: NNGRRT; PAM sequence: GTGAAT
atagaatgatagaactggaa

SEQ ID NO: 33777 - DNA, 20 bp, Artificial Sequence
  Description of Artificial Sequence: Synthetic oligonucleotide
  Target: LAMA2; (+) strand; PAM type: NNGRRT; PAM sequence: GCGAAT
ctggaagtgaattgagatca

SEQ ID NO: 33778 - DNA, 20 bp, Artificial Sequence
  Description of Artificial Sequence: Synthetic oligonucleotide
  Target: LAMA2; (+) strand; PAM type: NNGRRT; PAM sequence: TTGGGT
agctagatgtttaaagtgct

SEQ ID NO: 33779 - DNA, 20 bp, Artificial Sequence
  Description of Artificial Sequence: Synthetic oligonucleotide
  Target: LAMA2; (+) strand; PAM type: NNGRRT; PAM sequence: GAGGAT
actctgggaggccaaggcag

SEQ ID NO: 33780 - DNA, 20 bp, Artificial Sequence
  Description of Artificial Sequence: Synthetic oligonucleotide
  Target: LAMA2; (+) strand; PAM type: NNGRRT; PAM sequence: AGGAGT
caggaggatcacttaagccc

SEQ ID NO: 33781 - DNA, 20 bp, Artificial Sequence
  Description of Artificial Sequence: Synthetic oligonucleotide
  Target: LAMA2; (+) strand; PAM type: NNGRRT; PAM sequence: CAGGGT
aggtgggaggttcacttgag

SEQ ID NO: 33782 - DNA, 20 bp, Artificial Sequence
  Description of Artificial Sequence: Synthetic oligonucleotide
  Target: LAMA2; (+) strand; PAM type: NNGRRT; PAM sequence: CTGGGT
aagaaaaaaaaaattgacat

SEQ ID NO: 33783 - DNA, 20 bp, Artificial Sequence
  Description of Artificial Sequence: Synthetic oligonucleotide
  Target: LAMA2; (+) strand; PAM type: NNGRRT; PAM sequence: CTGGGT
gcccaattaaactataatct

SEQ ID NO: 33784 - DNA, 20 bp, Artificial Sequence
  Description of Artificial Sequence: Synthetic oligonucleotide
  Target: LAMA2; (+) strand; PAM type: NNGRRT; PAM sequence: AAGGAT
ggaggaactagaaggaactc

SEQ ID NO: 33785 - DNA, 20 bp, Artificial Sequence
  Description of Artificial Sequence: Synthetic oligonucleotide
  Target: LAMA2; (+) strand; PAM type: NNGRRT; PAM sequence: CTGGAT
tgtagtccagacagttgcat

SEQ ID NO: 33786 - DNA, 20 bp, Artificial Sequence
  Description of Artificial Sequence: Synthetic oligonucleotide
  Target: LAMA2; (+) strand; PAM type: NNGRRT; PAM sequence: CAGAAT
cagttgcatctggatccaag

SEQ ID NO: 33787 - DNA, 20 bp, Artificial Sequence
  Description of Artificial Sequence: Synthetic oligonucleotide
  Target: LAMA2; (+) strand; PAM type: NNGRRT; PAM sequence: CTGAAT
ctggatccaagcagaattca

SEQ ID NO: 33788 - DNA, 20 bp, Artificial Sequence
  Description of Artificial Sequence: Synthetic oligonucleotide
  Target: LAMA2; (+) strand; PAM type: NNGRRT; PAM sequence: CAGAGT
cccatgcaaaattcatactc

SEQ ID NO: 33789 - DNA, 20 bp, Artificial Sequence
  Description of Artificial Sequence: Synthetic oligonucleotide
  Target: LAMA2; (+) strand; PAM type: NNGRRT; PAM sequence: ATGAAT
ttcatactccagagtgaccc

SEQ ID NO: 33790 - DNA, 20 bp, Artificial Sequence
  Description of Artificial Sequence: Synthetic oligonucleotide
  Target: LAMA2; (+) strand; PAM type: NNGRRT; PAM sequence: TTGGAT
ctccagagtgacccatgaat

SEQ ID NO: 33791 - DNA, 20 bp, Artificial Sequence
  Description of Artificial Sequence: Synthetic oligonucleotide
  Target: LAMA2; (+) strand; PAM type: NNGRRT; PAM sequence: AGGAGT
caggtggaccacctgaggtc

SEQ ID NO: 33792 - DNA, 20 bp, Artificial Sequence
  Description of Artificial Sequence: Synthetic oligonucleotide
  Target: LAMA2; (+) strand; PAM type: NNGRRT; PAM sequence: GAGAAT
tactcgggaggctgaggcag

SEQ ID NO: 33793 - DNA, 20 bp, Artificial Sequence
  Description of Artificial Sequence: Synthetic oligonucleotide
  Target: LAMA2; (+) strand; PAM type: NNGRRT; PAM sequence: CAGAGT
ctgcactccagcctgggcga

SEQ ID NO: 33794 - DNA, 20 bp, Artificial Sequence
  Description of Artificial Sequence: Synthetic oligonucleotide
  Target: LAMA2; (-) strand; PAM type: NNNNGHTT; PAM sequence: TTGGGTTT
gttttgaatgtacatgtctt

SEQ ID NO: 33795 - DNA, 20 bp, Artificial Sequence
  Description of Artificial Sequence: Synthetic oligonucleotide
  Target: LAMA2; (-) strand; PAM type: NNNNGHTT; PAM sequence: TATAGTTT
taatattctaagcagtgcct

SEQ ID NO: 33796 - DNA, 20 bp, Artificial Sequence
  Description of Artificial Sequence: Synthetic oligonucleotide
  Target: LAMA2; (-) strand; PAM type: NNNNGHTT; PAM sequence: ACATGTTT
tagcccgtcttcatttattt

SEQ ID NO: 33797 - DNA, 20 bp, Artificial Sequence
  Description of Artificial Sequence: Synthetic oligonucleotide
  Target: LAMA2; (-) strand; PAM type: NNNNGHTT; PAM sequence: ACATGATT
ccaaaaaaggagagtaggga

SEQ ID NO: 33798 - DNA, 20 bp, Artificial Sequence
  Description of Artificial Sequence: Synthetic oligonucleotide
  Target: LAMA2; (-) strand; PAM type: NNNNGHTT; PAM sequence: ATCAGCTT
aagtccatataattttaaat

SEQ ID NO: 33799 - DNA, 20 bp, Artificial Sequence
  Description of Artificial Sequence: Synthetic oligonucleotide
  Target: LAMA2; (-) strand; PAM type: NNNNGHTT; PAM sequence: TTTAGTTT
gatcatatggtaagaatatg

SEQ ID NO: 33800 - DNA, 20 bp, Artificial Sequence
  Description of Artificial Sequence: Synthetic oligonucleotide
  Target: LAMA2; (-) strand; PAM type: NNNNGHTT; PAM sequence: ATATGTTT
gcctggatcatatggtaaga

SEQ ID NO: 33801 - DNA, 20 bp, Artificial Sequence
  Description of Artificial Sequence: Synthetic oligonucleotide
  Target: LAMA2; (-) strand; PAM type: NNNNGHTT; PAM sequence: ACAAGTTT
gtgaaggtttttgtgtggac

SEQ ID NO: 33802 - DNA, 20 bp, Artificial Sequence
  Description of Artificial Sequence: Synthetic oligonucleotide
  Target: LAMA2; (-) strand; PAM type: NNNNGHTT; PAM sequence: GAAGGTTT
tattctcatatttcacatgt

SEQ ID NO: 33803 - DNA, 20 bp, Artificial Sequence
  Description of Artificial Sequence: Synthetic oligonucleotide
  Target: LAMA2; (-) strand; PAM type: NNNNGHTT; PAM sequence: TATAGATT
tgctgatctaattttgtcac

SEQ ID NO: 33804 - DNA, 20 bp, Artificial Sequence
  Description of Artificial Sequence: Synthetic oligonucleotide
  Target: LAMA2; (-) strand; PAM type: NNNNGHTT; PAM sequence: CCAAGTTT
gaaaaacaccttggttggtt

SEQ ID NO: 33805 - DNA, 20 bp, Artificial Sequence
  Description of Artificial Sequence: Synthetic oligonucleotide
  Target: LAMA2; (-) strand; PAM type: NNNNGHTT; PAM sequence: CACAGTTT
atttcgttatcttgaagtac

SEQ ID NO: 33806 - DNA, 20 bp, Artificial Sequence
  Description of Artificial Sequence: Synthetic oligonucleotide
  Target: LAMA2; (-) strand; PAM type: NNNNGHTT; PAM sequence: CATGGCTT
gcatttaagtttcctctttt

SEQ ID NO: 33807 - DNA, 20 bp, Artificial Sequence
  Description of Artificial Sequence: Synthetic oligonucleotide
  Target: LAMA2; (-) strand; PAM type: NNNNGHTT; PAM sequence: TTAAGTTT
tttcacttagtaatatgcat

SEQ ID NO: 33808 - DNA, 20 bp, Artificial Sequence
  Description of Artificial Sequence: Synthetic oligonucleotide
  Target: LAMA2; (-) strand; PAM type: NNNNGHTT; PAM sequence: ATAAGTTT
tacaatatatagcctttcag

SEQ ID NO: 33809 - DNA, 20 bp, Artificial Sequence
  Description of Artificial Sequence: Synthetic oligonucleotide
  Target: LAMA2; (-) strand; PAM type: NNNNGHTT; PAM sequence: CTTAGTTT
actgatctttttactgtccc

SEQ ID NO: 33810 - DNA, 20 bp, Artificial Sequence
  Description of Artificial Sequence: Synthetic oligonucleotide
  Target: LAMA2; (-) strand; PAM type: NNNNGHTT; PAM sequence: CTGAGATT
tatagagtaattttactgcc

SEQ ID NO: 33811 - DNA, 20 bp, Artificial Sequence
  Description of Artificial Sequence: Synthetic oligonucleotide
  Target: LAMA2; (-) strand; PAM type: NNNNGHTT; PAM sequence: TTAGGTTT
ctccgatttcatagtttaca

SEQ ID NO: 33812 - DNA, 20 bp, Artificial Sequence
  Description of Artificial Sequence: Synthetic oligonucleotide
  Target: LAMA2; (-) strand; PAM type: NNNNGHTT; PAM sequence: CATAGTTT
tatcattatcactccgattt

SEQ ID NO: 33813 - DNA, 20 bp, Artificial Sequence
  Description of Artificial Sequence: Synthetic oligonucleotide
  Target: LAMA2; (-) strand; PAM type: NNNNGHTT; PAM sequence: CTCCGATT
acattgacatatcattatca

SEQ ID NO: 33814 - DNA, 20 bp, Artificial Sequence
  Description of Artificial Sequence: Synthetic oligonucleotide
  Target: LAMA2; (-) strand; PAM type: NNNNGHTT; PAM sequence: CAGAGATT
acaaagttgagcagaaggta

SEQ ID NO: 33815 - DNA, 20 bp, Artificial Sequence
  Description of Artificial Sequence: Synthetic oligonucleotide
  Target: LAMA2; (-) strand; PAM type: NNNNGHTT; PAM sequence: TTTAGATT
agactattgtttagagctgt

SEQ ID NO: 33816 - DNA, 20 bp, Artificial Sequence
  Description of Artificial Sequence: Synthetic oligonucleotide
  Target: LAMA2; (-) strand; PAM type: NNNNGHTT; PAM sequence: AGCTGTTT
tttaatagactattgtttag

SEQ ID NO: 33817 - DNA, 20 bp, Artificial Sequence
  Description of Artificial Sequence: Synthetic oligonucleotide
  Target: LAMA2; (-) strand; PAM type: NNNNGHTT; PAM sequence: TATTGTTT
attttttaattttaatagac

SEQ ID NO: 33818 - DNA, 20 bp, Artificial Sequence
  Description of Artificial Sequence: Synthetic oligonucleotide
  Target: LAMA2; (-) strand; PAM type: NNNNGHTT; PAM sequence: TGTTGTTT
aggtaaggtaaatcctataa

SEQ ID NO: 33819 - DNA, 20 bp, Artificial Sequence
  Description of Artificial Sequence: Synthetic oligonucleotide
  Target: LAMA2; (-) strand; PAM type: NNNNGHTT; PAM sequence: TGTAGCTT
actatcacagtctctattac

SEQ ID NO: 33820 - DNA, 20 bp, Artificial Sequence
  Description of Artificial Sequence: Synthetic oligonucleotide
  Target: LAMA2; (-) strand; PAM type: NNNNGHTT; PAM sequence: AAGGGCTT
tgtgaagtagaggcttaggt

SEQ ID NO: 33821 - DNA, 20 bp, Artificial Sequence
  Description of Artificial Sequence: Synthetic oligonucleotide
  Target: LAMA2; (-) strand; PAM type: NNNNGHTT; PAM sequence: AGAGGCTT
tttggtgtttgctgtgaagt

SEQ ID NO: 33822 - DNA, 20 bp, Artificial Sequence
  Description of Artificial Sequence: Synthetic oligonucleotide
  Target: LAMA2; (-) strand; PAM type: NNNNGHTT; PAM sequence: TGGTGTTT
gatttatttccagcaaattt

SEQ ID NO: 33823 - DNA, 20 bp, Artificial Sequence
  Description of Artificial Sequence: Synthetic oligonucleotide
  Target: LAMA2; (-) strand; PAM type: NNNNGHTT; PAM sequence: CTATGATT
cttagcttctacagttgggt

SEQ ID NO: 33824 - DNA, 20 bp, Artificial Sequence
  Description of Artificial Sequence: Synthetic oligonucleotide
  Target: LAMA2; (-) strand; PAM type: NNNNGHTT; PAM sequence: CTTAGCTT
ttttctagagattttatagt

SEQ ID NO: 33825 - DNA, 20 bp, Artificial Sequence
  Description of Artificial Sequence: Synthetic oligonucleotide
  Target: LAMA2; (-) strand; PAM type: NNNNGHTT; PAM sequence: TAGAGATT
tatcttctttattttttttc

SEQ ID NO: 33826 - DNA, 20 bp, Artificial Sequence
  Description of Artificial Sequence: Synthetic oligonucleotide
  Target: LAMA2; (-) strand; PAM type: NNNNGHTT; PAM sequence: TTATGCTT
acaatttattaaatcattca

SEQ ID NO: 33827 - DNA, 20 bp, Artificial Sequence
  Description of Artificial Sequence: Synthetic oligonucleotide
  Target: LAMA2; (-) strand; PAM type: NNNNGHTT; PAM sequence: TTCTGATT
caaagagcagaagtgtttaa

SEQ ID NO: 33828 - DNA, 20 bp, Artificial Sequence
  Description of Artificial Sequence: Synthetic oligonucleotide
  Target: LAMA2; (-) strand; PAM type: NNNNGHTT; PAM sequence: AAGTGTTT
ggagtgctttcaaagagcag

SEQ ID NO: 33829 - DNA, 20 bp, Artificial Sequence
  Description of Artificial Sequence: Synthetic oligonucleotide
  Target: LAMA2; (-) strand; PAM type: NNNNGHTT; PAM sequence: GAGTGCTT
gtggcttgactttgcatttg

SEQ ID NO: 33830 - DNA, 20 bp, Artificial Sequence
  Description of Artificial Sequence: Synthetic oligonucleotide
  Target: LAMA2; (-) strand; PAM type: NNNNGHTT; PAM sequence: TGTGGCTT
aatatgtattgttctcaatc

SEQ ID NO: 33831 - DNA, 20 bp, Artificial Sequence
  Description of Artificial Sequence: Synthetic oligonucleotide
  Target: LAMA2; (-) strand; PAM type: NNNNGHTT; PAM sequence: ATAAGATT
ctttgtttgccagattatta

SEQ ID NO: 33832 - DNA, 20 bp, Artificial Sequence
  Description of Artificial Sequence: Synthetic oligonucleotide
  Target: LAMA2; (-) strand; PAM type: NNNNGHTT; PAM sequence: GCCAGATT
ttgctcattttgctttgttt

SEQ ID NO: 33833 - DNA, 20 bp, Artificial Sequence
  Description of Artificial Sequence: Synthetic oligonucleotide
  Target: LAMA2; (-) strand; PAM type: NNNNGHTT; PAM sequence: CTTTGTTT
tgaaatctttgctcattttg

SEQ ID NO: 33834 - DNA, 20 bp, Artificial Sequence
  Description of Artificial Sequence: Synthetic oligonucleotide
  Target: LAMA2; (-) strand; PAM type: NNNNGHTT; PAM sequence: TTTTGCTT
cttcttgaaatctttgctca

SEQ ID NO: 33835 - DNA, 20 bp, Artificial Sequence
  Description of Artificial Sequence: Synthetic oligonucleotide
  Target: LAMA2; (-) strand; PAM type: NNNNGHTT; PAM sequence: ATGTGCTT
atgatgctgaacatattttc

SEQ ID NO: 33836 - DNA, 20 bp, Artificial Sequence
  Description of Artificial Sequence: Synthetic oligonucleotide
  Target: LAMA2; (-) strand; PAM type: NNNNGHTT; PAM sequence: TAGTGCTT
ttgttacattttagccattc

SEQ ID NO: 33837 - DNA, 20 bp, Artificial Sequence
  Description of Artificial Sequence: Synthetic oligonucleotide
  Target: LAMA2; (-) strand; PAM type: NNNNGHTT; PAM sequence: TATGGCTT
tataggagttccagatgctc

SEQ ID NO: 33838 - DNA, 20 bp, Artificial Sequence
  Description of Artificial Sequence: Synthetic oligonucleotide
  Target: LAMA2; (-) strand; PAM type: NNNNGHTT; PAM sequence: TGTTGTTT
actgtgaacctcttttccaa

SEQ ID NO: 33839 - DNA, 20 bp, Artificial Sequence
  Description of Artificial Sequence: Synthetic oligonucleotide
  Target: LAMA2; (-) strand; PAM type: NNNNGHTT; PAM sequence: ACATGTTT
taaacacagtgttcgcatgg

SEQ ID NO: 33840 - DNA, 20 bp, Artificial Sequence
  Description of Artificial Sequence: Synthetic oligonucleotide
  Target: LAMA2; (-) strand; PAM type: NNNNGHTT; PAM sequence: CTATGATT
ggctatgaagaataaaattg

SEQ ID NO: 33841 - DNA, 20 bp, Artificial Sequence
  Description of Artificial Sequence: Synthetic oligonucleotide
  Target: LAMA2; (-) strand; PAM type: NNNNGHTT; PAM sequence: TCCAGTTT
ttaaagtacatttgggttgt

SEQ ID NO: 33842 - DNA, 20 bp, Artificial Sequence
  Description of Artificial Sequence: Synthetic oligonucleotide
  Target: LAMA2; (-) strand; PAM type: NNNNGHTT; PAM sequence: TGTTGCTT
atgttttggaggtatagtca

SEQ ID NO: 33843 - DNA, 20 bp, Artificial Sequence
  Description of Artificial Sequence: Synthetic oligonucleotide
  Target: LAMA2; (-) strand; PAM type: NNNNGHTT; PAM sequence: ACATGTTT
ctggcttctttcactttgca

SEQ ID NO: 33844 - DNA, 20 bp, Artificial Sequence
  Description of Artificial Sequence: Synthetic oligonucleotide
  Target: LAMA2; (-) strand; PAM type: NNNNGHTT; PAM sequence: TCTGGCTT
taaaatagtaatcttttgtg

SEQ ID NO: 33845 - DNA, 20 bp, Artificial Sequence
  Description of Artificial Sequence: Synthetic oligonucleotide
  Target: LAMA2; (-) strand; PAM type: NNNNGHTT; PAM sequence: TATAGATT
tgctgatctaattttgtcac

SEQ ID NO: 33846 - DNA, 20 bp, Artificial Sequence
  Description of Artificial Sequence: Synthetic oligonucleotide
  Target: LAMA2; (-) strand; PAM type: NNNNGHTT; PAM sequence: AAAAGTTT
agtctatttctataatctca

SEQ ID NO: 33847 - DNA, 20 bp, Artificial Sequence
  Description of Artificial Sequence: Synthetic oligonucleotide
  Target: LAMA2; (-) strand; PAM type: NNNNGHTT; PAM sequence: GTTTGATT
ctccactgtcaactctactt

SEQ ID NO: 33848 - DNA, 20 bp, Artificial Sequence
  Description of Artificial Sequence: Synthetic oligonucleotide
  Target: LAMA2; (-) strand; PAM type: NNNNGHTT; PAM sequence: ACTTGTTT
tgatctccactgtcaactct

SEQ ID NO: 33849 - DNA, 20 bp, Artificial Sequence
  Description of Artificial Sequence: Synthetic oligonucleotide
  Target: LAMA2; (-) strand; PAM type: NNNNGHTT; PAM sequence: ACCTGCTT
attttataatcaatatttgt

SEQ ID NO: 33850 - DNA, 20 bp, Artificial Sequence
  Description of Artificial Sequence: Synthetic oligonucleotide
  Target: LAMA2; (-) strand; PAM type: NNNNGHTT; PAM sequence: CCAGGATT
cccttcctctttacattttc

SEQ ID NO: 33851 - DNA, 20 bp, Artificial Sequence
  Description of Artificial Sequence: Synthetic oligonucleotide
  Target: LAMA2; (-) strand; PAM type: NNNNGHTT; PAM sequence: AAATGATT
ttgaatatttataaaaagga

SEQ ID NO: 33852 - DNA, 20 bp, Artificial Sequence
  Description of Artificial Sequence: Synthetic oligonucleotide
  Target: LAMA2; (-) strand; PAM type: NNNNGHTT; PAM sequence: AAAAGTTT
aaaaaatatttataaaaagg

SEQ ID NO: 33853 - DNA, 20 bp, Artificial Sequence
  Description of Artificial Sequence: Synthetic oligonucleotide
  Target: LAMA2; (-) strand; PAM type: NNNNGHTT; PAM sequence: GAATGATT
taaacctattgctattctca

SEQ ID NO: 33854 - DNA, 20 bp, Artificial Sequence
  Description of Artificial Sequence: Synthetic oligonucleotide
  Target: LAMA2; (-) strand; PAM type: NNNNGHTT; PAM sequence: AAGTGTTT
tttggtctaattttgcctag

SEQ ID NO: 33855 - DNA, 20 bp, Artificial Sequence
  Description of Artificial Sequence: Synthetic oligonucleotide
  Target: LAMA2; (-) strand; PAM type: NNNNGHTT; PAM sequence: CAGTGTTT
gtttattataattgaagccc

SEQ ID NO: 33856 - DNA, 20 bp, Artificial Sequence
  Description of Artificial Sequence: Synthetic oligonucleotide
  Target: LAMA2; (-) strand; PAM type: NNNNGHTT; PAM sequence: GAGAGTTT
caataataaaacttatattt

SEQ ID NO: 33857 - DNA, 20 bp, Artificial Sequence
  Description of Artificial Sequence: Synthetic oligonucleotide
  Target: LAMA2; (-) strand; PAM type: NNNNGHTT; PAM sequence: GAAAGCTT
gttctgttaatattatacca

SEQ ID NO: 33858 - DNA, 20 bp, Artificial Sequence
  Description of Artificial Sequence: Synthetic oligonucleotide
  Target: LAMA2; (-) strand; PAM type: NNNNGHTT; PAM sequence: AATTGATT
gagagtattgctttgaagag

SEQ ID NO: 33859 - DNA, 20 bp, Artificial Sequence
  Description of Artificial Sequence: Synthetic oligonucleotide
  Target: LAMA2; (-) strand; PAM type: NNNNGHTT; PAM sequence: TATTGCTT
tttcagtaaaattaagagag

SEQ ID NO: 33860 - DNA, 20 bp, Artificial Sequence
  Description of Artificial Sequence: Synthetic oligonucleotide
  Target: LAMA2; (-) strand; PAM type: NNNNGHTT; PAM sequence: TATTGATT
tcttttttatagttaagatg

SEQ ID NO: 33861 - DNA, 20 bp, Artificial Sequence
  Description of Artificial Sequence: Synthetic oligonucleotide
  Target: LAMA2; (-) strand; PAM type: NNNNGHTT; PAM sequence: GATAGTTT
aatacatattgtcttatata

SEQ ID NO: 33862 - DNA, 20 bp, Artificial Sequence
  Description of Artificial Sequence: Synthetic oligonucleotide
  Target: LAMA2; (-) strand; PAM type: NNNNGHTT; PAM sequence: GGAAGTTT
tattttattttgcctcctaa

SEQ ID NO: 33863 - DNA, 20 bp, Artificial Sequence
  Description of Artificial Sequence: Synthetic oligonucleotide
  Target: LAMA2; (-) strand; PAM type: NNNNGHTT; PAM sequence: CATCGATT
ccagcacaatatcaacatcc

SEQ ID NO: 33864 - DNA, 20 bp, Artificial Sequence
  Description of Artificial Sequence: Synthetic oligonucleotide
  Target: LAMA2; (-) strand; PAM type: NNNNGHTT; PAM sequence: TTTGGATT
aagataatttactttgtgtt

SEQ ID NO: 33865 - DNA, 20 bp, Artificial Sequence
  Description of Artificial Sequence: Synthetic oligonucleotide
  Target: LAMA2; (-) strand; PAM type: NNNNGHTT; PAM sequence: TTGTGTTT
cattgagaagataatttact

SEQ ID NO: 33866 - DNA, 20 bp, Artificial Sequence
  Description of Artificial Sequence: Synthetic oligonucleotide
  Target: LAMA2; (-) strand; PAM type: NNNNGHTT; PAM sequence: GTTTGTTT
tgtgtgttttttgtttgttt

SEQ ID NO: 33867 - DNA, 20 bp, Artificial Sequence
  Description of Artificial Sequence: Synthetic oligonucleotide
  Target: LAMA2; (-) strand; PAM type: NNNNGHTT; PAM sequence: GTTTGTTT
tttgtgtgtgttttttgttt

SEQ ID NO: 33868 - DNA, 20 bp, Artificial Sequence
  Description of Artificial Sequence: Synthetic oligonucleotide
  Target: LAMA2; (-) strand; PAM type: NNNNGHTT; PAM sequence: GTTTGTTT
aatttttgtgtgtgtttttt

SEQ ID NO: 33869 - DNA, 20 bp, Artificial Sequence
  Description of Artificial Sequence: Synthetic oligonucleotide
  Target: LAMA2; (-) strand; PAM type: NNNNGHTT; PAM sequence: TTTTGTTT
atcaaatttttgtgtgtgtt

SEQ ID NO: 33870 - DNA, 20 bp, Artificial Sequence
  Description of Artificial Sequence: Synthetic oligonucleotide
  Target: LAMA2; (-) strand; PAM type: NNNNGHTT; PAM sequence: GTGTGTTT
tttccacatcaaatttttgt

SEQ ID NO: 33871 - DNA, 20 bp, Artificial Sequence
  Description of Artificial Sequence: Synthetic oligonucleotide
  Target: LAMA2; (-) strand; PAM type: NNNNGHTT; PAM sequence: GTTTGTTT
atatttgaaacctaatttaa

SEQ ID NO: 33872 - DNA, 20 bp, Artificial Sequence
  Description of Artificial Sequence: Synthetic oligonucleotide
  Target: LAMA2; (-) strand; PAM type: NNNNGHTT; PAM sequence: TTAAGTTT
ccttatatttgaaacctaat

SEQ ID NO: 33873 - DNA, 20 bp, Artificial Sequence
  Description of Artificial Sequence: Synthetic oligonucleotide
  Target: LAMA2; (-) strand; PAM type: NNNNGHTT; PAM sequence: TTTGGTTT
ttgtgagtcgcaggatgtct

SEQ ID NO: 33874 - DNA, 20 bp, Artificial Sequence
  Description of Artificial Sequence: Synthetic oligonucleotide
  Target: LAMA2; (-) strand; PAM type: NNNNGHTT; PAM sequence: AATGGATT
aaggtttaaaacaactccat

SEQ ID NO: 33875 - DNA, 20 bp, Artificial Sequence
  Description of Artificial Sequence: Synthetic oligonucleotide
  Target: LAMA2; (-) strand; PAM type: NNNNGHTT; PAM sequence: TAAGGTTT
gcctaggtcagtggttctca

SEQ ID NO: 33876 - DNA, 20 bp, Artificial Sequence
  Description of Artificial Sequence: Synthetic oligonucleotide
  Target: LAMA2; (-) strand; PAM type: NNNNGHTT; PAM sequence: ATTTGTTT
ctagtttttgttgttttttc

SEQ ID NO: 33877 - DNA, 20 bp, Artificial Sequence
  Description of Artificial Sequence: Synthetic oligonucleotide
  Target: LAMA2; (-) strand; PAM type: NNNNGHTT; PAM sequence: TGTTGTTT
ctactgccattcctagtttt

SEQ ID NO: 33878 - DNA, 20 bp, Artificial Sequence
  Description of Artificial Sequence: Synthetic oligonucleotide
  Target: LAMA2; (-) strand; PAM type: NNNNGHTT; PAM sequence: CCTAGTTT
tcaacagaactactgccatt

SEQ ID NO: 33879 - DNA, 20 bp, Artificial Sequence
  Description of Artificial Sequence: Synthetic oligonucleotide
  Target: LAMA2; (-) strand; PAM type: NNNNGHTT; PAM sequence: CCTGGTTT
acaatttcatctcttccagt

SEQ ID NO: 33880 - DNA, 20 bp, Artificial Sequence
  Description of Artificial Sequence: Synthetic oligonucleotide
  Target: LAMA2; (-) strand; PAM type: NNNNGHTT; PAM sequence: AATAGTTT
aaggtaataaaggcctttgc

SEQ ID NO: 33881 - DNA, 20 bp, Artificial Sequence
  Description of Artificial Sequence: Synthetic oligonucleotide
  Target: LAMA2; (-) strand; PAM type: NNNNGHTT; PAM sequence: GAAGGCTT
accaaactaatggttagaat

SEQ ID NO: 33882 - DNA, 20 bp, Artificial Sequence
  Description of Artificial Sequence: Synthetic oligonucleotide
  Target: LAMA2; (-) strand; PAM type: NNNNGHTT; PAM sequence: CCTAGCTT
ccctctgagaccggatcatt

SEQ ID NO: 33883 - DNA, 20 bp, Artificial Sequence
  Description of Artificial Sequence: Synthetic oligonucleotide
  Target: LAMA2; (-) strand; PAM type: NNNNGHTT; PAM sequence: TCTGGCTT
aagaggaggagacagccccc

SEQ ID NO: 33884 - DNA, 20 bp, Artificial Sequence
  Description of Artificial Sequence: Synthetic oligonucleotide
  Target: LAMA2; (-) strand; PAM type: NNNNGHTT; PAM sequence: CTTGGCTT
ctgccgccctgtcccctggc

SEQ ID NO: 33885 - DNA, 20 bp, Artificial Sequence
  Description of Artificial Sequence: Synthetic oligonucleotide
  Target: LAMA2; (-) strand; PAM type: NNNNGHTT; PAM sequence: ACTTGCTT
tctcatggcattgaacttga

SEQ ID NO: 33886 - DNA, 20 bp, Artificial Sequence
  Description of Artificial Sequence: Synthetic oligonucleotide
  Target: LAMA2; (-) strand; PAM type: NNNNGHTT; PAM sequence: GAAAGATT
tggaaaaagttttcctcttg

SEQ ID NO: 33887 - DNA, 20 bp, Artificial Sequence
  Description of Artificial Sequence: Synthetic oligonucleotide
  Target: LAMA2; (-) strand; PAM type: NNNNGHTT; PAM sequence: AAAAGTTT
ttcttttttttccaattgga

SEQ ID NO: 33888 - DNA, 20 bp, Artificial Sequence
  Description of Artificial Sequence: Synthetic oligonucleotide
  Target: LAMA2; (-) strand; PAM type: NNNNGHTT; PAM sequence: CTCTGATT
gcctttctctgcaggatggg

SEQ ID NO: 33889 - DNA, 20 bp, Artificial Sequence
  Description of Artificial Sequence: Synthetic oligonucleotide
  Target: LAMA2; (-) strand; PAM type: NNNNGHTT; PAM sequence: CACAGCTT
taaagtcccaggatgaacca

SEQ ID NO: 33890 - DNA, 20 bp, Artificial Sequence
  Description of Artificial Sequence: Synthetic oligonucleotide
  Target: LAMA2; (-) strand; PAM type: NNNNGHTT; PAM sequence: TCCTGTTT
ccacataacttctttagaaa

SEQ ID NO: 33891 - DNA, 20 bp, Artificial Sequence
  Description of Artificial Sequence: Synthetic oligonucleotide
  Target: LAMA2; (-) strand; PAM type: NNNNGHTT; PAM sequence: GTGGGTTT
ataggatatgaagataagat

SEQ ID NO: 33892 - DNA, 20 bp, Artificial Sequence
  Description of Artificial Sequence: Synthetic oligonucleotide
  Target: LAMA2; (-) strand; PAM type: NNNNGHTT; PAM sequence: TCACGATT
tttaagcaaaaggagaaatt

SEQ ID NO: 33893 - DNA, 20 bp, Artificial Sequence
  Description of Artificial Sequence: Synthetic oligonucleotide
  Target: LAMA2; (-) strand; PAM type: NNNNGHTT; PAM sequence: CAAAGTTT
ataactcttcaaagactccc

SEQ ID NO: 33894 - DNA, 20 bp, Artificial Sequence
  Description of Artificial Sequence: Synthetic oligonucleotide
  Target: LAMA2; (-) strand; PAM type: NNNNGHTT; PAM sequence: ATGTGCTT
tatgtcttacaatgctgcac

SEQ ID NO: 33895 - DNA, 20 bp, Artificial Sequence
  Description of Artificial Sequence: Synthetic oligonucleotide
  Target: LAMA2; (-) strand; PAM type: NNNNGHTT; PAM sequence: AATTGTTT
acaggttttccaacttaaag

SEQ ID NO: 33896 - DNA, 20 bp, Artificial Sequence
  Description of Artificial Sequence: Synthetic oligonucleotide
  Target: LAMA2; (-) strand; PAM type: NNNNGHTT; PAM sequence: ACAGGTTT
tcttttttttttactttgat

SEQ ID NO: 33897 - DNA, 20 bp, Artificial Sequence
  Description of Artificial Sequence: Synthetic oligonucleotide
  Target: LAMA2; (-) strand; PAM type: NNNNGHTT; PAM sequence: TACAGATT
acttttaaaagcttctaacc

SEQ ID NO: 33898 - DNA, 20 bp, Artificial Sequence
  Description of Artificial Sequence: Synthetic oligonucleotide
  Target: LAMA2; (-) strand; PAM type: NNNNGHTT; PAM sequence: AAAAGCTT
tcagcctcattaaaactttt

SEQ ID NO: 33899 - DNA, 20 bp, Artificial Sequence
  Description of Artificial Sequence: Synthetic oligonucleotide
  Target: LAMA2; (-) strand; PAM type: NNNNGHTT; PAM sequence: AGCAGATT
taagtatacttcaaaactta

SEQ ID NO: 33900 - DNA, 20 bp, Artificial Sequence
  Description of Artificial Sequence: Synthetic oligonucleotide
  Target: LAMA2; (-) strand; PAM type: NNNNGHTT; PAM sequence: GCTAGATT
aaaatagtactgctaaaaat

SEQ ID NO: 33901 - DNA, 20 bp, Artificial Sequence
  Description of Artificial Sequence: Synthetic oligonucleotide
  Target: LAMA2; (-) strand; PAM type: NNNNGHTT; PAM sequence: AAGAGCTT
cagggagttattattataga

SEQ ID NO: 33902 - DNA, 20 bp, Artificial Sequence
  Description of Artificial Sequence: Synthetic oligonucleotide
  Target: LAMA2; (-) strand; PAM type: NNNNGHTT; PAM sequence: CAAAGTTT
aaacacaccttgtaattgag

SEQ ID NO: 33903 - DNA, 20 bp, Artificial Sequence
  Description of Artificial Sequence: Synthetic oligonucleotide
  Target: LAMA2; (-) strand; PAM type: NNNNGHTT; PAM sequence: TCTTGTTT
aacattattaaagtattatg

SEQ ID NO: 33904 - DNA, 20 bp, Artificial Sequence
  Description of Artificial Sequence: Synthetic oligonucleotide
  Target: LAMA2; (-) strand; PAM type: NNNNGHTT; PAM sequence: TAAGGATT
tgccccattccaagtggaca

SEQ ID NO: 33905 - DNA, 20 bp, Artificial Sequence
  Description of Artificial Sequence: Synthetic oligonucleotide
  Target: LAMA2; (-) strand; PAM type: NNNNGHTT; PAM sequence: TTGAGTTT
tgatccttactctgcatgct

SEQ ID NO: 33906 - DNA, 20 bp, Artificial Sequence
  Description of Artificial Sequence: Synthetic oligonucleotide
  Target: LAMA2; (-) strand; PAM type: NNNNGHTT; PAM sequence: GCATGCTT
atttacttgatccttactct

SEQ ID NO: 33907 - DNA, 20 bp, Artificial Sequence
  Description of Artificial Sequence: Synthetic oligonucleotide
  Target: LAMA2; (-) strand; PAM type: NNNNGHTT; PAM sequence: AGTAGATT
tgcagattatagcagcctat

SEQ ID NO: 33908 - DNA, 20 bp, Artificial Sequence
  Description of Artificial Sequence: Synthetic oligonucleotide
  Target: LAMA2; (-) strand; PAM type: NNNNGHTT; PAM sequence: TGCAGATT
gacaataatatatactagaa

SEQ ID NO: 33909 - DNA, 20 bp, Artificial Sequence
  Description of Artificial Sequence: Synthetic oligonucleotide
  Target: LAMA2; (-) strand; PAM type: NNNNGHTT; PAM sequence: ACAGGTTT
tttacatactttcaacatta

SEQ ID NO: 33910 - DNA, 20 bp, Artificial Sequence
  Description of Artificial Sequence: Synthetic oligonucleotide
  Target: LAMA2; (-) strand; PAM type: NNNNGHTT; PAM sequence: TAAAGTTT
cataaatcactatccaattt

SEQ ID NO: 33911 - DNA, 20 bp, Artificial Sequence
  Description of Artificial Sequence: Synthetic oligonucleotide
  Target: LAMA2; (-) strand; PAM type: NNNNGHTT; PAM sequence: AAGTGTTT
ttcagcacaaacaataccgg

SEQ ID NO: 33912 - DNA, 20 bp, Artificial Sequence
  Description of Artificial Sequence: Synthetic oligonucleotide
  Target: LAMA2; (-) strand; PAM type: NNNNGHTT; PAM sequence: GCTTGCTT
tcccgtgattttcacagagg

SEQ ID NO: 33913 - DNA, 20 bp, Artificial Sequence
  Description of Artificial Sequence: Synthetic oligonucleotide
  Target: LAMA2; (-) strand; PAM type: NNNNGHTT; PAM sequence: GAGGGCTT
catatcccgtgattttcaca

SEQ ID NO: 33914 - DNA, 20 bp, Artificial Sequence
  Description of Artificial Sequence: Synthetic oligonucleotide
  Target: LAMA2; (-) strand; PAM type: NNNNGHTT; PAM sequence: CCGTGATT
tctccagtcaaactcatatc

SEQ ID NO: 33915 - DNA, 20 bp, Artificial Sequence
  Description of Artificial Sequence: Synthetic oligonucleotide
  Target: LAMA2; (-) strand; PAM type: NNNNGHTT; PAM sequence: TAGCGCTT
aaatagaacttctacacaat

SEQ ID NO: 33916 - DNA, 20 bp, Artificial Sequence
  Description of Artificial Sequence: Synthetic oligonucleotide
  Target: LAMA2; (-) strand; PAM type: NNNNGHTT; PAM sequence: GGTTGATT
caactgcaacatctaaaaat

SEQ ID NO: 33917 - DNA, 20 bp, Artificial Sequence
  Description of Artificial Sequence: Synthetic oligonucleotide
  Target: LAMA2; (-) strand; PAM type: NNNNGHTT; PAM sequence: TTATGTTT
gtaaaaaacaaaaagtctgg

SEQ ID NO: 33918 - DNA, 20 bp, Artificial Sequence
  Description of Artificial Sequence: Synthetic oligonucleotide
  Target: LAMA2; (-) strand; PAM type: NNNNGHTT; PAM sequence: ATAAGATT
gagtatgctatagaaaccac

SEQ ID NO: 33919 - DNA, 20 bp, Artificial Sequence
  Description of Artificial Sequence: Synthetic oligonucleotide
  Target: LAMA2; (-) strand; PAM type: NNNNGHTT; PAM sequence: TTTTGATT
cttgctgaaatgcagaatca

SEQ ID NO: 33920 - DNA, 20 bp, Artificial Sequence
  Description of Artificial Sequence: Synthetic oligonucleotide
  Target: LAMA2; (-) strand; PAM type: NNNNGHTT; PAM sequence: TTCAGTTT
caatttacctgccattatgc

SEQ ID NO: 33921 - DNA, 20 bp, Artificial Sequence
  Description of Artificial Sequence: Synthetic oligonucleotide
  Target: LAMA2; (-) strand; PAM type: NNNNGHTT; PAM sequence: TTATGCTT
cagttgcaatttacctgcca

SEQ ID NO: 33922 - DNA, 20 bp, Artificial Sequence
  Description of Artificial Sequence: Synthetic oligonucleotide
  Target: LAMA2; (-) strand; PAM type: NNNNGHTT; PAM sequence: TCCGGATT
tgcactgctagagacttctt

SEQ ID NO: 33923 - DNA, 20 bp, Artificial Sequence
  Description of Artificial Sequence: Synthetic oligonucleotide
  Target: LAMA2; (-) strand; PAM type: NNNNGHTT; PAM sequence: CTTGGATT
ccacatgcagttctgataag

SEQ ID NO: 33924 - DNA, 20 bp, Artificial Sequence
  Description of Artificial Sequence: Synthetic oligonucleotide
  Target: LAMA2; (-) strand; PAM type: NNNNGHTT; PAM sequence: ATAAGCTT
ttggaccacatgcagttctg

SEQ ID NO: 33925 - DNA, 20 bp, Artificial Sequence
  Description of Artificial Sequence: Synthetic oligonucleotide
  Target: LAMA2; (-) strand; PAM type: NNNNGHTT; PAM sequence: ACCAGCTT
aatttctgaacttgttagta

SEQ ID NO: 33926 - DNA, 20 bp, Artificial Sequence
  Description of Artificial Sequence: Synthetic oligonucleotide
  Target: LAMA2; (-) strand; PAM type: NNNNGHTT; PAM sequence: ATGAGTTT
caacagacctatgtgcttct

SEQ ID NO: 33927 - DNA, 20 bp, Artificial Sequence
  Description of Artificial Sequence: Synthetic oligonucleotide
  Target: LAMA2; (-) strand; PAM type: NNNNGHTT; PAM sequence: ATGTGCTT
gtgtgttaagcaacagacct

SEQ ID NO: 33928 - DNA, 20 bp, Artificial Sequence
  Description of Artificial Sequence: Synthetic oligonucleotide
  Target: LAMA2; (-) strand; PAM type: NNNNGHTT; PAM sequence: GAAAGATT
aatctttccttgttcagatg

SEQ ID NO: 33929 - DNA, 20 bp, Artificial Sequence
  Description of Artificial Sequence: Synthetic oligonucleotide
  Target: LAMA2; (-) strand; PAM type: NNNNGHTT; PAM sequence: TTATGATT
tgaaaatttgaggacagtcc

SEQ ID NO: 33930 - DNA, 20 bp, Artificial Sequence
  Description of Artificial Sequence: Synthetic oligonucleotide
  Target: LAMA2; (-) strand; PAM type: NNNNGHTT; PAM sequence: GGTTGTTT
atattataaaattcaaacct

SEQ ID NO: 33931 - DNA, 20 bp, Artificial Sequence
  Description of Artificial Sequence: Synthetic oligonucleotide
  Target: LAMA2; (-) strand; PAM type: NNNNGHTT; PAM sequence: AAGGGATT
gtttttattttaaatcccag

SEQ ID NO: 33932 - DNA, 20 bp, Artificial Sequence
  Description of Artificial Sequence: Synthetic oligonucleotide
  Target: LAMA2; (-) strand; PAM type: NNNNGHTT; PAM sequence: ACATGTTT
atgtgtgaggattgtctcaa

SEQ ID NO: 33933 - DNA, 20 bp, Artificial Sequence
  Description of Artificial Sequence: Synthetic oligonucleotide
  Target: LAMA2; (-) strand; PAM type: NNNNGHTT; PAM sequence: TGAGGATT
gtattcttgccaaaaatgtg

SEQ ID NO: 33934 - DNA, 20 bp, Artificial Sequence
  Description of Artificial Sequence: Synthetic oligonucleotide
  Target: LAMA2; (-) strand; PAM type: NNNNGHTT; PAM sequence: AGATGTTT
ttcttgcgtgttataacaca

SEQ ID NO: 33935 - DNA, 20 bp, Artificial Sequence
  Description of Artificial Sequence: Synthetic oligonucleotide
  Target: LAMA2; (-) strand; PAM type: NNNNGHTT; PAM sequence: CCAGGTTT
aatatttaaaaaaattaatt

SEQ ID NO: 33936 - DNA, 20 bp, Artificial Sequence
  Description of Artificial Sequence: Synthetic oligonucleotide
  Target: LAMA2; (-) strand; PAM type: NNNNGHTT; PAM sequence: AAATGATT
tgttatgaatcatttttact

SEQ ID NO: 33937 - DNA, 20 bp, Artificial Sequence
  Description of Artificial Sequence: Synthetic oligonucleotide
  Target: LAMA2; (-) strand; PAM type: NNNNGHTT; PAM sequence: ATTAGTTT
ccttgatatagattcagttc

SEQ ID NO: 33938 - DNA, 20 bp, Artificial Sequence
  Description of Artificial Sequence: Synthetic oligonucleotide
  Target: LAMA2; (-) strand; PAM type: NNNNGHTT; PAM sequence: TATAGATT
cagcccccagcatcccttga

SEQ ID NO: 33939 - DNA, 20 bp, Artificial Sequence
  Description of Artificial Sequence: Synthetic oligonucleotide
  Target: LAMA2; (-) strand; PAM type: NNNNGHTT; PAM sequence: CTGCGATT
cacctaggcctcccaaagtg

SEQ ID NO: 33940 - DNA, 20 bp, Artificial Sequence
  Description of Artificial Sequence: Synthetic oligonucleotide
  Target: LAMA2; (-) strand; PAM type: NNNNGHTT; PAM sequence: CACGGTTT
ttttgtatttttagtagaga

SEQ ID NO: 33941 - DNA, 20 bp, Artificial Sequence
  Description of Artificial Sequence: Synthetic oligonucleotide
  Target: LAMA2; (-) strand; PAM type: NNNNGHTT; PAM sequence: CTGGGATT
tgcctcagcctcctgagtag

SEQ ID NO: 33942 - DNA, 20 bp, Artificial Sequence
  Description of Artificial Sequence: Synthetic oligonucleotide
  Target: LAMA2; (-) strand; PAM type: NNNNGHTT; PAM sequence: AAGTGATT
aacctctgcctccagggttc

SEQ ID NO: 33943 - DNA, 20 bp, Artificial Sequence
  Description of Artificial Sequence: Synthetic oligonucleotide
  Target: LAMA2; (-) strand; PAM type: NNNNGHTT; PAM sequence: TTTTGTTT
ttttgttttgttttgttttg

SEQ ID NO: 33944 - DNA, 20 bp, Artificial Sequence
  Description of Artificial Sequence: Synthetic oligonucleotide
  Target: LAMA2; (-) strand; PAM type: NNNNGHTT; PAM sequence: TTTTGTTT
taaatttttgttttgttttg

SEQ ID NO: 33945 - DNA, 20 bp, Artificial Sequence
  Description of Artificial Sequence: Synthetic oligonucleotide
  Target: LAMA2; (-) strand; PAM type: NNNNGHTT; PAM sequence: TTTTGTTT
ctttttaaatttttgttttg

SEQ ID NO: 33946 - DNA, 20 bp, Artificial Sequence
  Description of Artificial Sequence: Synthetic oligonucleotide
  Target: LAMA2; (-) strand; PAM type: NNNNGHTT; PAM sequence: TTTTGTTT
caaatctttttaaatttttg

SEQ ID NO: 33947 - DNA, 20 bp, Artificial Sequence
  Description of Artificial Sequence: Synthetic oligonucleotide
  Target: LAMA2; (-) strand; PAM type: NNNNGHTT; PAM sequence: TTTTGTTT
agttgcaaatctttttaaat

SEQ ID NO: 33948 - DNA, 20 bp, Artificial Sequence
  Description of Artificial Sequence: Synthetic oligonucleotide
  Target: LAMA2; (-) strand; PAM type: NNNNGHTT; PAM sequence: CATGGTTT
tttcttcctgatctttttca

SEQ ID NO: 33949 - DNA, 20 bp, Artificial Sequence
  Description of Artificial Sequence: Synthetic oligonucleotide
  Target: LAMA2; (-) strand; PAM type: NNNNGHTT; PAM sequence: TCTAGATT
caaatcctaaacccgaatct

SEQ ID NO: 33950 - DNA, 20 bp, Artificial Sequence
  Description of Artificial Sequence: Synthetic oligonucleotide
  Target: LAMA2; (-) strand; PAM type: NNNNGHTT; PAM sequence: TCCTGTTT
aacggagcttctgcctaaat

SEQ ID NO: 33951 - DNA, 20 bp, Artificial Sequence
  Description of Artificial Sequence: Synthetic oligonucleotide
  Target: LAMA2; (-) strand; PAM type: NNNNGHTT; PAM sequence: CGGAGCTT
tgttttctcatttactgaaa

SEQ ID NO: 33952 - DNA, 20 bp, Artificial Sequence
  Description of Artificial Sequence: Synthetic oligonucleotide
  Target: LAMA2; (-) strand; PAM type: NNNNGHTT; PAM sequence: TCTTGTTT
ttatctttctctaaactctg

SEQ ID NO: 33953 - DNA, 20 bp, Artificial Sequence
  Description of Artificial Sequence: Synthetic oligonucleotide
  Target: LAMA2; (-) strand; PAM type: NNNNGHTT; PAM sequence: ATCTGCTT
ctagaattagttttatttct

SEQ ID NO: 33954 - DNA, 20 bp, Artificial Sequence
  Description of Artificial Sequence: Synthetic oligonucleotide
  Target: LAMA2; (-) strand; PAM type: NNNNGHTT; PAM sequence: ATTAGTTT
accaatggggaaagcctaga

SEQ ID NO: 33955 - DNA, 20 bp, Artificial Sequence
  Description of Artificial Sequence: Synthetic oligonucleotide
  Target: LAMA2; (-) strand; PAM type: NNNNGHTT; PAM sequence: TGTTGCTT
atacaatataggtgttcttt

SEQ ID NO: 33956 - DNA, 20 bp, Artificial Sequence
  Description of Artificial Sequence: Synthetic oligonucleotide
  Target: LAMA2; (-) strand; PAM type: NNNNGHTT; PAM sequence: ATTTGTTT
gactgtccttaccccgttgt

SEQ ID NO: 33957 - DNA, 20 bp, Artificial Sequence
  Description of Artificial Sequence: Synthetic oligonucleotide
  Target: LAMA2; (-) strand; PAM type: NNNNGHTT; PAM sequence: AAGTGTTT
atcactcccacgtcatcttc

SEQ ID NO: 33958 - DNA, 20 bp, Artificial Sequence
  Description of Artificial Sequence: Synthetic oligonucleotide
  Target: LAMA2; (-) strand; PAM type: NNNNGHTT; PAM sequence: CCAAGCTT
ctgagccttctcaccatgct

SEQ ID NO: 33959 - DNA, 20 bp, Artificial Sequence
  Description of Artificial Sequence: Synthetic oligonucleotide
  Target: LAMA2; (-) strand; PAM type: NNNNGHTT; PAM sequence: TCCAGTTT
aggtcaacaatgctatgtgt

SEQ ID NO: 33960 - DNA, 20 bp, Artificial Sequence
  Description of Artificial Sequence: Synthetic oligonucleotide
  Target: LAMA2; (-) strand; PAM type: NNNNGHTT; PAM sequence: CTGTGATT
cgtatttgagacaaaaaaac

SEQ ID NO: 33961 - DNA, 20 bp, Artificial Sequence
  Description of Artificial Sequence: Synthetic oligonucleotide
  Target: LAMA2; (-) strand; PAM type: NNNNGHTT; PAM sequence: CATGGATT
ttggactgttggtctagtcc

SEQ ID NO: 33962 - DNA, 20 bp, Artificial Sequence
  Description of Artificial Sequence: Synthetic oligonucleotide
  Target: LAMA2; (-) strand; PAM type: NNNNGHTT; PAM sequence: CTATGCTT
gagataaatctaaaataatt

SEQ ID NO: 33963 - DNA, 20 bp, Artificial Sequence
  Description of Artificial Sequence: Synthetic oligonucleotide
  Target: LAMA2; (-) strand; PAM type: NNNNGHTT; PAM sequence: GAGTGTTT
ttaaatgtgttctatcagtg

SEQ ID NO: 33964 - DNA, 20 bp, Artificial Sequence
  Description of Artificial Sequence: Synthetic oligonucleotide
  Target: LAMA2; (-) strand; PAM type: NNNNGHTT; PAM sequence: CTGAGCTT
agagtgttacaaagacacat

SEQ ID NO: 33965 - DNA, 20 bp, Artificial Sequence
  Description of Artificial Sequence: Synthetic oligonucleotide
  Target: LAMA2; (-) strand; PAM type: NNNNGHTT; PAM sequence: AATTGTTT
gcggaagttccctgcacaca

SEQ ID NO: 33966 - DNA, 20 bp, Artificial Sequence
  Description of Artificial Sequence: Synthetic oligonucleotide
  Target: LAMA2; (-) strand; PAM type: NNNNGHTT; PAM sequence: TTTTGTTT
tgggattgtgaataattcat

SEQ ID NO: 33967 - DNA, 20 bp, Artificial Sequence
  Description of Artificial Sequence: Synthetic oligonucleotide
  Target: LAMA2; (-) strand; PAM type: NNNNGHTT; PAM sequence: GTGGGATT
caaagtacctatatgtccat

SEQ ID NO: 33968 - DNA, 20 bp, Artificial Sequence
  Description of Artificial Sequence: Synthetic oligonucleotide
  Target: LAMA2; (-) strand; PAM type: NNNNGHTT; PAM sequence: CTGAGATT
ttgtgtctaaactttagcgt

SEQ ID NO: 33969 - DNA, 20 bp, Artificial Sequence
  Description of Artificial Sequence: Synthetic oligonucleotide
  Target: LAMA2; (-) strand; PAM type: NNNNGHTT; PAM sequence: ATAAGTTT
aaatggaaacagaacataga

SEQ ID NO: 33970 - DNA, 20 bp, Artificial Sequence
  Description of Artificial Sequence: Synthetic oligonucleotide
  Target: LAMA2; (-) strand; PAM type: NNNNGHTT; PAM sequence: AAGTGATT
acgttattgttaaagcttac

SEQ ID NO: 33971 - DNA, 20 bp, Artificial Sequence
  Description of Artificial Sequence: Synthetic oligonucleotide
  Target: LAMA2; (-) strand; PAM type: NNNNGHTT; PAM sequence: TAAAGCTT
atagtccaaaacgttattgt

SEQ ID NO: 33972 - DNA, 20 bp, Artificial Sequence
  Description of Artificial Sequence: Synthetic oligonucleotide
  Target: LAMA2; (-) strand; PAM type: NNNNGHTT; PAM sequence: TAAAGTTT
tttaataaggaagatttaag

SEQ ID NO: 33973 - DNA, 20 bp, Artificial Sequence
  Description of Artificial Sequence: Synthetic oligonucleotide
  Target: LAMA2; (-) strand; PAM type: NNNNGHTT; PAM sequence: GGAAGATT
ttacctgtggcttttaataa

SEQ ID NO: 33974 - DNA, 20 bp, Artificial Sequence
  Description of Artificial Sequence: Synthetic oligonucleotide
  Target: LAMA2; (-) strand; PAM type: NNNNGHTT; PAM sequence: TGTGGCTT
atctttagatagtaattacc

SEQ ID NO: 33975 - DNA, 20 bp, Artificial Sequence
  Description of Artificial Sequence: Synthetic oligonucleotide
  Target: LAMA2; (-) strand; PAM type: NNNNGHTT; PAM sequence: TTTAGCTT
atctttgacaagcaaatgtc

SEQ ID NO: 33976 - DNA, 20 bp, Artificial Sequence
  Description of Artificial Sequence: Synthetic oligonucleotide
  Target: LAMA2; (-) strand; PAM type: NNNNGHTT; PAM sequence: TCAAGATT
tcccatattaagatccacac

SEQ ID NO: 33977 - DNA, 20 bp, Artificial Sequence
  Description of Artificial Sequence: Synthetic oligonucleotide
  Target: LAMA2; (-) strand; PAM type: NNNNGHTT; PAM sequence: ACTAGATT
tagattaacttgttgtttga

SEQ ID NO: 33978 - DNA, 20 bp, Artificial Sequence
  Description of Artificial Sequence: Synthetic oligonucleotide
  Target: LAMA2; (-) strand; PAM type: NNNNGHTT; PAM sequence: TGTTGTTT
ggaatttgcatagattaact

SEQ ID NO: 33979 - DNA, 20 bp, Artificial Sequence
  Description of Artificial Sequence: Synthetic oligonucleotide
  Target: LAMA2; (-) strand; PAM type: NNNNGHTT; PAM sequence: CATAGATT
ttttcatcatcaggaatttg

SEQ ID NO: 33980 - DNA, 20 bp, Artificial Sequence
  Description of Artificial Sequence: Synthetic oligonucleotide
  Target: LAMA2; (-) strand; PAM type: NNNNGHTT; PAM sequence: TGAGGTTT
gccaggcactaaatagctcc

SEQ ID NO: 33981 - DNA, 20 bp, Artificial Sequence
  Description of Artificial Sequence: Synthetic oligonucleotide
  Target: LAMA2; (-) strand; PAM type: NNNNGHTT; PAM sequence: TTTTGTTT
tctaaaataagcattggaat

SEQ ID NO: 33982 - DNA, 20 bp, Artificial Sequence
  Description of Artificial Sequence: Synthetic oligonucleotide
  Target: LAMA2; (-) strand; PAM type: NNNNGHTT; PAM sequence: AATGGATT
atagactaacataacttaga

SEQ ID NO: 33983 - DNA, 20 bp, Artificial Sequence
  Description of Artificial Sequence: Synthetic oligonucleotide
  Target: LAMA2; (-) strand; PAM type: NNNNGHTT; PAM sequence: CATAGTTT
tgaatgcatttgaattaatg

SEQ ID NO: 33984 - DNA, 20 bp, Artificial Sequence
  Description of Artificial Sequence: Synthetic oligonucleotide
  Target: LAMA2; (-) strand; PAM type: NNNNGHTT; PAM sequence: TCTAGCTT
gtataataaataccgttgtt

SEQ ID NO: 33985 - DNA, 20 bp, Artificial Sequence
  Description of Artificial Sequence: Synthetic oligonucleotide
  Target: LAMA2; (-) strand; PAM type: NNNNGHTT; PAM sequence: CGTTGTTT
ttatacagtataataaatac

SEQ ID NO: 33986 - DNA, 20 bp, Artificial Sequence
  Description of Artificial Sequence: Synthetic oligonucleotide
  Target: LAMA2; (-) strand; PAM type: NNNNGHTT; PAM sequence: ATCTGTTT
ttgctctgattcttaggtat

SEQ ID NO: 33987 - DNA, 20 bp, Artificial Sequence
  Description of Artificial Sequence: Synthetic oligonucleotide
  Target: LAMA2; (-) strand; PAM type: NNNNGHTT; PAM sequence: CTCTGATT
gaattttgagattaatcttg

SEQ ID NO: 33988 - DNA, 20 bp, Artificial Sequence
  Description of Artificial Sequence: Synthetic oligonucleotide
  Target: LAMA2; (-) strand; PAM type: NNNNGHTT; PAM sequence: TTGAGATT
tcatcttttcagaaggaatt

SEQ ID NO: 33989 - DNA, 20 bp, Artificial Sequence
  Description of Artificial Sequence: Synthetic oligonucleotide
  Target: LAMA2; (-) strand; PAM type: NNNNGHTT; PAM sequence: CAAGGTTT
aaatgtttttatgaagatgt

SEQ ID NO: 33990 - DNA, 20 bp, Artificial Sequence
  Description of Artificial Sequence: Synthetic oligonucleotide
  Target: LAMA2; (-) strand; PAM type: NNNNGHTT; PAM sequence: AAATGTTT
aacttcaaatgaaagtcttt

SEQ ID NO: 33991 - DNA, 20 bp, Artificial Sequence
  Description of Artificial Sequence: Synthetic oligonucleotide
  Target: LAMA2; (-) strand; PAM type: NNNNGHTT; PAM sequence: GGGAGATT
aatacaccctctcaaaatct

SEQ ID NO: 33992 - DNA, 20 bp, Artificial Sequence
  Description of Artificial Sequence: Synthetic oligonucleotide
  Target: LAMA2; (-) strand; PAM type: NNNNGHTT; PAM sequence: CAAAGATT
aatttttagattttcttatt

SEQ ID NO: 33993 - DNA, 20 bp, Artificial Sequence
  Description of Artificial Sequence: Synthetic oligonucleotide
  Target: LAMA2; (-) strand; PAM type: NNNNGHTT; PAM sequence: TTTAGATT
agttttctagaaattcaatt

SEQ ID NO: 33994 - DNA, 20 bp, Artificial Sequence
  Description of Artificial Sequence: Synthetic oligonucleotide
  Target: LAMA2; (-) strand; PAM type: NNNNGHTT; PAM sequence: TAGAGTTT
taatcatttgtcaaggcaac

SEQ ID NO: 33995 - DNA, 20 bp, Artificial Sequence
  Description of Artificial Sequence: Synthetic oligonucleotide
  Target: LAMA2; (-) strand; PAM type: NNNNGHTT; PAM sequence: AAGGGATT
ctaagttacaagcaactcga

SEQ ID NO: 33996 - DNA, 20 bp, Artificial Sequence
  Description of Artificial Sequence: Synthetic oligonucleotide
  Target: LAMA2; (-) strand; PAM type: NNNNGHTT; PAM sequence: CACTGCTT
gctcactgaaatgacaattg

SEQ ID NO: 33997 - DNA, 20 bp, Artificial Sequence
  Description of Artificial Sequence: Synthetic oligonucleotide
  Target: LAMA2; (-) strand; PAM type: NNNNGHTT; PAM sequence: CAGTGTTT
gatgtttcatgttttatatt

SEQ ID NO: 33998 - DNA, 20 bp, Artificial Sequence
  Description of Artificial Sequence: Synthetic oligonucleotide
  Target: LAMA2; (-) strand; PAM type: NNNNGHTT; PAM sequence: TCATGTTT
ttgaggccttactagatgtt

SEQ ID NO: 33999 - DNA, 20 bp, Artificial Sequence
  Description of Artificial Sequence: Synthetic oligonucleotide
  Target: LAMA2; (-) strand; PAM type: NNNNGHTT; PAM sequence: AGATGTTT
acatttattgaggccttact

SEQ ID NO: 34000 - DNA, 20 bp, Artificial Sequence
  Description of Artificial Sequence: Synthetic oligonucleotide
  Target: LAMA2; (-) strand; PAM type: NNNNGHTT; PAM sequence: TTAGGTTT
gagaatgtcatgttaggttg

SEQ ID NO: 34001 - DNA, 20 bp, Artificial Sequence
  Description of Artificial Sequence: Synthetic oligonucleotide
  Target: LAMA2; (-) strand; PAM type: NNNNGHTT; PAM sequence: GAGTGTTT
taccacatgatgttggagaa

SEQ ID NO: 34002 - DNA, 20 bp, Artificial Sequence
  Description of Artificial Sequence: Synthetic oligonucleotide
  Target: LAMA2; (-) strand; PAM type: NNNNGHTT; PAM sequence: GTGTGTTT
taattagaattcaaatactt

SEQ ID NO: 34003 - DNA, 20 bp, Artificial Sequence
  Description of Artificial Sequence: Synthetic oligonucleotide
  Target: LAMA2; (-) strand; PAM type: NNNNGHTT; PAM sequence: AAGAGTTT
ataaagaggtacgtattgat

SEQ ID NO: 34004 - DNA, 20 bp, Artificial Sequence
  Description of Artificial Sequence: Synthetic oligonucleotide
  Target: LAMA2; (-) strand; PAM type: NNNNGHTT; PAM sequence: CTACGATT
ctcctaagtccatacgtttt

SEQ ID NO: 34005 - DNA, 20 bp, Artificial Sequence
  Description of Artificial Sequence: Synthetic oligonucleotide
  Target: LAMA2; (-) strand; PAM type: NNNNGHTT; PAM sequence: ATACGTTT
tctagccttctcctaagtcc

SEQ ID NO: 34006 - DNA, 20 bp, Artificial Sequence
  Description of Artificial Sequence: Synthetic oligonucleotide
  Target: LAMA2; (-) strand; PAM type: NNNNGHTT; PAM sequence: TCAGGCTT
gaaaatttaactccgttgac

SEQ ID NO: 34007 - DNA, 20 bp, Artificial Sequence
  Description of Artificial Sequence: Synthetic oligonucleotide
  Target: LAMA2; (-) strand; PAM type: NNNNGHTT; PAM sequence: TACTGATT
agaagaaaagagctagtatt

SEQ ID NO: 34008 - DNA, 20 bp, Artificial Sequence
  Description of Artificial Sequence: Synthetic oligonucleotide
  Target: LAMA2; (-) strand; PAM type: NNNNGHTT; PAM sequence: TTTAGTTT
atgcaaagcaaatctttttt

SEQ ID NO: 34009 - DNA, 20 bp, Artificial Sequence
  Description of Artificial Sequence: Synthetic oligonucleotide
  Target: LAMA2; (-) strand; PAM type: NNNNGHTT; PAM sequence: AATAGTTT
aatctcttggcaatgagata

SEQ ID NO: 34010 - DNA, 20 bp, Artificial Sequence
  Description of Artificial Sequence: Synthetic oligonucleotide
  Target: LAMA2; (-) strand; PAM type: NNNNGHTT; PAM sequence: TTGTGTTT
tgttagctaattataggaac

SEQ ID NO: 34011 - DNA, 20 bp, Artificial Sequence
  Description of Artificial Sequence: Synthetic oligonucleotide
  Target: LAMA2; (-) strand; PAM type: NNNNGHTT; PAM sequence: GCCTGTTT
gcaaaaatttccatcatgtt

SEQ ID NO: 34012 - DNA, 20 bp, Artificial Sequence
  Description of Artificial Sequence: Synthetic oligonucleotide
  Target: LAMA2; (-) strand; PAM type: NNNNGHTT; PAM sequence: AAACGTTT
aacaatgagattcctagaaa

SEQ ID NO: 34013 - DNA, 20 bp, Artificial Sequence
  Description of Artificial Sequence: Synthetic oligonucleotide
  Target: LAMA2; (-) strand; PAM type: NNNNGHTT; PAM sequence: ATGAGATT
aaataaatacatattcaaca

SEQ ID NO: 34014 - DNA, 20 bp, Artificial Sequence
  Description of Artificial Sequence: Synthetic oligonucleotide
  Target: LAMA2; (-) strand; PAM type: NNNNGHTT; PAM sequence: AATAGTTT
tattaaagaagtttttaaaa

SEQ ID NO: 34015 - DNA, 20 bp, Artificial Sequence
  Description of Artificial Sequence: Synthetic oligonucleotide
  Target: LAMA2; (-) strand; PAM type: NNNNGHTT; PAM sequence: AGAAGTTT
aaacatattataagtattaa

SEQ ID NO: 34016 - DNA, 20 bp, Artificial Sequence
  Description of Artificial Sequence: Synthetic oligonucleotide
  Target: LAMA2; (-) strand; PAM type: NNNNGHTT; PAM sequence: AAGTGCTT
aataataactaacctttatg

SEQ ID NO: 34017 - DNA, 20 bp, Artificial Sequence
  Description of Artificial Sequence: Synthetic oligonucleotide
  Target: LAMA2; (-) strand; PAM type: NNNNGHTT; PAM sequence: GAGAGATT
aaataaagacaatctatatt

SEQ ID NO: 34018 - DNA, 20 bp, Artificial Sequence
  Description of Artificial Sequence: Synthetic oligonucleotide
  Target: LAMA2; (-) strand; PAM type: NNNNGHTT; PAM sequence: AGTAGATT
tttttggtggtttttttaat

SEQ ID NO: 34019 - DNA, 20 bp, Artificial Sequence
  Description of Artificial Sequence: Synthetic oligonucleotide
  Target: LAMA2; (-) strand; PAM type: NNNNGHTT; PAM sequence: GGTGGTTT
gttttttggttttgtttttt

SEQ ID NO: 34020 - DNA, 20 bp, Artificial Sequence
  Description of Artificial Sequence: Synthetic oligonucleotide
  Target: LAMA2; (-) strand; PAM type: NNNNGHTT; PAM sequence: TTTTGTTT
ttctgaagtaggttttttgg

SEQ ID NO: 34021 - DNA, 20 bp, Artificial Sequence
  Description of Artificial Sequence: Synthetic oligonucleotide
  Target: LAMA2; (-) strand; PAM type: NNNNGHTT; PAM sequence: TTTGGTTT
tgattttctgaagtaggttt

SEQ ID NO: 34022 - DNA, 20 bp, Artificial Sequence
  Description of Artificial Sequence: Synthetic oligonucleotide
  Target: LAMA2; (-) strand; PAM type: NNNNGHTT; PAM sequence: GTAGGTTT
gtactatatgattttctgaa

SEQ ID NO: 34023 - DNA, 20 bp, Artificial Sequence
  Description of Artificial Sequence: Synthetic oligonucleotide
  Target: LAMA2; (-) strand; PAM type: NNNNGHTT; PAM sequence: ATATGATT
tagagatttgttagagtact

SEQ ID NO: 34024 - DNA, 20 bp, Artificial Sequence
  Description of Artificial Sequence: Synthetic oligonucleotide
  Target: LAMA2; (-) strand; PAM type: NNNNGHTT; PAM sequence: TAGAGATT
tttagaaaagcagttttctc

SEQ ID NO: 34025 - DNA, 20 bp, Artificial Sequence
  Description of Artificial Sequence: Synthetic oligonucleotide
  Target: LAMA2; (-) strand; PAM type: NNNNGHTT; PAM sequence: AGCAGTTT
agcgttcccaagtttagaaa

SEQ ID NO: 34026 - DNA, 20 bp, Artificial Sequence
  Description of Artificial Sequence: Synthetic oligonucleotide
  Target: LAMA2; (-) strand; PAM type: NNNNGHTT; PAM sequence: CCAAGTTT
attttcaaaatccagcgttc

SEQ ID NO: 34027 - DNA, 20 bp, Artificial Sequence
  Description of Artificial Sequence: Synthetic oligonucleotide
  Target: LAMA2; (-) strand; PAM type: NNNNGHTT; PAM sequence: AAGTGTTT
atggtaaacgggcctttaag

SEQ ID NO: 34028 - DNA, 20 bp, Artificial Sequence
  Description of Artificial Sequence: Synthetic oligonucleotide
  Target: LAMA2; (-) strand; PAM type: NNNNGHTT; PAM sequence: GCAAGATT
atttgcacattatgtgttag

SEQ ID NO: 34029 - DNA, 20 bp, Artificial Sequence
  Description of Artificial Sequence: Synthetic oligonucleotide
  Target: LAMA2; (-) strand; PAM type: NNNNGHTT; PAM sequence: CCATGTTT
agaatagttaagtgacttat

SEQ ID NO: 34030 - DNA, 20 bp, Artificial Sequence
  Description of Artificial Sequence: Synthetic oligonucleotide
  Target: LAMA2; (-) strand; PAM type: NNNNGHTT; PAM sequence: AATAGATT
cccttataacaaccccatga

SEQ ID NO: 34031 - DNA, 20 bp, Artificial Sequence
  Description of Artificial Sequence: Synthetic oligonucleotide
  Target: LAMA2; (-) strand; PAM type: NNNNGHTT; PAM sequence: CCATGTTT
tactaaacaaataatttgtg

SEQ ID NO: 34032 - DNA, 20 bp, Artificial Sequence
  Description of Artificial Sequence: Synthetic oligonucleotide
  Target: LAMA2; (-) strand; PAM type: NNNNGHTT; PAM sequence: ATATGTTT
cttcttatgcagtagtatgt

SEQ ID NO: 34033 - DNA, 20 bp, Artificial Sequence
  Description of Artificial Sequence: Synthetic oligonucleotide
  Target: LAMA2; (-) strand; PAM type: NNNNGHTT; PAM sequence: ACTTGTTT
ctgaatacttactctttgct

SEQ ID NO: 34034 - DNA, 20 bp, Artificial Sequence
  Description of Artificial Sequence: Synthetic oligonucleotide
  Target: LAMA2; (-) strand; PAM type: NNNNGHTT; PAM sequence: GATAGTTT
agcccttaggctatttttat

SEQ ID NO: 34035 - DNA, 20 bp, Artificial Sequence
  Description of Artificial Sequence: Synthetic oligonucleotide
  Target: LAMA2; (-) strand; PAM type: NNNNGHTT; PAM sequence: GAATGTTT
taaaaaggaatcttgacata

SEQ ID NO: 34036 - DNA, 20 bp, Artificial Sequence
  Description of Artificial Sequence: Synthetic oligonucleotide
  Target: LAMA2; (-) strand; PAM type: NNNNGHTT; PAM sequence: CAAAGTTT
atagtagatataccataaat

SEQ ID NO: 34037 - DNA, 20 bp, Artificial Sequence
  Description of Artificial Sequence: Synthetic oligonucleotide
  Target: LAMA2; (-) strand; PAM type: NNNNGHTT; PAM sequence: AATTGTTT
tgttctttttgtcaacatgt

SEQ ID NO: 34038 - DNA, 20 bp, Artificial Sequence
  Description of Artificial Sequence: Synthetic oligonucleotide
  Target: LAMA2; (-) strand; PAM type: NNNNGHTT; PAM sequence: AAGAGTTT
ttctattaagccagacattg

SEQ ID NO: 34039 - DNA, 20 bp, Artificial Sequence
  Description of Artificial Sequence: Synthetic oligonucleotide
  Target: LAMA2; (-) strand; PAM type: NNNNGHTT; PAM sequence: ATATGCTT
ttgttgttatatatttctta

SEQ ID NO: 34040 - DNA, 20 bp, Artificial Sequence
  Description of Artificial Sequence: Synthetic oligonucleotide
  Target: LAMA2; (-) strand; PAM type: NNNNGHTT; PAM sequence: CTATGTTT
tcttttttccaatagcttat

SEQ ID NO: 34041 - DNA, 20 bp, Artificial Sequence
  Description of Artificial Sequence: Synthetic oligonucleotide
  Target: LAMA2; (-) strand; PAM type: NNNNGHTT; PAM sequence: AATAGCTT
gacagactcctcttttttcc

SEQ ID NO: 34042 - DNA, 20 bp, Artificial Sequence
  Description of Artificial Sequence: Synthetic oligonucleotide
  Target: LAMA2; (-) strand; PAM type: NNNNGHTT; PAM sequence: CTGAGTTT
cttttgaaaactaccactta

SEQ ID NO: 34043 - DNA, 20 bp, Artificial Sequence
  Description of Artificial Sequence: Synthetic oligonucleotide
  Target: LAMA2; (-) strand; PAM type: NNNNGHTT; PAM sequence: TGCAGTTT
gcgtacaaaaatatcgttga

SEQ ID NO: 34044 - DNA, 20 bp, Artificial Sequence
  Description of Artificial Sequence: Synthetic oligonucleotide
  Target: LAMA2; (-) strand; PAM type: NNNNGHTT; PAM sequence: CGTAGATT
ttccaggtgtaagatagatc

SEQ ID NO: 34045 - DNA, 20 bp, Artificial Sequence
  Description of Artificial Sequence: Synthetic oligonucleotide
  Target: LAMA2; (-) strand; PAM type: NNNNGHTT; PAM sequence: AACAGCTT
gtctctaccattgtgagatt

SEQ ID NO: 34046 - DNA, 20 bp, Artificial Sequence
  Description of Artificial Sequence: Synthetic oligonucleotide
  Target: LAMA2; (-) strand; PAM type: NNNNGHTT; PAM sequence: GTGAGATT
aaaaatttgtctctaccatt

SEQ ID NO: 34047 - DNA, 20 bp, Artificial Sequence
  Description of Artificial Sequence: Synthetic oligonucleotide
  Target: LAMA2; (-) strand; PAM type: NNNNGHTT; PAM sequence: ATTTGTTT
aactatggtttttaagactc

SEQ ID NO: 34048 - DNA, 20 bp, Artificial Sequence
  Description of Artificial Sequence: Synthetic oligonucleotide
  Target: LAMA2; (-) strand; PAM type: NNNNGHTT; PAM sequence: TATGGTTT
tactacaaaaaggatctaac

SEQ ID NO: 34049 - DNA, 20 bp, Artificial Sequence
  Description of Artificial Sequence: Synthetic oligonucleotide
  Target: LAMA2; (-) strand; PAM type: NNNNGHTT; PAM sequence: AGTTGTTT
ttgaggaaaagcatttgtac

SEQ ID NO: 34050 - DNA, 20 bp, Artificial Sequence
  Description of Artificial Sequence: Synthetic oligonucleotide
  Target: LAMA2; (-) strand; PAM type: NNNNGHTT; PAM sequence: GGTTGATT
actgtatactgaagcatgat

SEQ ID NO: 34051 - DNA, 20 bp, Artificial Sequence
  Description of Artificial Sequence: Synthetic oligonucleotide
  Target: LAMA2; (-) strand; PAM type: NNNNGHTT; PAM sequence: CAATGATT
tgtacttgatgaagtagtaa

SEQ ID NO: 34052 - DNA, 20 bp, Artificial Sequence
  Description of Artificial Sequence: Synthetic oligonucleotide
  Target: LAMA2; (-) strand; PAM type: NNNNGHTT; PAM sequence: ACTAGTTT
actcccagaagaaaaaaaca

SEQ ID NO: 34053 - DNA, 20 bp, Artificial Sequence
  Description of Artificial Sequence: Synthetic oligonucleotide
  Target: LAMA2; (-) strand; PAM type: NNNNGHTT; PAM sequence: TTTAGTTT
taaaccatgctagtggtcag

SEQ ID NO: 34054 - DNA, 20 bp, Artificial Sequence
  Description of Artificial Sequence: Synthetic oligonucleotide
  Target: LAMA2; (-) strand; PAM type: NNNNGHTT; PAM sequence: GTCAGTTT
ggtactaaaccatgctagtg

SEQ ID NO: 34055 - DNA, 20 bp, Artificial Sequence
  Description of Artificial Sequence: Synthetic oligonucleotide
  Target: LAMA2; (-) strand; PAM type: NNNNGHTT; PAM sequence: ACAAGATT
gttcaaaaatccttttagta

SEQ ID NO: 34056 - DNA, 20 bp, Artificial Sequence
  Description of Artificial Sequence: Synthetic oligonucleotide
  Target: LAMA2; (-) strand; PAM type: NNNNGHTT; PAM sequence: TATAGATT
aaaatttaccttcatatggc

SEQ ID NO: 34057 - DNA, 20 bp, Artificial Sequence
  Description of Artificial Sequence: Synthetic oligonucleotide
  Target: LAMA2; (-) strand; PAM type: NNNNGHTT; PAM sequence: TTCTGATT
actgaagtggttttggcttt

SEQ ID NO: 34058 - DNA, 20 bp, Artificial Sequence
  Description of Artificial Sequence: Synthetic oligonucleotide
  Target: LAMA2; (-) strand; PAM type: NNNNGHTT; PAM sequence: TTTGGCTT
gaggtaaaaactgaagtggt

SEQ ID NO: 34059 - DNA, 20 bp, Artificial Sequence
  Description of Artificial Sequence: Synthetic oligonucleotide
  Target: LAMA2; (-) strand; PAM type: NNNNGHTT; PAM sequence: AGTGGTTT
agacctgaggtaaaaactga

SEQ ID NO: 34060 - DNA, 20 bp, Artificial Sequence
  Description of Artificial Sequence: Synthetic oligonucleotide
  Target: LAMA2; (-) strand; PAM type: NNNNGHTT; PAM sequence: TCTGGATT
ttttccacagaagaagcttt

SEQ ID NO: 34061 - DNA, 20 bp, Artificial Sequence
  Description of Artificial Sequence: Synthetic oligonucleotide
  Target: LAMA2; (-) strand; PAM type: NNNNGHTT; PAM sequence: AGAAGCTT
cttcctgctttttccacaga

SEQ ID NO: 34062 - DNA, 20 bp, Artificial Sequence
  Description of Artificial Sequence: Synthetic oligonucleotide
  Target: LAMA2; (-) strand; PAM type: NNNNGHTT; PAM sequence: TCCTGCTT
gtctggctggttttaacact

SEQ ID NO: 34063 - DNA, 20 bp, Artificial Sequence
  Description of Artificial Sequence: Synthetic oligonucleotide
  Target: LAMA2; (-) strand; PAM type: NNNNGHTT; PAM sequence: GCTGGTTT
gatttctatatgtatgtctg

SEQ ID NO: 34064 - DNA, 20 bp, Artificial Sequence
  Description of Artificial Sequence: Synthetic oligonucleotide
  Target: LAMA2; (-) strand; PAM type: NNNNGHTT; PAM sequence: TTTTGATT
ggcagatgatatggcagaga

SEQ ID NO: 34065 - DNA, 20 bp, Artificial Sequence
  Description of Artificial Sequence: Synthetic oligonucleotide
  Target: LAMA2; (-) strand; PAM type: NNNNGHTT; PAM sequence: CAGAGATT
aagaagggcagatgatatgg

SEQ ID NO: 34066 - DNA, 20 bp, Artificial Sequence
  Description of Artificial Sequence: Synthetic oligonucleotide
  Target: LAMA2; (-) strand; PAM type: NNNNGHTT; PAM sequence: TATAGTTT
ggtaagtacactatctctac

SEQ ID NO: 34067 - DNA, 20 bp, Artificial Sequence
  Description of Artificial Sequence: Synthetic oligonucleotide
  Target: LAMA2; (-) strand; PAM type: NNNNGHTT; PAM sequence: CTGGGATT
cgccccggcctcccaaagtg

SEQ ID NO: 34068 - DNA, 20 bp, Artificial Sequence
  Description of Artificial Sequence: Synthetic oligonucleotide
  Target: LAMA2; (-) strand; PAM type: NNNNGHTT; PAM sequence: CAGGGTTT
ttttttttttttagtagaga

SEQ ID NO: 34069 - DNA, 20 bp, Artificial Sequence
  Description of Artificial Sequence: Synthetic oligonucleotide
  Target: LAMA2; (-) strand; PAM type: NNNNGHTT; PAM sequence: TTTTGCTT
cgccaccacgcccggctaat

SEQ ID NO: 34070 - DNA, 20 bp, Artificial Sequence
  Description of Artificial Sequence: Synthetic oligonucleotide
  Target: LAMA2; (-) strand; PAM type: NNNNGHTT; PAM sequence: CCCGGATT
gctcactgcaagctcctcct

SEQ ID NO: 34071 - DNA, 20 bp, Artificial Sequence
  Description of Artificial Sequence: Synthetic oligonucleotide
  Target: LAMA2; (-) strand; PAM type: NNNNGHTT; PAM sequence: GTATGTTT
attcagaattacagatatta

SEQ ID NO: 34072 - DNA, 20 bp, Artificial Sequence
  Description of Artificial Sequence: Synthetic oligonucleotide
  Target: LAMA2; (-) strand; PAM type: NNNNGHTT; PAM sequence: CAGTGCTT
attttgagaaatacgatatc

SEQ ID NO: 34073 - DNA, 20 bp, Artificial Sequence
  Description of Artificial Sequence: Synthetic oligonucleotide
  Target: LAMA2; (-) strand; PAM type: NNNNGHTT; PAM sequence: AAATGCTT
tcaacattacaaaacctttt

SEQ ID NO: 34074 - DNA, 20 bp, Artificial Sequence
  Description of Artificial Sequence: Synthetic oligonucleotide
  Target: LAMA2; (-) strand; PAM type: NNNNGHTT; PAM sequence: TCACGTTT
gatgggcacagagaaaagaa

SEQ ID NO: 34075 - DNA, 20 bp, Artificial Sequence
  Description of Artificial Sequence: Synthetic oligonucleotide
  Target: LAMA2; (-) strand; PAM type: NNNNGHTT; PAM sequence: CAGTGTTT
ccactcatgttcagacccat

SEQ ID NO: 34076 - DNA, 20 bp, Artificial Sequence
  Description of Artificial Sequence: Synthetic oligonucleotide
  Target: LAMA2; (-) strand; PAM type: NNNNGHTT; PAM sequence: CATGGATT
gttattcagcaggaccagga

SEQ ID NO: 34077 - DNA, 20 bp, Artificial Sequence
  Description of Artificial Sequence: Synthetic oligonucleotide
  Target: LAMA2; (-) strand; PAM type: NNNNGHTT; PAM sequence: CAAAGCTT
ttgaatgaaaaatattttat

SEQ ID NO: 34078 - DNA, 20 bp, Artificial Sequence
  Description of Artificial Sequence: Synthetic oligonucleotide
  Target: LAMA2; (-) strand; PAM type: NNNNGHTT; PAM sequence: TAATGTTT
tttctaaaaaacatttagaa

SEQ ID NO: 34079 - DNA, 20 bp, Artificial Sequence
  Description of Artificial Sequence: Synthetic oligonucleotide
  Target: LAMA2; (-) strand; PAM type: NNNNGHTT; PAM sequence: AAATGTTT
ggtgaatgatgttttctaaa

SEQ ID NO: 34080 - DNA, 20 bp, Artificial Sequence
  Description of Artificial Sequence: Synthetic oligonucleotide
  Target: LAMA2; (-) strand; PAM type: NNNNGHTT; PAM sequence: TGATGTTT
aatttcagattctgggtgaa

SEQ ID NO: 34081 - DNA, 20 bp, Artificial Sequence
  Description of Artificial Sequence: Synthetic oligonucleotide
  Target: LAMA2; (-) strand; PAM type: NNNNGHTT; PAM sequence: TTCAGATT
taaataaataaagataaaat

SEQ ID NO: 34082 - DNA, 20 bp, Artificial Sequence
  Description of Artificial Sequence: Synthetic oligonucleotide
  Target: LAMA2; (-) strand; PAM type: NNNNGHTT; PAM sequence: CAATGTTT
aaaagaatagcctgtgaggg

SEQ ID NO: 34083 - DNA, 20 bp, Artificial Sequence
  Description of Artificial Sequence: Synthetic oligonucleotide
  Target: LAMA2; (-) strand; PAM type: NNNNGHTT; PAM sequence: ACTAGTTT
taggtattccatagatgtta

SEQ ID NO: 34084 - DNA, 20 bp, Artificial Sequence
  Description of Artificial Sequence: Synthetic oligonucleotide
  Target: LAMA2; (-) strand; PAM type: NNNNGHTT; PAM sequence: ACATGCTT
ttgataaattaaggcatgag

SEQ ID NO: 34085 - DNA, 20 bp, Artificial Sequence
  Description of Artificial Sequence: Synthetic oligonucleotide
  Target: LAMA2; (-) strand; PAM type: NNNNGHTT; PAM sequence: ATGAGATT
tcagttttctcttctgttaa

SEQ ID NO: 34086 - DNA, 20 bp, Artificial Sequence
  Description of Artificial Sequence: Synthetic oligonucleotide
  Target: LAMA2; (-) strand; PAM type: NNNNGHTT; PAM sequence: TTCAGTTT
agttacttaacattttgcat

SEQ ID NO: 34087 - DNA, 20 bp, Artificial Sequence
  Description of Artificial Sequence: Synthetic oligonucleotide
  Target: LAMA2; (-) strand; PAM type: NNNNGHTT; PAM sequence: GGTTGTTT
ttggtctctaccagttcact

SEQ ID NO: 34088 - DNA, 20 bp, Artificial Sequence
  Description of Artificial Sequence: Synthetic oligonucleotide
  Target: LAMA2; (-) strand; PAM type: NNNNGHTT; PAM sequence: TATTGTTT
tgctgaatctaaatggcaaa

SEQ ID NO: 34089 - DNA, 20 bp, Artificial Sequence
  Description of Artificial Sequence: Synthetic oligonucleotide
  Target: LAMA2; (-) strand; PAM type: NNNNGHTT; PAM sequence: TTTGGTTT
agccctgggccttgattatt

SEQ ID NO: 34090 - DNA, 20 bp, Artificial Sequence
  Description of Artificial Sequence: Synthetic oligonucleotide
  Target: LAMA2; (-) strand; PAM type: NNNNGHTT; PAM sequence: CCTTGATT
ggaccaggaaaagccctggg

SEQ ID NO: 34091 - DNA, 20 bp, Artificial Sequence
  Description of Artificial Sequence: Synthetic oligonucleotide
  Target: LAMA2; (-) strand; PAM type: NNNNGHTT; PAM sequence: TAATGATT
tggggataccctgagccaat

SEQ ID NO: 34092 - DNA, 20 bp, Artificial Sequence
  Description of Artificial Sequence: Synthetic oligonucleotide
  Target: LAMA2; (-) strand; PAM type: NNNNGHTT; PAM sequence: TGCGGTTT
tgtagcacttcagttccaac

SEQ ID NO: 34093 - DNA, 20 bp, Artificial Sequence
  Description of Artificial Sequence: Synthetic oligonucleotide
  Target: LAMA2; (-) strand; PAM type: NNNNGHTT; PAM sequence: TTTTGCTT
atagataagacactccctct

SEQ ID NO: 34094 - DNA, 20 bp, Artificial Sequence
  Description of Artificial Sequence: Synthetic oligonucleotide
  Target: LAMA2; (-) strand; PAM type: NNNNGHTT; PAM sequence: CGCTGCTT
gtctaacttcaaaagtgctg

SEQ ID NO: 34095 - DNA, 20 bp, Artificial Sequence
  Description of Artificial Sequence: Synthetic oligonucleotide
  Target: LAMA2; (-) strand; PAM type: NNNNGHTT; PAM sequence: TCAGGTTT
tctcttaaaggtgaggatga

SEQ ID NO: 34096 - DNA, 20 bp, Artificial Sequence
  Description of Artificial Sequence: Synthetic oligonucleotide
  Target: LAMA2; (-) strand; PAM type: NNNNGHTT; PAM sequence: TGATGATT
ctgattgtaaagtctttgaa

SEQ ID NO: 34097 - DNA, 20 bp, Artificial Sequence
  Description of Artificial Sequence: Synthetic oligonucleotide
  Target: LAMA2; (-) strand; PAM type: NNNNGHTT; PAM sequence: CACTGATT
gttgtccatgctgaaaacac

SEQ ID NO: 34098 - DNA, 20 bp, Artificial Sequence
  Description of Artificial Sequence: Synthetic oligonucleotide
  Target: LAMA2; (-) strand; PAM type: NNNNGHTT; PAM sequence: CCCAGTTT
ctaaaactgtggccaacaag

SEQ ID NO: 34099 - DNA, 20 bp, Artificial Sequence
  Description of Artificial Sequence: Synthetic oligonucleotide
  Target: LAMA2; (-) strand; PAM type: NNNNGHTT; PAM sequence: ATTTGATT
tagtaacttctagatgtcaa

SEQ ID NO: 34100 - DNA, 20 bp, Artificial Sequence
  Description of Artificial Sequence: Synthetic oligonucleotide
  Target: LAMA2; (-) strand; PAM type: NNNNGHTT; PAM sequence: TGCTGATT
ggtggtgtggatgacagaca

SEQ ID NO: 34101 - DNA, 20 bp, Artificial Sequence
  Description of Artificial Sequence: Synthetic oligonucleotide
  Target: LAMA2; (-) strand; PAM type: NNNNGHTT; PAM sequence: AATTGATT
actttgcctattgcatggaa

SEQ ID NO: 34102 - DNA, 20 bp, Artificial Sequence
  Description of Artificial Sequence: Synthetic oligonucleotide
  Target: LAMA2; (-) strand; PAM type: NNNNGHTT; PAM sequence: ATCTGATT
ttaagcagaggaaagatcta

SEQ ID NO: 34103 - DNA, 20 bp, Artificial Sequence
  Description of Artificial Sequence: Synthetic oligonucleotide
  Target: LAMA2; (-) strand; PAM type: NNNNGHTT; PAM sequence: AAAGGTTT
cttataatagaaatgcattg

SEQ ID NO: 34104 - DNA, 20 bp, Artificial Sequence
  Description of Artificial Sequence: Synthetic oligonucleotide
  Target: LAMA2; (-) strand; PAM type: NNNNGHTT; PAM sequence: ATGAGATT
tgtaagaggtgacatttgac

SEQ ID NO: 34105 - DNA, 20 bp, Artificial Sequence
  Description of Artificial Sequence: Synthetic oligonucleotide
  Target: LAMA2; (-) strand; PAM type: NNNNGHTT; PAM sequence: GACAGATT
taactgaaaatcataaacgg

SEQ ID NO: 34106 - DNA, 20 bp, Artificial Sequence
  Description of Artificial Sequence: Synthetic oligonucleotide
  Target: LAMA2; (-) strand; PAM type: NNNNGHTT; PAM sequence: ATTGGATT
tgaggtttatctgaaatatg

SEQ ID NO: 34107 - DNA, 20 bp, Artificial Sequence
  Description of Artificial Sequence: Synthetic oligonucleotide
  Target: LAMA2; (-) strand; PAM type: NNNNGHTT; PAM sequence: ATATGATT
gctcttgaggtttatctgaa

SEQ ID NO: 34108 - DNA, 20 bp, Artificial Sequence
  Description of Artificial Sequence: Synthetic oligonucleotide
  Target: LAMA2; (-) strand; PAM type: NNNNGHTT; PAM sequence: TGAGGTTT
tctgccatagcaattgctct

SEQ ID NO: 34109 - DNA, 20 bp, Artificial Sequence
  Description of Artificial Sequence: Synthetic oligonucleotide
  Target: LAMA2; (-) strand; PAM type: NNNNGHTT; PAM sequence: AGTTGATT
aagatcttggaaaaggaact

SEQ ID NO: 34110 - DNA, 20 bp, Artificial Sequence
  Description of Artificial Sequence: Synthetic oligonucleotide
  Target: LAMA2; (-) strand; PAM type: NNNNGHTT; PAM sequence: AGCTGCTT
ctcttggtctgtccaaaaag

SEQ ID NO: 34111 - DNA, 20 bp, Artificial Sequence
  Description of Artificial Sequence: Synthetic oligonucleotide
  Target: LAMA2; (-) strand; PAM type: NNNNGHTT; PAM sequence: AAATGTTT
agggggaaaaagtacacata

SEQ ID NO: 34112 - DNA, 20 bp, Artificial Sequence
  Description of Artificial Sequence: Synthetic oligonucleotide
  Target: LAMA2; (-) strand; PAM type: NNNNGHTT; PAM sequence: CTGTGTTT
ataactcatatctgtccata

SEQ ID NO: 34113 - DNA, 20 bp, Artificial Sequence
  Description of Artificial Sequence: Synthetic oligonucleotide
  Target: LAMA2; (-) strand; PAM type: NNNNGHTT; PAM sequence: CAAAGCTT
agaaatatgcattccttatc

SEQ ID NO: 34114 - DNA, 20 bp, Artificial Sequence
  Description of Artificial Sequence: Synthetic oligonucleotide
  Target: LAMA2; (-) strand; PAM type: NNNNGHTT; PAM sequence: AGTGGTTT
catattgtagaggccttgtg

SEQ ID NO: 34115 - DNA, 20 bp, Artificial Sequence
  Description of Artificial Sequence: Synthetic oligonucleotide
  Target: LAMA2; (-) strand; PAM type: NNNNGHTT; PAM sequence: GTTTGATT
gcgtttcttgacctccagat

SEQ ID NO: 34116 - DNA, 20 bp, Artificial Sequence
  Description of Artificial Sequence: Synthetic oligonucleotide
  Target: LAMA2; (-) strand; PAM type: NNNNGHTT; PAM sequence: AGATGTTT
tactgcgtttcttgacctcc

SEQ ID NO: 34117 - DNA, 20 bp, Artificial Sequence
  Description of Artificial Sequence: Synthetic oligonucleotide
  Target: LAMA2; (-) strand; PAM type: NNNNGHTT; PAM sequence: CTGCGTTT
taaggagaagaatataggta

SEQ ID NO: 34118 - DNA, 20 bp, Artificial Sequence
  Description of Artificial Sequence: Synthetic oligonucleotide
  Target: LAMA2; (-) strand; PAM type: NNNNGHTT; PAM sequence: ATTAGTTT
ccagctccgccttatttttt

SEQ ID NO: 34119 - DNA, 20 bp, Artificial Sequence
  Description of Artificial Sequence: Synthetic oligonucleotide
  Target: LAMA2; (-) strand; PAM type: NNNNGHTT; PAM sequence: CATAGTTT
atcatgatgttaaccatctt

SEQ ID NO: 34120 - DNA, 20 bp, Artificial Sequence
  Description of Artificial Sequence: Synthetic oligonucleotide
  Target: LAMA2; (-) strand; PAM type: NNNNGHTT; PAM sequence: TCCTGTTT
ttaaatatttaattggaaca

SEQ ID NO: 34121 - DNA, 20 bp, Artificial Sequence
  Description of Artificial Sequence: Synthetic oligonucleotide
  Target: LAMA2; (-) strand; PAM type: NNNNGHTT; PAM sequence: ATGAGCTT
gaggcaatcttatccaagtg

SEQ ID NO: 34122 - DNA, 20 bp, Artificial Sequence
  Description of Artificial Sequence: Synthetic oligonucleotide
  Target: LAMA2; (-) strand; PAM type: NNNNGHTT; PAM sequence: GATTGATT
tgcaaaaaatggatgaacca

SEQ ID NO: 34123 - DNA, 20 bp, Artificial Sequence
  Description of Artificial Sequence: Synthetic oligonucleotide
  Target: LAMA2; (-) strand; PAM type: NNNNGHTT; PAM sequence: ACCAGATT
tttttgcaaaaaatggatga

SEQ ID NO: 34124 - DNA, 20 bp, Artificial Sequence
  Description of Artificial Sequence: Synthetic oligonucleotide
  Target: LAMA2; (-) strand; PAM type: NNNNGHTT; PAM sequence: GGGAGTTT
caaataccttagtgaaagag

SEQ ID NO: 34125 - DNA, 20 bp, Artificial Sequence
  Description of Artificial Sequence: Synthetic oligonucleotide
  Target: LAMA2; (-) strand; PAM type: NNNNGHTT; PAM sequence: CTGGGATT
tgccttggccttccaaagag

SEQ ID NO: 34126 - DNA, 20 bp, Artificial Sequence
  Description of Artificial Sequence: Synthetic oligonucleotide
  Target: LAMA2; (-) strand; PAM type: NNNNGHTT; PAM sequence: TTTTGTTT
atagatagtctataacatgt

SEQ ID NO: 34127 - DNA, 20 bp, Artificial Sequence
  Description of Artificial Sequence: Synthetic oligonucleotide
  Target: LAMA2; (-) strand; PAM type: NNNNGHTT; PAM sequence: ACATGTTT
gaatctatagatagtctata

SEQ ID NO: 34128 - DNA, 20 bp, Artificial Sequence
  Description of Artificial Sequence: Synthetic oligonucleotide
  Target: LAMA2; (-) strand; PAM type: NNNNGHTT; PAM sequence: ATAGGATT
aatatttagagatgagaagc

SEQ ID NO: 34129 - DNA, 20 bp, Artificial Sequence
  Description of Artificial Sequence: Synthetic oligonucleotide
  Target: LAMA2; (-) strand; PAM type: NNNNGHTT; PAM sequence: CCAAGATT
gcaaggatggaaacagaatc

SEQ ID NO: 34130 - DNA, 20 bp, Artificial Sequence
  Description of Artificial Sequence: Synthetic oligonucleotide
  Target: LAMA2; (-) strand; PAM type: NNNNGHTT; PAM sequence: CTTAGCTT
tcatttcttaaaatgaatga

SEQ ID NO: 34131 - DNA, 20 bp, Artificial Sequence
  Description of Artificial Sequence: Synthetic oligonucleotide
  Target: LAMA2; (-) strand; PAM type: NNNNGHTT; PAM sequence: CACTGTTT
atctggcatctagaaggttt

SEQ ID NO: 34132 - DNA, 20 bp, Artificial Sequence
  Description of Artificial Sequence: Synthetic oligonucleotide
  Target: LAMA2; (-) strand; PAM type: NNNNGHTT; PAM sequence: GAAGGTTT
tgtatagcatctggcatcta

SEQ ID NO: 34133 - DNA, 20 bp, Artificial Sequence
  Description of Artificial Sequence: Synthetic oligonucleotide
  Target: LAMA2; (-) strand; PAM type: NNNNGHTT; PAM sequence: ATATGCTT
tttttcaccatgctggtgtc

SEQ ID NO: 34134 - DNA, 20 bp, Artificial Sequence
  Description of Artificial Sequence: Synthetic oligonucleotide
  Target: LAMA2; (-) strand; PAM type: NNNNGHTT; PAM sequence: ATTAGCTT
aatactatctgatggtctta

SEQ ID NO: 34135 - DNA, 20 bp, Artificial Sequence
  Description of Artificial Sequence: Synthetic oligonucleotide
  Target: LAMA2; (-) strand; PAM type: NNNNGHTT; PAM sequence: TCATGATT
gtaactatgtaacatagtta

SEQ ID NO: 34136 - DNA, 20 bp, Artificial Sequence
  Description of Artificial Sequence: Synthetic oligonucleotide
  Target: LAMA2; (-) strand; PAM type: NNNNGHTT; PAM sequence: GAGAGATT
attagctaatataactgtca

SEQ ID NO: 34137 - DNA, 20 bp, Artificial Sequence
  Description of Artificial Sequence: Synthetic oligonucleotide
  Target: LAMA2; (-) strand; PAM type: NNNNGHTT; PAM sequence: TAGTGATT
cttcttttaaaatttctgtt

SEQ ID NO: 34138 - DNA, 20 bp, Artificial Sequence
  Description of Artificial Sequence: Synthetic oligonucleotide
  Target: LAMA2; (-) strand; PAM type: NNNNGHTT; PAM sequence: TTCTGTTT
ttaaatacttcttttaaaat

SEQ ID NO: 34139 - DNA, 20 bp, Artificial Sequence
  Description of Artificial Sequence: Synthetic oligonucleotide
  Target: LAMA2; (-) strand; PAM type: NNNNGHTT; PAM sequence: AAGTGATT
tcatgaatcaagaaacagta

SEQ ID NO: 34140 - DNA, 20 bp, Artificial Sequence
  Description of Artificial Sequence: Synthetic oligonucleotide
  Target: LAMA2; (-) strand; PAM type: NNNNGHTT; PAM sequence: GTAAGTTT
ctttcccttctgtcatgatt

SEQ ID NO: 34141 - DNA, 20 bp, Artificial Sequence
  Description of Artificial Sequence: Synthetic oligonucleotide
  Target: LAMA2; (-) strand; PAM type: NNNNGHTT; PAM sequence: TCATGATT
tgtgtttgctttcccttctg

SEQ ID NO: 34142 - DNA, 20 bp, Artificial Sequence
  Description of Artificial Sequence: Synthetic oligonucleotide
  Target: LAMA2; (-) strand; PAM type: NNNNGHTT; PAM sequence: GTTTGCTT
gacatcatgaagaagaatgt

SEQ ID NO: 34143 - DNA, 20 bp, Artificial Sequence
  Description of Artificial Sequence: Synthetic oligonucleotide
  Target: LAMA2; (-) strand; PAM type: NNNNGHTT; PAM sequence: ATGTGTTT
tcctgacatcatgaagaaga

SEQ ID NO: 34144 - DNA, 20 bp, Artificial Sequence
  Description of Artificial Sequence: Synthetic oligonucleotide
  Target: LAMA2; (-) strand; PAM type: NNNNGHTT; PAM sequence: AGGGGCTT
tgaggtctgatggttttata

SEQ ID NO: 34145 - DNA, 20 bp, Artificial Sequence
  Description of Artificial Sequence: Synthetic oligonucleotide
  Target: LAMA2; (-) strand; PAM type: NNNNGHTT; PAM sequence: GATGGTTT
tgagtagtctcatgaggtct

SEQ ID NO: 34146 - DNA, 20 bp, Artificial Sequence
  Description of Artificial Sequence: Synthetic oligonucleotide
  Target: LAMA2; (-) strand; PAM type: NNNNGHTT; PAM sequence: GAGTGATT
ggaaggtgattagatcatga

SEQ ID NO: 34147 - DNA, 20 bp, Artificial Sequence
  Description of Artificial Sequence: Synthetic oligonucleotide
  Target: LAMA2; (-) strand; PAM type: NNNNGHTT; PAM sequence: AGGTGATT
tgggggagggacctcctgga

SEQ ID NO: 34148 - DNA, 20 bp, Artificial Sequence
  Description of Artificial Sequence: Synthetic oligonucleotide
  Target: LAMA2; (-) strand; PAM type: NNNNGHTT; PAM sequence: TAGTGATT
tataccagttgggacatcaa

SEQ ID NO: 34149 - DNA, 20 bp, Artificial Sequence
  Description of Artificial Sequence: Synthetic oligonucleotide
  Target: LAMA2; (-) strand; PAM type: NNNNGHTT; PAM sequence: ATGTGTTT
gtggaatttgtctcaaaatt

SEQ ID NO: 34150 - DNA, 20 bp, Artificial Sequence
  Description of Artificial Sequence: Synthetic oligonucleotide
  Target: LAMA2; (-) strand; PAM type: NNNNGHTT; PAM sequence: ATGTGTTT
tcatttttcttgcttcgatt

SEQ ID NO: 34151 - DNA, 20 bp, Artificial Sequence
  Description of Artificial Sequence: Synthetic oligonucleotide
  Target: LAMA2; (-) strand; PAM type: NNNNGHTT; PAM sequence: CTTCGATT
attttttctcatttttcttg

SEQ ID NO: 34152 - DNA, 20 bp, Artificial Sequence
  Description of Artificial Sequence: Synthetic oligonucleotide
  Target: LAMA2; (-) strand; PAM type: NNNNGHTT; PAM sequence: TCTTGCTT
atttgattttttctcatttt

SEQ ID NO: 34153 - DNA, 20 bp, Artificial Sequence
  Description of Artificial Sequence: Synthetic oligonucleotide
  Target: LAMA2; (-) strand; PAM type: NNNNGHTT; PAM sequence: ATTTGATT
aattcttcatcatattatat

SEQ ID NO: 34154 - DNA, 20 bp, Artificial Sequence
  Description of Artificial Sequence: Synthetic oligonucleotide
  Target: LAMA2; (-) strand; PAM type: NNNNGHTT; PAM sequence: GGATGTTT
aacacattgataaaatgaat

SEQ ID NO: 34155 - DNA, 20 bp, Artificial Sequence
  Description of Artificial Sequence: Synthetic oligonucleotide
  Target: LAMA2; (-) strand; PAM type: NNNNGHTT; PAM sequence: GGATGATT
acaaagaaatcttggtgaaa

SEQ ID NO: 34156 - DNA, 20 bp, Artificial Sequence
  Description of Artificial Sequence: Synthetic oligonucleotide
  Target: LAMA2; (-) strand; PAM type: NNNNGHTT; PAM sequence: GGAAGTTT
catttgtagtgaagtagaat

SEQ ID NO: 34157 - DNA, 20 bp, Artificial Sequence
  Description of Artificial Sequence: Synthetic oligonucleotide
  Target: LAMA2; (-) strand; PAM type: NNNNGHTT; PAM sequence: CAACGATT
tctgtaattctactaaatgt

SEQ ID NO: 34158 - DNA, 20 bp, Artificial Sequence
  Description of Artificial Sequence: Synthetic oligonucleotide
  Target: LAMA2; (-) strand; PAM type: NNNNGHTT; PAM sequence: AAATGATT
ataccctaagaaatatttgt

SEQ ID NO: 34159 - DNA, 20 bp, Artificial Sequence
  Description of Artificial Sequence: Synthetic oligonucleotide
  Target: LAMA2; (-) strand; PAM type: NNNNGHTT; PAM sequence: AAAGGTTT
aattacagcttaatgtccac

SEQ ID NO: 34160 - DNA, 20 bp, Artificial Sequence
  Description of Artificial Sequence: Synthetic oligonucleotide
  Target: LAMA2; (-) strand; PAM type: NNNNGHTT; PAM sequence: TACAGCTT
ttgcaagagaaagctacaat

SEQ ID NO: 34161 - DNA, 20 bp, Artificial Sequence
  Description of Artificial Sequence: Synthetic oligonucleotide
  Target: LAMA2; (-) strand; PAM type: NNNNGHTT; PAM sequence: AGAAGCTT
aataataaagcagaggataa

SEQ ID NO: 34162 - DNA, 20 bp, Artificial Sequence
  Description of Artificial Sequence: Synthetic oligonucleotide
  Target: LAMA2; (-) strand; PAM type: NNNNGHTT; PAM sequence: ATCTGTTT
taagggcattcacactccaa

SEQ ID NO: 34163 - DNA, 20 bp, Artificial Sequence
  Description of Artificial Sequence: Synthetic oligonucleotide
  Target: LAMA2; (-) strand; PAM type: NNNNGHTT; PAM sequence: AAATGCTT
tcacattattgtagaattaa

SEQ ID NO: 34164 - DNA, 20 bp, Artificial Sequence
  Description of Artificial Sequence: Synthetic oligonucleotide
  Target: LAMA2; (-) strand; PAM type: NNNNGHTT; PAM sequence: ACATGTTT
ttctggccttcagatgcaga

SEQ ID NO: 34165 - DNA, 20 bp, Artificial Sequence
  Description of Artificial Sequence: Synthetic oligonucleotide
  Target: LAMA2; (-) strand; PAM type: NNNNGHTT; PAM sequence: CAATGCTT
ttttcctttaactaaattaa

SEQ ID NO: 34166 - DNA, 20 bp, Artificial Sequence
  Description of Artificial Sequence: Synthetic oligonucleotide
  Target: LAMA2; (-) strand; PAM type: NNNNGHTT; PAM sequence: CATTGATT
atttaacatattaatttctc

SEQ ID NO: 34167 - DNA, 20 bp, Artificial Sequence
  Description of Artificial Sequence: Synthetic oligonucleotide
  Target: LAMA2; (-) strand; PAM type: NNNNGHTT; PAM sequence: TCCAGTTT
tggaaagatttttaaagtta

SEQ ID NO: 34168 - DNA, 20 bp, Artificial Sequence
  Description of Artificial Sequence: Synthetic oligonucleotide
  Target: LAMA2; (-) strand; PAM type: NNNNGHTT; PAM sequence: GAAAGATT
agaatataatgcattatatg

SEQ ID NO: 34169 - DNA, 20 bp, Artificial Sequence
  Description of Artificial Sequence: Synthetic oligonucleotide
  Target: LAMA2; (-) strand; PAM type: NNNNGHTT; PAM sequence: TGTTGTTT
ttgaaaataaaattggttta

SEQ ID NO: 34170 - DNA, 20 bp, Artificial Sequence
  Description of Artificial Sequence: Synthetic oligonucleotide
  Target: LAMA2; (-) strand; PAM type: NNNNGHTT; PAM sequence: ATTGGTTT
agattgattttgaaaataaa

SEQ ID NO: 34171 - DNA, 20 bp, Artificial Sequence
  Description of Artificial Sequence: Synthetic oligonucleotide
  Target: LAMA2; (-) strand; PAM type: NNNNGHTT; PAM sequence: GATTGATT
taagtagaagttaccccaaa

SEQ ID NO: 34172 - DNA, 20 bp, Artificial Sequence
  Description of Artificial Sequence: Synthetic oligonucleotide
  Target: LAMA2; (-) strand; PAM type: NNNNGHTT; PAM sequence: CAAAGATT
gctctaagtagaagttaccc

SEQ ID NO: 34173 - DNA, 20 bp, Artificial Sequence
  Description of Artificial Sequence: Synthetic oligonucleotide
  Target: LAMA2; (-) strand; PAM type: NNNNGHTT; PAM sequence: AAATGATT
cacataaataagactaatct

SEQ ID NO: 34174 - DNA, 20 bp, Artificial Sequence
  Description of Artificial Sequence: Synthetic oligonucleotide
  Target: LAMA2; (-) strand; PAM type: NNNNGHTT; PAM sequence: AGAGGTTT
aggaaagtgaaatggaggta

SEQ ID NO: 34175 - DNA, 20 bp, Artificial Sequence
  Description of Artificial Sequence: Synthetic oligonucleotide
  Target: LAMA2; (-) strand; PAM type: NNNNGHTT; PAM sequence: ATAAGCTT
ctaaatatcttcctgtccag

SEQ ID NO: 34176 - DNA, 20 bp, Artificial Sequence
  Description of Artificial Sequence: Synthetic oligonucleotide
  Target: LAMA2; (-) strand; PAM type: NNNNGHTT; PAM sequence: TGCTGTTT
aagaaattatacctttaaaa

SEQ ID NO: 34177 - DNA, 20 bp, Artificial Sequence
  Description of Artificial Sequence: Synthetic oligonucleotide
  Target: LAMA2; (-) strand; PAM type: NNNNGHTT; PAM sequence: ACTGGATT
caaatgtccaacaacgatag

SEQ ID NO: 34178 - DNA, 20 bp, Artificial Sequence
  Description of Artificial Sequence: Synthetic oligonucleotide
  Target: LAMA2; (-) strand; PAM type: NNNNGHTT; PAM sequence: ATATGTTT
ctataaagacacatgcacac

SEQ ID NO: 34179 - DNA, 20 bp, Artificial Sequence
  Description of Artificial Sequence: Synthetic oligonucleotide
  Target: LAMA2; (-) strand; PAM type: NNNNGHTT; PAM sequence: TGGCGATT
aaccattgtggaagtcagtg

SEQ ID NO: 34180 - DNA, 20 bp, Artificial Sequence
  Description of Artificial Sequence: Synthetic oligonucleotide
  Target: LAMA2; (-) strand; PAM type: NNNNGHTT; PAM sequence: AAGAGCTT
aatgggatctaattaaacta

SEQ ID NO: 34181 - DNA, 20 bp, Artificial Sequence
  Description of Artificial Sequence: Synthetic oligonucleotide
  Target: LAMA2; (-) strand; PAM type: NNNNGHTT; PAM sequence: GATGGATT
ttatacaaaaatcaattcaa

SEQ ID NO: 34182 - DNA, 20 bp, Artificial Sequence
  Description of Artificial Sequence: Synthetic oligonucleotide
  Target: LAMA2; (-) strand; PAM type: NNNNGHTT; PAM sequence: AAAGGATT
gagaaaaacaagcaatgggg

SEQ ID NO: 34183 - DNA, 20 bp, Artificial Sequence
  Description of Artificial Sequence: Synthetic oligonucleotide
  Target: LAMA2; (-) strand; PAM type: NNNNGHTT; PAM sequence: TACAGATT
ccatactgcccaaggtaatt

SEQ ID NO: 34184 - DNA, 20 bp, Artificial Sequence
  Description of Artificial Sequence: Synthetic oligonucleotide
  Target: LAMA2; (-) strand; PAM type: NNNNGHTT; PAM sequence: AATTGCTT
atgagtgaactcccattcac

SEQ ID NO: 34185 - DNA, 20 bp, Artificial Sequence
  Description of Artificial Sequence: Synthetic oligonucleotide
  Target: LAMA2; (-) strand; PAM type: NNNNGHTT; PAM sequence: ACATGATT
attgtccctctttgcagacg

SEQ ID NO: 34186 - DNA, 20 bp, Artificial Sequence
  Description of Artificial Sequence: Synthetic oligonucleotide
  Target: LAMA2; (-) strand; PAM type: NNNNGHTT; PAM sequence: ACATGATT
cagggccaaagacaaaaacc

SEQ ID NO: 34187 - DNA, 20 bp, Artificial Sequence
  Description of Artificial Sequence: Synthetic oligonucleotide
  Target: LAMA2; (-) strand; PAM type: NNNNGHTT; PAM sequence: GTGGGCTT
agcttatccaccatgatcaa

SEQ ID NO: 34188 - DNA, 20 bp, Artificial Sequence
  Description of Artificial Sequence: Synthetic oligonucleotide
  Target: LAMA2; (-) strand; PAM type: NNNNGHTT; PAM sequence: AAAAGCTT
acaaatccagcagcacatca

SEQ ID NO: 34189 - DNA, 20 bp, Artificial Sequence
  Description of Artificial Sequence: Synthetic oligonucleotide
  Target: LAMA2; (-) strand; PAM type: NNNNGHTT; PAM sequence: GATGGATT
ccaaaaagagtccaggacca

SEQ ID NO: 34190 - DNA, 20 bp, Artificial Sequence
  Description of Artificial Sequence: Synthetic oligonucleotide
  Target: LAMA2; (-) strand; PAM type: NNNNGHTT; PAM sequence: AATAGCTT
ctgaaattgtgacaataatc

SEQ ID NO: 34191 - DNA, 20 bp, Artificial Sequence
  Description of Artificial Sequence: Synthetic oligonucleotide
  Target: LAMA2; (-) strand; PAM type: NNNNGHTT; PAM sequence: GCTGGTTT
aaaaattaatgaatccagga

SEQ ID NO: 34192 - DNA, 20 bp, Artificial Sequence
  Description of Artificial Sequence: Synthetic oligonucleotide
  Target: LAMA2; (-) strand; PAM type: NNNNGHTT; PAM sequence: TCAGGATT
cagtgcaatcaaactagaac

SEQ ID NO: 34193 - DNA, 20 bp, Artificial Sequence
  Description of Artificial Sequence: Synthetic oligonucleotide
  Target: LAMA2; (-) strand; PAM type: NNNNGHTT; PAM sequence: CCCAGATT
acgcacccaacacaggagca

SEQ ID NO: 34194 - DNA, 20 bp, Artificial Sequence
  Description of Artificial Sequence: Synthetic oligonucleotide
  Target: LAMA2; (-) strand; PAM type: NNNNGHTT; PAM sequence: AACAGATT
gcaatcctagtctctgataa

SEQ ID NO: 34195 - DNA, 20 bp, Artificial Sequence
  Description of Artificial Sequence: Synthetic oligonucleotide
  Target: LAMA2; (-) strand; PAM type: NNNNGHTT; PAM sequence: GAGAGATT
tttacagacaagcaaatgct

SEQ ID NO: 34196 - DNA, 20 bp, Artificial Sequence
  Description of Artificial Sequence: Synthetic oligonucleotide
  Target: LAMA2; (-) strand; PAM type: NNNNGHTT; PAM sequence: CTAAGCTT
gaatttcatatccagccaaa

SEQ ID NO: 34197 - DNA, 20 bp, Artificial Sequence
  Description of Artificial Sequence: Synthetic oligonucleotide
  Target: LAMA2; (-) strand; PAM type: NNNNGHTT; PAM sequence: GTCAGATT
caactccaagacacataatt

SEQ ID NO: 34198 - DNA, 20 bp, Artificial Sequence
  Description of Artificial Sequence: Synthetic oligonucleotide
  Target: LAMA2; (-) strand; PAM type: NNNNGHTT; PAM sequence: TTCAGATT
tctagcaaggcaggccaacg

SEQ ID NO: 34199 - DNA, 20 bp, Artificial Sequence
  Description of Artificial Sequence: Synthetic oligonucleotide
  Target: LAMA2; (-) strand; PAM type: NNNNGHTT; PAM sequence: GTCTGATT
tgtgaaaagaccaaatccac

SEQ ID NO: 34200 - DNA, 20 bp, Artificial Sequence
  Description of Artificial Sequence: Synthetic oligonucleotide
  Target: LAMA2; (-) strand; PAM type: NNNNGHTT; PAM sequence: GGAAGTTT
gaatgaaatgaagcaagaag

SEQ ID NO: 34201 - DNA, 20 bp, Artificial Sequence
  Description of Artificial Sequence: Synthetic oligonucleotide
  Target: LAMA2; (-) strand; PAM type: NNNNGHTT; PAM sequence: AAATGCTT
ctagaataaccaatacagag

SEQ ID NO: 34202 - DNA, 20 bp, Artificial Sequence
  Description of Artificial Sequence: Synthetic oligonucleotide
  Target: LAMA2; (-) strand; PAM type: NNNNGHTT; PAM sequence: GAAGGCTT
actttgacgagctgagagaa

SEQ ID NO: 34203 - DNA, 20 bp, Artificial Sequence
  Description of Artificial Sequence: Synthetic oligonucleotide
  Target: LAMA2; (-) strand; PAM type: NNNNGHTT; PAM sequence: GACAGCTT
agacttaaatgtccctgtct

SEQ ID NO: 34204 - DNA, 20 bp, Artificial Sequence
  Description of Artificial Sequence: Synthetic oligonucleotide
  Target: LAMA2; (-) strand; PAM type: NNNNGHTT; PAM sequence: GCTTGATT
gggcgtctgccattgcccag

SEQ ID NO: 34205 - DNA, 20 bp, Artificial Sequence
  Description of Artificial Sequence: Synthetic oligonucleotide
  Target: LAMA2; (-) strand; PAM type: NNNNGHTT; PAM sequence: CCAGGCTT
ggaggggcgtctgccattgc

SEQ ID NO: 34206 - DNA, 20 bp, Artificial Sequence
  Description of Artificial Sequence: Synthetic oligonucleotide
  Target: LAMA2; (-) strand; PAM type: NNNNGHTT; PAM sequence: CACTGATT
gtactacgcccacggagtct

SEQ ID NO: 34207 - DNA, 20 bp, Artificial Sequence
  Description of Artificial Sequence: Synthetic oligonucleotide
  Target: LAMA2; (-) strand; PAM type: NNNNGHTT; PAM sequence: ACGAGATT
ggcttaaaaaacggcgaacc

SEQ ID NO: 34208 - DNA, 20 bp, Artificial Sequence
  Description of Artificial Sequence: Synthetic oligonucleotide
  Target: LAMA2; (-) strand; PAM type: NNNNGHTT; PAM sequence: ACGGGCTT
ccgaatactgcgcctttccg

SEQ ID NO: 34209 - DNA, 20 bp, Artificial Sequence
  Description of Artificial Sequence: Synthetic oligonucleotide
  Target: LAMA2; (-) strand; PAM type: NNNNGHTT; PAM sequence: TTCTGCTT
cgacgcagaagacaggtgat

SEQ ID NO: 34210 - DNA, 20 bp, Artificial Sequence
  Description of Artificial Sequence: Synthetic oligonucleotide
  Target: LAMA2; (-) strand; PAM type: NNNNGHTT; PAM sequence: AGGTGATT
gcgtgagcgacgcagaagac

SEQ ID NO: 34211 - DNA, 20 bp, Artificial Sequence
  Description of Artificial Sequence: Synthetic oligonucleotide
  Target: LAMA2; (-) strand; PAM type: NNNNGHTT; PAM sequence: AAGAGTTT
acagatgaaactaatcagat

SEQ ID NO: 34212 - DNA, 20 bp, Artificial Sequence
  Description of Artificial Sequence: Synthetic oligonucleotide
  Target: LAMA2; (-) strand; PAM type: NNNNGHTT; PAM sequence: TGGTGTTT
gacagaaaaaagtacttagt

SEQ ID NO: 34213 - DNA, 20 bp, Artificial Sequence
  Description of Artificial Sequence: Synthetic oligonucleotide
  Target: LAMA2; (-) strand; PAM type: NNNNGHTT; PAM sequence: GAATGATT
attgatggatgcaaaaacat

SEQ ID NO: 34214 - DNA, 20 bp, Artificial Sequence
  Description of Artificial Sequence: Synthetic oligonucleotide
  Target: LAMA2; (-) strand; PAM type: NNNNGHTT; PAM sequence: TAGCGATT
attcattcaacggaaaatgt

SEQ ID NO: 34215 - DNA, 20 bp, Artificial Sequence
  Description of Artificial Sequence: Synthetic oligonucleotide
  Target: LAMA2; (-) strand; PAM type: NNNNGHTT; PAM sequence: AAAAGCTT
atgaaaacatatgtccataa

SEQ ID NO: 34216 - DNA, 20 bp, Artificial Sequence
  Description of Artificial Sequence: Synthetic oligonucleotide
  Target: LAMA2; (-) strand; PAM type: NNNNGHTT; PAM sequence: TTTAGTTT
ctatagagccaacttttatc

SEQ ID NO: 34217 - DNA, 20 bp, Artificial Sequence
  Description of Artificial Sequence: Synthetic oligonucleotide
  Target: LAMA2; (-) strand; PAM type: NNNNGHTT; PAM sequence: CTCTGTTT
agttaaacaaaatatactta

SEQ ID NO: 34218 - DNA, 20 bp, Artificial Sequence
  Description of Artificial Sequence: Synthetic oligonucleotide
  Target: LAMA2; (-) strand; PAM type: NNNNGHTT; PAM sequence: CCCTGCTT
caactaacaaatgaataata

SEQ ID NO: 34219 - DNA, 20 bp, Artificial Sequence
  Description of Artificial Sequence: Synthetic oligonucleotide
  Target: LAMA2; (-) strand; PAM type: NNNNGHTT; PAM sequence: AGTAGATT
actgccttacccataattat

SEQ ID NO: 34220 - DNA, 20 bp, Artificial Sequence
  Description of Artificial Sequence: Synthetic oligonucleotide
  Target: LAMA2; (-) strand; PAM type: NNNNGHTT; PAM sequence: TTGGGATT
attcttatttaatgaataaa

SEQ ID NO: 34221 - DNA, 20 bp, Artificial Sequence
  Description of Artificial Sequence: Synthetic oligonucleotide
  Target: LAMA2; (-) strand; PAM type: NNNNGHTT; PAM sequence: TGGAGTTT
gtcttgctcatctttgtatt

SEQ ID NO: 34222 - DNA, 20 bp, Artificial Sequence
  Description of Artificial Sequence: Synthetic oligonucleotide
  Target: LAMA2; (-) strand; PAM type: NNNNGHTT; PAM sequence: AAATGTTT
gccctgttcctgttagatgg

SEQ ID NO: 34223 - DNA, 20 bp, Artificial Sequence
  Description of Artificial Sequence: Synthetic oligonucleotide
  Target: LAMA2; (-) strand; PAM type: NNNNGHTT; PAM sequence: CCCTGTTT
gtgttctcccaatttgtcaa

SEQ ID NO: 34224 - DNA, 20 bp, Artificial Sequence
  Description of Artificial Sequence: Synthetic oligonucleotide
  Target: LAMA2; (-) strand; PAM type: NNNNGHTT; PAM sequence: TTTAGCTT
tggtttttaaatttttaatt

SEQ ID NO: 34225 - DNA, 20 bp, Artificial Sequence
  Description of Artificial Sequence: Synthetic oligonucleotide
  Target: LAMA2; (-) strand; PAM type: NNNNGHTT; PAM sequence: ATTGGTTT
taattaatctctcagagtgg

SEQ ID NO: 34226 - DNA, 20 bp, Artificial Sequence
  Description of Artificial Sequence: Synthetic oligonucleotide
  Target: LAMA2; (-) strand; PAM type: NNNNGHTT; PAM sequence: AGTGGATT
cactttaattaatctctcag

SEQ ID NO: 34227 - DNA, 20 bp, Artificial Sequence
  Description of Artificial Sequence: Synthetic oligonucleotide
  Target: LAMA2; (-) strand; PAM type: NNNNGHTT; PAM sequence: GAAAGTTT
ttactaaaaatatggaagtt

SEQ ID NO: 34228 - DNA, 20 bp, Artificial Sequence
  Description of Artificial Sequence: Synthetic oligonucleotide
  Target: LAMA2; (-) strand; PAM type: NNNNGHTT; PAM sequence: GTGTGTTT
ttggttatatcaatgatggg

SEQ ID NO: 34229 - DNA, 20 bp, Artificial Sequence
  Description of Artificial Sequence: Synthetic oligonucleotide
  Target: LAMA2; (-) strand; PAM type: NNNNGHTT; PAM sequence: TAATGATT
accagtcgaataaataatta

SEQ ID NO: 34230 - DNA, 20 bp, Artificial Sequence
  Description of Artificial Sequence: Synthetic oligonucleotide
  Target: LAMA2; (-) strand; PAM type: NNNNGHTT; PAM sequence: TATAGCTT
aaacaacaatgaagcaaagt

SEQ ID NO: 34231 - DNA, 20 bp, Artificial Sequence
  Description of Artificial Sequence: Synthetic oligonucleotide
  Target: LAMA2; (-) strand; PAM type: NNNNGHTT; PAM sequence: AATTGATT
tactgttaacaatgcccaca

SEQ ID NO: 34232 - DNA, 20 bp, Artificial Sequence
  Description of Artificial Sequence: Synthetic oligonucleotide
  Target: LAMA2; (-) strand; PAM type: NNNNGHTT; PAM sequence: GATTGCTT
tgctttgaaagcttagctct

SEQ ID NO: 34233 - DNA, 20 bp, Artificial Sequence
  Description of Artificial Sequence: Synthetic oligonucleotide
  Target: LAMA2; (-) strand; PAM type: NNNNGHTT; PAM sequence: CTCTGATT
aatctgctttgaaagcttag

SEQ ID NO: 34234 - DNA, 20 bp, Artificial Sequence
  Description of Artificial Sequence: Synthetic oligonucleotide
  Target: LAMA2; (-) strand; PAM type: NNNNGHTT; PAM sequence: GAAAGCTT
agcttcctctaatctgcttt

SEQ ID NO: 34235 - DNA, 20 bp, Artificial Sequence
  Description of Artificial Sequence: Synthetic oligonucleotide
  Target: LAMA2; (-) strand; PAM type: NNNNGHTT; PAM sequence: ATCTGCTT
ttgctaataagcttcctcta

SEQ ID NO: 34236 - DNA, 20 bp, Artificial Sequence
  Description of Artificial Sequence: Synthetic oligonucleotide
  Target: LAMA2; (-) strand; PAM type: NNNNGHTT; PAM sequence: ATAAGCTT
ttgactatattttattgcta

SEQ ID NO: 34237 - DNA, 20 bp, Artificial Sequence
  Description of Artificial Sequence: Synthetic oligonucleotide
  Target: LAMA2; (-) strand; PAM type: NNNNGHTT; PAM sequence: ATATGATT
ggtaattccactacataaaa

SEQ ID NO: 34238 - DNA, 20 bp, Artificial Sequence
  Description of Artificial Sequence: Synthetic oligonucleotide
  Target: LAMA2; (-) strand; PAM type: NNNNGHTT; PAM sequence: TTTAGATT
tcaattataaactcatttaa

SEQ ID NO: 34239 - DNA, 20 bp, Artificial Sequence
  Description of Artificial Sequence: Synthetic oligonucleotide
  Target: LAMA2; (-) strand; PAM type: NNNNGHTT; PAM sequence: GAGCGTTT
gctataatgtaaaaaatata

SEQ ID NO: 34240 - DNA, 20 bp, Artificial Sequence
  Description of Artificial Sequence: Synthetic oligonucleotide
  Target: LAMA2; (-) strand; PAM type: NNNNGHTT; PAM sequence: ATGTGCTT
aatttttgcctgggtttgcc

SEQ ID NO: 34241 - DNA, 20 bp, Artificial Sequence
  Description of Artificial Sequence: Synthetic oligonucleotide
  Target: LAMA2; (-) strand; PAM type: NNNNGHTT; PAM sequence: CTGGGTTT
tttatttttctaatttttgc

SEQ ID NO: 34242 - DNA, 20 bp, Artificial Sequence
  Description of Artificial Sequence: Synthetic oligonucleotide
  Target: LAMA2; (-) strand; PAM type: NNNNGHTT; PAM sequence: GTTAGCTT
ggaaaaaaatggataaggga

SEQ ID NO: 34243 - DNA, 20 bp, Artificial Sequence
  Description of Artificial Sequence: Synthetic oligonucleotide
  Target: LAMA2; (-) strand; PAM type: NNNNGHTT; PAM sequence: TCTAGATT
aagtagaaatgcaatttctt

SEQ ID NO: 34244 - DNA, 20 bp, Artificial Sequence
  Description of Artificial Sequence: Synthetic oligonucleotide
  Target: LAMA2; (-) strand; PAM type: NNNNGHTT; PAM sequence: GCTGGTTT
gttacgacatcccagaacca

SEQ ID NO: 34245 - DNA, 20 bp, Artificial Sequence
  Description of Artificial Sequence: Synthetic oligonucleotide
  Target: LAMA2; (-) strand; PAM type: NNNNGHTT; PAM sequence: ATTGGTTT
ggagccaatgagcacaaacc

SEQ ID NO: 34246 - DNA, 20 bp, Artificial Sequence
  Description of Artificial Sequence: Synthetic oligonucleotide
  Target: LAMA2; (-) strand; PAM type: NNNNGHTT; PAM sequence: CCCTGTTT
tatttaagtagcatttatct

SEQ ID NO: 34247 - DNA, 20 bp, Artificial Sequence
  Description of Artificial Sequence: Synthetic oligonucleotide
  Target: LAMA2; (-) strand; PAM type: NNNNGHTT; PAM sequence: CGCTGATT
tgctcactttacattttgtt

SEQ ID NO: 34248 - DNA, 20 bp, Artificial Sequence
  Description of Artificial Sequence: Synthetic oligonucleotide
  Target: LAMA2; (-) strand; PAM type: NNNNGHTT; PAM sequence: AGAGGATT
gtattacatatatatgagat

SEQ ID NO: 34249 - DNA, 20 bp, Artificial Sequence
  Description of Artificial Sequence: Synthetic oligonucleotide
  Target: LAMA2; (-) strand; PAM type: NNNNGHTT; PAM sequence: CTTCGTTT
aaataaagctatagcaacat

SEQ ID NO: 34250 - DNA, 20 bp, Artificial Sequence
  Description of Artificial Sequence: Synthetic oligonucleotide
  Target: LAMA2; (-) strand; PAM type: NNNNGHTT; PAM sequence: TACAGTTT
atctgattagcacatacact

SEQ ID NO: 34251 - DNA, 20 bp, Artificial Sequence
  Description of Artificial Sequence: Synthetic oligonucleotide
  Target: LAMA2; (-) strand; PAM type: NNNNGHTT; PAM sequence: ATCTGATT
aagtctctagtaaaagaatt

SEQ ID NO: 34252 - DNA, 20 bp, Artificial Sequence
  Description of Artificial Sequence: Synthetic oligonucleotide
  Target: LAMA2; (-) strand; PAM type: NNNNGHTT; PAM sequence: AGAAGATT
tttaattatcagtctgtttt

SEQ ID NO: 34253 - DNA, 20 bp, Artificial Sequence
  Description of Artificial Sequence: Synthetic oligonucleotide
  Target: LAMA2; (-) strand; PAM type: NNNNGHTT; PAM sequence: GTCTGTTT
tcaacccagtttaattatca

SEQ ID NO: 34254 - DNA, 20 bp, Artificial Sequence
  Description of Artificial Sequence: Synthetic oligonucleotide
  Target: LAMA2; (-) strand; PAM type: NNNNGHTT; PAM sequence: CCCAGTTT
atgaacccaataatgatcaa

SEQ ID NO: 34255 - DNA, 20 bp, Artificial Sequence
  Description of Artificial Sequence: Synthetic oligonucleotide
  Target: LAMA2; (-) strand; PAM type: NNNNGHTT; PAM sequence: ATATGATT
taatatttttgctattttta

SEQ ID NO: 34256 - DNA, 20 bp, Artificial Sequence
  Description of Artificial Sequence: Synthetic oligonucleotide
  Target: LAMA2; (-) strand; PAM type: NNNNGHTT; PAM sequence: CCTTGTTT
tttatccattaacctttctg

SEQ ID NO: 34257 - DNA, 20 bp, Artificial Sequence
  Description of Artificial Sequence: Synthetic oligonucleotide
  Target: LAMA2; (-) strand; PAM type: NNNNGHTT; PAM sequence: AAACGCTT
caaaatactaagagaatcag

SEQ ID NO: 34258 - DNA, 20 bp, Artificial Sequence
  Description of Artificial Sequence: Synthetic oligonucleotide
  Target: LAMA2; (-) strand; PAM type: NNNNGHTT; PAM sequence: ACTGGCTT
ccgatgtttttgatgttata

SEQ ID NO: 34259 - DNA, 20 bp, Artificial Sequence
  Description of Artificial Sequence: Synthetic oligonucleotide
  Target: LAMA2; (-) strand; PAM type: NNNNGHTT; PAM sequence: CGATGTTT
tagaagaaaagaaagggttc

SEQ ID NO: 34260 - DNA, 20 bp, Artificial Sequence
  Description of Artificial Sequence: Synthetic oligonucleotide
  Target: LAMA2; (-) strand; PAM type: NNNNGHTT; PAM sequence: CCAAGTTT
tgtagttatataagacactg

SEQ ID NO: 34261 - DNA, 20 bp, Artificial Sequence
  Description of Artificial Sequence: Synthetic oligonucleotide
  Target: LAMA2; (-) strand; PAM type: NNNNGHTT; PAM sequence: CACTGTTT
ttatcagacaatgtatttca

SEQ ID NO: 34262 - DNA, 20 bp, Artificial Sequence
  Description of Artificial Sequence: Synthetic oligonucleotide
  Target: LAMA2; (-) strand; PAM type: NNNNGHTT; PAM sequence: CTTGGATT
caaatatacaactataaaga

SEQ ID NO: 34263 - DNA, 20 bp, Artificial Sequence
  Description of Artificial Sequence: Synthetic oligonucleotide
  Target: LAMA2; (-) strand; PAM type: NNNNGHTT; PAM sequence: GGTTGTTT
agcttatattattcccccac

SEQ ID NO: 34264 - DNA, 20 bp, Artificial Sequence
  Description of Artificial Sequence: Synthetic oligonucleotide
  Target: LAMA2; (-) strand; PAM type: NNNNGHTT; PAM sequence: TTAAGCTT
gtagactaatcaccaaatga

SEQ ID NO: 34265 - DNA, 20 bp, Artificial Sequence
  Description of Artificial Sequence: Synthetic oligonucleotide
  Target: LAMA2; (-) strand; PAM type: NNNNGHTT; PAM sequence: AAATGATT
tagttggtagactaatcacc

SEQ ID NO: 34266 - DNA, 20 bp, Artificial Sequence
  Description of Artificial Sequence: Synthetic oligonucleotide
  Target: LAMA2; (-) strand; PAM type: NNNNGHTT; PAM sequence: TTTTGTTT
aatagtttttttgtttttgt

SEQ ID NO: 34267 - DNA, 20 bp, Artificial Sequence
  Description of Artificial Sequence: Synthetic oligonucleotide
  Target: LAMA2; (-) strand; PAM type: NNNNGHTT; PAM sequence: TTTTGTTT
ttgccaaatagtttttttgt

SEQ ID NO: 34268 - DNA, 20 bp, Artificial Sequence
  Description of Artificial Sequence: Synthetic oligonucleotide
  Target: LAMA2; (-) strand; PAM type: NNNNGHTT; PAM sequence: TTTTGTTT
cccaatttgccaaatagttt

SEQ ID NO: 34269 - DNA, 20 bp, Artificial Sequence
  Description of Artificial Sequence: Synthetic oligonucleotide
  Target: LAMA2; (-) strand; PAM type: NNNNGHTT; PAM sequence: AATAGTTT
tctcatatcccaatttgcca

SEQ ID NO: 34270 - DNA, 20 bp, Artificial Sequence
  Description of Artificial Sequence: Synthetic oligonucleotide
  Target: LAMA2; (-) strand; PAM type: NNNNGHTT; PAM sequence: AAAAGTTT
aaaaaaaattggcaaggact

SEQ ID NO: 34271 - DNA, 20 bp, Artificial Sequence
  Description of Artificial Sequence: Synthetic oligonucleotide
  Target: LAMA2; (-) strand; PAM type: NNNNGHTT; PAM sequence: TGAAGTTT
ggaatatgaatcaagataat

SEQ ID NO: 34272 - DNA, 20 bp, Artificial Sequence
  Description of Artificial Sequence: Synthetic oligonucleotide
  Target: LAMA2; (-) strand; PAM type: NNNNGHTT; PAM sequence: CTCTGATT
gtacctacagttggtgttct

SEQ ID NO: 34273 - DNA, 20 bp, Artificial Sequence
  Description of Artificial Sequence: Synthetic oligonucleotide
  Target: LAMA2; (-) strand; PAM type: NNNNGHTT; PAM sequence: AGTTGTTT
agctcagtgattttaacgcc

SEQ ID NO: 34274 - DNA, 20 bp, Artificial Sequence
  Description of Artificial Sequence: Synthetic oligonucleotide
  Target: LAMA2; (-) strand; PAM type: NNNNGHTT; PAM sequence: CAGTGATT
gtattcatgtaacagaagct

SEQ ID NO: 34275 - DNA, 20 bp, Artificial Sequence
  Description of Artificial Sequence: Synthetic oligonucleotide
  Target: LAMA2; (-) strand; PAM type: NNNNGHTT; PAM sequence: ACCAGATT
gaaccatggagcactatgca

SEQ ID NO: 34276 - DNA, 20 bp, Artificial Sequence
  Description of Artificial Sequence: Synthetic oligonucleotide
  Target: LAMA2; (-) strand; PAM type: NNNNGHTT; PAM sequence: CCTGGCTT
ctcagagttgtaggatgtct

SEQ ID NO: 34277 - DNA, 20 bp, Artificial Sequence
  Description of Artificial Sequence: Synthetic oligonucleotide
  Target: LAMA2; (-) strand; PAM type: NNNNGHTT; PAM sequence: AAATGCTT
cagccactgctgccaacatc

SEQ ID NO: 34278 - DNA, 20 bp, Artificial Sequence
  Description of Artificial Sequence: Synthetic oligonucleotide
  Target: LAMA2; (-) strand; PAM type: NNNNGHTT; PAM sequence: ACAGGTTT
aagatccagctggagggcca

SEQ ID NO: 34279 - DNA, 20 bp, Artificial Sequence
  Description of Artificial Sequence: Synthetic oligonucleotide
  Target: LAMA2; (-) strand; PAM type: NNNNGHTT; PAM sequence: AAAAGTTT
ctatctcaaacctaatgctt

SEQ ID NO: 34280 - DNA, 20 bp, Artificial Sequence
  Description of Artificial Sequence: Synthetic oligonucleotide
  Target: LAMA2; (-) strand; PAM type: NNNNGHTT; PAM sequence: TAATGCTT
ctccctagctatctcaaacc

SEQ ID NO: 34281 - DNA, 20 bp, Artificial Sequence
  Description of Artificial Sequence: Synthetic oligonucleotide
  Target: LAMA2; (-) strand; PAM type: NNNNGHTT; PAM sequence: ATGGGATT
agaagagatgatgagatacc

SEQ ID NO: 34282 - DNA, 20 bp, Artificial Sequence
  Description of Artificial Sequence: Synthetic oligonucleotide
  Target: LAMA2; (-) strand; PAM type: NNNNGHTT; PAM sequence: AAAGGCTT
tagttttttttttttttaaa

SEQ ID NO: 34283 - DNA, 20 bp, Artificial Sequence
  Description of Artificial Sequence: Synthetic oligonucleotide
  Target: LAMA2; (-) strand; PAM type: NNNNGHTT; PAM sequence: ATTAGTTT
aaacatatattaattctgta

SEQ ID NO: 34284 - DNA, 20 bp, Artificial Sequence
  Description of Artificial Sequence: Synthetic oligonucleotide
  Target: LAMA2; (-) strand; PAM type: NNNNGHTT; PAM sequence: TATAGTTT
agctctcttttttgtttata

SEQ ID NO: 34285 - DNA, 20 bp, Artificial Sequence
  Description of Artificial Sequence: Synthetic oligonucleotide
  Target: LAMA2; (-) strand; PAM type: NNNNGHTT; PAM sequence: TTTTGTTT
attgatgggcaagctctctt

SEQ ID NO: 34286 - DNA, 20 bp, Artificial Sequence
  Description of Artificial Sequence: Synthetic oligonucleotide
  Target: LAMA2; (-) strand; PAM type: NNNNGHTT; PAM sequence: TGTGGATT
ggtactcaaccaattttgca

SEQ ID NO: 34287 - DNA, 20 bp, Artificial Sequence
  Description of Artificial Sequence: Synthetic oligonucleotide
  Target: LAMA2; (-) strand; PAM type: NNNNGHTT; PAM sequence: TGTTGCTT
caaaggaaatttaattcatt

SEQ ID NO: 34288 - DNA, 20 bp, Artificial Sequence
  Description of Artificial Sequence: Synthetic oligonucleotide
  Target: LAMA2; (-) strand; PAM type: NNNNGHTT; PAM sequence: GATTGTTT
tgggaggccgaggtggggag

SEQ ID NO: 34289 - DNA, 20 bp, Artificial Sequence
  Description of Artificial Sequence: Synthetic oligonucleotide
  Target: LAMA2; (-) strand; PAM type: NNNNGHTT; PAM sequence: GGAGGATT
actatgggaggccgaggtgg

SEQ ID NO: 34290 - DNA, 20 bp, Artificial Sequence
  Description of Artificial Sequence: Synthetic oligonucleotide
  Target: LAMA2; (-) strand; PAM type: NNNNGHTT; PAM sequence: ACGAGTTT
acccataccactttataaca

SEQ ID NO: 34291 - DNA, 20 bp, Artificial Sequence
  Description of Artificial Sequence: Synthetic oligonucleotide
  Target: LAMA2; (-) strand; PAM type: NNNNGHTT; PAM sequence: TCTTGATT
agagctaatctttccatcac

SEQ ID NO: 34292 - DNA, 20 bp, Artificial Sequence
  Description of Artificial Sequence: Synthetic oligonucleotide
  Target: LAMA2; (-) strand; PAM type: NNNNGHTT; PAM sequence: CAGTGTTT
gaaatttaaagtaatgttac

SEQ ID NO: 34293 - DNA, 20 bp, Artificial Sequence
  Description of Artificial Sequence: Synthetic oligonucleotide
  Target: LAMA2; (-) strand; PAM type: NNNNGHTT; PAM sequence: AATTGTTT
aaagtttaccttagatcctg

SEQ ID NO: 34294 - DNA, 20 bp, Artificial Sequence
  Description of Artificial Sequence: Synthetic oligonucleotide
  Target: LAMA2; (-) strand; PAM type: NNNNGHTT; PAM sequence: AAAAGTTT
gcaaatatatatacatccta

SEQ ID NO: 34295 - DNA, 20 bp, Artificial Sequence
  Description of Artificial Sequence: Synthetic oligonucleotide
  Target: LAMA2; (-) strand; PAM type: NNNNGHTT; PAM sequence: TTAGGTTT
atttttatgataaaaatgta

SEQ ID NO: 34296 - DNA, 20 bp, Artificial Sequence
  Description of Artificial Sequence: Synthetic oligonucleotide
  Target: LAMA2; (-) strand; PAM type: NNNNGHTT; PAM sequence: TGTAGATT
cttgagatgatttagaatta

SEQ ID NO: 34297 - DNA, 20 bp, Artificial Sequence
  Description of Artificial Sequence: Synthetic oligonucleotide
  Target: LAMA2; (-) strand; PAM type: NNNNGHTT; PAM sequence: AGATGATT
attaattctaatttcacttg

SEQ ID NO: 34298 - DNA, 20 bp, Artificial Sequence
  Description of Artificial Sequence: Synthetic oligonucleotide
  Target: LAMA2; (-) strand; PAM type: NNNNGHTT; PAM sequence: ATTTGTTT
tgaaaattttaacttccaat

SEQ ID NO: 34299 - DNA, 20 bp, Artificial Sequence
  Description of Artificial Sequence: Synthetic oligonucleotide
  Target: LAMA2; (-) strand; PAM type: NNNNGHTT; PAM sequence: TTCAGTTT
taggagtagaagacgaaaaa

SEQ ID NO: 34300 - DNA, 20 bp, Artificial Sequence
  Description of Artificial Sequence: Synthetic oligonucleotide
  Target: LAMA2; (-) strand; PAM type: NNNNGHTT; PAM sequence: TAGTGTTT
ttgggtgacaattttctaga

SEQ ID NO: 34301 - DNA, 20 bp, Artificial Sequence
  Description of Artificial Sequence: Synthetic oligonucleotide
  Target: LAMA2; (-) strand; PAM type: NNNNGHTT; PAM sequence: CTAGGTTT
aatgaagatgaggaagacca

SEQ ID NO: 34302 - DNA, 20 bp, Artificial Sequence
  Description of Artificial Sequence: Synthetic oligonucleotide
  Target: LAMA2; (-) strand; PAM type: NNNNGHTT; PAM sequence: GAATGTTT
atattatatttgttacaagg

SEQ ID NO: 34303 - DNA, 20 bp, Artificial Sequence
  Description of Artificial Sequence: Synthetic oligonucleotide
  Target: LAMA2; (-) strand; PAM type: NNNNGHTT; PAM sequence: TATTGTTT
aaattaactgaaagcaccca

SEQ ID NO: 34304 - DNA, 20 bp, Artificial Sequence
  Description of Artificial Sequence: Synthetic oligonucleotide
  Target: LAMA2; (-) strand; PAM type: NNNNGHTT; PAM sequence: ACTGGATT
ggaaaagtaactgaaaaatt

SEQ ID NO: 34305 - DNA, 20 bp, Artificial Sequence
  Description of Artificial Sequence: Synthetic oligonucleotide
  Target: LAMA2; (-) strand; PAM type: NNNNGHTT; PAM sequence: ACTTGTTT
agaaggctgaacctcgaact

SEQ ID NO: 34306 - DNA, 20 bp, Artificial Sequence
  Description of Artificial Sequence: Synthetic oligonucleotide
  Target: LAMA2; (-) strand; PAM type: NNNNGHTT; PAM sequence: CCCAGATT
tacttatgttccctgctgct

SEQ ID NO: 34307 - DNA, 20 bp, Artificial Sequence
  Description of Artificial Sequence: Synthetic oligonucleotide
  Target: LAMA2; (-) strand; PAM type: NNNNGHTT; PAM sequence: GAAGGATT
gggaactgaatttgtaccag

SEQ ID NO: 34308 - DNA, 20 bp, Artificial Sequence
  Description of Artificial Sequence: Synthetic oligonucleotide
  Target: LAMA2; (-) strand; PAM type: NNNNGHTT; PAM sequence: GTAGGTTT
atgagtcagatttgaagtca

SEQ ID NO: 34309 - DNA, 20 bp, Artificial Sequence
  Description of Artificial Sequence: Synthetic oligonucleotide
  Target: LAMA2; (-) strand; PAM type: NNNNGHTT; PAM sequence: GTCAGATT
ggagaggagaaacatcatga

SEQ ID NO: 34310 - DNA, 20 bp, Artificial Sequence
  Description of Artificial Sequence: Synthetic oligonucleotide
  Target: LAMA2; (-) strand; PAM type: NNNNGHTT; PAM sequence: TCATGATT
ccacaatcccaatgagtgcc

SEQ ID NO: 34311 - DNA, 20 bp, Artificial Sequence
  Description of Artificial Sequence: Synthetic oligonucleotide
  Target: LAMA2; (-) strand; PAM type: NNNNGHTT; PAM sequence: AGTTGATT
cctcttgatattgagagaac

SEQ ID NO: 34312 - DNA, 20 bp, Artificial Sequence
  Description of Artificial Sequence: Synthetic oligonucleotide
  Target: LAMA2; (-) strand; PAM type: NNNNGHTT; PAM sequence: TAAAGTTT
gactgacgtaagttatacat

SEQ ID NO: 34313 - DNA, 20 bp, Artificial Sequence
  Description of Artificial Sequence: Synthetic oligonucleotide
  Target: LAMA2; (-) strand; PAM type: NNNNGHTT; PAM sequence: TCAGGATT
tagtgagaatagtggtatta

SEQ ID NO: 34314 - DNA, 20 bp, Artificial Sequence
  Description of Artificial Sequence: Synthetic oligonucleotide
  Target: LAMA2; (-) strand; PAM type: NNNNGHTT; PAM sequence: GATTGATT
aatagattttaaggaactag

SEQ ID NO: 34315 - DNA, 20 bp, Artificial Sequence
  Description of Artificial Sequence: Synthetic oligonucleotide
  Target: LAMA2; (-) strand; PAM type: NNNNGHTT; PAM sequence: CTAGGATT
aactaatagattttaaggaa

SEQ ID NO: 34316 - DNA, 20 bp, Artificial Sequence
  Description of Artificial Sequence: Synthetic oligonucleotide
  Target: LAMA2; (-) strand; PAM type: NNNNGHTT; PAM sequence: AATAGATT
cagtttcataaggctcaact

SEQ ID NO: 34317 - DNA, 20 bp, Artificial Sequence
  Description of Artificial Sequence: Synthetic oligonucleotide
  Target: LAMA2; (-) strand; PAM type: NNNNGHTT; PAM sequence: GGCAGTTT
ccatttgaaccgacaaaaag

SEQ ID NO: 34318 - DNA, 20 bp, Artificial Sequence
  Description of Artificial Sequence: Synthetic oligonucleotide
  Target: LAMA2; (-) strand; PAM type: NNNNGHTT; PAM sequence: AATTGCTT
taataagttgaaccatatga

SEQ ID NO: 34319 - DNA, 20 bp, Artificial Sequence
  Description of Artificial Sequence: Synthetic oligonucleotide
  Target: LAMA2; (-) strand; PAM type: NNNNGHTT; PAM sequence: TGATGATT
tatccattagaaggccacag

SEQ ID NO: 34320 - DNA, 20 bp, Artificial Sequence
  Description of Artificial Sequence: Synthetic oligonucleotide
  Target: LAMA2; (-) strand; PAM type: NNNNGHTT; PAM sequence: TAAAGCTT
ctcaatactattgtgtttta

SEQ ID NO: 34321 - DNA, 20 bp, Artificial Sequence
  Description of Artificial Sequence: Synthetic oligonucleotide
  Target: LAMA2; (-) strand; PAM type: NNNNGHTT; PAM sequence: TTGTGTTT
agaggaatagctcaatacta

SEQ ID NO: 34322 - DNA, 20 bp, Artificial Sequence
  Description of Artificial Sequence: Synthetic oligonucleotide
  Target: LAMA2; (-) strand; PAM type: NNNNGHTT; PAM sequence: CTTGGATT
tataaatcacattaacagag

SEQ ID NO: 34323 - DNA, 20 bp, Artificial Sequence
  Description of Artificial Sequence: Synthetic oligonucleotide
  Target: LAMA2; (-) strand; PAM type: NNNNGHTT; PAM sequence: CAGAGCTT
tgacttataaatcacattaa

SEQ ID NO: 34324 - DNA, 20 bp, Artificial Sequence
  Description of Artificial Sequence: Synthetic oligonucleotide
  Target: LAMA2; (-) strand; PAM type: NNNNGHTT; PAM sequence: TTATGATT
agaatggatacagctcattt

SEQ ID NO: 34325 - DNA, 20 bp, Artificial Sequence
  Description of Artificial Sequence: Synthetic oligonucleotide
  Target: LAMA2; (-) strand; PAM type: NNNNGHTT; PAM sequence: ACAGGCTT
gcagtgacaacattatgggc

SEQ ID NO: 34326 - DNA, 20 bp, Artificial Sequence
  Description of Artificial Sequence: Synthetic oligonucleotide
  Target: LAMA2; (-) strand; PAM type: NNNNGHTT; PAM sequence: AATCGCTT
tctagaggctgaggaaggag

SEQ ID NO: 34327 - DNA, 20 bp, Artificial Sequence
  Description of Artificial Sequence: Synthetic oligonucleotide
  Target: LAMA2; (-) strand; PAM type: NNNNGHTT; PAM sequence: AAGTGCTT
aaactagtctagaggtcaga

SEQ ID NO: 34328 - DNA, 20 bp, Artificial Sequence
  Description of Artificial Sequence: Synthetic oligonucleotide
  Target: LAMA2; (-) strand; PAM type: NNNNGHTT; PAM sequence: GTTTGATT
catggttaattgggaaaagg

SEQ ID NO: 34329 - DNA, 20 bp, Artificial Sequence
  Description of Artificial Sequence: Synthetic oligonucleotide
  Target: LAMA2; (-) strand; PAM type: NNNNGHTT; PAM sequence: AAGGGTTT
taaacatggttaattgggaa

SEQ ID NO: 34330 - DNA, 20 bp, Artificial Sequence
  Description of Artificial Sequence: Synthetic oligonucleotide
  Target: LAMA2; (-) strand; PAM type: NNNNGHTT; PAM sequence: TAGTGCTT
tcttttcttctcccttgcta

SEQ ID NO: 34331 - DNA, 20 bp, Artificial Sequence
  Description of Artificial Sequence: Synthetic oligonucleotide
  Target: LAMA2; (-) strand; PAM type: NNNNGHTT; PAM sequence: ACTTGTTT
ttgtcagttcaaagcctctt

SEQ ID NO: 34332 - DNA, 20 bp, Artificial Sequence
  Description of Artificial Sequence: Synthetic oligonucleotide
  Target: LAMA2; (-) strand; PAM type: NNNNGHTT; PAM sequence: TCAGGCTT
ttgcaggcaagatacgcgtt

SEQ ID NO: 34333 - DNA, 20 bp, Artificial Sequence
  Description of Artificial Sequence: Synthetic oligonucleotide
  Target: LAMA2; (-) strand; PAM type: NNNNGHTT; PAM sequence: ACGCGTTT
ttgtacattgcaggcaagat

SEQ ID NO: 34334 - DNA, 20 bp, Artificial Sequence
  Description of Artificial Sequence: Synthetic oligonucleotide
  Target: LAMA2; (-) strand; PAM type: NNNNGHTT; PAM sequence: ATAAGTTT
ttactatatgagatgttctg

SEQ ID NO: 34335 - DNA, 20 bp, Artificial Sequence
  Description of Artificial Sequence: Synthetic oligonucleotide
  Target: LAMA2; (-) strand; PAM type: NNNNGHTT; PAM sequence: TTTTGTTT
cattttagaaattgttttgt

SEQ ID NO: 34336 - DNA, 20 bp, Artificial Sequence
  Description of Artificial Sequence: Synthetic oligonucleotide
  Target: LAMA2; (-) strand; PAM type: NNNNGHTT; PAM sequence: TTTTGTTT
agtcatcattttagaaattg

SEQ ID NO: 34337 - DNA, 20 bp, Artificial Sequence
  Description of Artificial Sequence: Synthetic oligonucleotide
  Target: LAMA2; (-) strand; PAM type: NNNNGHTT; PAM sequence: AATTGTTT
cttttagtcatcattttaga

SEQ ID NO: 34338 - DNA, 20 bp, Artificial Sequence
  Description of Artificial Sequence: Synthetic oligonucleotide
  Target: LAMA2; (-) strand; PAM type: NNNNGHTT; PAM sequence: AATGGATT
tctggaagtaaatcttataa

SEQ ID NO: 34339 - DNA, 20 bp, Artificial Sequence
  Description of Artificial Sequence: Synthetic oligonucleotide
  Target: LAMA2; (-) strand; PAM type: NNNNGHTT; PAM sequence: TTCAGCTT
gcttagaaatgatatgccac

SEQ ID NO: 34340 - DNA, 20 bp, Artificial Sequence
  Description of Artificial Sequence: Synthetic oligonucleotide
  Target: LAMA2; (-) strand; PAM type: NNNNGHTT; PAM sequence: AATAGCTT
gatgcaattcaacctacaaa

SEQ ID NO: 34341 - DNA, 20 bp, Artificial Sequence
  Description of Artificial Sequence: Synthetic oligonucleotide
  Target: LAMA2; (-) strand; PAM type: NNNNGHTT; PAM sequence: CACAGCTT
catctctgcctccatcttta

SEQ ID NO: 34342 - DNA, 20 bp, Artificial Sequence
  Description of Artificial Sequence: Synthetic oligonucleotide
  Target: LAMA2; (-) strand; PAM type: NNNNGHTT; PAM sequence: CTTGGCTT
tgcttctttccttggcattg

SEQ ID NO: 34343 - DNA, 20 bp, Artificial Sequence
  Description of Artificial Sequence: Synthetic oligonucleotide
  Target: LAMA2; (-) strand; PAM type: NNNNGHTT; PAM sequence: CATTGCTT
gtccatgcttctttccttgg

SEQ ID NO: 34344 - DNA, 20 bp, Artificial Sequence
  Description of Artificial Sequence: Synthetic oligonucleotide
  Target: LAMA2; (-) strand; PAM type: NNNNGHTT; PAM sequence: CCATGCTT
gacacagtaagaaaaaatgt

SEQ ID NO: 34345 - DNA, 20 bp, Artificial Sequence
  Description of Artificial Sequence: Synthetic oligonucleotide
  Target: LAMA2; (-) strand; PAM type: NNNNGHTT; PAM sequence: ATGTGCTT
ccataaaaaatgatgagttc

SEQ ID NO: 34346 - DNA, 20 bp, Artificial Sequence
  Description of Artificial Sequence: Synthetic oligonucleotide
  Target: LAMA2; (-) strand; PAM type: NNNNGHTT; PAM sequence: ACTAGATT
caaatgtccaacaaagatag

SEQ ID NO: 34347 - DNA, 20 bp, Artificial Sequence
  Description of Artificial Sequence: Synthetic oligonucleotide
  Target: LAMA2; (-) strand; PAM type: NNNNGHTT; PAM sequence: GTATGTTT
ctataaagacacatacacag

SEQ ID NO: 34348 - DNA, 20 bp, Artificial Sequence
  Description of Artificial Sequence: Synthetic oligonucleotide
  Target: LAMA2; (-) strand; PAM type: NNNNGHTT; PAM sequence: TGGCGATT
aaccattgtggaagtcagtg

SEQ ID NO: 34349 - DNA, 20 bp, Artificial Sequence
  Description of Artificial Sequence: Synthetic oligonucleotide
  Target: LAMA2; (-) strand; PAM type: NNNNGHTT; PAM sequence: AAGAGCTT
aatgggatctaattaaacta

SEQ ID NO: 34350 - DNA, 20 bp, Artificial Sequence
  Description of Artificial Sequence: Synthetic oligonucleotide
  Target: LAMA2; (-) strand; PAM type: NNNNGHTT; PAM sequence: GATGGATT
ttatacaaaaatcaattcaa

SEQ ID NO: 34351 - DNA, 20 bp, Artificial Sequence
  Description of Artificial Sequence: Synthetic oligonucleotide
  Target: LAMA2; (-) strand; PAM type: NNNNGHTT; PAM sequence: AAAGGATT
gagaaaaacaagcaatgcgg

SEQ ID NO: 34352 - DNA, 20 bp, Artificial Sequence
  Description of Artificial Sequence: Synthetic oligonucleotide
  Target: LAMA2; (-) strand; PAM type: NNNNGHTT; PAM sequence: TACAGATT
ccatactgcccaaggtaatt

SEQ ID NO: 34353 - DNA, 20 bp, Artificial Sequence
  Description of Artificial Sequence: Synthetic oligonucleotide
  Target: LAMA2; (-) strand; PAM type: NNNNGHTT; PAM sequence: GGTGGCTT
taataaatgaccacaaacta

SEQ ID NO: 34354 - DNA, 20 bp, Artificial Sequence
  Description of Artificial Sequence: Synthetic oligonucleotide
  Target: LAMA2; (-) strand; PAM type: NNNNGHTT; PAM sequence: CTTAGTTT
ttgtttcctaatttaggtat

SEQ ID NO: 34355 - DNA, 20 bp, Artificial Sequence
  Description of Artificial Sequence: Synthetic oligonucleotide
  Target: LAMA2; (-) strand; PAM type: NNNNGHTT; PAM sequence: ATTTGTTT
tccccttttaatatagttat

SEQ ID NO: 34356 - DNA, 20 bp, Artificial Sequence
  Description of Artificial Sequence: Synthetic oligonucleotide
  Target: LAMA2; (-) strand; PAM type: NNNNGHTT; PAM sequence: TAGTGATT
atcagactactacagcagat

SEQ ID NO: 34357 - DNA, 20 bp, Artificial Sequence
  Description of Artificial Sequence: Synthetic oligonucleotide
  Target: LAMA2; (-) strand; PAM type: NNNNGHTT; PAM sequence: AGCAGATT
agcatcaatcagactactac

SEQ ID NO: 34358 - DNA, 20 bp, Artificial Sequence
  Description of Artificial Sequence: Synthetic oligonucleotide
  Target: LAMA2; (-) strand; PAM type: NNNNGHTT; PAM sequence: CATGGCTT
gggtttattcattcctgcag

SEQ ID NO: 34359 - DNA, 20 bp, Artificial Sequence
  Description of Artificial Sequence: Synthetic oligonucleotide
  Target: LAMA2; (-) strand; PAM type: NNNNGHTT; PAM sequence: GGGGGTTT
atgctaagattttaagattt

SEQ ID NO: 34360 - DNA, 20 bp, Artificial Sequence
  Description of Artificial Sequence: Synthetic oligonucleotide
  Target: LAMA2; (-) strand; PAM type: NNNNGHTT; PAM sequence: TTAAGATT
acctctataatgctaagatt

SEQ ID NO: 34361 - DNA, 20 bp, Artificial Sequence
  Description of Artificial Sequence: Synthetic oligonucleotide
  Target: LAMA2; (-) strand; PAM type: NNNNGHTT; PAM sequence: CTAAGATT
agaaataaacctctataatg

SEQ ID NO: 34362 - DNA, 20 bp, Artificial Sequence
  Description of Artificial Sequence: Synthetic oligonucleotide
  Target: LAMA2; (-) strand; PAM type: NNNNGHTT; PAM sequence: CTTAGATT
aagaggggcatctgactatt

SEQ ID NO: 34363 - DNA, 20 bp, Artificial Sequence
  Description of Artificial Sequence: Synthetic oligonucleotide
  Target: LAMA2; (-) strand; PAM type: NNNNGHTT; PAM sequence: AATAGATT
tgagagcatagtatgatttt

SEQ ID NO: 34364 - DNA, 20 bp, Artificial Sequence
  Description of Artificial Sequence: Synthetic oligonucleotide
  Target: LAMA2; (-) strand; PAM type: NNNNGHTT; PAM sequence: GTATGATT
ctagaatctttgagagcata

SEQ ID NO: 34365 - DNA, 20 bp, Artificial Sequence
  Description of Artificial Sequence: Synthetic oligonucleotide
  Target: LAMA2; (-) strand; PAM type: NNNNGHTT; PAM sequence: AGAAGCTT
gtgtgtatatatatatgaaa

SEQ ID NO: 34366 - DNA, 20 bp, Artificial Sequence
  Description of Artificial Sequence: Synthetic oligonucleotide
  Target: LAMA2; (-) strand; PAM type: NNNNGHTT; PAM sequence: AAGAGTTT
aggaatgattttggatggaa

SEQ ID NO: 34367 - DNA, 20 bp, Artificial Sequence
  Description of Artificial Sequence: Synthetic oligonucleotide
  Target: LAMA2; (-) strand; PAM type: NNNNGHTT; PAM sequence: GAATGATT
actaataaatgtttaaatag

SEQ ID NO: 34368 - DNA, 20 bp, Artificial Sequence
  Description of Artificial Sequence: Synthetic oligonucleotide
  Target: LAMA2; (-) strand; PAM type: NNNNGHTT; PAM sequence: AAATGTTT
tattagaattgaacactaat

SEQ ID NO: 34369 - DNA, 20 bp, Artificial Sequence
  Description of Artificial Sequence: Synthetic oligonucleotide
  Target: LAMA2; (-) strand; PAM type: NNNNGHTT; PAM sequence: GGTTGTTT
tcaaaacaatcaaaatggca

SEQ ID NO: 34370 - DNA, 20 bp, Artificial Sequence
  Description of Artificial Sequence: Synthetic oligonucleotide
  Target: LAMA2; (-) strand; PAM type: NNNNGHTT; PAM sequence: AGGGGATT
aaagctttagtttattatac

SEQ ID NO: 34371 - DNA, 20 bp, Artificial Sequence
  Description of Artificial Sequence: Synthetic oligonucleotide
  Target: LAMA2; (-) strand; PAM type: NNNNGHTT; PAM sequence: TTTAGTTT
aagaaggatgttaaaaaagc

SEQ ID NO: 34372 - DNA, 20 bp, Artificial Sequence
  Description of Artificial Sequence: Synthetic oligonucleotide
  Target: LAMA2; (-) strand; PAM type: NNNNGHTT; PAM sequence: AAAAGCTT
gggattaagaaggatgttaa

SEQ ID NO: 34373 - DNA, 20 bp, Artificial Sequence
  Description of Artificial Sequence: Synthetic oligonucleotide
  Target: LAMA2; (-) strand; PAM type: NNNNGHTT; PAM sequence: GAGGGATT
ggagtataaatttttcatat

SEQ ID NO: 34374 - DNA, 20 bp, Artificial Sequence
  Description of Artificial Sequence: Synthetic oligonucleotide
  Target: LAMA2; (-) strand; PAM type: NNNNGHTT; PAM sequence: TTGAGCTT
gcaccctagctacctgtaca

SEQ ID NO: 34375 - DNA, 20 bp, Artificial Sequence
  Description of Artificial Sequence: Synthetic oligonucleotide
  Target: LAMA2; (-) strand; PAM type: NNNNGHTT; PAM sequence: ACATGATT
ttgtgtaaaaaataattgca

SEQ ID NO: 34376 - DNA, 20 bp, Artificial Sequence
  Description of Artificial Sequence: Synthetic oligonucleotide
  Target: LAMA2; (-) strand; PAM type: NNNNGHTT; PAM sequence: AAAGGCTT
ttaagcatgtatattctgta

SEQ ID NO: 34377 - DNA, 20 bp, Artificial Sequence
  Description of Artificial Sequence: Synthetic oligonucleotide
  Target: LAMA2; (-) strand; PAM type: NNNNGHTT; PAM sequence: TAAAGCTT
ggcagccatcctaatgggta

SEQ ID NO: 34378 - DNA, 20 bp, Artificial Sequence
  Description of Artificial Sequence: Synthetic oligonucleotide
  Target: LAMA2; (-) strand; PAM type: NNNNGHTT; PAM sequence: TAAGGCTT
atattcccatcaacaatgca

SEQ ID NO: 34379 - DNA, 20 bp, Artificial Sequence
  Description of Artificial Sequence: Synthetic oligonucleotide
  Target: LAMA2; (-) strand; PAM type: NNNNGHTT; PAM sequence: CCATGATT
aggaccctccatactgtttt

SEQ ID NO: 34380 - DNA, 20 bp, Artificial Sequence
  Description of Artificial Sequence: Synthetic oligonucleotide
  Target: LAMA2; (-) strand; PAM type: NNNNGHTT; PAM sequence: TACTGTTT
aatgttttgaggaccctcca

SEQ ID NO: 34381 - DNA, 20 bp, Artificial Sequence
  Description of Artificial Sequence: Synthetic oligonucleotide
  Target: LAMA2; (-) strand; PAM type: NNNNGHTT; PAM sequence: TAATGTTT
tcctattgtaattctatttg

SEQ ID NO: 34382 - DNA, 20 bp, Artificial Sequence
  Description of Artificial Sequence: Synthetic oligonucleotide
  Target: LAMA2; (-) strand; PAM type: NNNNGHTT; PAM sequence: CCCTGCTT
gtataaatatcttttcagga

SEQ ID NO: 34383 - DNA, 20 bp, Artificial Sequence
  Description of Artificial Sequence: Synthetic oligonucleotide
  Target: LAMA2; (-) strand; PAM type: NNNNGHTT; PAM sequence: CCAGGTTT
atctattcgtctgtcaacag

SEQ ID NO: 34384 - DNA, 20 bp, Artificial Sequence
  Description of Artificial Sequence: Synthetic oligonucleotide
  Target: LAMA2; (-) strand; PAM type: NNNNGHTT; PAM sequence: CTATGATT
caccattatactttctgtct

SEQ ID NO: 34385 - DNA, 20 bp, Artificial Sequence
  Description of Artificial Sequence: Synthetic oligonucleotide
  Target: LAMA2; (-) strand; PAM type: NNNNGHTT; PAM sequence: GAATGCTT
atcaacaccattcacatcca

SEQ ID NO: 34386 - DNA, 20 bp, Artificial Sequence
  Description of Artificial Sequence: Synthetic oligonucleotide
  Target: LAMA2; (-) strand; PAM type: NNNNGHTT; PAM sequence: ATTGGTTT
cagaactaaagaataaagac

SEQ ID NO: 34387 - DNA, 20 bp, Artificial Sequence
  Description of Artificial Sequence: Synthetic oligonucleotide
  Target: LAMA2; (-) strand; PAM type: NNNNGHTT; PAM sequence: CTCCGTTT
aggcccaggaagtttccctg

SEQ ID NO: 34388 - DNA, 20 bp, Artificial Sequence
  Description of Artificial Sequence: Synthetic oligonucleotide
  Target: LAMA2; (-) strand; PAM type: NNNNGHTT; PAM sequence: GGAAGTTT
gcctattcagtttaggccca

SEQ ID NO: 34389 - DNA, 20 bp, Artificial Sequence
  Description of Artificial Sequence: Synthetic oligonucleotide
  Target: LAMA2; (-) strand; PAM type: NNNNGHTT; PAM sequence: TTCAGTTT
gaagagaataaaatggccta

SEQ ID NO: 34390 - DNA, 20 bp, Artificial Sequence
  Description of Artificial Sequence: Synthetic oligonucleotide
  Target: LAMA2; (-) strand; PAM type: NNNNGHTT; PAM sequence: AAGAGTTT
ctctattgccaccatgacca

SEQ ID NO: 34391 - DNA, 20 bp, Artificial Sequence
  Description of Artificial Sequence: Synthetic oligonucleotide
  Target: LAMA2; (-) strand; PAM type: NNNNGHTT; PAM sequence: TGGGGATT
atacatatctgagttacctc

SEQ ID NO: 34392 - DNA, 20 bp, Artificial Sequence
  Description of Artificial Sequence: Synthetic oligonucleotide
  Target: LAMA2; (-) strand; PAM type: NNNNGHTT; PAM sequence: ATCAGATT
actttaaatattgagaacaa

SEQ ID NO: 34393 - DNA, 20 bp, Artificial Sequence
  Description of Artificial Sequence: Synthetic oligonucleotide
  Target: LAMA2; (-) strand; PAM type: NNNNGHTT; PAM sequence: TAGAGTTT
ttgagagcctactaaagcat

SEQ ID NO: 34394 - DNA, 20 bp, Artificial Sequence
  Description of Artificial Sequence: Synthetic oligonucleotide
  Target: LAMA2; (-) strand; PAM type: NNNNGHTT; PAM sequence: AGCAGTTT
gacagaacacttgagctgtc

SEQ ID NO: 34395 - DNA, 20 bp, Artificial Sequence
  Description of Artificial Sequence: Synthetic oligonucleotide
  Target: LAMA2; (-) strand; PAM type: NNNNGHTT; PAM sequence: TCTGGATT
gtggaatatttaactgttat

SEQ ID NO: 34396 - DNA, 20 bp, Artificial Sequence
  Description of Artificial Sequence: Synthetic oligonucleotide
  Target: LAMA2; (-) strand; PAM type: NNNNGHTT; PAM sequence: GGAGGATT
ttcctgaatttatctcagaa

SEQ ID NO: 34397 - DNA, 20 bp, Artificial Sequence
  Description of Artificial Sequence: Synthetic oligonucleotide
  Target: LAMA2; (-) strand; PAM type: NNNNGHTT; PAM sequence: GTCAGATT
caaaagggctgaggagaaag

SEQ ID NO: 34398 - DNA, 20 bp, Artificial Sequence
  Description of Artificial Sequence: Synthetic oligonucleotide
  Target: LAMA2; (-) strand; PAM type: NNNNGHTT; PAM sequence: CTGAGCTT
actaaaacatcttttcaact

SEQ ID NO: 34399 - DNA, 20 bp, Artificial Sequence
  Description of Artificial Sequence: Synthetic oligonucleotide
  Target: LAMA2; (-) strand; PAM type: NNNNGHTT; PAM sequence: ATTTGTTT
cagagctgaagtgtactgga

SEQ ID NO: 34400 - DNA, 20 bp, Artificial Sequence
  Description of Artificial Sequence: Synthetic oligonucleotide
  Target: LAMA2; (-) strand; PAM type: NNNNGHTT; PAM sequence: ATAAGATT
caaactggatgtcaacctta

SEQ ID NO: 34401 - DNA, 20 bp, Artificial Sequence
  Description of Artificial Sequence: Synthetic oligonucleotide
  Target: LAMA2; (-) strand; PAM type: NNNNGHTT; PAM sequence: GATGGTTT
tcactgttttgtgcttgctc

SEQ ID NO: 34402 - DNA, 20 bp, Artificial Sequence
  Description of Artificial Sequence: Synthetic oligonucleotide
  Target: LAMA2; (-) strand; PAM type: NNNNGHTT; PAM sequence: TTGTGCTT
cagctctcagcttcactgtt

SEQ ID NO: 34403 - DNA, 20 bp, Artificial Sequence
  Description of Artificial Sequence: Synthetic oligonucleotide
  Target: LAMA2; (-) strand; PAM type: NNNNGHTT; PAM sequence: CACTGTTT
tgttctgcagctctcagctt

SEQ ID NO: 34404 - DNA, 20 bp, Artificial Sequence
  Description of Artificial Sequence: Synthetic oligonucleotide
  Target: LAMA2; (-) strand; PAM type: NNNNGHTT; PAM sequence: CTCAGCTT
gatctctatgttctgcagct

SEQ ID NO: 34405 - DNA, 20 bp, Artificial Sequence
  Description of Artificial Sequence: Synthetic oligonucleotide
  Target: LAMA2; (-) strand; PAM type: NNNNGHTT; PAM sequence: AAATGCTT
agagtggtgtgttgaccagg

SEQ ID NO: 34406 - DNA, 20 bp, Artificial Sequence
  Description of Artificial Sequence: Synthetic oligonucleotide
  Target: LAMA2; (-) strand; PAM type: NNNNGHTT; PAM sequence: AAGAGTTT
agtgcatttgttatcaagaa

SEQ ID NO: 34407 - DNA, 20 bp, Artificial Sequence
  Description of Artificial Sequence: Synthetic oligonucleotide
  Target: LAMA2; (-) strand; PAM type: NNNNGHTT; PAM sequence: CGGAGCTT
aggagatagaaagttagaga

SEQ ID NO: 34408 - DNA, 20 bp, Artificial Sequence
  Description of Artificial Sequence: Synthetic oligonucleotide
  Target: LAMA2; (-) strand; PAM type: NNNNGHTT; PAM sequence: TTAAGTTT
agagggagaatgtttagctg

SEQ ID NO: 34409 - DNA, 20 bp, Artificial Sequence
  Description of Artificial Sequence: Synthetic oligonucleotide
  Target: LAMA2; (-) strand; PAM type: NNNNGHTT; PAM sequence: GAATGTTT
aatgggatacttcagaggga

SEQ ID NO: 34410 - DNA, 20 bp, Artificial Sequence
  Description of Artificial Sequence: Synthetic oligonucleotide
  Target: LAMA2; (-) strand; PAM type: NNNNGHTT; PAM sequence: AATGGTTT
tagggatctagtaggaatct

SEQ ID NO: 34411 - DNA, 20 bp, Artificial Sequence
  Description of Artificial Sequence: Synthetic oligonucleotide
  Target: LAMA2; (-) strand; PAM type: NNNNGHTT; PAM sequence: AAGTGTTT
aacaactttgaaactggaat

SEQ ID NO: 34412 - DNA, 20 bp, Artificial Sequence
  Description of Artificial Sequence: Synthetic oligonucleotide
  Target: LAMA2; (-) strand; PAM type: NNNNGHTT; PAM sequence: AAGTGATT
ttagtcaaagaaggattatt

SEQ ID NO: 34413 - DNA, 20 bp, Artificial Sequence
  Description of Artificial Sequence: Synthetic oligonucleotide
  Target: LAMA2; (-) strand; PAM type: NNNNGHTT; PAM sequence: GAAGGATT
atttcattgtcttagtcaaa

SEQ ID NO: 34414 - DNA, 20 bp, Artificial Sequence
  Description of Artificial Sequence: Synthetic oligonucleotide
  Target: LAMA2; (-) strand; PAM type: NNNNGHTT; PAM sequence: TGCTGATT
aaagacctataagcaaatgg

SEQ ID NO: 34415 - DNA, 20 bp, Artificial Sequence
  Description of Artificial Sequence: Synthetic oligonucleotide
  Target: LAMA2; (-) strand; PAM type: NNNNGHTT; PAM sequence: AGAGGCTT
ctccccattgcctgtcccag

SEQ ID NO: 34416 - DNA, 20 bp, Artificial Sequence
  Description of Artificial Sequence: Synthetic oligonucleotide
  Target: LAMA2; (-) strand; PAM type: NNNNGHTT; PAM sequence: GACTGCTT
tacattgattcctttatgat

SEQ ID NO: 34417 - DNA, 20 bp, Artificial Sequence
  Description of Artificial Sequence: Synthetic oligonucleotide
  Target: LAMA2; (-) strand; PAM type: NNNNGHTT; PAM sequence: CATTGATT
aagtcactatgctgaatgta

SEQ ID NO: 34418 - DNA, 20 bp, Artificial Sequence
  Description of Artificial Sequence: Synthetic oligonucleotide
  Target: LAMA2; (-) strand; PAM type: NNNNGHTT; PAM sequence: CTGTGCTT
gtctgagacttctcatacct

SEQ ID NO: 34419 - DNA, 20 bp, Artificial Sequence
  Description of Artificial Sequence: Synthetic oligonucleotide
  Target: LAMA2; (-) strand; PAM type: NNNNGHTT; PAM sequence: CAGAGATT
aggaccaatagcatctgtgc

SEQ ID NO: 34420 - DNA, 20 bp, Artificial Sequence
  Description of Artificial Sequence: Synthetic oligonucleotide
  Target: LAMA2; (-) strand; PAM type: NNNNGHTT; PAM sequence: GTTTGATT
cagtgaacctaattaaacat

SEQ ID NO: 34421 - DNA, 20 bp, Artificial Sequence
  Description of Artificial Sequence: Synthetic oligonucleotide
  Target: LAMA2; (-) strand; PAM type: NNNNGHTT; PAM sequence: ACATGTTT
agagcagtgaacctaattaa

SEQ ID NO: 34422 - DNA, 20 bp, Artificial Sequence
  Description of Artificial Sequence: Synthetic oligonucleotide
  Target: LAMA2; (-) strand; PAM type: NNNNGHTT; PAM sequence: CTATGATT
attctaagtatgatttaaga

SEQ ID NO: 34423 - DNA, 20 bp, Artificial Sequence
  Description of Artificial Sequence: Synthetic oligonucleotide
  Target: LAMA2; (-) strand; PAM type: NNNNGHTT; PAM sequence: GTATGATT
taaataatatagtattctaa

SEQ ID NO: 34424 - DNA, 20 bp, Artificial Sequence
  Description of Artificial Sequence: Synthetic oligonucleotide
  Target: LAMA2; (-) strand; PAM type: NNNNGHTT; PAM sequence: ATTGGTTT
aacattttgttgaaatagat

SEQ ID NO: 34425 - DNA, 20 bp, Artificial Sequence
  Description of Artificial Sequence: Synthetic oligonucleotide
  Target: LAMA2; (-) strand; PAM type: NNNNGHTT; PAM sequence: AGCTGTTT
cctttggatttagtttcatc

SEQ ID NO: 34426 - DNA, 20 bp, Artificial Sequence
  Description of Artificial Sequence: Synthetic oligonucleotide
  Target: LAMA2; (-) strand; PAM type: NNNNGHTT; PAM sequence: TTTAGTTT
gtctttgtcatacctttgga

SEQ ID NO: 34427 - DNA, 20 bp, Artificial Sequence
  Description of Artificial Sequence: Synthetic oligonucleotide
  Target: LAMA2; (-) strand; PAM type: NNNNGHTT; PAM sequence: TTTGGATT
tgagtcgtctttgtcatacc

SEQ ID NO: 34428 - DNA, 20 bp, Artificial Sequence
  Description of Artificial Sequence: Synthetic oligonucleotide
  Target: LAMA2; (-) strand; PAM type: NNNNGHTT; PAM sequence: ACATGCTT
ccttgaacggctttatgggc

SEQ ID NO: 34429 - DNA, 20 bp, Artificial Sequence
  Description of Artificial Sequence: Synthetic oligonucleotide
  Target: LAMA2; (-) strand; PAM type: NNNNGHTT; PAM sequence: AACGGCTT
gacctccttccctctccttg

SEQ ID NO: 34430 - DNA, 20 bp, Artificial Sequence
  Description of Artificial Sequence: Synthetic oligonucleotide
  Target: LAMA2; (-) strand; PAM type: NNNNGHTT; PAM sequence: CACTGATT
ttctgatgagcattactatt

SEQ ID NO: 34431 - DNA, 20 bp, Artificial Sequence
  Description of Artificial Sequence: Synthetic oligonucleotide
  Target: LAMA2; (-) strand; PAM type: NNNNGHTT; PAM sequence: CTTTGTTT
gatcaaatgtatggacttgg

SEQ ID NO: 34432 - DNA, 20 bp, Artificial Sequence
  Description of Artificial Sequence: Synthetic oligonucleotide
  Target: LAMA2; (-) strand; PAM type: NNNNGHTT; PAM sequence: CTTGGCTT
caactgatcaaatgtatgga

SEQ ID NO: 34433 - DNA, 20 bp, Artificial Sequence
  Description of Artificial Sequence: Synthetic oligonucleotide
  Target: LAMA2; (-) strand; PAM type: NNNNGHTT; PAM sequence: AGTAGCTT
gctccttctgagctggaatg

SEQ ID NO: 34434 - DNA, 20 bp, Artificial Sequence
  Description of Artificial Sequence: Synthetic oligonucleotide
  Target: LAMA2; (-) strand; PAM type: NNNNGHTT; PAM sequence: ATGGGCTT
ttggcttcttgaatgcatat

SEQ ID NO: 34435 - DNA, 20 bp, Artificial Sequence
  Description of Artificial Sequence: Synthetic oligonucleotide
  Target: LAMA2; (-) strand; PAM type: NNNNGHTT; PAM sequence: ATTGGCTT
atccacagctagaggatacc

SEQ ID NO: 34436 - DNA, 20 bp, Artificial Sequence
  Description of Artificial Sequence: Synthetic oligonucleotide
  Target: LAMA2; (-) strand; PAM type: NNNNGHTT; PAM sequence: TGTGGATT
aacgctgctgcggtccacag

SEQ ID NO: 34437 - DNA, 20 bp, Artificial Sequence
  Description of Artificial Sequence: Synthetic oligonucleotide
  Target: LAMA2; (-) strand; PAM type: NNNNGHTT; PAM sequence: CAGAGTTT
ggatcctgtaaatccctatc

SEQ ID NO: 34438 - DNA, 20 bp, Artificial Sequence
  Description of Artificial Sequence: Synthetic oligonucleotide
  Target: LAMA2; (-) strand; PAM type: NNNNGHTT; PAM sequence: AGGAGTTT
tatggagataattgtcgctc

SEQ ID NO: 34439 - DNA, 20 bp, Artificial Sequence
  Description of Artificial Sequence: Synthetic oligonucleotide
  Target: LAMA2; (-) strand; PAM type: NNNNGHTT; PAM sequence: AAGCGCTT
tgagcaggtcagcatcgtgg

SEQ ID NO: 34440 - DNA, 20 bp, Artificial Sequence
  Description of Artificial Sequence: Synthetic oligonucleotide
  Target: LAMA2; (-) strand; PAM type: NNNNGHTT; PAM sequence: GTTGGCTT
attgcccttgatttcttggc

SEQ ID NO: 34441 - DNA, 20 bp, Artificial Sequence
  Description of Artificial Sequence: Synthetic oligonucleotide
  Target: LAMA2; (-) strand; PAM type: NNNNGHTT; PAM sequence: CCTTGATT
aggtttcatcgggtgattgc

SEQ ID NO: 34442 - DNA, 20 bp, Artificial Sequence
  Description of Artificial Sequence: Synthetic oligonucleotide
  Target: LAMA2; (-) strand; PAM type: NNNNGHTT; PAM sequence: GGGTGATT
tctgaccttgaggtttcatc

SEQ ID NO: 34443 - DNA, 20 bp, Artificial Sequence
  Description of Artificial Sequence: Synthetic oligonucleotide
  Target: LAMA2; (-) strand; PAM type: NNNNGHTT; PAM sequence: TGAGGTTT
gaattgggaaggtctgacct

SEQ ID NO: 34444 - DNA, 20 bp, Artificial Sequence
  Description of Artificial Sequence: Synthetic oligonucleotide
  Target: LAMA2; (-) strand; PAM type: NNNNGHTT; PAM sequence: CTACGATT
acacgttttccaatatccag

SEQ ID NO: 34445 - DNA, 20 bp, Artificial Sequence
  Description of Artificial Sequence: Synthetic oligonucleotide
  Target: LAMA2; (-) strand; PAM type: NNNNGHTT; PAM sequence: ACACGTTT
caggagacagttgtggtttt

SEQ ID NO: 34446 - DNA, 20 bp, Artificial Sequence
  Description of Artificial Sequence: Synthetic oligonucleotide
  Target: LAMA2; (-) strand; PAM type: NNNNGHTT; PAM sequence: TGTGGTTT
gttggaagtcaggagacagt

SEQ ID NO: 34447 - DNA, 20 bp, Artificial Sequence
  Description of Artificial Sequence: Synthetic oligonucleotide
  Target: LAMA2; (-) strand; PAM type: NNNNGHTT; PAM sequence: GCAAGTTT
tcactcgtggaagtcttcag

SEQ ID NO: 34448 - DNA, 20 bp, Artificial Sequence
  Description of Artificial Sequence: Synthetic oligonucleotide
  Target: LAMA2; (-) strand; PAM type: NNNNGHTT; PAM sequence: TCCTGCTT
ggtggggctgtgggccgcgc

SEQ ID NO: 34449 - DNA, 20 bp, Artificial Sequence
  Description of Artificial Sequence: Synthetic oligonucleotide
  Target: LAMA2; (-) strand; PAM type: NNNNGHTT; PAM sequence: TGCTGATT
gccctgtgcgggctgtgggc

SEQ ID NO: 34450 - DNA, 20 bp, Artificial Sequence
  Description of Artificial Sequence: Synthetic oligonucleotide
  Target: LAMA2; (-) strand; PAM type: NNNNGHTT; PAM sequence: ACTGGCTT
tatagcatggcgaattatgc

SEQ ID NO: 34451 - DNA, 20 bp, Artificial Sequence
  Description of Artificial Sequence: Synthetic oligonucleotide
  Target: LAMA2; (-) strand; PAM type: NNNNGHTT; PAM sequence: TGTGGATT
actgcagactccaaagtctc

SEQ ID NO: 34452 - DNA, 20 bp, Artificial Sequence
  Description of Artificial Sequence: Synthetic oligonucleotide
  Target: LAMA2; (-) strand; PAM type: NNNNGHTT; PAM sequence: GAAAGATT
ataattagagttctatttca

SEQ ID NO: 34453 - DNA, 20 bp, Artificial Sequence
  Description of Artificial Sequence: Synthetic oligonucleotide
  Target: LAMA2; (-) strand; PAM type: NNNNGHTT; PAM sequence: CAAAGATT
gaagataacagggaaatatt

SEQ ID NO: 34454 - DNA, 20 bp, Artificial Sequence
  Description of Artificial Sequence: Synthetic oligonucleotide
  Target: LAMA2; (-) strand; PAM type: NNNNGHTT; PAM sequence: GGGTGTTT
tgtacacgtagggaaaccgt

SEQ ID NO: 34455 - DNA, 20 bp, Artificial Sequence
  Description of Artificial Sequence: Synthetic oligonucleotide
  Target: LAMA2; (-) strand; PAM type: NNNNGHTT; PAM sequence: AGGTGTTT
tctttgttcctttgggagga

SEQ ID NO: 34456 - DNA, 20 bp, Artificial Sequence
  Description of Artificial Sequence: Synthetic oligonucleotide
  Target: LAMA2; (-) strand; PAM type: NNNNGHTT; PAM sequence: TCTGGCTT
aaatggtccaattgctaaaa

SEQ ID NO: 34457 - DNA, 20 bp, Artificial Sequence
  Description of Artificial Sequence: Synthetic oligonucleotide
  Target: LAMA2; (-) strand; PAM type: NNNNGHTT; PAM sequence: TTTTGTTT
tatcctttatgataaatttc

SEQ ID NO: 34458 - DNA, 20 bp, Artificial Sequence
  Description of Artificial Sequence: Synthetic oligonucleotide
  Target: LAMA2; (-) strand; PAM type: NNNNGHTT; PAM sequence: GGTAGTTT
tgatttctgaagaaaaaaac

SEQ ID NO: 34459 - DNA, 20 bp, Artificial Sequence
  Description of Artificial Sequence: Synthetic oligonucleotide
  Target: LAMA2; (-) strand; PAM type: NNNNGHTT; PAM sequence: TTGTGATT
tattggcaacatttgcctcg

SEQ ID NO: 34460 - DNA, 20 bp, Artificial Sequence
  Description of Artificial Sequence: Synthetic oligonucleotide
  Target: LAMA2; (-) strand; PAM type: NNNNGHTT; PAM sequence: TTATGTTT
tcagttcatttctcagatat

SEQ ID NO: 34461 - DNA, 20 bp, Artificial Sequence
  Description of Artificial Sequence: Synthetic oligonucleotide
  Target: LAMA2; (-) strand; PAM type: NNNNGHTT; PAM sequence: TAAGGATT
cctgtaccattcatgtcctg

SEQ ID NO: 34462 - DNA, 20 bp, Artificial Sequence
  Description of Artificial Sequence: Synthetic oligonucleotide
  Target: LAMA2; (-) strand; PAM type: NNNNGHTT; PAM sequence: ATAAGATT
cttagaaaaaataattttta

SEQ ID NO: 34463 - DNA, 20 bp, Artificial Sequence
  Description of Artificial Sequence: Synthetic oligonucleotide
  Target: LAMA2; (-) strand; PAM type: NNNNGHTT; PAM sequence: AAATGCTT
tcaaaactgaagccacaaag

SEQ ID NO: 34464 - DNA, 20 bp, Artificial Sequence
  Description of Artificial Sequence: Synthetic oligonucleotide
  Target: LAMA2; (-) strand; PAM type: NNNNGHTT; PAM sequence: AATTGTTT
atgtaatttttatttgttta

SEQ ID NO: 34465 - DNA, 20 bp, Artificial Sequence
  Description of Artificial Sequence: Synthetic oligonucleotide
  Target: LAMA2; (-) strand; PAM type: NNNNGHTT; PAM sequence: ATTTGTTT
aattctgtaatgtaattttt

SEQ ID NO: 34466 - DNA, 20 bp, Artificial Sequence
  Description of Artificial Sequence: Synthetic oligonucleotide
  Target: LAMA2; (-) strand; PAM type: NNNNGHTT; PAM sequence: AAGAGTTT
taacagtccccgtggaaagt

SEQ ID NO: 34467 - DNA, 20 bp, Artificial Sequence
  Description of Artificial Sequence: Synthetic oligonucleotide
  Target: LAMA2; (-) strand; PAM type: NNNNGHTT; PAM sequence: AACAGATT
agttaaattaaaagaataag

SEQ ID NO: 34468 - DNA, 20 bp, Artificial Sequence
  Description of Artificial Sequence: Synthetic oligonucleotide
  Target: LAMA2; (-) strand; PAM type: NNNNGHTT; PAM sequence: TGGTGCTT
catatacagcaaagaaggat

SEQ ID NO: 34469 - DNA, 20 bp, Artificial Sequence
  Description of Artificial Sequence: Synthetic oligonucleotide
  Target: LAMA2; (-) strand; PAM type: NNNNGHTT; PAM sequence: GAAGGATT
tttgatacatatacagcaaa

SEQ ID NO: 34470 - DNA, 20 bp, Artificial Sequence
  Description of Artificial Sequence: Synthetic oligonucleotide
  Target: LAMA2; (-) strand; PAM type: NNNNGHTT; PAM sequence: AGAGGTTT
ttgtagaataaaaagttgtg

SEQ ID NO: 34471 - DNA, 20 bp, Artificial Sequence
  Description of Artificial Sequence: Synthetic oligonucleotide
  Target: LAMA2; (-) strand; PAM type: NNNNGHTT; PAM sequence: TGAAGATT
tgttctcttgactgttgctg

SEQ ID NO: 34472 - DNA, 20 bp, Artificial Sequence
  Description of Artificial Sequence: Synthetic oligonucleotide
  Target: LAMA2; (-) strand; PAM type: NNNNGHTT; PAM sequence: TGAAGATT
caaggcccagtcactcctac

SEQ ID NO: 34473 - DNA, 20 bp, Artificial Sequence
  Description of Artificial Sequence: Synthetic oligonucleotide
  Target: LAMA2; (-) strand; PAM type: NNNNGHTT; PAM sequence: GAGAGATT
actagtggaagaaactactg

SEQ ID NO: 34474 - DNA, 20 bp, Artificial Sequence
  Description of Artificial Sequence: Synthetic oligonucleotide
  Target: LAMA2; (-) strand; PAM type: NNNNGHTT; PAM sequence: GATTGATT
tcagtaaacacttgttgagt

SEQ ID NO: 34475 - DNA, 20 bp, Artificial Sequence
  Description of Artificial Sequence: Synthetic oligonucleotide
  Target: LAMA2; (-) strand; PAM type: NNNNGHTT; PAM sequence: GAGTGATT
gctttcagtaaacacttgtt

SEQ ID NO: 34476 - DNA, 20 bp, Artificial Sequence
  Description of Artificial Sequence: Synthetic oligonucleotide
  Target: LAMA2; (-) strand; PAM type: NNNNGHTT; PAM sequence: GTAAGCTT
agtttaaggtctgggtatca

SEQ ID NO: 34477 - DNA, 20 bp, Artificial Sequence
  Description of Artificial Sequence: Synthetic oligonucleotide
  Target: LAMA2; (-) strand; PAM type: NNNNGHTT; PAM sequence: AACAGTTT
tatctggcattctgtttggt

SEQ ID NO: 34478 - DNA, 20 bp, Artificial Sequence
  Description of Artificial Sequence: Synthetic oligonucleotide
  Target: LAMA2; (-) strand; PAM type: NNNNGHTT; PAM sequence: TTCTGTTT
attatatcccatatctggca

SEQ ID NO: 34479 - DNA, 20 bp, Artificial Sequence
  Description of Artificial Sequence: Synthetic oligonucleotide
  Target: LAMA2; (-) strand; PAM type: NNNNGHTT; PAM sequence: TTACGCTT
gaacttaatcatttgctctg

SEQ ID NO: 34480 - DNA, 20 bp, Artificial Sequence
  Description of Artificial Sequence: Synthetic oligonucleotide
  Target: LAMA2; (-) strand; PAM type: NNNNGHTT; PAM sequence: TACTGTTT
aactatagttaataatattg

SEQ ID NO: 34481 - DNA, 20 bp, Artificial Sequence
  Description of Artificial Sequence: Synthetic oligonucleotide
  Target: LAMA2; (-) strand; PAM type: NNNNGHTT; PAM sequence: CACAGTTT
gaggtttgggtcaaagggta

SEQ ID NO: 34482 - DNA, 20 bp, Artificial Sequence
  Description of Artificial Sequence: Synthetic oligonucleotide
  Target: LAMA2; (-) strand; PAM type: NNNNGHTT; PAM sequence: AGAGGTTT
gccaggaattggggtaaatg

SEQ ID NO: 34483 - DNA, 20 bp, Artificial Sequence
  Description of Artificial Sequence: Synthetic oligonucleotide
  Target: LAMA2; (-) strand; PAM type: NNNNGHTT; PAM sequence: TAGAGATT
atggaaaacagcattaagca

SEQ ID NO: 34484 - DNA, 20 bp, Artificial Sequence
  Description of Artificial Sequence: Synthetic oligonucleotide
  Target: LAMA2; (-) strand; PAM type: NNNNGHTT; PAM sequence: ACATGTTT
taaacatatctaaaaaatag

SEQ ID NO: 34485 - DNA, 20 bp, Artificial Sequence
  Description of Artificial Sequence: Synthetic oligonucleotide
  Target: LAMA2; (-) strand; PAM type: NNNNGHTT; PAM sequence: TCATGATT
ctccttgccatcagtcttgg

SEQ ID NO: 34486 - DNA, 20 bp, Artificial Sequence
  Description of Artificial Sequence: Synthetic oligonucleotide
  Target: LAMA2; (-) strand; PAM type: NNNNGHTT; PAM sequence: TAAAGCTT
aaatgtatgacctgaaacca

SEQ ID NO: 34487 - DNA, 20 bp, Artificial Sequence
  Description of Artificial Sequence: Synthetic oligonucleotide
  Target: LAMA2; (-) strand; PAM type: NNNNGHTT; PAM sequence: AATGGATT
atatacaaaaatcaactgaa

SEQ ID NO: 34488 - DNA, 20 bp, Artificial Sequence
  Description of Artificial Sequence: Synthetic oligonucleotide
  Target: LAMA2; (-) strand; PAM type: NNNNGHTT; PAM sequence: GGATGTTT
acatgcaaaagaatgatttt

SEQ ID NO: 34489 - DNA, 20 bp, Artificial Sequence
  Description of Artificial Sequence: Synthetic oligonucleotide
  Target: LAMA2; (-) strand; PAM type: NNNNGHTT; PAM sequence: GAATGATT
ctagatatccacatgcaaaa

SEQ ID NO: 34490 - DNA, 20 bp, Artificial Sequence
  Description of Artificial Sequence: Synthetic oligonucleotide
  Target: LAMA2; (-) strand; PAM type: NNNNGHTT; PAM sequence: TCCTGATT
aaagccagaagcaccatggg

SEQ ID NO: 34491 - DNA, 20 bp, Artificial Sequence
  Description of Artificial Sequence: Synthetic oligonucleotide
  Target: LAMA2; (-) strand; PAM type: NNNNGHTT; PAM sequence: CTGAGATT
gagacggaggttgcagtgag

SEQ ID NO: 34492 - DNA, 20 bp, Artificial Sequence
  Description of Artificial Sequence: Synthetic oligonucleotide
  Target: LAMA2; (-) strand; PAM type: NNNNGHTT; PAM sequence: AGGAGTTT
tgggcagattacctgaggtc

SEQ ID NO: 34493 - DNA, 20 bp, Artificial Sequence
  Description of Artificial Sequence: Synthetic oligonucleotide
  Target: LAMA2; (-) strand; PAM type: NNNNGHTT; PAM sequence: GGCAGATT
cactttgggaggctgaggtg

SEQ ID NO: 34494 - DNA, 20 bp, Artificial Sequence
  Description of Artificial Sequence: Synthetic oligonucleotide
  Target: LAMA2; (-) strand; PAM type: NNNNGHTT; PAM sequence: AGTGGCTT
tagaaaaaatggccgggtgt

SEQ ID NO: 34495 - DNA, 20 bp, Artificial Sequence
  Description of Artificial Sequence: Synthetic oligonucleotide
  Target: LAMA2; (-) strand; PAM type: NNNNGHTT; PAM sequence: ATGAGTTT
actacagagtcataaaaaag

SEQ ID NO: 34496 - DNA, 20 bp, Artificial Sequence
  Description of Artificial Sequence: Synthetic oligonucleotide
  Target: LAMA2; (-) strand; PAM type: NNNNGHTT; PAM sequence: GTATGTTT
ctataaagacacatgtacat

SEQ ID NO: 34497 - DNA, 20 bp, Artificial Sequence
  Description of Artificial Sequence: Synthetic oligonucleotide
  Target: LAMA2; (-) strand; PAM type: NNNNGHTT; PAM sequence: AAAGGATT
caaaaaagaattaagtaccc

SEQ ID NO: 34498 - DNA, 20 bp, Artificial Sequence
  Description of Artificial Sequence: Synthetic oligonucleotide
  Target: LAMA2; (-) strand; PAM type: NNNNGHTT; PAM sequence: CTCTGTTT
aaaggaagaaggtaaattgt

SEQ ID NO: 34499 - DNA, 20 bp, Artificial Sequence
  Description of Artificial Sequence: Synthetic oligonucleotide
  Target: LAMA2; (-) strand; PAM type: NNNNGHTT; PAM sequence: ATGAGATT
gatgagggttacaactgaag

SEQ ID NO: 34500 - DNA, 20 bp, Artificial Sequence
  Description of Artificial Sequence: Synthetic oligonucleotide
  Target: LAMA2; (-) strand; PAM type: NNNNGHTT; PAM sequence: TGGGGATT
atctggtttcctttgacatt

SEQ ID NO: 34501 - DNA, 20 bp, Artificial Sequence
  Description of Artificial Sequence: Synthetic oligonucleotide
  Target: LAMA2; (-) strand; PAM type: NNNNGHTT; PAM sequence: TCTGGTTT
ccatgattcaattaccttca

SEQ ID NO: 34502 - DNA, 20 bp, Artificial Sequence
  Description of Artificial Sequence: Synthetic oligonucleotide
  Target: LAMA2; (-) strand; PAM type: NNNNGHTT; PAM sequence: CCATGATT
agcatcggggaaactggcct

SEQ ID NO: 34503 - DNA, 20 bp, Artificial Sequence
  Description of Artificial Sequence: Synthetic oligonucleotide
  Target: LAMA2; (-) strand; PAM type: NNNNGHTT; PAM sequence: GGAAGCTT
gcacggctggggagacctca

SEQ ID NO: 34504 - DNA, 20 bp, Artificial Sequence
  Description of Artificial Sequence: Synthetic oligonucleotide
  Target: LAMA2; (-) strand; PAM type: NNNNGHTT; PAM sequence: AAAAGTTT
actgggtgatttataaagga

SEQ ID NO: 34505 - DNA, 20 bp, Artificial Sequence
  Description of Artificial Sequence: Synthetic oligonucleotide
  Target: LAMA2; (-) strand; PAM type: NNNNGHTT; PAM sequence: GGGTGATT
ataaagaactgcccgaaact

SEQ ID NO: 34506 - DNA, 20 bp, Artificial Sequence
  Description of Artificial Sequence: Synthetic oligonucleotide
  Target: LAMA2; (-) strand; PAM type: NNNNGHTT; PAM sequence: AGTCGTTT
taagataagggtgctgtatt

SEQ ID NO: 34507 - DNA, 20 bp, Artificial Sequence
  Description of Artificial Sequence: Synthetic oligonucleotide
  Target: LAMA2; (-) strand; PAM type: NNNNGHTT; PAM sequence: CTGAGATT
gtgaaaagttgaaagctttt

SEQ ID NO: 34508 - DNA, 20 bp, Artificial Sequence
  Description of Artificial Sequence: Synthetic oligonucleotide
  Target: LAMA2; (-) strand; PAM type: NNNNGHTT; PAM sequence: GAAAGCTT
atactgaatagtgaaaagtt

SEQ ID NO: 34509 - DNA, 20 bp, Artificial Sequence
  Description of Artificial Sequence: Synthetic oligonucleotide
  Target: LAMA2; (-) strand; PAM type: NNNNGHTT; PAM sequence: TGCAGTTT
atgtaggtgtcagtacaatc

SEQ ID NO: 34510 - DNA, 20 bp, Artificial Sequence
  Description of Artificial Sequence: Synthetic oligonucleotide
  Target: LAMA2; (-) strand; PAM type: NNNNGHTT; PAM sequence: TCCTGTTT
caggattaaatcttacactg

SEQ ID NO: 34511 - DNA, 20 bp, Artificial Sequence
  Description of Artificial Sequence: Synthetic oligonucleotide
  Target: LAMA2; (-) strand; PAM type: NNNNGHTT; PAM sequence: GCAGGATT
tgaattgtgcattttgagta

SEQ ID NO: 34512 - DNA, 20 bp, Artificial Sequence
  Description of Artificial Sequence: Synthetic oligonucleotide
  Target: LAMA2; (-) strand; PAM type: NNNNGHTT; PAM sequence: ATAAGTTT
aaatttcagaaaaacaattc

SEQ ID NO: 34513 - DNA, 20 bp, Artificial Sequence
  Description of Artificial Sequence: Synthetic oligonucleotide
  Target: LAMA2; (-) strand; PAM type: NNNNGHTT; PAM sequence: CATGGTTT
ttatgctttgtttcactttc

SEQ ID NO: 34514 - DNA, 20 bp, Artificial Sequence
  Description of Artificial Sequence: Synthetic oligonucleotide
  Target: LAMA2; (-) strand; PAM type: NNNNGHTT; PAM sequence: CTTTGTTT
atatagtattctcacttatg

SEQ ID NO: 34515 - DNA, 20 bp, Artificial Sequence
  Description of Artificial Sequence: Synthetic oligonucleotide
  Target: LAMA2; (-) strand; PAM type: NNNNGHTT; PAM sequence: TTATGCTT
atgtgatatagtattctcac

SEQ ID NO: 34516 - DNA, 20 bp, Artificial Sequence
  Description of Artificial Sequence: Synthetic oligonucleotide
  Target: LAMA2; (-) strand; PAM type: NNNNGHTT; PAM sequence: GAGGGATT
ggaacattcaccatgattaa

SEQ ID NO: 34517 - DNA, 20 bp, Artificial Sequence
  Description of Artificial Sequence: Synthetic oligonucleotide
  Target: LAMA2; (-) strand; PAM type: NNNNGHTT; PAM sequence: CCATGATT
catatcaaaaggaacattca

SEQ ID NO: 34518 - DNA, 20 bp, Artificial Sequence
  Description of Artificial Sequence: Synthetic oligonucleotide
  Target: LAMA2; (-) strand; PAM type: NNNNGHTT; PAM sequence: TGAGGATT
ccaaactaagaaaaaaggaa

SEQ ID NO: 34519 - DNA, 20 bp, Artificial Sequence
  Description of Artificial Sequence: Synthetic oligonucleotide
  Target: LAMA2; (-) strand; PAM type: NNNNGHTT; PAM sequence: AATTGTTT
aaaagatcaatataagtaag

SEQ ID NO: 34520 - DNA, 20 bp, Artificial Sequence
  Description of Artificial Sequence: Synthetic oligonucleotide
  Target: LAMA2; (-) strand; PAM type: NNNNGHTT; PAM sequence: AGAAGTTT
agcaaaagacgttctaagag

SEQ ID NO: 34521 - DNA, 20 bp, Artificial Sequence
  Description of Artificial Sequence: Synthetic oligonucleotide
  Target: LAMA2; (-) strand; PAM type: NNNNGHTT; PAM sequence: AATGGCTT
actgaggcactgagagttta

SEQ ID NO: 34522 - DNA, 20 bp, Artificial Sequence
  Description of Artificial Sequence: Synthetic oligonucleotide
  Target: LAMA2; (-) strand; PAM type: NNNNGHTT; PAM sequence: GAGAGTTT
gataaggggactgaggcact

SEQ ID NO: 34523 - DNA, 20 bp, Artificial Sequence
  Description of Artificial Sequence: Synthetic oligonucleotide
  Target: LAMA2; (-) strand; PAM type: NNNNGHTT; PAM sequence: AGCAGCTT
aaaaaatcttatgtttgcct

SEQ ID NO: 34524 - DNA, 20 bp, Artificial Sequence
  Description of Artificial Sequence: Synthetic oligonucleotide
  Target: LAMA2; (-) strand; PAM type: NNNNGHTT; PAM sequence: TTATGTTT
gtgctagatttaaaaaaatc

SEQ ID NO: 34525 - DNA, 20 bp, Artificial Sequence
  Description of Artificial Sequence: Synthetic oligonucleotide
  Target: LAMA2; (-) strand; PAM type: NNNNGHTT; PAM sequence: GCTAGATT
ggtaaagttcaggtccttgt

SEQ ID NO: 34526 - DNA, 20 bp, Artificial Sequence
  Description of Artificial Sequence: Synthetic oligonucleotide
  Target: LAMA2; (-) strand; PAM type: NNNNGHTT; PAM sequence: AAATGCTT
gagaagtacattttaacatc

SEQ ID NO: 34527 - DNA, 20 bp, Artificial Sequence
  Description of Artificial Sequence: Synthetic oligonucleotide
  Target: LAMA2; (-) strand; PAM type: NNNNGHTT; PAM sequence: TTCTGATT
tcccaggaccttcccttcat

SEQ ID NO: 34528 - DNA, 20 bp, Artificial Sequence
  Description of Artificial Sequence: Synthetic oligonucleotide
  Target: LAMA2; (-) strand; PAM type: NNNNGHTT; PAM sequence: GCTGGCTT
gatagaattctatccctttt

SEQ ID NO: 34529 - DNA, 20 bp, Artificial Sequence
  Description of Artificial Sequence: Synthetic oligonucleotide
  Target: LAMA2; (-) strand; PAM type: NNNNGHTT; PAM sequence: GTAGGTTT
attaagactatcaacatgga

SEQ ID NO: 34530 - DNA, 20 bp, Artificial Sequence
  Description of Artificial Sequence: Synthetic oligonucleotide
  Target: LAMA2; (-) strand; PAM type: NNNNGHTT; PAM sequence: CTAAGATT
caagcagcagggatcattaa

SEQ ID NO: 34531 - DNA, 20 bp, Artificial Sequence
  Description of Artificial Sequence: Synthetic oligonucleotide
  Target: LAMA2; (-) strand; PAM type: NNNNGHTT; PAM sequence: TTAGGTTT
ggaaatgagtgaagtcattg

SEQ ID NO: 34532 - DNA, 20 bp, Artificial Sequence
  Description of Artificial Sequence: Synthetic oligonucleotide
  Target: LAMA2; (-) strand; PAM type: NNNNGHTT; PAM sequence: CTTTGATT
gaaatgaaaagttgcagaac

SEQ ID NO: 34533 - DNA, 20 bp, Artificial Sequence
  Description of Artificial Sequence: Synthetic oligonucleotide
  Target: LAMA2; (-) strand; PAM type: NNNNGHTT; PAM sequence: AGGAGTTT
ttgagtcttgaaggatgaaa

SEQ ID NO: 34534 - DNA, 20 bp, Artificial Sequence
  Description of Artificial Sequence: Synthetic oligonucleotide
  Target: LAMA2; (-) strand; PAM type: NNNNGHTT; PAM sequence: TGGTGCTT
aaaggaaactcttggtcttg

SEQ ID NO: 34535 - DNA, 20 bp, Artificial Sequence
  Description of Artificial Sequence: Synthetic oligonucleotide
  Target: LAMA2; (-) strand; PAM type: NNNNGHTT; PAM sequence: TCATGCTT
aaggtatatatgttataaat

SEQ ID NO: 34536 - DNA, 20 bp, Artificial Sequence
  Description of Artificial Sequence: Synthetic oligonucleotide
  Target: LAMA2; (-) strand; PAM type: NNNNGHTT; PAM sequence: CTCTGCTT
aaatgaccctacattttgga

SEQ ID NO: 34537 - DNA, 20 bp, Artificial Sequence
  Description of Artificial Sequence: Synthetic oligonucleotide
  Target: LAMA2; (-) strand; PAM type: NNNNGHTT; PAM sequence: ATTTGCTT
tctactcaagctccttgagc

SEQ ID NO: 34538 - DNA, 20 bp, Artificial Sequence
  Description of Artificial Sequence: Synthetic oligonucleotide
  Target: LAMA2; (-) strand; PAM type: NNNNGHTT; PAM sequence: ATTAGCTT
agattcttgtttcttagata

SEQ ID NO: 34539 - DNA, 20 bp, Artificial Sequence
  Description of Artificial Sequence: Synthetic oligonucleotide
  Target: LAMA2; (-) strand; PAM type: NNNNGHTT; PAM sequence: TCTTGTTT
tgaatctgcctaggagagat

SEQ ID NO: 34540 - DNA, 20 bp, Artificial Sequence
  Description of Artificial Sequence: Synthetic oligonucleotide
  Target: LAMA2; (-) strand; PAM type: NNNNGHTT; PAM sequence: GAGAGATT
aggcaactgaatctgcctag

SEQ ID NO: 34541 - DNA, 20 bp, Artificial Sequence
  Description of Artificial Sequence: Synthetic oligonucleotide
  Target: LAMA2; (-) strand; PAM type: NNNNGHTT; PAM sequence: TGGGGCTT
gtttttctagaaggcaatgg

SEQ ID NO: 34542 - DNA, 20 bp, Artificial Sequence
  Description of Artificial Sequence: Synthetic oligonucleotide
  Target: LAMA2; (-) strand; PAM type: NNNNGHTT; PAM sequence: GAAAGTTT
agtgggcaagaaagaagaaa

SEQ ID NO: 34543 - DNA, 20 bp, Artificial Sequence
  Description of Artificial Sequence: Synthetic oligonucleotide
  Target: LAMA2; (-) strand; PAM type: NNNNGHTT; PAM sequence: GAGGGCTT
tagtaggaagactcagtgat

SEQ ID NO: 34544 - DNA, 20 bp, Artificial Sequence
  Description of Artificial Sequence: Synthetic oligonucleotide
  Target: LAMA2; (-) strand; PAM type: NNNNGHTT; PAM sequence: TGCAGTTT
taaggaagtaatatttgact

SEQ ID NO: 34545 - DNA, 20 bp, Artificial Sequence
  Description of Artificial Sequence: Synthetic oligonucleotide
  Target: LAMA2; (-) strand; PAM type: NNNNGHTT; PAM sequence: ATGAGATT
tggtctagggagacagtctg

SEQ ID NO: 34546 - DNA, 20 bp, Artificial Sequence
  Description of Artificial Sequence: Synthetic oligonucleotide
  Target: LAMA2; (-) strand; PAM type: NNNNGHTT; PAM sequence: TAAAGCTT
agaaatagtttttgccctct

SEQ ID NO: 34547 - DNA, 20 bp, Artificial Sequence
  Description of Artificial Sequence: Synthetic oligonucleotide
  Target: LAMA2; (-) strand; PAM type: NNNNGHTT; PAM sequence: AATAGTTT
aagatggtaagaaaaacaga

SEQ ID NO: 34548 - DNA, 20 bp, Artificial Sequence
  Description of Artificial Sequence: Synthetic oligonucleotide
  Target: LAMA2; (-) strand; PAM type: NNNNGHTT; PAM sequence: CTTTGTTT
atatttcaggatatggaact

SEQ ID NO: 34549 - DNA, 20 bp, Artificial Sequence
  Description of Artificial Sequence: Synthetic oligonucleotide
  Target: LAMA2; (-) strand; PAM type: NNNNGHTT; PAM sequence: CATGGCTT
ctttatcaaacctttcattc

SEQ ID NO: 34550 - DNA, 20 bp, Artificial Sequence
  Description of Artificial Sequence: Synthetic oligonucleotide
  Target: LAMA2; (-) strand; PAM type: NNNNGHTT; PAM sequence: TCCAGCTT
cacaggtgtgagctaccacg

SEQ ID NO: 34551 - DNA, 20 bp, Artificial Sequence
  Description of Artificial Sequence: Synthetic oligonucleotide
  Target: LAMA2; (-) strand; PAM type: NNNNGHTT; PAM sequence: AAGCGATT
ggccttgaacttctgagctc

SEQ ID NO: 34552 - DNA, 20 bp, Artificial Sequence
  Description of Artificial Sequence: Synthetic oligonucleotide
  Target: LAMA2; (-) strand; PAM type: NNNNGHTT; PAM sequence: TTTTGTTT
gtactaccatgctcaactaa

SEQ ID NO: 34553 - DNA, 20 bp, Artificial Sequence
  Description of Artificial Sequence: Synthetic oligonucleotide
  Target: LAMA2; (-) strand; PAM type: NNNNGHTT; PAM sequence: TTCTGCTT
cattcataattaaactaata

SEQ ID NO: 34554 - DNA, 20 bp, Artificial Sequence
  Description of Artificial Sequence: Synthetic oligonucleotide
  Target: LAMA2; (-) strand; PAM type: NNNNGHTT; PAM sequence: CCATGCTT
cagacaagttcttaaaagcc

SEQ ID NO: 34555 - DNA, 20 bp, Artificial Sequence
  Description of Artificial Sequence: Synthetic oligonucleotide
  Target: LAMA2; (-) strand; PAM type: NNNNGHTT; PAM sequence: CAAGGCTT
attgacttgctccactccag

SEQ ID NO: 34556 - DNA, 20 bp, Artificial Sequence
  Description of Artificial Sequence: Synthetic oligonucleotide
  Target: LAMA2; (-) strand; PAM type: NNNNGHTT; PAM sequence: GAAGGCTT
taaatgctccacctaactgt

SEQ ID NO: 34557 - DNA, 20 bp, Artificial Sequence
  Description of Artificial Sequence: Synthetic oligonucleotide
  Target: LAMA2; (-) strand; PAM type: NNNNGHTT; PAM sequence: CAGTGTTT
gtaaccaatagacaatcagt

SEQ ID NO: 34558 - DNA, 20 bp, Artificial Sequence
  Description of Artificial Sequence: Synthetic oligonucleotide
  Target: LAMA2; (-) strand; PAM type: NNNNGHTT; PAM sequence: CTTTGATT
attgacccttctaacacaaa

SEQ ID NO: 34559 - DNA, 20 bp, Artificial Sequence
  Description of Artificial Sequence: Synthetic oligonucleotide
  Target: LAMA2; (-) strand; PAM type: NNNNGHTT; PAM sequence: TTCAGATT
agatccatttttcaaaagcc

SEQ ID NO: 34560 - DNA, 20 bp, Artificial Sequence
  Description of Artificial Sequence: Synthetic oligonucleotide
  Target: LAMA2; (-) strand; PAM type: NNNNGHTT; PAM sequence: GATTGATT
tttattgaattaattggatt

SEQ ID NO: 34561 - DNA, 20 bp, Artificial Sequence
  Description of Artificial Sequence: Synthetic oligonucleotide
  Target: LAMA2; (-) strand; PAM type: NNNNGHTT; PAM sequence: GATTGATT
ttagtttattgaattaattg

SEQ ID NO: 34562 - DNA, 20 bp, Artificial Sequence
  Description of Artificial Sequence: Synthetic oligonucleotide
  Target: LAMA2; (-) strand; PAM type: NNNNGHTT; PAM sequence: ATTGGATT
atgattagtttattgaatta

SEQ ID NO: 34563 - DNA, 20 bp, Artificial Sequence
  Description of Artificial Sequence: Synthetic oligonucleotide
  Target: LAMA2; (-) strand; PAM type: NNNNGHTT; PAM sequence: ATTAGTTT
gaatactcactaaaatcatg

SEQ ID NO: 34564 - DNA, 20 bp, Artificial Sequence
  Description of Artificial Sequence: Synthetic oligonucleotide
  Target: LAMA2; (-) strand; PAM type: NNNNGHTT; PAM sequence: TCATGATT
tcatagaatactcactaaaa

SEQ ID NO: 34565 - DNA, 20 bp, Artificial Sequence
  Description of Artificial Sequence: Synthetic oligonucleotide
  Target: LAMA2; (-) strand; PAM type: NNNNGHTT; PAM sequence: TTTTGTTT
tccagaatgtcatttatttt

SEQ ID NO: 34566 - DNA, 20 bp, Artificial Sequence
  Description of Artificial Sequence: Synthetic oligonucleotide
  Target: LAMA2; (-) strand; PAM type: NNNNGHTT; PAM sequence: CTAAGATT
ctaaagatcctcttttcaag

SEQ ID NO: 34567 - DNA, 20 bp, Artificial Sequence
  Description of Artificial Sequence: Synthetic oligonucleotide
  Target: LAMA2; (-) strand; PAM type: NNNNGHTT; PAM sequence: GATTGCTT
ttctgagcttgttttaatga

SEQ ID NO: 34568 - DNA, 20 bp, Artificial Sequence
  Description of Artificial Sequence: Synthetic oligonucleotide
  Target: LAMA2; (-) strand; PAM type: NNNNGHTT; PAM sequence: ATGAGATT
tgttttctgagcttgtttta

SEQ ID NO: 34569 - DNA, 20 bp, Artificial Sequence
  Description of Artificial Sequence: Synthetic oligonucleotide
  Target: LAMA2; (-) strand; PAM type: NNNNGHTT; PAM sequence: GCTTGTTT
atcttggaattgttttctga

SEQ ID NO: 34570 - DNA, 20 bp, Artificial Sequence
  Description of Artificial Sequence: Synthetic oligonucleotide
  Target: LAMA2; (-) strand; PAM type: NNNNGHTT; PAM sequence: CTGAGCTT
atatatcttggaattgtttt

SEQ ID NO: 34571 - DNA, 20 bp, Artificial Sequence
  Description of Artificial Sequence: Synthetic oligonucleotide
  Target: LAMA2; (-) strand; PAM type: NNNNGHTT; PAM sequence: AATTGTTT
cttttactcatatatcttgg

SEQ ID NO: 34572 - DNA, 20 bp, Artificial Sequence
  Description of Artificial Sequence: Synthetic oligonucleotide
  Target: LAMA2; (-) strand; PAM type: NNNNGHTT; PAM sequence: GTTTGCTT
atttgtgcttccgttgttta

SEQ ID NO: 34573 - DNA, 20 bp, Artificial Sequence
  Description of Artificial Sequence: Synthetic oligonucleotide
  Target: LAMA2; (-) strand; PAM type: NNNNGHTT; PAM sequence: TTTAGTTT
tactatttgtgcttccgttg

SEQ ID NO: 34574 - DNA, 20 bp, Artificial Sequence
  Description of Artificial Sequence: Synthetic oligonucleotide
  Target: LAMA2; (-) strand; PAM type: NNNNGHTT; PAM sequence: CGTTGTTT
ggtcatactatttgtgcttc

SEQ ID NO: 34575 - DNA, 20 bp, Artificial Sequence
  Description of Artificial Sequence: Synthetic oligonucleotide
  Target: LAMA2; (-) strand; PAM type: NNNNGHTT; PAM sequence: TTGTGCTT
tcaagagaaggtcatactat

SEQ ID NO: 34576 - DNA, 20 bp, Artificial Sequence
  Description of Artificial Sequence: Synthetic oligonucleotide
  Target: LAMA2; (-) strand; PAM type: NNNNGHTT; PAM sequence: CAGAGCTT
aaaaagcttaatgtccgaaa

SEQ ID NO: 34577 - DNA, 20 bp, Artificial Sequence
  Description of Artificial Sequence: Synthetic oligonucleotide
  Target: LAMA2; (-) strand; PAM type: NNNNGHTT; PAM sequence: AAAAGCTT
acgaaagttatggctatgaa

SEQ ID NO: 34578 - DNA, 20 bp, Artificial Sequence
  Description of Artificial Sequence: Synthetic oligonucleotide
  Target: LAMA2; (-) strand; PAM type: NNNNGHTT; PAM sequence: TCAAGTTT
catttatagagatttttttt

SEQ ID NO: 34579 - DNA, 20 bp, Artificial Sequence
  Description of Artificial Sequence: Synthetic oligonucleotide
  Target: LAMA2; (-) strand; PAM type: NNNNGHTT; PAM sequence: TAGAGATT
gagtaaaaaacctccattta

SEQ ID NO: 34580 - DNA, 20 bp, Artificial Sequence
  Description of Artificial Sequence: Synthetic oligonucleotide
  Target: LAMA2; (-) strand; PAM type: NNNNGHTT; PAM sequence: AAGAGATT
ttttgagctcaactggaaga

SEQ ID NO: 34581 - DNA, 20 bp, Artificial Sequence
  Description of Artificial Sequence: Synthetic oligonucleotide
  Target: LAMA2; (-) strand; PAM type: NNNNGHTT; PAM sequence: TTTTGCTT
tctggcttctgtccatcttt

SEQ ID NO: 34582 - DNA, 20 bp, Artificial Sequence
  Description of Artificial Sequence: Synthetic oligonucleotide
  Target: LAMA2; (-) strand; PAM type: NNNNGHTT; PAM sequence: TCTGGCTT
acactaatttattcagcatt

SEQ ID NO: 34583 - DNA, 20 bp, Artificial Sequence
  Description of Artificial Sequence: Synthetic oligonucleotide
  Target: LAMA2; (-) strand; PAM type: NNNNGHTT; PAM sequence: CATAGTTT
tctatttaaatgagccaatt

SEQ ID NO: 34584 - DNA, 20 bp, Artificial Sequence
  Description of Artificial Sequence: Synthetic oligonucleotide
  Target: LAMA2; (-) strand; PAM type: NNNNGHTT; PAM sequence: AAATGTTT
actgtacacaacaacaacaa

SEQ ID NO: 34585 - DNA, 20 bp, Artificial Sequence
  Description of Artificial Sequence: Synthetic oligonucleotide
  Target: LAMA2; (-) strand; PAM type: NNNNGHTT; PAM sequence: AAGTGATT
aatccacagattaaatacgt

SEQ ID NO: 34586 - DNA, 20 bp, Artificial Sequence
  Description of Artificial Sequence: Synthetic oligonucleotide
  Target: LAMA2; (-) strand; PAM type: NNNNGHTT; PAM sequence: CACAGATT
tcccagcatgctctacaatc

SEQ ID NO: 34587 - DNA, 20 bp, Artificial Sequence
  Description of Artificial Sequence: Synthetic oligonucleotide
  Target: LAMA2; (-) strand; PAM type: NNNNGHTT; PAM sequence: CTACGATT
ggtgctcttcctcactgaaa

SEQ ID NO: 34588 - DNA, 20 bp, Artificial Sequence
  Description of Artificial Sequence: Synthetic oligonucleotide
  Target: LAMA2; (-) strand; PAM type: NNNNGHTT; PAM sequence: CAATGATT
gcaaaataaagaagaaaaag

SEQ ID NO: 34589 - DNA, 20 bp, Artificial Sequence
  Description of Artificial Sequence: Synthetic oligonucleotide
  Target: LAMA2; (-) strand; PAM type: NNNNGHTT; PAM sequence: TATAGCTT
atatgtcttaaaaaatagct

SEQ ID NO: 34590 - DNA, 20 bp, Artificial Sequence
  Description of Artificial Sequence: Synthetic oligonucleotide
  Target: LAMA2; (-) strand; PAM type: NNNNGHTT; PAM sequence: AATAGCTT
aaaacctatatgtcttaaaa

SEQ ID NO: 34591 - DNA, 20 bp, Artificial Sequence
  Description of Artificial Sequence: Synthetic oligonucleotide
  Target: LAMA2; (-) strand; PAM type: NNNNGHTT; PAM sequence: CATAGTTT
aaagtagaagttgcccgaga

SEQ ID NO: 34592 - DNA, 20 bp, Artificial Sequence
  Description of Artificial Sequence: Synthetic oligonucleotide
  Target: LAMA2; (-) strand; PAM type: NNNNGHTT; PAM sequence: ATGTGTTT
gagacagtcttcttgtgcgt

SEQ ID NO: 34593 - DNA, 20 bp, Artificial Sequence
  Description of Artificial Sequence: Synthetic oligonucleotide
  Target: LAMA2; (-) strand; PAM type: NNNNGHTT; PAM sequence: AATTGCTT
tcagaaggctgaggcatgag

SEQ ID NO: 34594 - DNA, 20 bp, Artificial Sequence
  Description of Artificial Sequence: Synthetic oligonucleotide
  Target: LAMA2; (-) strand; PAM type: NNNNGHTT; PAM sequence: ATCAGCTT
tggaggtccaggagttcaag

SEQ ID NO: 34595 - DNA, 20 bp, Artificial Sequence
  Description of Artificial Sequence: Synthetic oligonucleotide
  Target: LAMA2; (-) strand; PAM type: NNNNGHTT; PAM sequence: GGTGGCTT
tatggacgatggtcaggcaa

SEQ ID NO: 34596 - DNA, 20 bp, Artificial Sequence
  Description of Artificial Sequence: Synthetic oligonucleotide
  Target: LAMA2; (-) strand; PAM type: NNNNGHTT; PAM sequence: ACTAGTTT
ttctttttgatattatttcc

SEQ ID NO: 34597 - DNA, 20 bp, Artificial Sequence
  Description of Artificial Sequence: Synthetic oligonucleotide
  Target: LAMA2; (-) strand; PAM type: NNNNGHTT; PAM sequence: TGATGATT
cattatccatgggtagcatt

SEQ ID NO: 34598 - DNA, 20 bp, Artificial Sequence
  Description of Artificial Sequence: Synthetic oligonucleotide
  Target: LAMA2; (-) strand; PAM type: NNNNGHTT; PAM sequence: CTGAGTTT
atctgtgccaaataattttg

SEQ ID NO: 34599 - DNA, 20 bp, Artificial Sequence
  Description of Artificial Sequence: Synthetic oligonucleotide
  Target: LAMA2; (-) strand; PAM type: NNNNGHTT; PAM sequence: ATGAGCTT
ctcatacatacatgtaccaa

SEQ ID NO: 34600 - DNA, 20 bp, Artificial Sequence
  Description of Artificial Sequence: Synthetic oligonucleotide
  Target: LAMA2; (-) strand; PAM type: NNNNGHTT; PAM sequence: TCTTGATT
ccgatgaaaatcttttcaga

SEQ ID NO: 34601 - DNA, 20 bp, Artificial Sequence
  Description of Artificial Sequence: Synthetic oligonucleotide
  Target: LAMA2; (-) strand; PAM type: NNNNGHTT; PAM sequence: TCAGGTTT
tcctacaaagtactagattg

SEQ ID NO: 34602 - DNA, 20 bp, Artificial Sequence
  Description of Artificial Sequence: Synthetic oligonucleotide
  Target: LAMA2; (-) strand; PAM type: NNNNGHTT; PAM sequence: ACTAGATT
cacattagttcctacaaagt

SEQ ID NO: 34603 - DNA, 20 bp, Artificial Sequence
  Description of Artificial Sequence: Synthetic oligonucleotide
  Target: LAMA2; (-) strand; PAM type: NNNNGHTT; PAM sequence: CTAAGATT
ctttctgtccactaagcccc

SEQ ID NO: 34604 - DNA, 20 bp, Artificial Sequence
  Description of Artificial Sequence: Synthetic oligonucleotide
  Target: LAMA2; (-) strand; PAM type: NNNNGHTT; PAM sequence: ATTTGCTT
ttcatattgtttaaggtccc

SEQ ID NO: 34605 - DNA, 20 bp, Artificial Sequence
  Description of Artificial Sequence: Synthetic oligonucleotide
  Target: LAMA2; (-) strand; PAM type: NNNNGHTT; PAM sequence: TATTGTTT
tgagaaaccatgtctattca

SEQ ID NO: 34606 - DNA, 20 bp, Artificial Sequence
  Description of Artificial Sequence: Synthetic oligonucleotide
  Target: LAMA2; (-) strand; PAM type: NNNNGHTT; PAM sequence: TCCAGATT
ggcacctgaggtttatattt

SEQ ID NO: 34607 - DNA, 20 bp, Artificial Sequence
  Description of Artificial Sequence: Synthetic oligonucleotide
  Target: LAMA2; (-) strand; PAM type: NNNNGHTT; PAM sequence: TGAGGTTT
tccctctgaagtctggcacc

SEQ ID NO: 34608 - DNA, 20 bp, Artificial Sequence
  Description of Artificial Sequence: Synthetic oligonucleotide
  Target: LAMA2; (-) strand; PAM type: NNNNGHTT; PAM sequence: AATTGTTT
aatggactaatgcaaaaagt

SEQ ID NO: 34609 - DNA, 20 bp, Artificial Sequence
  Description of Artificial Sequence: Synthetic oligonucleotide
  Target: LAMA2; (-) strand; PAM type: NNNNGHTT; PAM sequence: TTAGGATT
ctttagaaattatccagtct

SEQ ID NO: 34610 - DNA, 20 bp, Artificial Sequence
  Description of Artificial Sequence: Synthetic oligonucleotide
  Target: LAMA2; (-) strand; PAM type: NNNNGHTT; PAM sequence: CTGGGATT
cacctcggcctcccaaaatc

SEQ ID NO: 34611 - DNA, 20 bp, Artificial Sequence
  Description of Artificial Sequence: Synthetic oligonucleotide
  Target: LAMA2; (-) strand; PAM type: NNNNGHTT; PAM sequence: CGAGGTTT
ttttctacttttagcagaga

SEQ ID NO: 34612 - DNA, 20 bp, Artificial Sequence
  Description of Artificial Sequence: Synthetic oligonucleotide
  Target: LAMA2; (-) strand; PAM type: NNNNGHTT; PAM sequence: TTGTGCTT
ctccccagaggcagatgctg

SEQ ID NO: 34613 - DNA, 20 bp, Artificial Sequence
  Description of Artificial Sequence: Synthetic oligonucleotide
  Target: LAMA2; (-) strand; PAM type: NNNNGHTT; PAM sequence: GGAAGCTT
cttaaccttctgccatgatt

SEQ ID NO: 34614 - DNA, 20 bp, Artificial Sequence
  Description of Artificial Sequence: Synthetic oligonucleotide
  Target: LAMA2; (-) strand; PAM type: NNNNGHTT; PAM sequence: CCATGATT
tgctcctccttaaccttctg

SEQ ID NO: 34615 - DNA, 20 bp, Artificial Sequence
  Description of Artificial Sequence: Synthetic oligonucleotide
  Target: LAMA2; (-) strand; PAM type: NNNNGHTT; PAM sequence: TCCTGTTT
accttcccactctctcttgc

SEQ ID NO: 34616 - DNA, 20 bp, Artificial Sequence
  Description of Artificial Sequence: Synthetic oligonucleotide
  Target: LAMA2; (-) strand; PAM type: NNNNGHTT; PAM sequence: AGTGGTTT
ataggggctgatttctcata

SEQ ID NO: 34617 - DNA, 20 bp, Artificial Sequence
  Description of Artificial Sequence: Synthetic oligonucleotide
  Target: LAMA2; (-) strand; PAM type: NNNNGHTT; PAM sequence: GGCTGATT
ggagatgattggagaatagg

SEQ ID NO: 34618 - DNA, 20 bp, Artificial Sequence
  Description of Artificial Sequence: Synthetic oligonucleotide
  Target: LAMA2; (-) strand; PAM type: NNNNGHTT; PAM sequence: AGATGATT
taggggaggggcctggtggg

SEQ ID NO: 34619 - DNA, 20 bp, Artificial Sequence
  Description of Artificial Sequence: Synthetic oligonucleotide
  Target: LAMA2; (-) strand; PAM type: NNNNGHTT; PAM sequence: AAATGTTT
ctaaaatgcatttttaatca

SEQ ID NO: 34620 - DNA, 20 bp, Artificial Sequence
  Description of Artificial Sequence: Synthetic oligonucleotide
  Target: LAMA2; (-) strand; PAM type: NNNNGHTT; PAM sequence: CAAGGTTT
tgacaaattttttcataggt

SEQ ID NO: 34621 - DNA, 20 bp, Artificial Sequence
  Description of Artificial Sequence: Synthetic oligonucleotide
  Target: LAMA2; (-) strand; PAM type: NNNNGHTT; PAM sequence: AGAAGTTT
gattaaaaagtccagaactg

SEQ ID NO: 34622 - DNA, 20 bp, Artificial Sequence
  Description of Artificial Sequence: Synthetic oligonucleotide
  Target: LAMA2; (-) strand; PAM type: NNNNGHTT; PAM sequence: CACTGATT
ggtgagtccgatggcaacta

SEQ ID NO: 34623 - DNA, 20 bp, Artificial Sequence
  Description of Artificial Sequence: Synthetic oligonucleotide
  Target: LAMA2; (-) strand; PAM type: NNNNGHTT; PAM sequence: GATGGATT
tatttgagtgacacagatca

SEQ ID NO: 34624 - DNA, 20 bp, Artificial Sequence
  Description of Artificial Sequence: Synthetic oligonucleotide
  Target: LAMA2; (-) strand; PAM type: NNNNGHTT; PAM sequence: CCTGGATT
cttatccctagttattggta

SEQ ID NO: 34625 - DNA, 20 bp, Artificial Sequence
  Description of Artificial Sequence: Synthetic oligonucleotide
  Target: LAMA2; (-) strand; PAM type: NNNNGHTT; PAM sequence: AGTAGCTT
tcagaataatcttccttttg

SEQ ID NO: 34626 - DNA, 20 bp, Artificial Sequence
  Description of Artificial Sequence: Synthetic oligonucleotide
  Target: LAMA2; (-) strand; PAM type: NNNNGHTT; PAM sequence: ACTTGATT
agacactcttttaggagttc

SEQ ID NO: 34627 - DNA, 20 bp, Artificial Sequence
  Description of Artificial Sequence: Synthetic oligonucleotide
  Target: LAMA2; (-) strand; PAM type: NNNNGHTT; PAM sequence: ATTTGCTT
tgtggccttctcacatgatt

SEQ ID NO: 34628 - DNA, 20 bp, Artificial Sequence
  Description of Artificial Sequence: Synthetic oligonucleotide
  Target: LAMA2; (-) strand; PAM type: NNNNGHTT; PAM sequence: ACATGATT
tcttgctgtgtggccttctc

SEQ ID NO: 34629 - DNA, 20 bp, Artificial Sequence
  Description of Artificial Sequence: Synthetic oligonucleotide
  Target: LAMA2; (-) strand; PAM type: NNNNGHTT; PAM sequence: CTCAGCTT
attatcaatccagtgctgct

SEQ ID NO: 34630 - DNA, 20 bp, Artificial Sequence
  Description of Artificial Sequence: Synthetic oligonucleotide
  Target: LAMA2; (-) strand; PAM type: NNNNGHTT; PAM sequence: TGCTGATT
ttagctcagctgtgctttct

SEQ ID NO: 34631 - DNA, 20 bp, Artificial Sequence
  Description of Artificial Sequence: Synthetic oligonucleotide
  Target: LAMA2; (-) strand; PAM type: NNNNGHTT; PAM sequence: CTGTGCTT
cagtctccatgttagctcag

SEQ ID NO: 34632 - DNA, 20 bp, Artificial Sequence
  Description of Artificial Sequence: Synthetic oligonucleotide
  Target: LAMA2; (-) strand; PAM type: NNNNGHTT; PAM sequence: TTTGGTTT
tttctttttaatcttttgta

SEQ ID NO: 34633 - DNA, 20 bp, Artificial Sequence
  Description of Artificial Sequence: Synthetic oligonucleotide
  Target: LAMA2; (-) strand; PAM type: NNNNGHTT; PAM sequence: CTTAGATT
tcggtttaagatatcttcaa

SEQ ID NO: 34634 - DNA, 20 bp, Artificial Sequence
  Description of Artificial Sequence: Synthetic oligonucleotide
  Target: LAMA2; (-) strand; PAM type: NNNNGHTT; PAM sequence: TTCGGTTT
gttaggtgtattaaatgcaa

SEQ ID NO: 34635 - DNA, 20 bp, Artificial Sequence
  Description of Artificial Sequence: Synthetic oligonucleotide
  Target: LAMA2; (-) strand; PAM type: NNNNGHTT; PAM sequence: TTTCGATT
tgacggttgaacttcgtatt

SEQ ID NO: 34636 - DNA, 20 bp, Artificial Sequence
  Description of Artificial Sequence: Synthetic oligonucleotide
  Target: LAMA2; (-) strand; PAM type: NNNNGHTT; PAM sequence: TGAGGATT
atacattgaagagaaaaagt

SEQ ID NO: 34637 - DNA, 20 bp, Artificial Sequence
  Description of Artificial Sequence: Synthetic oligonucleotide
  Target: LAMA2; (-) strand; PAM type: NNNNGHTT; PAM sequence: GCTGGTTT
tggaaatgttccaactgggc

SEQ ID NO: 34638 - DNA, 20 bp, Artificial Sequence
  Description of Artificial Sequence: Synthetic oligonucleotide
  Target: LAMA2; (-) strand; PAM type: NNNNGHTT; PAM sequence: AATAGATT
tatatctctcaaccttctta

SEQ ID NO: 34639 - DNA, 20 bp, Artificial Sequence
  Description of Artificial Sequence: Synthetic oligonucleotide
  Target: LAMA2; (-) strand; PAM type: NNNNGHTT; PAM sequence: TTTGGTTT
atttcatttaccattttccc

SEQ ID NO: 34640 - DNA, 20 bp, Artificial Sequence
  Description of Artificial Sequence: Synthetic oligonucleotide
  Target: LAMA2; (-) strand; PAM type: NNNNGHTT; PAM sequence: ATGTGTTT
accaatgaataaacagggtg

SEQ ID NO: 34641 - DNA, 20 bp, Artificial Sequence
  Description of Artificial Sequence: Synthetic oligonucleotide
  Target: LAMA2; (-) strand; PAM type: NNNNGHTT; PAM sequence: TAAGGCTT
gtacaggatagatacctaat

SEQ ID NO: 34642 - DNA, 20 bp, Artificial Sequence
  Description of Artificial Sequence: Synthetic oligonucleotide
  Target: LAMA2; (-) strand; PAM type: NNNNGHTT; PAM sequence: TTATGTTT
acttcagcagtcttatttct

SEQ ID NO: 34643 - DNA, 20 bp, Artificial Sequence
  Description of Artificial Sequence: Synthetic oligonucleotide
  Target: LAMA2; (-) strand; PAM type: NNNNGHTT; PAM sequence: TTGAGCTT
tttcatgaaagagttgaccc

SEQ ID NO: 34644 - DNA, 20 bp, Artificial Sequence
  Description of Artificial Sequence: Synthetic oligonucleotide
  Target: LAMA2; (-) strand; PAM type: NNNNGHTT; PAM sequence: CATTGTTT
ttttcagtgtcattagattt

SEQ ID NO: 34645 - DNA, 20 bp, Artificial Sequence
  Description of Artificial Sequence: Synthetic oligonucleotide
  Target: LAMA2; (-) strand; PAM type: NNNNGHTT; PAM sequence: ATTAGATT
tgaaagcacttttcagtgtc

SEQ ID NO: 34646 - DNA, 20 bp, Artificial Sequence
  Description of Artificial Sequence: Synthetic oligonucleotide
  Target: LAMA2; (-) strand; PAM type: NNNNGHTT; PAM sequence: TGTGGCTT
ctgaatatacaagttaaaaa

SEQ ID NO: 34647 - DNA, 20 bp, Artificial Sequence
  Description of Artificial Sequence: Synthetic oligonucleotide
  Target: LAMA2; (-) strand; PAM type: NNNNGHTT; PAM sequence: TATGGATT
ctatgtattatattcacata

SEQ ID NO: 34648 - DNA, 20 bp, Artificial Sequence
  Description of Artificial Sequence: Synthetic oligonucleotide
  Target: LAMA2; (-) strand; PAM type: NNNNGHTT; PAM sequence: TCATGATT
tgagataaaacttgttaacc

SEQ ID NO: 34649 - DNA, 20 bp, Artificial Sequence
  Description of Artificial Sequence: Synthetic oligonucleotide
  Target: LAMA2; (-) strand; PAM type: NNNNGHTT; PAM sequence: AAATGCTT
tctcaggttataaaagtaat

SEQ ID NO: 34650 - DNA, 20 bp, Artificial Sequence
  Description of Artificial Sequence: Synthetic oligonucleotide
  Target: LAMA2; (-) strand; PAM type: NNNNGHTT; PAM sequence: TAATGTTT
tccatgctcttctttttcaa

SEQ ID NO: 34651 - DNA, 20 bp, Artificial Sequence
  Description of Artificial Sequence: Synthetic oligonucleotide
  Target: LAMA2; (-) strand; PAM type: NNNNGHTT; PAM sequence: CCTCGCTT
taacagccacagtctcacat

SEQ ID NO: 34652 - DNA, 20 bp, Artificial Sequence
  Description of Artificial Sequence: Synthetic oligonucleotide
  Target: LAMA2; (-) strand; PAM type: NNNNGHTT; PAM sequence: TTTAGCTT
atttatcgtctcccttccat

SEQ ID NO: 34653 - DNA, 20 bp, Artificial Sequence
  Description of Artificial Sequence: Synthetic oligonucleotide
  Target: LAMA2; (-) strand; PAM type: NNNNGHTT; PAM sequence: TTCTGCTT
atatttcaaatctgagtcat

SEQ ID NO: 34654 - DNA, 20 bp, Artificial Sequence
  Description of Artificial Sequence: Synthetic oligonucleotide
  Target: LAMA2; (-) strand; PAM type: NNNNGHTT; PAM sequence: CCTGGCTT
ttgtcaatttcggctaatga

SEQ ID NO: 34655 - DNA, 20 bp, Artificial Sequence
  Description of Artificial Sequence: Synthetic oligonucleotide
  Target: LAMA2; (-) strand; PAM type: NNNNGHTT; PAM sequence: CTTGGATT
tcctcttgttacctgctttg

SEQ ID NO: 34656 - DNA, 20 bp, Artificial Sequence
  Description of Artificial Sequence: Synthetic oligonucleotide
  Target: LAMA2; (-) strand; PAM type: NNNNGHTT; PAM sequence: CTTTGCTT
tcaagtcctcttgttacctg

SEQ ID NO: 34657 - DNA, 20 bp, Artificial Sequence
  Description of Artificial Sequence: Synthetic oligonucleotide
  Target: LAMA2; (-) strand; PAM type: NNNNGHTT; PAM sequence: ACCTGCTT
tggaatcaagtcctcttgtt

SEQ ID NO: 34658 - DNA, 20 bp, Artificial Sequence
  Description of Artificial Sequence: Synthetic oligonucleotide
  Target: LAMA2; (-) strand; PAM type: NNNNGHTT; PAM sequence: GGTGGCTT
ttatagcactgaaatttcag

SEQ ID NO: 34659 - DNA, 20 bp, Artificial Sequence
  Description of Artificial Sequence: Synthetic oligonucleotide
  Target: LAMA2; (-) strand; PAM type: NNNNGHTT; PAM sequence: ACAGGTTT
attcctatagagttcccact

SEQ ID NO: 34660 - DNA, 20 bp, Artificial Sequence
  Description of Artificial Sequence: Synthetic oligonucleotide
  Target: LAMA2; (-) strand; PAM type: NNNNGHTT; PAM sequence: CTGTGTTT
gggaacaaactgaaaaactt

SEQ ID NO: 34661 - DNA, 20 bp, Artificial Sequence
  Description of Artificial Sequence: Synthetic oligonucleotide
  Target: LAMA2; (-) strand; PAM type: NNNNGHTT; PAM sequence: GGTGGTTT
gtgttttttgtgtggctgga

SEQ ID NO: 34662 - DNA, 20 bp, Artificial Sequence
  Description of Artificial Sequence: Synthetic oligonucleotide
  Target: LAMA2; (-) strand; PAM type: NNNNGHTT; PAM sequence: GTGTGTTT
tggaatgactcaagcatagt

SEQ ID NO: 34663 - DNA, 20 bp, Artificial Sequence
  Description of Artificial Sequence: Synthetic oligonucleotide
  Target: LAMA2; (-) strand; PAM type: NNNNGHTT; PAM sequence: TAATGTTT
caaatgtcctaatttcacac

SEQ ID NO: 34664 - DNA, 20 bp, Artificial Sequence
  Description of Artificial Sequence: Synthetic oligonucleotide
  Target: LAMA2; (-) strand; PAM type: NNNNGHTT; PAM sequence: ATGCGATT
actgggaataccatttcaac

SEQ ID NO: 34665 - DNA, 20 bp, Artificial Sequence
  Description of Artificial Sequence: Synthetic oligonucleotide
  Target: LAMA2; (-) strand; PAM type: NNNNGHTT; PAM sequence: GGAAGCTT
tgattctggtgagggcctca

SEQ ID NO: 34666 - DNA, 20 bp, Artificial Sequence
  Description of Artificial Sequence: Synthetic oligonucleotide
  Target: LAMA2; (-) strand; PAM type: NNNNGHTT; PAM sequence: ATCTGATT
acaggaaccatggtgcagac

SEQ ID NO: 34667 - DNA, 20 bp, Artificial Sequence
  Description of Artificial Sequence: Synthetic oligonucleotide
  Target: LAMA2; (-) strand; PAM type: NNNNGHTT; PAM sequence: CACTGCTT
cagtgttaagccattttttg

SEQ ID NO: 34668 - DNA, 20 bp, Artificial Sequence
  Description of Artificial Sequence: Synthetic oligonucleotide
  Target: LAMA2; (-) strand; PAM type: NNNNGHTT; PAM sequence: ATAAGCTT
actggagttgtgataattca

SEQ ID NO: 34669 - DNA, 20 bp, Artificial Sequence
  Description of Artificial Sequence: Synthetic oligonucleotide
  Target: LAMA2; (-) strand; PAM type: NNNNGHTT; PAM sequence: TCTGGTTT
gcattttgacaaagtcaagg

SEQ ID NO: 34670 - DNA, 20 bp, Artificial Sequence
  Description of Artificial Sequence: Synthetic oligonucleotide
  Target: LAMA2; (-) strand; PAM type: NNNNGHTT; PAM sequence: ATCAGATT
gagaagaatctgcacctaat

SEQ ID NO: 34671 - DNA, 20 bp, Artificial Sequence
  Description of Artificial Sequence: Synthetic oligonucleotide
  Target: LAMA2; (-) strand; PAM type: NNNNGHTT; PAM sequence: AACAGTTT
cctcactaaagtgagagagc

SEQ ID NO: 34672 - DNA, 20 bp, Artificial Sequence
  Description of Artificial Sequence: Synthetic oligonucleotide
  Target: LAMA2; (-) strand; PAM type: NNNNGHTT; PAM sequence: TTTTGTTT
tctgttttttcttcttttca

SEQ ID NO: 34673 - DNA, 20 bp, Artificial Sequence
  Description of Artificial Sequence: Synthetic oligonucleotide
  Target: LAMA2; (-) strand; PAM type: NNNNGHTT; PAM sequence: ATCTGTTT
atttttaaatcactgaatgt

SEQ ID NO: 34674 - DNA, 20 bp, Artificial Sequence
  Description of Artificial Sequence: Synthetic oligonucleotide
  Target: LAMA2; (-) strand; PAM type: NNNNGHTT; PAM sequence: CAAAGTTT
gaacattttaaatatgtcta

SEQ ID NO: 34675 - DNA, 20 bp, Artificial Sequence
  Description of Artificial Sequence: Synthetic oligonucleotide
  Target: LAMA2; (-) strand; PAM type: NNNNGHTT; PAM sequence: GATTGTTT
gcccttatgtttaaaaatgt

SEQ ID NO: 34676 - DNA, 20 bp, Artificial Sequence
  Description of Artificial Sequence: Synthetic oligonucleotide
  Target: LAMA2; (-) strand; PAM type: NNNNGHTT; PAM sequence: ATGTGATT
atatgcccttatgtttaaaa

SEQ ID NO: 34677 - DNA, 20 bp, Artificial Sequence
  Description of Artificial Sequence: Synthetic oligonucleotide
  Target: LAMA2; (-) strand; PAM type: NNNNGHTT; PAM sequence: TTATGTTT
gtcacaccaaatatatgccc

SEQ ID NO: 34678 - DNA, 20 bp, Artificial Sequence
  Description of Artificial Sequence: Synthetic oligonucleotide
  Target: LAMA2; (-) strand; PAM type: NNNNGHTT; PAM sequence: AAAAGTTT
caaattctcaagtatatcaa

SEQ ID NO: 34679 - DNA, 20 bp, Artificial Sequence
  Description of Artificial Sequence: Synthetic oligonucleotide
  Target: LAMA2; (-) strand; PAM type: NNNNGHTT; PAM sequence: AGGGGTTT
aaatataaaggatcatattt

SEQ ID NO: 34680 - DNA, 20 bp, Artificial Sequence
  Description of Artificial Sequence: Synthetic oligonucleotide
  Target: LAMA2; (-) strand; PAM type: NNNNGHTT; PAM sequence: ATTTGTTT
tccacatagtatttacatat

SEQ ID NO: 34681 - DNA, 20 bp, Artificial Sequence
  Description of Artificial Sequence: Synthetic oligonucleotide
  Target: LAMA2; (-) strand; PAM type: NNNNGHTT; PAM sequence: CTCTGTTT
cagatttattcatttctgcc

SEQ ID NO: 34682 - DNA, 20 bp, Artificial Sequence
  Description of Artificial Sequence: Synthetic oligonucleotide
  Target: LAMA2; (-) strand; PAM type: NNNNGHTT; PAM sequence: CTCAGATT
acaagctcacatcatgttat

SEQ ID NO: 34683 - DNA, 20 bp, Artificial Sequence
  Description of Artificial Sequence: Synthetic oligonucleotide
  Target: LAMA2; (-) strand; PAM type: NNNNGHTT; PAM sequence: CAAAGCTT
tcttcctggagtgccaaacc

SEQ ID NO: 34684 - DNA, 20 bp, Artificial Sequence
  Description of Artificial Sequence: Synthetic oligonucleotide
  Target: LAMA2; (-) strand; PAM type: NNNNGHTT; PAM sequence: TTCTGCTT
acaatcagtgccctttaccc

SEQ ID NO: 34685 - DNA, 20 bp, Artificial Sequence
  Description of Artificial Sequence: Synthetic oligonucleotide
  Target: LAMA2; (-) strand; PAM type: NNNNGHTT; PAM sequence: TGTTGCTT
ttcctgcctccttcttggta

SEQ ID NO: 34686 - DNA, 20 bp, Artificial Sequence
  Description of Artificial Sequence: Synthetic oligonucleotide
  Target: LAMA2; (-) strand; PAM type: NNNNGHTT; PAM sequence: TGCTGTTT
tcctcacccatcttccatgc

SEQ ID NO: 34687 - DNA, 20 bp, Artificial Sequence
  Description of Artificial Sequence: Synthetic oligonucleotide
  Target: LAMA2; (-) strand; PAM type: NNNNGHTT; PAM sequence: TGCAGATT
gcatacataataaacatatg

SEQ ID NO: 34688 - DNA, 20 bp, Artificial Sequence
  Description of Artificial Sequence: Synthetic oligonucleotide
  Target: LAMA2; (-) strand; PAM type: NNNNGHTT; PAM sequence: CAGTGCTT
aataatagttaatgttgatt

SEQ ID NO: 34689 - DNA, 20 bp, Artificial Sequence
  Description of Artificial Sequence: Synthetic oligonucleotide
  Target: LAMA2; (-) strand; PAM type: NNNNGHTT; PAM sequence: TGTTGATT
aaccaaataataatagttaa

SEQ ID NO: 34690 - DNA, 20 bp, Artificial Sequence
  Description of Artificial Sequence: Synthetic oligonucleotide
  Target: LAMA2; (-) strand; PAM type: NNNNGHTT; PAM sequence: GAATGTTT
gccttagtgctataccattt

SEQ ID NO: 34691 - DNA, 20 bp, Artificial Sequence
  Description of Artificial Sequence: Synthetic oligonucleotide
  Target: LAMA2; (-) strand; PAM type: NNNNGHTT; PAM sequence: AAAAGTTT
ctggatacccaaaaatgtga

SEQ ID NO: 34692 - DNA, 20 bp, Artificial Sequence
  Description of Artificial Sequence: Synthetic oligonucleotide
  Target: LAMA2; (-) strand; PAM type: NNNNGHTT; PAM sequence: CAATGCTT
tatctgcctaatttcaaagt

SEQ ID NO: 34693 - DNA, 20 bp, Artificial Sequence
  Description of Artificial Sequence: Synthetic oligonucleotide
  Target: LAMA2; (-) strand; PAM type: NNNNGHTT; PAM sequence: TGAGGATT
tagtaacagttacccttcat

SEQ ID NO: 34694 - DNA, 20 bp, Artificial Sequence
  Description of Artificial Sequence: Synthetic oligonucleotide
  Target: LAMA2; (-) strand; PAM type: NNNNGHTT; PAM sequence: CAGGGTTT
cccatgctccaatattgaac

SEQ ID NO: 34695 - DNA, 20 bp, Artificial Sequence
  Description of Artificial Sequence: Synthetic oligonucleotide
  Target: LAMA2; (-) strand; PAM type: NNNNGHTT; PAM sequence: GGATGCTT
ttttggacattatgctggga

SEQ ID NO: 34696 - DNA, 20 bp, Artificial Sequence
  Description of Artificial Sequence: Synthetic oligonucleotide
  Target: LAMA2; (-) strand; PAM type: NNNNGHTT; PAM sequence: TTATGCTT
cacttaaaatgacccctttc

SEQ ID NO: 34697 - DNA, 20 bp, Artificial Sequence
  Description of Artificial Sequence: Synthetic oligonucleotide
  Target: LAMA2; (-) strand; PAM type: NNNNGHTT; PAM sequence: ACTGGCTT
tccaagctacagttcagtgg

SEQ ID NO: 34698 - DNA, 20 bp, Artificial Sequence
  Description of Artificial Sequence: Synthetic oligonucleotide
  Target: LAMA2; (-) strand; PAM type: NNNNGHTT; PAM sequence: TATAGATT
gtattactccctcagatcac

SEQ ID NO: 34699 - DNA, 20 bp, Artificial Sequence
  Description of Artificial Sequence: Synthetic oligonucleotide
  Target: LAMA2; (-) strand; PAM type: NNNNGHTT; PAM sequence: TGGAGTTT
ttattctacagtcattaact

SEQ ID NO: 34700 - DNA, 20 bp, Artificial Sequence
  Description of Artificial Sequence: Synthetic oligonucleotide
  Target: LAMA2; (-) strand; PAM type: NNNNGHTT; PAM sequence: AGAAGCTT
caacagttttggggacaata

SEQ ID NO: 34701 - DNA, 20 bp, Artificial Sequence
  Description of Artificial Sequence: Synthetic oligonucleotide
  Target: LAMA2; (-) strand; PAM type: NNNNGHTT; PAM sequence: AACAGTTT
gctgagttacatactatatc

SEQ ID NO: 34702 - DNA, 20 bp, Artificial Sequence
  Description of Artificial Sequence: Synthetic oligonucleotide
  Target: LAMA2; (-) strand; PAM type: NNNNGHTT; PAM sequence: AAAAGTTT
taaataaataaaaagggtag

SEQ ID NO: 34703 - DNA, 20 bp, Artificial Sequence
  Description of Artificial Sequence: Synthetic oligonucleotide
  Target: LAMA2; (-) strand; PAM type: NNNNGHTT; PAM sequence: CTTGGTTT
tgaaatgccgagtgttgagg

SEQ ID NO: 34704 - DNA, 20 bp, Artificial Sequence
  Description of Artificial Sequence: Synthetic oligonucleotide
  Target: LAMA2; (-) strand; PAM type: NNNNGHTT; PAM sequence: TGAGGCTT
tggcctgaaatgccgagtgt

SEQ ID NO: 34705 - DNA, 20 bp, Artificial Sequence
  Description of Artificial Sequence: Synthetic oligonucleotide
  Target: LAMA2; (-) strand; PAM type: NNNNGHTT; PAM sequence: CTGTGATT
tgcacaagcctcccaaagtg

SEQ ID NO: 34706 - DNA, 20 bp, Artificial Sequence
  Description of Artificial Sequence: Synthetic oligonucleotide
  Target: LAMA2; (-) strand; PAM type: NNNNGHTT; PAM sequence: TTTTGTTT
ttgaatttgaaatggtttgt

SEQ ID NO: 34707 - DNA, 20 bp, Artificial Sequence
  Description of Artificial Sequence: Synthetic oligonucleotide
  Target: LAMA2; (-) strand; PAM type: NNNNGHTT; PAM sequence: GTTTGTTT
atatgtttgaatttgaaatg

SEQ ID NO: 34708 - DNA, 20 bp, Artificial Sequence
  Description of Artificial Sequence: Synthetic oligonucleotide
  Target: LAMA2; (-) strand; PAM type: NNNNGHTT; PAM sequence: AATGGTTT
aaaaatatgtttgaatttga

SEQ ID NO: 34709 - DNA, 20 bp, Artificial Sequence
  Description of Artificial Sequence: Synthetic oligonucleotide
  Target: LAMA2; (-) strand; PAM type: NNNNGHTT; PAM sequence: ATATGTTT
ttcttttttaattcagaaaa

SEQ ID NO: 34710 - DNA, 20 bp, Artificial Sequence
  Description of Artificial Sequence: Synthetic oligonucleotide
  Target: LAMA2; (-) strand; PAM type: NNNNGHTT; PAM sequence: ATTTGCTT
taatatactctaggaaagat

SEQ ID NO: 34711 - DNA, 20 bp, Artificial Sequence
  Description of Artificial Sequence: Synthetic oligonucleotide
  Target: LAMA2; (-) strand; PAM type: NNNNGHTT; PAM sequence: TCCAGATT
tttattcttgttagctaaca

SEQ ID NO: 34712 - DNA, 20 bp, Artificial Sequence
  Description of Artificial Sequence: Synthetic oligonucleotide
  Target: LAMA2; (-) strand; PAM type: NNNNGHTT; PAM sequence: AGCAGTTT
tttagatctccagcatctaa

SEQ ID NO: 34713 - DNA, 20 bp, Artificial Sequence
  Description of Artificial Sequence: Synthetic oligonucleotide
  Target: LAMA2; (-) strand; PAM type: NNNNGHTT; PAM sequence: CTATGTTT
acatttatttgttatgatgc

SEQ ID NO: 34714 - DNA, 20 bp, Artificial Sequence
  Description of Artificial Sequence: Synthetic oligonucleotide
  Target: LAMA2; (-) strand; PAM type: NNNNGHTT; PAM sequence: TCAAGCTT
tgaaattgctttctgaacaa

SEQ ID NO: 34715 - DNA, 20 bp, Artificial Sequence
  Description of Artificial Sequence: Synthetic oligonucleotide
  Target: LAMA2; (-) strand; PAM type: NNNNGHTT; PAM sequence: AATTGCTT
catctcctaaatatagatga

SEQ ID NO: 34716 - DNA, 20 bp, Artificial Sequence
  Description of Artificial Sequence: Synthetic oligonucleotide
  Target: LAMA2; (-) strand; PAM type: NNNNGHTT; PAM sequence: TTTGGATT
aggtgtcaatagatgctcaa

SEQ ID NO: 34717 - DNA, 20 bp, Artificial Sequence
  Description of Artificial Sequence: Synthetic oligonucleotide
  Target: LAMA2; (-) strand; PAM type: NNNNGHTT; PAM sequence: ATGTGATT
gagaggggagagtcctgttg

SEQ ID NO: 34718 - DNA, 20 bp, Artificial Sequence
  Description of Artificial Sequence: Synthetic oligonucleotide
  Target: LAMA2; (-) strand; PAM type: NNNNGHTT; PAM sequence: GAAAGCTT
aaaataaagacaacaaagag

SEQ ID NO: 34719 - DNA, 20 bp, Artificial Sequence
  Description of Artificial Sequence: Synthetic oligonucleotide
  Target: LAMA2; (-) strand; PAM type: NNNNGHTT; PAM sequence: CTCCGATT
aacaggaggtatttttcctc

SEQ ID NO: 34720 - DNA, 20 bp, Artificial Sequence
  Description of Artificial Sequence: Synthetic oligonucleotide
  Target: LAMA2; (-) strand; PAM type: NNNNGHTT; PAM sequence: CAGAGATT
catcacccatgcaaggccaa

SEQ ID NO: 34721 - DNA, 20 bp, Artificial Sequence
  Description of Artificial Sequence: Synthetic oligonucleotide
  Target: LAMA2; (-) strand; PAM type: NNNNGHTT; PAM sequence: GATAGTTT
cttttacttaaaatcaagaa

SEQ ID NO: 34722 - DNA, 20 bp, Artificial Sequence
  Description of Artificial Sequence: Synthetic oligonucleotide
  Target: LAMA2; (-) strand; PAM type: NNNNGHTT; PAM sequence: CATTGCTT
aatgttagagggcctttttt

SEQ ID NO: 34723 - DNA, 20 bp, Artificial Sequence
  Description of Artificial Sequence: Synthetic oligonucleotide
  Target: LAMA2; (-) strand; PAM type: NNNNGHTT; PAM sequence: CTATGTTT
atagtaatattttatacaaa

SEQ ID NO: 34724 - DNA, 20 bp, Artificial Sequence
  Description of Artificial Sequence: Synthetic oligonucleotide
  Target: LAMA2; (-) strand; PAM type: NNNNGHTT; PAM sequence: TTTTGTTT
actacagacataggttttgt

SEQ ID NO: 34725 - DNA, 20 bp, Artificial Sequence
  Description of Artificial Sequence: Synthetic oligonucleotide
  Target: LAMA2; (-) strand; PAM type: NNNNGHTT; PAM sequence: TTTTGTTT
atacatactacagacatagg

SEQ ID NO: 34726 - DNA, 20 bp, Artificial Sequence
  Description of Artificial Sequence: Synthetic oligonucleotide
  Target: LAMA2; (-) strand; PAM type: NNNNGHTT; PAM sequence: ATAGGTTT
caaatatacatactacagac

SEQ ID NO: 34727 - DNA, 20 bp, Artificial Sequence
  Description of Artificial Sequence: Synthetic oligonucleotide
  Target: LAMA2; (-) strand; PAM type: NNNNGHTT; PAM sequence: ATCAGTTT
acaccaaaaattgtcctttt

SEQ ID NO: 34728 - DNA, 20 bp, Artificial Sequence
  Description of Artificial Sequence: Synthetic oligonucleotide
  Target: LAMA2; (-) strand; PAM type: NNNNGHTT; PAM sequence: GTAGGTTT
aaataatgcaaatgtacttt

SEQ ID NO: 34729 - DNA, 20 bp, Artificial Sequence
  Description of Artificial Sequence: Synthetic oligonucleotide
  Target: LAMA2; (-) strand; PAM type: NNNNGHTT; PAM sequence: ATTAGCTT
ctttttgaagattaagaaaa

SEQ ID NO: 34730 - DNA, 20 bp, Artificial Sequence
  Description of Artificial Sequence: Synthetic oligonucleotide
  Target: LAMA2; (-) strand; PAM type: NNNNGHTT; PAM sequence: TGAAGATT
aatttgatccctaaactttt

SEQ ID NO: 34731 - DNA, 20 bp, Artificial Sequence
  Description of Artificial Sequence: Synthetic oligonucleotide
  Target: LAMA2; (-) strand; PAM type: NNNNGHTT; PAM sequence: ACAAGTTT
ataatccactggtcgaagag

SEQ ID NO: 34732 - DNA, 20 bp, Artificial Sequence
  Description of Artificial Sequence: Synthetic oligonucleotide
  Target: LAMA2; (-) strand; PAM type: NNNNGHTT; PAM sequence: TTATGTTT
atcagacagcattatggagt

SEQ ID NO: 34733 - DNA, 20 bp, Artificial Sequence
  Description of Artificial Sequence: Synthetic oligonucleotide
  Target: LAMA2; (-) strand; PAM type: NNNNGHTT; PAM sequence: TGGAGTTT
aataatatcagacagcatta

SEQ ID NO: 34734 - DNA, 20 bp, Artificial Sequence
  Description of Artificial Sequence: Synthetic oligonucleotide
  Target: LAMA2; (-) strand; PAM type: NNNNGHTT; PAM sequence: TCCTGTTT
taatgctccatgatgttcct

SEQ ID NO: 34735 - DNA, 20 bp, Artificial Sequence
  Description of Artificial Sequence: Synthetic oligonucleotide
  Target: LAMA2; (-) strand; PAM type: NNNNGHTT; PAM sequence: CAGAGCTT
cctaagacacaaagaatttc

SEQ ID NO: 34736 - DNA, 20 bp, Artificial Sequence
  Description of Artificial Sequence: Synthetic oligonucleotide
  Target: LAMA2; (-) strand; PAM type: NNNNGHTT; PAM sequence: CCATGTTT
cacccacataaaaacaactg

SEQ ID NO: 34737 - DNA, 20 bp, Artificial Sequence
  Description of Artificial Sequence: Synthetic oligonucleotide
  Target: LAMA2; (-) strand; PAM type: NNNNGHTT; PAM sequence: GTTAGATT
aataacagagctttgctgta

SEQ ID NO: 34738 - DNA, 20 bp, Artificial Sequence
  Description of Artificial Sequence: Synthetic oligonucleotide
  Target: LAMA2; (-) strand; PAM type: NNNNGHTT; PAM sequence: CAGAGCTT
tgtactgtactgaagaataa

SEQ ID NO: 34739 - DNA, 20 bp, Artificial Sequence
  Description of Artificial Sequence: Synthetic oligonucleotide
  Target: LAMA2; (-) strand; PAM type: NNNNGHTT; PAM sequence: TCTGGCTT
tttcacccaaatgtattata

SEQ ID NO: 34740 - DNA, 20 bp, Artificial Sequence
  Description of Artificial Sequence: Synthetic oligonucleotide
  Target: LAMA2; (-) strand; PAM type: NNNNGHTT; PAM sequence: TGTAGTTT
aagatccccctctatgattt

SEQ ID NO: 34741 - DNA, 20 bp, Artificial Sequence
  Description of Artificial Sequence: Synthetic oligonucleotide
  Target: LAMA2; (-) strand; PAM type: NNNNGHTT; PAM sequence: CTATGATT
gctcttaaaaagatccccct

SEQ ID NO: 34742 - DNA, 20 bp, Artificial Sequence
  Description of Artificial Sequence: Synthetic oligonucleotide
  Target: LAMA2; (-) strand; PAM type: NNNNGHTT; PAM sequence: GATTGTTT
ttctctgccttaaaccaaaa

SEQ ID NO: 34743 - DNA, 20 bp, Artificial Sequence
  Description of Artificial Sequence: Synthetic oligonucleotide
  Target: LAMA2; (-) strand; PAM type: NNNNGHTT; PAM sequence: AAAAGATT
atacttctctgccttaaacc

SEQ ID NO: 34744 - DNA, 20 bp, Artificial Sequence
  Description of Artificial Sequence: Synthetic oligonucleotide
  Target: LAMA2; (-) strand; PAM type: NNNNGHTT; PAM sequence: TAGTGTTT
caggcttatcttatgcaatc

SEQ ID NO: 34745 - DNA, 20 bp, Artificial Sequence
  Description of Artificial Sequence: Synthetic oligonucleotide
  Target: LAMA2; (-) strand; PAM type: NNNNGHTT; PAM sequence: ACAGGCTT
aaaattaagttggaacaggc

SEQ ID NO: 34746 - DNA, 20 bp, Artificial Sequence
  Description of Artificial Sequence: Synthetic oligonucleotide
  Target: LAMA2; (-) strand; PAM type: NNNNGHTT; PAM sequence: TATAGATT
ttttgctcacacctgtgcct

SEQ ID NO: 34747 - DNA, 20 bp, Artificial Sequence
  Description of Artificial Sequence: Synthetic oligonucleotide
  Target: LAMA2; (-) strand; PAM type: NNNNGHTT; PAM sequence: GAGTGATT
atttagtatttccttgtgag

SEQ ID NO: 34748 - DNA, 20 bp, Artificial Sequence
  Description of Artificial Sequence: Synthetic oligonucleotide
  Target: LAMA2; (-) strand; PAM type: NNNNGHTT; PAM sequence: GTTGGATT
atagaacaactttaatgact

SEQ ID NO: 34749 - DNA, 20 bp, Artificial Sequence
  Description of Artificial Sequence: Synthetic oligonucleotide
  Target: LAMA2; (-) strand; PAM type: NNNNGHTT; PAM sequence: TGAAGATT
cttatattaaaaatacaaac

SEQ ID NO: 34750 - DNA, 20 bp, Artificial Sequence
  Description of Artificial Sequence: Synthetic oligonucleotide
  Target: LAMA2; (-) strand; PAM type: NNNNGHTT; PAM sequence: CTTTGATT
cctatccacataagcctttg

SEQ ID NO: 34751 - DNA, 20 bp, Artificial Sequence
  Description of Artificial Sequence: Synthetic oligonucleotide
  Target: LAMA2; (-) strand; PAM type: NNNNGHTT; PAM sequence: CTTTGCTT
aatgccctatccacataagc

SEQ ID NO: 34752 - DNA, 20 bp, Artificial Sequence
  Description of Artificial Sequence: Synthetic oligonucleotide
  Target: LAMA2; (-) strand; PAM type: NNNNGHTT; PAM sequence: AACAGATT
tgtaggctagtggttaaata

SEQ ID NO: 34753 - DNA, 20 bp, Artificial Sequence
  Description of Artificial Sequence: Synthetic oligonucleotide
  Target: LAMA2; (-) strand; PAM type: NNNNGHTT; PAM sequence: TTGAGTTT
acatattttgccttctgttt

SEQ ID NO: 34754 - DNA, 20 bp, Artificial Sequence
  Description of Artificial Sequence: Synthetic oligonucleotide
  Target: LAMA2; (-) strand; PAM type: NNNNGHTT; PAM sequence: TTCTGTTT
gttcttttacatattttgcc

SEQ ID NO: 34755 - DNA, 20 bp, Artificial Sequence
  Description of Artificial Sequence: Synthetic oligonucleotide
  Target: LAMA2; (-) strand; PAM type: NNNNGHTT; PAM sequence: CTCAGTTT
attctatttttaaaaatatt

SEQ ID NO: 34756 - DNA, 20 bp, Artificial Sequence
  Description of Artificial Sequence: Synthetic oligonucleotide
  Target: LAMA2; (-) strand; PAM type: NNNNGHTT; PAM sequence: ATGTGATT
tagaagaaagaaactcttaa

SEQ ID NO: 34757 - DNA, 20 bp, Artificial Sequence
  Description of Artificial Sequence: Synthetic oligonucleotide
  Target: LAMA2; (-) strand; PAM type: NNNNGHTT; PAM sequence: GGGGGTTT
ttttaataaaaaccaaactt

SEQ ID NO: 34758 - DNA, 20 bp, Artificial Sequence
  Description of Artificial Sequence: Synthetic oligonucleotide
  Target: LAMA2; (-) strand; PAM type: NNNNGHTT; PAM sequence: GATAGATT
aatgtgatgtattgaccaat

SEQ ID NO: 34759 - DNA, 20 bp, Artificial Sequence
  Description of Artificial Sequence: Synthetic oligonucleotide
  Target: LAMA2; (-) strand; PAM type: NNNNGHTT; PAM sequence: CTCAGATT
tagtagctatatatttgctc

SEQ ID NO: 34760 - DNA, 20 bp, Artificial Sequence
  Description of Artificial Sequence: Synthetic oligonucleotide
  Target: LAMA2; (-) strand; PAM type: NNNNGHTT; PAM sequence: CTTTGATT
caatgctaaaacttttaaat

SEQ ID NO: 34761 - DNA, 20 bp, Artificial Sequence
  Description of Artificial Sequence: Synthetic oligonucleotide
  Target: LAMA2; (-) strand; PAM type: NNNNGHTT; PAM sequence: CAATGATT
aggcatttaaaatgttttta

SEQ ID NO: 34762 - DNA, 20 bp, Artificial Sequence
  Description of Artificial Sequence: Synthetic oligonucleotide
  Target: LAMA2; (-) strand; PAM type: NNNNGHTT; PAM sequence: AAATGTTT
ctaaaaaatggaggcattta

SEQ ID NO: 34763 - DNA, 20 bp, Artificial Sequence
  Description of Artificial Sequence: Synthetic oligonucleotide
  Target: LAMA2; (-) strand; PAM type: NNNNGHTT; PAM sequence: GAATGTTT
ctcaaggaacattttttact

SEQ ID NO: 34764 - DNA, 20 bp, Artificial Sequence
  Description of Artificial Sequence: Synthetic oligonucleotide
  Target: LAMA2; (-) strand; PAM type: NNNNGHTT; PAM sequence: ATGTGTTT
ttactgagtcatataaattc

SEQ ID NO: 34765 - DNA, 20 bp, Artificial Sequence
  Description of Artificial Sequence: Synthetic oligonucleotide
  Target: LAMA2; (-) strand; PAM type: NNNNGHTT; PAM sequence: AATTGCTT
ctcacattgtgaattgtgtg

SEQ ID NO: 34766 - DNA, 20 bp, Artificial Sequence
  Description of Artificial Sequence: Synthetic oligonucleotide
  Target: LAMA2; (-) strand; PAM type: NNNNGHTT; PAM sequence: ATATGCTT
aaattttattctacagtatc

SEQ ID NO: 34767 - DNA, 20 bp, Artificial Sequence
  Description of Artificial Sequence: Synthetic oligonucleotide
  Target: LAMA2; (-) strand; PAM type: NNNNGHTT; PAM sequence: TGGAGATT
atttcacagaagagtcaggt

SEQ ID NO: 34768 - DNA, 20 bp, Artificial Sequence
  Description of Artificial Sequence: Synthetic oligonucleotide
  Target: LAMA2; (-) strand; PAM type: NNNNGHTT; PAM sequence: CACGGCTT
ctatgaaggctgcattatct

SEQ ID NO: 34769 - DNA, 20 bp, Artificial Sequence
  Description of Artificial Sequence: Synthetic oligonucleotide
  Target: LAMA2; (-) strand; PAM type: NNNNGHTT; PAM sequence: CTTGGATT
tgctatgtttcacctccact

SEQ ID NO: 34770 - DNA, 20 bp, Artificial Sequence
  Description of Artificial Sequence: Synthetic oligonucleotide
  Target: LAMA2; (-) strand; PAM type: NNNNGHTT; PAM sequence: CTATGTTT
acatataaaaatatccagtg

SEQ ID NO: 34771 - DNA, 20 bp, Artificial Sequence
  Description of Artificial Sequence: Synthetic oligonucleotide
  Target: LAMA2; (-) strand; PAM type: NNNNGHTT; PAM sequence: ATTTGATT
actatcattttatctctcct

SEQ ID NO: 34772 - DNA, 20 bp, Artificial Sequence
  Description of Artificial Sequence: Synthetic oligonucleotide
  Target: LAMA2; (-) strand; PAM type: NNNNGHTT; PAM sequence: TTAAGTTT
tgctgtcatatcatgtaact

SEQ ID NO: 34773 - DNA, 20 bp, Artificial Sequence
  Description of Artificial Sequence: Synthetic oligonucleotide
  Target: LAMA2; (-) strand; PAM type: NNNNGHTT; PAM sequence: TAATGATT
aaaatagaagcagtagatga

SEQ ID NO: 34774 - DNA, 20 bp, Artificial Sequence
  Description of Artificial Sequence: Synthetic oligonucleotide
  Target: LAMA2; (-) strand; PAM type: NNNNGHTT; PAM sequence: ATTCGATT
ataaaatccatcataccatc

SEQ ID NO: 34775 - DNA, 20 bp, Artificial Sequence
  Description of Artificial Sequence: Synthetic oligonucleotide
  Target: LAMA2; (-) strand; PAM type: NNNNGHTT; PAM sequence: CACTGCTT
tttaatttatgaaagaattg

SEQ ID NO: 34776 - DNA, 20 bp, Artificial Sequence
  Description of Artificial Sequence: Synthetic oligonucleotide
  Target: LAMA2; (-) strand; PAM type: NNNNGHTT; PAM sequence: AGTGGTTT
gtattaaacctgtaagattt

SEQ ID NO: 34777 - DNA, 20 bp, Artificial Sequence
  Description of Artificial Sequence: Synthetic oligonucleotide
  Target: LAMA2; (-) strand; PAM type: NNNNGHTT; PAM sequence: GTAAGATT
gagttttgagtattaaacct

SEQ ID NO: 34778 - DNA, 20 bp, Artificial Sequence
  Description of Artificial Sequence: Synthetic oligonucleotide
  Target: LAMA2; (-) strand; PAM type: NNNNGHTT; PAM sequence: AGGAGTTT
gtaggtatattgaagacaag

SEQ ID NO: 34779 - DNA, 20 bp, Artificial Sequence
  Description of Artificial Sequence: Synthetic oligonucleotide
  Target: LAMA2; (-) strand; PAM type: NNNNGHTT; PAM sequence: ATCTGTTT
acaaaaaaggattattctac

SEQ ID NO: 34780 - DNA, 20 bp, Artificial Sequence
  Description of Artificial Sequence: Synthetic oligonucleotide
  Target: LAMA2; (-) strand; PAM type: NNNNGHTT; PAM sequence: AAAGGATT
gtgttaaaaacaacaacaaa

SEQ ID NO: 34781 - DNA, 20 bp, Artificial Sequence
  Description of Artificial Sequence: Synthetic oligonucleotide
  Target: LAMA2; (-) strand; PAM type: NNNNGHTT; PAM sequence: ATAGGATT
attattccctgtatgggcta

SEQ ID NO: 34782 - DNA, 20 bp, Artificial Sequence
  Description of Artificial Sequence: Synthetic oligonucleotide
  Target: LAMA2; (-) strand; PAM type: NNNNGHTT; PAM sequence: AATGGATT
gtaatctttaaagagcaata

SEQ ID NO: 34783 - DNA, 20 bp, Artificial Sequence
  Description of Artificial Sequence: Synthetic oligonucleotide
  Target: LAMA2; (-) strand; PAM type: NNNNGHTT; PAM sequence: TCCAGATT
atttctgcttctatgaattt

SEQ ID NO: 34784 - DNA, 20 bp, Artificial Sequence
  Description of Artificial Sequence: Synthetic oligonucleotide
  Target: LAMA2; (-) strand; PAM type: NNNNGHTT; PAM sequence: TTCTGCTT
tgattcattagattacttat

SEQ ID NO: 34785 - DNA, 20 bp, Artificial Sequence
  Description of Artificial Sequence: Synthetic oligonucleotide
  Target: LAMA2; (-) strand; PAM type: NNNNGHTT; PAM sequence: ATTAGATT
cttgacattgtttttgattc

SEQ ID NO: 34786 - DNA, 20 bp, Artificial Sequence
  Description of Artificial Sequence: Synthetic oligonucleotide
  Target: LAMA2; (-) strand; PAM type: NNNNGHTT; PAM sequence: TTTTGATT
gaaacactacttgacattgt

SEQ ID NO: 34787 - DNA, 20 bp, Artificial Sequence
  Description of Artificial Sequence: Synthetic oligonucleotide
  Target: LAMA2; (-) strand; PAM type: NNNNGHTT; PAM sequence: CATTGTTT
gattaagaaacactacttga

SEQ ID NO: 34788 - DNA, 20 bp, Artificial Sequence
  Description of Artificial Sequence: Synthetic oligonucleotide
  Target: LAMA2; (-) strand; PAM type: NNNNGHTT; PAM sequence: TAATGATT
ccaaaattcataaataattg

SEQ ID NO: 34789 - DNA, 20 bp, Artificial Sequence
  Description of Artificial Sequence: Synthetic oligonucleotide
  Target: LAMA2; (-) strand; PAM type: NNNNGHTT; PAM sequence: TTTGGATT
gagactttacaataacactg

SEQ ID NO: 34790 - DNA, 20 bp, Artificial Sequence
  Description of Artificial Sequence: Synthetic oligonucleotide
  Target: LAMA2; (-) strand; PAM type: NNNNGHTT; PAM sequence: CACTGTTT
gcccagagactttacaataa

SEQ ID NO: 34791 - DNA, 20 bp, Artificial Sequence
  Description of Artificial Sequence: Synthetic oligonucleotide
  Target: LAMA2; (-) strand; PAM type: NNNNGHTT; PAM sequence: GATGGTTT
aatatattaaacatataaat

SEQ ID NO: 34792 - DNA, 20 bp, Artificial Sequence
  Description of Artificial Sequence: Synthetic oligonucleotide
  Target: LAMA2; (-) strand; PAM type: NNNNGHTT; PAM sequence: GTTAGATT
ccatgggtacccaggagcct

SEQ ID NO: 34793 - DNA, 20 bp, Artificial Sequence
  Description of Artificial Sequence: Synthetic oligonucleotide
  Target: LAMA2; (-) strand; PAM type: NNNNGHTT; PAM sequence: TAGGGTTT
gagggaaaggaatttaattg

SEQ ID NO: 34794 - DNA, 20 bp, Artificial Sequence
  Description of Artificial Sequence: Synthetic oligonucleotide
  Target: LAMA2; (-) strand; PAM type: NNNNGHTT; PAM sequence: TGATGATT
ttgctgaggcaagaggcagg

SEQ ID NO: 34795 - DNA, 20 bp, Artificial Sequence
  Description of Artificial Sequence: Synthetic oligonucleotide
  Target: LAMA2; (-) strand; PAM type: NNNNGHTT; PAM sequence: TAGAGCTT
atctcctttaaaatacaacc

SEQ ID NO: 34796 - DNA, 20 bp, Artificial Sequence
  Description of Artificial Sequence: Synthetic oligonucleotide
  Target: LAMA2; (-) strand; PAM type: NNNNGHTT; PAM sequence: ATGAGCTT
aagaattgcaactttttgtt

SEQ ID NO: 34797 - DNA, 20 bp, Artificial Sequence
  Description of Artificial Sequence: Synthetic oligonucleotide
  Target: LAMA2; (-) strand; PAM type: NNNNGHTT; PAM sequence: AGTTGTTT
aaatgtttaaattaagttat

SEQ ID NO: 34798 - DNA, 20 bp, Artificial Sequence
  Description of Artificial Sequence: Synthetic oligonucleotide
  Target: LAMA2; (-) strand; PAM type: NNNNGHTT; PAM sequence: AAATGTTT
aaaggaagagataatgtcta

SEQ ID NO: 34799 - DNA, 20 bp, Artificial Sequence
  Description of Artificial Sequence: Synthetic oligonucleotide
  Target: LAMA2; (-) strand; PAM type: NNNNGHTT; PAM sequence: TATGGTTT
tcagctgtgagtaatattta

SEQ ID NO: 34800 - DNA, 20 bp, Artificial Sequence
  Description of Artificial Sequence: Synthetic oligonucleotide
  Target: LAMA2; (-) strand; PAM type: NNNNGHTT; PAM sequence: TGTAGTTT
ttaataattctgtcagaaag

SEQ ID NO: 34801 - DNA, 20 bp, Artificial Sequence
  Description of Artificial Sequence: Synthetic oligonucleotide
  Target: LAMA2; (-) strand; PAM type: NNNNGHTT; PAM sequence: GGGAGTTT
atgtgatgaaacatactgaa

SEQ ID NO: 34802 - DNA, 20 bp, Artificial Sequence
  Description of Artificial Sequence: Synthetic oligonucleotide
  Target: LAMA2; (-) strand; PAM type: NNNNGHTT; PAM sequence: AATAGATT
aataacaaaaatcatcaatt

SEQ ID NO: 34803 - DNA, 20 bp, Artificial Sequence
  Description of Artificial Sequence: Synthetic oligonucleotide
  Target: LAMA2; (-) strand; PAM type: NNNNGHTT; PAM sequence: GATGGTTT
gtgggagagaaaagcatcag

SEQ ID NO: 34804 - DNA, 20 bp, Artificial Sequence
  Description of Artificial Sequence: Synthetic oligonucleotide
  Target: LAMA2; (-) strand; PAM type: NNNNGHTT; PAM sequence: AGATGCTT
atcttcaaaattctgagaag

SEQ ID NO: 34805 - DNA, 20 bp, Artificial Sequence
  Description of Artificial Sequence: Synthetic oligonucleotide
  Target: LAMA2; (-) strand; PAM type: NNNNGHTT; PAM sequence: AGCAGTTT
cattgggaatggtaaatctt

SEQ ID NO: 34806 - DNA, 20 bp, Artificial Sequence
  Description of Artificial Sequence: Synthetic oligonucleotide
  Target: LAMA2; (-) strand; PAM type: NNNNGHTT; PAM sequence: GGCAGTTT
caggaatggcagtgggcagg

SEQ ID NO: 34807 - DNA, 20 bp, Artificial Sequence
  Description of Artificial Sequence: Synthetic oligonucleotide
  Target: LAMA2; (-) strand; PAM type: NNNNGHTT; PAM sequence: ACTTGTTT
gaaagggaagaaatactaag

SEQ ID NO: 34808 - DNA, 20 bp, Artificial Sequence
  Description of Artificial Sequence: Synthetic oligonucleotide
  Target: LAMA2; (-) strand; PAM type: NNNNGHTT; PAM sequence: AAAAGTTT
gagtacagagagaggcaata

SEQ ID NO: 34809 - DNA, 20 bp, Artificial Sequence
  Description of Artificial Sequence: Synthetic oligonucleotide
  Target: LAMA2; (-) strand; PAM type: NNNNGHTT; PAM sequence: AGTAGCTT
cattttttcaagggtcaaga

SEQ ID NO: 34810 - DNA, 20 bp, Artificial Sequence
  Description of Artificial Sequence: Synthetic oligonucleotide
  Target: LAMA2; (-) strand; PAM type: NNNNGHTT; PAM sequence: AAAAGTTT
tttataatttattaatttag

SEQ ID NO: 34811 - DNA, 20 bp, Artificial Sequence
  Description of Artificial Sequence: Synthetic oligonucleotide
  Target: LAMA2; (-) strand; PAM type: NNNNGHTT; PAM sequence: AGTTGCTT
aggtgtttaggcatacatct

SEQ ID NO: 34812 - DNA, 20 bp, Artificial Sequence
  Description of Artificial Sequence: Synthetic oligonucleotide
  Target: LAMA2; (-) strand; PAM type: NNNNGHTT; PAM sequence: AGGTGTTT
catgcgccaggcacttttct

SEQ ID NO: 34813 - DNA, 20 bp, Artificial Sequence
  Description of Artificial Sequence: Synthetic oligonucleotide
  Target: LAMA2; (-) strand; PAM type: NNNNGHTT; PAM sequence: AAAAGTTT
tggggtcaagataaaatcct

SEQ ID NO: 34814 - DNA, 20 bp, Artificial Sequence
  Description of Artificial Sequence: Synthetic oligonucleotide
  Target: LAMA2; (-) strand; PAM type: NNNNGHTT; PAM sequence: AGGGGATT
taaaccaaagacaaaaagct

SEQ ID NO: 34815 - DNA, 20 bp, Artificial Sequence
  Description of Artificial Sequence: Synthetic oligonucleotide
  Target: LAMA2; (-) strand; PAM type: NNNNGHTT; PAM sequence: CCGGGTTT
actaaaaatacaaaaattag

SEQ ID NO: 34816 - DNA, 20 bp, Artificial Sequence
  Description of Artificial Sequence: Synthetic oligonucleotide
  Target: LAMA2; (-) strand; PAM type: NNNNGHTT; PAM sequence: CAGAGATT
taacatgctttcgtgacata

SEQ ID NO: 34817 - DNA, 20 bp, Artificial Sequence
  Description of Artificial Sequence: Synthetic oligonucleotide
  Target: LAMA2; (-) strand; PAM type: NNNNGHTT; PAM sequence: ACATGCTT
ccttgttcatatttgagtta

SEQ ID NO: 34818 - DNA, 20 bp, Artificial Sequence
  Description of Artificial Sequence: Synthetic oligonucleotide
  Target: LAMA2; (-) strand; PAM type: NNNNGHTT; PAM sequence: CAAAGATT
tcaacaaaaatgctagcaga

SEQ ID NO: 34819 - DNA, 20 bp, Artificial Sequence
  Description of Artificial Sequence: Synthetic oligonucleotide
  Target: LAMA2; (-) strand; PAM type: NNNNGHTT; PAM sequence: GTGTGATT
gaaaatctacatattgtaga

SEQ ID NO: 34820 - DNA, 20 bp, Artificial Sequence
  Description of Artificial Sequence: Synthetic oligonucleotide
  Target: LAMA2; (-) strand; PAM type: NNNNGHTT; PAM sequence: CTCAGCTT
cagactggctctccttgctc

SEQ ID NO: 34821 - DNA, 20 bp, Artificial Sequence
  Description of Artificial Sequence: Synthetic oligonucleotide
  Target: LAMA2; (-) strand; PAM type: NNNNGHTT; PAM sequence: TTCAGTTT
aaacatcagactccaagttc

SEQ ID NO: 34822 - DNA, 20 bp, Artificial Sequence
  Description of Artificial Sequence: Synthetic oligonucleotide
  Target: LAMA2; (-) strand; PAM type: NNNNGHTT; PAM sequence: GGATGCTT
ctacatctttctcccttgct

SEQ ID NO: 34823 - DNA, 20 bp, Artificial Sequence
  Description of Artificial Sequence: Synthetic oligonucleotide
  Target: LAMA2; (-) strand; PAM type: NNNNGHTT; PAM sequence: ATTGGATT
ttaatacaagtgtcaacttg

SEQ ID NO: 34824 - DNA, 20 bp, Artificial Sequence
  Description of Artificial Sequence: Synthetic oligonucleotide
  Target: LAMA2; (-) strand; PAM type: NNNNGHTT; PAM sequence: ACTTGATT
gatggttaatacaagtgtca

SEQ ID NO: 34825 - DNA, 20 bp, Artificial Sequence
  Description of Artificial Sequence: Synthetic oligonucleotide
  Target: LAMA2; (-) strand; PAM type: NNNNGHTT; PAM sequence: TTCTGTTT
ggtatgaaagtaatatcata

SEQ ID NO: 34826 - DNA, 20 bp, Artificial Sequence
  Description of Artificial Sequence: Synthetic oligonucleotide
  Target: LAMA2; (-) strand; PAM type: NNNNGHTT; PAM sequence: AAGAGTTT
acgtgagacacacaaaatta

SEQ ID NO: 34827 - DNA, 20 bp, Artificial Sequence
  Description of Artificial Sequence: Synthetic oligonucleotide
  Target: LAMA2; (-) strand; PAM type: NNNNGHTT; PAM sequence: TATTGTTT
aatgagcaatgttattactt

SEQ ID NO: 34828 - DNA, 20 bp, Artificial Sequence
  Description of Artificial Sequence: Synthetic oligonucleotide
  Target: LAMA2; (-) strand; PAM type: NNNNGHTT; PAM sequence: TTGGGATT
gtaattaatcacagttgtga

SEQ ID NO: 34829 - DNA, 20 bp, Artificial Sequence
  Description of Artificial Sequence: Synthetic oligonucleotide
  Target: LAMA2; (-) strand; PAM type: NNNNGHTT; PAM sequence: TTGTGATT
atatttgtaattaatcacag

SEQ ID NO: 34830 - DNA, 20 bp, Artificial Sequence
  Description of Artificial Sequence: Synthetic oligonucleotide
  Target: LAMA2; (-) strand; PAM type: NNNNGHTT; PAM sequence: ATTTGATT
gtaaacttggagtaattttt

SEQ ID NO: 34831 - DNA, 20 bp, Artificial Sequence
  Description of Artificial Sequence: Synthetic oligonucleotide
  Target: LAMA2; (-) strand; PAM type: NNNNGHTT; PAM sequence: TTCTGTTT
tcctttgccttttgagaaaa

SEQ ID NO: 34832 - DNA, 20 bp, Artificial Sequence
  Description of Artificial Sequence: Synthetic oligonucleotide
  Target: LAMA2; (-) strand; PAM type: NNNNGHTT; PAM sequence: ATATGATT
tcagaaggagaaatgtgagt

SEQ ID NO: 34833 - DNA, 20 bp, Artificial Sequence
  Description of Artificial Sequence: Synthetic oligonucleotide
  Target: LAMA2; (-) strand; PAM type: NNNNGHTT; PAM sequence: GTTTGTTT
atctttatctctcatcagta

SEQ ID NO: 34834 - DNA, 20 bp, Artificial Sequence
  Description of Artificial Sequence: Synthetic oligonucleotide
  Target: LAMA2; (-) strand; PAM type: NNNNGHTT; PAM sequence: AGTAGTTT
aattatctttatctctcatc

SEQ ID NO: 34835 - DNA, 20 bp, Artificial Sequence
  Description of Artificial Sequence: Synthetic oligonucleotide
  Target: LAMA2; (-) strand; PAM type: NNNNGHTT; PAM sequence: TTTTGCTT
cccaatataatcatgtcttg

SEQ ID NO: 34836 - DNA, 20 bp, Artificial Sequence
  Description of Artificial Sequence: Synthetic oligonucleotide
  Target: LAMA2; (-) strand; PAM type: NNNNGHTT; PAM sequence: TCTTGTTT
cttctcccaatataatcatg

SEQ ID NO: 34837 - DNA, 20 bp, Artificial Sequence
  Description of Artificial Sequence: Synthetic oligonucleotide
  Target: LAMA2; (-) strand; PAM type: NNNNGHTT; PAM sequence: TAACGATT
gggagggaggataggggctt

SEQ ID NO: 34838 - DNA, 20 bp, Artificial Sequence
  Description of Artificial Sequence: Synthetic oligonucleotide
  Target: LAMA2; (-) strand; PAM type: NNNNGHTT; PAM sequence: AGGGGCTT
tacagaaagggagggaggat

SEQ ID NO: 34839 - DNA, 20 bp, Artificial Sequence
  Description of Artificial Sequence: Synthetic oligonucleotide
  Target: LAMA2; (-) strand; PAM type: NNNNGHTT; PAM sequence: ATTAGATT
gactgtctactaggtaagaa

SEQ ID NO: 34840 - DNA, 20 bp, Artificial Sequence
  Description of Artificial Sequence: Synthetic oligonucleotide
  Target: LAMA2; (-) strand; PAM type: NNNNGHTT; PAM sequence: CCATGATT
atgtggacactagttcattt

SEQ ID NO: 34841 - DNA, 20 bp, Artificial Sequence
  Description of Artificial Sequence: Synthetic oligonucleotide
  Target: LAMA2; (-) strand; PAM type: NNNNGHTT; PAM sequence: GAAGGATT
gcctaaagatagccagatgt

SEQ ID NO: 34842 - DNA, 20 bp, Artificial Sequence
  Description of Artificial Sequence: Synthetic oligonucleotide
  Target: LAMA2; (-) strand; PAM type: NNNNGHTT; PAM sequence: TTAAGATT
ctttgatgtaacattttgat

SEQ ID NO: 34843 - DNA, 20 bp, Artificial Sequence
  Description of Artificial Sequence: Synthetic oligonucleotide
  Target: LAMA2; (-) strand; PAM type: NNNNGHTT; PAM sequence: TTTTGATT
actcttcctttgatgtaaca

SEQ ID NO: 34844 - DNA, 20 bp, Artificial Sequence
  Description of Artificial Sequence: Synthetic oligonucleotide
  Target: LAMA2; (-) strand; PAM type: NNNNGHTT; PAM sequence: TGAGGTTT
agtggagtgtttggttgttt

SEQ ID NO: 34845 - DNA, 20 bp, Artificial Sequence
  Description of Artificial Sequence: Synthetic oligonucleotide
  Target: LAMA2; (-) strand; PAM type: NNNNGHTT; PAM sequence: GGTTGTTT
aacagacaagtggagtgttt

SEQ ID NO: 34846 - DNA, 20 bp, Artificial Sequence
  Description of Artificial Sequence: Synthetic oligonucleotide
  Target: LAMA2; (-) strand; PAM type: NNNNGHTT; PAM sequence: GAGTGTTT
ataatttaaacagacaagtg

SEQ ID NO: 34847 - DNA, 20 bp, Artificial Sequence
  Description of Artificial Sequence: Synthetic oligonucleotide
  Target: LAMA2; (-) strand; PAM type: NNNNGHTT; PAM sequence: AGCTGCTT
cttagaagctgggataacag

SEQ ID NO: 34848 - DNA, 20 bp, Artificial Sequence
  Description of Artificial Sequence: Synthetic oligonucleotide
  Target: LAMA2; (-) strand; PAM type: NNNNGHTT; PAM sequence: GTTAGCTT
aggccaaaatgatgagtctg

SEQ ID NO: 34849 - DNA, 20 bp, Artificial Sequence
  Description of Artificial Sequence: Synthetic oligonucleotide
  Target: LAMA2; (-) strand; PAM type: NNNNGHTT; PAM sequence: GGACGTTT
agcatttattagtaatttgt

SEQ ID NO: 34850 - DNA, 20 bp, Artificial Sequence
  Description of Artificial Sequence: Synthetic oligonucleotide
  Target: LAMA2; (-) strand; PAM type: NNNNGHTT; PAM sequence: CCTGGTTT
tcagctaaaaggcatggctt

SEQ ID NO: 34851 - DNA, 20 bp, Artificial Sequence
  Description of Artificial Sequence: Synthetic oligonucleotide
  Target: LAMA2; (-) strand; PAM type: NNNNGHTT; PAM sequence: CATGGCTT
atgttttgtcagctaaaagg

SEQ ID NO: 34852 - DNA, 20 bp, Artificial Sequence
  Description of Artificial Sequence: Synthetic oligonucleotide
  Target: LAMA2; (-) strand; PAM type: NNNNGHTT; PAM sequence: GAATGTTT
cacccagatagcatttcaat

SEQ ID NO: 34853 - DNA, 20 bp, Artificial Sequence
  Description of Artificial Sequence: Synthetic oligonucleotide
  Target: LAMA2; (-) strand; PAM type: NNNNGHTT; PAM sequence: CAGTGCTT
tattcagatgattaatttct

SEQ ID NO: 34854 - DNA, 20 bp, Artificial Sequence
  Description of Artificial Sequence: Synthetic oligonucleotide
  Target: LAMA2; (-) strand; PAM type: NNNNGHTT; PAM sequence: AGATGATT
tactataatttagactattc

SEQ ID NO: 34855 - DNA, 20 bp, Artificial Sequence
  Description of Artificial Sequence: Synthetic oligonucleotide
  Target: LAMA2; (-) strand; PAM type: NNNNGHTT; PAM sequence: GTTGGTTT
aagcatacaaacatttacat

SEQ ID NO: 34856 - DNA, 20 bp, Artificial Sequence
  Description of Artificial Sequence: Synthetic oligonucleotide
  Target: LAMA2; (-) strand; PAM type: NNNNGHTT; PAM sequence: CTGTGTTT
cttaccttcaaagaaaaaga

SEQ ID NO: 34857 - DNA, 20 bp, Artificial Sequence
  Description of Artificial Sequence: Synthetic oligonucleotide
  Target: LAMA2; (-) strand; PAM type: NNNNGHTT; PAM sequence: TAATGATT
caattctgcactccaggctt

SEQ ID NO: 34858 - DNA, 20 bp, Artificial Sequence
  Description of Artificial Sequence: Synthetic oligonucleotide
  Target: LAMA2; (-) strand; PAM type: NNNNGHTT; PAM sequence: CCAGGCTT
gtcgacaacaattctgcact

SEQ ID NO: 34859 - DNA, 20 bp, Artificial Sequence
  Description of Artificial Sequence: Synthetic oligonucleotide
  Target: LAMA2; (-) strand; PAM type: NNNNGHTT; PAM sequence: TGCAGATT
atgtcagatatcacataaaa

SEQ ID NO: 34860 - DNA, 20 bp, Artificial Sequence
  Description of Artificial Sequence: Synthetic oligonucleotide
  Target: LAMA2; (-) strand; PAM type: NNNNGHTT; PAM sequence: TAGGGATT
agtgtgctgacatttgaaag

SEQ ID NO: 34861 - DNA, 20 bp, Artificial Sequence
  Description of Artificial Sequence: Synthetic oligonucleotide
  Target: LAMA2; (-) strand; PAM type: NNNNGHTT; PAM sequence: CTTAGATT
ttcaaggaaatactcatcta

SEQ ID NO: 34862 - DNA, 20 bp, Artificial Sequence
  Description of Artificial Sequence: Synthetic oligonucleotide
  Target: LAMA2; (-) strand; PAM type: NNNNGHTT; PAM sequence: TGTTGCTT
acaacatttaggctataaca

SEQ ID NO: 34863 - DNA, 20 bp, Artificial Sequence
  Description of Artificial Sequence: Synthetic oligonucleotide
  Target: LAMA2; (-) strand; PAM type: NNNNGHTT; PAM sequence: CATTGTTT
ctgtgaaacatttaaggtta

SEQ ID NO: 34864 - DNA, 20 bp, Artificial Sequence
  Description of Artificial Sequence: Synthetic oligonucleotide
  Target: LAMA2; (-) strand; PAM type: NNNNGHTT; PAM sequence: TTTGGATT
ctttgatgagtagtatgtgt

SEQ ID NO: 34865 - DNA, 20 bp, Artificial Sequence
  Description of Artificial Sequence: Synthetic oligonucleotide
  Target: LAMA2; (-) strand; PAM type: NNNNGHTT; PAM sequence: ATGTGTTT
agatgactttgatgagtagt

SEQ ID NO: 34866 - DNA, 20 bp, Artificial Sequence
  Description of Artificial Sequence: Synthetic oligonucleotide
  Target: LAMA2; (-) strand; PAM type: NNNNGHTT; PAM sequence: CTAAGCTT
tcagatttctatttttcttc

SEQ ID NO: 34867 - DNA, 20 bp, Artificial Sequence
  Description of Artificial Sequence: Synthetic oligonucleotide
  Target: LAMA2; (-) strand; PAM type: NNNNGHTT; PAM sequence: TTCAGATT
tgtggactaagagcaaacat

SEQ ID NO: 34868 - DNA, 20 bp, Artificial Sequence
  Description of Artificial Sequence: Synthetic oligonucleotide
  Target: LAMA2; (-) strand; PAM type: NNNNGHTT; PAM sequence: GCCAGTTT
acagaactggaaactaccaa

SEQ ID NO: 34869 - DNA, 20 bp, Artificial Sequence
  Description of Artificial Sequence: Synthetic oligonucleotide
  Target: LAMA2; (-) strand; PAM type: NNNNGHTT; PAM sequence: GATAGATT
ttatgttacaggtttattat

SEQ ID NO: 34870 - DNA, 20 bp, Artificial Sequence
  Description of Artificial Sequence: Synthetic oligonucleotide
  Target: LAMA2; (-) strand; PAM type: NNNNGHTT; PAM sequence: ACAGGTTT
gtattctgtacttttatgtt

SEQ ID NO: 34871 - DNA, 20 bp, Artificial Sequence
  Description of Artificial Sequence: Synthetic oligonucleotide
  Target: LAMA2; (-) strand; PAM type: NNNNGHTT; PAM sequence: AGTTGCTT
aacaacacaccattcactgc

SEQ ID NO: 34872 - DNA, 20 bp, Artificial Sequence
  Description of Artificial Sequence: Synthetic oligonucleotide
  Target: LAMA2; (-) strand; PAM type: NNNNGHTT; PAM sequence: TCATGATT
tccttgaaagtatatttttt

SEQ ID NO: 34873 - DNA, 20 bp, Artificial Sequence
  Description of Artificial Sequence: Synthetic oligonucleotide
  Target: LAMA2; (-) strand; PAM type: NNNNGHTT; PAM sequence: GTAAGATT
ccaaaatatatatatttgga

SEQ ID NO: 34874 - DNA, 20 bp, Artificial Sequence
  Description of Artificial Sequence: Synthetic oligonucleotide
  Target: LAMA2; (-) strand; PAM type: NNNNGHTT; PAM sequence: CAGTGCTT
ttccaatatattggtcagct

SEQ ID NO: 34875 - DNA, 20 bp, Artificial Sequence
  Description of Artificial Sequence: Synthetic oligonucleotide
  Target: LAMA2; (-) strand; PAM type: NNNNGHTT; PAM sequence: CTTAGTTT
gagatcactggcctgcttta

SEQ ID NO: 34876 - DNA, 20 bp, Artificial Sequence
  Description of Artificial Sequence: Synthetic oligonucleotide
  Target: LAMA2; (-) strand; PAM type: NNNNGHTT; PAM sequence: GCCTGCTT
actcagaatagagatcactg

SEQ ID NO: 34877 - DNA, 20 bp, Artificial Sequence
  Description of Artificial Sequence: Synthetic oligonucleotide
  Target: LAMA2; (-) strand; PAM type: NNNNGHTT; PAM sequence: AAGAGTTT
aaaatacacattagtattta

SEQ ID NO: 34878 - DNA, 20 bp, Artificial Sequence
  Description of Artificial Sequence: Synthetic oligonucleotide
  Target: LAMA2; (-) strand; PAM type: NNNNGHTT; PAM sequence: TTGTGTTT
ctcctggaatataacagaat

SEQ ID NO: 34879 - DNA, 20 bp, Artificial Sequence
  Description of Artificial Sequence: Synthetic oligonucleotide
  Target: LAMA2; (-) strand; PAM type: NNNNGHTT; PAM sequence: ATCTGATT
aagatagttcatgttatcaa

SEQ ID NO: 34880 - DNA, 20 bp, Artificial Sequence
  Description of Artificial Sequence: Synthetic oligonucleotide
  Target: LAMA2; (-) strand; PAM type: NNNNGHTT; PAM sequence: TGATGTTT
aaaatcccaattatctttca

SEQ ID NO: 34881 - DNA, 20 bp, Artificial Sequence
  Description of Artificial Sequence: Synthetic oligonucleotide
  Target: LAMA2; (-) strand; PAM type: NNNNGHTT; PAM sequence: GAATGATT
agtagaaagaagaataaaac

SEQ ID NO: 34882 - DNA, 20 bp, Artificial Sequence
  Description of Artificial Sequence: Synthetic oligonucleotide
  Target: LAMA2; (-) strand; PAM type: NNNNGHTT; PAM sequence: GAGAGCTT
attacatctcctttcctttt

SEQ ID NO: 34883 - DNA, 20 bp, Artificial Sequence
  Description of Artificial Sequence: Synthetic oligonucleotide
  Target: LAMA2; (-) strand; PAM type: NNNNGHTT; PAM sequence: ATGTGTTT
aatgtcatcgatgattgttt

SEQ ID NO: 34884 - DNA, 20 bp, Artificial Sequence
  Description of Artificial Sequence: Synthetic oligonucleotide
  Target: LAMA2; (-) strand; PAM type: NNNNGHTT; PAM sequence: GATTGTTT
taagtaataatgtcatcgat

SEQ ID NO: 34885 - DNA, 20 bp, Artificial Sequence
  Description of Artificial Sequence: Synthetic oligonucleotide
  Target: LAMA2; (-) strand; PAM type: NNNNGHTT; PAM sequence: CGATGATT
gacataagtaataatgtcat

SEQ ID NO: 34886 - DNA, 20 bp, Artificial Sequence
  Description of Artificial Sequence: Synthetic oligonucleotide
  Target: LAMA2; (-) strand; PAM type: NNNNGHTT; PAM sequence: CACAGTTT
atatttttaatctgtttaaa

SEQ ID NO: 34887 - DNA, 20 bp, Artificial Sequence
  Description of Artificial Sequence: Synthetic oligonucleotide
  Target: LAMA2; (-) strand; PAM type: NNNNGHTT; PAM sequence: ATCTGTTT
ctctccagaaaatattttta

SEQ ID NO: 34888 - DNA, 20 bp, Artificial Sequence
  Description of Artificial Sequence: Synthetic oligonucleotide
  Target: LAMA2; (-) strand; PAM type: NNNNGHTT; PAM sequence: TAAAGATT
aagatgactcaagcaggatt

SEQ ID NO: 34889 - DNA, 20 bp, Artificial Sequence
  Description of Artificial Sequence: Synthetic oligonucleotide
  Target: LAMA2; (-) strand; PAM type: NNNNGHTT; PAM sequence: GCAGGATT
tggaataaaagatgactcaa

SEQ ID NO: 34890 - DNA, 20 bp, Artificial Sequence
  Description of Artificial Sequence: Synthetic oligonucleotide
  Target: LAMA2; (-) strand; PAM type: NNNNGHTT; PAM sequence: TCTGGTTT
aaaaaaaaaaaaaaaaaacc

SEQ ID NO: 34891 - DNA, 20 bp, Artificial Sequence
  Description of Artificial Sequence: Synthetic oligonucleotide
  Target: LAMA2; (-) strand; PAM type: NNNNGHTT; PAM sequence: GTCAGATT
ctaaaaagtgttttagaata

SEQ ID NO: 34892 - DNA, 20 bp, Artificial Sequence
  Description of Artificial Sequence: Synthetic oligonucleotide
  Target: LAMA2; (-) strand; PAM type: NNNNGHTT; PAM sequence: AAGTGTTT
acaattagtgatatcctaaa

SEQ ID NO: 34893 - DNA, 20 bp, Artificial Sequence
  Description of Artificial Sequence: Synthetic oligonucleotide
  Target: LAMA2; (-) strand; PAM type: NNNNGHTT; PAM sequence: ATAAGTTT
aaaacaattttctgttcctg

SEQ ID NO: 34894 - DNA, 20 bp, Artificial Sequence
  Description of Artificial Sequence: Synthetic oligonucleotide
  Target: LAMA2; (-) strand; PAM type: NNNNGHTT; PAM sequence: TTTAGTTT
acagaatctttaaaaaaaaa

SEQ ID NO: 34895 - DNA, 20 bp, Artificial Sequence
  Description of Artificial Sequence: Synthetic oligonucleotide
  Target: LAMA2; (-) strand; PAM type: NNNNGHTT; PAM sequence: TATTGTTT
ttccagtctttgtccttatg

SEQ ID NO: 34896 - DNA, 20 bp, Artificial Sequence
  Description of Artificial Sequence: Synthetic oligonucleotide
  Target: LAMA2; (-) strand; PAM type: NNNNGHTT; PAM sequence: TTGAGTTT
gccttacccaagaaaatccc

SEQ ID NO: 34897 - DNA, 20 bp, Artificial Sequence
  Description of Artificial Sequence: Synthetic oligonucleotide
  Target: LAMA2; (-) strand; PAM type: NNNNGHTT; PAM sequence: GATAGTTT
ttaaaaaggattaatgaatg

SEQ ID NO: 34898 - DNA, 20 bp, Artificial Sequence
  Description of Artificial Sequence: Synthetic oligonucleotide
  Target: LAMA2; (-) strand; PAM type: NNNNGHTT; PAM sequence: AAAGGATT
ttctaattacttcagtttaa

SEQ ID NO: 34899 - DNA, 20 bp, Artificial Sequence
  Description of Artificial Sequence: Synthetic oligonucleotide
  Target: LAMA2; (-) strand; PAM type: NNNNGHTT; PAM sequence: TTCAGTTT
gacctgctttttctaattac

SEQ ID NO: 34900 - DNA, 20 bp, Artificial Sequence
  Description of Artificial Sequence: Synthetic oligonucleotide
  Target: LAMA2; (-) strand; PAM type: NNNNGHTT; PAM sequence: ACCTGCTT
gcccatttctttgcacattg

SEQ ID NO: 34901 - DNA, 20 bp, Artificial Sequence
  Description of Artificial Sequence: Synthetic oligonucleotide
  Target: LAMA2; (-) strand; PAM type: NNNNGHTT; PAM sequence: TGCAGATT
atgaaatttaattaactaat

SEQ ID NO: 34902 - DNA, 20 bp, Artificial Sequence
  Description of Artificial Sequence: Synthetic oligonucleotide
  Target: LAMA2; (-) strand; PAM type: NNNNGHTT; PAM sequence: TAAAGTTT
agcttttctaacaatttgcg

SEQ ID NO: 34903 - DNA, 20 bp, Artificial Sequence
  Description of Artificial Sequence: Synthetic oligonucleotide
  Target: LAMA2; (-) strand; PAM type: NNNNGHTT; PAM sequence: ATAAGCTT
ttcatagtagtcatgtttac

SEQ ID NO: 34904 - DNA, 20 bp, Artificial Sequence
  Description of Artificial Sequence: Synthetic oligonucleotide
  Target: LAMA2; (-) strand; PAM type: NNNNGHTT; PAM sequence: TCATGTTT
ctggtctgtattcatagtag

SEQ ID NO: 34905 - DNA, 20 bp, Artificial Sequence
  Description of Artificial Sequence: Synthetic oligonucleotide
  Target: LAMA2; (-) strand; PAM type: NNNNGHTT; PAM sequence: GAGGGCTT
gtatgtctctgggaatgata

SEQ ID NO: 34906 - DNA, 20 bp, Artificial Sequence
  Description of Artificial Sequence: Synthetic oligonucleotide
  Target: LAMA2; (-) strand; PAM type: NNNNGHTT; PAM sequence: ATTTGATT
atatttctctttaagtcagt

SEQ ID NO: 34907 - DNA, 20 bp, Artificial Sequence
  Description of Artificial Sequence: Synthetic oligonucleotide
  Target: LAMA2; (-) strand; PAM type: NNNNGHTT; PAM sequence: CTTTGTTT
gtgccttgtaaaagacattt

SEQ ID NO: 34908 - DNA, 20 bp, Artificial Sequence
  Description of Artificial Sequence: Synthetic oligonucleotide
  Target: LAMA2; (-) strand; PAM type: NNNNGHTT; PAM sequence: GTATGTTT
agcataaatgctggtcagga

SEQ ID NO: 34909 - DNA, 20 bp, Artificial Sequence
  Description of Artificial Sequence: Synthetic oligonucleotide
  Target: LAMA2; (-) strand; PAM type: NNNNGHTT; PAM sequence: TATAGATT
actcatcaagtattggtcaa

SEQ ID NO: 34910 - DNA, 20 bp, Artificial Sequence
  Description of Artificial Sequence: Synthetic oligonucleotide
  Target: LAMA2; (-) strand; PAM type: NNNNGHTT; PAM sequence: TCCTGATT
gaacccatgcaaacctatga

SEQ ID NO: 34911 - DNA, 20 bp, Artificial Sequence
  Description of Artificial Sequence: Synthetic oligonucleotide
  Target: LAMA2; (-) strand; PAM type: NNNNGHTT; PAM sequence: TGATGCTT
agggtgagaatggagtcctt

SEQ ID NO: 34912 - DNA, 20 bp, Artificial Sequence
  Description of Artificial Sequence: Synthetic oligonucleotide
  Target: LAMA2; (-) strand; PAM type: NNNNGHTT; PAM sequence: CCGTGTTT
catcccctgagcagtaaaat

SEQ ID NO: 34913 - DNA, 20 bp, Artificial Sequence
  Description of Artificial Sequence: Synthetic oligonucleotide
  Target: LAMA2; (-) strand; PAM type: NNNNGHTT; PAM sequence: TCACGATT
ttagagagcaaaattggccc

SEQ ID NO: 34914 - DNA, 20 bp, Artificial Sequence
  Description of Artificial Sequence: Synthetic oligonucleotide
  Target: LAMA2; (-) strand; PAM type: NNNNGHTT; PAM sequence: GTCTGTTT
tagaaggaatctagtgattg

SEQ ID NO: 34915 - DNA, 20 bp, Artificial Sequence
  Description of Artificial Sequence: Synthetic oligonucleotide
  Target: LAMA2; (-) strand; PAM type: NNNNGHTT; PAM sequence: TAGTGATT
tttgatctgtagaaggaatc

SEQ ID NO: 34916 - DNA, 20 bp, Artificial Sequence
  Description of Artificial Sequence: Synthetic oligonucleotide
  Target: LAMA2; (-) strand; PAM type: NNNNGHTT; PAM sequence: GTTTGATT
cctcacatggattccctttt

SEQ ID NO: 34917 - DNA, 20 bp, Artificial Sequence
  Description of Artificial Sequence: Synthetic oligonucleotide
  Target: LAMA2; (-) strand; PAM type: NNNNGHTT; PAM sequence: TTTTGTTT
gttgcctcacatggattccc

SEQ ID NO: 34918 - DNA, 20 bp, Artificial Sequence
  Description of Artificial Sequence: Synthetic oligonucleotide
  Target: LAMA2; (-) strand; PAM type: NNNNGHTT; PAM sequence: CATGGATT
gcccttccttagttgcctca

SEQ ID NO: 34919 - DNA, 20 bp, Artificial Sequence
  Description of Artificial Sequence: Synthetic oligonucleotide
  Target: LAMA2; (-) strand; PAM type: NNNNGHTT; PAM sequence: TACAGCTT
atctagggcatgagtacatc

SEQ ID NO: 34920 - DNA, 20 bp, Artificial Sequence
  Description of Artificial Sequence: Synthetic oligonucleotide
  Target: LAMA2; (-) strand; PAM type: NNNNGHTT; PAM sequence: ATGGGTTT
tgaataagtgttagacacca

SEQ ID NO: 34921 - DNA, 20 bp, Artificial Sequence
  Description of Artificial Sequence: Synthetic oligonucleotide
  Target: LAMA2; (-) strand; PAM type: NNNNGHTT; PAM sequence: ATTTGTTT
cctcataagagctcaaaaat

SEQ ID NO: 34922 - DNA, 20 bp, Artificial Sequence
  Description of Artificial Sequence: Synthetic oligonucleotide
  Target: LAMA2; (-) strand; PAM type: NNNNGHTT; PAM sequence: CATTGCTT
cttgtttactcctgttttcc

SEQ ID NO: 34923 - DNA, 20 bp, Artificial Sequence
  Description of Artificial Sequence: Synthetic oligonucleotide
  Target: LAMA2; (-) strand; PAM type: NNNNGHTT; PAM sequence: TCCTGTTT
aagaatggggacttgtttac

SEQ ID NO: 34924 - DNA, 20 bp, Artificial Sequence
  Description of Artificial Sequence: Synthetic oligonucleotide
  Target: LAMA2; (-) strand; PAM type: NNNNGHTT; PAM sequence: ACTTGTTT
aaaacatcataagaatgggg

SEQ ID NO: 34925 - DNA, 20 bp, Artificial Sequence
  Description of Artificial Sequence: Synthetic oligonucleotide
  Target: LAMA2; (-) strand; PAM type: NNNNGHTT; PAM sequence: ATTGGCTT
atttatttctttccttattc

SEQ ID NO: 34926 - DNA, 20 bp, Artificial Sequence
  Description of Artificial Sequence: Synthetic oligonucleotide
  Target: LAMA2; (-) strand; PAM type: NNNNGHTT; PAM sequence: TGTTGATT
agcattatatgaaattatct

SEQ ID NO: 34927 - DNA, 20 bp, Artificial Sequence
  Description of Artificial Sequence: Synthetic oligonucleotide
  Target: LAMA2; (-) strand; PAM type: NNNNGHTT; PAM sequence: ACCTGTTT
accccatgatctattccaac

SEQ ID NO: 34928 - DNA, 20 bp, Artificial Sequence
  Description of Artificial Sequence: Synthetic oligonucleotide
  Target: LAMA2; (-) strand; PAM type: NNNNGHTT; PAM sequence: CCTTGTTT
caatattagagcctttaggg

SEQ ID NO: 34929 - DNA, 20 bp, Artificial Sequence
  Description of Artificial Sequence: Synthetic oligonucleotide
  Target: LAMA2; (-) strand; PAM type: NNNNGHTT; PAM sequence: ATCTGTTT
ccaacccttgtctccttatg

SEQ ID NO: 34930 - DNA, 20 bp, Artificial Sequence
  Description of Artificial Sequence: Synthetic oligonucleotide
  Target: LAMA2; (-) strand; PAM type: NNNNGHTT; PAM sequence: CATTGCTT
accaaagtcttctgtagaag

SEQ ID NO: 34931 - DNA, 20 bp, Artificial Sequence
  Description of Artificial Sequence: Synthetic oligonucleotide
  Target: LAMA2; (-) strand; PAM type: NNNNGHTT; PAM sequence: CAGAGCTT
gaagctgtagtggtctcctg

SEQ ID NO: 34932 - DNA, 20 bp, Artificial Sequence
  Description of Artificial Sequence: Synthetic oligonucleotide
  Target: LAMA2; (-) strand; PAM type: NNNNGHTT; PAM sequence: AGGGGTTT
atgccagattttaactgctc

SEQ ID NO: 34933 - DNA, 20 bp, Artificial Sequence
  Description of Artificial Sequence: Synthetic oligonucleotide
  Target: LAMA2; (-) strand; PAM type: NNNNGHTT; PAM sequence: GCCAGATT
gaattgatagtgttattgat

SEQ ID NO: 34934 - DNA, 20 bp, Artificial Sequence
  Description of Artificial Sequence: Synthetic oligonucleotide
  Target: LAMA2; (-) strand; PAM type: NNNNGHTT; PAM sequence: AATGGTTT
accaaaaaagaggtaaaaga

SEQ ID NO: 34935 - DNA, 20 bp, Artificial Sequence
  Description of Artificial Sequence: Synthetic oligonucleotide
  Target: LAMA2; (-) strand; PAM type: NNNNGHTT; PAM sequence: ATGTGATT
acttctggtaaattgcatac

SEQ ID NO: 34936 - DNA, 20 bp, Artificial Sequence
  Description of Artificial Sequence: Synthetic oligonucleotide
  Target: LAMA2; (-) strand; PAM type: NNNNGHTT; PAM sequence: CTAAGATT
attggaatgttagtggtaat

SEQ ID NO: 34937 - DNA, 20 bp, Artificial Sequence
  Description of Artificial Sequence: Synthetic oligonucleotide
  Target: LAMA2; (-) strand; PAM type: NNNNGHTT; PAM sequence: GATCGCTT
tctcgtggctgaggcaggag

SEQ ID NO: 34938 - DNA, 20 bp, Artificial Sequence
  Description of Artificial Sequence: Synthetic oligonucleotide
  Target: LAMA2; (-) strand; PAM type: NNNNGHTT; PAM sequence: AAAAGTTT
ctcatatctactaaaaatac

SEQ ID NO: 34939 - DNA, 20 bp, Artificial Sequence
  Description of Artificial Sequence: Synthetic oligonucleotide
  Target: LAMA2; (-) strand; PAM type: NNNNGHTT; PAM sequence: AGGAGTTT
tgggtggatcacttgagctc

SEQ ID NO: 34940 - DNA, 20 bp, Artificial Sequence
  Description of Artificial Sequence: Synthetic oligonucleotide
  Target: LAMA2; (-) strand; PAM type: NNNNGHTT; PAM sequence: TTTTGTTT
ttttacagtagttttaattt

SEQ ID NO: 34941 - DNA, 20 bp, Artificial Sequence
  Description of Artificial Sequence: Synthetic oligonucleotide
  Target: LAMA2; (-) strand; PAM type: NNNNGHTT; PAM sequence: AGTAGTTT
gtagtatctttcacttttac

SEQ ID NO: 34942 - DNA, 20 bp, Artificial Sequence
  Description of Artificial Sequence: Synthetic oligonucleotide
  Target: LAMA2; (-) strand; PAM type: NNNNGHTT; PAM sequence: ATTAGATT
ggctttgatcttcacacaac

SEQ ID NO: 34943 - DNA, 20 bp, Artificial Sequence
  Description of Artificial Sequence: Synthetic oligonucleotide
  Target: LAMA2; (-) strand; PAM type: NNNNGHTT; PAM sequence: CTTGGCTT
caacatgagctacaattgta

SEQ ID NO: 34944 - DNA, 20 bp, Artificial Sequence
  Description of Artificial Sequence: Synthetic oligonucleotide
  Target: LAMA2; (-) strand; PAM type: NNNNGHTT; PAM sequence: TATAGATT
acccagattctgttttctat

SEQ ID NO: 34945 - DNA, 20 bp, Artificial Sequence
  Description of Artificial Sequence: Synthetic oligonucleotide
  Target: LAMA2; (-) strand; PAM type: NNNNGHTT; PAM sequence: TTCTGTTT
tccactgattttaacccaga

SEQ ID NO: 34946 - DNA, 20 bp, Artificial Sequence
  Description of Artificial Sequence: Synthetic oligonucleotide
  Target: LAMA2; (-) strand; PAM type: NNNNGHTT; PAM sequence: CCCAGATT
attatttccactgattttaa

SEQ ID NO: 34947 - DNA, 20 bp, Artificial Sequence
  Description of Artificial Sequence: Synthetic oligonucleotide
  Target: LAMA2; (-) strand; PAM type: NNNNGHTT; PAM sequence: CACTGATT
tctgaaataaaaattatttc

SEQ ID NO: 34948 - DNA, 20 bp, Artificial Sequence
  Description of Artificial Sequence: Synthetic oligonucleotide
  Target: LAMA2; (-) strand; PAM type: NNNNGHTT; PAM sequence: TGCAGCTT
acataatgatgctactgact

SEQ ID NO: 34949 - DNA, 20 bp, Artificial Sequence
  Description of Artificial Sequence: Synthetic oligonucleotide
  Target: LAMA2; (-) strand; PAM type: NNNNGHTT; PAM sequence: TATTGATT
agtttcattctttcaggaat

SEQ ID NO: 34950 - DNA, 20 bp, Artificial Sequence
  Description of Artificial Sequence: Synthetic oligonucleotide
  Target: LAMA2; (-) strand; PAM type: NNNNGHTT; PAM sequence: ATAAGTTT
tgtcacgtaataaaagtcga

SEQ ID NO: 34951 - DNA, 20 bp, Artificial Sequence
  Description of Artificial Sequence: Synthetic oligonucleotide
  Target: LAMA2; (-) strand; PAM type: NNNNGHTT; PAM sequence: TAATGTTT
tgctttgaattcagactcca

SEQ ID NO: 34952 - DNA, 20 bp, Artificial Sequence
  Description of Artificial Sequence: Synthetic oligonucleotide
  Target: LAMA2; (-) strand; PAM type: NNNNGHTT; PAM sequence: TTATGCTT
tcatactttactttctgcct

SEQ ID NO: 34953 - DNA, 20 bp, Artificial Sequence
  Description of Artificial Sequence: Synthetic oligonucleotide
  Target: LAMA2; (-) strand; PAM type: NNNNGHTT; PAM sequence: AGACGTTT
acaaaattattaaaagtgac

SEQ ID NO: 34954 - DNA, 20 bp, Artificial Sequence
  Description of Artificial Sequence: Synthetic oligonucleotide
  Target: LAMA2; (-) strand; PAM type: NNNNGHTT; PAM sequence: GAACGTTT
aaaatatgtttatatctgtt

SEQ ID NO: 34955 - DNA, 20 bp, Artificial Sequence
  Description of Artificial Sequence: Synthetic oligonucleotide
  Target: LAMA2; (-) strand; PAM type: NNNNGHTT; PAM sequence: ATATGTTT
aatatttattcttaattaaa

SEQ ID NO: 34956 - DNA, 20 bp, Artificial Sequence
  Description of Artificial Sequence: Synthetic oligonucleotide
  Target: LAMA2; (-) strand; PAM type: NNNNGHTT; PAM sequence: ATATGATT
cttcatcagaataagttaga

SEQ ID NO: 34957 - DNA, 20 bp, Artificial Sequence
  Description of Artificial Sequence: Synthetic oligonucleotide
  Target: LAMA2; (-) strand; PAM type: NNNNGHTT; PAM sequence: AAAAGCTT
tcataaaacacactttaaga

SEQ ID NO: 34958 - DNA, 20 bp, Artificial Sequence
  Description of Artificial Sequence: Synthetic oligonucleotide
  Target: LAMA2; (-) strand; PAM type: NNNNGHTT; PAM sequence: TTCCGCTT
ccatcactaccccaaataaa

SEQ ID NO: 34959 - DNA, 20 bp, Artificial Sequence
  Description of Artificial Sequence: Synthetic oligonucleotide
  Target: LAMA2; (-) strand; PAM type: NNNNGHTT; PAM sequence: AAGTGCTT
atgtgtaacaaaatgcttca

SEQ ID NO: 34960 - DNA, 20 bp, Artificial Sequence
  Description of Artificial Sequence: Synthetic oligonucleotide
  Target: LAMA2; (-) strand; PAM type: NNNNGHTT; PAM sequence: AAATGCTT
aattatagatatgtgtaaca

SEQ ID NO: 34961 - DNA, 20 bp, Artificial Sequence
  Description of Artificial Sequence: Synthetic oligonucleotide
  Target: LAMA2; (-) strand; PAM type: NNNNGHTT; PAM sequence: ACTTGATT
ttcttgagggcaggtatcct

SEQ ID NO: 34962 - DNA, 20 bp, Artificial Sequence
  Description of Artificial Sequence: Synthetic oligonucleotide
  Target: LAMA2; (-) strand; PAM type: NNNNGHTT; PAM sequence: ATTTGTTT
atgttggtatataattattc

SEQ ID NO: 34963 - DNA, 20 bp, Artificial Sequence
  Description of Artificial Sequence: Synthetic oligonucleotide
  Target: LAMA2; (-) strand; PAM type: NNNNGHTT; PAM sequence: ATGAGCTT
ccatattcccacattcacct

SEQ ID NO: 34964 - DNA, 20 bp, Artificial Sequence
  Description of Artificial Sequence: Synthetic oligonucleotide
  Target: LAMA2; (-) strand; PAM type: NNNNGHTT; PAM sequence: CAATGATT
ctctttgatcactcacctgg

SEQ ID NO: 34965 - DNA, 20 bp, Artificial Sequence
  Description of Artificial Sequence: Synthetic oligonucleotide
  Target: LAMA2; (-) strand; PAM type: NNNNGHTT; PAM sequence: CTCTGCTT
acactaaaatctgctgctgg

SEQ ID NO: 34966 - DNA, 20 bp, Artificial Sequence
  Description of Artificial Sequence: Synthetic oligonucleotide
  Target: LAMA2; (-) strand; PAM type: NNNNGHTT; PAM sequence: AATTGCTT
ctgagaggactttttcaata

SEQ ID NO: 34967 - DNA, 20 bp, Artificial Sequence
  Description of Artificial Sequence: Synthetic oligonucleotide
  Target: LAMA2; (-) strand; PAM type: NNNNGHTT; PAM sequence: TTCAGCTT
ccactttctcccctaccttt

SEQ ID NO: 34968 - DNA, 20 bp, Artificial Sequence
  Description of Artificial Sequence: Synthetic oligonucleotide
  Target: LAMA2; (-) strand; PAM type: NNNNGHTT; PAM sequence: AATGGCTT
tgaggcaagggttggctgct

SEQ ID NO: 34969 - DNA, 20 bp, Artificial Sequence
  Description of Artificial Sequence: Synthetic oligonucleotide
  Target: LAMA2; (-) strand; PAM type: NNNNGHTT; PAM sequence: TAATGTTT
gcacataaaatagcaatatc

SEQ ID NO: 34970 - DNA, 20 bp, Artificial Sequence
  Description of Artificial Sequence: Synthetic oligonucleotide
  Target: LAMA2; (-) strand; PAM type: NNNNGHTT; PAM sequence: AATTGCTT
taaggtttttcaaacagtgt

SEQ ID NO: 34971 - DNA, 20 bp, Artificial Sequence
  Description of Artificial Sequence: Synthetic oligonucleotide
  Target: LAMA2; (-) strand; PAM type: NNNNGHTT; PAM sequence: TAAGGTTT
acagatttttttttacaaaa

SEQ ID NO: 34972 - DNA, 20 bp, Artificial Sequence
  Description of Artificial Sequence: Synthetic oligonucleotide
  Target: LAMA2; (-) strand; PAM type: NNNNGHTT; PAM sequence: AACAGATT
atctgtgagacagtgaatag

SEQ ID NO: 34973 - DNA, 20 bp, Artificial Sequence
  Description of Artificial Sequence: Synthetic oligonucleotide
  Target: LAMA2; (-) strand; PAM type: NNNNGHTT; PAM sequence: GTCTGTTT
aggtcaaggtttaaggtcag

SEQ ID NO: 34974 - DNA, 20 bp, Artificial Sequence
  Description of Artificial Sequence: Synthetic oligonucleotide
  Target: LAMA2; (-) strand; PAM type: NNNNGHTT; PAM sequence: CAAGGTTT
tatacagcaaagaacaaggt

SEQ ID NO: 34975 - DNA, 20 bp, Artificial Sequence
  Description of Artificial Sequence: Synthetic oligonucleotide
  Target: LAMA2; (-) strand; PAM type: NNNNGHTT; PAM sequence: GAATGATT
tgttcattgcttcttcatat

SEQ ID NO: 34976 - DNA, 20 bp, Artificial Sequence
  Description of Artificial Sequence: Synthetic oligonucleotide
  Target: LAMA2; (-) strand; PAM type: NNNNGHTT; PAM sequence: CATTGCTT
tgtgcaccagaccctgtgtt

SEQ ID NO: 34977 - DNA, 20 bp, Artificial Sequence
  Description of Artificial Sequence: Synthetic oligonucleotide
  Target: LAMA2; (-) strand; PAM type: NNNNGHTT; PAM sequence: CAAGGTTT
ataccttctactgaaagcat

SEQ ID NO: 34978 - DNA, 20 bp, Artificial Sequence
  Description of Artificial Sequence: Synthetic oligonucleotide
  Target: LAMA2; (-) strand; PAM type: NNNNGHTT; PAM sequence: AAAAGATT
agtcccatcaatacccccag

SEQ ID NO: 34979 - DNA, 20 bp, Artificial Sequence
  Description of Artificial Sequence: Synthetic oligonucleotide
  Target: LAMA2; (-) strand; PAM type: NNNNGHTT; PAM sequence: ATGAGTTT
ctaatatattttactttgta

SEQ ID NO: 34980 - DNA, 20 bp, Artificial Sequence
  Description of Artificial Sequence: Synthetic oligonucleotide
  Target: LAMA2; (-) strand; PAM type: NNNNGHTT; PAM sequence: AGATGATT
agccattacaagagacagag

SEQ ID NO: 34981 - DNA, 20 bp, Artificial Sequence
  Description of Artificial Sequence: Synthetic oligonucleotide
  Target: LAMA2; (-) strand; PAM type: NNNNGHTT; PAM sequence: AACTGCTT
caatatagtaacttgcttgc

SEQ ID NO: 34982 - DNA, 20 bp, Artificial Sequence
  Description of Artificial Sequence: Synthetic oligonucleotide
  Target: LAMA2; (-) strand; PAM type: NNNNGHTT; PAM sequence: ACTTGCTT
tttttcattgcaatatagta

SEQ ID NO: 34983 - DNA, 20 bp, Artificial Sequence
  Description of Artificial Sequence: Synthetic oligonucleotide
  Target: LAMA2; (-) strand; PAM type: NNNNGHTT; PAM sequence: TTAGGATT
catcttatgatggctttgat

SEQ ID NO: 34984 - DNA, 20 bp, Artificial Sequence
  Description of Artificial Sequence: Synthetic oligonucleotide
  Target: LAMA2; (-) strand; PAM type: NNNNGHTT; PAM sequence: CTTTGATT
tctgcagcatcttatgatgg

SEQ ID NO: 34985 - DNA, 20 bp, Artificial Sequence
  Description of Artificial Sequence: Synthetic oligonucleotide
  Target: LAMA2; (-) strand; PAM type: NNNNGHTT; PAM sequence: GATGGCTT
agaggtctgcagcatcttat

SEQ ID NO: 34986 - DNA, 20 bp, Artificial Sequence
  Description of Artificial Sequence: Synthetic oligonucleotide
  Target: LAMA2; (-) strand; PAM type: NNNNGHTT; PAM sequence: CAAGGATT
ctgcttcaatcattttgatt

SEQ ID NO: 34987 - DNA, 20 bp, Artificial Sequence
  Description of Artificial Sequence: Synthetic oligonucleotide
  Target: LAMA2; (-) strand; PAM type: NNNNGHTT; PAM sequence: TTTTGATT
aaaaataactgcttcaatca

SEQ ID NO: 34988 - DNA, 20 bp, Artificial Sequence
  Description of Artificial Sequence: Synthetic oligonucleotide
  Target: LAMA2; (-) strand; PAM type: NNNNGHTT; PAM sequence: AACTGCTT
tagcttctatttttaaaaat

SEQ ID NO: 34989 - DNA, 20 bp, Artificial Sequence
  Description of Artificial Sequence: Synthetic oligonucleotide
  Target: LAMA2; (-) strand; PAM type: NNNNGHTT; PAM sequence: TCTAGCTT
acaaaataatacattttaaa

SEQ ID NO: 34990 - DNA, 20 bp, Artificial Sequence
  Description of Artificial Sequence: Synthetic oligonucleotide
  Target: LAMA2; (-) strand; PAM type: NNNNGHTT; PAM sequence: TAGAGTTT
ttcaatattttaatcaccag

SEQ ID NO: 34991 - DNA, 20 bp, Artificial Sequence
  Description of Artificial Sequence: Synthetic oligonucleotide
  Target: LAMA2; (-) strand; PAM type: NNNNGHTT; PAM sequence: TATAGTTT
aatcatgccaaaaatactgt

SEQ ID NO: 34992 - DNA, 20 bp, Artificial Sequence
  Description of Artificial Sequence: Synthetic oligonucleotide
  Target: LAMA2; (-) strand; PAM type: NNNNGHTT; PAM sequence: AACAGTTT
tgccttcagtacattgaaaa

SEQ ID NO: 34993 - DNA, 20 bp, Artificial Sequence
  Description of Artificial Sequence: Synthetic oligonucleotide
  Target: LAMA2; (-) strand; PAM type: NNNNGHTT; PAM sequence: CTGTGATT
ggctaaatggtcccttgtct

SEQ ID NO: 34994 - DNA, 20 bp, Artificial Sequence
  Description of Artificial Sequence: Synthetic oligonucleotide
  Target: LAMA2; (-) strand; PAM type: NNNNGHTT; PAM sequence: ACAGGTTT
tttgtggggtaggtaaagtg

SEQ ID NO: 34995 - DNA, 20 bp, Artificial Sequence
  Description of Artificial Sequence: Synthetic oligonucleotide
  Target: LAMA2; (-) strand; PAM type: NNNNGHTT; PAM sequence: CAAAGCTT
actaggtcagtgttaatgtg

SEQ ID NO: 34996 - DNA, 20 bp, Artificial Sequence
  Description of Artificial Sequence: Synthetic oligonucleotide
  Target: LAMA2; (-) strand; PAM type: NNNNGHTT; PAM sequence: CCTTGATT
tgctggtgtctgaccactca

SEQ ID NO: 34997 - DNA, 20 bp, Artificial Sequence
  Description of Artificial Sequence: Synthetic oligonucleotide
  Target: LAMA2; (-) strand; PAM type: NNNNGHTT; PAM sequence: CTGTGCTT
gacctgtttgacagtcaagc

SEQ ID NO: 34998 - DNA, 20 bp, Artificial Sequence
  Description of Artificial Sequence: Synthetic oligonucleotide
  Target: LAMA2; (-) strand; PAM type: NNNNGHTT; PAM sequence: ACCTGTTT
cactttttgtcctccttgtg

SEQ ID NO: 34999 - DNA, 20 bp, Artificial Sequence
  Description of Artificial Sequence: Synthetic oligonucleotide
  Target: LAMA2; (-) strand; PAM type: NNNNGHTT; PAM sequence: CTGTGATT
agcaattaatagagggtatt

SEQ ID NO: 35000 - DNA, 20 bp, Artificial Sequence
  Description of Artificial Sequence: Synthetic oligonucleotide
  Target: LAMA2; (-) strand; PAM type: NNNNGHTT; PAM sequence: ATTGGATT
aggcatgtcttcaggtggaa

SEQ ID NO: 35001 - DNA, 20 bp, Artificial Sequence
  Description of Artificial Sequence: Synthetic oligonucleotide
  Target: LAMA2; (-) strand; PAM type: NNNNGHTT; PAM sequence: AATTGATT
cagatcctatttacctaaat

SEQ ID NO: 35002 - DNA, 20 bp, Artificial Sequence
  Description of Artificial Sequence: Synthetic oligonucleotide
  Target: LAMA2; (-) strand; PAM type: NNNNGHTT; PAM sequence: GAGTGTTT
ctagatactctaataggtct

SEQ ID NO: 35003 - DNA, 20 bp, Artificial Sequence
  Description of Artificial Sequence: Synthetic oligonucleotide
  Target: LAMA2; (-) strand; PAM type: NNNNGHTT; PAM sequence: CAATGCTT
gaatacattttaatataaaa

SEQ ID NO: 35004 - DNA, 20 bp, Artificial Sequence
  Description of Artificial Sequence: Synthetic oligonucleotide
  Target: LAMA2; (-) strand; PAM type: NNNNGHTT; PAM sequence: AGTGGCTT
ttaataaaatagtccataaa

SEQ ID NO: 35005 - DNA, 20 bp, Artificial Sequence
  Description of Artificial Sequence: Synthetic oligonucleotide
  Target: LAMA2; (-) strand; PAM type: NNNNGHTT; PAM sequence: ATTGGTTT
gcagacacaaagtctatttt

SEQ ID NO: 35006 - DNA, 20 bp, Artificial Sequence
  Description of Artificial Sequence: Synthetic oligonucleotide
  Target: LAMA2; (-) strand; PAM type: NNNNGHTT; PAM sequence: CGGAGCTT
aatggcgtgaacccgtgagg

SEQ ID NO: 35007 - DNA, 20 bp, Artificial Sequence
  Description of Artificial Sequence: Synthetic oligonucleotide
  Target: LAMA2; (-) strand; PAM type: NNNNGHTT; PAM sequence: GTTTGATT
tatggtcctaatagcatttt

SEQ ID NO: 35008 - DNA, 20 bp, Artificial Sequence
  Description of Artificial Sequence: Synthetic oligonucleotide
  Target: LAMA2; (-) strand; PAM type: NNNNGHTT; PAM sequence: TTTTGTTT
gccatatggtcctaatagca

SEQ ID NO: 35009 - DNA, 20 bp, Artificial Sequence
  Description of Artificial Sequence: Synthetic oligonucleotide
  Target: LAMA2; (-) strand; PAM type: NNNNGHTT; PAM sequence: TGTTGTTT
ccctaactcttctaagattc

SEQ ID NO: 35010 - DNA, 20 bp, Artificial Sequence
  Description of Artificial Sequence: Synthetic oligonucleotide
  Target: LAMA2; (-) strand; PAM type: NNNNGHTT; PAM sequence: CTAAGATT
ggaagtcttccctaactctt

SEQ ID NO: 35011 - DNA, 20 bp, Artificial Sequence
  Description of Artificial Sequence: Synthetic oligonucleotide
  Target: LAMA2; (-) strand; PAM type: NNNNGHTT; PAM sequence: GCAAGTTT
cacctactcccaaccccact

SEQ ID NO: 35012 - DNA, 20 bp, Artificial Sequence
  Description of Artificial Sequence: Synthetic oligonucleotide
  Target: LAMA2; (-) strand; PAM type: NNNNGHTT; PAM sequence: CTATGATT
agcatgggaaagacctgccc

SEQ ID NO: 35013 - DNA, 20 bp, Artificial Sequence
  Description of Artificial Sequence: Synthetic oligonucleotide
  Target: LAMA2; (-) strand; PAM type: NNNNGHTT; PAM sequence: AGAGGTTT
cagggtaatttataaaggaa

SEQ ID NO: 35014 - DNA, 20 bp, Artificial Sequence
  Description of Artificial Sequence: Synthetic oligonucleotide
  Target: LAMA2; (-) strand; PAM type: NNNNGHTT; PAM sequence: TCTTGCTT
aaagcgtttcatgatctgct

SEQ ID NO: 35015 - DNA, 20 bp, Artificial Sequence
  Description of Artificial Sequence: Synthetic oligonucleotide
  Target: LAMA2; (-) strand; PAM type: NNNNGHTT; PAM sequence: ATCTGCTT
ggctcacaaagcgtttcatg

SEQ ID NO: 35016 - DNA, 20 bp, Artificial Sequence
  Description of Artificial Sequence: Synthetic oligonucleotide
  Target: LAMA2; (-) strand; PAM type: NNNNGHTT; PAM sequence: AAGCGTTT
actcactaacaaggctcaca

SEQ ID NO: 35017 - DNA, 20 bp, Artificial Sequence
  Description of Artificial Sequence: Synthetic oligonucleotide
  Target: LAMA2; (-) strand; PAM type: NNNNGHTT; PAM sequence: GAGGGATT
cattttccacattgcagtta

SEQ ID NO: 35018 - DNA, 20 bp, Artificial Sequence
  Description of Artificial Sequence: Synthetic oligonucleotide
  Target: LAMA2; (-) strand; PAM type: NNNNGHTT; PAM sequence: CTCTGCTT
tcctctccagatgtatcttt

SEQ ID NO: 35019 - DNA, 20 bp, Artificial Sequence
  Description of Artificial Sequence: Synthetic oligonucleotide
  Target: LAMA2; (-) strand; PAM type: NNNNGHTT; PAM sequence: TCTTGTTT
acaaaacaaaaagtggggat

SEQ ID NO: 35020 - DNA, 20 bp, Artificial Sequence
  Description of Artificial Sequence: Synthetic oligonucleotide
  Target: LAMA2; (-) strand; PAM type: NNNNGHTT; PAM sequence: TGGGGATT
ggaaaaaacaaaacaaaaag

SEQ ID NO: 35021 - DNA, 20 bp, Artificial Sequence
  Description of Artificial Sequence: Synthetic oligonucleotide
  Target: LAMA2; (-) strand; PAM type: NNNNGHTT; PAM sequence: CTGAGCTT
tcaccagctagagttctccc

SEQ ID NO: 35022 - DNA, 20 bp, Artificial Sequence
  Description of Artificial Sequence: Synthetic oligonucleotide
  Target: LAMA2; (-) strand; PAM type: NNNNGHTT; PAM sequence: ACAAGCTT
ctacacagtctcttccttct

SEQ ID NO: 35023 - DNA, 20 bp, Artificial Sequence
  Description of Artificial Sequence: Synthetic oligonucleotide
  Target: LAMA2; (-) strand; PAM type: NNNNGHTT; PAM sequence: TCATGATT
ataaatcaaatttcttattg

SEQ ID NO: 35024 - DNA, 20 bp, Artificial Sequence
  Description of Artificial Sequence: Synthetic oligonucleotide
  Target: LAMA2; (-) strand; PAM type: NNNNGHTT; PAM sequence: TACAGATT
cgtatgatatttatgatatt

SEQ ID NO: 35025 - DNA, 20 bp, Artificial Sequence
  Description of Artificial Sequence: Synthetic oligonucleotide
  Target: LAMA2; (-) strand; PAM type: NNNNGHTT; PAM sequence: TTAGGATT
tccttaaatcccagaatttc

SEQ ID NO: 35026 - DNA, 20 bp, Artificial Sequence
  Description of Artificial Sequence: Synthetic oligonucleotide
  Target: LAMA2; (-) strand; PAM type: NNNNGHTT; PAM sequence: TTCTGTTT
ggtcaaatgtggattgtgct

SEQ ID NO: 35027 - DNA, 20 bp, Artificial Sequence
  Description of Artificial Sequence: Synthetic oligonucleotide
  Target: LAMA2; (-) strand; PAM type: NNNNGHTT; PAM sequence: TTGTGCTT
aaaatatggtcaaatgtgga

SEQ ID NO: 35028 - DNA, 20 bp, Artificial Sequence
  Description of Artificial Sequence: Synthetic oligonucleotide
  Target: LAMA2; (-) strand; PAM type: NNNNGHTT; PAM sequence: TGTGGATT
acgaggaaaatatggtcaaa

SEQ ID NO: 35029 - DNA, 20 bp, Artificial Sequence
  Description of Artificial Sequence: Synthetic oligonucleotide
  Target: LAMA2; (-) strand; PAM type: NNNNGHTT; PAM sequence: CCATGATT
gaggttgaggctgcagtgag

SEQ ID NO: 35030 - DNA, 20 bp, Artificial Sequence
  Description of Artificial Sequence: Synthetic oligonucleotide
  Target: LAMA2; (-) strand; PAM type: NNNNGHTT; PAM sequence: GATTGCTT
tgggggtgcggaggtggaag

SEQ ID NO: 35031 - DNA, 20 bp, Artificial Sequence
  Description of Artificial Sequence: Synthetic oligonucleotide
  Target: LAMA2; (-) strand; PAM type: NNNNGHTT; PAM sequence: GAAGGATT
tgcttgggggtgcggaggtg

SEQ ID NO: 35032 - DNA, 20 bp, Artificial Sequence
  Description of Artificial Sequence: Synthetic oligonucleotide
  Target: LAMA2; (-) strand; PAM type: NNNNGHTT; PAM sequence: AGCTGCTT
tggcccttgcctgtagtccc

SEQ ID NO: 35033 - DNA, 20 bp, Artificial Sequence
  Description of Artificial Sequence: Synthetic oligonucleotide
  Target: LAMA2; (-) strand; PAM type: NNNNGHTT; PAM sequence: AGGAGTTT
gcagaaggatcacttggccc

SEQ ID NO: 35034 - DNA, 20 bp, Artificial Sequence
  Description of Artificial Sequence: Synthetic oligonucleotide
  Target: LAMA2; (-) strand; PAM type: NNNNGHTT; PAM sequence: AAAAGTTT
agaatctctcaaaaaaaaag

SEQ ID NO: 35035 - DNA, 20 bp, Artificial Sequence
  Description of Artificial Sequence: Synthetic oligonucleotide
  Target: LAMA2; (-) strand; PAM type: NNNNGHTT; PAM sequence: TCTAGTTT
aacatttatcgtaagtacaa

SEQ ID NO: 35036 - DNA, 20 bp, Artificial Sequence
  Description of Artificial Sequence: Synthetic oligonucleotide
  Target: LAMA2; (-) strand; PAM type: NNNNGHTT; PAM sequence: ACCTGATT
aaattattgtctcaaccgaa

SEQ ID NO: 35037 - DNA, 20 bp, Artificial Sequence
  Description of Artificial Sequence: Synthetic oligonucleotide
  Target: LAMA2; (-) strand; PAM type: NNNNGHTT; PAM sequence: GTAAGATT
tcaataagtcttcctccact

SEQ ID NO: 35038 - DNA, 20 bp, Artificial Sequence
  Description of Artificial Sequence: Synthetic oligonucleotide
  Target: LAMA2; (-) strand; PAM type: NNNNGHTT; PAM sequence: AATTGTTT
aagagaaaaaaaagtgatga

SEQ ID NO: 35039 - DNA, 20 bp, Artificial Sequence
  Description of Artificial Sequence: Synthetic oligonucleotide
  Target: LAMA2; (-) strand; PAM type: NNNNGHTT; PAM sequence: TATTGATT
ggagtcagttaaaagtaaaa

SEQ ID NO: 35040 - DNA, 20 bp, Artificial Sequence
  Description of Artificial Sequence: Synthetic oligonucleotide
  Target: LAMA2; (-) strand; PAM type: NNNNGHTT; PAM sequence: GCTTGTTT
atacaataaatcatggaatg

SEQ ID NO: 35041 - DNA, 20 bp, Artificial Sequence
  Description of Artificial Sequence: Synthetic oligonucleotide
  Target: LAMA2; (-) strand; PAM type: NNNNGHTT; PAM sequence: AATGGCTT
tcttatacaataaatcatgg

SEQ ID NO: 35042 - DNA, 20 bp, Artificial Sequence
  Description of Artificial Sequence: Synthetic oligonucleotide
  Target: LAMA2; (-) strand; PAM type: NNNNGHTT; PAM sequence: GCAGGTTT
atccagggtattattctatt

SEQ ID NO: 35043 - DNA, 20 bp, Artificial Sequence
  Description of Artificial Sequence: Synthetic oligonucleotide
  Target: LAMA2; (-) strand; PAM type: NNNNGHTT; PAM sequence: CAATGATT
caactattcacaagcgacct

SEQ ID NO: 35044 - DNA, 20 bp, Artificial Sequence
  Description of Artificial Sequence: Synthetic oligonucleotide
  Target: LAMA2; (-) strand; PAM type: NNNNGHTT; PAM sequence: GGAAGTTT
gcctacacagccttaatatt

SEQ ID NO: 35045 - DNA, 20 bp, Artificial Sequence
  Description of Artificial Sequence: Synthetic oligonucleotide
  Target: LAMA2; (-) strand; PAM type: NNNNGHTT; PAM sequence: ACTAGATT
aaaaaatttctgaaaggata

SEQ ID NO: 35046 - DNA, 20 bp, Artificial Sequence
  Description of Artificial Sequence: Synthetic oligonucleotide
  Target: LAMA2; (-) strand; PAM type: NNNNGHTT; PAM sequence: TTTTGCTT
aaagaaagaagggcaggtac

SEQ ID NO: 35047 - DNA, 20 bp, Artificial Sequence
  Description of Artificial Sequence: Synthetic oligonucleotide
  Target: LAMA2; (-) strand; PAM type: NNNNGHTT; PAM sequence: AATCGCTT
tcaggaggctgaggcaagtg

SEQ ID NO: 35048 - DNA, 20 bp, Artificial Sequence
  Description of Artificial Sequence: Synthetic oligonucleotide
  Target: LAMA2; (-) strand; PAM type: NNNNGHTT; PAM sequence: CCCAGCTT
actaaaaatacaaaaattag

SEQ ID NO: 35049 - DNA, 20 bp, Artificial Sequence
  Description of Artificial Sequence: Synthetic oligonucleotide
  Target: LAMA2; (-) strand; PAM type: NNNNGHTT; PAM sequence: TCACGCTT
tactgaccgggcatggtggc

SEQ ID NO: 35050 - DNA, 20 bp, Artificial Sequence
  Description of Artificial Sequence: Synthetic oligonucleotide
  Target: LAMA2; (-) strand; PAM type: NNNNGHTT; PAM sequence: CAAAGCTT
cattaggttgatgagttgat

SEQ ID NO: 35051 - DNA, 20 bp, Artificial Sequence
  Description of Artificial Sequence: Synthetic oligonucleotide
  Target: LAMA2; (-) strand; PAM type: NNNNGHTT; PAM sequence: CCCTGTTT
gtagatcacactattgagaa

SEQ ID NO: 35052 - DNA, 20 bp, Artificial Sequence
  Description of Artificial Sequence: Synthetic oligonucleotide
  Target: LAMA2; (-) strand; PAM type: NNNNGHTT; PAM sequence: GAATGTTT
ttactatctaagcctttaca

SEQ ID NO: 35053 - DNA, 20 bp, Artificial Sequence
  Description of Artificial Sequence: Synthetic oligonucleotide
  Target: LAMA2; (-) strand; PAM type: NNNNGHTT; PAM sequence: ATCTGCTT
cacacatacatattgtttat

SEQ ID NO: 35054 - DNA, 20 bp, Artificial Sequence
  Description of Artificial Sequence: Synthetic oligonucleotide
  Target: LAMA2; (-) strand; PAM type: NNNNGHTT; PAM sequence: TATTGTTT
aacatctactcacacataca

SEQ ID NO: 35055 - DNA, 20 bp, Artificial Sequence
  Description of Artificial Sequence: Synthetic oligonucleotide
  Target: LAMA2; (-) strand; PAM type: NNNNGHTT; PAM sequence: TAAAGCTT
tcatggcttgtttctgtaaa

SEQ ID NO: 35056 - DNA, 20 bp, Artificial Sequence
  Description of Artificial Sequence: Synthetic oligonucleotide
  Target: LAMA2; (-) strand; PAM type: NNNNGHTT; PAM sequence: GCTTGTTT
atatgccagatactgtcatg

SEQ ID NO: 35057 - DNA, 20 bp, Artificial Sequence
  Description of Artificial Sequence: Synthetic oligonucleotide
  Target: LAMA2; (-) strand; PAM type: NNNNGHTT; PAM sequence: CATGGCTT
ggagatatgccagatactgt

SEQ ID NO: 35058 - DNA, 20 bp, Artificial Sequence
  Description of Artificial Sequence: Synthetic oligonucleotide
  Target: LAMA2; (-) strand; PAM type: NNNNGHTT; PAM sequence: TGAGGATT
tgggaaataaggcagcaaca

SEQ ID NO: 35059 - DNA, 20 bp, Artificial Sequence
  Description of Artificial Sequence: Synthetic oligonucleotide
  Target: LAMA2; (-) strand; PAM type: NNNNGHTT; PAM sequence: TGATGCTT
tttcaatgtctaaagtacac

SEQ ID NO: 35060 - DNA, 20 bp, Artificial Sequence
  Description of Artificial Sequence: Synthetic oligonucleotide
  Target: LAMA2; (-) strand; PAM type: NNNNGHTT; PAM sequence: ACCCGATT
tccatattttttttttccta

SEQ ID NO: 35061 - DNA, 20 bp, Artificial Sequence
  Description of Artificial Sequence: Synthetic oligonucleotide
  Target: LAMA2; (-) strand; PAM type: NNNNGHTT; PAM sequence: TGCTGTTT
ccttggcaaatgaaccagct

SEQ ID NO: 35062 - DNA, 20 bp, Artificial Sequence
  Description of Artificial Sequence: Synthetic oligonucleotide
  Target: LAMA2; (-) strand; PAM type: NNNNGHTT; PAM sequence: ACCAGCTT
cttccttccttggcaaatga

SEQ ID NO: 35063 - DNA, 20 bp, Artificial Sequence
  Description of Artificial Sequence: Synthetic oligonucleotide
  Target: LAMA2; (-) strand; PAM type: NNNNGHTT; PAM sequence: CTTTGCTT
aagttcatctaccaagtgat

SEQ ID NO: 35064 - DNA, 20 bp, Artificial Sequence
  Description of Artificial Sequence: Synthetic oligonucleotide
  Target: LAMA2; (-) strand; PAM type: NNNNGHTT; PAM sequence: GATAGTTT
gttgcagtagagccttgcaa

SEQ ID NO: 35065 - DNA, 20 bp, Artificial Sequence
  Description of Artificial Sequence: Synthetic oligonucleotide
  Target: LAMA2; (-) strand; PAM type: NNNNGHTT; PAM sequence: TATAGCTT
tatgacagtccattaacttc

SEQ ID NO: 35066 - DNA, 20 bp, Artificial Sequence
  Description of Artificial Sequence: Synthetic oligonucleotide
  Target: LAMA2; (-) strand; PAM type: NNNNGHTT; PAM sequence: CTGGGTTT
ccttagtctgttaagctttg

SEQ ID NO: 35067 - DNA, 20 bp, Artificial Sequence
  Description of Artificial Sequence: Synthetic oligonucleotide
  Target: LAMA2; (-) strand; PAM type: NNNNGHTT; PAM sequence: TTAAGCTT
gcaaaatccaccttagtctg

SEQ ID NO: 35068 - DNA, 20 bp, Artificial Sequence
  Description of Artificial Sequence: Synthetic oligonucleotide
  Target: LAMA2; (-) strand; PAM type: NNNNGHTT; PAM sequence: ACTGGATT
gattactcaaagaaattagc

SEQ ID NO: 35069 - DNA, 20 bp, Artificial Sequence
  Description of Artificial Sequence: Synthetic oligonucleotide
  Target: LAMA2; (-) strand; PAM type: NNNNGHTT; PAM sequence: CTGAGATT
ctttagcataaaaaagtttt

SEQ ID NO: 35070 - DNA, 20 bp, Artificial Sequence
  Description of Artificial Sequence: Synthetic oligonucleotide
  Target: LAMA2; (-) strand; PAM type: NNNNGHTT; PAM sequence: AAAAGTTT
aatgaatcactttagcataa

SEQ ID NO: 35071 - DNA, 20 bp, Artificial Sequence
  Description of Artificial Sequence: Synthetic oligonucleotide
  Target: LAMA2; (-) strand; PAM type: NNNNGHTT; PAM sequence: GGTTGTTT
caaaatattttaaatacact

SEQ ID NO: 35072 - DNA, 20 bp, Artificial Sequence
  Description of Artificial Sequence: Synthetic oligonucleotide
  Target: LAMA2; (-) strand; PAM type: NNNNGHTT; PAM sequence: CTAAGATT
aagtttgttgtttgcaacca

SEQ ID NO: 35073 - DNA, 20 bp, Artificial Sequence
  Description of Artificial Sequence: Synthetic oligonucleotide
  Target: LAMA2; (-) strand; PAM type: NNNNGHTT; PAM sequence: TGTTGTTT
gtgagtgggagaaaaaagtt

SEQ ID NO: 35074 - DNA, 20 bp, Artificial Sequence
  Description of Artificial Sequence: Synthetic oligonucleotide
  Target: LAMA2; (-) strand; PAM type: NNNNGHTT; PAM sequence: AAAAGTTT
ctgtattgtgagtgggagaa

SEQ ID NO: 35075 - DNA, 20 bp, Artificial Sequence
  Description of Artificial Sequence: Synthetic oligonucleotide
  Target: LAMA2; (-) strand; PAM type: NNNNGHTT; PAM sequence: TTATGATT
tcaggtggctatatcagcaa

SEQ ID NO: 35076 - DNA, 20 bp, Artificial Sequence
  Description of Artificial Sequence: Synthetic oligonucleotide
  Target: LAMA2; (-) strand; PAM type: NNNNGHTT; PAM sequence: AGATGATT
gttctaatatttgatatgaa

SEQ ID NO: 35077 - DNA, 20 bp, Artificial Sequence
  Description of Artificial Sequence: Synthetic oligonucleotide
  Target: LAMA2; (-) strand; PAM type: NNNNGHTT; PAM sequence: AAGTGATT
aatgttccacacacacaaaa

SEQ ID NO: 35078 - DNA, 20 bp, Artificial Sequence
  Description of Artificial Sequence: Synthetic oligonucleotide
  Target: LAMA2; (-) strand; PAM type: NNNNGHTT; PAM sequence: ATCAGTTT
atgtgcacagctcaataaac

SEQ ID NO: 35079 - DNA, 20 bp, Artificial Sequence
  Description of Artificial Sequence: Synthetic oligonucleotide
  Target: LAMA2; (-) strand; PAM type: NNNNGHTT; PAM sequence: ATAAGCTT
ctctctgacaccatggaaaa

SEQ ID NO: 35080 - DNA, 20 bp, Artificial Sequence
  Description of Artificial Sequence: Synthetic oligonucleotide
  Target: LAMA2; (-) strand; PAM type: NNNNGHTT; PAM sequence: AATAGTTT
atgatatttcagctggcaaa

SEQ ID NO: 35081 - DNA, 20 bp, Artificial Sequence
  Description of Artificial Sequence: Synthetic oligonucleotide
  Target: LAMA2; (-) strand; PAM type: NNNNGHTT; PAM sequence: CAAAGCTT
taagatatacacgttaaaat

SEQ ID NO: 35082 - DNA, 20 bp, Artificial Sequence
  Description of Artificial Sequence: Synthetic oligonucleotide
  Target: LAMA2; (-) strand; PAM type: NNNNGHTT; PAM sequence: TCAGGTTT
tttgtccaatgattcgcgtt

SEQ ID NO: 35083 - DNA, 20 bp, Artificial Sequence
  Description of Artificial Sequence: Synthetic oligonucleotide
  Target: LAMA2; (-) strand; PAM type: NNNNGHTT; PAM sequence: TCGCGTTT
tctcacatttgtccaatgat

SEQ ID NO: 35084 - DNA, 20 bp, Artificial Sequence
  Description of Artificial Sequence: Synthetic oligonucleotide
  Target: LAMA2; (-) strand; PAM type: NNNNGHTT; PAM sequence: CAATGATT
ggaaaaatctcacatttgtc

SEQ ID NO: 35085 - DNA, 20 bp, Artificial Sequence
  Description of Artificial Sequence: Synthetic oligonucleotide
  Target: LAMA2; (-) strand; PAM type: NNNNGHTT; PAM sequence: AAAGGATT
acaattacaattgtaactgg

SEQ ID NO: 35086 - DNA, 20 bp, Artificial Sequence
  Description of Artificial Sequence: Synthetic oligonucleotide
  Target: LAMA2; (-) strand; PAM type: NNNNGHTT; PAM sequence: TTTAGTTT
tatgggaaagagtccgtttg

SEQ ID NO: 35087 - DNA, 20 bp, Artificial Sequence
  Description of Artificial Sequence: Synthetic oligonucleotide
  Target: LAMA2; (-) strand; PAM type: NNNNGHTT; PAM sequence: GTTTGTTT
aaaaatatgggaaagagtcc

SEQ ID NO: 35088 - DNA, 20 bp, Artificial Sequence
  Description of Artificial Sequence: Synthetic oligonucleotide
  Target: LAMA2; (-) strand; PAM type: NNNNGHTT; PAM sequence: GTCCGTTT
gtagaaaaatatgggaaaga

SEQ ID NO: 35089 - DNA, 20 bp, Artificial Sequence
  Description of Artificial Sequence: Synthetic oligonucleotide
  Target: LAMA2; (-) strand; PAM type: NNNNGHTT; PAM sequence: AGATGATT
ggtttctgacttaggcatct

SEQ ID NO: 35090 - DNA, 20 bp, Artificial Sequence
  Description of Artificial Sequence: Synthetic oligonucleotide
  Target: LAMA2; (-) strand; PAM type: NNNNGHTT; PAM sequence: CTAGGTTT
aaagaatgaagggatgatgc

SEQ ID NO: 35091 - DNA, 20 bp, Artificial Sequence
  Description of Artificial Sequence: Synthetic oligonucleotide
  Target: LAMA2; (-) strand; PAM type: NNNNGHTT; PAM sequence: TAGGGCTT
gccgaccaaagacttttcat

SEQ ID NO: 35092 - DNA, 20 bp, Artificial Sequence
  Description of Artificial Sequence: Synthetic oligonucleotide
  Target: LAMA2; (-) strand; PAM type: NNNNGHTT; PAM sequence: TCACGTTT
agatccaactctcaggagtt

SEQ ID NO: 35093 - DNA, 20 bp, Artificial Sequence
  Description of Artificial Sequence: Synthetic oligonucleotide
  Target: LAMA2; (-) strand; PAM type: NNNNGHTT; PAM sequence: AGGAGTTT
aggaagtagatccaactctc

SEQ ID NO: 35094 - DNA, 20 bp, Artificial Sequence
  Description of Artificial Sequence: Synthetic oligonucleotide
  Target: LAMA2; (-) strand; PAM type: NNNNGHTT; PAM sequence: AAGAGTTT
caggttcaaatgatgtgtga

SEQ ID NO: 35095 - DNA, 20 bp, Artificial Sequence
  Description of Artificial Sequence: Synthetic oligonucleotide
  Target: LAMA2; (-) strand; PAM type: NNNNGHTT; PAM sequence: CTGGGATT
ggccttggcctcccaaagtg

SEQ ID NO: 35096 - DNA, 20 bp, Artificial Sequence
  Description of Artificial Sequence: Synthetic oligonucleotide
  Target: LAMA2; (-) strand; PAM type: NNNNGHTT; PAM sequence: TGGGGTTT
ttttttttttttggtagaga

SEQ ID NO: 35097 - DNA, 20 bp, Artificial Sequence
  Description of Artificial Sequence: Synthetic oligonucleotide
  Target: LAMA2; (-) strand; PAM type: NNNNGHTT; PAM sequence: AACGGCTT
taactgagtaggaactagag

SEQ ID NO: 35098 - DNA, 20 bp, Artificial Sequence
  Description of Artificial Sequence: Synthetic oligonucleotide
  Target: LAMA2; (-) strand; PAM type: NNNNGHTT; PAM sequence: ACCAGTTT
aagaagacaagcaggtaaac

SEQ ID NO: 35099 - DNA, 20 bp, Artificial Sequence
  Description of Artificial Sequence: Synthetic oligonucleotide
  Target: LAMA2; (-) strand; PAM type: NNNNGHTT; PAM sequence: TCATGTTT
gaatgtgggtatatatttta

SEQ ID NO: 35100 - DNA, 20 bp, Artificial Sequence
  Description of Artificial Sequence: Synthetic oligonucleotide
  Target: LAMA2; (-) strand; PAM type: NNNNGHTT; PAM sequence: GTTAGTTT
aaagtaggatagaaatgcag

SEQ ID NO: 35101 - DNA, 20 bp, Artificial Sequence
  Description of Artificial Sequence: Synthetic oligonucleotide
  Target: LAMA2; (-) strand; PAM type: NNNNGHTT; PAM sequence: TGGTGTTT
aattgacaacaaacctgtgt

SEQ ID NO: 35102 - DNA, 20 bp, Artificial Sequence
  Description of Artificial Sequence: Synthetic oligonucleotide
  Target: LAMA2; (-) strand; PAM type: NNNNGHTT; PAM sequence: TTATGTTT
attggcatattcactcaatg

SEQ ID NO: 35103 - DNA, 20 bp, Artificial Sequence
  Description of Artificial Sequence: Synthetic oligonucleotide
  Target: LAMA2; (-) strand; PAM type: NNNNGHTT; PAM sequence: ACTGGATT
caaatgtacaacaatgatag

SEQ ID NO: 35104 - DNA, 20 bp, Artificial Sequence
  Description of Artificial Sequence: Synthetic oligonucleotide
  Target: LAMA2; (-) strand; PAM type: NNNNGHTT; PAM sequence: GTATGTTT
ctataaagacacatgcacac

SEQ ID NO: 35105 - DNA, 20 bp, Artificial Sequence
  Description of Artificial Sequence: Synthetic oligonucleotide
  Target: LAMA2; (-) strand; PAM type: NNNNGHTT; PAM sequence: TGGCGATT
aaccattgtggaagtcagtg

SEQ ID NO: 35106 - DNA, 20 bp, Artificial Sequence
  Description of Artificial Sequence: Synthetic oligonucleotide
  Target: LAMA2; (-) strand; PAM type: NNNNGHTT; PAM sequence: AGGTGTTT
aaaatccaaactttttagca

SEQ ID NO: 35107 - DNA, 20 bp, Artificial Sequence
  Description of Artificial Sequence: Synthetic oligonucleotide
  Target: LAMA2; (-) strand; PAM type: NNNNGHTT; PAM sequence: AGCTGATT
tctccaaagcattgttcaca

SEQ ID NO: 35108 - DNA, 20 bp, Artificial Sequence
  Description of Artificial Sequence: Synthetic oligonucleotide
  Target: LAMA2; (-) strand; PAM type: NNNNGHTT; PAM sequence: TACTGCTT
aatagttttctaaatcactt

SEQ ID NO: 35109 - DNA, 20 bp, Artificial Sequence
  Description of Artificial Sequence: Synthetic oligonucleotide
  Target: LAMA2; (-) strand; PAM type: NNNNGHTT; PAM sequence: AATAGTTT
tttcttgtctggtccattga

SEQ ID NO: 35110 - DNA, 20 bp, Artificial Sequence
  Description of Artificial Sequence: Synthetic oligonucleotide
  Target: LAMA2; (-) strand; PAM type: NNNNGHTT; PAM sequence: TTCAGTTT
cctgatccaaatccctgaaa

SEQ ID NO: 35111 - DNA, 20 bp, Artificial Sequence
  Description of Artificial Sequence: Synthetic oligonucleotide
  Target: LAMA2; (-) strand; PAM type: NNNNGHTT; PAM sequence: TTTGGTTT
ctaaataaatatcattaata

SEQ ID NO: 35112 - DNA, 20 bp, Artificial Sequence
  Description of Artificial Sequence: Synthetic oligonucleotide
  Target: LAMA2; (-) strand; PAM type: NNNNGHTT; PAM sequence: TTCAGTTT
aggttctgattgccttaatc

SEQ ID NO: 35113 - DNA, 20 bp, Artificial Sequence
  Description of Artificial Sequence: Synthetic oligonucleotide
  Target: LAMA2; (-) strand; PAM type: NNNNGHTT; PAM sequence: TTCTGATT
attcagcaatgtttactagg

SEQ ID NO: 35114 - DNA, 20 bp, Artificial Sequence
  Description of Artificial Sequence: Synthetic oligonucleotide
  Target: LAMA2; (-) strand; PAM type: NNNNGHTT; PAM sequence: CAATGTTT
ggatacaatggtgaattcag

SEQ ID NO: 35115 - DNA, 20 bp, Artificial Sequence
  Description of Artificial Sequence: Synthetic oligonucleotide
  Target: LAMA2; (-) strand; PAM type: NNNNGHTT; PAM sequence: ATGAGATT
aatatcacatgaagctagag

SEQ ID NO: 35116 - DNA, 20 bp, Artificial Sequence
  Description of Artificial Sequence: Synthetic oligonucleotide
  Target: LAMA2; (-) strand; PAM type: NNNNGHTT; PAM sequence: GGTAGTTT
tatagcacagcaagaatatg

SEQ ID NO: 35117 - DNA, 20 bp, Artificial Sequence
  Description of Artificial Sequence: Synthetic oligonucleotide
  Target: LAMA2; (-) strand; PAM type: NNNNGHTT; PAM sequence: GTAAGTTT
atgggcccttaagaagagag

SEQ ID NO: 35118 - DNA, 20 bp, Artificial Sequence
  Description of Artificial Sequence: Synthetic oligonucleotide
  Target: LAMA2; (-) strand; PAM type: NNNNGHTT; PAM sequence: CCTTGTTT
ttctcatctctacaaaagaa

SEQ ID NO: 35119 - DNA, 20 bp, Artificial Sequence
  Description of Artificial Sequence: Synthetic oligonucleotide
  Target: LAMA2; (-) strand; PAM type: NNNNGHTT; PAM sequence: TGTTGTTT
gggtggatacatggaattta

SEQ ID NO: 35120 - DNA, 20 bp, Artificial Sequence
  Description of Artificial Sequence: Synthetic oligonucleotide
  Target: LAMA2; (-) strand; PAM type: NNNNGHTT; PAM sequence: AAGTGATT
tatccagattcaacgcagtg

SEQ ID NO: 35121 - DNA, 20 bp, Artificial Sequence
  Description of Artificial Sequence: Synthetic oligonucleotide
  Target: LAMA2; (-) strand; PAM type: NNNNGHTT; PAM sequence: TCCAGATT
tcatgaatctttatttccta

SEQ ID NO: 35122 - DNA, 20 bp, Artificial Sequence
  Description of Artificial Sequence: Synthetic oligonucleotide
  Target: LAMA2; (-) strand; PAM type: NNNNGHTT; PAM sequence: TTATGATT
tgtacttatcagacactgta

SEQ ID NO: 35123 - DNA, 20 bp, Artificial Sequence
  Description of Artificial Sequence: Synthetic oligonucleotide
  Target: LAMA2; (-) strand; PAM type: NNNNGHTT; PAM sequence: AAGAGTTT
agaataagacagtctatgaa

SEQ ID NO: 35124 - DNA, 20 bp, Artificial Sequence
  Description of Artificial Sequence: Synthetic oligonucleotide
  Target: LAMA2; (-) strand; PAM type: NNNNGHTT; PAM sequence: ATCAGTTT
tcaaaagagaccaggaagct

SEQ ID NO: 35125 - DNA, 20 bp, Artificial Sequence
  Description of Artificial Sequence: Synthetic oligonucleotide
  Target: LAMA2; (-) strand; PAM type: NNNNGHTT; PAM sequence: GGTGGTTT
tgaatagttttaaactgcat

SEQ ID NO: 35126 - DNA, 20 bp, Artificial Sequence
  Description of Artificial Sequence: Synthetic oligonucleotide
  Target: LAMA2; (-) strand; PAM type: NNNNGHTT; PAM sequence: AATAGTTT
gaattttgccataagcactg

SEQ ID NO: 35127 - DNA, 20 bp, Artificial Sequence
  Description of Artificial Sequence: Synthetic oligonucleotide
  Target: LAMA2; (-) strand; PAM type: NNNNGHTT; PAM sequence: CAATGTTT
tccccccaccaaaaatgatt

SEQ ID NO: 35128 - DNA, 20 bp, Artificial Sequence
  Description of Artificial Sequence: Synthetic oligonucleotide
  Target: LAMA2; (-) strand; PAM type: NNNNGHTT; PAM sequence: AAATGATT
taagtcaatccccccaccaa

SEQ ID NO: 35129 - DNA, 20 bp, Artificial Sequence
  Description of Artificial Sequence: Synthetic oligonucleotide
  Target: LAMA2; (-) strand; PAM type: NNNNGHTT; PAM sequence: TCTGGATT
tgtgtcattttcttgacatt

SEQ ID NO: 35130 - DNA, 20 bp, Artificial Sequence
  Description of Artificial Sequence: Synthetic oligonucleotide
  Target: LAMA2; (-) strand; PAM type: NNNNGHTT; PAM sequence: TTTTGTTT
ggctctaaactgaatttttc

SEQ ID NO: 35131 - DNA, 20 bp, Artificial Sequence
  Description of Artificial Sequence: Synthetic oligonucleotide
  Target: LAMA2; (-) strand; PAM type: NNNNGHTT; PAM sequence: GTCAGATT
taaggcattggaagatcaat

SEQ ID NO: 35132 - DNA, 20 bp, Artificial Sequence
  Description of Artificial Sequence: Synthetic oligonucleotide
  Target: LAMA2; (-) strand; PAM type: NNNNGHTT; PAM sequence: ATTTGCTT
acagattatatgatatgatg

SEQ ID NO: 35133 - DNA, 20 bp, Artificial Sequence
  Description of Artificial Sequence: Synthetic oligonucleotide
  Target: LAMA2; (-) strand; PAM type: NNNNGHTT; PAM sequence: TGATGATT
agattacagattatatgata

SEQ ID NO: 35134 - DNA, 20 bp, Artificial Sequence
  Description of Artificial Sequence: Synthetic oligonucleotide
  Target: LAMA2; (-) strand; PAM type: NNNNGHTT; PAM sequence: TACAGATT
atacttaaatatttgcagat

SEQ ID NO: 35135 - DNA, 20 bp, Artificial Sequence
  Description of Artificial Sequence: Synthetic oligonucleotide
  Target: LAMA2; (-) strand; PAM type: NNNNGHTT; PAM sequence: TGCAGATT
gatatgcatacttaaatatt

SEQ ID NO: 35136 - DNA, 20 bp, Artificial Sequence
  Description of Artificial Sequence: Synthetic oligonucleotide
  Target: LAMA2; (-) strand; PAM type: NNNNGHTT; PAM sequence: TTATGATT
agtgtgtcattatactgaga

SEQ ID NO: 35137 - DNA, 20 bp, Artificial Sequence
  Description of Artificial Sequence: Synthetic oligonucleotide
  Target: LAMA2; (-) strand; PAM type: NNNNGHTT; PAM sequence: CTGAGATT
ttttttagtgtgtcattata

SEQ ID NO: 35138 - DNA, 20 bp, Artificial Sequence
  Description of Artificial Sequence: Synthetic oligonucleotide
  Target: LAMA2; (-) strand; PAM type: NNNNGHTT; PAM sequence: AATAGCTT
ccaatatatagtaaaagaat

SEQ ID NO: 35139 - DNA, 20 bp, Artificial Sequence
  Description of Artificial Sequence: Synthetic oligonucleotide
  Target: LAMA2; (-) strand; PAM type: NNNNGHTT; PAM sequence: AAAAGCTT
gtaaataagagtcaatggtg

SEQ ID NO: 35140 - DNA, 20 bp, Artificial Sequence
  Description of Artificial Sequence: Synthetic oligonucleotide
  Target: LAMA2; (-) strand; PAM type: NNNNGHTT; PAM sequence: TCCTGTTT
atcaagtatttgatctgctt

SEQ ID NO: 35141 - DNA, 20 bp, Artificial Sequence
  Description of Artificial Sequence: Synthetic oligonucleotide
  Target: LAMA2; (-) strand; PAM type: NNNNGHTT; PAM sequence: ATCTGCTT
aagaaagaatcaagtatttg

SEQ ID NO: 35142 - DNA, 20 bp, Artificial Sequence
  Description of Artificial Sequence: Synthetic oligonucleotide
  Target: LAMA2; (-) strand; PAM type: NNNNGHTT; PAM sequence: ATTTGATT
taccaaccaaagatgagaca

SEQ ID NO: 35143 - DNA, 20 bp, Artificial Sequence
  Description of Artificial Sequence: Synthetic oligonucleotide
  Target: LAMA2; (-) strand; PAM type: NNNNGHTT; PAM sequence: CTGAGTTT
atgagaatcattaaggaaaa

SEQ ID NO: 35144 - DNA, 20 bp, Artificial Sequence
  Description of Artificial Sequence: Synthetic oligonucleotide
  Target: LAMA2; (-) strand; PAM type: NNNNGHTT; PAM sequence: GACTGTTT
ccagggctcctccaagaaat

SEQ ID NO: 35145 - DNA, 20 bp, Artificial Sequence
  Description of Artificial Sequence: Synthetic oligonucleotide
  Target: LAMA2; (-) strand; PAM type: NNNNGHTT; PAM sequence: GGATGCTT
ttgattgtagatgcctagtg

SEQ ID NO: 35146 - DNA, 20 bp, Artificial Sequence
  Description of Artificial Sequence: Synthetic oligonucleotide
  Target: LAMA2; (-) strand; PAM type: NNNNGHTT; PAM sequence: ATTTGATT
tttttttttaaaaaaaggta

SEQ ID NO: 35147 - DNA, 20 bp, Artificial Sequence
  Description of Artificial Sequence: Synthetic oligonucleotide
  Target: LAMA2; (-) strand; PAM type: NNNNGHTT; PAM sequence: AAGTGATT
aaccataaaataattttttc

SEQ ID NO: 35148 - DNA, 20 bp, Artificial Sequence
  Description of Artificial Sequence: Synthetic oligonucleotide
  Target: LAMA2; (-) strand; PAM type: NNNNGHTT; PAM sequence: GGTGGCTT
tgaagcaaatgaagttgttt

SEQ ID NO: 35149 - DNA, 20 bp, Artificial Sequence
  Description of Artificial Sequence: Synthetic oligonucleotide
  Target: LAMA2; (-) strand; PAM type: NNNNGHTT; PAM sequence: AGTTGTTT
aagtcaaatgaagcaaatga

SEQ ID NO: 35150 - DNA, 20 bp, Artificial Sequence
  Description of Artificial Sequence: Synthetic oligonucleotide
  Target: LAMA2; (-) strand; PAM type: NNNNGHTT; PAM sequence: AAAAGTTT
atttgaccttgaaactatgt

SEQ ID NO: 35151 - DNA, 20 bp, Artificial Sequence
  Description of Artificial Sequence: Synthetic oligonucleotide
  Target: LAMA2; (-) strand; PAM type: NNNNGHTT; PAM sequence: GACTGTTT
tagaaaaatattcttaagcg

SEQ ID NO: 35152 - DNA, 20 bp, Artificial Sequence
  Description of Artificial Sequence: Synthetic oligonucleotide
  Target: LAMA2; (-) strand; PAM type: NNNNGHTT; PAM sequence: GCAAGATT
cgtgcacaaaacaactgatt

SEQ ID NO: 35153 - DNA, 20 bp, Artificial Sequence
  Description of Artificial Sequence: Synthetic oligonucleotide
  Target: LAMA2; (-) strand; PAM type: NNNNGHTT; PAM sequence: AACTGATT
aaaagacacgtgcacaaaac

SEQ ID NO: 35154 - DNA, 20 bp, Artificial Sequence
  Description of Artificial Sequence: Synthetic oligonucleotide
  Target: LAMA2; (-) strand; PAM type: NNNNGHTT; PAM sequence: AAGAGTTT
ctcacttgaacctgggaagc

SEQ ID NO: 35155 - DNA, 20 bp, Artificial Sequence
  Description of Artificial Sequence: Synthetic oligonucleotide
  Target: LAMA2; (-) strand; PAM type: NNNNGHTT; PAM sequence: AGCAGTTT
tagctcacaactgtaatccc

SEQ ID NO: 35156 - DNA, 20 bp, Artificial Sequence
  Description of Artificial Sequence: Synthetic oligonucleotide
  Target: LAMA2; (-) strand; PAM type: NNNNGHTT; PAM sequence: TTAGGATT
cacattctcacatgctgatc

SEQ ID NO: 35157 - DNA, 20 bp, Artificial Sequence
  Description of Artificial Sequence: Synthetic oligonucleotide
  Target: LAMA2; (-) strand; PAM type: NNNNGHTT; PAM sequence: TAAAGTTT
ccccacaaagctttggaaca

SEQ ID NO: 35158 - DNA, 20 bp, Artificial Sequence
  Description of Artificial Sequence: Synthetic oligonucleotide
  Target: LAMA2; (-) strand; PAM type: NNNNGHTT; PAM sequence: CAAAGCTT
aactaccagacatatcccca

SEQ ID NO: 35159 - DNA, 20 bp, Artificial Sequence
  Description of Artificial Sequence: Synthetic oligonucleotide
  Target: LAMA2; (-) strand; PAM type: NNNNGHTT; PAM sequence: CTAAGTTT
ctaagactcttttcttcata

SEQ ID NO: 35160 - DNA, 20 bp, Artificial Sequence
  Description of Artificial Sequence: Synthetic oligonucleotide
  Target: LAMA2; (-) strand; PAM type: NNNNGHTT; PAM sequence: ATATGTTT
ctatggcaaggtattctgtc

SEQ ID NO: 35161 - DNA, 20 bp, Artificial Sequence
  Description of Artificial Sequence: Synthetic oligonucleotide
  Target: LAMA2; (-) strand; PAM type: NNNNGHTT; PAM sequence: AGCAGATT
cactttgggaggccaagacg

SEQ ID NO: 35162 - DNA, 20 bp, Artificial Sequence
  Description of Artificial Sequence: Synthetic oligonucleotide
  Target: LAMA2; (-) strand; PAM type: NNNNGHTT; PAM sequence: AATTGCTT
ccaaatgctttacaaatttc

SEQ ID NO: 35163 - DNA, 20 bp, Artificial Sequence
  Description of Artificial Sequence: Synthetic oligonucleotide
  Target: LAMA2; (-) strand; PAM type: NNNNGHTT; PAM sequence: AAATGCTT
aataacttttgtagatatcc

SEQ ID NO: 35164 - DNA, 20 bp, Artificial Sequence
  Description of Artificial Sequence: Synthetic oligonucleotide
  Target: LAMA2; (-) strand; PAM type: NNNNGHTT; PAM sequence: GTTGGTTT
cacttattcttaccccatgt

SEQ ID NO: 35165 - DNA, 20 bp, Artificial Sequence
  Description of Artificial Sequence: Synthetic oligonucleotide
  Target: LAMA2; (-) strand; PAM type: NNNNGHTT; PAM sequence: GCAGGTTT
gtgcatcttatgctggttta

SEQ ID NO: 35166 - DNA, 20 bp, Artificial Sequence
  Description of Artificial Sequence: Synthetic oligonucleotide
  Target: LAMA2; (-) strand; PAM type: NNNNGHTT; PAM sequence: GCTGGTTT
tttagttcagtgcatcttat

SEQ ID NO: 35167 - DNA, 20 bp, Artificial Sequence
  Description of Artificial Sequence: Synthetic oligonucleotide
  Target: LAMA2; (-) strand; PAM type: NNNNGHTT; PAM sequence: TTGGGCTT
ttgtccaggtaatgctcgga

SEQ ID NO: 35168 - DNA, 20 bp, Artificial Sequence
  Description of Artificial Sequence: Synthetic oligonucleotide
  Target: LAMA2; (-) strand; PAM type: NNNNGHTT; PAM sequence: CTCGGATT
gtttaattgtccaggtaatg

SEQ ID NO: 35169 - DNA, 20 bp, Artificial Sequence
  Description of Artificial Sequence: Synthetic oligonucleotide
  Target: LAMA2; (-) strand; PAM type: NNNNGHTT; PAM sequence: GACTGTTT
ttgtgaaaatcccaataact

SEQ ID NO: 35170 - DNA, 20 bp, Artificial Sequence
  Description of Artificial Sequence: Synthetic oligonucleotide
  Target: LAMA2; (-) strand; PAM type: NNNNGHTT; PAM sequence: TCATGATT
aagaactaaatttctctcca

SEQ ID NO: 35171 - DNA, 20 bp, Artificial Sequence
  Description of Artificial Sequence: Synthetic oligonucleotide
  Target: LAMA2; (-) strand; PAM type: NNNNGHTT; PAM sequence: ATTTGTTT
aattaaatgcttcagtttta

SEQ ID NO: 35172 - DNA, 20 bp, Artificial Sequence
  Description of Artificial Sequence: Synthetic oligonucleotide
  Target: LAMA2; (-) strand; PAM type: NNNNGHTT; PAM sequence: TTCAGTTT
gagttttctaaattaaatgc

SEQ ID NO: 35173 - DNA, 20 bp, Artificial Sequence
  Description of Artificial Sequence: Synthetic oligonucleotide
  Target: LAMA2; (-) strand; PAM type: NNNNGHTT; PAM sequence: AAATGCTT
aaatttgagttttctaaatt

SEQ ID NO: 35174 - DNA, 20 bp, Artificial Sequence
  Description of Artificial Sequence: Synthetic oligonucleotide
  Target: LAMA2; (-) strand; PAM type: NNNNGHTT; PAM sequence: TTGAGTTT
caattttaggctgaagaaat

SEQ ID NO: 35175 - DNA, 20 bp, Artificial Sequence
  Description of Artificial Sequence: Synthetic oligonucleotide
  Target: LAMA2; (-) strand; PAM type: NNNNGHTT; PAM sequence: ACTTGTTT
ttaatttgagaatctaacaa

SEQ ID NO: 35176 - DNA, 20 bp, Artificial Sequence
  Description of Artificial Sequence: Synthetic oligonucleotide
  Target: LAMA2; (-) strand; PAM type: NNNNGHTT; PAM sequence: TCCTGTTT
gttataaaatagcgattctg

SEQ ID NO: 35177 - DNA, 20 bp, Artificial Sequence
  Description of Artificial Sequence: Synthetic oligonucleotide
  Target: LAMA2; (-) strand; PAM type: NNNNGHTT; PAM sequence: TAGCGATT
aatatgtattagttataaaa

SEQ ID NO: 35178 - DNA, 20 bp, Artificial Sequence
  Description of Artificial Sequence: Synthetic oligonucleotide
  Target: LAMA2; (-) strand; PAM type: NNNNGHTT; PAM sequence: GGATGTTT
caacattgccattctttaca

SEQ ID NO: 35179 - DNA, 20 bp, Artificial Sequence
  Description of Artificial Sequence: Synthetic oligonucleotide
  Target: LAMA2; (-) strand; PAM type: NNNNGHTT; PAM sequence: TTGTGTTT
aaaaattaaagtatcaatat

SEQ ID NO: 35180 - DNA, 20 bp, Artificial Sequence
  Description of Artificial Sequence: Synthetic oligonucleotide
  Target: LAMA2; (-) strand; PAM type: NNNNGHTT; PAM sequence: AAATGTTT
ttttctgaacttctaagaac

SEQ ID NO: 35181 - DNA, 20 bp, Artificial Sequence
  Description of Artificial Sequence: Synthetic oligonucleotide
  Target: LAMA2; (-) strand; PAM type: NNNNGHTT; PAM sequence: ATTTGATT
attctatcttcatattatat

SEQ ID NO: 35182 - DNA, 20 bp, Artificial Sequence
  Description of Artificial Sequence: Synthetic oligonucleotide
  Target: LAMA2; (-) strand; PAM type: NNNNGHTT; PAM sequence: ACTTGATT
cttaaaagaagctaaaactc

SEQ ID NO: 35183 - DNA, 20 bp, Artificial Sequence
  Description of Artificial Sequence: Synthetic oligonucleotide
  Target: LAMA2; (-) strand; PAM type: NNNNGHTT; PAM sequence: GCATGATT
ttagcatatgtgaggagcat

SEQ ID NO: 35184 - DNA, 20 bp, Artificial Sequence
  Description of Artificial Sequence: Synthetic oligonucleotide
  Target: LAMA2; (-) strand; PAM type: NNNNGHTT; PAM sequence: TGATGTTT
tcaaatactattctataaat

SEQ ID NO: 35185 - DNA, 20 bp, Artificial Sequence
  Description of Artificial Sequence: Synthetic oligonucleotide
  Target: LAMA2; (-) strand; PAM type: NNNNGHTT; PAM sequence: CTAGGCTT
ttgaatgcaaattcaaaggt

SEQ ID NO: 35186 - DNA, 20 bp, Artificial Sequence
  Description of Artificial Sequence: Synthetic oligonucleotide
  Target: LAMA2; (-) strand; PAM type: NNNNGHTT; PAM sequence: TCTTGCTT
aaggtactgaaaggaaagtg

SEQ ID NO: 35187 - DNA, 20 bp, Artificial Sequence
  Description of Artificial Sequence: Synthetic oligonucleotide
  Target: LAMA2; (-) strand; PAM type: NNNNGHTT; PAM sequence: GGCAGATT
tccttaggacagcggtgcaa

SEQ ID NO: 35188 - DNA, 20 bp, Artificial Sequence
  Description of Artificial Sequence: Synthetic oligonucleotide
  Target: LAMA2; (-) strand; PAM type: NNNNGHTT; PAM sequence: GTATGCTT
tactatgtgccaagcccttt

SEQ ID NO: 35189 - DNA, 20 bp, Artificial Sequence
  Description of Artificial Sequence: Synthetic oligonucleotide
  Target: LAMA2; (-) strand; PAM type: NNNNGHTT; PAM sequence: ACTGGCTT
ttcagcaaattatctacaaa

SEQ ID NO: 35190 - DNA, 20 bp, Artificial Sequence
  Description of Artificial Sequence: Synthetic oligonucleotide
  Target: LAMA2; (-) strand; PAM type: NNNNGHTT; PAM sequence: TCCAGTTT
ttatctttgcttataatcca

SEQ ID NO: 35191 - DNA, 20 bp, Artificial Sequence
  Description of Artificial Sequence: Synthetic oligonucleotide
  Target: LAMA2; (-) strand; PAM type: NNNNGHTT; PAM sequence: CTTTGCTT
gactgtgagaaataaattat

SEQ ID NO: 35192 - DNA, 20 bp, Artificial Sequence
  Description of Artificial Sequence: Synthetic oligonucleotide
  Target: LAMA2; (-) strand; PAM type: NNNNGHTT; PAM sequence: TGGGGCTT
aatgtgaggatatcaggagg

SEQ ID NO: 35193 - DNA, 20 bp, Artificial Sequence
  Description of Artificial Sequence: Synthetic oligonucleotide
  Target: LAMA2; (-) strand; PAM type: NNNNGHTT; PAM sequence: GAATGTTT
atatgtattttctatgttat

SEQ ID NO: 35194 - DNA, 20 bp, Artificial Sequence
  Description of Artificial Sequence: Synthetic oligonucleotide
  Target: LAMA2; (-) strand; PAM type: NNNNGHTT; PAM sequence: TTTGGTTT
gctagttctacagttttctg

SEQ ID NO: 35195 - DNA, 20 bp, Artificial Sequence
  Description of Artificial Sequence: Synthetic oligonucleotide
  Target: LAMA2; (-) strand; PAM type: NNNNGHTT; PAM sequence: TTCTGTTT
ccttggctagttctacagtt

SEQ ID NO: 35196 - DNA, 20 bp, Artificial Sequence
  Description of Artificial Sequence: Synthetic oligonucleotide
  Target: LAMA2; (-) strand; PAM type: NNNNGHTT; PAM sequence: TACAGTTT
taagataccttggctagttc

SEQ ID NO: 35197 - DNA, 20 bp, Artificial Sequence
  Description of Artificial Sequence: Synthetic oligonucleotide
  Target: LAMA2; (-) strand; PAM type: NNNNGHTT; PAM sequence: AATTGCTT
aaataatcaataattaaaat

SEQ ID NO: 35198 - DNA, 20 bp, Artificial Sequence
  Description of Artificial Sequence: Synthetic oligonucleotide
  Target: LAMA2; (-) strand; PAM type: NNNNGHTT; PAM sequence: TATTGTTT
tttgcatgcatcctatttgt

SEQ ID NO: 35199 - DNA, 20 bp, Artificial Sequence
  Description of Artificial Sequence: Synthetic oligonucleotide
  Target: LAMA2; (-) strand; PAM type: NNNNGHTT; PAM sequence: GTATGTTT
gcatattcgtatttgaagat

SEQ ID NO: 35200 - DNA, 20 bp, Artificial Sequence
  Description of Artificial Sequence: Synthetic oligonucleotide
  Target: LAMA2; (-) strand; PAM type: NNNNGHTT; PAM sequence: AAGAGCTT
attacctccaatggtgaccc

SEQ ID NO: 35201 - DNA, 20 bp, Artificial Sequence
  Description of Artificial Sequence: Synthetic oligonucleotide
  Target: LAMA2; (-) strand; PAM type: NNNNGHTT; PAM sequence: CTTGGCTT
aaatagtcctttaacatgta

SEQ ID NO: 35202 - DNA, 20 bp, Artificial Sequence
  Description of Artificial Sequence: Synthetic oligonucleotide
  Target: LAMA2; (-) strand; PAM type: NNNNGHTT; PAM sequence: TAAAGCTT
acaatgaaagtagttcagat

SEQ ID NO: 35203 - DNA, 20 bp, Artificial Sequence
  Description of Artificial Sequence: Synthetic oligonucleotide
  Target: LAMA2; (-) strand; PAM type: NNNNGHTT; PAM sequence: TTCAGATT
cacccacacaatgaaagtag

SEQ ID NO: 35204 - DNA, 20 bp, Artificial Sequence
  Description of Artificial Sequence: Synthetic oligonucleotide
  Target: LAMA2; (-) strand; PAM type: NNNNGHTT; PAM sequence: ATTTGTTT
attaaaaacatttttagttc

SEQ ID NO: 35205 - DNA, 20 bp, Artificial Sequence
  Description of Artificial Sequence: Synthetic oligonucleotide
  Target: LAMA2; (-) strand; PAM type: NNNNGHTT; PAM sequence: TGCTGATT
cttttaaatacagggacatg

SEQ ID NO: 35206 - DNA, 20 bp, Artificial Sequence
  Description of Artificial Sequence: Synthetic oligonucleotide
  Target: LAMA2; (-) strand; PAM type: NNNNGHTT; PAM sequence: ATTAGATT
gtttatagtcgtttaaactg

SEQ ID NO: 35207 - DNA, 20 bp, Artificial Sequence
  Description of Artificial Sequence: Synthetic oligonucleotide
  Target: LAMA2; (-) strand; PAM type: NNNNGHTT; PAM sequence: AACTGATT
gctgtgtttatagtcgttta

SEQ ID NO: 35208 - DNA, 20 bp, Artificial Sequence
  Description of Artificial Sequence: Synthetic oligonucleotide
  Target: LAMA2; (-) strand; PAM type: NNNNGHTT; PAM sequence: AGTCGTTT
atgatcatcgctgtgtttat

SEQ ID NO: 35209 - DNA, 20 bp, Artificial Sequence
  Description of Artificial Sequence: Synthetic oligonucleotide
  Target: LAMA2; (-) strand; PAM type: NNNNGHTT; PAM sequence: CTGTGTTT
tccaacttaaatgatcatcg

SEQ ID NO: 35210 - DNA, 20 bp, Artificial Sequence
  Description of Artificial Sequence: Synthetic oligonucleotide
  Target: LAMA2; (-) strand; PAM type: NNNNGHTT; PAM sequence: GACAGATT
tttttttttcccctgtatgg

SEQ ID NO: 35211 - DNA, 20 bp, Artificial Sequence
  Description of Artificial Sequence: Synthetic oligonucleotide
  Target: LAMA2; (-) strand; PAM type: NNNNGHTT; PAM sequence: AGGTGATT
aattagtaaaaatcacaagt

SEQ ID NO: 35212 - DNA, 20 bp, Artificial Sequence
  Description of Artificial Sequence: Synthetic oligonucleotide
  Target: LAMA2; (-) strand; PAM type: NNNNGHTT; PAM sequence: GCAGGATT
agaataaaataagcttccca

SEQ ID NO: 35213 - DNA, 20 bp, Artificial Sequence
  Description of Artificial Sequence: Synthetic oligonucleotide
  Target: LAMA2; (-) strand; PAM type: NNNNGHTT; PAM sequence: ATAAGCTT
agcaaatctaagagaataaa

SEQ ID NO: 35214 - DNA, 20 bp, Artificial Sequence
  Description of Artificial Sequence: Synthetic oligonucleotide
  Target: LAMA2; (-) strand; PAM type: NNNNGHTT; PAM sequence: TAGTGTTT
gctgtaccaaaaaatggcaa

SEQ ID NO: 35215 - DNA, 20 bp, Artificial Sequence
  Description of Artificial Sequence: Synthetic oligonucleotide
  Target: LAMA2; (-) strand; PAM type: NNNNGHTT; PAM sequence: AATCGCTT
tctgcttccataatagattg

SEQ ID NO: 35216 - DNA, 20 bp, Artificial Sequence
  Description of Artificial Sequence: Synthetic oligonucleotide
  Target: LAMA2; (-) strand; PAM type: NNNNGHTT; PAM sequence: AATAGATT
gaagatgtttctgcttccat

SEQ ID NO: 35217 - DNA, 20 bp, Artificial Sequence
  Description of Artificial Sequence: Synthetic oligonucleotide
  Target: LAMA2; (-) strand; PAM type: NNNNGHTT; PAM sequence: TTCTGCTT
taaagcaaataggaagatgt

SEQ ID NO: 35218 - DNA, 20 bp, Artificial Sequence
  Description of Artificial Sequence: Synthetic oligonucleotide
  Target: LAMA2; (-) strand; PAM type: NNNNGHTT; PAM sequence: AGATGTTT
aatttgtaaagcaaatagga

SEQ ID NO: 35219 - DNA, 20 bp, Artificial Sequence
  Description of Artificial Sequence: Synthetic oligonucleotide
  Target: LAMA2; (-) strand; PAM type: NNNNGHTT; PAM sequence: ACAAGTTT
ttagtgtaaagaattctaaa

SEQ ID NO: 35220 - DNA, 20 bp, Artificial Sequence
  Description of Artificial Sequence: Synthetic oligonucleotide
  Target: LAMA2; (-) strand; PAM type: NNNNGHTT; PAM sequence: GATTGCTT
actgtttagtatgaaaagca

SEQ ID NO: 35221 - DNA, 20 bp, Artificial Sequence
  Description of Artificial Sequence: Synthetic oligonucleotide
  Target: LAMA2; (-) strand; PAM type: NNNNGHTT; PAM sequence: AGCAGATT
cttcactgtttagtatgaaa

SEQ ID NO: 35222 - DNA, 20 bp, Artificial Sequence
  Description of Artificial Sequence: Synthetic oligonucleotide
  Target: LAMA2; (-) strand; PAM type: NNNNGHTT; PAM sequence: CACTGTTT
taaaataatgcttttcactt

SEQ ID NO: 35223 - DNA, 20 bp, Artificial Sequence
  Description of Artificial Sequence: Synthetic oligonucleotide
  Target: LAMA2; (-) strand; PAM type: NNNNGHTT; PAM sequence: TAATGCTT
acagaaatatttctttaaaa

SEQ ID NO: 35224 - DNA, 20 bp, Artificial Sequence
  Description of Artificial Sequence: Synthetic oligonucleotide
  Target: LAMA2; (-) strand; PAM type: NNNNGHTT; PAM sequence: ATAAGTTT
aatagatttcatagtcaatc

SEQ ID NO: 35225 - DNA, 20 bp, Artificial Sequence
  Description of Artificial Sequence: Synthetic oligonucleotide
  Target: LAMA2; (-) strand; PAM type: NNNNGHTT; PAM sequence: AATAGATT
ctcattttattttgtcctag

SEQ ID NO: 35226 - DNA, 20 bp, Artificial Sequence
  Description of Artificial Sequence: Synthetic oligonucleotide
  Target: LAMA2; (-) strand; PAM type: NNNNGHTT; PAM sequence: GTTAGTTT
taaaaattaaaacttgaatg

SEQ ID NO: 35227 - DNA, 20 bp, Artificial Sequence
  Description of Artificial Sequence: Synthetic oligonucleotide
  Target: LAMA2; (-) strand; PAM type: NNNNGHTT; PAM sequence: GAAAGTTT
acagatgtcaggggcacata

SEQ ID NO: 35228 - DNA, 20 bp, Artificial Sequence
  Description of Artificial Sequence: Synthetic oligonucleotide
  Target: LAMA2; (-) strand; PAM type: NNNNGHTT; PAM sequence: CTATGATT
agcacagtggaaaatctatg

SEQ ID NO: 35229 - DNA, 20 bp, Artificial Sequence
  Description of Artificial Sequence: Synthetic oligonucleotide
  Target: LAMA2; (-) strand; PAM type: NNNNGHTT; PAM sequence: TGACGTTT
taaggctctatcattgcatc

SEQ ID NO: 35230 - DNA, 20 bp, Artificial Sequence
  Description of Artificial Sequence: Synthetic oligonucleotide
  Target: LAMA2; (-) strand; PAM type: NNNNGHTT; PAM sequence: ATGAGATT
tcaaaccatattacacacct

SEQ ID NO: 35231 - DNA, 20 bp, Artificial Sequence
  Description of Artificial Sequence: Synthetic oligonucleotide
  Target: LAMA2; (-) strand; PAM type: NNNNGHTT; PAM sequence: TTGCGCTT
agttgatactgggtgatcag

SEQ ID NO: 35232 - DNA, 20 bp, Artificial Sequence
  Description of Artificial Sequence: Synthetic oligonucleotide
  Target: LAMA2; (-) strand; PAM type: NNNNGHTT; PAM sequence: TGCCGATT
tcataaaaattaatataagg

SEQ ID NO: 35233 - DNA, 20 bp, Artificial Sequence
  Description of Artificial Sequence: Synthetic oligonucleotide
  Target: LAMA2; (-) strand; PAM type: NNNNGHTT; PAM sequence: TAAGGTTT
tacccgctcctgctatgaaa

SEQ ID NO: 35234 - DNA, 20 bp, Artificial Sequence
  Description of Artificial Sequence: Synthetic oligonucleotide
  Target: LAMA2; (-) strand; PAM type: NNNNGHTT; PAM sequence: AAAGGATT
tccaaaaacataaaaactgt

SEQ ID NO: 35235 - DNA, 20 bp, Artificial Sequence
  Description of Artificial Sequence: Synthetic oligonucleotide
  Target: LAMA2; (-) strand; PAM type: NNNNGHTT; PAM sequence: TGCAGATT
tttgcaaaccatttctagtt

SEQ ID NO: 35236 - DNA, 20 bp, Artificial Sequence
  Description of Artificial Sequence: Synthetic oligonucleotide
  Target: LAMA2; (-) strand; PAM type: NNNNGHTT; PAM sequence: TCTAGTTT
cttgccatttgcaaaccatt

SEQ ID NO: 35237 - DNA, 20 bp, Artificial Sequence
  Description of Artificial Sequence: Synthetic oligonucleotide
  Target: LAMA2; (-) strand; PAM type: NNNNGHTT; PAM sequence: GAATGCTT
atcacatgtaacagttattt

SEQ ID NO: 35238 - DNA, 20 bp, Artificial Sequence
  Description of Artificial Sequence: Synthetic oligonucleotide
  Target: LAMA2; (-) strand; PAM type: NNNNGHTT; PAM sequence: AAGAGATT
cttgtcatcctgaaacccaa

SEQ ID NO: 35239 - DNA, 20 bp, Artificial Sequence
  Description of Artificial Sequence: Synthetic oligonucleotide
  Target: LAMA2; (-) strand; PAM type: NNNNGHTT; PAM sequence: AGTAGATT
tatagctttctcttcatatc

SEQ ID NO: 35240 - DNA, 20 bp, Artificial Sequence
  Description of Artificial Sequence: Synthetic oligonucleotide
  Target: LAMA2; (-) strand; PAM type: NNNNGHTT; PAM sequence: TATAGCTT
aacattgtcttaactttagt

SEQ ID NO: 35241 - DNA, 20 bp, Artificial Sequence
  Description of Artificial Sequence: Synthetic oligonucleotide
  Target: LAMA2; (-) strand; PAM type: NNNNGHTT; PAM sequence: AAGTGATT
tcagtggcgttgctggggtt

SEQ ID NO: 35242 - DNA, 20 bp, Artificial Sequence
  Description of Artificial Sequence: Synthetic oligonucleotide
  Target: LAMA2; (-) strand; PAM type: NNNNGHTT; PAM sequence: GCGTGATT
tttagtcagaatgttttttg

SEQ ID NO: 35243 - DNA, 20 bp, Artificial Sequence
  Description of Artificial Sequence: Synthetic oligonucleotide
  Target: LAMA2; (-) strand; PAM type: NNNNGHTT; PAM sequence: GAATGTTT
tcttttgagctttttagtca

SEQ ID NO: 35244 - DNA, 20 bp, Artificial Sequence
  Description of Artificial Sequence: Synthetic oligonucleotide
  Target: LAMA2; (-) strand; PAM type: NNNNGHTT; PAM sequence: TTGAGCTT
gaatgcttaattattttctt

SEQ ID NO: 35245 - DNA, 20 bp, Artificial Sequence
  Description of Artificial Sequence: Synthetic oligonucleotide
  Target: LAMA2; (-) strand; PAM type: NNNNGHTT; PAM sequence: GAATGCTT
atatcttcatatggaaaaga

SEQ ID NO: 35246 - DNA, 20 bp, Artificial Sequence
  Description of Artificial Sequence: Synthetic oligonucleotide
  Target: LAMA2; (-) strand; PAM type: NNNNGHTT; PAM sequence: TTGAGTTT
tctaacatacataagtaaat

SEQ ID NO: 35247 - DNA, 20 bp, Artificial Sequence
  Description of Artificial Sequence: Synthetic oligonucleotide
  Target: LAMA2; (-) strand; PAM type: NNNNGHTT; PAM sequence: TTATGTTT
acaagcatatattgtaaagt

SEQ ID NO: 35248 - DNA, 20 bp, Artificial Sequence
  Description of Artificial Sequence: Synthetic oligonucleotide
  Target: LAMA2; (-) strand; PAM type: NNNNGHTT; PAM sequence: TAAAGTTT
acacacacaagcatatattg

SEQ ID NO: 35249 - DNA, 20 bp, Artificial Sequence
  Description of Artificial Sequence: Synthetic oligonucleotide
  Target: LAMA2; (-) strand; PAM type: NNNNGHTT; PAM sequence: TCTTGTTT
gttcccttctttcatagatc

SEQ ID NO: 35250 - DNA, 20 bp, Artificial Sequence
  Description of Artificial Sequence: Synthetic oligonucleotide
  Target: LAMA2; (-) strand; PAM type: NNNNGHTT; PAM sequence: CCTGGATT
tttttgacatttaatatctc

SEQ ID NO: 35251 - DNA, 20 bp, Artificial Sequence
  Description of Artificial Sequence: Synthetic oligonucleotide
  Target: LAMA2; (-) strand; PAM type: NNNNGHTT; PAM sequence: AGTTGATT
acattataatgtattgttca

SEQ ID NO: 35252 - DNA, 20 bp, Artificial Sequence
  Description of Artificial Sequence: Synthetic oligonucleotide
  Target: LAMA2; (-) strand; PAM type: NNNNGHTT; PAM sequence: TCAAGTTT
tcacaaaaccactgcagtta

SEQ ID NO: 35253 - DNA, 20 bp, Artificial Sequence
  Description of Artificial Sequence: Synthetic oligonucleotide
  Target: LAMA2; (-) strand; PAM type: NNNNGHTT; PAM sequence: ATTGGATT
cacaacatttaactcttaaa

SEQ ID NO: 35254 - DNA, 20 bp, Artificial Sequence
  Description of Artificial Sequence: Synthetic oligonucleotide
  Target: LAMA2; (-) strand; PAM type: NNNNGHTT; PAM sequence: CTCTGATT
ttttgttataaatatctatt

SEQ ID NO: 35255 - DNA, 20 bp, Artificial Sequence
  Description of Artificial Sequence: Synthetic oligonucleotide
  Target: LAMA2; (-) strand; PAM type: NNNNGHTT; PAM sequence: AGCAGCTT
gatttagaccatcaattttc

SEQ ID NO: 35256 - DNA, 20 bp, Artificial Sequence
  Description of Artificial Sequence: Synthetic oligonucleotide
  Target: LAMA2; (-) strand; PAM type: NNNNGHTT; PAM sequence: TTTTGATT
caaagattcctaatccatcc

SEQ ID NO: 35257 - DNA, 20 bp, Artificial Sequence
  Description of Artificial Sequence: Synthetic oligonucleotide
  Target: LAMA2; (-) strand; PAM type: NNNNGHTT; PAM sequence: CAAAGATT
acaggtctgtaataattccg

SEQ ID NO: 35258 - DNA, 20 bp, Artificial Sequence
  Description of Artificial Sequence: Synthetic oligonucleotide
  Target: LAMA2; (-) strand; PAM type: NNNNGHTT; PAM sequence: CTCTGCTT
aagtaaaagaccttgacatt

SEQ ID NO: 35259 - DNA, 20 bp, Artificial Sequence
  Description of Artificial Sequence: Synthetic oligonucleotide
  Target: LAMA2; (-) strand; PAM type: NNNNGHTT; PAM sequence: ACAAGTTT
tactgaaaacatcctccttc

SEQ ID NO: 35260 - DNA, 20 bp, Artificial Sequence
  Description of Artificial Sequence: Synthetic oligonucleotide
  Target: LAMA2; (-) strand; PAM type: NNNNGHTT; PAM sequence: ATCAGATT
gtgtttcagaccctaactgt

SEQ ID NO: 35261 - DNA, 20 bp, Artificial Sequence
  Description of Artificial Sequence: Synthetic oligonucleotide
  Target: LAMA2; (-) strand; PAM type: NNNNGHTT; PAM sequence: TAGTGTTT
caaagtaccataagaactcg

SEQ ID NO: 35262 - DNA, 20 bp, Artificial Sequence
  Description of Artificial Sequence: Synthetic oligonucleotide
  Target: LAMA2; (-) strand; PAM type: NNNNGHTT; PAM sequence: TTTAGTTT
aacttaaattcaatttaatc

SEQ ID NO: 35263 - DNA, 20 bp, Artificial Sequence
  Description of Artificial Sequence: Synthetic oligonucleotide
  Target: LAMA2; (-) strand; PAM type: NNNNGHTT; PAM sequence: TCAGGATT
ggatagtattaggtatgtac

SEQ ID NO: 35264 - DNA, 20 bp, Artificial Sequence
  Description of Artificial Sequence: Synthetic oligonucleotide
  Target: LAMA2; (-) strand; PAM type: NNNNGHTT; PAM sequence: TAAAGTTT
tattctacatgatacctgct

SEQ ID NO: 35265 - DNA, 20 bp, Artificial Sequence
  Description of Artificial Sequence: Synthetic oligonucleotide
  Target: LAMA2; (-) strand; PAM type: NNNNGHTT; PAM sequence: ACCTGCTT
agtatgttattctacatgat

SEQ ID NO: 35266 - DNA, 20 bp, Artificial Sequence
  Description of Artificial Sequence: Synthetic oligonucleotide
  Target: LAMA2; (-) strand; PAM type: NNNNGHTT; PAM sequence: ATGGGATT
agtcacaaatctagggaatc

SEQ ID NO: 35267 - DNA, 20 bp, Artificial Sequence
  Description of Artificial Sequence: Synthetic oligonucleotide
  Target: LAMA2; (-) strand; PAM type: NNNNGHTT; PAM sequence: CTGGGATT
cacagtatatacaaagaatt

SEQ ID NO: 35268 - DNA, 20 bp, Artificial Sequence
  Description of Artificial Sequence: Synthetic oligonucleotide
  Target: LAMA2; (-) strand; PAM type: NNNNGHTT; PAM sequence: CAGAGATT
gtagcatgaaagatagaacg

SEQ ID NO: 35269 - DNA, 20 bp, Artificial Sequence
  Description of Artificial Sequence: Synthetic oligonucleotide
  Target: LAMA2; (-) strand; PAM type: NNNNGHTT; PAM sequence: TTCAGTTT
taagtactgtgatatttaaa

SEQ ID NO: 35270 - DNA, 20 bp, Artificial Sequence
  Description of Artificial Sequence: Synthetic oligonucleotide
  Target: LAMA2; (-) strand; PAM type: NNNNGHTT; PAM sequence: CCCTGATT
tatatacctgcacatgtact

SEQ ID NO: 35271 - DNA, 20 bp, Artificial Sequence
  Description of Artificial Sequence: Synthetic oligonucleotide
  Target: LAMA2; (-) strand; PAM type: NNNNGHTT; PAM sequence: GACAGATT
actatacccactacctgaat

SEQ ID NO: 35272 - DNA, 20 bp, Artificial Sequence
  Description of Artificial Sequence: Synthetic oligonucleotide
  Target: LAMA2; (-) strand; PAM type: NNNNGHTT; PAM sequence: AAGTGCTT
tatggaggctgaagcaggag

SEQ ID NO: 35273 - DNA, 20 bp, Artificial Sequence
  Description of Artificial Sequence: Synthetic oligonucleotide
  Target: LAMA2; (-) strand; PAM type: NNNNGHTT; PAM sequence: AAGGGTTT
aggggagagagagaaggaga

SEQ ID NO: 35274 - DNA, 20 bp, Artificial Sequence
  Description of Artificial Sequence: Synthetic oligonucleotide
  Target: LAMA2; (-) strand; PAM type: NNNNGHTT; PAM sequence: TACTGATT
attttaacaacataaaaaat

SEQ ID NO: 35275 - DNA, 20 bp, Artificial Sequence
  Description of Artificial Sequence: Synthetic oligonucleotide
  Target: LAMA2; (-) strand; PAM type: NNNNGHTT; PAM sequence: AATTGATT
tacattctaatctctgcaaa

SEQ ID NO: 35276 - DNA, 20 bp, Artificial Sequence
  Description of Artificial Sequence: Synthetic oligonucleotide
  Target: LAMA2; (-) strand; PAM type: NNNNGHTT; PAM sequence: TTTTGTTT
gtctataaattatgtcctta

SEQ ID NO: 35277 - DNA, 20 bp, Artificial Sequence
  Description of Artificial Sequence: Synthetic oligonucleotide
  Target: LAMA2; (-) strand; PAM type: NNNNGHTT; PAM sequence: CAGGGCTT
aaaaaggaagtaaaagagag

SEQ ID NO: 35278 - DNA, 20 bp, Artificial Sequence
  Description of Artificial Sequence: Synthetic oligonucleotide
  Target: LAMA2; (-) strand; PAM type: NNNNGHTT; PAM sequence: GTATGTTT
tccattaggacaaaggcctt

SEQ ID NO: 35279 - DNA, 20 bp, Artificial Sequence
  Description of Artificial Sequence: Synthetic oligonucleotide
  Target: LAMA2; (-) strand; PAM type: NNNNGHTT; PAM sequence: ATTAGATT
agttactgtctgcctcctgc

SEQ ID NO: 35280 - DNA, 20 bp, Artificial Sequence
  Description of Artificial Sequence: Synthetic oligonucleotide
  Target: LAMA2; (-) strand; PAM type: NNNNGHTT; PAM sequence: TATTGTTT
acttaccgcatatacaatta

SEQ ID NO: 35281 - DNA, 20 bp, Artificial Sequence
  Description of Artificial Sequence: Synthetic oligonucleotide
  Target: LAMA2; (-) strand; PAM type: NNNNGHTT; PAM sequence: CCTTGTTT
aactactttctgttgtgtca

SEQ ID NO: 35282 - DNA, 20 bp, Artificial Sequence
  Description of Artificial Sequence: Synthetic oligonucleotide
  Target: LAMA2; (-) strand; PAM type: NNNNGHTT; PAM sequence: GATAGTTT
aggttgcctgttactctgat

SEQ ID NO: 35283 - DNA, 20 bp, Artificial Sequence
  Description of Artificial Sequence: Synthetic oligonucleotide
  Target: LAMA2; (-) strand; PAM type: NNNNGHTT; PAM sequence: GATAGATT
tattagccctttgtcagatg

SEQ ID NO: 35284 - DNA, 20 bp, Artificial Sequence
  Description of Artificial Sequence: Synthetic oligonucleotide
  Target: LAMA2; (-) strand; PAM type: NNNNGHTT; PAM sequence: TGTAGATT
gtgaatttgtttatgttcct

SEQ ID NO: 35285 - DNA, 20 bp, Artificial Sequence
  Description of Artificial Sequence: Synthetic oligonucleotide
  Target: LAMA2; (-) strand; PAM type: NNNNGHTT; PAM sequence: ATTTGTTT
ggggttgctttttcttgtga

SEQ ID NO: 35286 - DNA, 20 bp, Artificial Sequence
  Description of Artificial Sequence: Synthetic oligonucleotide
  Target: LAMA2; (-) strand; PAM type: NNNNGHTT; PAM sequence: GGTTGCTT
ctttgcccacttttcgatgg

SEQ ID NO: 35287 - DNA, 20 bp, Artificial Sequence
  Description of Artificial Sequence: Synthetic oligonucleotide
  Target: LAMA2; (-) strand; PAM type: NNNNGHTT; PAM sequence: ATATGTTT
gtgatggtgagctttttttc

SEQ ID NO: 35288 - DNA, 20 bp, Artificial Sequence
  Description of Artificial Sequence: Synthetic oligonucleotide
  Target: LAMA2; (-) strand; PAM type: NNNNGHTT; PAM sequence: GTGAGCTT
ttctctaattaccagtgatg

SEQ ID NO: 35289 - DNA, 20 bp, Artificial Sequence
  Description of Artificial Sequence: Synthetic oligonucleotide
  Target: LAMA2; (-) strand; PAM type: NNNNGHTT; PAM sequence: TTTTGATT
gagttggtatctcattgtcg

SEQ ID NO: 35290 - DNA, 20 bp, Artificial Sequence
  Description of Artificial Sequence: Synthetic oligonucleotide
  Target: LAMA2; (-) strand; PAM type: NNNNGHTT; PAM sequence: TGTCGTTT
ggcatgagttggtatctcat

SEQ ID NO: 35291 - DNA, 20 bp, Artificial Sequence
  Description of Artificial Sequence: Synthetic oligonucleotide
  Target: LAMA2; (-) strand; PAM type: NNNNGHTT; PAM sequence: TGTTGTTT
tccacatcctctccagcatc

SEQ ID NO: 35292 - DNA, 20 bp, Artificial Sequence
  Description of Artificial Sequence: Synthetic oligonucleotide
  Target: LAMA2; (-) strand; PAM type: NNNNGHTT; PAM sequence: GAATGATT
gtgcatgtgtctttatagta

SEQ ID NO: 35293 - DNA, 20 bp, Artificial Sequence
  Description of Artificial Sequence: Synthetic oligonucleotide
  Target: LAMA2; (-) strand; PAM type: NNNNGHTT; PAM sequence: TCCAGCTT
gtttgctgagaatgatggtt

SEQ ID NO: 35294 - DNA, 20 bp, Artificial Sequence
  Description of Artificial Sequence: Synthetic oligonucleotide
  Target: LAMA2; (-) strand; PAM type: NNNNGHTT; PAM sequence: GATGGTTT
tctgttagtttgctgagaat

SEQ ID NO: 35295 - DNA, 20 bp, Artificial Sequence
  Description of Artificial Sequence: Synthetic oligonucleotide
  Target: LAMA2; (-) strand; PAM type: NNNNGHTT; PAM sequence: GTTAGTTT
gtttggttttctgttcctct

SEQ ID NO: 35296 - DNA, 20 bp, Artificial Sequence
  Description of Artificial Sequence: Synthetic oligonucleotide
  Target: LAMA2; (-) strand; PAM type: NNNNGHTT; PAM sequence: TTTGGTTT
atgagtgagaacatgcagtg

SEQ ID NO: 35297 - DNA, 20 bp, Artificial Sequence
  Description of Artificial Sequence: Synthetic oligonucleotide
  Target: LAMA2; (-) strand; PAM type: NNNNGHTT; PAM sequence: CAGTGTTT
cacttatgagtgagaacatg

SEQ ID NO: 35298 - DNA, 20 bp, Artificial Sequence
  Description of Artificial Sequence: Synthetic oligonucleotide
  Target: LAMA2; (-) strand; PAM type: NNNNGHTT; PAM sequence: GGTGGTTT
cataggaatacatgtgccat

SEQ ID NO: 35299 - DNA, 20 bp, Artificial Sequence
  Description of Artificial Sequence: Synthetic oligonucleotide
  Target: LAMA2; (-) strand; PAM type: NNNNGHTT; PAM sequence: GCAGGTTT
gggatacatgtgcaaaatgt

SEQ ID NO: 35300 - DNA, 20 bp, Artificial Sequence
  Description of Artificial Sequence: Synthetic oligonucleotide
  Target: LAMA2; (-) strand; PAM type: NNNNGHTT; PAM sequence: CTTTGTTT
ctctttctttctctctctct

SEQ ID NO: 35301 - DNA, 20 bp, Artificial Sequence
  Description of Artificial Sequence: Synthetic oligonucleotide
  Target: LAMA2; (-) strand; PAM type: NNNNGHTT; PAM sequence: GCCAGTTT
caggcataaagtcttgaata

SEQ ID NO: 35302 - DNA, 20 bp, Artificial Sequence
  Description of Artificial Sequence: Synthetic oligonucleotide
  Target: LAMA2; (-) strand; PAM type: NNNNGHTT; PAM sequence: CCATGTTT
ttggtagagacagggtttca

SEQ ID NO: 35303 - DNA, 20 bp, Artificial Sequence
  Description of Artificial Sequence: Synthetic oligonucleotide
  Target: LAMA2; (-) strand; PAM type: NNNNGHTT; PAM sequence: CAGGGTTT
ttttgcatttttggtagaga

SEQ ID NO: 35304 - DNA, 20 bp, Artificial Sequence
  Description of Artificial Sequence: Synthetic oligonucleotide
  Target: LAMA2; (-) strand; PAM type: NNNNGHTT; PAM sequence: AAGTGATT
agcctctgccttccaggttc

SEQ ID NO: 35305 - DNA, 20 bp, Artificial Sequence
  Description of Artificial Sequence: Synthetic oligonucleotide
  Target: LAMA2; (-) strand; PAM type: NNNNGHTT; PAM sequence: TGATGATT
tcactctctccttcctggct

SEQ ID NO: 35306 - DNA, 20 bp, Artificial Sequence
  Description of Artificial Sequence: Synthetic oligonucleotide
  Target: LAMA2; (-) strand; PAM type: NNNNGHTT; PAM sequence: CCTGGCTT
cttgatttcactctctcctt

SEQ ID NO: 35307 - DNA, 20 bp, Artificial Sequence
  Description of Artificial Sequence: Synthetic oligonucleotide
  Target: LAMA2; (-) strand; PAM type: NNNNGHTT; PAM sequence: CCTTGATT
tctcctatccatcaccttct

SEQ ID NO: 35308 - DNA, 20 bp, Artificial Sequence
  Description of Artificial Sequence: Synthetic oligonucleotide
  Target: LAMA2; (-) strand; PAM type: NNNNGHTT; PAM sequence: ATCAGTTT
ctctttgatgctacttctta

SEQ ID NO: 35309 - DNA, 20 bp, Artificial Sequence
  Description of Artificial Sequence: Synthetic oligonucleotide
  Target: LAMA2; (-) strand; PAM type: NNNNGHTT; PAM sequence: CCCTGCTT
ccaggtgaggcaatgcctcg

SEQ ID NO: 35310 - DNA, 20 bp, Artificial Sequence
  Description of Artificial Sequence: Synthetic oligonucleotide
  Target: LAMA2; (-) strand; PAM type: NNNNGHTT; PAM sequence: TTGCGCTT
aaagggaactccctgacccc

SEQ ID NO: 35311 - DNA, 20 bp, Artificial Sequence
  Description of Artificial Sequence: Synthetic oligonucleotide
  Target: LAMA2; (-) strand; PAM type: NNNNGHTT; PAM sequence: ACCCGATT
gcaatattcgggtgggagtg

SEQ ID NO: 35312 - DNA, 20 bp, Artificial Sequence
  Description of Artificial Sequence: Synthetic oligonucleotide
  Target: LAMA2; (-) strand; PAM type: NNNNGHTT; PAM sequence: CGCCGTTT
tgggatatagtctcgtggtg

SEQ ID NO: 35313 - DNA, 20 bp, Artificial Sequence
  Description of Artificial Sequence: Synthetic oligonucleotide
  Target: LAMA2; (-) strand; PAM type: NNNNGHTT; PAM sequence: GCGAGATT
gactgctgtgctagcaatca

SEQ ID NO: 35314 - DNA, 20 bp, Artificial Sequence
  Description of Artificial Sequence: Synthetic oligonucleotide
  Target: LAMA2; (-) strand; PAM type: NNNNGHTT; PAM sequence: TGCAGTTT
ccccagcctcgttgccgcct

SEQ ID NO: 35315 - DNA, 20 bp, Artificial Sequence
  Description of Artificial Sequence: Synthetic oligonucleotide
  Target: LAMA2; (-) strand; PAM type: NNNNGHTT; PAM sequence: CTTTGTTT
cagttcgagcttcccggctg

SEQ ID NO: 35316 - DNA, 20 bp, Artificial Sequence
  Description of Artificial Sequence: Synthetic oligonucleotide
  Target: LAMA2; (-) strand; PAM type: NNNNGHTT; PAM sequence: GGCTGCTT
ccacccagttcgagcttccc

SEQ ID NO: 35317 - DNA, 20 bp, Artificial Sequence
  Description of Artificial Sequence: Synthetic oligonucleotide
  Target: LAMA2; (-) strand; PAM type: NNNNGHTT; PAM sequence: TCGAGCTT
tgtggtgggctccacccagt

SEQ ID NO: 35318 - DNA, 20 bp, Artificial Sequence
  Description of Artificial Sequence: Synthetic oligonucleotide
  Target: LAMA2; (-) strand; PAM type: NNNNGHTT; PAM sequence: TTTTGTTT
tgcagaggttactgctgtct

SEQ ID NO: 35319 - DNA, 20 bp, Artificial Sequence
  Description of Artificial Sequence: Synthetic oligonucleotide
  Target: LAMA2; (-) strand; PAM type: NNNNGHTT; PAM sequence: GTTAGTTT
tgtagatgtcctttctggtt

SEQ ID NO: 35320 - DNA, 20 bp, Artificial Sequence
  Description of Artificial Sequence: Synthetic oligonucleotide
  Target: LAMA2; (-) strand; PAM type: NNNNGHTT; PAM sequence: ATGGGTTT
ttgatgatggtgatgtacag

SEQ ID NO: 35321 - DNA, 20 bp, Artificial Sequence
  Description of Artificial Sequence: Synthetic oligonucleotide
  Target: LAMA2; (-) strand; PAM type: NNNNGHTT; PAM sequence: TGTGGTTT
ttctgttttttccccatctt

SEQ ID NO: 35322 - DNA, 20 bp, Artificial Sequence
  Description of Artificial Sequence: Synthetic oligonucleotide
  Target: LAMA2; (-) strand; PAM type: NNNNGHTT; PAM sequence: TTCTGTTT
tagagtttccagtttttctg

SEQ ID NO: 35323 - DNA, 20 bp, Artificial Sequence
  Description of Artificial Sequence: Synthetic oligonucleotide
  Target: LAMA2; (-) strand; PAM type: NNNNGHTT; PAM sequence: TCCAGTTT
gcgctctgcgttttagagtt

SEQ ID NO: 35324 - DNA, 20 bp, Artificial Sequence
  Description of Artificial Sequence: Synthetic oligonucleotide
  Target: LAMA2; (-) strand; PAM type: NNNNGHTT; PAM sequence: TAGAGTTT
aggagaggcgctctgcgttt

SEQ ID NO: 35325 - DNA, 20 bp, Artificial Sequence
  Description of Artificial Sequence: Synthetic oligonucleotide
  Target: LAMA2; (-) strand; PAM type: NNNNGHTT; PAM sequence: CTGCGTTT
tttggaggaggagaggcgct

SEQ ID NO: 35326 - DNA, 20 bp, Artificial Sequence
  Description of Artificial Sequence: Synthetic oligonucleotide
  Target: LAMA2; (-) strand; PAM type: NNNNGHTT; PAM sequence: TCCAGCTT
ctcgtcaaaatcattctcca

SEQ ID NO: 35327 - DNA, 20 bp, Artificial Sequence
  Description of Artificial Sequence: Synthetic oligonucleotide
  Target: LAMA2; (-) strand; PAM type: NNNNGHTT; PAM sequence: TTTGGTTT
aagttttcaacttctttgcc

SEQ ID NO: 35328 - DNA, 20 bp, Artificial Sequence
  Description of Artificial Sequence: Synthetic oligonucleotide
  Target: LAMA2; (-) strand; PAM type: NNNNGHTT; PAM sequence: CAAAGTTT
acattcttctaaattttttt

SEQ ID NO: 35329 - DNA, 20 bp, Artificial Sequence
  Description of Artificial Sequence: Synthetic oligonucleotide
  Target: LAMA2; (-) strand; PAM type: NNNNGHTT; PAM sequence: CTTGGTTT
tcttcacgtagttctcgagc

SEQ ID NO: 35330 - DNA, 20 bp, Artificial Sequence
  Description of Artificial Sequence: Synthetic oligonucleotide
  Target: LAMA2; (-) strand; PAM type: NNNNGHTT; PAM sequence: TGAGGCTT
cagttgatcgcatcggctcc

SEQ ID NO: 35331 - DNA, 20 bp, Artificial Sequence
  Description of Artificial Sequence: Synthetic oligonucleotide
  Target: LAMA2; (-) strand; PAM type: NNNNGHTT; PAM sequence: TCTCGCTT
ttttttctctaaacttccct

SEQ ID NO: 35332 - DNA, 20 bp, Artificial Sequence
  Description of Artificial Sequence: Synthetic oligonucleotide
  Target: LAMA2; (-) strand; PAM type: NNNNGHTT; PAM sequence: GGAGGCTT
cacatagtcccatatttctt

SEQ ID NO: 35333 - DNA, 20 bp, Artificial Sequence
  Description of Artificial Sequence: Synthetic oligonucleotide
  Target: LAMA2; (-) strand; PAM type: NNNNGHTT; PAM sequence: CGTAGATT
tttcaggtacaccaatcaga

SEQ ID NO: 35334 - DNA, 20 bp, Artificial Sequence
  Description of Artificial Sequence: Synthetic oligonucleotide
  Target: LAMA2; (-) strand; PAM type: NNNNGHTT; PAM sequence: CTTGGTTT
tcctgcagagtgttttccaa

SEQ ID NO: 35335 - DNA, 20 bp, Artificial Sequence
  Description of Artificial Sequence: Synthetic oligonucleotide
  Target: LAMA2; (-) strand; PAM type: NNNNGHTT; PAM sequence: GAGTGTTT
ctcctggataatatcctgca

SEQ ID NO: 35336 - DNA, 20 bp, Artificial Sequence
  Description of Artificial Sequence: Synthetic oligonucleotide
  Target: LAMA2; (-) strand; PAM type: NNNNGHTT; PAM sequence: GCTAGATT
tctgaacgttggcctgcctt

SEQ ID NO: 35337 - DNA, 20 bp, Artificial Sequence
  Description of Artificial Sequence: Synthetic oligonucleotide
  Target: LAMA2; (-) strand; PAM type: NNNNGHTT; PAM sequence: ATGGGCTT
agagatccgctgttagtctg

SEQ ID NO: 35338 - DNA, 20 bp, Artificial Sequence
  Description of Artificial Sequence: Synthetic oligonucleotide
  Target: LAMA2; (-) strand; PAM type: NNNNGHTT; PAM sequence: TAGGGTTT
ccccactctcttctggcttg

SEQ ID NO: 35339 - DNA, 20 bp, Artificial Sequence
  Description of Artificial Sequence: Synthetic oligonucleotide
  Target: LAMA2; (-) strand; PAM type: NNNNGHTT; PAM sequence: TCTGGCTT
aatattggcccccactctct

SEQ ID NO: 35340 - DNA, 20 bp, Artificial Sequence
  Description of Artificial Sequence: Synthetic oligonucleotide
  Target: LAMA2; (-) strand; PAM type: NNNNGHTT; PAM sequence: CTTAGTTT
tttctccttcacttatgaag

SEQ ID NO: 35341 - DNA, 20 bp, Artificial Sequence
  Description of Artificial Sequence: Synthetic oligonucleotide
  Target: LAMA2; (-) strand; PAM type: NNNNGHTT; PAM sequence: TGAAGCTT
ttttatttctccttcactta

SEQ ID NO: 35342 - DNA, 20 bp, Artificial Sequence
  Description of Artificial Sequence: Synthetic oligonucleotide
  Target: LAMA2; (-) strand; PAM type: NNNNGHTT; PAM sequence: ATTTGCTT
tggtgacaaaatctctcaac

SEQ ID NO: 35343 - DNA, 20 bp, Artificial Sequence
  Description of Artificial Sequence: Synthetic oligonucleotide
  Target: LAMA2; (-) strand; PAM type: NNNNGHTT; PAM sequence: TAGCGCTT
cggttgttcctttccatgtt

SEQ ID NO: 35344 - DNA, 20 bp, Artificial Sequence
  Description of Artificial Sequence: Synthetic oligonucleotide
  Target: LAMA2; (-) strand; PAM type: NNNNGHTT; PAM sequence: CCATGTTT
ctggtaccggttgttccttt

SEQ ID NO: 35345 - DNA, 20 bp, Artificial Sequence
  Description of Artificial Sequence: Synthetic oligonucleotide
  Target: LAMA2; (-) strand; PAM type: NNNNGHTT; PAM sequence: GCATGATT
tcgatggtctttacattttg

SEQ ID NO: 35346 - DNA, 20 bp, Artificial Sequence
  Description of Artificial Sequence: Synthetic oligonucleotide
  Target: LAMA2; (-) strand; PAM type: NNNNGHTT; PAM sequence: TGCAGTTT
tgattttgctcattagttga

SEQ ID NO: 35347 - DNA, 20 bp, Artificial Sequence
  Description of Artificial Sequence: Synthetic oligonucleotide
  Target: LAMA2; (-) strand; PAM type: NNNNGHTT; PAM sequence: TGGTGATT
cctgtcatgatgatgttagc

SEQ ID NO: 35348 - DNA, 20 bp, Artificial Sequence
  Description of Artificial Sequence: Synthetic oligonucleotide
  Target: LAMA2; (-) strand; PAM type: NNNNGHTT; PAM sequence: GCCAGTTT
cttgactctttatccaactt

SEQ ID NO: 35349 - DNA, 20 bp, Artificial Sequence
  Description of Artificial Sequence: Synthetic oligonucleotide
  Target: LAMA2; (-) strand; PAM type: NNNNGHTT; PAM sequence: ATGGGTTT
tgtgtgtctctgcacgtgag

SEQ ID NO: 35350 - DNA, 20 bp, Artificial Sequence
  Description of Artificial Sequence: Synthetic oligonucleotide
  Target: LAMA2; (-) strand; PAM type: NNNNGHTT; PAM sequence: ATTGGCTT
cctgcctttttttgttttcc

SEQ ID NO: 35351 - DNA, 20 bp, Artificial Sequence
  Description of Artificial Sequence: Synthetic oligonucleotide
  Target: LAMA2; (-) strand; PAM type: NNNNGHTT; PAM sequence: TTTTGTTT
ggattgcaacccctgccttt

SEQ ID NO: 35352 - DNA, 20 bp, Artificial Sequence
  Description of Artificial Sequence: Synthetic oligonucleotide
  Target: LAMA2; (-) strand; PAM type: NNNNGHTT; PAM sequence: CTAGGATT
aaagtctgttttgtcagaga

SEQ ID NO: 35353 - DNA, 20 bp, Artificial Sequence
  Description of Artificial Sequence: Synthetic oligonucleotide
  Target: LAMA2; (-) strand; PAM type: NNNNGHTT; PAM sequence: GTCTGTTT
ttgatctttgttggtttaaa

SEQ ID NO: 35354 - DNA, 20 bp, Artificial Sequence
  Description of Artificial Sequence: Synthetic oligonucleotide
  Target: LAMA2; (-) strand; PAM type: NNNNGHTT; PAM sequence: GTTGGTTT
ctttgtctcttttgatcttt

SEQ ID NO: 35355 - DNA, 20 bp, Artificial Sequence
  Description of Artificial Sequence: Synthetic oligonucleotide
  Target: LAMA2; (-) strand; PAM type: NNNNGHTT; PAM sequence: ACTTGCTT
ctctttgtaggtcactgagg

SEQ ID NO: 35356 - DNA, 20 bp, Artificial Sequence
  Description of Artificial Sequence: Synthetic oligonucleotide
  Target: LAMA2; (-) strand; PAM type: NNNNGHTT; PAM sequence: GTCTGCTT
gttctgtagatgtctattag

SEQ ID NO: 35357 - DNA, 20 bp, Artificial Sequence
  Description of Artificial Sequence: Synthetic oligonucleotide
  Target: LAMA2; (-) strand; PAM type: NNNNGHTT; PAM sequence: TGTTGATT
gctgaaaaaaatgtatattc

SEQ ID NO: 35358 - DNA, 20 bp, Artificial Sequence
  Description of Artificial Sequence: Synthetic oligonucleotide
  Target: LAMA2; (-) strand; PAM type: NNNNGHTT; PAM sequence: GAGAGCTT
gttcttttacatttgctgag

SEQ ID NO: 35359 - DNA, 20 bp, Artificial Sequence
  Description of Artificial Sequence: Synthetic oligonucleotide
  Target: LAMA2; (-) strand; PAM type: NNNNGHTT; PAM sequence: GATAGTTT
gattgcactgtggtctgaga

SEQ ID NO: 35360 - DNA, 20 bp, Artificial Sequence
  Description of Artificial Sequence: Synthetic oligonucleotide
  Target: LAMA2; (-) strand; PAM type: NNNNGHTT; PAM sequence: GTTTGATT
attcttaatcctgagttcta

SEQ ID NO: 35361 - DNA, 20 bp, Artificial Sequence
  Description of Artificial Sequence: Synthetic oligonucleotide
  Target: LAMA2; (-) strand; PAM type: NNNNGHTT; PAM sequence: TCTAGTTT
tgagattcttaatcctgagt

SEQ ID NO: 35362 - DNA, 20 bp, Artificial Sequence
  Description of Artificial Sequence: Synthetic oligonucleotide
  Target: LAMA2; (-) strand; PAM type: NNNNGHTT; PAM sequence: GTGAGATT
atgtagttgagcggctttga

SEQ ID NO: 35363 - DNA, 20 bp, Artificial Sequence
  Description of Artificial Sequence: Synthetic oligonucleotide
  Target: LAMA2; (-) strand; PAM type: NNNNGHTT; PAM sequence: AGCGGCTT
gttcagtttccatgtagttg

SEQ ID NO: 35364 - DNA, 20 bp, Artificial Sequence
  Description of Artificial Sequence: Synthetic oligonucleotide
  Target: LAMA2; (-) strand; PAM type: NNNNGHTT; PAM sequence: TTCAGTTT
agtcattcaggagcaggttg

SEQ ID NO: 35365 - DNA, 20 bp, Artificial Sequence
  Description of Artificial Sequence: Synthetic oligonucleotide
  Target: LAMA2; (-) strand; PAM type: NNNNGHTT; PAM sequence: GTTGGTTT
tatgtggtgtctttgttctc

SEQ ID NO: 35366 - DNA, 20 bp, Artificial Sequence
  Description of Artificial Sequence: Synthetic oligonucleotide
  Target: LAMA2; (-) strand; PAM type: NNNNGHTT; PAM sequence: CAGAGATT
acactgctttgaatgcgtcc

SEQ ID NO: 35367 - DNA, 20 bp, Artificial Sequence
  Description of Artificial Sequence: Synthetic oligonucleotide
  Target: LAMA2; (-) strand; PAM type: NNNNGHTT; PAM sequence: CACTGCTT
gctataaatttccctctaca

SEQ ID NO: 35368 - DNA, 20 bp, Artificial Sequence
  Description of Artificial Sequence: Synthetic oligonucleotide
  Target: LAMA2; (-) strand; PAM type: NNNNGHTT; PAM sequence: TCCTGCTT
gggtgtcaattttggatctt

SEQ ID NO: 35369 - DNA, 20 bp, Artificial Sequence
  Description of Artificial Sequence: Synthetic oligonucleotide
  Target: LAMA2; (-) strand; PAM type: NNNNGHTT; PAM sequence: TCTTGCTT
tagcttttgaatgtgtttgc

SEQ ID NO: 35370 - DNA, 20 bp, Artificial Sequence
  Description of Artificial Sequence: Synthetic oligonucleotide
  Target: LAMA2; (-) strand; PAM type: NNNNGHTT; PAM sequence: ATGTGTTT
tgccttctgctagcttttga

SEQ ID NO: 35371 - DNA, 20 bp, Artificial Sequence
  Description of Artificial Sequence: Synthetic oligonucleotide
  Target: LAMA2; (-) strand; PAM type: NNNNGHTT; PAM sequence: GCTAGCTT
ttagttatttcttgccttct

SEQ ID NO: 35372 - DNA, 20 bp, Artificial Sequence
  Description of Artificial Sequence: Synthetic oligonucleotide
  Target: LAMA2; (-) strand; PAM type: NNNNGHTT; PAM sequence: CTCTGATT
ctctatttccttcagttctg

SEQ ID NO: 35373 - DNA, 20 bp, Artificial Sequence
  Description of Artificial Sequence: Synthetic oligonucleotide
  Target: LAMA2; (-) strand; PAM type: NNNNGHTT; PAM sequence: AAGGGTTT
ctggattcattgattttttg

SEQ ID NO: 35374 - DNA, 20 bp, Artificial Sequence
  Description of Artificial Sequence: Synthetic oligonucleotide
  Target: LAMA2; (-) strand; PAM type: NNNNGHTT; PAM sequence: CATTGATT
aaaaaaccagctcctggatt

SEQ ID NO: 35375 - DNA, 20 bp, Artificial Sequence
  Description of Artificial Sequence: Synthetic oligonucleotide
  Target: LAMA2; (-) strand; PAM type: NNNNGHTT; PAM sequence: CCTGGATT
atcctttcaaaaaaccagct

SEQ ID NO: 35376 - DNA, 20 bp, Artificial Sequence
  Description of Artificial Sequence: Synthetic oligonucleotide
  Target: LAMA2; (-) strand; PAM type: NNNNGHTT; PAM sequence: ATTTGATT
tatcattttttattgtgtct

SEQ ID NO: 35377 - DNA, 20 bp, Artificial Sequence
  Description of Artificial Sequence: Synthetic oligonucleotide
  Target: LAMA2; (-) strand; PAM type: NNNNGHTT; PAM sequence: GGTAGTTT
tgtttgtagtattctctgat

SEQ ID NO: 35378 - DNA, 20 bp, Artificial Sequence
  Description of Artificial Sequence: Synthetic oligonucleotide
  Target: LAMA2; (-) strand; PAM type: NNNNGHTT; PAM sequence: AGGTGTTT
tttctagtttatttgcgtag

SEQ ID NO: 35379 - DNA, 20 bp, Artificial Sequence
  Description of Artificial Sequence: Synthetic oligonucleotide
  Target: LAMA2; (-) strand; PAM type: NNNNGHTT; PAM sequence: TCTAGTTT
tatccatttcttctagattt

SEQ ID NO: 35380 - DNA, 20 bp, Artificial Sequence
  Description of Artificial Sequence: Synthetic oligonucleotide
  Target: LAMA2; (-) strand; PAM type: NNNNGHTT; PAM sequence: TCTAGATT
cgaggaatgtatccatttct

SEQ ID NO: 35381 - DNA, 20 bp, Artificial Sequence
  Description of Artificial Sequence: Synthetic oligonucleotide
  Target: LAMA2; (-) strand; PAM type: NNNNGHTT; PAM sequence: CCTGGTTT
attcagagattcaacttctt

SEQ ID NO: 35382 - DNA, 20 bp, Artificial Sequence
  Description of Artificial Sequence: Synthetic oligonucleotide
  Target: LAMA2; (-) strand; PAM type: NNNNGHTT; PAM sequence: CAGAGATT
gagcctgttattggtcgatt

SEQ ID NO: 35383 - DNA, 20 bp, Artificial Sequence
  Description of Artificial Sequence: Synthetic oligonucleotide
  Target: LAMA2; (-) strand; PAM type: NNNNGHTT; PAM sequence: GGTCGATT
caatttcagagcctgttatt

SEQ ID NO: 35384 - DNA, 20 bp, Artificial Sequence
  Description of Artificial Sequence: Synthetic oligonucleotide
  Target: LAMA2; (-) strand; PAM type: NNNNGHTT; PAM sequence: TATTGATT
actctttttggttggtaaac

SEQ ID NO: 35385 - DNA, 20 bp, Artificial Sequence
  Description of Artificial Sequence: Synthetic oligonucleotide
  Target: LAMA2; (-) strand; PAM type: NNNNGHTT; PAM sequence: AATAGTTT
cctctttttctattgattgg

SEQ ID NO: 35386 - DNA, 20 bp, Artificial Sequence
  Description of Artificial Sequence: Synthetic oligonucleotide
  Target: LAMA2; (-) strand; PAM type: NNNNGHTT; PAM sequence: TATTGATT
gggaggattccctctttttc

SEQ ID NO: 35387 - DNA, 20 bp, Artificial Sequence
  Description of Artificial Sequence: Synthetic oligonucleotide
  Target: LAMA2; (-) strand; PAM type: NNNNGHTT; PAM sequence: GGAGGATT
ggcctcataaaatgagttag

SEQ ID NO: 35388 - DNA, 20 bp, Artificial Sequence
  Description of Artificial Sequence: Synthetic oligonucleotide
  Target: LAMA2; (-) strand; PAM type: NNNNGHTT; PAM sequence: CCCGGCTT
cttttttggttgtgtctctg

SEQ ID NO: 35389 - DNA, 20 bp, Artificial Sequence
  Description of Artificial Sequence: Synthetic oligonucleotide
  Target: LAMA2; (-) strand; PAM type: NNNNGHTT; PAM sequence: TGAGGATT
tcggtttgccagtattttat

SEQ ID NO: 35390 - DNA, 20 bp, Artificial Sequence
  Description of Artificial Sequence: Synthetic oligonucleotide
  Target: LAMA2; (-) strand; PAM type: NNNNGHTT; PAM sequence: TTCGGTTT
ctttttgatgtgctgctgga

SEQ ID NO: 35391 - DNA, 20 bp, Artificial Sequence
  Description of Artificial Sequence: Synthetic oligonucleotide
  Target: LAMA2; (-) strand; PAM type: NNNNGHTT; PAM sequence: GCTGGATT
gataagctttttgatgtgct

SEQ ID NO: 35392 - DNA, 20 bp, Artificial Sequence
  Description of Artificial Sequence: Synthetic oligonucleotide
  Target: LAMA2; (-) strand; PAM type: NNNNGHTT; PAM sequence: ATAAGCTT
agcccacttgatcatggtgg

SEQ ID NO: 35393 - DNA, 20 bp, Artificial Sequence
  Description of Artificial Sequence: Synthetic oligonucleotide
  Target: LAMA2; (-) strand; PAM type: NNNNGHTT; PAM sequence: TATTGATT
tttatatgctggattacatt

SEQ ID NO: 35394 - DNA, 20 bp, Artificial Sequence
  Description of Artificial Sequence: Synthetic oligonucleotide
  Target: LAMA2; (-) strand; PAM type: NNNNGHTT; PAM sequence: GCTGGATT
gtctttggctctgtttatat

SEQ ID NO: 35395 - DNA, 20 bp, Artificial Sequence
  Description of Artificial Sequence: Synthetic oligonucleotide
  Target: LAMA2; (-) strand; PAM type: NNNNGHTT; PAM sequence: CTCTGTTT
catgtggtttttgtctttgg

SEQ ID NO: 35396 - DNA, 20 bp, Artificial Sequence
  Description of Artificial Sequence: Synthetic oligonucleotide
  Target: LAMA2; (-) strand; PAM type: NNNNGHTT; PAM sequence: TGTGGTTT
tgcatctattgagataatca

SEQ ID NO: 35397 - DNA, 20 bp, Artificial Sequence
  Description of Artificial Sequence: Synthetic oligonucleotide
  Target: LAMA2; (-) strand; PAM type: NNNNGHTT; PAM sequence: AAAGGCTT
aagggttgttgaattttgtc

SEQ ID NO: 35398 - DNA, 20 bp, Artificial Sequence
  Description of Artificial Sequence: Synthetic oligonucleotide
  Target: LAMA2; (-) strand; PAM type: NNNNGHTT; PAM sequence: GAGAGTTT
ccatcaatacctaatttatt

SEQ ID NO: 35399 - DNA, 20 bp, Artificial Sequence
  Description of Artificial Sequence: Synthetic oligonucleotide
  Target: LAMA2; (-) strand; PAM type: NNNNGHTT; PAM sequence: GTGGGTTT
cattcagtatgatattggct

SEQ ID NO: 35400 - DNA, 20 bp, Artificial Sequence
  Description of Artificial Sequence: Synthetic oligonucleotide
  Target: LAMA2; (-) strand; PAM type: NNNNGHTT; PAM sequence: TCCAGTTT
cagttttcaaagggaatgct

SEQ ID NO: 35401 - DNA, 20 bp, Artificial Sequence
  Description of Artificial Sequence: Synthetic oligonucleotide
  Target: LAMA2; (-) strand; PAM type: NNNNGHTT; PAM sequence: GAATGCTT
cttgtgccagttttcaaagg

SEQ ID NO: 35402 - DNA, 20 bp, Artificial Sequence
  Description of Artificial Sequence: Synthetic oligonucleotide
  Target: LAMA2; (-) strand; PAM type: NNNNGHTT; PAM sequence: GCCAGTTT
agagggcatccctgtcttgt

SEQ ID NO: 35403 - DNA, 20 bp, Artificial Sequence
  Description of Artificial Sequence: Synthetic oligonucleotide
  Target: LAMA2; (-) strand; PAM type: NNNNGHTT; PAM sequence: GCCTGATT
accctttatttccttctcct

SEQ ID NO: 35404 - DNA, 20 bp, Artificial Sequence
  Description of Artificial Sequence: Synthetic oligonucleotide
  Target: LAMA2; (-) strand; PAM type: NNNNGHTT; PAM sequence: TGGGGTTT
gagattttgggctgagacga

SEQ ID NO: 35405 - DNA, 20 bp, Artificial Sequence
  Description of Artificial Sequence: Synthetic oligonucleotide
  Target: LAMA2; (-) strand; PAM type: NNNNGHTT; PAM sequence: AGGAGATT
tgaagttgcttatcagctta

SEQ ID NO: 35406 - DNA, 20 bp, Artificial Sequence
  Description of Artificial Sequence: Synthetic oligonucleotide
  Target: LAMA2; (-) strand; PAM type: NNNNGHTT; PAM sequence: ATCAGCTT
agactttgctgaagttgctt

SEQ ID NO: 35407 - DNA, 20 bp, Artificial Sequence
  Description of Artificial Sequence: Synthetic oligonucleotide
  Target: LAMA2; (-) strand; PAM type: NNNNGHTT; PAM sequence: AGTTGCTT
gtatcctgagactttgctga

SEQ ID NO: 35408 - DNA, 20 bp, Artificial Sequence
  Description of Artificial Sequence: Synthetic oligonucleotide
  Target: LAMA2; (-) strand; PAM type: NNNNGHTT; PAM sequence: CATTGATT
gaatgtttgtgatttttgta

SEQ ID NO: 35409 - DNA, 20 bp, Artificial Sequence
  Description of Artificial Sequence: Synthetic oligonucleotide
  Target: LAMA2; (-) strand; PAM type: NNNNGHTT; PAM sequence: TTGTGATT
ttgttggtgtataagaatgt

SEQ ID NO: 35410 - DNA, 20 bp, Artificial Sequence
  Description of Artificial Sequence: Synthetic oligonucleotide
  Target: LAMA2; (-) strand; PAM type: NNNNGHTT; PAM sequence: GAATGTTT
tgtctgttgttggtgtataa

SEQ ID NO: 35411 - DNA, 20 bp, Artificial Sequence
  Description of Artificial Sequence: Synthetic oligonucleotide
  Target: LAMA2; (-) strand; PAM type: NNNNGHTT; PAM sequence: CTCTGTTT
agttcacccatgatttggct

SEQ ID NO: 35412 - DNA, 20 bp, Artificial Sequence
  Description of Artificial Sequence: Synthetic oligonucleotide
  Target: LAMA2; (-) strand; PAM type: NNNNGHTT; PAM sequence: CCATGATT
aattgtgaatgggagttcac

SEQ ID NO: 35413 - DNA, 20 bp, Artificial Sequence
  Description of Artificial Sequence: Synthetic oligonucleotide
  Target: LAMA2; (-) strand; PAM type: NNNNGHTT; PAM sequence: GTTGGATT
gtccttcacatcccttgtaa

SEQ ID NO: 35414 - DNA, 20 bp, Artificial Sequence
  Description of Artificial Sequence: Synthetic oligonucleotide
  Target: LAMA2; (-) strand; PAM type: NNNNGHTT; PAM sequence: AGTGGTTT
cctcttttatttccttgagc

SEQ ID NO: 35415 - DNA, 20 bp, Artificial Sequence
  Description of Artificial Sequence: Synthetic oligonucleotide
  Target: LAMA2; (-) strand; PAM type: NNNNGHTT; PAM sequence: TATTGATT
cagtatggccattttcacga

SEQ ID NO: 35416 - DNA, 20 bp, Artificial Sequence
  Description of Artificial Sequence: Synthetic oligonucleotide
  Target: LAMA2; (-) strand; PAM type: NNNNGHTT; PAM sequence: GGTAGCTT
attctgtgaagaaagtcatt

SEQ ID NO: 35417 - DNA, 20 bp, Artificial Sequence
  Description of Artificial Sequence: Synthetic oligonucleotide
  Target: LAMA2; (-) strand; PAM type: NNNNGHTT; PAM sequence: AGTAGTTT
tggttccatatgaactttaa

SEQ ID NO: 35418 - DNA, 20 bp, Artificial Sequence
  Description of Artificial Sequence: Synthetic oligonucleotide
  Target: LAMA2; (-) strand; PAM type: NNNNGHTT; PAM sequence: TTAGGATT
tccagctttgttcttttggc

SEQ ID NO: 35419 - DNA, 20 bp, Artificial Sequence
  Description of Artificial Sequence: Synthetic oligonucleotide
  Target: LAMA2; (-) strand; PAM type: NNNNGHTT; PAM sequence: TTTGGCTT
gatgcctccagctttgttct

SEQ ID NO: 35420 - DNA, 20 bp, Artificial Sequence
  Description of Artificial Sequence: Synthetic oligonucleotide
  Target: LAMA2; (-) strand; PAM type: NNNNGHTT; PAM sequence: TCCAGCTT
aagtcaggtagtgtgatgcc

SEQ ID NO: 35421 - DNA, 20 bp, Artificial Sequence
  Description of Artificial Sequence: Synthetic oligonucleotide
  Target: LAMA2; (-) strand; PAM type: NNNNGHTT; PAM sequence: TATAGTTT
tggttactgtagccttgtag

SEQ ID NO: 35422 - DNA, 20 bp, Artificial Sequence
  Description of Artificial Sequence: Synthetic oligonucleotide
  Target: LAMA2; (-) strand; PAM type: NNNNGHTT; PAM sequence: TGCTGTTT
ctgtttttgtaccagtacca

SEQ ID NO: 35423 - DNA, 20 bp, Artificial Sequence
  Description of Artificial Sequence: Synthetic oligonucleotide
  Target: LAMA2; (-) strand; PAM type: NNNNGHTT; PAM sequence: CTCTGTTT
tctgttccattgatctatat

SEQ ID NO: 35424 - DNA, 20 bp, Artificial Sequence
  Description of Artificial Sequence: Synthetic oligonucleotide
  Target: LAMA2; (-) strand; PAM type: NNNNGHTT; PAM sequence: TCAGGTTT
ttccccattgcttgtttttc

SEQ ID NO: 35425 - DNA, 20 bp, Artificial Sequence
  Description of Artificial Sequence: Synthetic oligonucleotide
  Target: LAMA2; (-) strand; PAM type: NNNNGHTT; PAM sequence: GCTTGTTT
tagggaatcctttccccatt

SEQ ID NO: 35426 - DNA, 20 bp, Artificial Sequence
  Description of Artificial Sequence: Synthetic oligonucleotide
  Target: LAMA2; (-) strand; PAM type: NNNNGHTT; PAM sequence: CATTGCTT
taaatagggaatcctttccc

SEQ ID NO: 35427 - DNA, 20 bp, Artificial Sequence
  Description of Artificial Sequence: Synthetic oligonucleotide
  Target: LAMA2; (-) strand; PAM type: NNNNGHTT; PAM sequence: GCCAGTTT
cagctttctacatatggcta

SEQ ID NO: 35428 - DNA, 20 bp, Artificial Sequence
  Description of Artificial Sequence: Synthetic oligonucleotide
  Target: LAMA2; (-) strand; PAM type: NNNNGHTT; PAM sequence: TTCAGCTT
gtgtaaggaagggatccagt

SEQ ID NO: 35429 - DNA, 20 bp, Artificial Sequence
  Description of Artificial Sequence: Synthetic oligonucleotide
  Target: LAMA2; (-) strand; PAM type: NNNNGHTT; PAM sequence: TCCAGTTT
tataaggtgtaaggaaggga

SEQ ID NO: 35430 - DNA, 20 bp, Artificial Sequence
  Description of Artificial Sequence: Synthetic oligonucleotide
  Target: LAMA2; (-) strand; PAM type: NNNNGHTT; PAM sequence: AATTGATT
taaatctttaatccatcttg

SEQ ID NO: 35431 - DNA, 20 bp, Artificial Sequence
  Description of Artificial Sequence: Synthetic oligonucleotide
  Target: LAMA2; (-) strand; PAM type: NNNNGHTT; PAM sequence: TAACGTTT
ggtttttatggttttaggtt

SEQ ID NO: 35432 - DNA, 20 bp, Artificial Sequence
  Description of Artificial Sequence: Synthetic oligonucleotide
  Target: LAMA2; (-) strand; PAM type: NNNNGHTT; PAM sequence: TTAGGTTT
cttctagggtttttatggtt

SEQ ID NO: 35433 - DNA, 20 bp, Artificial Sequence
  Description of Artificial Sequence: Synthetic oligonucleotide
  Target: LAMA2; (-) strand; PAM type: NNNNGHTT; PAM sequence: TATGGTTT
aggttttcttctagggtttt

SEQ ID NO: 35434 - DNA, 20 bp, Artificial Sequence
  Description of Artificial Sequence: Synthetic oligonucleotide
  Target: LAMA2; (-) strand; PAM type: NNNNGHTT; PAM sequence: TAGGGTTT
gtaatgcctaggttttcttc

SEQ ID NO: 35435 - DNA, 20 bp, Artificial Sequence
  Description of Artificial Sequence: Synthetic oligonucleotide
  Target: LAMA2; (-) strand; PAM type: NNNNGHTT; PAM sequence: CTAGGTTT
tatgtcctgaatggtaatgc

SEQ ID NO: 35436 - DNA, 20 bp, Artificial Sequence
  Description of Artificial Sequence: Synthetic oligonucleotide
  Target: LAMA2; (-) strand; PAM type: NNNNGHTT; PAM sequence: TGGTGTTT
tcttttgttgccattgcttt

SEQ ID NO: 35437 - DNA, 20 bp, Artificial Sequence
  Description of Artificial Sequence: Synthetic oligonucleotide
  Target: LAMA2; (-) strand; PAM type: NNNNGHTT; PAM sequence: CATTGCTT
tcaattttgtcttttgttgc

SEQ ID NO: 35438 - DNA, 20 bp, Artificial Sequence
  Description of Artificial Sequence: Synthetic oligonucleotide
  Target: LAMA2; (-) strand; PAM type: NNNNGHTT; PAM sequence: TTTAGTTT
cttttgctgtgcagaagctc

SEQ ID NO: 35439 - DNA, 20 bp, Artificial Sequence
  Description of Artificial Sequence: Synthetic oligonucleotide
  Target: LAMA2; (-) strand; PAM type: NNNNGHTT; PAM sequence: GGTAGTTT
ggttgcctgttcactctgat

SEQ ID NO: 35440 - DNA, 20 bp, Artificial Sequence
  Description of Artificial Sequence: Synthetic oligonucleotide
  Target: LAMA2; (-) strand; PAM type: NNNNGHTT; PAM sequence: TGTAGATT
gtaaatttgtttgagttcat

SEQ ID NO: 35441 - DNA, 20 bp, Artificial Sequence
  Description of Artificial Sequence: Synthetic oligonucleotide
  Target: LAMA2; (-) strand; PAM type: NNNNGHTT; PAM sequence: ATTTGTTT
tgtttgtttttttcttgtaa

SEQ ID NO: 35442 - DNA, 20 bp, Artificial Sequence
  Description of Artificial Sequence: Synthetic oligonucleotide
  Target: LAMA2; (-) strand; PAM type: NNNNGHTT; PAM sequence: GTTTGTTT
gcccactttttgatggggtt

SEQ ID NO: 35443 - DNA, 20 bp, Artificial Sequence
  Description of Artificial Sequence: Synthetic oligonucleotide
  Target: LAMA2; (-) strand; PAM type: NNNNGHTT; PAM sequence: GGTTGTTT
cttcgcccactttttgatgg

SEQ ID NO: 35444 - DNA, 20 bp, Artificial Sequence
  Description of Artificial Sequence: Synthetic oligonucleotide
  Target: LAMA2; (-) strand; PAM type: NNNNGHTT; PAM sequence: ATGTGTTT
gtgatgatgagcatttcttc

SEQ ID NO: 35445 - DNA, 20 bp, Artificial Sequence
  Description of Artificial Sequence: Synthetic oligonucleotide
  Target: LAMA2; (-) strand; PAM type: NNNNGHTT; PAM sequence: TTTTGATT
gagatgatatctcatagtgg

SEQ ID NO: 35446 - DNA, 20 bp, Artificial Sequence
  Description of Artificial Sequence: Synthetic oligonucleotide
  Target: LAMA2; (-) strand; PAM type: NNNNGHTT; PAM sequence: AGTGGTTT
ggtgtgagatgatatctcat

SEQ ID NO: 35447 - DNA, 20 bp, Artificial Sequence
  Description of Artificial Sequence: Synthetic oligonucleotide
  Target: LAMA2; (-) strand; PAM type: NNNNGHTT; PAM sequence: TAATGATT
cctgttgtttcctgactttt

SEQ ID NO: 35448 - DNA, 20 bp, Artificial Sequence
  Description of Artificial Sequence: Synthetic oligonucleotide
  Target: LAMA2; (-) strand; PAM type: NNNNGHTT; PAM sequence: TGTTGTTT
tccacatcctctccagcacc

SEQ ID NO: 35449 - DNA, 20 bp, Artificial Sequence
  Description of Artificial Sequence: Synthetic oligonucleotide
  Target: LAMA2; (-) strand; PAM type: NNNNGHTT; PAM sequence: ACTAGTTT
ctgacttccacaatggttga

SEQ ID NO: 35450 - DNA, 20 bp, Artificial Sequence
  Description of Artificial Sequence: Synthetic oligonucleotide
  Target: LAMA2; (-) strand; PAM type: NNNNGHTT; PAM sequence: GCATGATT
gtgcatgtgtctttatagca

SEQ ID NO: 35451 - DNA, 20 bp, Artificial Sequence
  Description of Artificial Sequence: Synthetic oligonucleotide
  Target: LAMA2; (-) strand; PAM type: NNNNGHTT; PAM sequence: GATGGTTT
tgcgatagtttactgagaat

SEQ ID NO: 35452 - DNA, 20 bp, Artificial Sequence
  Description of Artificial Sequence: Synthetic oligonucleotide
  Target: LAMA2; (-) strand; PAM type: NNNNGHTT; PAM sequence: GATAGTTT
gtttggttttttgttcttgc

SEQ ID NO: 35453 - DNA, 20 bp, Artificial Sequence
  Description of Artificial Sequence: Synthetic oligonucleotide
  Target: LAMA2; (-) strand; PAM type: NNNNGHTT; PAM sequence: TTTGGTTT
atgagtgagaatatgcggtg

SEQ ID NO: 35454 - DNA, 20 bp, Artificial Sequence
  Description of Artificial Sequence: Synthetic oligonucleotide
  Target: LAMA2; (-) strand; PAM type: NNNNGHTT; PAM sequence: CGGTGTTT
cacctatgagtgagaatatg

SEQ ID NO: 35455 - DNA, 20 bp, Artificial Sequence
  Description of Artificial Sequence: Synthetic oligonucleotide
  Target: LAMA2; (-) strand; PAM type: NNNNGHTT; PAM sequence: CTAAGTTT
tttttttttattattatact

SEQ ID NO: 35456 - DNA, 20 bp, Artificial Sequence
  Description of Artificial Sequence: Synthetic oligonucleotide
  Target: LAMA2; (-) strand; PAM type: NNNNGHTT; PAM sequence: ATATGATT
gcaagtcagtaagtagtgat

SEQ ID NO: 35457 - DNA, 20 bp, Artificial Sequence
  Description of Artificial Sequence: Synthetic oligonucleotide
  Target: LAMA2; (-) strand; PAM type: NNNNGHTT; PAM sequence: GTGTGTTT
cccaactgatttaagtcaac

SEQ ID NO: 35458 - DNA, 20 bp, Artificial Sequence
  Description of Artificial Sequence: Synthetic oligonucleotide
  Target: LAMA2; (-) strand; PAM type: NNNNGHTT; PAM sequence: AACTGATT
attgagtttacaatttaccc

SEQ ID NO: 35459 - DNA, 20 bp, Artificial Sequence
  Description of Artificial Sequence: Synthetic oligonucleotide
  Target: LAMA2; (-) strand; PAM type: NNNNGHTT; PAM sequence: TTGAGTTT
actaaagtcaaagtaaggaa

SEQ ID NO: 35460 - DNA, 20 bp, Artificial Sequence
  Description of Artificial Sequence: Synthetic oligonucleotide
  Target: LAMA2; (-) strand; PAM type: NNNNGHTT; PAM sequence: AAGTGTTT
aactatatatatatcctgaa

SEQ ID NO: 35461 - DNA, 20 bp, Artificial Sequence
  Description of Artificial Sequence: Synthetic oligonucleotide
  Target: LAMA2; (-) strand; PAM type: NNNNGHTT; PAM sequence: TTCGGATT
catgaggttttacttgaaaa

SEQ ID NO: 35462 - DNA, 20 bp, Artificial Sequence
  Description of Artificial Sequence: Synthetic oligonucleotide
  Target: LAMA2; (-) strand; PAM type: NNNNGHTT; PAM sequence: TGAGGTTT
tgatgaatctgataattcca

SEQ ID NO: 35463 - DNA, 20 bp, Artificial Sequence
  Description of Artificial Sequence: Synthetic oligonucleotide
  Target: LAMA2; (-) strand; PAM type: NNNNGHTT; PAM sequence: AAAAGTTT
aaactcagcagatgtgttat

SEQ ID NO: 35464 - DNA, 20 bp, Artificial Sequence
  Description of Artificial Sequence: Synthetic oligonucleotide
  Target: LAMA2; (-) strand; PAM type: NNNNGHTT; PAM sequence: GCATGTTT
aagtaaaatttttctttcca

SEQ ID NO: 35465 - DNA, 20 bp, Artificial Sequence
  Description of Artificial Sequence: Synthetic oligonucleotide
  Target: LAMA2; (-) strand; PAM type: NNNNGHTT; PAM sequence: TAATGTTT
aagctttgggaaagaaacct

SEQ ID NO: 35466 - DNA, 20 bp, Artificial Sequence
  Description of Artificial Sequence: Synthetic oligonucleotide
  Target: LAMA2; (-) strand; PAM type: NNNNGHTT; PAM sequence: ATAAGCTT
taaaaactgacaattaacta

SEQ ID NO: 35467 - DNA, 20 bp, Artificial Sequence
  Description of Artificial Sequence: Synthetic oligonucleotide
  Target: LAMA2; (-) strand; PAM type: NNNNGHTT; PAM sequence: ATGGGCTT
ccttatataggtctaacctc

SEQ ID NO: 35468 - DNA, 20 bp, Artificial Sequence
  Description of Artificial Sequence: Synthetic oligonucleotide
  Target: LAMA2; (-) strand; PAM type: NNNNGHTT; PAM sequence: GCAGGTTT
tcaagatatttttttaaaaa

SEQ ID NO: 35469 - DNA, 20 bp, Artificial Sequence
  Description of Artificial Sequence: Synthetic oligonucleotide
  Target: LAMA2; (-) strand; PAM type: NNNNGHTT; PAM sequence: ATTTGATT
tgttaagcatgggatctgaa

SEQ ID NO: 35470 - DNA, 20 bp, Artificial Sequence
  Description of Artificial Sequence: Synthetic oligonucleotide
  Target: LAMA2; (-) strand; PAM type: NNNNGHTT; PAM sequence: TTTGGATT
ttcccccaagtagagacggc

SEQ ID NO: 35471 - DNA, 20 bp, Artificial Sequence
  Description of Artificial Sequence: Synthetic oligonucleotide
  Target: LAMA2; (-) strand; PAM type: NNNNGHTT; PAM sequence: GACGGCTT
acatttttcccccaagtaga

SEQ ID NO: 35472 - DNA, 20 bp, Artificial Sequence
  Description of Artificial Sequence: Synthetic oligonucleotide
  Target: LAMA2; (-) strand; PAM type: NNNNGHTT; PAM sequence: AAGCGTTT
ggtaaatagacaaaatggcc

SEQ ID NO: 35473 - DNA, 20 bp, Artificial Sequence
  Description of Artificial Sequence: Synthetic oligonucleotide
  Target: LAMA2; (-) strand; PAM type: NNNNGHTT; PAM sequence: TGAAGTTT
attacccaaacaaaaaatgc

SEQ ID NO: 35474 - DNA, 20 bp, Artificial Sequence
  Description of Artificial Sequence: Synthetic oligonucleotide
  Target: LAMA2; (-) strand; PAM type: NNNNGHTT; PAM sequence: TGTTGTTT
aattagggggtctttcttgt

SEQ ID NO: 35475 - DNA, 20 bp, Artificial Sequence
  Description of Artificial Sequence: Synthetic oligonucleotide
  Target: LAMA2; (-) strand; PAM type: NNNNGHTT; PAM sequence: TACTGATT
tcaattatagatttactgta

SEQ ID NO: 35476 - DNA, 20 bp, Artificial Sequence
  Description of Artificial Sequence: Synthetic oligonucleotide
  Target: LAMA2; (-) strand; PAM type: NNNNGHTT; PAM sequence: TATAGATT
tctaacattatttattcaat

SEQ ID NO: 35477 - DNA, 20 bp, Artificial Sequence
  Description of Artificial Sequence: Synthetic oligonucleotide
  Target: LAMA2; (-) strand; PAM type: NNNNGHTT; PAM sequence: ATTTGCTT
agctgatcctagcctgtgat

SEQ ID NO: 35478 - DNA, 20 bp, Artificial Sequence
  Description of Artificial Sequence: Synthetic oligonucleotide
  Target: LAMA2; (-) strand; PAM type: NNNNGHTT; PAM sequence: TGGAGATT
aattatgtaggctcacattt

SEQ ID NO: 35479 - DNA, 20 bp, Artificial Sequence
  Description of Artificial Sequence: Synthetic oligonucleotide
  Target: LAMA2; (-) strand; PAM type: NNNNGHTT; PAM sequence: TTAAGATT
tcgggtaaaagaaaataaaa

SEQ ID NO: 35480 - DNA, 20 bp, Artificial Sequence
  Description of Artificial Sequence: Synthetic oligonucleotide
  Target: LAMA2; (-) strand; PAM type: NNNNGHTT; PAM sequence: GAATGTTT
agcctctaagatcaaggcaa

SEQ ID NO: 35481 - DNA, 20 bp, Artificial Sequence
  Description of Artificial Sequence: Synthetic oligonucleotide
  Target: LAMA2; (-) strand; PAM type: NNNNGHTT; PAM sequence: TTTAGATT
agaaatcaagggcagaaata

SEQ ID NO: 35482 - DNA, 20 bp, Artificial Sequence
  Description of Artificial Sequence: Synthetic oligonucleotide
  Target: LAMA2; (-) strand; PAM type: NNNNGHTT; PAM sequence: GTACGATT
cttcctgattacaagtttca

SEQ ID NO: 35483 - DNA, 20 bp, Artificial Sequence
  Description of Artificial Sequence: Synthetic oligonucleotide
  Target: LAMA2; (-) strand; PAM type: NNNNGHTT; PAM sequence: ACAAGTTT
aaggggatgtcttcctgatt

SEQ ID NO: 35484 - DNA, 20 bp, Artificial Sequence
  Description of Artificial Sequence: Synthetic oligonucleotide
  Target: LAMA2; (-) strand; PAM type: NNNNGHTT; PAM sequence: TCCTGATT
tgattacaaaggggatgtct

SEQ ID NO: 35485 - DNA, 20 bp, Artificial Sequence
  Description of Artificial Sequence: Synthetic oligonucleotide
  Target: LAMA2; (-) strand; PAM type: NNNNGHTT; PAM sequence: ATCTGATT
aagttggactggtgatggag

SEQ ID NO: 35486 - DNA, 20 bp, Artificial Sequence
  Description of Artificial Sequence: Synthetic oligonucleotide
  Target: LAMA2; (-) strand; PAM type: NNNNGHTT; PAM sequence: TGAGGTTT
tgttacccatgcaaatatgg

SEQ ID NO: 35487 - DNA, 20 bp, Artificial Sequence
  Description of Artificial Sequence: Synthetic oligonucleotide
  Target: LAMA2; (-) strand; PAM type: NNNNGHTT; PAM sequence: GAGAGCTT
tcaggaatcaggatgtcagg

SEQ ID NO: 35488 - DNA, 20 bp, Artificial Sequence
  Description of Artificial Sequence: Synthetic oligonucleotide
  Target: LAMA2; (-) strand; PAM type: NNNNGHTT; PAM sequence: GATTGCTT
tccttggcccagtttcacca

SEQ ID NO: 35489 - DNA, 20 bp, Artificial Sequence
  Description of Artificial Sequence: Synthetic oligonucleotide
  Target: LAMA2; (-) strand; PAM type: NNNNGHTT; PAM sequence: ACCAGATT
agtctccttggcccagtttc

SEQ ID NO: 35490 - DNA, 20 bp, Artificial Sequence
  Description of Artificial Sequence: Synthetic oligonucleotide
  Target: LAMA2; (-) strand; PAM type: NNNNGHTT; PAM sequence: CCCAGTTT
ttagagacaagtctccttgg

SEQ ID NO: 35491 - DNA, 20 bp, Artificial Sequence
  Description of Artificial Sequence: Synthetic oligonucleotide
  Target: LAMA2; (-) strand; PAM type: NNNNGHTT; PAM sequence: TGTAGCTT
gtaaaacattgctctgccaa

SEQ ID NO: 35492 - DNA, 20 bp, Artificial Sequence
  Description of Artificial Sequence: Synthetic oligonucleotide
  Target: LAMA2; (-) strand; PAM type: NNNNGHTT; PAM sequence: AGGTGCTT
aacacagcagtgctgccaag

SEQ ID NO: 35493 - DNA, 20 bp, Artificial Sequence
  Description of Artificial Sequence: Synthetic oligonucleotide
  Target: LAMA2; (-) strand; PAM type: NNNNGHTT; PAM sequence: CCCTGTTT
acacagatgacagacagagt

SEQ ID NO: 35494 - DNA, 20 bp, Artificial Sequence
  Description of Artificial Sequence: Synthetic oligonucleotide
  Target: LAMA2; (-) strand; PAM type: NNNNGHTT; PAM sequence: AGAGGATT
taaatagacttcagtgccac

SEQ ID NO: 35495 - DNA, 20 bp, Artificial Sequence
  Description of Artificial Sequence: Synthetic oligonucleotide
  Target: LAMA2; (-) strand; PAM type: NNNNGHTT; PAM sequence: TTTGGTTT
ttacatgtacatgacaatgg

SEQ ID NO: 35496 - DNA, 20 bp, Artificial Sequence
  Description of Artificial Sequence: Synthetic oligonucleotide
  Target: LAMA2; (-) strand; PAM type: NNNNGHTT; PAM sequence: AATGGTTT
aatatttacatgtacatgac

SEQ ID NO: 35497 - DNA, 20 bp, Artificial Sequence
  Description of Artificial Sequence: Synthetic oligonucleotide
  Target: LAMA2; (-) strand; PAM type: NNNNGHTT; PAM sequence: GAAGGATT
ggcagcctaaaatggagtaa

SEQ ID NO: 35498 - DNA, 20 bp, Artificial Sequence
  Description of Artificial Sequence: Synthetic oligonucleotide
  Target: LAMA2; (-) strand; PAM type: NNNNGHTT; PAM sequence: TTAGGTTT
cttctcaaggatgtatttca

SEQ ID NO: 35499 - DNA, 20 bp, Artificial Sequence
  Description of Artificial Sequence: Synthetic oligonucleotide
  Target: LAMA2; (-) strand; PAM type: NNNNGHTT; PAM sequence: GGAAGCTT
acagctactaaaatggtgaa

SEQ ID NO: 35500 - DNA, 20 bp, Artificial Sequence
  Description of Artificial Sequence: Synthetic oligonucleotide
  Target: LAMA2; (-) strand; PAM type: NNNNGHTT; PAM sequence: CCATGATT
aagcgtgttgtcattgtcct

SEQ ID NO: 35501 - DNA, 20 bp, Artificial Sequence
  Description of Artificial Sequence: Synthetic oligonucleotide
  Target: LAMA2; (-) strand; PAM type: NNNNGHTT; PAM sequence: CAAAGATT
agtttctgcaaggtttggca

SEQ ID NO: 35502 - DNA, 20 bp, Artificial Sequence
  Description of Artificial Sequence: Synthetic oligonucleotide
  Target: LAMA2; (-) strand; PAM type: NNNNGHTT; PAM sequence: CAAGGTTT
aaatgcacacagagtttctg

SEQ ID NO: 35503 - DNA, 20 bp, Artificial Sequence
  Description of Artificial Sequence: Synthetic oligonucleotide
  Target: LAMA2; (-) strand; PAM type: NNNNGHTT; PAM sequence: CAGAGTTT
cttacgtcagtaaatgcaca

SEQ ID NO: 35504 - DNA, 20 bp, Artificial Sequence
  Description of Artificial Sequence: Synthetic oligonucleotide
  Target: LAMA2; (-) strand; PAM type: NNNNGHTT; PAM sequence: CAATGCTT
aagatcaaagagatggagag

SEQ ID NO: 35505 - DNA, 20 bp, Artificial Sequence
  Description of Artificial Sequence: Synthetic oligonucleotide
  Target: LAMA2; (-) strand; PAM type: NNNNGHTT; PAM sequence: TGTAGCTT
tatagagaactaattaaaga

SEQ ID NO: 35506 - DNA, 20 bp, Artificial Sequence
  Description of Artificial Sequence: Synthetic oligonucleotide
  Target: LAMA2; (-) strand; PAM type: NNNNGHTT; PAM sequence: GACTGCTT
gatcaaaaatttagtaaaat

SEQ ID NO: 35507 - DNA, 20 bp, Artificial Sequence
  Description of Artificial Sequence: Synthetic oligonucleotide
  Target: LAMA2; (-) strand; PAM type: NNNNGHTT; PAM sequence: CTATGTTT
tattattattacttttgcat

SEQ ID NO: 35508 - DNA, 20 bp, Artificial Sequence
  Description of Artificial Sequence: Synthetic oligonucleotide
  Target: LAMA2; (-) strand; PAM type: NNNNGHTT; PAM sequence: AAAGGATT
aaagaggtagagaaacactg

SEQ ID NO: 35509 - DNA, 20 bp, Artificial Sequence
  Description of Artificial Sequence: Synthetic oligonucleotide
  Target: LAMA2; (-) strand; PAM type: NNNNGHTT; PAM sequence: AACTGATT
atcgtttggaaaattcctgc

SEQ ID NO: 35510 - DNA, 20 bp, Artificial Sequence
  Description of Artificial Sequence: Synthetic oligonucleotide
  Target: LAMA2; (-) strand; PAM type: NNNNGHTT; PAM sequence: AATCGTTT
gattaagttgatgctgtgtg

SEQ ID NO: 35511 - DNA, 20 bp, Artificial Sequence
  Description of Artificial Sequence: Synthetic oligonucleotide
  Target: LAMA2; (-) strand; PAM type: NNNNGHTT; PAM sequence: AGAAGATT
tggtccctaaaatgttttcc

SEQ ID NO: 35512 - DNA, 20 bp, Artificial Sequence
  Description of Artificial Sequence: Synthetic oligonucleotide
  Target: LAMA2; (-) strand; PAM type: NNNNGHTT; PAM sequence: AAATGTTT
atatgtatttgtggtcccta

SEQ ID NO: 35513 - DNA, 20 bp, Artificial Sequence
  Description of Artificial Sequence: Synthetic oligonucleotide
  Target: LAMA2; (-) strand; PAM type: NNNNGHTT; PAM sequence: TTTTGTTT
atattctcttgtagaagagc

SEQ ID NO: 35514 - DNA, 20 bp, Artificial Sequence
  Description of Artificial Sequence: Synthetic oligonucleotide
  Target: LAMA2; (-) strand; PAM type: NNNNGHTT; PAM sequence: AAGAGCTT
atgaagatattctcttgtag

SEQ ID NO: 35515 - DNA, 20 bp, Artificial Sequence
  Description of Artificial Sequence: Synthetic oligonucleotide
  Target: LAMA2; (-) strand; PAM type: NNNNGHTT; PAM sequence: ATATGTTT
catacttacttgagatattg

SEQ ID NO: 35516 - DNA, 20 bp, Artificial Sequence
  Description of Artificial Sequence: Synthetic oligonucleotide
  Target: LAMA2; (-) strand; PAM type: NNNNGHTT; PAM sequence: CTCAGTTT
agacttttaaaatactgatc

SEQ ID NO: 35517 - DNA, 20 bp, Artificial Sequence
  Description of Artificial Sequence: Synthetic oligonucleotide
  Target: LAMA2; (-) strand; PAM type: NNNNGHTT; PAM sequence: GATGGCTT
aagactatttatttctacaa

SEQ ID NO: 35518 - DNA, 20 bp, Artificial Sequence
  Description of Artificial Sequence: Synthetic oligonucleotide
  Target: LAMA2; (-) strand; PAM type: NNNNGHTT; PAM sequence: CAGAGATT
aaaattcctaataattattt

SEQ ID NO: 35519 - DNA, 20 bp, Artificial Sequence
  Description of Artificial Sequence: Synthetic oligonucleotide
  Target: LAMA2; (-) strand; PAM type: NNNNGHTT; PAM sequence: AAGTGTTT
gaatctaaattataattcca

SEQ ID NO: 35520 - DNA, 20 bp, Artificial Sequence
  Description of Artificial Sequence: Synthetic oligonucleotide
  Target: LAMA2; (-) strand; PAM type: NNNNGHTT; PAM sequence: CTCAGTTT
ttgaaaaaacagtcataaaa

SEQ ID NO: 35521 - DNA, 20 bp, Artificial Sequence
  Description of Artificial Sequence: Synthetic oligonucleotide
  Target: LAMA2; (-) strand; PAM type: NNNNGHTT; PAM sequence: TGAAGCTT
tgcaacatttgccaaaattt

SEQ ID NO: 35522 - DNA, 20 bp, Artificial Sequence
  Description of Artificial Sequence: Synthetic oligonucleotide
  Target: LAMA2; (-) strand; PAM type: NNNNGHTT; PAM sequence: AATGGATT
tttctaatttctattttcac

SEQ ID NO: 35523 - DNA, 20 bp, Artificial Sequence
  Description of Artificial Sequence: Synthetic oligonucleotide
  Target: LAMA2; (-) strand; PAM type: NNNNGHTT; PAM sequence: AAATGATT
tgactccacactttttcaaa

SEQ ID NO: 35524 - DNA, 20 bp, Artificial Sequence
  Description of Artificial Sequence: Synthetic oligonucleotide
  Target: LAMA2; (-) strand; PAM type: NNNNGHTT; PAM sequence: AACAGTTT
atctatatcaaggcaatttc

SEQ ID NO: 35525 - DNA, 20 bp, Artificial Sequence
  Description of Artificial Sequence: Synthetic oligonucleotide
  Target: LAMA2; (-) strand; PAM type: NNNNGHTT; PAM sequence: AAGGGTTT
gtgcctgagataccatattc

SEQ ID NO: 35526 - DNA, 20 bp, Artificial Sequence
  Description of Artificial Sequence: Synthetic oligonucleotide
  Target: LAMA2; (-) strand; PAM type: NNNNGHTT; PAM sequence: ATCTGATT
cccttcagtagccagtctaa

SEQ ID NO: 35527 - DNA, 20 bp, Artificial Sequence
  Description of Artificial Sequence: Synthetic oligonucleotide
  Target: LAMA2; (-) strand; PAM type: NNNNGHTT; PAM sequence: AAGAGATT
aattaacatctttgactctg

SEQ ID NO: 35528 - DNA, 20 bp, Artificial Sequence
  Description of Artificial Sequence: Synthetic oligonucleotide
  Target: LAMA2; (-) strand; PAM type: NNNNGHTT; PAM sequence: CCCAGATT
cagtgcatgtatgatcatta

SEQ ID NO: 35529 - DNA, 20 bp, Artificial Sequence
  Description of Artificial Sequence: Synthetic oligonucleotide
  Target: LAMA2; (-) strand; PAM type: NNNNGHTT; PAM sequence: GCATGTTT
tacctttgctatcttttcat

SEQ ID NO: 35530 - DNA, 20 bp, Artificial Sequence
  Description of Artificial Sequence: Synthetic oligonucleotide
  Target: LAMA2; (-) strand; PAM type: NNNNGHTT; PAM sequence: GAGCGTTT
ctcaaatccactatgtgtgt

SEQ ID NO: 35531 - DNA, 20 bp, Artificial Sequence
  Description of Artificial Sequence: Synthetic oligonucleotide
  Target: LAMA2; (-) strand; PAM type: NNNNGHTT; PAM sequence: AATTGATT
gaattttctagattagtgaa

SEQ ID NO: 35532 - DNA, 20 bp, Artificial Sequence
  Description of Artificial Sequence: Synthetic oligonucleotide
  Target: LAMA2; (-) strand; PAM type: NNNNGHTT; PAM sequence: TCTAGATT
ttctcttgaggagagaattt

SEQ ID NO: 35533 - DNA, 20 bp, Artificial Sequence
  Description of Artificial Sequence: Synthetic oligonucleotide
  Target: LAMA2; (-) strand; PAM type: NNNNGHTT; PAM sequence: GAAAGTTT
gttgaatttaaatacatcat

SEQ ID NO: 35534 - DNA, 20 bp, Artificial Sequence
  Description of Artificial Sequence: Synthetic oligonucleotide
  Target: LAMA2; (-) strand; PAM type: NNNNGHTT; PAM sequence: CCTAGTTT
ttaattcttcagtgcttctc

SEQ ID NO: 35535 - DNA, 20 bp, Artificial Sequence
  Description of Artificial Sequence: Synthetic oligonucleotide
  Target: LAMA2; (-) strand; PAM type: NNNNGHTT; PAM sequence: CAGTGCTT
cccactgcccattaattctt

SEQ ID NO: 35536 - DNA, 20 bp, Artificial Sequence
  Description of Artificial Sequence: Synthetic oligonucleotide
  Target: LAMA2; (-) strand; PAM type: NNNNGHTT; PAM sequence: GATAGATT
atatttggacaagtaggagt

SEQ ID NO: 35537 - DNA, 20 bp, Artificial Sequence
  Description of Artificial Sequence: Synthetic oligonucleotide
  Target: LAMA2; (-) strand; PAM type: NNNNGHTT; PAM sequence: ATTTGCTT
aaataaaaaaatcatacaag

SEQ ID NO: 35538 - DNA, 20 bp, Artificial Sequence
  Description of Artificial Sequence: Synthetic oligonucleotide
  Target: LAMA2; (-) strand; PAM type: NNNNGHTT; PAM sequence: ACAAGATT
atattaaataaaaaaatcat

SEQ ID NO: 35539 - DNA, 20 bp, Artificial Sequence
  Description of Artificial Sequence: Synthetic oligonucleotide
  Target: LAMA2; (-) strand; PAM type: NNNNGHTT; PAM sequence: ATCTGCTT
tcaaagaaaaaaaagaataa

SEQ ID NO: 35540 - DNA, 20 bp, Artificial Sequence
  Description of Artificial Sequence: Synthetic oligonucleotide
  Target: LAMA2; (-) strand; PAM type: NNNNGHTT; PAM sequence: ATGGGATT
catattctccacatggataa

SEQ ID NO: 35541 - DNA, 20 bp, Artificial Sequence
  Description of Artificial Sequence: Synthetic oligonucleotide
  Target: LAMA2; (-) strand; PAM type: NNNNGHTT; PAM sequence: GTCGGTTT
agaggtacaaagaatagtaa

SEQ ID NO: 35542 - DNA, 20 bp, Artificial Sequence
  Description of Artificial Sequence: Synthetic oligonucleotide
  Target: LAMA2; (-) strand; PAM type: NNNNGHTT; PAM sequence: TGAGGTTT
ctataaatgactggtggctg

SEQ ID NO: 35543 - DNA, 20 bp, Artificial Sequence
  Description of Artificial Sequence: Synthetic oligonucleotide
  Target: LAMA2; (-) strand; PAM type: NNNNGHTT; PAM sequence: AGGAGCTT
aacagtcttttctccacata

SEQ ID NO: 35544 - DNA, 20 bp, Artificial Sequence
  Description of Artificial Sequence: Synthetic oligonucleotide
  Target: LAMA2; (-) strand; PAM type: NNNNGHTT; PAM sequence: CAAGGCTT
aaagggcatggatatgggca

SEQ ID NO: 35545 - DNA, 20 bp, Artificial Sequence
  Description of Artificial Sequence: Synthetic oligonucleotide
  Target: LAMA2; (-) strand; PAM type: NNNNGHTT; PAM sequence: AAATGCTT
agagccttgcctaatgatac

SEQ ID NO: 35546 - DNA, 20 bp, Artificial Sequence
  Description of Artificial Sequence: Synthetic oligonucleotide
  Target: LAMA2; (-) strand; PAM type: NNNNGHTT; PAM sequence: CAATGCTT
aagcacactattgccacctc

SEQ ID NO: 35547 - DNA, 20 bp, Artificial Sequence
  Description of Artificial Sequence: Synthetic oligonucleotide
  Target: LAMA2; (-) strand; PAM type: NNNNGHTT; PAM sequence: AAAAGCTT
aaaagaaaccaaatttgttg

SEQ ID NO: 35548 - DNA, 20 bp, Artificial Sequence
  Description of Artificial Sequence: Synthetic oligonucleotide
  Target: LAMA2; (-) strand; PAM type: NNNNGHTT; PAM sequence: AATAGTTT
catttaacaaaactaccaaa

SEQ ID NO: 35549 - DNA, 20 bp, Artificial Sequence
  Description of Artificial Sequence: Synthetic oligonucleotide
  Target: LAMA2; (-) strand; PAM type: NNNNGHTT; PAM sequence: AGAGGCTT
caaaaacataggatgataaa

SEQ ID NO: 35550 - DNA, 20 bp, Artificial Sequence
  Description of Artificial Sequence: Synthetic oligonucleotide
  Target: LAMA2; (-) strand; PAM type: NNNNGHTT; PAM sequence: CAATGTTT
taaaccccttcttgcttcta

SEQ ID NO: 35551 - DNA, 20 bp, Artificial Sequence
  Description of Artificial Sequence: Synthetic oligonucleotide
  Target: LAMA2; (-) strand; PAM type: NNNNGHTT; PAM sequence: TCTTGCTT
tttaacaacattaaacccct

SEQ ID NO: 35552 - DNA, 20 bp, Artificial Sequence
  Description of Artificial Sequence: Synthetic oligonucleotide
  Target: LAMA2; (-) strand; PAM type: NNNNGHTT; PAM sequence: CCTCGTTT
aagagtagaagagcccagtg

SEQ ID NO: 35553 - DNA, 20 bp, Artificial Sequence
  Description of Artificial Sequence: Synthetic oligonucleotide
  Target: LAMA2; (-) strand; PAM type: NNNNGHTT; PAM sequence: CTTTGCTT
gttttaaactacaatattat

SEQ ID NO: 35554 - DNA, 20 bp, Artificial Sequence
  Description of Artificial Sequence: Synthetic oligonucleotide
  Target: LAMA2; (-) strand; PAM type: NNNNGHTT; PAM sequence: CCAAGTTT
tccctcatggtggtggatag

SEQ ID NO: 35555 - DNA, 20 bp, Artificial Sequence
  Description of Artificial Sequence: Synthetic oligonucleotide
  Target: LAMA2; (-) strand; PAM type: NNNNGHTT; PAM sequence: AAATGTTT
aatatagctgaagaaatttt

SEQ ID NO: 35556 - DNA, 20 bp, Artificial Sequence
  Description of Artificial Sequence: Synthetic oligonucleotide
  Target: LAMA2; (-) strand; PAM type: NNNNGHTT; PAM sequence: TTTTGATT
aaataattataacttaataa

SEQ ID NO: 35557 - DNA, 20 bp, Artificial Sequence
  Description of Artificial Sequence: Synthetic oligonucleotide
  Target: LAMA2; (-) strand; PAM type: NNNNGHTT; PAM sequence: ATTAGCTT
aaactttatttgcataatcc

SEQ ID NO: 35558 - DNA, 20 bp, Artificial Sequence
  Description of Artificial Sequence: Synthetic oligonucleotide
  Target: LAMA2; (-) strand; PAM type: NNNNGHTT; PAM sequence: ATTAGTTT
tttctcttctttgtccttaa

SEQ ID NO: 35559 - DNA, 20 bp, Artificial Sequence
  Description of Artificial Sequence: Synthetic oligonucleotide
  Target: LAMA2; (-) strand; PAM type: NNNNGHTT; PAM sequence: GTGGGTTT
attagtgagggccaagcaca

SEQ ID NO: 35560 - DNA, 20 bp, Artificial Sequence
  Description of Artificial Sequence: Synthetic oligonucleotide
  Target: LAMA2; (-) strand; PAM type: NNNNGHTT; PAM sequence: GTGAGTTT
aatttgctttatctctaaaa

SEQ ID NO: 35561 - DNA, 20 bp, Artificial Sequence
  Description of Artificial Sequence: Synthetic oligonucleotide
  Target: LAMA2; (-) strand; PAM type: NNNNGHTT; PAM sequence: ATTTGCTT
taattggtgacatttggaca

SEQ ID NO: 35562 - DNA, 20 bp, Artificial Sequence
  Description of Artificial Sequence: Synthetic oligonucleotide
  Target: LAMA2; (-) strand; PAM type: NNNNGHTT; PAM sequence: TTTAGATT
ataaaacctgtatgcccaca

SEQ ID NO: 35563 - DNA, 20 bp, Artificial Sequence
  Description of Artificial Sequence: Synthetic oligonucleotide
  Target: LAMA2; (-) strand; PAM type: NNNNGHTT; PAM sequence: GACTGCTT
atcatatagaaaagctgaaa

SEQ ID NO: 35564 - DNA, 20 bp, Artificial Sequence
  Description of Artificial Sequence: Synthetic oligonucleotide
  Target: LAMA2; (-) strand; PAM type: NNNNGHTT; PAM sequence: CTGGGATT
cgcctcagcctcccaaagtg

SEQ ID NO: 35565 - DNA, 20 bp, Artificial Sequence
  Description of Artificial Sequence: Synthetic oligonucleotide
  Target: LAMA2; (-) strand; PAM type: NNNNGHTT; PAM sequence: CGGGGTTT
ttttggatttttagtagaga

SEQ ID NO: 35566 - DNA, 20 bp, Artificial Sequence
  Description of Artificial Sequence: Synthetic oligonucleotide
  Target: LAMA2; (-) strand; PAM type: NNNNGHTT; PAM sequence: TTTGGATT
accacgccgggctaattttt

SEQ ID NO: 35567 - DNA, 20 bp, Artificial Sequence
  Description of Artificial Sequence: Synthetic oligonucleotide
  Target: LAMA2; (-) strand; PAM type: NNNNGHTT; PAM sequence: GTGGGTTT
tactatgctggtttctttta

SEQ ID NO: 35568 - DNA, 20 bp, Artificial Sequence
  Description of Artificial Sequence: Synthetic oligonucleotide
  Target: LAMA2; (-) strand; PAM type: NNNNGHTT; PAM sequence: GCTGGTTT
atgctcatacaaaatactat

SEQ ID NO: 35569 - DNA, 20 bp, Artificial Sequence
  Description of Artificial Sequence: Synthetic oligonucleotide
  Target: LAMA2; (-) strand; PAM type: NNNNGHTT; PAM sequence: ATTGGATT
tttctttctaaaatagagac

SEQ ID NO: 35570 - DNA, 20 bp, Artificial Sequence
  Description of Artificial Sequence: Synthetic oligonucleotide
  Target: LAMA2; (-) strand; PAM type: NNNNGHTT; PAM sequence: CGTGGCTT
aataaaatgaaaatgccttt

SEQ ID NO: 35571 - DNA, 20 bp, Artificial Sequence
  Description of Artificial Sequence: Synthetic oligonucleotide
  Target: LAMA2; (-) strand; PAM type: NNNNGHTT; PAM sequence: GTCTGCTT
gcctaaaacatcccacacat

SEQ ID NO: 35572 - DNA, 20 bp, Artificial Sequence
  Description of Artificial Sequence: Synthetic oligonucleotide
  Target: LAMA2; (-) strand; PAM type: NNNNGHTT; PAM sequence: TATTGATT
tctgggccattaataagtac

SEQ ID NO: 35573 - DNA, 20 bp, Artificial Sequence
  Description of Artificial Sequence: Synthetic oligonucleotide
  Target: LAMA2; (-) strand; PAM type: NNNNGHTT; PAM sequence: TAAAGTTT
ccttctctaactgccttatc

SEQ ID NO: 35574 - DNA, 20 bp, Artificial Sequence
  Description of Artificial Sequence: Synthetic oligonucleotide
  Target: LAMA2; (-) strand; PAM type: NNNNGHTT; PAM sequence: CCTTGATT
gacaaaaatctagaatctat

SEQ ID NO: 35575 - DNA, 20 bp, Artificial Sequence
  Description of Artificial Sequence: Synthetic oligonucleotide
  Target: LAMA2; (-) strand; PAM type: NNNNGHTT; PAM sequence: AACTGTTT
attcagtatggctatagcag

SEQ ID NO: 35576 - DNA, 20 bp, Artificial Sequence
  Description of Artificial Sequence: Synthetic oligonucleotide
  Target: LAMA2; (-) strand; PAM type: NNNNGHTT; PAM sequence: GCCAGCTT
caaatgcagttctaggtttt

SEQ ID NO: 35577 - DNA, 20 bp, Artificial Sequence
  Description of Artificial Sequence: Synthetic oligonucleotide
  Target: LAMA2; (-) strand; PAM type: NNNNGHTT; PAM sequence: CTAGGTTT
cagaggggacaaatgcagtt

SEQ ID NO: 35578 - DNA, 20 bp, Artificial Sequence
  Description of Artificial Sequence: Synthetic oligonucleotide
  Target: LAMA2; (-) strand; PAM type: NNNNGHTT; PAM sequence: TAAAGCTT
agaataggatgatgaaaaac

SEQ ID NO: 35579 - DNA, 20 bp, Artificial Sequence
  Description of Artificial Sequence: Synthetic oligonucleotide
  Target: LAMA2; (-) strand; PAM type: NNNNGHTT; PAM sequence: TATGGCTT
ccatccgaaggcagtgttta

SEQ ID NO: 35580 - DNA, 20 bp, Artificial Sequence
  Description of Artificial Sequence: Synthetic oligonucleotide
  Target: LAMA2; (-) strand; PAM type: NNNNGHTT; PAM sequence: CAGTGTTT
atctaagggccatccgaagg

SEQ ID NO: 35581 - DNA, 20 bp, Artificial Sequence
  Description of Artificial Sequence: Synthetic oligonucleotide
  Target: LAMA2; (-) strand; PAM type: NNNNGHTT; PAM sequence: TTCTGCTT
cagaatgaaggacatctttc

SEQ ID NO: 35582 - DNA, 20 bp, Artificial Sequence
  Description of Artificial Sequence: Synthetic oligonucleotide
  Target: LAMA2; (-) strand; PAM type: NNNNGHTT; PAM sequence: TCTAGCTT
agctgaggtttgaatacatg

SEQ ID NO: 35583 - DNA, 20 bp, Artificial Sequence
  Description of Artificial Sequence: Synthetic oligonucleotide
  Target: LAMA2; (-) strand; PAM type: NNNNGHTT; PAM sequence: TGAGGTTT
tatctaattattgggggagc

SEQ ID NO: 35584 - DNA, 20 bp, Artificial Sequence
  Description of Artificial Sequence: Synthetic oligonucleotide
  Target: LAMA2; (-) strand; PAM type: NNNNGHTT; PAM sequence: CTTTGTTT
actctattagattttatatc

SEQ ID NO: 35585 - DNA, 20 bp, Artificial Sequence
  Description of Artificial Sequence: Synthetic oligonucleotide
  Target: LAMA2; (-) strand; PAM type: NNNNGHTT; PAM sequence: ATTAGATT
ataatcatgttatccactct

SEQ ID NO: 35586 - DNA, 20 bp, Artificial Sequence
  Description of Artificial Sequence: Synthetic oligonucleotide
  Target: LAMA2; (-) strand; PAM type: NNNNGHTT; PAM sequence: TATTGATT
ataatacgtgatatactcat

SEQ ID NO: 35587 - DNA, 20 bp, Artificial Sequence
  Description of Artificial Sequence: Synthetic oligonucleotide
  Target: LAMA2; (-) strand; PAM type: NNNNGHTT; PAM sequence: AATAGATT
tattctatttaatttatttt

SEQ ID NO: 35588 - DNA, 20 bp, Artificial Sequence
  Description of Artificial Sequence: Synthetic oligonucleotide
  Target: LAMA2; (-) strand; PAM type: NNNNGHTT; PAM sequence: TTCAGTTT
gtatctataaatgatatata

SEQ ID NO: 35589 - DNA, 20 bp, Artificial Sequence
  Description of Artificial Sequence: Synthetic oligonucleotide
  Target: LAMA2; (-) strand; PAM type: NNNNGHTT; PAM sequence: CTATGCTT
agattacctgaatttaaact

SEQ ID NO: 35590 - DNA, 20 bp, Artificial Sequence
  Description of Artificial Sequence: Synthetic oligonucleotide
  Target: LAMA2; (-) strand; PAM type: NNNNGHTT; PAM sequence: ATAAGATT
ttcacggtttgtacatccaa

SEQ ID NO: 35591 - DNA, 20 bp, Artificial Sequence
  Description of Artificial Sequence: Synthetic oligonucleotide
  Target: LAMA2; (-) strand; PAM type: NNNNGHTT; PAM sequence: CACGGTTT
ttttccttaatgtctctatt

SEQ ID NO: 35592 - DNA, 20 bp, Artificial Sequence
  Description of Artificial Sequence: Synthetic oligonucleotide
  Target: LAMA2; (-) strand; PAM type: NNNNGHTT; PAM sequence: TGAAGATT
aagaggaatggtgtgaactc

SEQ ID NO: 35593 - DNA, 20 bp, Artificial Sequence
  Description of Artificial Sequence: Synthetic oligonucleotide
  Target: LAMA2; (-) strand; PAM type: NNNNGHTT; PAM sequence: ATGTGTTT
cttgatcagcctaaacctgt

SEQ ID NO: 35594 - DNA, 20 bp, Artificial Sequence
  Description of Artificial Sequence: Synthetic oligonucleotide
  Target: LAMA2; (-) strand; PAM type: NNNNGHTT; PAM sequence: TAGTGCTT
accgtgatcatatatgccac

SEQ ID NO: 35595 - DNA, 20 bp, Artificial Sequence
  Description of Artificial Sequence: Synthetic oligonucleotide
  Target: LAMA2; (-) strand; PAM type: NNNNGHTT; PAM sequence: AAATGCTT
gtttaatgtttttcatggtg

SEQ ID NO: 35596 - DNA, 20 bp, Artificial Sequence
  Description of Artificial Sequence: Synthetic oligonucleotide
  Target: LAMA2; (-) strand; PAM type: NNNNGHTT; PAM sequence: TAATGTTT
tattatatacttaaaatgtt

SEQ ID NO: 35597 - DNA, 20 bp, Artificial Sequence
  Description of Artificial Sequence: Synthetic oligonucleotide
  Target: LAMA2; (-) strand; PAM type: NNNNGHTT; PAM sequence: AAATGTTT
tatttcatattatatactta

SEQ ID NO: 35598 - DNA, 20 bp, Artificial Sequence
  Description of Artificial Sequence: Synthetic oligonucleotide
  Target: LAMA2; (-) strand; PAM type: NNNNGHTT; PAM sequence: ACAAGTTT
gtaccaaagtaacaaatata

SEQ ID NO: 35599 - DNA, 20 bp, Artificial Sequence
  Description of Artificial Sequence: Synthetic oligonucleotide
  Target: LAMA2; (-) strand; PAM type: NNNNGHTT; PAM sequence: CTTTGTTT
agactacataaaaagaaatt

SEQ ID NO: 35600 - DNA, 20 bp, Artificial Sequence
  Description of Artificial Sequence: Synthetic oligonucleotide
  Target: LAMA2; (-) strand; PAM type: NNNNGHTT; PAM sequence: CACAGATT
ctaagatgcataaacaatct

SEQ ID NO: 35601 - DNA, 20 bp, Artificial Sequence
  Description of Artificial Sequence: Synthetic oligonucleotide
  Target: LAMA2; (-) strand; PAM type: NNNNGHTT; PAM sequence: TGGTGATT
agaagagttcaaaatacaaa

SEQ ID NO: 35602 - DNA, 20 bp, Artificial Sequence
  Description of Artificial Sequence: Synthetic oligonucleotide
  Target: LAMA2; (-) strand; PAM type: NNNNGHTT; PAM sequence: CACGGTTT
caagtttatatattgtacct

SEQ ID NO: 35603 - DNA, 20 bp, Artificial Sequence
  Description of Artificial Sequence: Synthetic oligonucleotide
  Target: LAMA2; (-) strand; PAM type: NNNNGHTT; PAM sequence: GCAAGTTT
gtggtttttctcggttggat

SEQ ID NO: 35604 - DNA, 20 bp, Artificial Sequence
  Description of Artificial Sequence: Synthetic oligonucleotide
  Target: LAMA2; (-) strand; PAM type: NNNNGHTT; PAM sequence: AGTGGTTT
attgaagtgcagataagagt

SEQ ID NO: 35605 - DNA, 20 bp, Artificial Sequence
  Description of Artificial Sequence: Synthetic oligonucleotide
  Target: LAMA2; (-) strand; PAM type: NNNNGHTT; PAM sequence: TGCTGATT
caaactgaaaaagaacctcc

SEQ ID NO: 35606 - DNA, 20 bp, Artificial Sequence
  Description of Artificial Sequence: Synthetic oligonucleotide
  Target: LAMA2; (-) strand; PAM type: NNNNGHTT; PAM sequence: TAAAGATT
ggcaaaagaaaatttctttg

SEQ ID NO: 35607 - DNA, 20 bp, Artificial Sequence
  Description of Artificial Sequence: Synthetic oligonucleotide
  Target: LAMA2; (-) strand; PAM type: NNNNGHTT; PAM sequence: AGAAGTTT
aaactgttttgcagttagac

SEQ ID NO: 35608 - DNA, 20 bp, Artificial Sequence
  Description of Artificial Sequence: Synthetic oligonucleotide
  Target: LAMA2; (-) strand; PAM type: NNNNGHTT; PAM sequence: AACTGTTT
ttgtcatagatgatacctta

SEQ ID NO: 35609 - DNA, 20 bp, Artificial Sequence
  Description of Artificial Sequence: Synthetic oligonucleotide
  Target: LAMA2; (-) strand; PAM type: NNNNGHTT; PAM sequence: TTGGGTTT
catgataatataaactttga

SEQ ID NO: 35610 - DNA, 20 bp, Artificial Sequence
  Description of Artificial Sequence: Synthetic oligonucleotide
  Target: LAMA2; (-) strand; PAM type: NNNNGHTT; PAM sequence: CTTTGATT
attatgcatgataatataaa

SEQ ID NO: 35611 - DNA, 20 bp, Artificial Sequence
  Description of Artificial Sequence: Synthetic oligonucleotide
  Target: LAMA2; (-) strand; PAM type: NNNNGHTT; PAM sequence: TGGTGCTT
cccgtttggtattcagataa

SEQ ID NO: 35612 - DNA, 20 bp, Artificial Sequence
  Description of Artificial Sequence: Synthetic oligonucleotide
  Target: LAMA2; (-) strand; PAM type: NNNNGHTT; PAM sequence: CCCCGTTT
aatcatagagaattatttgg

SEQ ID NO: 35613 - DNA, 20 bp, Artificial Sequence
  Description of Artificial Sequence: Synthetic oligonucleotide
  Target: LAMA2; (-) strand; PAM type: NNNNGHTT; PAM sequence: ACTTGTTT
caaagtgatttttaccacat

SEQ ID NO: 35614 - DNA, 20 bp, Artificial Sequence
  Description of Artificial Sequence: Synthetic oligonucleotide
  Target: LAMA2; (-) strand; PAM type: NNNNGHTT; PAM sequence: AAGTGATT
ataatgccaaaggttttcca

SEQ ID NO: 35615 - DNA, 20 bp, Artificial Sequence
  Description of Artificial Sequence: Synthetic oligonucleotide
  Target: LAMA2; (-) strand; PAM type: NNNNGHTT; PAM sequence: AAAGGTTT
taatttcattagataatgcc

SEQ ID NO: 35616 - DNA, 20 bp, Artificial Sequence
  Description of Artificial Sequence: Synthetic oligonucleotide
  Target: LAMA2; (-) strand; PAM type: NNNNGHTT; PAM sequence: ATATGCTT
tgcacctatttctcttgagt

SEQ ID NO: 35617 - DNA, 20 bp, Artificial Sequence
  Description of Artificial Sequence: Synthetic oligonucleotide
  Target: LAMA2; (-) strand; PAM type: NNNNGHTT; PAM sequence: TCCAGCTT
agcgatgtcatttggttatt

SEQ ID NO: 35618 - DNA, 20 bp, Artificial Sequence
  Description of Artificial Sequence: Synthetic oligonucleotide
  Target: LAMA2; (-) strand; PAM type: NNNNGHTT; PAM sequence: TACTGCTT
aacagttgtttgttcatttt

SEQ ID NO: 35619 - DNA, 20 bp, Artificial Sequence
  Description of Artificial Sequence: Synthetic oligonucleotide
  Target: LAMA2; (-) strand; PAM type: NNNNGHTT; PAM sequence: AGTTGTTT
cccgtgctgttgggtataac

SEQ ID NO: 35620 - DNA, 20 bp, Artificial Sequence
  Description of Artificial Sequence: Synthetic oligonucleotide
  Target: LAMA2; (-) strand; PAM type: NNNNGHTT; PAM sequence: TTATGTTT
ctaatttcttttccttaaga

SEQ ID NO: 35621 - DNA, 20 bp, Artificial Sequence
  Description of Artificial Sequence: Synthetic oligonucleotide
  Target: LAMA2; (-) strand; PAM type: NNNNGHTT; PAM sequence: TTAAGATT
ttatgtctaatttcttttcc

SEQ ID NO: 35622 - DNA, 20 bp, Artificial Sequence
  Description of Artificial Sequence: Synthetic oligonucleotide
  Target: LAMA2; (-) strand; PAM type: NNNNGHTT; PAM sequence: TTGAGCTT
aaatggggtgtttttattta

SEQ ID NO: 35623 - DNA, 20 bp, Artificial Sequence
  Description of Artificial Sequence: Synthetic oligonucleotide
  Target: LAMA2; (-) strand; PAM type: NNNNGHTT; PAM sequence: GGGTGTTT
tctctagtgacaaggaaatg

SEQ ID NO: 35624 - DNA, 20 bp, Artificial Sequence
  Description of Artificial Sequence: Synthetic oligonucleotide
  Target: LAMA2; (-) strand; PAM type: NNNNGHTT; PAM sequence: ATACGATT
atataaaaaatatgctgtat

SEQ ID NO: 35625 - DNA, 20 bp, Artificial Sequence
  Description of Artificial Sequence: Synthetic oligonucleotide
  Target: LAMA2; (-) strand; PAM type: NNNNGHTT; PAM sequence: ATTTGCTT
aagtctagatgtagttgttg

SEQ ID NO: 35626 - DNA, 20 bp, Artificial Sequence
  Description of Artificial Sequence: Synthetic oligonucleotide
  Target: LAMA2; (-) strand; PAM type: NNNNGHTT; PAM sequence: TGTTGATT
tgcagaagtctagatgtagt

SEQ ID NO: 35627 - DNA, 20 bp, Artificial Sequence
  Description of Artificial Sequence: Synthetic oligonucleotide
  Target: LAMA2; (-) strand; PAM type: NNNNGHTT; PAM sequence: TCTGGTTT
aaaatgcatttaaatgtagt

SEQ ID NO: 35628 - DNA, 20 bp, Artificial Sequence
  Description of Artificial Sequence: Synthetic oligonucleotide
  Target: LAMA2; (-) strand; PAM type: NNNNGHTT; PAM sequence: AAGAGTTT
tattggaagattgttcagaa

SEQ ID NO: 35629 - DNA, 20 bp, Artificial Sequence
  Description of Artificial Sequence: Synthetic oligonucleotide
  Target: LAMA2; (-) strand; PAM type: NNNNGHTT; PAM sequence: GGAAGATT
ttacttatggtcaatatatt

SEQ ID NO: 35630 - DNA, 20 bp, Artificial Sequence
  Description of Artificial Sequence: Synthetic oligonucleotide
  Target: LAMA2; (-) strand; PAM type: NNNNGHTT; PAM sequence: CCTTGTTT
atatgaagacaggaaaaaaa

SEQ ID NO: 35631 - DNA, 20 bp, Artificial Sequence
  Description of Artificial Sequence: Synthetic oligonucleotide
  Target: LAMA2; (-) strand; PAM type: NNNNGHTT; PAM sequence: TTCTGATT
gatgccatcagaaacaaaat

SEQ ID NO: 35632 - DNA, 20 bp, Artificial Sequence
  Description of Artificial Sequence: Synthetic oligonucleotide
  Target: LAMA2; (-) strand; PAM type: NNNNGHTT; PAM sequence: AAATGTTT
tagacaggaaaatatcccta

SEQ ID NO: 35633 - DNA, 20 bp, Artificial Sequence
  Description of Artificial Sequence: Synthetic oligonucleotide
  Target: LAMA2; (-) strand; PAM type: NNNNGHTT; PAM sequence: TGTAGTTT
caactagatttgacaaagtc

SEQ ID NO: 35634 - DNA, 20 bp, Artificial Sequence
  Description of Artificial Sequence: Synthetic oligonucleotide
  Target: LAMA2; (-) strand; PAM type: NNNNGHTT; PAM sequence: ACTAGATT
ttcattcttcttccaaggca

SEQ ID NO: 35635 - DNA, 20 bp, Artificial Sequence
  Description of Artificial Sequence: Synthetic oligonucleotide
  Target: LAMA2; (-) strand; PAM type: NNNNGHTT; PAM sequence: TATTGTTT
gaaatagcaaaaatattttg

SEQ ID NO: 35636 - DNA, 20 bp, Artificial Sequence
  Description of Artificial Sequence: Synthetic oligonucleotide
  Target: LAMA2; (-) strand; PAM type: NNNNGHTT; PAM sequence: GACAGTTT
cttcttttgtttcctaaaaa

SEQ ID NO: 35637 - DNA, 20 bp, Artificial Sequence
  Description of Artificial Sequence: Synthetic oligonucleotide
  Target: LAMA2; (-) strand; PAM type: NNNNGHTT; PAM sequence: TTTTGTTT
gtctttttctaaaatacttc

SEQ ID NO: 35638 - DNA, 20 bp, Artificial Sequence
  Description of Artificial Sequence: Synthetic oligonucleotide
  Target: LAMA2; (-) strand; PAM type: NNNNGHTT; PAM sequence: AACTGCTT
caccttaaagttactacata

SEQ ID NO: 35639 - DNA, 20 bp, Artificial Sequence
  Description of Artificial Sequence: Synthetic oligonucleotide
  Target: LAMA2; (-) strand; PAM type: NNNNGHTT; PAM sequence: AATTGATT
tatgtgaagatttgccttca

SEQ ID NO: 35640 - DNA, 20 bp, Artificial Sequence
  Description of Artificial Sequence: Synthetic oligonucleotide
  Target: LAMA2; (-) strand; PAM type: NNNNGHTT; PAM sequence: TGAAGATT
tttctgattcttttcatatg

SEQ ID NO: 35641 - DNA, 20 bp, Artificial Sequence
  Description of Artificial Sequence: Synthetic oligonucleotide
  Target: LAMA2; (-) strand; PAM type: NNNNGHTT; PAM sequence: TTCTGATT
tttaagacctgagttaacat

SEQ ID NO: 35642 - DNA, 20 bp, Artificial Sequence
  Description of Artificial Sequence: Synthetic oligonucleotide
  Target: LAMA2; (-) strand; PAM type: NNNNGHTT; PAM sequence: TCAAGTTT
cttttttttttttttaaatc

SEQ ID NO: 35643 - DNA, 20 bp, Artificial Sequence
  Description of Artificial Sequence: Synthetic oligonucleotide
  Target: LAMA2; (-) strand; PAM type: NNNNGHTT; PAM sequence: CTTCGCTT
caagaggggtagtttaaata

SEQ ID NO: 35644 - DNA, 20 bp, Artificial Sequence
  Description of Artificial Sequence: Synthetic oligonucleotide
  Target: LAMA2; (-) strand; PAM type: NNNNGHTT; PAM sequence: GGTAGTTT
gtggctgggagctcaagagg

SEQ ID NO: 35645 - DNA, 20 bp, Artificial Sequence
  Description of Artificial Sequence: Synthetic oligonucleotide
  Target: LAMA2; (-) strand; PAM type: NNNNGHTT; PAM sequence: TCATGATT
atggagtataagtagctaag

SEQ ID NO: 35646 - DNA, 20 bp, Artificial Sequence
  Description of Artificial Sequence: Synthetic oligonucleotide
  Target: LAMA2; (-) strand; PAM type: NNNNGHTT; PAM sequence: AGATGTTT
acacagaaacatggaatagt

SEQ ID NO: 35647 - DNA, 20 bp, Artificial Sequence
  Description of Artificial Sequence: Synthetic oligonucleotide
  Target: LAMA2; (-) strand; PAM type: NNNNGHTT; PAM sequence: TTATGTTT
ctggagaaattagaaggaat

SEQ ID NO: 35648 - DNA, 20 bp, Artificial Sequence
  Description of Artificial Sequence: Synthetic oligonucleotide
  Target: LAMA2; (-) strand; PAM type: NNNNGHTT; PAM sequence: GGGAGTTT
aaggtaaaaatttgactcat

SEQ ID NO: 35649 - DNA, 20 bp, Artificial Sequence
  Description of Artificial Sequence: Synthetic oligonucleotide
  Target: LAMA2; (-) strand; PAM type: NNNNGHTT; PAM sequence: TAAAGTTT
aaaatacaaatcttttaaaa

SEQ ID NO: 35650 - DNA, 20 bp, Artificial Sequence
  Description of Artificial Sequence: Synthetic oligonucleotide
  Target: LAMA2; (-) strand; PAM type: NNNNGHTT; PAM sequence: AAGAGATT
actgctaattaatatttttg

SEQ ID NO: 35651 - DNA, 20 bp, Artificial Sequence
  Description of Artificial Sequence: Synthetic oligonucleotide
  Target: LAMA2; (-) strand; PAM type: NNNNGHTT; PAM sequence: AAATGCTT
ggggaaaaaatctggaggac

SEQ ID NO: 35652 - DNA, 20 bp, Artificial Sequence
  Description of Artificial Sequence: Synthetic oligonucleotide
  Target: LAMA2; (-) strand; PAM type: NNNNGHTT; PAM sequence: TGTAGATT
ttagtagggaataaagatta

SEQ ID NO: 35653 - DNA, 20 bp, Artificial Sequence
  Description of Artificial Sequence: Synthetic oligonucleotide
  Target: LAMA2; (-) strand; PAM type: NNNNGHTT; PAM sequence: TAAAGATT
agttaaatgttagtagggaa

SEQ ID NO: 35654 - DNA, 20 bp, Artificial Sequence
  Description of Artificial Sequence: Synthetic oligonucleotide
  Target: LAMA2; (-) strand; PAM type: NNNNGHTT; PAM sequence: CTAGGATT
gcctcagcctcacagaagtg

SEQ ID NO: 35655 - DNA, 20 bp, Artificial Sequence
  Description of Artificial Sequence: Synthetic oligonucleotide
  Target: LAMA2; (-) strand; PAM type: NNNNGHTT; PAM sequence: CAGGGTTT
ttggtacttttagtagagac

SEQ ID NO: 35656 - DNA, 20 bp, Artificial Sequence
  Description of Artificial Sequence: Synthetic oligonucleotide
  Target: LAMA2; (-) strand; PAM type: NNNNGHTT; PAM sequence: GGCTGATT
aggtgcctgccaccacacct

SEQ ID NO: 35657 - DNA, 20 bp, Artificial Sequence
  Description of Artificial Sequence: Synthetic oligonucleotide
  Target: LAMA2; (-) strand; PAM type: NNNNGHTT; PAM sequence: CTGGGATT
tgcctcagcctcctgagtag

SEQ ID NO: 35658 - DNA, 20 bp, Artificial Sequence
  Description of Artificial Sequence: Synthetic oligonucleotide
  Target: LAMA2; (-) strand; PAM type: NNNNGHTT; PAM sequence: CCAAGTTT
ctcactgcaactcttgcctc

SEQ ID NO: 35659 - DNA, 20 bp, Artificial Sequence
  Description of Artificial Sequence: Synthetic oligonucleotide
  Target: LAMA2; (-) strand; PAM type: NNNNGHTT; PAM sequence: GCTAGCTT
taatgctgcctggcaaaaca

SEQ ID NO: 35660 - DNA, 20 bp, Artificial Sequence
  Description of Artificial Sequence: Synthetic oligonucleotide
  Target: LAMA2; (-) strand; PAM type: NNNNGHTT; PAM sequence: TGGAGATT
ctctcctccaggaataagta

SEQ ID NO: 35661 - DNA, 20 bp, Artificial Sequence
  Description of Artificial Sequence: Synthetic oligonucleotide
  Target: LAMA2; (-) strand; PAM type: NNNNGHTT; PAM sequence: TCCAGTTT
catgttaatctgtctaactg

SEQ ID NO: 35662 - DNA, 20 bp, Artificial Sequence
  Description of Artificial Sequence: Synthetic oligonucleotide
  Target: LAMA2; (-) strand; PAM type: NNNNGHTT; PAM sequence: CACAGCTT
agttcctctcctcacactcc

SEQ ID NO: 35663 - DNA, 20 bp, Artificial Sequence
  Description of Artificial Sequence: Synthetic oligonucleotide
  Target: LAMA2; (-) strand; PAM type: NNNNGHTT; PAM sequence: CTTTGCTT
tatcttcatgatatgacaac

SEQ ID NO: 35664 - DNA, 20 bp, Artificial Sequence
  Description of Artificial Sequence: Synthetic oligonucleotide
  Target: LAMA2; (-) strand; PAM type: NNNNGHTT; PAM sequence: TGAGGATT
caccttttcacgtgttcttc

SEQ ID NO: 35665 - DNA, 20 bp, Artificial Sequence
  Description of Artificial Sequence: Synthetic oligonucleotide
  Target: LAMA2; (-) strand; PAM type: NNNNGHTT; PAM sequence: AGAAGATT
ctggaatctacatgaactag

SEQ ID NO: 35666 - DNA, 20 bp, Artificial Sequence
  Description of Artificial Sequence: Synthetic oligonucleotide
  Target: LAMA2; (-) strand; PAM type: NNNNGHTT; PAM sequence: AGAGGCTT
gcctctcctcaagcacaggg

SEQ ID NO: 35667 - DNA, 20 bp, Artificial Sequence
  Description of Artificial Sequence: Synthetic oligonucleotide
  Target: LAMA2; (-) strand; PAM type: NNNNGHTT; PAM sequence: TGGCGCTT
gaaaatagtactccaaagta

SEQ ID NO: 35668 - DNA, 20 bp, Artificial Sequence
  Description of Artificial Sequence: Synthetic oligonucleotide
  Target: LAMA2; (-) strand; PAM type: NNNNGHTT; PAM sequence: ATGTGATT
aaataaaacttattcataaa

SEQ ID NO: 35669 - DNA, 20 bp, Artificial Sequence
  Description of Artificial Sequence: Synthetic oligonucleotide
  Target: LAMA2; (-) strand; PAM type: NNNNGHTT; PAM sequence: TGTGGTTT
agttacttgggaattaaagt

SEQ ID NO: 35670 - DNA, 20 bp, Artificial Sequence
  Description of Artificial Sequence: Synthetic oligonucleotide
  Target: LAMA2; (-) strand; PAM type: NNNNGHTT; PAM sequence: AGCTGATT
aaaagtctacatgggaatgt

SEQ ID NO: 35671 - DNA, 20 bp, Artificial Sequence
  Description of Artificial Sequence: Synthetic oligonucleotide
  Target: LAMA2; (-) strand; PAM type: NNNNGHTT; PAM sequence: ATCAGTTT
gaattatgtgcactttctgt

SEQ ID NO: 35672 - DNA, 20 bp, Artificial Sequence
  Description of Artificial Sequence: Synthetic oligonucleotide
  Target: LAMA2; (-) strand; PAM type: NNNNGHTT; PAM sequence: CTTAGCTT
gaaaaataacatgagagctt

SEQ ID NO: 35673 - DNA, 20 bp, Artificial Sequence
  Description of Artificial Sequence: Synthetic oligonucleotide
  Target: LAMA2; (-) strand; PAM type: NNNNGHTT; PAM sequence: GAGAGCTT
aaattgaagaaaaataacat

SEQ ID NO: 35674 - DNA, 20 bp, Artificial Sequence
  Description of Artificial Sequence: Synthetic oligonucleotide
  Target: LAMA2; (-) strand; PAM type: NNNNGHTT; PAM sequence: ATATGTTT
agaaaataactacactctat

SEQ ID NO: 35675 - DNA, 20 bp, Artificial Sequence
  Description of Artificial Sequence: Synthetic oligonucleotide
  Target: LAMA2; (-) strand; PAM type: NNNNGHTT; PAM sequence: CAAAGCTT
agtctcctaccttttctctc

SEQ ID NO: 35676 - DNA, 20 bp, Artificial Sequence
  Description of Artificial Sequence: Synthetic oligonucleotide
  Target: LAMA2; (-) strand; PAM type: NNNNGHTT; PAM sequence: CTCTGTTT
ttccctttggctatttacta

SEQ ID NO: 35677 - DNA, 20 bp, Artificial Sequence
  Description of Artificial Sequence: Synthetic oligonucleotide
  Target: LAMA2; (-) strand; PAM type: NNNNGHTT; PAM sequence: GCAAGCTT
tatttaagtggaggaacaca

SEQ ID NO: 35678 - DNA, 20 bp, Artificial Sequence
  Description of Artificial Sequence: Synthetic oligonucleotide
  Target: LAMA2; (-) strand; PAM type: NNNNGHTT; PAM sequence: TATTGTTT
taccgctgttttctttctaa

SEQ ID NO: 35679 - DNA, 20 bp, Artificial Sequence
  Description of Artificial Sequence: Synthetic oligonucleotide
  Target: LAMA2; (-) strand; PAM type: NNNNGHTT; PAM sequence: CGCTGTTT
ctagcatggttgatttgtac

SEQ ID NO: 35680 - DNA, 20 bp, Artificial Sequence
  Description of Artificial Sequence: Synthetic oligonucleotide
  Target: LAMA2; (-) strand; PAM type: NNNNGHTT; PAM sequence: GGTTGATT
ggagagatttttactagcat

SEQ ID NO: 35681 - DNA, 20 bp, Artificial Sequence
  Description of Artificial Sequence: Synthetic oligonucleotide
  Target: LAMA2; (-) strand; PAM type: NNNNGHTT; PAM sequence: GAGAGATT
cactcagtaatgtcttgcag

SEQ ID NO: 35682 - DNA, 20 bp, Artificial Sequence
  Description of Artificial Sequence: Synthetic oligonucleotide
  Target: LAMA2; (-) strand; PAM type: NNNNGHTT; PAM sequence: TTGGGCTT
gattgctttcttttcttttg

SEQ ID NO: 35683 - DNA, 20 bp, Artificial Sequence
  Description of Artificial Sequence: Synthetic oligonucleotide
  Target: LAMA2; (-) strand; PAM type: NNNNGHTT; PAM sequence: GATTGCTT
tatcttaaagcctcttgaaa

SEQ ID NO: 35684 - DNA, 20 bp, Artificial Sequence
  Description of Artificial Sequence: Synthetic oligonucleotide
  Target: LAMA2; (-) strand; PAM type: NNNNGHTT; PAM sequence: GAAAGATT
atgttatcttaaagcctctt

SEQ ID NO: 35685 - DNA, 20 bp, Artificial Sequence
  Description of Artificial Sequence: Synthetic oligonucleotide
  Target: LAMA2; (-) strand; PAM type: NNNNGHTT; PAM sequence: CCGAGTTT
gccaatagacagaatttctc

SEQ ID NO: 35686 - DNA, 20 bp, Artificial Sequence
  Description of Artificial Sequence: Synthetic oligonucleotide
  Target: LAMA2; (-) strand; PAM type: NNNNGHTT; PAM sequence: AAGCGATT
ttgctaaactttttggctaa

SEQ ID NO: 35687 - DNA, 20 bp, Artificial Sequence
  Description of Artificial Sequence: Synthetic oligonucleotide
  Target: LAMA2; (-) strand; PAM type: NNNNGHTT; PAM sequence: TATTGATT
gcactccttatgcatctatc

SEQ ID NO: 35688 - DNA, 20 bp, Artificial Sequence
  Description of Artificial Sequence: Synthetic oligonucleotide
  Target: LAMA2; (-) strand; PAM type: NNNNGHTT; PAM sequence: TGATGATT
tagaaaaagcttttgaagta

SEQ ID NO: 35689 - DNA, 20 bp, Artificial Sequence
  Description of Artificial Sequence: Synthetic oligonucleotide
  Target: LAMA2; (-) strand; PAM type: NNNNGHTT; PAM sequence: AAAAGCTT
cagctgtgagttatgttaga

SEQ ID NO: 35690 - DNA, 20 bp, Artificial Sequence
  Description of Artificial Sequence: Synthetic oligonucleotide
  Target: LAMA2; (-) strand; PAM type: NNNNGHTT; PAM sequence: TTTTGCTT
tttgtagctatgaaaattgt

SEQ ID NO: 35691 - DNA, 20 bp, Artificial Sequence
  Description of Artificial Sequence: Synthetic oligonucleotide
  Target: LAMA2; (-) strand; PAM type: NNNNGHTT; PAM sequence: AATTGTTT
cggcggtttgtagctatgaa

SEQ ID NO: 35692 - DNA, 20 bp, Artificial Sequence
  Description of Artificial Sequence: Synthetic oligonucleotide
  Target: LAMA2; (-) strand; PAM type: NNNNGHTT; PAM sequence: GGCGGTTT
tttaaatagaaagttgtgtc

SEQ ID NO: 35693 - DNA, 20 bp, Artificial Sequence
  Description of Artificial Sequence: Synthetic oligonucleotide
  Target: LAMA2; (-) strand; PAM type: NNNNGHTT; PAM sequence: TAGAGATT
ggataatagtattttgaaat

SEQ ID NO: 35694 - DNA, 20 bp, Artificial Sequence
  Description of Artificial Sequence: Synthetic oligonucleotide
  Target: LAMA2; (-) strand; PAM type: NNNNGHTT; PAM sequence: TTTTGTTT
agggagggtagtgcataaat

SEQ ID NO: 35695 - DNA, 20 bp, Artificial Sequence
  Description of Artificial Sequence: Synthetic oligonucleotide
  Target: LAMA2; (-) strand; PAM type: NNNNGHTT; PAM sequence: TGCTGATT
ttttatggagagaaactgaa

SEQ ID NO: 35696 - DNA, 20 bp, Artificial Sequence
  Description of Artificial Sequence: Synthetic oligonucleotide
  Target: LAMA2; (-) strand; PAM type: NNNNGHTT; PAM sequence: AACAGTTT
aaaggcttattggatttaat

SEQ ID NO: 35697 - DNA, 20 bp, Artificial Sequence
  Description of Artificial Sequence: Synthetic oligonucleotide
  Target: LAMA2; (-) strand; PAM type: NNNNGHTT; PAM sequence: ATTGGATT
gattcagaaatgaaaggctt

SEQ ID NO: 35698 - DNA, 20 bp, Artificial Sequence
  Description of Artificial Sequence: Synthetic oligonucleotide
  Target: LAMA2; (-) strand; PAM type: NNNNGHTT; PAM sequence: AAAGGCTT
cttcacttgattcagaaatg

SEQ ID NO: 35699 - DNA, 20 bp, Artificial Sequence
  Description of Artificial Sequence: Synthetic oligonucleotide
  Target: LAMA2; (-) strand; PAM type: NNNNGHTT; PAM sequence: ACTTGATT
aaagatagagaaaaatcttc

SEQ ID NO: 35700 - DNA, 20 bp, Artificial Sequence
  Description of Artificial Sequence: Synthetic oligonucleotide
  Target: LAMA2; (-) strand; PAM type: NNNNGHTT; PAM sequence: TAAGGATT
gaattcagaacattggtatg

SEQ ID NO: 35701 - DNA, 20 bp, Artificial Sequence
  Description of Artificial Sequence: Synthetic oligonucleotide
  Target: LAMA2; (-) strand; PAM type: NNNNGHTT; PAM sequence: AAGTGTTT
acttgaaatagataccatgg

SEQ ID NO: 35702 - DNA, 20 bp, Artificial Sequence
  Description of Artificial Sequence: Synthetic oligonucleotide
  Target: LAMA2; (-) strand; PAM type: NNNNGHTT; PAM sequence: TCTAGCTT
taatcatttggtcattatca

SEQ ID NO: 35703 - DNA, 20 bp, Artificial Sequence
  Description of Artificial Sequence: Synthetic oligonucleotide
  Target: LAMA2; (-) strand; PAM type: NNNNGHTT; PAM sequence: TGCTGCTT
tatataaaatttctgagtca

SEQ ID NO: 35704 - DNA, 20 bp, Artificial Sequence
  Description of Artificial Sequence: Synthetic oligonucleotide
  Target: LAMA2; (-) strand; PAM type: NNNNGHTT; PAM sequence: TTGAGTTT
gatccaattctaaggtttat

SEQ ID NO: 35705 - DNA, 20 bp, Artificial Sequence
  Description of Artificial Sequence: Synthetic oligonucleotide
  Target: LAMA2; (-) strand; PAM type: NNNNGHTT; PAM sequence: TAAGGTTT
tactcgataagatccaattc

SEQ ID NO: 35706 - DNA, 20 bp, Artificial Sequence
  Description of Artificial Sequence: Synthetic oligonucleotide
  Target: LAMA2; (-) strand; PAM type: NNNNGHTT; PAM sequence: TCATGCTT
ggaattaagaattgagtcta

SEQ ID NO: 35707 - DNA, 20 bp, Artificial Sequence
  Description of Artificial Sequence: Synthetic oligonucleotide
  Target: LAMA2; (-) strand; PAM type: NNNNGHTT; PAM sequence: CTCTGTTT
aatatgttccttggacataa

SEQ ID NO: 35708 - DNA, 20 bp, Artificial Sequence
  Description of Artificial Sequence: Synthetic oligonucleotide
  Target: LAMA2; (-) strand; PAM type: NNNNGHTT; PAM sequence: CAGTGATT
aagaaaaagctacagctgta

SEQ ID NO: 35709 - DNA, 20 bp, Artificial Sequence
  Description of Artificial Sequence: Synthetic oligonucleotide
  Target: LAMA2; (-) strand; PAM type: NNNNGHTT; PAM sequence: AATTGTTT
ttgggaggctgaggcaggag

SEQ ID NO: 35710 - DNA, 20 bp, Artificial Sequence
  Description of Artificial Sequence: Synthetic oligonucleotide
  Target: LAMA2; (-) strand; PAM type: NNNNGHTT; PAM sequence: AGGGGTTT
tgggaggatcacctgaggtc

SEQ ID NO: 35711 - DNA, 20 bp, Artificial Sequence
  Description of Artificial Sequence: Synthetic oligonucleotide
  Target: LAMA2; (-) strand; PAM type: NNNNGHTT; PAM sequence: CTGGGATT
tgtctccgcctcccaagtag

SEQ ID NO: 35712 - DNA, 20 bp, Artificial Sequence
  Description of Artificial Sequence: Synthetic oligonucleotide
  Target: LAMA2; (-) strand; PAM type: NNNNGHTT; PAM sequence: CTTTGATT
aataaaatatttcttaaggc

SEQ ID NO: 35713 - DNA, 20 bp, Artificial Sequence
  Description of Artificial Sequence: Synthetic oligonucleotide
  Target: LAMA2; (-) strand; PAM type: NNNNGHTT; PAM sequence: GCAAGATT
aatgggaaactgttactgtt

SEQ ID NO: 35714 - DNA, 20 bp, Artificial Sequence
  Description of Artificial Sequence: Synthetic oligonucleotide
  Target: LAMA2; (-) strand; PAM type: NNNNGHTT; PAM sequence: CAGTGATT
acctcaattgtgtcttttcc

SEQ ID NO: 35715 - DNA, 20 bp, Artificial Sequence
  Description of Artificial Sequence: Synthetic oligonucleotide
  Target: LAMA2; (-) strand; PAM type: NNNNGHTT; PAM sequence: ATTTGATT
aaagtggaagtacagagttc

SEQ ID NO: 35716 - DNA, 20 bp, Artificial Sequence
  Description of Artificial Sequence: Synthetic oligonucleotide
  Target: LAMA2; (-) strand; PAM type: NNNNGHTT; PAM sequence: ATGGGTTT
ttttgatttttgtaaatagc

SEQ ID NO: 35717 - DNA, 20 bp, Artificial Sequence
  Description of Artificial Sequence: Synthetic oligonucleotide
  Target: LAMA2; (-) strand; PAM type: NNNNGHTT; PAM sequence: TTTTGATT
acagaattcatgatttgagc

SEQ ID NO: 35718 - DNA, 20 bp, Artificial Sequence
  Description of Artificial Sequence: Synthetic oligonucleotide
  Target: LAMA2; (-) strand; PAM type: NNNNGHTT; PAM sequence: TTGAGCTT
acacaaacagaattcatgat

SEQ ID NO: 35719 - DNA, 20 bp, Artificial Sequence
  Description of Artificial Sequence: Synthetic oligonucleotide
  Target: LAMA2; (-) strand; PAM type: NNNNGHTT; PAM sequence: TCATGATT
atccttaacacaaacagaat

SEQ ID NO: 35720 - DNA, 20 bp, Artificial Sequence
  Description of Artificial Sequence: Synthetic oligonucleotide
  Target: LAMA2; (-) strand; PAM type: NNNNGHTT; PAM sequence: GTATGATT
ccacggacctttctacttag

SEQ ID NO: 35721 - DNA, 20 bp, Artificial Sequence
  Description of Artificial Sequence: Synthetic oligonucleotide
  Target: LAMA2; (-) strand; PAM type: NNNNGHTT; PAM sequence: TATGGTTT
caatttaattttaactctga

SEQ ID NO: 35722 - DNA, 20 bp, Artificial Sequence
  Description of Artificial Sequence: Synthetic oligonucleotide
  Target: LAMA2; (-) strand; PAM type: NNNNGHTT; PAM sequence: CCTTGATT
gaaagaagtgaaaatggttt

SEQ ID NO: 35723 - DNA, 20 bp, Artificial Sequence
  Description of Artificial Sequence: Synthetic oligonucleotide
  Target: LAMA2; (-) strand; PAM type: NNNNGHTT; PAM sequence: AATGGTTT
atcatatcgaaagaagtgaa

SEQ ID NO: 35724 - DNA, 20 bp, Artificial Sequence
  Description of Artificial Sequence: Synthetic oligonucleotide
  Target: LAMA2; (-) strand; PAM type: NNNNGHTT; PAM sequence: GCATGATT
tcccatttcccatttaaaat

SEQ ID NO: 35725 - DNA, 20 bp, Artificial Sequence
  Description of Artificial Sequence: Synthetic oligonucleotide
  Target: LAMA2; (-) strand; PAM type: NNNNGHTT; PAM sequence: GAATGTTT
gtggctacataatgtattga

SEQ ID NO: 35726 - DNA, 20 bp, Artificial Sequence
  Description of Artificial Sequence: Synthetic oligonucleotide
  Target: LAMA2; (-) strand; PAM type: NNNNGHTT; PAM sequence: CTAAGTTT
caacaaatacgttctatgga

SEQ ID NO: 35727 - DNA, 20 bp, Artificial Sequence
  Description of Artificial Sequence: Synthetic oligonucleotide
  Target: LAMA2; (-) strand; PAM type: NNNNGHTT; PAM sequence: GTGTGTTT
tcgtgaaaccttgcatgtgt

SEQ ID NO: 35728 - DNA, 20 bp, Artificial Sequence
  Description of Artificial Sequence: Synthetic oligonucleotide
  Target: LAMA2; (-) strand; PAM type: NNNNGHTT; PAM sequence: ACCTGATT
gacacatacacaaaatacat

SEQ ID NO: 35729 - DNA, 20 bp, Artificial Sequence
  Description of Artificial Sequence: Synthetic oligonucleotide
  Target: LAMA2; (-) strand; PAM type: NNNNGHTT; PAM sequence: CTAAGTTT
acacaaattccagttgatgg

SEQ ID NO: 35730 - DNA, 20 bp, Artificial Sequence
  Description of Artificial Sequence: Synthetic oligonucleotide
  Target: LAMA2; (-) strand; PAM type: NNNNGHTT; PAM sequence: TCATGATT
tgacagaaagataattgata

SEQ ID NO: 35731 - DNA, 20 bp, Artificial Sequence
  Description of Artificial Sequence: Synthetic oligonucleotide
  Target: LAMA2; (-) strand; PAM type: NNNNGHTT; PAM sequence: AACTGCTT
atatatactatttgtttgta

SEQ ID NO: 35732 - DNA, 20 bp, Artificial Sequence
  Description of Artificial Sequence: Synthetic oligonucleotide
  Target: LAMA2; (-) strand; PAM type: NNNNGHTT; PAM sequence: ATTTGTTT
catatacatgtatatatact

SEQ ID NO: 35733 - DNA, 20 bp, Artificial Sequence
  Description of Artificial Sequence: Synthetic oligonucleotide
  Target: LAMA2; (-) strand; PAM type: NNNNGHTT; PAM sequence: TCTGGCTT
catgtaaatgccaagggaca

SEQ ID NO: 35734 - DNA, 20 bp, Artificial Sequence
  Description of Artificial Sequence: Synthetic oligonucleotide
  Target: LAMA2; (-) strand; PAM type: NNNNGHTT; PAM sequence: ACTAGTTT
tttctttttaaccattgaat

SEQ ID NO: 35735 - DNA, 20 bp, Artificial Sequence
  Description of Artificial Sequence: Synthetic oligonucleotide
  Target: LAMA2; (-) strand; PAM type: NNNNGHTT; PAM sequence: TATTGCTT
attactaagccaaagatagg

SEQ ID NO: 35736 - DNA, 20 bp, Artificial Sequence
  Description of Artificial Sequence: Synthetic oligonucleotide
  Target: LAMA2; (-) strand; PAM type: NNNNGHTT; PAM sequence: CAAAGTTT
taaggtgaggcctctgttct

SEQ ID NO: 35737 - DNA, 20 bp, Artificial Sequence
  Description of Artificial Sequence: Synthetic oligonucleotide
  Target: LAMA2; (-) strand; PAM type: NNNNGHTT; PAM sequence: ACATGATT
tgtctagctgagagccttcc

SEQ ID NO: 35738 - DNA, 20 bp, Artificial Sequence
  Description of Artificial Sequence: Synthetic oligonucleotide
  Target: LAMA2; (-) strand; PAM type: NNNNGHTT; PAM sequence: AAGTGCTT
tcattcagcaaataatgatg

SEQ ID NO: 35739 - DNA, 20 bp, Artificial Sequence
  Description of Artificial Sequence: Synthetic oligonucleotide
  Target: LAMA2; (-) strand; PAM type: NNNNGHTT; PAM sequence: TATGGATT
caaatggacaagctattaca

SEQ ID NO: 35740 - DNA, 20 bp, Artificial Sequence
  Description of Artificial Sequence: Synthetic oligonucleotide
  Target: LAMA2; (-) strand; PAM type: NNNNGHTT; PAM sequence: CACAGTTT
acttgacagttcttatcaaa

SEQ ID NO: 35741 - DNA, 20 bp, Artificial Sequence
  Description of Artificial Sequence: Synthetic oligonucleotide
  Target: LAMA2; (-) strand; PAM type: NNNNGHTT; PAM sequence: GTTTGATT
taccattaaaaagaatcatt

SEQ ID NO: 35742 - DNA, 20 bp, Artificial Sequence
  Description of Artificial Sequence: Synthetic oligonucleotide
  Target: LAMA2; (-) strand; PAM type: NNNNGHTT; PAM sequence: CATTGTTT
aagttaccattaaaaagaat

SEQ ID NO: 35743 - DNA, 20 bp, Artificial Sequence
  Description of Artificial Sequence: Synthetic oligonucleotide
  Target: LAMA2; (-) strand; PAM type: NNNNGHTT; PAM sequence: TCAAGATT
gtctaaatttagtatttctt

SEQ ID NO: 35744 - DNA, 20 bp, Artificial Sequence
  Description of Artificial Sequence: Synthetic oligonucleotide
  Target: LAMA2; (-) strand; PAM type: NNNNGHTT; PAM sequence: AATTGCTT
acctcccctgggtagtgttc

SEQ ID NO: 35745 - DNA, 20 bp, Artificial Sequence
  Description of Artificial Sequence: Synthetic oligonucleotide
  Target: LAMA2; (-) strand; PAM type: NNNNGHTT; PAM sequence: TATAGATT
atcagattcatgtgcattac

SEQ ID NO: 35746 - DNA, 20 bp, Artificial Sequence
  Description of Artificial Sequence: Synthetic oligonucleotide
  Target: LAMA2; (-) strand; PAM type: NNNNGHTT; PAM sequence: ATCAGATT
agcaaagattataataattt

SEQ ID NO: 35747 - DNA, 20 bp, Artificial Sequence
  Description of Artificial Sequence: Synthetic oligonucleotide
  Target: LAMA2; (-) strand; PAM type: NNNNGHTT; PAM sequence: CAAAGATT
atccccatttctactaaaag

SEQ ID NO: 35748 - DNA, 20 bp, Artificial Sequence
  Description of Artificial Sequence: Synthetic oligonucleotide
  Target: LAMA2; (-) strand; PAM type: NNNNGHTT; PAM sequence: ATATGTTT
tcttatccttgtttttcaaa

SEQ ID NO: 35749 - DNA, 20 bp, Artificial Sequence
  Description of Artificial Sequence: Synthetic oligonucleotide
  Target: LAMA2; (-) strand; PAM type: NNNNGHTT; PAM sequence: CCTTGTTT
ttttaaacactaattcttat

SEQ ID NO: 35750 - DNA, 20 bp, Artificial Sequence
  Description of Artificial Sequence: Synthetic oligonucleotide
  Target: LAMA2; (-) strand; PAM type: NNNNGHTT; PAM sequence: TTTAGCTT
gctgacacaaattcttctct

SEQ ID NO: 35751 - DNA, 20 bp, Artificial Sequence
  Description of Artificial Sequence: Synthetic oligonucleotide
  Target: LAMA2; (-) strand; PAM type: NNNNGHTT; PAM sequence: AATGGATT
tcattgttatgaaactgata

SEQ ID NO: 35752 - DNA, 20 bp, Artificial Sequence
  Description of Artificial Sequence: Synthetic oligonucleotide
  Target: LAMA2; (-) strand; PAM type: NNNNGHTT; PAM sequence: ACAAGCTT
tctaccctgtgagaaatgaa

SEQ ID NO: 35753 - DNA, 20 bp, Artificial Sequence
  Description of Artificial Sequence: Synthetic oligonucleotide
  Target: LAMA2; (-) strand; PAM type: NNNNGHTT; PAM sequence: GGTAGATT
tggctacaacaaacatgcct

SEQ ID NO: 35754 - DNA, 20 bp, Artificial Sequence
  Description of Artificial Sequence: Synthetic oligonucleotide
  Target: LAMA2; (-) strand; PAM type: NNNNGHTT; PAM sequence: ATTTGCTT
atatttttagaattctatat

SEQ ID NO: 35755 - DNA, 20 bp, Artificial Sequence
  Description of Artificial Sequence: Synthetic oligonucleotide
  Target: LAMA2; (-) strand; PAM type: NNNNGHTT; PAM sequence: TATAGATT
tgaatgaaatgttttcagta

SEQ ID NO: 35756 - DNA, 20 bp, Artificial Sequence
  Description of Artificial Sequence: Synthetic oligonucleotide
  Target: LAMA2; (-) strand; PAM type: NNNNGHTT; PAM sequence: AAATGTTT
gaaggtcaacttattgaatg

SEQ ID NO: 35757 - DNA, 20 bp, Artificial Sequence
  Description of Artificial Sequence: Synthetic oligonucleotide
  Target: LAMA2; (-) strand; PAM type: NNNNGHTT; PAM sequence: TATTGATT
ggagatcaacttaaaaacca

SEQ ID NO: 35758 - DNA, 20 bp, Artificial Sequence
  Description of Artificial Sequence: Synthetic oligonucleotide
  Target: LAMA2; (-) strand; PAM type: NNNNGHTT; PAM sequence: AACGGCTT
aatttgatgattggtaccag

SEQ ID NO: 35759 - DNA, 20 bp, Artificial Sequence
  Description of Artificial Sequence: Synthetic oligonucleotide
  Target: LAMA2; (-) strand; PAM type: NNNNGHTT; PAM sequence: TGATGATT
tttcttacaaatatgaaatt

SEQ ID NO: 35760 - DNA, 20 bp, Artificial Sequence
  Description of Artificial Sequence: Synthetic oligonucleotide
  Target: LAMA2; (-) strand; PAM type: NNNNGHTT; PAM sequence: GGTGGATT
tggaagtgagatatatactt

SEQ ID NO: 35761 - DNA, 20 bp, Artificial Sequence
  Description of Artificial Sequence: Synthetic oligonucleotide
  Target: LAMA2; (-) strand; PAM type: NNNNGHTT; PAM sequence: ACTTGTTT
ttttccatatggaacttctt

SEQ ID NO: 35762 - DNA, 20 bp, Artificial Sequence
  Description of Artificial Sequence: Synthetic oligonucleotide
  Target: LAMA2; (-) strand; PAM type: NNNNGHTT; PAM sequence: ATCAGTTT
ttgcttctaaaaaattgctt

SEQ ID NO: 35763 - DNA, 20 bp, Artificial Sequence
  Description of Artificial Sequence: Synthetic oligonucleotide
  Target: LAMA2; (-) strand; PAM type: NNNNGHTT; PAM sequence: AATTGCTT
tgagatttttgcttctaaaa

SEQ ID NO: 35764 - DNA, 20 bp, Artificial Sequence
  Description of Artificial Sequence: Synthetic oligonucleotide
  Target: LAMA2; (-) strand; PAM type: NNNNGHTT; PAM sequence: TTTTGCTT
ttgttttagcgtcatgagat

SEQ ID NO: 35765 - DNA, 20 bp, Artificial Sequence
  Description of Artificial Sequence: Synthetic oligonucleotide
  Target: LAMA2; (-) strand; PAM type: NNNNGHTT; PAM sequence: ATGAGATT
catcatcttgttttagcgtc

SEQ ID NO: 35766 - DNA, 20 bp, Artificial Sequence
  Description of Artificial Sequence: Synthetic oligonucleotide
  Target: LAMA2; (-) strand; PAM type: NNNNGHTT; PAM sequence: TCTTGTTT
acagagtaatttcttcatca

SEQ ID NO: 35767 - DNA, 20 bp, Artificial Sequence
  Description of Artificial Sequence: Synthetic oligonucleotide
  Target: LAMA2; (-) strand; PAM type: NNNNGHTT; PAM sequence: CTGAGTTT
gactaaaattccttccactt

SEQ ID NO: 35768 - DNA, 20 bp, Artificial Sequence
  Description of Artificial Sequence: Synthetic oligonucleotide
  Target: LAMA2; (-) strand; PAM type: NNNNGHTT; PAM sequence: GTTTGCTT
caattaaatattcctaatcc

SEQ ID NO: 35769 - DNA, 20 bp, Artificial Sequence
  Description of Artificial Sequence: Synthetic oligonucleotide
  Target: LAMA2; (-) strand; PAM type: NNNNGHTT; PAM sequence: ATCCGTTT
tctccaattaaatattccta

SEQ ID NO: 35770 - DNA, 20 bp, Artificial Sequence
  Description of Artificial Sequence: Synthetic oligonucleotide
  Target: LAMA2; (-) strand; PAM type: NNNNGHTT; PAM sequence: AAGTGTTT
aatatttctagacatttaaa

SEQ ID NO: 35771 - DNA, 20 bp, Artificial Sequence
  Description of Artificial Sequence: Synthetic oligonucleotide
  Target: LAMA2; (-) strand; PAM type: NNNNGHTT; PAM sequence: ATCTGTTT
attcatatatttcggagcat

SEQ ID NO: 35772 - DNA, 20 bp, Artificial Sequence
  Description of Artificial Sequence: Synthetic oligonucleotide
  Target: LAMA2; (-) strand; PAM type: NNNNGHTT; PAM sequence: TGCAGTTT
aatttcttggggtcttttac

SEQ ID NO: 35773 - DNA, 20 bp, Artificial Sequence
  Description of Artificial Sequence: Synthetic oligonucleotide
  Target: LAMA2; (-) strand; PAM type: NNNNGHTT; PAM sequence: CATAGTTT
ccacttgctacaatcatttc

SEQ ID NO: 35774 - DNA, 20 bp, Artificial Sequence
  Description of Artificial Sequence: Synthetic oligonucleotide
  Target: LAMA2; (-) strand; PAM type: NNNNGHTT; PAM sequence: AATAGCTT
gctttcaaaatgcaaacaaa

SEQ ID NO: 35775 - DNA, 20 bp, Artificial Sequence
  Description of Artificial Sequence: Synthetic oligonucleotide
  Target: LAMA2; (-) strand; PAM type: NNNNGHTT; PAM sequence: AACTGCTT
caaaattagaaatttctaaa

SEQ ID NO: 35776 - DNA, 20 bp, Artificial Sequence
  Description of Artificial Sequence: Synthetic oligonucleotide
  Target: LAMA2; (-) strand; PAM type: NNNNGHTT; PAM sequence: TTAAGATT
cagaattcctaaaaatcaat

SEQ ID NO: 35777 - DNA, 20 bp, Artificial Sequence
  Description of Artificial Sequence: Synthetic oligonucleotide
  Target: LAMA2; (-) strand; PAM type: NNNNGHTT; PAM sequence: AACTGTTT
gaaggaactgattctgagtc

SEQ ID NO: 35778 - DNA, 20 bp, Artificial Sequence
  Description of Artificial Sequence: Synthetic oligonucleotide
  Target: LAMA2; (-) strand; PAM type: NNNNGHTT; PAM sequence: AACTGATT
ataaggatctgaaaggaagg

SEQ ID NO: 35779 - DNA, 20 bp, Artificial Sequence
  Description of Artificial Sequence: Synthetic oligonucleotide
  Target: LAMA2; (-) strand; PAM type: NNNNGHTT; PAM sequence: CAAAGATT
ctttactttaaattcctagg

SEQ ID NO: 35780 - DNA, 20 bp, Artificial Sequence
  Description of Artificial Sequence: Synthetic oligonucleotide
  Target: LAMA2; (-) strand; PAM type: NNNNGHTT; PAM sequence: ATAAGATT
gtagatacaagtcaagagaa

SEQ ID NO: 35781 - DNA, 20 bp, Artificial Sequence
  Description of Artificial Sequence: Synthetic oligonucleotide
  Target: LAMA2; (-) strand; PAM type: NNNNGHTT; PAM sequence: GAGAGTTT
taaggggttgacaataagga

SEQ ID NO: 35782 - DNA, 20 bp, Artificial Sequence
  Description of Artificial Sequence: Synthetic oligonucleotide
  Target: LAMA2; (-) strand; PAM type: NNNNGHTT; PAM sequence: AAGAGCTT
gtcaaggacccttgccttca

SEQ ID NO: 35783 - DNA, 20 bp, Artificial Sequence
  Description of Artificial Sequence: Synthetic oligonucleotide
  Target: LAMA2; (-) strand; PAM type: NNNNGHTT; PAM sequence: ATGTGTTT
tgatttgctaaagacggaac

SEQ ID NO: 35784 - DNA, 20 bp, Artificial Sequence
  Description of Artificial Sequence: Synthetic oligonucleotide
  Target: LAMA2; (-) strand; PAM type: NNNNGHTT; PAM sequence: GGGTGATT
aatggaagattagtaatgat

SEQ ID NO: 35785 - DNA, 20 bp, Artificial Sequence
  Description of Artificial Sequence: Synthetic oligonucleotide
  Target: LAMA2; (-) strand; PAM type: NNNNGHTT; PAM sequence: GGAAGATT
aatatcatagataaaataat

SEQ ID NO: 35786 - DNA, 20 bp, Artificial Sequence
  Description of Artificial Sequence: Synthetic oligonucleotide
  Target: LAMA2; (-) strand; PAM type: NNNNGHTT; PAM sequence: GTTGGTTT
acatgttatgtacaattaat

SEQ ID NO: 35787 - DNA, 20 bp, Artificial Sequence
  Description of Artificial Sequence: Synthetic oligonucleotide
  Target: LAMA2; (-) strand; PAM type: NNNNGHTT; PAM sequence: TCTAGTTT
tcttcatggaaaatatttgt

SEQ ID NO: 35788 - DNA, 20 bp, Artificial Sequence
  Description of Artificial Sequence: Synthetic oligonucleotide
  Target: LAMA2; (-) strand; PAM type: NNNNGHTT; PAM sequence: CCATGATT
aagttccttgaaggcagaag

SEQ ID NO: 35789 - DNA, 20 bp, Artificial Sequence
  Description of Artificial Sequence: Synthetic oligonucleotide
  Target: LAMA2; (-) strand; PAM type: NNNNGHTT; PAM sequence: ATGAGTTT
catataaactctcagatatt

SEQ ID NO: 35790 - DNA, 20 bp, Artificial Sequence
  Description of Artificial Sequence: Synthetic oligonucleotide
  Target: LAMA2; (-) strand; PAM type: NNNNGHTT; PAM sequence: TTCTGTTT
tgcagggaaacccacaaata

SEQ ID NO: 35791 - DNA, 20 bp, Artificial Sequence
  Description of Artificial Sequence: Synthetic oligonucleotide
  Target: LAMA2; (-) strand; PAM type: NNNNGHTT; PAM sequence: AGCTGTTT
aaaacactttgttctctagc

SEQ ID NO: 35792 - DNA, 20 bp, Artificial Sequence
  Description of Artificial Sequence: Synthetic oligonucleotide
  Target: LAMA2; (-) strand; PAM type: NNNNGHTT; PAM sequence: CAGTGTTT
tttttcacagtgagatttga

SEQ ID NO: 35793 - DNA, 20 bp, Artificial Sequence
  Description of Artificial Sequence: Synthetic oligonucleotide
  Target: LAMA2; (-) strand; PAM type: NNNNGHTT; PAM sequence: GTGAGATT
atagacaaatttttttcaca

SEQ ID NO: 35794 - DNA, 20 bp, Artificial Sequence
  Description of Artificial Sequence: Synthetic oligonucleotide
  Target: LAMA2; (-) strand; PAM type: NNNNGHTT; PAM sequence: ACTTGTTT
tttagtatatctatgaaaat

SEQ ID NO: 35795 - DNA, 20 bp, Artificial Sequence
  Description of Artificial Sequence: Synthetic oligonucleotide
  Target: LAMA2; (-) strand; PAM type: NNNNGHTT; PAM sequence: TGCAGCTT
tgctataaaagcaaattcta

SEQ ID NO: 35796 - DNA, 20 bp, Artificial Sequence
  Description of Artificial Sequence: Synthetic oligonucleotide
  Target: LAMA2; (-) strand; PAM type: NNNNGHTT; PAM sequence: TTCTGTTT
tagctgactcaagcatctaa

SEQ ID NO: 35797 - DNA, 20 bp, Artificial Sequence
  Description of Artificial Sequence: Synthetic oligonucleotide
  Target: LAMA2; (-) strand; PAM type: NNNNGHTT; PAM sequence: CCCAGCTT
tccagtctattccccccacc

SEQ ID NO: 35798 - DNA, 20 bp, Artificial Sequence
  Description of Artificial Sequence: Synthetic oligonucleotide
  Target: LAMA2; (-) strand; PAM type: NNNNGHTT; PAM sequence: GTTTGATT
gtttggttgataaattagga

SEQ ID NO: 35799 - DNA, 20 bp, Artificial Sequence
  Description of Artificial Sequence: Synthetic oligonucleotide
  Target: LAMA2; (-) strand; PAM type: NNNNGHTT; PAM sequence: AGGAGTTT
gttggtttggttgataaatt

SEQ ID NO: 35800 - DNA, 20 bp, Artificial Sequence
  Description of Artificial Sequence: Synthetic oligonucleotide
  Target: LAMA2; (-) strand; PAM type: NNNNGHTT; PAM sequence: GTTGGTTT
tgaattctctatgggattag

SEQ ID NO: 35801 - DNA, 20 bp, Artificial Sequence
  Description of Artificial Sequence: Synthetic oligonucleotide
  Target: LAMA2; (-) strand; PAM type: NNNNGHTT; PAM sequence: ATGGGATT
tgagtcactttgaattctct

SEQ ID NO: 35802 - DNA, 20 bp, Artificial Sequence
  Description of Artificial Sequence: Synthetic oligonucleotide
  Target: LAMA2; (-) strand; PAM type: NNNNGHTT; PAM sequence: GATAGTTT
acccataccactgtcctctg

SEQ ID NO: 35803 - DNA, 20 bp, Artificial Sequence
  Description of Artificial Sequence: Synthetic oligonucleotide
  Target: LAMA2; (-) strand; PAM type: NNNNGHTT; PAM sequence: TATTGTTT
acattttaaaaagatgtatg

SEQ ID NO: 35804 - DNA, 20 bp, Artificial Sequence
  Description of Artificial Sequence: Synthetic oligonucleotide
  Target: LAMA2; (-) strand; PAM type: NNNNGHTT; PAM sequence: TCAGGATT
gaaaagaaaagaaattcata

SEQ ID NO: 35805 - DNA, 20 bp, Artificial Sequence
  Description of Artificial Sequence: Synthetic oligonucleotide
  Target: LAMA2; (-) strand; PAM type: NNNNGHTT; PAM sequence: AAGGGATT
accacagggctggacacata

SEQ ID NO: 35806 - DNA, 20 bp, Artificial Sequence
  Description of Artificial Sequence: Synthetic oligonucleotide
  Target: LAMA2; (-) strand; PAM type: NNNNGHTT; PAM sequence: TTTTGTTT
gatgggagagactatgtatg

SEQ ID NO: 35807 - DNA, 20 bp, Artificial Sequence
  Description of Artificial Sequence: Synthetic oligonucleotide
  Target: LAMA2; (-) strand; PAM type: NNNNGHTT; PAM sequence: GTATGTTT
ttcatgatgggagagactat

SEQ ID NO: 35808 - DNA, 20 bp, Artificial Sequence
  Description of Artificial Sequence: Synthetic oligonucleotide
  Target: LAMA2; (-) strand; PAM type: NNNNGHTT; PAM sequence: GTAAGCTT
tctagcttccttgctggaac

SEQ ID NO: 35809 - DNA, 20 bp, Artificial Sequence
  Description of Artificial Sequence: Synthetic oligonucleotide
  Target: LAMA2; (-) strand; PAM type: NNNNGHTT; PAM sequence: TCTAGCTT
tgataattatctattgaagg

SEQ ID NO: 35810 - DNA, 20 bp, Artificial Sequence
  Description of Artificial Sequence: Synthetic oligonucleotide
  Target: LAMA2; (-) strand; PAM type: NNNNGHTT; PAM sequence: CACTGATT
gccttatttttcttgcatag

SEQ ID NO: 35811 - DNA, 20 bp, Artificial Sequence
  Description of Artificial Sequence: Synthetic oligonucleotide
  Target: LAMA2; (-) strand; PAM type: NNNNGHTT; PAM sequence: TAATGCTT
ttcctccatgagggctttcc

SEQ ID NO: 35812 - DNA, 20 bp, Artificial Sequence
  Description of Artificial Sequence: Synthetic oligonucleotide
  Target: LAMA2; (-) strand; PAM type: NNNNGHTT; PAM sequence: GAGGGCTT
ccttgtcttatttcctccat

SEQ ID NO: 35813 - DNA, 20 bp, Artificial Sequence
  Description of Artificial Sequence: Synthetic oligonucleotide
  Target: LAMA2; (-) strand; PAM type: NNNNGHTT; PAM sequence: AAGTGTTT
cataccttcctattgttcac

SEQ ID NO: 35814 - DNA, 20 bp, Artificial Sequence
  Description of Artificial Sequence: Synthetic oligonucleotide
  Target: LAMA2; (-) strand; PAM type: NNNNGHTT; PAM sequence: TAGGGCTT
agctctgctttttccttgct

SEQ ID NO: 35815 - DNA, 20 bp, Artificial Sequence
  Description of Artificial Sequence: Synthetic oligonucleotide
  Target: LAMA2; (-) strand; PAM type: NNNNGHTT; PAM sequence: CCTTGCTT
agaataaagctctgcttttt

SEQ ID NO: 35816 - DNA, 20 bp, Artificial Sequence
  Description of Artificial Sequence: Synthetic oligonucleotide
  Target: LAMA2; (-) strand; PAM type: NNNNGHTT; PAM sequence: CTCTGCTT
agtccgattctagaataaag

SEQ ID NO: 35817 - DNA, 20 bp, Artificial Sequence
  Description of Artificial Sequence: Synthetic oligonucleotide
  Target: LAMA2; (-) strand; PAM type: NNNNGHTT; PAM sequence: GTCCGATT
ttcaacgaatactgccttta

SEQ ID NO: 35818 - DNA, 20 bp, Artificial Sequence
  Description of Artificial Sequence: Synthetic oligonucleotide
  Target: LAMA2; (-) strand; PAM type: NNNNGHTT; PAM sequence: CCTGGCTT
ttaaaattcaaaatgattat

SEQ ID NO: 35819 - DNA, 20 bp, Artificial Sequence
  Description of Artificial Sequence: Synthetic oligonucleotide
  Target: LAMA2; (-) strand; PAM type: NNNNGHTT; PAM sequence: AAATGATT
tgtacctaggttaaaattca

SEQ ID NO: 35820 - DNA, 20 bp, Artificial Sequence
  Description of Artificial Sequence: Synthetic oligonucleotide
  Target: LAMA2; (-) strand; PAM type: NNNNGHTT; PAM sequence: TTAAGATT
tttttacataatgagttttc

SEQ ID NO: 35821 - DNA, 20 bp, Artificial Sequence
  Description of Artificial Sequence: Synthetic oligonucleotide
  Target: LAMA2; (-) strand; PAM type: NNNNGHTT; PAM sequence: ATGAGTTT
tttagccctttttttacata

SEQ ID NO: 35822 - DNA, 20 bp, Artificial Sequence
  Description of Artificial Sequence: Synthetic oligonucleotide
  Target: LAMA2; (-) strand; PAM type: NNNNGHTT; PAM sequence: ATCTGCTT
ccgaaataaatatcagatcc

SEQ ID NO: 35823 - DNA, 20 bp, Artificial Sequence
  Description of Artificial Sequence: Synthetic oligonucleotide
  Target: LAMA2; (-) strand; PAM type: NNNNGHTT; PAM sequence: CTTAGTTT
ttctctcaagctcaacacat

SEQ ID NO: 35824 - DNA, 20 bp, Artificial Sequence
  Description of Artificial Sequence: Synthetic oligonucleotide
  Target: LAMA2; (-) strand; PAM type: NNNNGHTT; PAM sequence: CCCAGATT
aatccccacccgaagggaca

SEQ ID NO: 35825 - DNA, 20 bp, Artificial Sequence
  Description of Artificial Sequence: Synthetic oligonucleotide
  Target: LAMA2; (-) strand; PAM type: NNNNGHTT; PAM sequence: CGTGGTTT
ttactctccaaagtagagtt

SEQ ID NO: 35826 - DNA, 20 bp, Artificial Sequence
  Description of Artificial Sequence: Synthetic oligonucleotide
  Target: LAMA2; (-) strand; PAM type: NNNNGHTT; PAM sequence: CAGGGCTT
cagtaactattatcgttcct

SEQ ID NO: 35827 - DNA, 20 bp, Artificial Sequence
  Description of Artificial Sequence: Synthetic oligonucleotide
  Target: LAMA2; (-) strand; PAM type: NNNNGHTT; PAM sequence: TCTGGCTT
ctgttccacattatgttttc

SEQ ID NO: 35828 - DNA, 20 bp, Artificial Sequence
  Description of Artificial Sequence: Synthetic oligonucleotide
  Target: LAMA2; (-) strand; PAM type: NNNNGHTT; PAM sequence: TTATGTTT
cataaaaacactgttccaca

SEQ ID NO: 35829 - DNA, 20 bp, Artificial Sequence
  Description of Artificial Sequence: Synthetic oligonucleotide
  Target: LAMA2; (-) strand; PAM type: NNNNGHTT; PAM sequence: GACAGCTT
ggccctccctggtccttaag

SEQ ID NO: 35830 - DNA, 20 bp, Artificial Sequence
  Description of Artificial Sequence: Synthetic oligonucleotide
  Target: LAMA2; (-) strand; PAM type: NNNNGHTT; PAM sequence: CTATGCTT
aaatatcagaagagactcat

SEQ ID NO: 35831 - DNA, 20 bp, Artificial Sequence
  Description of Artificial Sequence: Synthetic oligonucleotide
  Target: LAMA2; (-) strand; PAM type: NNNNGHTT; PAM sequence: ATGAGCTT
ctaattgctatgctaggagc

SEQ ID NO: 35832 - DNA, 20 bp, Artificial Sequence
  Description of Artificial Sequence: Synthetic oligonucleotide
  Target: LAMA2; (-) strand; PAM type: NNNNGHTT; PAM sequence: TAGGGCTT
tatagaaaacaaaaaaaatt

SEQ ID NO: 35833 - DNA, 20 bp, Artificial Sequence
  Description of Artificial Sequence: Synthetic oligonucleotide
  Target: LAMA2; (-) strand; PAM type: NNNNGHTT; PAM sequence: AACAGTTT
agcaaggagaggaagtgcaa

SEQ ID NO: 35834 - DNA, 20 bp, Artificial Sequence
  Description of Artificial Sequence: Synthetic oligonucleotide
  Target: LAMA2; (-) strand; PAM type: NNNNGHTT; PAM sequence: CCAAGCTT
tggagagaaatagactgctt

SEQ ID NO: 35835 - DNA, 20 bp, Artificial Sequence
  Description of Artificial Sequence: Synthetic oligonucleotide
  Target: LAMA2; (-) strand; PAM type: NNNNGHTT; PAM sequence: GACTGCTT
gtggcagttggagagaaata

SEQ ID NO: 35836 - DNA, 20 bp, Artificial Sequence
  Description of Artificial Sequence: Synthetic oligonucleotide
  Target: LAMA2; (-) strand; PAM type: NNNNGHTT; PAM sequence: AAAGGCTT
gaacaatcctaaatcatccc

SEQ ID NO: 35837 - DNA, 20 bp, Artificial Sequence
  Description of Artificial Sequence: Synthetic oligonucleotide
  Target: LAMA2; (-) strand; PAM type: NNNNGHTT; PAM sequence: TTTGGTTT
gagtccacgaactgctttgt

SEQ ID NO: 35838 - DNA, 20 bp, Artificial Sequence
  Description of Artificial Sequence: Synthetic oligonucleotide
  Target: LAMA2; (-) strand; PAM type: NNNNGHTT; PAM sequence: CTTTGTTT
aaattagagtccacgaactg

SEQ ID NO: 35839 - DNA, 20 bp, Artificial Sequence
  Description of Artificial Sequence: Synthetic oligonucleotide
  Target: LAMA2; (-) strand; PAM type: NNNNGHTT; PAM sequence: AACTGCTT
atttaaaattagagtccacg

SEQ ID NO: 35840 - DNA, 20 bp, Artificial Sequence
  Description of Artificial Sequence: Synthetic oligonucleotide
  Target: LAMA2; (-) strand; PAM type: NNNNGHTT; PAM sequence: CCCTGCTT
agaaacaggttcatactata

SEQ ID NO: 35841 - DNA, 20 bp, Artificial Sequence
  Description of Artificial Sequence: Synthetic oligonucleotide
  Target: LAMA2; (-) strand; PAM type: NNNNGHTT; PAM sequence: AATAGATT
tcatatctagagtttgatta

SEQ ID NO: 35842 - DNA, 20 bp, Artificial Sequence
  Description of Artificial Sequence: Synthetic oligonucleotide
  Target: LAMA2; (-) strand; PAM type: NNNNGHTT; PAM sequence: GTTTGATT
agcaaaacatcatatctaga

SEQ ID NO: 35843 - DNA, 20 bp, Artificial Sequence
  Description of Artificial Sequence: Synthetic oligonucleotide
  Target: LAMA2; (-) strand; PAM type: NNNNGHTT; PAM sequence: TAGAGTTT
agttagcaaaacatcatatc

SEQ ID NO: 35844 - DNA, 20 bp, Artificial Sequence
  Description of Artificial Sequence: Synthetic oligonucleotide
  Target: LAMA2; (-) strand; PAM type: NNNNGHTT; PAM sequence: TCATGCTT
aatacctgtaaccaatcact

SEQ ID NO: 35845 - DNA, 20 bp, Artificial Sequence
  Description of Artificial Sequence: Synthetic oligonucleotide
  Target: LAMA2; (-) strand; PAM type: NNNNGHTT; PAM sequence: TCCAGATT
aaaaaaaactgtcatgataa

SEQ ID NO: 35846 - DNA, 20 bp, Artificial Sequence
  Description of Artificial Sequence: Synthetic oligonucleotide
  Target: LAMA2; (-) strand; PAM type: NNNNGHTT; PAM sequence: GTGTGTTT
tcaaaaagacacctacattt

SEQ ID NO: 35847 - DNA, 20 bp, Artificial Sequence
  Description of Artificial Sequence: Synthetic oligonucleotide
  Target: LAMA2; (-) strand; PAM type: NNNNGHTT; PAM sequence: GAATGCTT
gtgaggttgcagagaaaagg

SEQ ID NO: 35848 - DNA, 20 bp, Artificial Sequence
  Description of Artificial Sequence: Synthetic oligonucleotide
  Target: LAMA2; (-) strand; PAM type: NNNNGHTT; PAM sequence: CGGCGTTT
tgggacttaattaaactaaa

SEQ ID NO: 35849 - DNA, 20 bp, Artificial Sequence
  Description of Artificial Sequence: Synthetic oligonucleotide
  Target: LAMA2; (-) strand; PAM type: NNNNGHTT; PAM sequence: TACAGATT
ctatgctacccaaaacaatc

SEQ ID NO: 35850 - DNA, 20 bp, Artificial Sequence
  Description of Artificial Sequence: Synthetic oligonucleotide
  Target: LAMA2; (-) strand; PAM type: NNNNGHTT; PAM sequence: TTATGATT
agatctctaccaggaattga

SEQ ID NO: 35851 - DNA, 20 bp, Artificial Sequence
  Description of Artificial Sequence: Synthetic oligonucleotide
  Target: LAMA2; (-) strand; PAM type: NNNNGHTT; PAM sequence: AATTGATT
ggtaaaagatctctaccagg

SEQ ID NO: 35852 - DNA, 20 bp, Artificial Sequence
  Description of Artificial Sequence: Synthetic oligonucleotide
  Target: LAMA2; (-) strand; PAM type: NNNNGHTT; PAM sequence: CTGTGATT
aggattacaccataaatttg

SEQ ID NO: 35853 - DNA, 20 bp, Artificial Sequence
  Description of Artificial Sequence: Synthetic oligonucleotide
  Target: LAMA2; (-) strand; PAM type: NNNNGHTT; PAM sequence: ATAGGATT
acatcatccatctaattaag

SEQ ID NO: 35854 - DNA, 20 bp, Artificial Sequence
  Description of Artificial Sequence: Synthetic oligonucleotide
  Target: LAMA2; (-) strand; PAM type: NNNNGHTT; PAM sequence: ATTAGATT
acttggtccagctaagcagt

SEQ ID NO: 35855 - DNA, 20 bp, Artificial Sequence
  Description of Artificial Sequence: Synthetic oligonucleotide
  Target: LAMA2; (-) strand; PAM type: NNNNGHTT; PAM sequence: TATGGATT
agaagggctacaaggtccac

SEQ ID NO: 35856 - DNA, 20 bp, Artificial Sequence
  Description of Artificial Sequence: Synthetic oligonucleotide
  Target: LAMA2; (-) strand; PAM type: NNNNGHTT; PAM sequence: CAATGTTT
taggcatgtttatagaatac

SEQ ID NO: 35857 - DNA, 20 bp, Artificial Sequence
  Description of Artificial Sequence: Synthetic oligonucleotide
  Target: LAMA2; (-) strand; PAM type: NNNNGHTT; PAM sequence: GCATGTTT
catactccaatggatcttag

SEQ ID NO: 35858 - DNA, 20 bp, Artificial Sequence
  Description of Artificial Sequence: Synthetic oligonucleotide
  Target: LAMA2; (-) strand; PAM type: NNNNGHTT; PAM sequence: AATTGCTT
tctgttgaattaatttttaa

SEQ ID NO: 35859 - DNA, 20 bp, Artificial Sequence
  Description of Artificial Sequence: Synthetic oligonucleotide
  Target: LAMA2; (-) strand; PAM type: NNNNGHTT; PAM sequence: ACATGTTT
ttttaatcagaaaaagtagt

SEQ ID NO: 35860 - DNA, 20 bp, Artificial Sequence
  Description of Artificial Sequence: Synthetic oligonucleotide
  Target: LAMA2; (-) strand; PAM type: NNNNGHTT; PAM sequence: GGAGGCTT
taaaataaaagagtattttt

SEQ ID NO: 35861 - DNA, 20 bp, Artificial Sequence
  Description of Artificial Sequence: Synthetic oligonucleotide
  Target: LAMA2; (-) strand; PAM type: NNNNGHTT; PAM sequence: TTCAGCTT
cattagttagatctgccctt

SEQ ID NO: 35862 - DNA, 20 bp, Artificial Sequence
  Description of Artificial Sequence: Synthetic oligonucleotide
  Target: LAMA2; (-) strand; PAM type: NNNNGHTT; PAM sequence: TCCTGTTT
aaagagagtaagtattctat

SEQ ID NO: 35863 - DNA, 20 bp, Artificial Sequence
  Description of Artificial Sequence: Synthetic oligonucleotide
  Target: LAMA2; (-) strand; PAM type: NNNNGHTT; PAM sequence: AAGGGTTT
tttgatccacgatgcagatg

SEQ ID NO: 35864 - DNA, 20 bp, Artificial Sequence
  Description of Artificial Sequence: Synthetic oligonucleotide
  Target: LAMA2; (-) strand; PAM type: NNNNGHTT; PAM sequence: GAATGATT
acaaagcaaaatgtggaaga

SEQ ID NO: 35865 - DNA, 20 bp, Artificial Sequence
  Description of Artificial Sequence: Synthetic oligonucleotide
  Target: LAMA2; (-) strand; PAM type: NNNNGHTT; PAM sequence: AAGTGATT
atgcaagcagagatgtttgc

SEQ ID NO: 35866 - DNA, 20 bp, Artificial Sequence
  Description of Artificial Sequence: Synthetic oligonucleotide
  Target: LAMA2; (-) strand; PAM type: NNNNGHTT; PAM sequence: AGATGTTT
aaaaatattcatgcaagcag

SEQ ID NO: 35867 - DNA, 20 bp, Artificial Sequence
  Description of Artificial Sequence: Synthetic oligonucleotide
  Target: LAMA2; (-) strand; PAM type: NNNNGHTT; PAM sequence: TTCAGCTT
gaatgattctaactttccat

SEQ ID NO: 35868 - DNA, 20 bp, Artificial Sequence
  Description of Artificial Sequence: Synthetic oligonucleotide
  Target: LAMA2; (-) strand; PAM type: NNNNGHTT; PAM sequence: GAATGATT
taaaatcaaaatttgtgttt

SEQ ID NO: 35869 - DNA, 20 bp, Artificial Sequence
  Description of Artificial Sequence: Synthetic oligonucleotide
  Target: LAMA2; (-) strand; PAM type: NNNNGHTT; PAM sequence: TTGTGTTT
caaaggaataaaatcaaaat

SEQ ID NO: 35870 - DNA, 20 bp, Artificial Sequence
  Description of Artificial Sequence: Synthetic oligonucleotide
  Target: LAMA2; (-) strand; PAM type: NNNNGHTT; PAM sequence: TACTGTTT
ataatctctaagatatcata

SEQ ID NO: 35871 - DNA, 20 bp, Artificial Sequence
  Description of Artificial Sequence: Synthetic oligonucleotide
  Target: LAMA2; (-) strand; PAM type: NNNNGHTT; PAM sequence: TCAAGTTT
aaatgtctcaacatttatag

SEQ ID NO: 35872 - DNA, 20 bp, Artificial Sequence
  Description of Artificial Sequence: Synthetic oligonucleotide
  Target: LAMA2; (-) strand; PAM type: NNNNGHTT; PAM sequence: CGGAGCTT
aatggcgtgaacctgggagg

SEQ ID NO: 35873 - DNA, 20 bp, Artificial Sequence
  Description of Artificial Sequence: Synthetic oligonucleotide
  Target: LAMA2; (-) strand; PAM type: NNNNGHTT; PAM sequence: ATCAGCTT
taaatatattttcttgtttt

SEQ ID NO: 35874 - DNA, 20 bp, Artificial Sequence
  Description of Artificial Sequence: Synthetic oligonucleotide
  Target: LAMA2; (-) strand; PAM type: NNNNGHTT; PAM sequence: TCTTGTTT
aaaattttttaaatatattt

SEQ ID NO: 35875 - DNA, 20 bp, Artificial Sequence
  Description of Artificial Sequence: Synthetic oligonucleotide
  Target: LAMA2; (-) strand; PAM type: NNNNGHTT; PAM sequence: TTCTGTTT
acaccgtgtcacttcagaaa

SEQ ID NO: 35876 - DNA, 20 bp, Artificial Sequence
  Description of Artificial Sequence: Synthetic oligonucleotide
  Target: LAMA2; (-) strand; PAM type: NNNNGHTT; PAM sequence: AGTTGCTT
aaatgaataaatatgtatac

SEQ ID NO: 35877 - DNA, 20 bp, Artificial Sequence
  Description of Artificial Sequence: Synthetic oligonucleotide
  Target: LAMA2; (-) strand; PAM type: NNNNGHTT; PAM sequence: ACTTGATT
agaaagattaggatagaata

SEQ ID NO: 35878 - DNA, 20 bp, Artificial Sequence
  Description of Artificial Sequence: Synthetic oligonucleotide
  Target: LAMA2; (-) strand; PAM type: NNNNGHTT; PAM sequence: GAAAGATT
tcacacacagagtgaagata

SEQ ID NO: 35879 - DNA, 20 bp, Artificial Sequence
  Description of Artificial Sequence: Synthetic oligonucleotide
  Target: LAMA2; (-) strand; PAM type: NNNNGHTT; PAM sequence: TTCAGCTT
atggtatatttcaaatgtat

SEQ ID NO: 35880 - DNA, 20 bp, Artificial Sequence
  Description of Artificial Sequence: Synthetic oligonucleotide
  Target: LAMA2; (-) strand; PAM type: NNNNGHTT; PAM sequence: CCTGGTTT
gatgtctgccatcttctcac

SEQ ID NO: 35881 - DNA, 20 bp, Artificial Sequence
  Description of Artificial Sequence: Synthetic oligonucleotide
  Target: LAMA2; (-) strand; PAM type: NNNNGHTT; PAM sequence: AACTGTTT
ttaatttggtggaaatgtag

SEQ ID NO: 35882 - DNA, 20 bp, Artificial Sequence
  Description of Artificial Sequence: Synthetic oligonucleotide
  Target: LAMA2; (-) strand; PAM type: NNNNGHTT; PAM sequence: TTCTGTTT
tgactttgccacacagaatt

SEQ ID NO: 35883 - DNA, 20 bp, Artificial Sequence
  Description of Artificial Sequence: Synthetic oligonucleotide
  Target: LAMA2; (-) strand; PAM type: NNNNGHTT; PAM sequence: AAGTGTTT
aaatattccctgctctgtga

SEQ ID NO: 35884 - DNA, 20 bp, Artificial Sequence
  Description of Artificial Sequence: Synthetic oligonucleotide
  Target: LAMA2; (-) strand; PAM type: NNNNGHTT; PAM sequence: AAATGCTT
aaatatagcaggcattttga

SEQ ID NO: 35885 - DNA, 20 bp, Artificial Sequence
  Description of Artificial Sequence: Synthetic oligonucleotide
  Target: LAMA2; (-) strand; PAM type: NNNNGHTT; PAM sequence: GCCTGCTT
atctaaacatttataatcag

SEQ ID NO: 35886 - DNA, 20 bp, Artificial Sequence
  Description of Artificial Sequence: Synthetic oligonucleotide
  Target: LAMA2; (-) strand; PAM type: NNNNGHTT; PAM sequence: AACAGTTT
tggctgatgatctgaggtgg

SEQ ID NO: 35887 - DNA, 20 bp, Artificial Sequence
  Description of Artificial Sequence: Synthetic oligonucleotide
  Target: LAMA2; (-) strand; PAM type: NNNNGHTT; PAM sequence: TCCAGTTT
cccattctaagatttctgct

SEQ ID NO: 35888 - DNA, 20 bp, Artificial Sequence
  Description of Artificial Sequence: Synthetic oligonucleotide
  Target: LAMA2; (-) strand; PAM type: NNNNGHTT; PAM sequence: TTCTGCTT
acttttccccattctaagat

SEQ ID NO: 35889 - DNA, 20 bp, Artificial Sequence
  Description of Artificial Sequence: Synthetic oligonucleotide
  Target: LAMA2; (-) strand; PAM type: NNNNGHTT; PAM sequence: CTAAGATT
atgccttacttttccccatt

SEQ ID NO: 35890 - DNA, 20 bp, Artificial Sequence
  Description of Artificial Sequence: Synthetic oligonucleotide
  Target: LAMA2; (-) strand; PAM type: NNNNGHTT; PAM sequence: TTGAGATT
cacctcaacctcccaaactg

SEQ ID NO: 35891 - DNA, 20 bp, Artificial Sequence
  Description of Artificial Sequence: Synthetic oligonucleotide
  Target: LAMA2; (-) strand; PAM type: NNNNGHTT; PAM sequence: CCAAGTTT
gatggatcttgctctgttgc

SEQ ID NO: 35892 - DNA, 20 bp, Artificial Sequence
  Description of Artificial Sequence: Synthetic oligonucleotide
  Target: LAMA2; (-) strand; PAM type: NNNNGHTT; PAM sequence: ATTTGTTT
aataacttcatttcttttta

SEQ ID NO: 35893 - DNA, 20 bp, Artificial Sequence
  Description of Artificial Sequence: Synthetic oligonucleotide
  Target: LAMA2; (-) strand; PAM type: NNNNGHTT; PAM sequence: ATCAGTTT
ctcctgaaggccacttgcaa

SEQ ID NO: 35894 - DNA, 20 bp, Artificial Sequence
  Description of Artificial Sequence: Synthetic oligonucleotide
  Target: LAMA2; (-) strand; PAM type: NNNNGHTT; PAM sequence: AATGGATT
acacttctgcagatctcctc

SEQ ID NO: 35895 - DNA, 20 bp, Artificial Sequence
  Description of Artificial Sequence: Synthetic oligonucleotide
  Target: LAMA2; (-) strand; PAM type: NNNNGHTT; PAM sequence: CTTGGTTT
ctcctttttgcaagtgaagc

SEQ ID NO: 35896 - DNA, 20 bp, Artificial Sequence
  Description of Artificial Sequence: Synthetic oligonucleotide
  Target: LAMA2; (-) strand; PAM type: NNNNGHTT; PAM sequence: CTCAGTTT
tatgatatatttccaaattt

SEQ ID NO: 35897 - DNA, 20 bp, Artificial Sequence
  Description of Artificial Sequence: Synthetic oligonucleotide
  Target: LAMA2; (-) strand; PAM type: NNNNGHTT; PAM sequence: CATAGCTT
actcatgggctaacttccat

SEQ ID NO: 35898 - DNA, 20 bp, Artificial Sequence
  Description of Artificial Sequence: Synthetic oligonucleotide
  Target: LAMA2; (-) strand; PAM type: NNNNGHTT; PAM sequence: CTGTGTTT
attttattattaaagatcta

SEQ ID NO: 35899 - DNA, 20 bp, Artificial Sequence
  Description of Artificial Sequence: Synthetic oligonucleotide
  Target: LAMA2; (-) strand; PAM type: NNNNGHTT; PAM sequence: GCTGGTTT
cccagaatttaaatggcaca

SEQ ID NO: 35900 - DNA, 20 bp, Artificial Sequence
  Description of Artificial Sequence: Synthetic oligonucleotide
  Target: LAMA2; (-) strand; PAM type: NNNNGHTT; PAM sequence: TTAGGCTT
gcacagggaaggctgcttcc

SEQ ID NO: 35901 - DNA, 20 bp, Artificial Sequence
  Description of Artificial Sequence: Synthetic oligonucleotide
  Target: LAMA2; (-) strand; PAM type: NNNNGHTT; PAM sequence: GGCTGCTT
cttctgtgtggcacagggaa

SEQ ID NO: 35902 - DNA, 20 bp, Artificial Sequence
  Description of Artificial Sequence: Synthetic oligonucleotide
  Target: LAMA2; (-) strand; PAM type: NNNNGHTT; PAM sequence: AAGTGTTT
tagaatcatgtttgatgtgt

SEQ ID NO: 35903 - DNA, 20 bp, Artificial Sequence
  Description of Artificial Sequence: Synthetic oligonucleotide
  Target: LAMA2; (-) strand; PAM type: NNNNGHTT; PAM sequence: TCATGTTT
tgaagaactttgacttagaa

SEQ ID NO: 35904 - DNA, 20 bp, Artificial Sequence
  Description of Artificial Sequence: Synthetic oligonucleotide
  Target: LAMA2; (-) strand; PAM type: NNNNGHTT; PAM sequence: TACAGTTT
gcaggtgactatttctcttg

SEQ ID NO: 35905 - DNA, 20 bp, Artificial Sequence
  Description of Artificial Sequence: Synthetic oligonucleotide
  Target: LAMA2; (-) strand; PAM type: NNNNGHTT; PAM sequence: CTGAGTTT
gtcctggataagcaaaattg

SEQ ID NO: 35906 - DNA, 20 bp, Artificial Sequence
  Description of Artificial Sequence: Synthetic oligonucleotide
  Target: LAMA2; (-) strand; PAM type: NNNNGHTT; PAM sequence: TTTGGATT
atgtaagatttatctcattc

SEQ ID NO: 35907 - DNA, 20 bp, Artificial Sequence
  Description of Artificial Sequence: Synthetic oligonucleotide
  Target: LAMA2; (-) strand; PAM type: NNNNGHTT; PAM sequence: GTAAGATT
tatagaaatatgacacatat

SEQ ID NO: 35908 - DNA, 20 bp, Artificial Sequence
  Description of Artificial Sequence: Synthetic oligonucleotide
  Target: LAMA2; (-) strand; PAM type: NNNNGHTT; PAM sequence: GTATGATT
tcgagtacatagtgttcact

SEQ ID NO: 35909 - DNA, 20 bp, Artificial Sequence
  Description of Artificial Sequence: Synthetic oligonucleotide
  Target: LAMA2; (-) strand; PAM type: NNNNGHTT; PAM sequence: TCTAGATT
tgcttggcctaattttagaa

SEQ ID NO: 35910 - DNA, 20 bp, Artificial Sequence
  Description of Artificial Sequence: Synthetic oligonucleotide
  Target: LAMA2; (-) strand; PAM type: NNNNGHTT; PAM sequence: CTATGCTT
gggattacaggcatcagcca

SEQ ID NO: 35911 - DNA, 20 bp, Artificial Sequence
  Description of Artificial Sequence: Synthetic oligonucleotide
  Target: LAMA2; (-) strand; PAM type: NNNNGHTT; PAM sequence: CTGGGATT
cacctcagcctcccaaatcc

SEQ ID NO: 35912 - DNA, 20 bp, Artificial Sequence
  Description of Artificial Sequence: Synthetic oligonucleotide
  Target: LAMA2; (-) strand; PAM type: NNNNGHTT; PAM sequence: CTCAGCTT
ggctcaagcaatcctcctgc

SEQ ID NO: 35913 - DNA, 20 bp, Artificial Sequence
  Description of Artificial Sequence: Synthetic oligonucleotide
  Target: LAMA2; (-) strand; PAM type: NNNNGHTT; PAM sequence: GCATGATT
gcccaggttggagtgcaata

SEQ ID NO: 35914 - DNA, 20 bp, Artificial Sequence
  Description of Artificial Sequence: Synthetic oligonucleotide
  Target: LAMA2; (-) strand; PAM type: NNNNGHTT; PAM sequence: TTAGGATT
tgcctcagcctctgaaagtg

SEQ ID NO: 35915 - DNA, 20 bp, Artificial Sequence
  Description of Artificial Sequence: Synthetic oligonucleotide
  Target: LAMA2; (-) strand; PAM type: NNNNGHTT; PAM sequence: GCTGGTTT
ggttttgccatatcagccag

SEQ ID NO: 35916 - DNA, 20 bp, Artificial Sequence
  Description of Artificial Sequence: Synthetic oligonucleotide
  Target: LAMA2; (-) strand; PAM type: NNNNGHTT; PAM sequence: CGGGGTTT
ttttgtatttttagtagaga

SEQ ID NO: 35917 - DNA, 20 bp, Artificial Sequence
  Description of Artificial Sequence: Synthetic oligonucleotide
  Target: LAMA2; (-) strand; PAM type: NNNNGHTT; PAM sequence: CTGGGATT
tgcctcagcctcccgagtag

SEQ ID NO: 35918 - DNA, 20 bp, Artificial Sequence
  Description of Artificial Sequence: Synthetic oligonucleotide
  Target: LAMA2; (-) strand; PAM type: NNNNGHTT; PAM sequence: AAGTGATT
aacctccgcctctcaggttc

SEQ ID NO: 35919 - DNA, 20 bp, Artificial Sequence
  Description of Artificial Sequence: Synthetic oligonucleotide
  Target: LAMA2; (-) strand; PAM type: NNNNGHTT; PAM sequence: AATGGATT
tgcagtatattaaaagataa

SEQ ID NO: 35920 - DNA, 20 bp, Artificial Sequence
  Description of Artificial Sequence: Synthetic oligonucleotide
  Target: LAMA2; (-) strand; PAM type: NNNNGHTT; PAM sequence: TGAGGTTT
catgatcatgtgtataggaa

SEQ ID NO: 35921 - DNA, 20 bp, Artificial Sequence
  Description of Artificial Sequence: Synthetic oligonucleotide
  Target: LAMA2; (-) strand; PAM type: NNNNGHTT; PAM sequence: TTGAGCTT
gcatttcaatgtagataaat

SEQ ID NO: 35922 - DNA, 20 bp, Artificial Sequence
  Description of Artificial Sequence: Synthetic oligonucleotide
  Target: LAMA2; (-) strand; PAM type: NNNNGHTT; PAM sequence: AGCAGTTT
atgatgataatattcttgat

SEQ ID NO: 35923 - DNA, 20 bp, Artificial Sequence
  Description of Artificial Sequence: Synthetic oligonucleotide
  Target: LAMA2; (-) strand; PAM type: NNNNGHTT; PAM sequence: GGGAGCTT
caggaaaaatggttgccttt

SEQ ID NO: 35924 - DNA, 20 bp, Artificial Sequence
  Description of Artificial Sequence: Synthetic oligonucleotide
  Target: LAMA2; (-) strand; PAM type: NNNNGHTT; PAM sequence: ATAAGTTT
aaaggattatgccacataat

SEQ ID NO: 35925 - DNA, 20 bp, Artificial Sequence
  Description of Artificial Sequence: Synthetic oligonucleotide
  Target: LAMA2; (-) strand; PAM type: NNNNGHTT; PAM sequence: AAAGGATT
aacaatgctgatgactccaa

SEQ ID NO: 35926 - DNA, 20 bp, Artificial Sequence
  Description of Artificial Sequence: Synthetic oligonucleotide
  Target: LAMA2; (-) strand; PAM type: NNNNGHTT; PAM sequence: TTAGGTTT
tagccaaacctggaaacacc

SEQ ID NO: 35927 - DNA, 20 bp, Artificial Sequence
  Description of Artificial Sequence: Synthetic oligonucleotide
  Target: LAMA2; (-) strand; PAM type: NNNNGHTT; PAM sequence: AGAAGTTT
acctaaacaaaaatgttcat

SEQ ID NO: 35928 - DNA, 20 bp, Artificial Sequence
  Description of Artificial Sequence: Synthetic oligonucleotide
  Target: LAMA2; (-) strand; PAM type: NNNNGHTT; PAM sequence: GGTAGTTT
cacaacccttttagaaaaca

SEQ ID NO: 35929 - DNA, 20 bp, Artificial Sequence
  Description of Artificial Sequence: Synthetic oligonucleotide
  Target: LAMA2; (-) strand; PAM type: NNNNGHTT; PAM sequence: AAAAGTTT
attgacaacatcaaatatta

SEQ ID NO: 35930 - DNA, 20 bp, Artificial Sequence
  Description of Artificial Sequence: Synthetic oligonucleotide
  Target: LAMA2; (-) strand; PAM type: NNNNGHTT; PAM sequence: AAAAGATT
gattaaatggcattatatta

SEQ ID NO: 35931 - DNA, 20 bp, Artificial Sequence
  Description of Artificial Sequence: Synthetic oligonucleotide
  Target: LAMA2; (-) strand; PAM type: NNNNGHTT; PAM sequence: TTTAGATT
tattgacaaagttctcatgt

SEQ ID NO: 35932 - DNA, 20 bp, Artificial Sequence
  Description of Artificial Sequence: Synthetic oligonucleotide
  Target: LAMA2; (-) strand; PAM type: NNNNGHTT; PAM sequence: TCATGTTT
cctatatattgacaaagttc

SEQ ID NO: 35933 - DNA, 20 bp, Artificial Sequence
  Description of Artificial Sequence: Synthetic oligonucleotide
  Target: LAMA2; (-) strand; PAM type: NNNNGHTT; PAM sequence: ATATGTTT
gcaaaaaatcacatcattgc

SEQ ID NO: 35934 - DNA, 20 bp, Artificial Sequence
  Description of Artificial Sequence: Synthetic oligonucleotide
  Target: LAMA2; (-) strand; PAM type: NNNNGHTT; PAM sequence: ATGTGATT
atgaaaaaaaaatccactac

SEQ ID NO: 35935 - DNA, 20 bp, Artificial Sequence
  Description of Artificial Sequence: Synthetic oligonucleotide
  Target: LAMA2; (-) strand; PAM type: NNNNGHTT; PAM sequence: AGCAGCTT
taagcaaacaagcatcttca

SEQ ID NO: 35936 - DNA, 20 bp, Artificial Sequence
  Description of Artificial Sequence: Synthetic oligonucleotide
  Target: LAMA2; (-) strand; PAM type: NNNNGHTT; PAM sequence: CGGAGATT
ttatgagaaaaagcaatcaa

SEQ ID NO: 35937 - DNA, 20 bp, Artificial Sequence
  Description of Artificial Sequence: Synthetic oligonucleotide
  Target: LAMA2; (-) strand; PAM type: NNNNGHTT; PAM sequence: CAGAGTTT
cagaggaacataacaaaacc

SEQ ID NO: 35938 - DNA, 20 bp, Artificial Sequence
  Description of Artificial Sequence: Synthetic oligonucleotide
  Target: LAMA2; (-) strand; PAM type: NNNNGHTT; PAM sequence: CAGAGATT
gctagggctgaaaaactgaa

SEQ ID NO: 35939 - DNA, 20 bp, Artificial Sequence
  Description of Artificial Sequence: Synthetic oligonucleotide
  Target: LAMA2; (-) strand; PAM type: NNNNGHTT; PAM sequence: GTCAGATT
ccagacctacacctgcccta

SEQ ID NO: 35940 - DNA, 20 bp, Artificial Sequence
  Description of Artificial Sequence: Synthetic oligonucleotide
  Target: LAMA2; (-) strand; PAM type: NNNNGHTT; PAM sequence: ACTGGCTT
aaatagaaacccacagtttt

SEQ ID NO: 35941 - DNA, 20 bp, Artificial Sequence
  Description of Artificial Sequence: Synthetic oligonucleotide
  Target: LAMA2; (-) strand; PAM type: NNNNGHTT; PAM sequence: CACAGTTT
ctaaaactcaaatagaaacc

SEQ ID NO: 35942 - DNA, 20 bp, Artificial Sequence
  Description of Artificial Sequence: Synthetic oligonucleotide
  Target: LAMA2; (-) strand; PAM type: NNNNGHTT; PAM sequence: AGTAGCTT
tctatttttaataattgtga

SEQ ID NO: 35943 - DNA, 20 bp, Artificial Sequence
  Description of Artificial Sequence: Synthetic oligonucleotide
  Target: LAMA2; (-) strand; PAM type: NNNNGHTT; PAM sequence: TTTGGTTT
acattctcaaaatcccactt

SEQ ID NO: 35944 - DNA, 20 bp, Artificial Sequence
  Description of Artificial Sequence: Synthetic oligonucleotide
  Target: LAMA2; (-) strand; PAM type: NNNNGHTT; PAM sequence: GCATGATT
tagtatgttcacacatgttg

SEQ ID NO: 35945 - DNA, 20 bp, Artificial Sequence
  Description of Artificial Sequence: Synthetic oligonucleotide
  Target: LAMA2; (-) strand; PAM type: NNNNGHTT; PAM sequence: ATTTGCTT
tttggatgtgtttataccat

SEQ ID NO: 35946 - DNA, 20 bp, Artificial Sequence
  Description of Artificial Sequence: Synthetic oligonucleotide
  Target: LAMA2; (-) strand; PAM type: NNNNGHTT; PAM sequence: ATGTGTTT
cttccactgtttttatttgg

SEQ ID NO: 35947 - DNA, 20 bp, Artificial Sequence
  Description of Artificial Sequence: Synthetic oligonucleotide
  Target: LAMA2; (-) strand; PAM type: NNNNGHTT; PAM sequence: CACTGTTT
gaaaaaaatcacctaacttc

SEQ ID NO: 35948 - DNA, 20 bp, Artificial Sequence
  Description of Artificial Sequence: Synthetic oligonucleotide
  Target: LAMA2; (-) strand; PAM type: NNNNGHTT; PAM sequence: TAGAGATT
gtttatactatgtattttat

SEQ ID NO: 35949 - DNA, 20 bp, Artificial Sequence
  Description of Artificial Sequence: Synthetic oligonucleotide
  Target: LAMA2; (-) strand; PAM type: NNNNGHTT; PAM sequence: TTCTGTTT
tgaacaaaaatcaaacaata

SEQ ID NO: 35950 - DNA, 20 bp, Artificial Sequence
  Description of Artificial Sequence: Synthetic oligonucleotide
  Target: LAMA2; (-) strand; PAM type: NNNNGHTT; PAM sequence: ATAAGTTT
tctgaatagcactagactaa

SEQ ID NO: 35951 - DNA, 20 bp, Artificial Sequence
  Description of Artificial Sequence: Synthetic oligonucleotide
  Target: LAMA2; (-) strand; PAM type: NNNNGHTT; PAM sequence: CTATGATT
agtgatcattatccatacaa

SEQ ID NO: 35952 - DNA, 20 bp, Artificial Sequence
  Description of Artificial Sequence: Synthetic oligonucleotide
  Target: LAMA2; (-) strand; PAM type: NNNNGHTT; PAM sequence: TTAAGATT
attcaatatgtgttacttgg

SEQ ID NO: 35953 - DNA, 20 bp, Artificial Sequence
  Description of Artificial Sequence: Synthetic oligonucleotide
  Target: LAMA2; (-) strand; PAM type: NNNNGHTT; PAM sequence: TATAGATT
gaatcttcagcatgtcttat

SEQ ID NO: 35954 - DNA, 20 bp, Artificial Sequence
  Description of Artificial Sequence: Synthetic oligonucleotide
  Target: LAMA2; (-) strand; PAM type: NNNNGHTT; PAM sequence: CTGAGCTT
tttgaagaatgaatcaatat

SEQ ID NO: 35955 - DNA, 20 bp, Artificial Sequence
  Description of Artificial Sequence: Synthetic oligonucleotide
  Target: LAMA2; (-) strand; PAM type: NNNNGHTT; PAM sequence: TGCTGTTT
atgaaatttcattgctattt

SEQ ID NO: 35956 - DNA, 20 bp, Artificial Sequence
  Description of Artificial Sequence: Synthetic oligonucleotide
  Target: LAMA2; (-) strand; PAM type: NNNNGHTT; PAM sequence: AGTTGCTT
ttgttttatggtcagggaat

SEQ ID NO: 35957 - DNA, 20 bp, Artificial Sequence
  Description of Artificial Sequence: Synthetic oligonucleotide
  Target: LAMA2; (-) strand; PAM type: NNNNGHTT; PAM sequence: CCTTGTTT
acctttgcacaatttaattg

SEQ ID NO: 35958 - DNA, 20 bp, Artificial Sequence
  Description of Artificial Sequence: Synthetic oligonucleotide
  Target: LAMA2; (-) strand; PAM type: NNNNGHTT; PAM sequence: TACTGATT
tgatttgtttctattacagt

SEQ ID NO: 35959 - DNA, 20 bp, Artificial Sequence
  Description of Artificial Sequence: Synthetic oligonucleotide
  Target: LAMA2; (-) strand; PAM type: NNNNGHTT; PAM sequence: ATTTGTTT
tctttcaattcttttctttg

SEQ ID NO: 35960 - DNA, 20 bp, Artificial Sequence
  Description of Artificial Sequence: Synthetic oligonucleotide
  Target: LAMA2; (-) strand; PAM type: NNNNGHTT; PAM sequence: CTTTGATT
taggatctttcaattctttt

SEQ ID NO: 35961 - DNA, 20 bp, Artificial Sequence
  Description of Artificial Sequence: Synthetic oligonucleotide
  Target: LAMA2; (-) strand; PAM type: NNNNGHTT; PAM sequence: TAGAGTTT
accatgccattgttgcttca

SEQ ID NO: 35962 - DNA, 20 bp, Artificial Sequence
  Description of Artificial Sequence: Synthetic oligonucleotide
  Target: LAMA2; (-) strand; PAM type: NNNNGHTT; PAM sequence: TGTTGCTT
cttatccctcaccatgccat

SEQ ID NO: 35963 - DNA, 20 bp, Artificial Sequence
  Description of Artificial Sequence: Synthetic oligonucleotide
  Target: LAMA2; (-) strand; PAM type: NNNNGHTT; PAM sequence: TAAAGCTT
aaccaaaatctggtccttgg

SEQ ID NO: 35964 - DNA, 20 bp, Artificial Sequence
  Description of Artificial Sequence: Synthetic oligonucleotide
  Target: LAMA2; (-) strand; PAM type: NNNNGHTT; PAM sequence: AAAAGCTT
gatttgaagtgagctcttta

SEQ ID NO: 35965 - DNA, 20 bp, Artificial Sequence
  Description of Artificial Sequence: Synthetic oligonucleotide
  Target: LAMA2; (-) strand; PAM type: NNNNGHTT; PAM sequence: CTATGATT
tgaattagtaagattgataa

SEQ ID NO: 35966 - DNA, 20 bp, Artificial Sequence
  Description of Artificial Sequence: Synthetic oligonucleotide
  Target: LAMA2; (-) strand; PAM type: NNNNGHTT; PAM sequence: GTAAGATT
atgtacaaagttatgaatta

SEQ ID NO: 35967 - DNA, 20 bp, Artificial Sequence
  Description of Artificial Sequence: Synthetic oligonucleotide
  Target: LAMA2; (-) strand; PAM type: NNNNGHTT; PAM sequence: CATTGATT
ggattacagagtacaagaaa

SEQ ID NO: 35968 - DNA, 20 bp, Artificial Sequence
  Description of Artificial Sequence: Synthetic oligonucleotide
  Target: LAMA2; (-) strand; PAM type: NNNNGHTT; PAM sequence: AAGGGATT
agcaaaagcatacagctaca

SEQ ID NO: 35969 - DNA, 20 bp, Artificial Sequence
  Description of Artificial Sequence: Synthetic oligonucleotide
  Target: LAMA2; (-) strand; PAM type: NNNNGHTT; PAM sequence: ATTGGATT
gtatgttcagaaaatataga

SEQ ID NO: 35970 - DNA, 20 bp, Artificial Sequence
  Description of Artificial Sequence: Synthetic oligonucleotide
  Target: LAMA2; (-) strand; PAM type: NNNNGHTT; PAM sequence: ACCTGATT
gctttggtctgccctgaaag

SEQ ID NO: 35971 - DNA, 20 bp, Artificial Sequence
  Description of Artificial Sequence: Synthetic oligonucleotide
  Target: LAMA2; (-) strand; PAM type: NNNNGHTT; PAM sequence: CCCTGCTT
tatgggtaagactccctgtg

SEQ ID NO: 35972 - DNA, 20 bp, Artificial Sequence
  Description of Artificial Sequence: Synthetic oligonucleotide
  Target: LAMA2; (-) strand; PAM type: NNNNGHTT; PAM sequence: TCCTGTTT
gaccctgaccatggcctcat

SEQ ID NO: 35973 - DNA, 20 bp, Artificial Sequence
  Description of Artificial Sequence: Synthetic oligonucleotide
  Target: LAMA2; (-) strand; PAM type: NNNNGHTT; PAM sequence: CTCGGATT
agggcattgtcactttttct

SEQ ID NO: 35974 - DNA, 20 bp, Artificial Sequence
  Description of Artificial Sequence: Synthetic oligonucleotide
  Target: LAMA2; (-) strand; PAM type: NNNNGHTT; PAM sequence: GCCAGCTT
atctgcccccttcaaagaca

SEQ ID NO: 35975 - DNA, 20 bp, Artificial Sequence
  Description of Artificial Sequence: Synthetic oligonucleotide
  Target: LAMA2; (-) strand; PAM type: NNNNGHTT; PAM sequence: ATGAGTTT
ttctcttgctcgcttatatg

SEQ ID NO: 35976 - DNA, 20 bp, Artificial Sequence
  Description of Artificial Sequence: Synthetic oligonucleotide
  Target: LAMA2; (-) strand; PAM type: NNNNGHTT; PAM sequence: GCTCGCTT
agcaaaattatacttctctt

SEQ ID NO: 35977 - DNA, 20 bp, Artificial Sequence
  Description of Artificial Sequence: Synthetic oligonucleotide
  Target: LAMA2; (-) strand; PAM type: NNNNGHTT; PAM sequence: TTCTGTTT
acaaagagacatgctgggaa

SEQ ID NO: 35978 - DNA, 20 bp, Artificial Sequence
  Description of Artificial Sequence: Synthetic oligonucleotide
  Target: LAMA2; (-) strand; PAM type: NNNNGHTT; PAM sequence: ATTTGTTT
cttatttgtcactgttagta

SEQ ID NO: 35979 - DNA, 20 bp, Artificial Sequence
  Description of Artificial Sequence: Synthetic oligonucleotide
  Target: LAMA2; (-) strand; PAM type: NNNNGHTT; PAM sequence: CACTGCTT
acttacatattaacataaag

SEQ ID NO: 35980 - DNA, 20 bp, Artificial Sequence
  Description of Artificial Sequence: Synthetic oligonucleotide
  Target: LAMA2; (-) strand; PAM type: NNNNGHTT; PAM sequence: CCATGATT
tgttacttctttgccttcca

SEQ ID NO: 35981 - DNA, 20 bp, Artificial Sequence
  Description of Artificial Sequence: Synthetic oligonucleotide
  Target: LAMA2; (-) strand; PAM type: NNNNGHTT; PAM sequence: TGGCGATT
taaataagtctcataatatc

SEQ ID NO: 35982 - DNA, 20 bp, Artificial Sequence
  Description of Artificial Sequence: Synthetic oligonucleotide
  Target: LAMA2; (-) strand; PAM type: NNNNGHTT; PAM sequence: GCAGGTTT
gaggtatttgaatcatgagg

SEQ ID NO: 35983 - DNA, 20 bp, Artificial Sequence
  Description of Artificial Sequence: Synthetic oligonucleotide
  Target: LAMA2; (-) strand; PAM type: NNNNGHTT; PAM sequence: TATGGTTT
tgaataaacataatggtgga

SEQ ID NO: 35984 - DNA, 20 bp, Artificial Sequence
  Description of Artificial Sequence: Synthetic oligonucleotide
  Target: LAMA2; (-) strand; PAM type: NNNNGHTT; PAM sequence: ATAAGATT
atctgtaattgtttcaacat

SEQ ID NO: 35985 - DNA, 20 bp, Artificial Sequence
  Description of Artificial Sequence: Synthetic oligonucleotide
  Target: LAMA2; (-) strand; PAM type: NNNNGHTT; PAM sequence: AATTGTTT
gtcagagtacttgaatctgt

SEQ ID NO: 35986 - DNA, 20 bp, Artificial Sequence
  Description of Artificial Sequence: Synthetic oligonucleotide
  Target: LAMA2; (-) strand; PAM type: NNNNGHTT; PAM sequence: GAAAGCTT
ataagtatggtctctctgct

SEQ ID NO: 35987 - DNA, 20 bp, Artificial Sequence
  Description of Artificial Sequence: Synthetic oligonucleotide
  Target: LAMA2; (-) strand; PAM type: NNNNGHTT; PAM sequence: AGAAGTTT
ctgaattttcaaggagaaat

SEQ ID NO: 35988 - DNA, 20 bp, Artificial Sequence
  Description of Artificial Sequence: Synthetic oligonucleotide
  Target: LAMA2; (-) strand; PAM type: NNNNGHTT; PAM sequence: ATGGGCTT
agaataaaaatattactaag

SEQ ID NO: 35989 - DNA, 20 bp, Artificial Sequence
  Description of Artificial Sequence: Synthetic oligonucleotide
  Target: LAMA2; (-) strand; PAM type: NNNNGHTT; PAM sequence: ATATGTTT
tacaactattccttcatcaa

SEQ ID NO: 35990 - DNA, 20 bp, Artificial Sequence
  Description of Artificial Sequence: Synthetic oligonucleotide
  Target: LAMA2; (-) strand; PAM type: NNNNGHTT; PAM sequence: TAAAGTTT
ataaatgatatgcgattaaa

SEQ ID NO: 35991 - DNA, 20 bp, Artificial Sequence
  Description of Artificial Sequence: Synthetic oligonucleotide
  Target: LAMA2; (-) strand; PAM type: NNNNGHTT; PAM sequence: ATGCGATT
tttctaggttaataaatgat

SEQ ID NO: 35992 - DNA, 20 bp, Artificial Sequence
  Description of Artificial Sequence: Synthetic oligonucleotide
  Target: LAMA2; (-) strand; PAM type: NNNNGHTT; PAM sequence: TGACGTTT
aaaacttcctaacaattttg

SEQ ID NO: 35993 - DNA, 20 bp, Artificial Sequence
  Description of Artificial Sequence: Synthetic oligonucleotide
  Target: LAMA2; (-) strand; PAM type: NNNNGHTT; PAM sequence: AAAAGTTT
taaaaagtagagtaccattt

SEQ ID NO: 35994 - DNA, 20 bp, Artificial Sequence
  Description of Artificial Sequence: Synthetic oligonucleotide
  Target: LAMA2; (-) strand; PAM type: NNNNGHTT; PAM sequence: TAATGTTT
atttatttcattagaaaatg

SEQ ID NO: 35995 - DNA, 20 bp, Artificial Sequence
  Description of Artificial Sequence: Synthetic oligonucleotide
  Target: LAMA2; (-) strand; PAM type: NNNNGHTT; PAM sequence: TCCTGATT
aagttgaggttcccaatttt

SEQ ID NO: 35996 - DNA, 20 bp, Artificial Sequence
  Description of Artificial Sequence: Synthetic oligonucleotide
  Target: LAMA2; (-) strand; PAM type: NNNNGHTT; PAM sequence: TTGTGTTT
ctctcatctggcctcctgcc

SEQ ID NO: 35997 - DNA, 20 bp, Artificial Sequence
  Description of Artificial Sequence: Synthetic oligonucleotide
  Target: LAMA2; (-) strand; PAM type: NNNNGHTT; PAM sequence: AATAGTTT
cagtaaaaattgcaattata

SEQ ID NO: 35998 - DNA, 20 bp, Artificial Sequence
  Description of Artificial Sequence: Synthetic oligonucleotide
  Target: LAMA2; (-) strand; PAM type: NNNNGHTT; PAM sequence: TTAAGTTT
attagagtatgtattgacta

SEQ ID NO: 35999 - DNA, 20 bp, Artificial Sequence
  Description of Artificial Sequence: Synthetic oligonucleotide
  Target: LAMA2; (-) strand; PAM type: NNNNGHTT; PAM sequence: ATTTGATT
attaggaagatttttataat

SEQ ID NO: 36000 - DNA, 20 bp, Artificial Sequence
  Description of Artificial Sequence: Synthetic oligonucleotide
  Target: LAMA2; (-) strand; PAM type: NNNNGHTT; PAM sequence: GGAAGATT
ttaaaaaagaaagtaaatta

SEQ ID NO: 36001 - DNA, 20 bp, Artificial Sequence
  Description of Artificial Sequence: Synthetic oligonucleotide
  Target: LAMA2; (-) strand; PAM type: NNNNGHTT; PAM sequence: CAATGTTT
actctactgaatggcatcta

SEQ ID NO: 36002 - DNA, 20 bp, Artificial Sequence
  Description of Artificial Sequence: Synthetic oligonucleotide
  Target: LAMA2; (-) strand; PAM type: NNNNGHTT; PAM sequence: CTATGATT
acagctagcaagtagcagag

SEQ ID NO: 36003 - DNA, 20 bp, Artificial Sequence
  Description of Artificial Sequence: Synthetic oligonucleotide
  Target: LAMA2; (-) strand; PAM type: NNNNGHTT; PAM sequence: TCCTGATT
agaggtgttaagtaactcgc

SEQ ID NO: 36004 - DNA, 20 bp, Artificial Sequence
  Description of Artificial Sequence: Synthetic oligonucleotide
  Target: LAMA2; (-) strand; PAM type: NNNNGHTT; PAM sequence: ATGAGCTT
ttgctacacaaaacatccac

SEQ ID NO: 36005 - DNA, 20 bp, Artificial Sequence
  Description of Artificial Sequence: Synthetic oligonucleotide
  Target: LAMA2; (-) strand; PAM type: NNNNGHTT; PAM sequence: CAATGATT
attgtcagacactgttccta

SEQ ID NO: 36006 - DNA, 20 bp, Artificial Sequence
  Description of Artificial Sequence: Synthetic oligonucleotide
  Target: LAMA2; (-) strand; PAM type: NNNNGHTT; PAM sequence: GAATGTTT
tcataatagccagcatcgtt

SEQ ID NO: 36007 - DNA, 20 bp, Artificial Sequence
  Description of Artificial Sequence: Synthetic oligonucleotide
  Target: LAMA2; (-) strand; PAM type: NNNNGHTT; PAM sequence: AAATGTTT
attataaatattggactcat

SEQ ID NO: 36008 - DNA, 20 bp, Artificial Sequence
  Description of Artificial Sequence: Synthetic oligonucleotide
  Target: LAMA2; (-) strand; PAM type: NNNNGHTT; PAM sequence: ATTAGATT
atttgtaaaataaacgaata

SEQ ID NO: 36009 - DNA, 20 bp, Artificial Sequence
  Description of Artificial Sequence: Synthetic oligonucleotide
  Target: LAMA2; (-) strand; PAM type: NNNNGHTT; PAM sequence: CAAAGCTT
tgtattttctgccttatcct

SEQ ID NO: 36010 - DNA, 20 bp, Artificial Sequence
  Description of Artificial Sequence: Synthetic oligonucleotide
  Target: LAMA2; (-) strand; PAM type: NNNNGHTT; PAM sequence: TTGTGTTT
gagatccctagatcttgagt

SEQ ID NO: 36011 - DNA, 20 bp, Artificial Sequence
  Description of Artificial Sequence: Synthetic oligonucleotide
  Target: LAMA2; (-) strand; PAM type: NNNNGHTT; PAM sequence: TTGAGTTT
tttactgagatccctagatc

SEQ ID NO: 36012 - DNA, 20 bp, Artificial Sequence
  Description of Artificial Sequence: Synthetic oligonucleotide
  Target: LAMA2; (-) strand; PAM type: NNNNGHTT; PAM sequence: CATGGCTT
aaaccttcctgactaaatct

SEQ ID NO: 36013 - DNA, 20 bp, Artificial Sequence
  Description of Artificial Sequence: Synthetic oligonucleotide
  Target: LAMA2; (-) strand; PAM type: NNNNGHTT; PAM sequence: AATTGCTT
ttggaaacctgaggcaggag

SEQ ID NO: 36014 - DNA, 20 bp, Artificial Sequence
  Description of Artificial Sequence: Synthetic oligonucleotide
  Target: LAMA2; (-) strand; PAM type: NNNNGHTT; PAM sequence: GGTTGTTT
gaaaatatgccgaccatcta

SEQ ID NO: 36015 - DNA, 20 bp, Artificial Sequence
  Description of Artificial Sequence: Synthetic oligonucleotide
  Target: LAMA2; (-) strand; PAM type: NNNNGHTT; PAM sequence: TTGTGCTT
ttcctgtaagttaatgtcaa

SEQ ID NO: 36016 - DNA, 20 bp, Artificial Sequence
  Description of Artificial Sequence: Synthetic oligonucleotide
  Target: LAMA2; (-) strand; PAM type: NNNNGHTT; PAM sequence: GGGAGATT
tccatctaagtgtagggctg

SEQ ID NO: 36017 - DNA, 20 bp, Artificial Sequence
  Description of Artificial Sequence: Synthetic oligonucleotide
  Target: LAMA2; (-) strand; PAM type: NNNNGHTT; PAM sequence: AGAAGTTT
aattatgtcttagatataat

SEQ ID NO: 36018 - DNA, 20 bp, Artificial Sequence
  Description of Artificial Sequence: Synthetic oligonucleotide
  Target: LAMA2; (-) strand; PAM type: NNNNGHTT; PAM sequence: TACTGCTT
tactttggaataccaatttt

SEQ ID NO: 36019 - DNA, 20 bp, Artificial Sequence
  Description of Artificial Sequence: Synthetic oligonucleotide
  Target: LAMA2; (-) strand; PAM type: NNNNGHTT; PAM sequence: TAATGTTT
cccagactagagaagataga

SEQ ID NO: 36020 - DNA, 20 bp, Artificial Sequence
  Description of Artificial Sequence: Synthetic oligonucleotide
  Target: LAMA2; (-) strand; PAM type: NNNNGHTT; PAM sequence: TAATGTTT
atcaagacataattgcatgt

SEQ ID NO: 36021 - DNA, 20 bp, Artificial Sequence
  Description of Artificial Sequence: Synthetic oligonucleotide
  Target: LAMA2; (-) strand; PAM type: NNNNGHTT; PAM sequence: TTAGGATT
tgtgtagaccagaaacaaag

SEQ ID NO: 36022 - DNA, 20 bp, Artificial Sequence
  Description of Artificial Sequence: Synthetic oligonucleotide
  Target: LAMA2; (-) strand; PAM type: NNNNGHTT; PAM sequence: GCAAGATT
tcgtgataagagcattagaa

SEQ ID NO: 36023 - DNA, 20 bp, Artificial Sequence
  Description of Artificial Sequence: Synthetic oligonucleotide
  Target: LAMA2; (-) strand; PAM type: NNNNGHTT; PAM sequence: TGCAGATT
tggattgctgctgttttgat

SEQ ID NO: 36024 - DNA, 20 bp, Artificial Sequence
  Description of Artificial Sequence: Synthetic oligonucleotide
  Target: LAMA2; (-) strand; PAM type: NNNNGHTT; PAM sequence: TTTTGATT
tacggtttggattgctgctg

SEQ ID NO: 36025 - DNA, 20 bp, Artificial Sequence
  Description of Artificial Sequence: Synthetic oligonucleotide
  Target: LAMA2; (-) strand; PAM type: NNNNGHTT; PAM sequence: TGCTGTTT
atacatacggtttggattgc

SEQ ID NO: 36026 - DNA, 20 bp, Artificial Sequence
  Description of Artificial Sequence: Synthetic oligonucleotide
  Target: LAMA2; (-) strand; PAM type: NNNNGHTT; PAM sequence: TTTGGATT
acacactaaaatacatacgg

SEQ ID NO: 36027 - DNA, 20 bp, Artificial Sequence
  Description of Artificial Sequence: Synthetic oligonucleotide
  Target: LAMA2; (-) strand; PAM type: NNNNGHTT; PAM sequence: TACGGTTT
cacctacacactaaaataca

SEQ ID NO: 36028 - DNA, 20 bp, Artificial Sequence
  Description of Artificial Sequence: Synthetic oligonucleotide
  Target: LAMA2; (-) strand; PAM type: NNNNGHTT; PAM sequence: TAATGTTT
gcacatagcaggaactccaa

SEQ ID NO: 36029 - DNA, 20 bp, Artificial Sequence
  Description of Artificial Sequence: Synthetic oligonucleotide
  Target: LAMA2; (-) strand; PAM type: NNNNGHTT; PAM sequence: ATCAGCTT
tttagctcatgtccttggtc

SEQ ID NO: 36030 - DNA, 20 bp, Artificial Sequence
  Description of Artificial Sequence: Synthetic oligonucleotide
  Target: LAMA2; (-) strand; PAM type: NNNNGHTT; PAM sequence: CCTTGTTT
tttacctgtttatctcatac

SEQ ID NO: 36031 - DNA, 20 bp, Artificial Sequence
  Description of Artificial Sequence: Synthetic oligonucleotide
  Target: LAMA2; (-) strand; PAM type: NNNNGHTT; PAM sequence: ACCTGTTT
ttcccctccctcacctcttt

SEQ ID NO: 36032 - DNA, 20 bp, Artificial Sequence
  Description of Artificial Sequence: Synthetic oligonucleotide
  Target: LAMA2; (-) strand; PAM type: NNNNGHTT; PAM sequence: TTCTGATT
aactaggattttctgtctaa

SEQ ID NO: 36033 - DNA, 20 bp, Artificial Sequence
  Description of Artificial Sequence: Synthetic oligonucleotide
  Target: LAMA2; (-) strand; PAM type: NNNNGHTT; PAM sequence: CTAGGATT
acttgtagctccccgagtaa

SEQ ID NO: 36034 - DNA, 20 bp, Artificial Sequence
  Description of Artificial Sequence: Synthetic oligonucleotide
  Target: LAMA2; (-) strand; PAM type: NNNNGHTT; PAM sequence: GAGGGCTT
tggttcatagaggctggaaa

SEQ ID NO: 36035 - DNA, 20 bp, Artificial Sequence
  Description of Artificial Sequence: Synthetic oligonucleotide
  Target: LAMA2; (-) strand; PAM type: NNNNGHTT; PAM sequence: CAATGCTT
tttaacattatgctccaata

SEQ ID NO: 36036 - DNA, 20 bp, Artificial Sequence
  Description of Artificial Sequence: Synthetic oligonucleotide
  Target: LAMA2; (-) strand; PAM type: NNNNGHTT; PAM sequence: TAAAGATT
cagatagagatatatagata

SEQ ID NO: 36037 - DNA, 20 bp, Artificial Sequence
  Description of Artificial Sequence: Synthetic oligonucleotide
  Target: LAMA2; (-) strand; PAM type: NNNNGHTT; PAM sequence: TGTAGATT
aatatatatttttaccttta

SEQ ID NO: 36038 - DNA, 20 bp, Artificial Sequence
  Description of Artificial Sequence: Synthetic oligonucleotide
  Target: LAMA2; (-) strand; PAM type: NNNNGHTT; PAM sequence: GTGAGATT
actccagcctgggtgacaga

SEQ ID NO: 36039 - DNA, 20 bp, Artificial Sequence
  Description of Artificial Sequence: Synthetic oligonucleotide
  Target: LAMA2; (-) strand; PAM type: NNNNGHTT; PAM sequence: AATTGCTT
tcgggaggctgaggcaggag

SEQ ID NO: 36040 - DNA, 20 bp, Artificial Sequence
  Description of Artificial Sequence: Synthetic oligonucleotide
  Target: LAMA2; (-) strand; PAM type: NNNNGHTT; PAM sequence: AGGAGTTT
gcgggtgatcacttgaggtc

SEQ ID NO: 36041 - DNA, 20 bp, Artificial Sequence
  Description of Artificial Sequence: Synthetic oligonucleotide
  Target: LAMA2; (-) strand; PAM type: NNNNGHTT; PAM sequence: TCAGGCTT
ccaatggtggtttccctcca

SEQ ID NO: 36042 - DNA, 20 bp, Artificial Sequence
  Description of Artificial Sequence: Synthetic oligonucleotide
  Target: LAMA2; (-) strand; PAM type: NNNNGHTT; PAM sequence: GGTGGTTT
ccaccagtctctgaaccaat

SEQ ID NO: 36043 - DNA, 20 bp, Artificial Sequence
  Description of Artificial Sequence: Synthetic oligonucleotide
  Target: LAMA2; (-) strand; PAM type: NNNNGHTT; PAM sequence: CTGGGCTT
ccacaactccgttcatgccc

SEQ ID NO: 36044 - DNA, 20 bp, Artificial Sequence
  Description of Artificial Sequence: Synthetic oligonucleotide
  Target: LAMA2; (-) strand; PAM type: NNNNGHTT; PAM sequence: TATGGTTT
tgcatacatatacacacact

SEQ ID NO: 36045 - DNA, 20 bp, Artificial Sequence
  Description of Artificial Sequence: Synthetic oligonucleotide
  Target: LAMA2; (-) strand; PAM type: NNNNGHTT; PAM sequence: TGAAGCTT
attttaaaataatataattg

SEQ ID NO: 36046 - DNA, 20 bp, Artificial Sequence
  Description of Artificial Sequence: Synthetic oligonucleotide
  Target: LAMA2; (-) strand; PAM type: NNNNGHTT; PAM sequence: CGGAGCTT
aatggcgtgaacccgggagg

SEQ ID NO: 36047 - DNA, 20 bp, Artificial Sequence
  Description of Artificial Sequence: Synthetic oligonucleotide
  Target: LAMA2; (-) strand; PAM type: NNNNGHTT; PAM sequence: AGGAGATT
ggcgggcatatcacgagatc

SEQ ID NO: 36048 - DNA, 20 bp, Artificial Sequence
  Description of Artificial Sequence: Synthetic oligonucleotide
  Target: LAMA2; (-) strand; PAM type: NNNNGHTT; PAM sequence: GGGGGATT
aacaaatgtagcactctgga

SEQ ID NO: 36049 - DNA, 20 bp, Artificial Sequence
  Description of Artificial Sequence: Synthetic oligonucleotide
  Target: LAMA2; (-) strand; PAM type: NNNNGHTT; PAM sequence: TGAAGTTT
gtaaaccctaatgcagtcta

SEQ ID NO: 36050 - DNA, 20 bp, Artificial Sequence
  Description of Artificial Sequence: Synthetic oligonucleotide
  Target: LAMA2; (-) strand; PAM type: NNNNGHTT; PAM sequence: ATAAGTTT
aatggtagatatatatcatt

SEQ ID NO: 36051 - DNA, 20 bp, Artificial Sequence
  Description of Artificial Sequence: Synthetic oligonucleotide
  Target: LAMA2; (-) strand; PAM type: NNNNGHTT; PAM sequence: TAATGTTT
tgtcaattgctgaaatatag

SEQ ID NO: 36052 - DNA, 20 bp, Artificial Sequence
  Description of Artificial Sequence: Synthetic oligonucleotide
  Target: LAMA2; (-) strand; PAM type: NNNNGHTT; PAM sequence: ACATGTTT
ttgccttctttggtgtctta

SEQ ID NO: 36053 - DNA, 20 bp, Artificial Sequence
  Description of Artificial Sequence: Synthetic oligonucleotide
  Target: LAMA2; (-) strand; PAM type: NNNNGHTT; PAM sequence: AAAGGTTT
taaccagagtcattaatagg

SEQ ID NO: 36054 - DNA, 20 bp, Artificial Sequence
  Description of Artificial Sequence: Synthetic oligonucleotide
  Target: LAMA2; (-) strand; PAM type: NNNNGHTT; PAM sequence: CTTGGCTT
actccatttacctgaactcc

SEQ ID NO: 36055 - DNA, 20 bp, Artificial Sequence
  Description of Artificial Sequence: Synthetic oligonucleotide
  Target: LAMA2; (-) strand; PAM type: NNNNGHTT; PAM sequence: ATCTGTTT
cctgatttttttcccttgaa

SEQ ID NO: 36056 - DNA, 20 bp, Artificial Sequence
  Description of Artificial Sequence: Synthetic oligonucleotide
  Target: LAMA2; (-) strand; PAM type: NNNNGHTT; PAM sequence: TCCTGATT
acatacctaatgcctcattt

SEQ ID NO: 36057 - DNA, 20 bp, Artificial Sequence
  Description of Artificial Sequence: Synthetic oligonucleotide
  Target: LAMA2; (-) strand; PAM type: NNNNGHTT; PAM sequence: TTATGCTT
aaaagcaagggaaacctatt

SEQ ID NO: 36058 - DNA, 20 bp, Artificial Sequence
  Description of Artificial Sequence: Synthetic oligonucleotide
  Target: LAMA2; (-) strand; PAM type: NNNNGHTT; PAM sequence: ATATGTTT
ttgcctatgcttaatgaccc

SEQ ID NO: 36059 - DNA, 20 bp, Artificial Sequence
  Description of Artificial Sequence: Synthetic oligonucleotide
  Target: LAMA2; (-) strand; PAM type: NNNNGHTT; PAM sequence: CTATGCTT
ttctaatataaggtttttgc

SEQ ID NO: 36060 - DNA, 20 bp, Artificial Sequence
  Description of Artificial Sequence: Synthetic oligonucleotide
  Target: LAMA2; (-) strand; PAM type: NNNNGHTT; PAM sequence: TAAGGTTT
aaagtatgtatcttctaata

SEQ ID NO: 36061 - DNA, 20 bp, Artificial Sequence
  Description of Artificial Sequence: Synthetic oligonucleotide
  Target: LAMA2; (-) strand; PAM type: NNNNGHTT; PAM sequence: TTCTGATT
tgctattcattctttcttct

SEQ ID NO: 36062 - DNA, 20 bp, Artificial Sequence
  Description of Artificial Sequence: Synthetic oligonucleotide
  Target: LAMA2; (-) strand; PAM type: NNNNGHTT; PAM sequence: CCCAGATT
cttctttcctcagcaggtaa

SEQ ID NO: 36063 - DNA, 20 bp, Artificial Sequence
  Description of Artificial Sequence: Synthetic oligonucleotide
  Target: LAMA2; (-) strand; PAM type: NNNNGHTT; PAM sequence: GTTTGCTT
gagaggctcataatctaaat

SEQ ID NO: 36064 - DNA, 20 bp, Artificial Sequence
  Description of Artificial Sequence: Synthetic oligonucleotide
  Target: LAMA2; (-) strand; PAM type: NNNNGHTT; PAM sequence: AAATGTTT
ccctgagaggctcataatct

SEQ ID NO: 36065 - DNA, 20 bp, Artificial Sequence
  Description of Artificial Sequence: Synthetic oligonucleotide
  Target: LAMA2; (-) strand; PAM type: NNNNGHTT; PAM sequence: TTCTGATT
catatggaattgccacttta

SEQ ID NO: 36066 - DNA, 20 bp, Artificial Sequence
  Description of Artificial Sequence: Synthetic oligonucleotide
  Target: LAMA2; (-) strand; PAM type: NNNNGHTT; PAM sequence: GTTTGATT
ccaagagtatcagtccacac

SEQ ID NO: 36067 - DNA, 20 bp, Artificial Sequence
  Description of Artificial Sequence: Synthetic oligonucleotide
  Target: LAMA2; (-) strand; PAM type: NNNNGHTT; PAM sequence: ACACGTTT
tgctccaagagtatcagtcc

SEQ ID NO: 36068 - DNA, 20 bp, Artificial Sequence
  Description of Artificial Sequence: Synthetic oligonucleotide
  Target: LAMA2; (-) strand; PAM type: NNNNGHTT; PAM sequence: TCAGGCTT
ccaatggtagtttccctcca

SEQ ID NO: 36069 - DNA, 20 bp, Artificial Sequence
  Description of Artificial Sequence: Synthetic oligonucleotide
  Target: LAMA2; (-) strand; PAM type: NNNNGHTT; PAM sequence: GGTAGTTT
ccaccagtccctgaaccaat

SEQ ID NO: 36070 - DNA, 20 bp, Artificial Sequence
  Description of Artificial Sequence: Synthetic oligonucleotide
  Target: LAMA2; (-) strand; PAM type: NNNNGHTT; PAM sequence: CTGGGCTT
ccacaactccgttcatgccc

SEQ ID NO: 36071 - DNA, 20 bp, Artificial Sequence
  Description of Artificial Sequence: Synthetic oligonucleotide
  Target: LAMA2; (-) strand; PAM type: NNNNGHTT; PAM sequence: TATGGTTT
tgcatacatatacacacact

SEQ ID NO: 36072 - DNA, 20 bp, Artificial Sequence
  Description of Artificial Sequence: Synthetic oligonucleotide
  Target: LAMA2; (-) strand; PAM type: NNNNGHTT; PAM sequence: TCATGTTT
tatattacatatcatatatt

SEQ ID NO: 36073 - DNA, 20 bp, Artificial Sequence
  Description of Artificial Sequence: Synthetic oligonucleotide
  Target: LAMA2; (-) strand; PAM type: NNNNGHTT; PAM sequence: TTATGATT
atcattcctccatcccattt

SEQ ID NO: 36074 - DNA, 20 bp, Artificial Sequence
  Description of Artificial Sequence: Synthetic oligonucleotide
  Target: LAMA2; (-) strand; PAM type: NNNNGHTT; PAM sequence: AATAGCTT
ttcaagagggtgaaagacag

SEQ ID NO: 36075 - DNA, 20 bp, Artificial Sequence
  Description of Artificial Sequence: Synthetic oligonucleotide
  Target: LAMA2; (-) strand; PAM type: NNNNGHTT; PAM sequence: TTTGGTTT
actgaaataattgattcatt

SEQ ID NO: 36076 - DNA, 20 bp, Artificial Sequence
  Description of Artificial Sequence: Synthetic oligonucleotide
  Target: LAMA2; (-) strand; PAM type: NNNNGHTT; PAM sequence: AATTGATT
acaccttgctttactgaaat

SEQ ID NO: 36077 - DNA, 20 bp, Artificial Sequence
  Description of Artificial Sequence: Synthetic oligonucleotide
  Target: LAMA2; (-) strand; PAM type: NNNNGHTT; PAM sequence: CCTTGCTT
caaatcataacttatataca

SEQ ID NO: 36078 - DNA, 20 bp, Artificial Sequence
  Description of Artificial Sequence: Synthetic oligonucleotide
  Target: LAMA2; (-) strand; PAM type: NNNNGHTT; PAM sequence: ACTGGTTT
taaagtaaatccagactgtg

SEQ ID NO: 36079 - DNA, 20 bp, Artificial Sequence
  Description of Artificial Sequence: Synthetic oligonucleotide
  Target: LAMA2; (-) strand; PAM type: NNNNGHTT; PAM sequence: CCAAGATT
gaggcgaaggttgcagtgag

SEQ ID NO: 36080 - DNA, 20 bp, Artificial Sequence
  Description of Artificial Sequence: Synthetic oligonucleotide
  Target: LAMA2; (-) strand; PAM type: NNNNGHTT; PAM sequence: AATCGCTT
tcaggaggctgaggcttgag

SEQ ID NO: 36081 - DNA, 20 bp, Artificial Sequence
  Description of Artificial Sequence: Synthetic oligonucleotide
  Target: LAMA2; (-) strand; PAM type: NNNNGHTT; PAM sequence: TGAGGCTT
gtcccagctactcaggaggc

SEQ ID NO: 36082 - DNA, 20 bp, Artificial Sequence
  Description of Artificial Sequence: Synthetic oligonucleotide
  Target: LAMA2; (-) strand; PAM type: NNNNGHTT; PAM sequence: TGGGGTTT
ttgctagatttttattcttg

SEQ ID NO: 36083 - DNA, 20 bp, Artificial Sequence
  Description of Artificial Sequence: Synthetic oligonucleotide
  Target: LAMA2; (-) strand; PAM type: NNNNGHTT; PAM sequence: GCTAGATT
atatattcatgcagttgatt

SEQ ID NO: 36084 - DNA, 20 bp, Artificial Sequence
  Description of Artificial Sequence: Synthetic oligonucleotide
  Target: LAMA2; (-) strand; PAM type: NNNNGHTT; PAM sequence: AGTTGATT
ttactaaaatatattcatgc

SEQ ID NO: 36085 - DNA, 20 bp, Artificial Sequence
  Description of Artificial Sequence: Synthetic oligonucleotide
  Target: LAMA2; (-) strand; PAM type: NNNNGHTT; PAM sequence: GTTCGTTT
ctattaacagaaagttcaag

SEQ ID NO: 36086 - DNA, 20 bp, Artificial Sequence
  Description of Artificial Sequence: Synthetic oligonucleotide
  Target: LAMA2; (-) strand; PAM type: NNNNGHTT; PAM sequence: GCTAGCTT
tgaggtaaacctttcaaact

SEQ ID NO: 36087 - DNA, 20 bp, Artificial Sequence
  Description of Artificial Sequence: Synthetic oligonucleotide
  Target: LAMA2; (-) strand; PAM type: NNNNGHTT; PAM sequence: GAAAGTTT
ttaaccataatccctattat

SEQ ID NO: 36088 - DNA, 20 bp, Artificial Sequence
  Description of Artificial Sequence: Synthetic oligonucleotide
  Target: LAMA2; (-) strand; PAM type: NNNNGHTT; PAM sequence: GTGCGTTT
ctgaatcttttttacagatt

SEQ ID NO: 36089 - DNA, 20 bp, Artificial Sequence
  Description of Artificial Sequence: Synthetic oligonucleotide
  Target: LAMA2; (-) strand; PAM type: NNNNGHTT; PAM sequence: TACAGATT
acatcctcctgaatcttttt

SEQ ID NO: 36090 - DNA, 20 bp, Artificial Sequence
  Description of Artificial Sequence: Synthetic oligonucleotide
  Target: LAMA2; (-) strand; PAM type: NNNNGHTT; PAM sequence: TGAGGCTT
atgttagcagtccatagaga

SEQ ID NO: 36091 - DNA, 20 bp, Artificial Sequence
  Description of Artificial Sequence: Synthetic oligonucleotide
  Target: LAMA2; (-) strand; PAM type: NNNNGHTT; PAM sequence: CTATGTTT
atttactgaaaacatgaaga

SEQ ID NO: 36092 - DNA, 20 bp, Artificial Sequence
  Description of Artificial Sequence: Synthetic oligonucleotide
  Target: LAMA2; (-) strand; PAM type: NNNNGHTT; PAM sequence: TGAAGATT
atttggcattttcagatttg

SEQ ID NO: 36093 - DNA, 20 bp, Artificial Sequence
  Description of Artificial Sequence: Synthetic oligonucleotide
  Target: LAMA2; (-) strand; PAM type: NNNNGHTT; PAM sequence: TTCAGATT
tattcactaaatttggcatt

SEQ ID NO: 36094 - DNA, 20 bp, Artificial Sequence
  Description of Artificial Sequence: Synthetic oligonucleotide
  Target: LAMA2; (-) strand; PAM type: NNNNGHTT; PAM sequence: CACTGTTT
atacatctattcaaaatgta

SEQ ID NO: 36095 - DNA, 20 bp, Artificial Sequence
  Description of Artificial Sequence: Synthetic oligonucleotide
  Target: LAMA2; (-) strand; PAM type: NNNNGHTT; PAM sequence: ATTAGTTT
aagggcatttaaaaaccatc

SEQ ID NO: 36096 - DNA, 20 bp, Artificial Sequence
  Description of Artificial Sequence: Synthetic oligonucleotide
  Target: LAMA2; (-) strand; PAM type: NNNNGHTT; PAM sequence: CTTAGTTT
ttgatataggagttctagct

SEQ ID NO: 36097 - DNA, 20 bp, Artificial Sequence
  Description of Artificial Sequence: Synthetic oligonucleotide
  Target: LAMA2; (-) strand; PAM type: NNNNGHTT; PAM sequence: GATCGATT
gaaattaaaaataaatgtgt

SEQ ID NO: 36098 - DNA, 20 bp, Artificial Sequence
  Description of Artificial Sequence: Synthetic oligonucleotide
  Target: LAMA2; (-) strand; PAM type: NNNNGHTT; PAM sequence: TCCAGATT
ttccgctcacagcagtggtt

SEQ ID NO: 36099 - DNA, 20 bp, Artificial Sequence
  Description of Artificial Sequence: Synthetic oligonucleotide
  Target: LAMA2; (-) strand; PAM type: NNNNGHTT; PAM sequence: AGTGGTTT
aacaaaattccgctcacagc

SEQ ID NO: 36100 - DNA, 20 bp, Artificial Sequence
  Description of Artificial Sequence: Synthetic oligonucleotide
  Target: LAMA2; (-) strand; PAM type: NNNNGHTT; PAM sequence: TTTAGATT
gagtggcttatgaatgacct

SEQ ID NO: 36101 - DNA, 20 bp, Artificial Sequence
  Description of Artificial Sequence: Synthetic oligonucleotide
  Target: LAMA2; (-) strand; PAM type: NNNNGHTT; PAM sequence: AGTGGCTT
ctgggaagatgtttcgaatg

SEQ ID NO: 36102 - DNA, 20 bp, Artificial Sequence
  Description of Artificial Sequence: Synthetic oligonucleotide
  Target: LAMA2; (-) strand; PAM type: NNNNGHTT; PAM sequence: AGATGTTT
ataaaactaagtatctggga

SEQ ID NO: 36103 - DNA, 20 bp, Artificial Sequence
  Description of Artificial Sequence: Synthetic oligonucleotide
  Target: LAMA2; (-) strand; PAM type: NNNNGHTT; PAM sequence: GGATGCTT
ctgtgtttattatagattaa

SEQ ID NO: 36104 - DNA, 20 bp, Artificial Sequence
  Description of Artificial Sequence: Synthetic oligonucleotide
  Target: LAMA2; (-) strand; PAM type: NNNNGHTT; PAM sequence: TATAGATT
ccctgtactcctgtgtttat

SEQ ID NO: 36105 - DNA, 20 bp, Artificial Sequence
  Description of Artificial Sequence: Synthetic oligonucleotide
  Target: LAMA2; (-) strand; PAM type: NNNNGHTT; PAM sequence: CTGTGTTT
aggtgagcttccctgtactc

SEQ ID NO: 36106 - DNA, 20 bp, Artificial Sequence
  Description of Artificial Sequence: Synthetic oligonucleotide
  Target: LAMA2; (-) strand; PAM type: NNNNGHTT; PAM sequence: GTGAGCTT
gaaatgtaaacaaagtggag

SEQ ID NO: 36107 - DNA, 20 bp, Artificial Sequence
  Description of Artificial Sequence: Synthetic oligonucleotide
  Target: LAMA2; (-) strand; PAM type: NNNNGHTT; PAM sequence: TCCTGTTT
ggagtggaggctgttgatga

SEQ ID NO: 36108 - DNA, 20 bp, Artificial Sequence
  Description of Artificial Sequence: Synthetic oligonucleotide
  Target: LAMA2; (-) strand; PAM type: NNNNGHTT; PAM sequence: CTTTGCTT
cattggttcttgtctaaaat

SEQ ID NO: 36109 - DNA, 20 bp, Artificial Sequence
  Description of Artificial Sequence: Synthetic oligonucleotide
  Target: LAMA2; (-) strand; PAM type: NNNNGHTT; PAM sequence: CACAGTTT
ttcttacaatcctcaaagct

SEQ ID NO: 36110 - DNA, 20 bp, Artificial Sequence
  Description of Artificial Sequence: Synthetic oligonucleotide
  Target: LAMA2; (-) strand; PAM type: NNNNGHTT; PAM sequence: GGGAGATT
accaattgtgaaaatcaaaa

SEQ ID NO: 36111 - DNA, 20 bp, Artificial Sequence
  Description of Artificial Sequence: Synthetic oligonucleotide
  Target: LAMA2; (-) strand; PAM type: NNNNGHTT; PAM sequence: AGAAGCTT
agttttcccttggcccttac

SEQ ID NO: 36112 - DNA, 20 bp, Artificial Sequence
  Description of Artificial Sequence: Synthetic oligonucleotide
  Target: LAMA2; (-) strand; PAM type: NNNNGHTT; PAM sequence: AGAAGTTT
aaaccttcagagggcaaaag

SEQ ID NO: 36113 - DNA, 20 bp, Artificial Sequence
  Description of Artificial Sequence: Synthetic oligonucleotide
  Target: LAMA2; (-) strand; PAM type: NNNNGHTT; PAM sequence: AGTTGATT
ctaccaagctaacttttttc

SEQ ID NO: 36114 - DNA, 20 bp, Artificial Sequence
  Description of Artificial Sequence: Synthetic oligonucleotide
  Target: LAMA2; (-) strand; PAM type: NNNNGHTT; PAM sequence: CTGTGATT
gttattgggtaatcatcctc

SEQ ID NO: 36115 - DNA, 20 bp, Artificial Sequence
  Description of Artificial Sequence: Synthetic oligonucleotide
  Target: LAMA2; (-) strand; PAM type: NNNNGHTT; PAM sequence: TTAAGTTT
gtttcctctggccctcttgc

SEQ ID NO: 36116 - DNA, 20 bp, Artificial Sequence
  Description of Artificial Sequence: Synthetic oligonucleotide
  Target: LAMA2; (-) strand; PAM type: NNNNGHTT; PAM sequence: TCTTGCTT
ggaaaagtttcctctggccc

SEQ ID NO: 36117 - DNA, 20 bp, Artificial Sequence
  Description of Artificial Sequence: Synthetic oligonucleotide
  Target: LAMA2; (-) strand; PAM type: NNNNGHTT; PAM sequence: AAAAGTTT
agtctgatcccaccaggagg

SEQ ID NO: 36118 - DNA, 20 bp, Artificial Sequence
  Description of Artificial Sequence: Synthetic oligonucleotide
  Target: LAMA2; (-) strand; PAM type: NNNNGHTT; PAM sequence: ATAAGTTT
ggagaccagcaaatgctgaa

SEQ ID NO: 36119 - DNA, 20 bp, Artificial Sequence
  Description of Artificial Sequence: Synthetic oligonucleotide
  Target: LAMA2; (-) strand; PAM type: NNNNGHTT; PAM sequence: TGCTGATT
gaaaatatagcatgctggta

SEQ ID NO: 36120 - DNA, 20 bp, Artificial Sequence
  Description of Artificial Sequence: Synthetic oligonucleotide
  Target: LAMA2; (-) strand; PAM type: NNNNGHTT; PAM sequence: TCTGGTTT
cgtagggagtccaatatata

SEQ ID NO: 36121 - DNA, 20 bp, Artificial Sequence
  Description of Artificial Sequence: Synthetic oligonucleotide
  Target: LAMA2; (-) strand; PAM type: NNNNGHTT; PAM sequence: AAATGCTT
caaggtagcaggaaatgttt

SEQ ID NO: 36122 - DNA, 20 bp, Artificial Sequence
  Description of Artificial Sequence: Synthetic oligonucleotide
  Target: LAMA2; (-) strand; PAM type: NNNNGHTT; PAM sequence: AAATGTTT
gcaccatacaaggtagcagg

SEQ ID NO: 36123 - DNA, 20 bp, Artificial Sequence
  Description of Artificial Sequence: Synthetic oligonucleotide
  Target: LAMA2; (-) strand; PAM type: NNNNGHTT; PAM sequence: TTCAGATT
ataatacagaaggagagtaa

SEQ ID NO: 36124 - DNA, 20 bp, Artificial Sequence
  Description of Artificial Sequence: Synthetic oligonucleotide
  Target: LAMA2; (-) strand; PAM type: NNNNGHTT; PAM sequence: TATAGCTT
aaaagatcatataactagtt

SEQ ID NO: 36125 - DNA, 20 bp, Artificial Sequence
  Description of Artificial Sequence: Synthetic oligonucleotide
  Target: LAMA2; (-) strand; PAM type: NNNNGHTT; PAM sequence: ACTAGTTT
gaagaagaaaagatcatata

SEQ ID NO: 36126 - DNA, 20 bp, Artificial Sequence
  Description of Artificial Sequence: Synthetic oligonucleotide
  Target: LAMA2; (-) strand; PAM type: NNNNGHTT; PAM sequence: ATTCGATT
ggtaattgtcacataatggt

SEQ ID NO: 36127 - DNA, 20 bp, Artificial Sequence
  Description of Artificial Sequence: Synthetic oligonucleotide
  Target: LAMA2; (-) strand; PAM type: NNNNGHTT; PAM sequence: TTGTGCTT
ttcacgtgcttccatttgaa

SEQ ID NO: 36128 - DNA, 20 bp, Artificial Sequence
  Description of Artificial Sequence: Synthetic oligonucleotide
  Target: LAMA2; (-) strand; PAM type: NNNNGHTT; PAM sequence: ACGTGCTT
aattcatttctaagctcttc

SEQ ID NO: 36129 - DNA, 20 bp, Artificial Sequence
  Description of Artificial Sequence: Synthetic oligonucleotide
  Target: LAMA2; (-) strand; PAM type: NNNNGHTT; PAM sequence: CCAAGTTT
ttgttacttcatttagtcac

SEQ ID NO: 36130 - DNA, 20 bp, Artificial Sequence
  Description of Artificial Sequence: Synthetic oligonucleotide
  Target: LAMA2; (-) strand; PAM type: NNNNGHTT; PAM sequence: CAAAGCTT
gcatcaattttgtataacta

SEQ ID NO: 36131 - DNA, 20 bp, Artificial Sequence
  Description of Artificial Sequence: Synthetic oligonucleotide
  Target: LAMA2; (-) strand; PAM type: NNNNGHTT; PAM sequence: AAGAGATT
tattgtgaagagaaggaaga

SEQ ID NO: 36132 - DNA, 20 bp, Artificial Sequence
  Description of Artificial Sequence: Synthetic oligonucleotide
  Target: LAMA2; (-) strand; PAM type: NNNNGHTT; PAM sequence: TCCTGATT
taatttgaggtgctggcgat

SEQ ID NO: 36133 - DNA, 20 bp, Artificial Sequence
  Description of Artificial Sequence: Synthetic oligonucleotide
  Target: LAMA2; (-) strand; PAM type: NNNNGHTT; PAM sequence: TGGCGATT
gcctaaataatttgaggtgc

SEQ ID NO: 36134 - DNA, 20 bp, Artificial Sequence
  Description of Artificial Sequence: Synthetic oligonucleotide
  Target: LAMA2; (-) strand; PAM type: NNNNGHTT; PAM sequence: GGGGGCTT
gctgatctggcccactggct

SEQ ID NO: 36135 - DNA, 20 bp, Artificial Sequence
  Description of Artificial Sequence: Synthetic oligonucleotide
  Target: LAMA2; (-) strand; PAM type: NNNNGHTT; PAM sequence: GGGAGATT
tgaacctagacactggagga

SEQ ID NO: 36136 - DNA, 20 bp, Artificial Sequence
  Description of Artificial Sequence: Synthetic oligonucleotide
  Target: LAMA2; (-) strand; PAM type: NNNNGHTT; PAM sequence: GCCAGCTT
ccaccagcttgtttgctcca

SEQ ID NO: 36137 - DNA, 20 bp, Artificial Sequence
  Description of Artificial Sequence: Synthetic oligonucleotide
  Target: LAMA2; (-) strand; PAM type: NNNNGHTT; PAM sequence: GCTTGTTT
gtctaccgtgcaatccacca

SEQ ID NO: 36138 - DNA, 20 bp, Artificial Sequence
  Description of Artificial Sequence: Synthetic oligonucleotide
  Target: LAMA2; (-) strand; PAM type: NNNNGHTT; PAM sequence: ACCAGCTT
gcaggtctaccgtgcaatcc

SEQ ID NO: 36139 - DNA, 20 bp, Artificial Sequence
  Description of Artificial Sequence: Synthetic oligonucleotide
  Target: LAMA2; (-) strand; PAM type: NNNNGHTT; PAM sequence: GGTAGCTT
aaagcatgattgatcagtgt

SEQ ID NO: 36140 - DNA, 20 bp, Artificial Sequence
  Description of Artificial Sequence: Synthetic oligonucleotide
  Target: LAMA2; (-) strand; PAM type: NNNNGHTT; PAM sequence: GCATGATT
acaggattaattttcctaaa

SEQ ID NO: 36141 - DNA, 20 bp, Artificial Sequence
  Description of Artificial Sequence: Synthetic oligonucleotide
  Target: LAMA2; (-) strand; PAM type: NNNNGHTT; PAM sequence: ACAGGATT
gatccccaggggattcatgc

SEQ ID NO: 36142 - DNA, 20 bp, Artificial Sequence
  Description of Artificial Sequence: Synthetic oligonucleotide
  Target: LAMA2; (-) strand; PAM type: NNNNGHTT; PAM sequence: AGGGGATT
attttgaggctaagatcccc

SEQ ID NO: 36143 - DNA, 20 bp, Artificial Sequence
  Description of Artificial Sequence: Synthetic oligonucleotide
  Target: LAMA2; (-) strand; PAM type: NNNNGHTT; PAM sequence: TCTTGATT
tcaatgcacagcagactcac

SEQ ID NO: 36144 - DNA, 20 bp, Artificial Sequence
  Description of Artificial Sequence: Synthetic oligonucleotide
  Target: LAMA2; (-) strand; PAM type: NNNNGHTT; PAM sequence: TATTGATT
aacaataaagcatcattatt

SEQ ID NO: 36145 - DNA, 20 bp, Artificial Sequence
  Description of Artificial Sequence: Synthetic oligonucleotide
  Target: LAMA2; (-) strand; PAM type: NNNNGHTT; PAM sequence: AAGTGATT
ttcagctcaaagagtactat

SEQ ID NO: 36146 - DNA, 20 bp, Artificial Sequence
  Description of Artificial Sequence: Synthetic oligonucleotide
  Target: LAMA2; (-) strand; PAM type: NNNNGHTT; PAM sequence: CCATGTTT
ttaggaggggaaaaatgctg

SEQ ID NO: 36147 - DNA, 20 bp, Artificial Sequence
  Description of Artificial Sequence: Synthetic oligonucleotide
  Target: LAMA2; (-) strand; PAM type: NNNNGHTT; PAM sequence: AAATGATT
gataaaaacaggcaagttag

SEQ ID NO: 36148 - DNA, 20 bp, Artificial Sequence
  Description of Artificial Sequence: Synthetic oligonucleotide
  Target: LAMA2; (-) strand; PAM type: NNNNGHTT; PAM sequence: ATAGGCTT
atcaatgacatcactgaaaa

SEQ ID NO: 36149 - DNA, 20 bp, Artificial Sequence
  Description of Artificial Sequence: Synthetic oligonucleotide
  Target: LAMA2; (-) strand; PAM type: NNNNGHTT; PAM sequence: GGTTGATT
cttcttctacacacacagta

SEQ ID NO: 36150 - DNA, 20 bp, Artificial Sequence
  Description of Artificial Sequence: Synthetic oligonucleotide
  Target: LAMA2; (-) strand; PAM type: NNNNGHTT; PAM sequence: TAGAGATT
ataaggatttattacatttt

SEQ ID NO: 36151 - DNA, 20 bp, Artificial Sequence
  Description of Artificial Sequence: Synthetic oligonucleotide
  Target: LAMA2; (-) strand; PAM type: NNNNGHTT; PAM sequence: TAAGGATT
aatcttgagtcaagtagaaa

SEQ ID NO: 36152 - DNA, 20 bp, Artificial Sequence
  Description of Artificial Sequence: Synthetic oligonucleotide
  Target: LAMA2; (-) strand; PAM type: NNNNGHTT; PAM sequence: ACCTGTTT
tcacgaaacttgattacaaa

SEQ ID NO: 36153 - DNA, 20 bp, Artificial Sequence
  Description of Artificial Sequence: Synthetic oligonucleotide
  Target: LAMA2; (-) strand; PAM type: NNNNGHTT; PAM sequence: ACTTGATT
ctgagaagttccatcacgaa

SEQ ID NO: 36154 - DNA, 20 bp, Artificial Sequence
  Description of Artificial Sequence: Synthetic oligonucleotide
  Target: LAMA2; (-) strand; PAM type: NNNNGHTT; PAM sequence: CACAGTTT
taagtattataaacatgtct

SEQ ID NO: 36155 - DNA, 20 bp, Artificial Sequence
  Description of Artificial Sequence: Synthetic oligonucleotide
  Target: LAMA2; (-) strand; PAM type: NNNNGHTT; PAM sequence: TCAGGATT
attaatattagctggtttat

SEQ ID NO: 36156 - DNA, 20 bp, Artificial Sequence
  Description of Artificial Sequence: Synthetic oligonucleotide
  Target: LAMA2; (-) strand; PAM type: NNNNGHTT; PAM sequence: GCTGGTTT
caataggaatattaatatta

SEQ ID NO: 36157 - DNA, 20 bp, Artificial Sequence
  Description of Artificial Sequence: Synthetic oligonucleotide
  Target: LAMA2; (-) strand; PAM type: NNNNGHTT; PAM sequence: ATAAGCTT
ttgccccagccctgcccata

SEQ ID NO: 36158 - DNA, 20 bp, Artificial Sequence
  Description of Artificial Sequence: Synthetic oligonucleotide
  Target: LAMA2; (-) strand; PAM type: NNNNGHTT; PAM sequence: TCTGGATT
gaaaagatagtgtatttggg

SEQ ID NO: 36159 - DNA, 20 bp, Artificial Sequence
  Description of Artificial Sequence: Synthetic oligonucleotide
  Target: LAMA2; (-) strand; PAM type: NNNNGHTT; PAM sequence: CTAGGATT
taaaaattatcctgagctcc

SEQ ID NO: 36160 - DNA, 20 bp, Artificial Sequence
  Description of Artificial Sequence: Synthetic oligonucleotide
  Target: LAMA2; (-) strand; PAM type: NNNNGHTT; PAM sequence: CCCTGCTT
agaaaatgagggttctagtc

SEQ ID NO: 36161 - DNA, 20 bp, Artificial Sequence
  Description of Artificial Sequence: Synthetic oligonucleotide
  Target: LAMA2; (-) strand; PAM type: NNNNGHTT; PAM sequence: AGAAGCTT
atgcggtaggtagaaaagac

SEQ ID NO: 36162 - DNA, 20 bp, Artificial Sequence
  Description of Artificial Sequence: Synthetic oligonucleotide
  Target: LAMA2; (-) strand; PAM type: NNNNGHTT; PAM sequence: TTATGTTT
aataaatgcaatcgtttctg

SEQ ID NO: 36163 - DNA, 20 bp, Artificial Sequence
  Description of Artificial Sequence: Synthetic oligonucleotide
  Target: LAMA2; (-) strand; PAM type: NNNNGHTT; PAM sequence: AATCGTTT
tgatttaatcaaataaatgc

SEQ ID NO: 36164 - DNA, 20 bp, Artificial Sequence
  Description of Artificial Sequence: Synthetic oligonucleotide
  Target: LAMA2; (-) strand; PAM type: NNNNGHTT; PAM sequence: TAGTGATT
aaaaaacccactgtaatcta

SEQ ID NO: 36165 - DNA, 20 bp, Artificial Sequence
  Description of Artificial Sequence: Synthetic oligonucleotide
  Target: LAMA2; (-) strand; PAM type: NNNNGHTT; PAM sequence: TAGTGCTT
aaacaaattgctattttttc

SEQ ID NO: 36166 - DNA, 20 bp, Artificial Sequence
  Description of Artificial Sequence: Synthetic oligonucleotide
  Target: LAMA2; (-) strand; PAM type: NNNNGHTT; PAM sequence: GCATGATT
aatctagaagttgaggcaca

SEQ ID NO: 36167 - DNA, 20 bp, Artificial Sequence
  Description of Artificial Sequence: Synthetic oligonucleotide
  Target: LAMA2; (-) strand; PAM type: NNNNGHTT; PAM sequence: TTAAGCTT
tatacacgtcactggaacag

SEQ ID NO: 36168 - DNA, 20 bp, Artificial Sequence
  Description of Artificial Sequence: Synthetic oligonucleotide
  Target: LAMA2; (-) strand; PAM type: NNNNGHTT; PAM sequence: TTGAGTTT
tatttttgttcgcaattata

SEQ ID NO: 36169 - DNA, 20 bp, Artificial Sequence
  Description of Artificial Sequence: Synthetic oligonucleotide
  Target: LAMA2; (-) strand; PAM type: NNNNGHTT; PAM sequence: TAACGTTT
gaatgttttagacatcttat

SEQ ID NO: 36170 - DNA, 20 bp, Artificial Sequence
  Description of Artificial Sequence: Synthetic oligonucleotide
  Target: LAMA2; (-) strand; PAM type: NNNNGHTT; PAM sequence: GAATGTTT
gtaggaaaaagactaaaata

SEQ ID NO: 36171 - DNA, 20 bp, Artificial Sequence
  Description of Artificial Sequence: Synthetic oligonucleotide
  Target: LAMA2; (-) strand; PAM type: NNNNGHTT; PAM sequence: GCTAGATT
agggcatgacggagataatg

SEQ ID NO: 36172 - DNA, 20 bp, Artificial Sequence
  Description of Artificial Sequence: Synthetic oligonucleotide
  Target: LAMA2; (-) strand; PAM type: NNNNGHTT; PAM sequence: ATCAGCTT
ctgttttaccccgcctgcca

SEQ ID NO: 36173 - DNA, 20 bp, Artificial Sequence
  Description of Artificial Sequence: Synthetic oligonucleotide
  Target: LAMA2; (-) strand; PAM type: NNNNGHTT; PAM sequence: CTCTGTTT
tctactgaaaagctgcctcc

SEQ ID NO: 36174 - DNA, 20 bp, Artificial Sequence
  Description of Artificial Sequence: Synthetic oligonucleotide
  Target: LAMA2; (-) strand; PAM type: NNNNGHTT; PAM sequence: ATGTGTTT
ggagtgagtatcacctcaat

SEQ ID NO: 36175 - DNA, 20 bp, Artificial Sequence
  Description of Artificial Sequence: Synthetic oligonucleotide
  Target: LAMA2; (-) strand; PAM type: NNNNGHTT; PAM sequence: CCTGGATT
cttaactaattaatggcatt

SEQ ID NO: 36176 - DNA, 20 bp, Artificial Sequence
  Description of Artificial Sequence: Synthetic oligonucleotide
  Target: LAMA2; (-) strand; PAM type: NNNNGHTT; PAM sequence: ATGAGCTT
agaagactcctagttaagac

SEQ ID NO: 36177 - DNA, 20 bp, Artificial Sequence
  Description of Artificial Sequence: Synthetic oligonucleotide
  Target: LAMA2; (-) strand; PAM type: NNNNGHTT; PAM sequence: AATTGCTT
atagaccaggaagagaagtg

SEQ ID NO: 36178 - DNA, 20 bp, Artificial Sequence
  Description of Artificial Sequence: Synthetic oligonucleotide
  Target: LAMA2; (-) strand; PAM type: NNNNGHTT; PAM sequence: CTTAGTTT
tcttgtttggtaaacgcatt

SEQ ID NO: 36179 - DNA, 20 bp, Artificial Sequence
  Description of Artificial Sequence: Synthetic oligonucleotide
  Target: LAMA2; (-) strand; PAM type: NNNNGHTT; PAM sequence: TCTTGTTT
tctctgtagctgtaagataa

SEQ ID NO: 36180 - DNA, 20 bp, Artificial Sequence
  Description of Artificial Sequence: Synthetic oligonucleotide
  Target: LAMA2; (-) strand; PAM type: NNNNGHTT; PAM sequence: AGTAGTTT
agtaatatttgcatagaaat

SEQ ID NO: 36181 - DNA, 20 bp, Artificial Sequence
  Description of Artificial Sequence: Synthetic oligonucleotide
  Target: LAMA2; (-) strand; PAM type: NNNNGHTT; PAM sequence: CATGGATT
aaatcattttatactattca

SEQ ID NO: 36182 - DNA, 20 bp, Artificial Sequence
  Description of Artificial Sequence: Synthetic oligonucleotide
  Target: LAMA2; (-) strand; PAM type: NNNNGHTT; PAM sequence: CTAGGCTT
taaccattacattaatgatt

SEQ ID NO: 36183 - DNA, 20 bp, Artificial Sequence
  Description of Artificial Sequence: Synthetic oligonucleotide
  Target: LAMA2; (-) strand; PAM type: NNNNGHTT; PAM sequence: TAATGATT
gaaatgtttaaccattacat

SEQ ID NO: 36184 - DNA, 20 bp, Artificial Sequence
  Description of Artificial Sequence: Synthetic oligonucleotide
  Target: LAMA2; (-) strand; PAM type: NNNNGHTT; PAM sequence: AAATGTTT
tttatgttttattattgcag

SEQ ID NO: 36185 - DNA, 20 bp, Artificial Sequence
  Description of Artificial Sequence: Synthetic oligonucleotide
  Target: LAMA2; (-) strand; PAM type: NNNNGHTT; PAM sequence: TTATGTTT
ataaagtatttccacgtatt

SEQ ID NO: 36186 - DNA, 20 bp, Artificial Sequence
  Description of Artificial Sequence: Synthetic oligonucleotide
  Target: LAMA2; (-) strand; PAM type: NNNNGHTT; PAM sequence: AAATGATT
ggatcacctttaatatgttt

SEQ ID NO: 36187 - DNA, 20 bp, Artificial Sequence
  Description of Artificial Sequence: Synthetic oligonucleotide
  Target: LAMA2; (-) strand; PAM type: NNNNGHTT; PAM sequence: ATATGTTT
tgaaaattggatcaccttta

SEQ ID NO: 36188 - DNA, 20 bp, Artificial Sequence
  Description of Artificial Sequence: Synthetic oligonucleotide
  Target: LAMA2; (-) strand; PAM type: NNNNGHTT; PAM sequence: TGTTGTTT
ccattggttgtttgggagta

SEQ ID NO: 36189 - DNA, 20 bp, Artificial Sequence
  Description of Artificial Sequence: Synthetic oligonucleotide
  Target: LAMA2; (-) strand; PAM type: NNNNGHTT; PAM sequence: GGTTGTTT
taattttttctttatccatt

SEQ ID NO: 36190 - DNA, 20 bp, Artificial Sequence
  Description of Artificial Sequence: Synthetic oligonucleotide
  Target: LAMA2; (-) strand; PAM type: NNNNGHTT; PAM sequence: TTTTGCTT
gcctttcttcttagaactgc

SEQ ID NO: 36191 - DNA, 20 bp, Artificial Sequence
  Description of Artificial Sequence: Synthetic oligonucleotide
  Target: LAMA2; (-) strand; PAM type: NNNNGHTT; PAM sequence: AACTGCTT
actatagcctttcttcttag

SEQ ID NO: 36192 - DNA, 20 bp, Artificial Sequence
  Description of Artificial Sequence: Synthetic oligonucleotide
  Target: LAMA2; (-) strand; PAM type: NNNNGHTT; PAM sequence: TTTTGCTT
ttttcttcattttttttttt

SEQ ID NO: 36193 - DNA, 20 bp, Artificial Sequence
  Description of Artificial Sequence: Synthetic oligonucleotide
  Target: LAMA2; (-) strand; PAM type: NNNNGHTT; PAM sequence: CCTAGTTT
ttctttctgctacttctagg

SEQ ID NO: 36194 - DNA, 20 bp, Artificial Sequence
  Description of Artificial Sequence: Synthetic oligonucleotide
  Target: LAMA2; (-) strand; PAM type: NNNNGHTT; PAM sequence: CATTGTTT
acagttttgctaatctcttc

SEQ ID NO: 36195 - DNA, 20 bp, Artificial Sequence
  Description of Artificial Sequence: Synthetic oligonucleotide
  Target: LAMA2; (-) strand; PAM type: NNNNGHTT; PAM sequence: GACAGTTT
atattttccaaaacccaagt

SEQ ID NO: 36196 - DNA, 20 bp, Artificial Sequence
  Description of Artificial Sequence: Synthetic oligonucleotide
  Target: LAMA2; (-) strand; PAM type: NNNNGHTT; PAM sequence: TTTAGCTT
tttagctaaacttttgtcaa

SEQ ID NO: 36197 - DNA, 20 bp, Artificial Sequence
  Description of Artificial Sequence: Synthetic oligonucleotide
  Target: LAMA2; (-) strand; PAM type: NNNNGHTT; PAM sequence: GAAAGTTT
aattctgatcttttttctta

SEQ ID NO: 36198 - DNA, 20 bp, Artificial Sequence
  Description of Artificial Sequence: Synthetic oligonucleotide
  Target: LAMA2; (-) strand; PAM type: NNNNGHTT; PAM sequence: TCCAGTTT
tttccattttttctaggtta

SEQ ID NO: 36199 - DNA, 20 bp, Artificial Sequence
  Description of Artificial Sequence: Synthetic oligonucleotide
  Target: LAMA2; (-) strand; PAM type: NNNNGHTT; PAM sequence: TCATGATT
tgctcatgttatctatttct

SEQ ID NO: 36200 - DNA, 20 bp, Artificial Sequence
  Description of Artificial Sequence: Synthetic oligonucleotide
  Target: LAMA2; (-) strand; PAM type: NNNNGHTT; PAM sequence: TCCTGATT
tttgatagggtatttcttat

SEQ ID NO: 36201 - DNA, 20 bp, Artificial Sequence
  Description of Artificial Sequence: Synthetic oligonucleotide
  Target: LAMA2; (-) strand; PAM type: NNNNGHTT; PAM sequence: CTGGGCTT
agcagtaaaaccatcaggtt

SEQ ID NO: 36202 - DNA, 20 bp, Artificial Sequence
  Description of Artificial Sequence: Synthetic oligonucleotide
  Target: LAMA2; (-) strand; PAM type: NNNNGHTT; PAM sequence: AAATGTTT
aggattggtattagttcctt

SEQ ID NO: 36203 - DNA, 20 bp, Artificial Sequence
  Description of Artificial Sequence: Synthetic oligonucleotide
  Target: LAMA2; (-) strand; PAM type: NNNNGHTT; PAM sequence: GAAGGATT
agttatttggaggattttga

SEQ ID NO: 36204 - DNA, 20 bp, Artificial Sequence
  Description of Artificial Sequence: Synthetic oligonucleotide
  Target: LAMA2; (-) strand; PAM type: NNNNGHTT; PAM sequence: GGAGGATT
tccctcatcttcagttattt

SEQ ID NO: 36205 - DNA, 20 bp, Artificial Sequence
  Description of Artificial Sequence: Synthetic oligonucleotide
  Target: LAMA2; (-) strand; PAM type: NNNNGHTT; PAM sequence: ATAAGTTT
ctaatggctggcctcataaa

SEQ ID NO: 36206 - DNA, 20 bp, Artificial Sequence
  Description of Artificial Sequence: Synthetic oligonucleotide
  Target: LAMA2; (-) strand; PAM type: NNNNGHTT; PAM sequence: TTTGGCTT
tgtacttttcttgcagtgtc

SEQ ID NO: 36207 - DNA, 20 bp, Artificial Sequence
  Description of Artificial Sequence: Synthetic oligonucleotide
  Target: LAMA2; (-) strand; PAM type: NNNNGHTT; PAM sequence: AGGAGTTT
ggtttgttagtattttcttg

SEQ ID NO: 36208 - DNA, 20 bp, Artificial Sequence
  Description of Artificial Sequence: Synthetic oligonucleotide
  Target: LAMA2; (-) strand; PAM type: NNNNGHTT; PAM sequence: TTTGGTTT
ccttttaatgtgctgctgaa

SEQ ID NO: 36209 - DNA, 20 bp, Artificial Sequence
  Description of Artificial Sequence: Synthetic oligonucleotide
  Target: LAMA2; (-) strand; PAM type: NNNNGHTT; PAM sequence: TATAGATT
ctaatgtaaggtatcacatt

SEQ ID NO: 36210 - DNA, 20 bp, Artificial Sequence
  Description of Artificial Sequence: Synthetic oligonucleotide
  Target: LAMA2; (-) strand; PAM type: NNNNGHTT; PAM sequence: ATATGATT
ctgcatctattgagatgatc

SEQ ID NO: 36211 - DNA, 20 bp, Artificial Sequence
  Description of Artificial Sequence: Synthetic oligonucleotide
  Target: LAMA2; (-) strand; PAM type: NNNNGHTT; PAM sequence: AAATGCTT
aaacaatgttgaattttgtc

SEQ ID NO: 36212 - DNA, 20 bp, Artificial Sequence
  Description of Artificial Sequence: Synthetic oligonucleotide
  Target: LAMA2; (-) strand; PAM type: NNNNGHTT; PAM sequence: GACAGCTT
ccttctatagctaatttgtt

SEQ ID NO: 36213 - DNA, 20 bp, Artificial Sequence
  Description of Artificial Sequence: Synthetic oligonucleotide
  Target: LAMA2; (-) strand; PAM type: NNNNGHTT; PAM sequence: TTCAGCTT
ctgatcttagagaaaaacct

SEQ ID NO: 36214 - DNA, 20 bp, Artificial Sequence
  Description of Artificial Sequence: Synthetic oligonucleotide
  Target: LAMA2; (-) strand; PAM type: NNNNGHTT; PAM sequence: GCCTGATT
acaattttatttcttttttt

SEQ ID NO: 36215 - DNA, 20 bp, Artificial Sequence
  Description of Artificial Sequence: Synthetic oligonucleotide
  Target: LAMA2; (-) strand; PAM type: NNNNGHTT; PAM sequence: GTAAGATT
ggagtcagggttttctatat

SEQ ID NO: 36216 - DNA, 20 bp, Artificial Sequence
  Description of Artificial Sequence: Synthetic oligonucleotide
  Target: LAMA2; (-) strand; PAM type: NNNNGHTT; PAM sequence: CAGGGTTT
aacagttattttggtggagt

SEQ ID NO: 36217 - DNA, 20 bp, Artificial Sequence
  Description of Artificial Sequence: Synthetic oligonucleotide
  Target: LAMA2; (-) strand; PAM type: NNNNGHTT; PAM sequence: ATTTGTTT
gtatcctgctaatttacaga

SEQ ID NO: 36218 - DNA, 20 bp, Artificial Sequence
  Description of Artificial Sequence: Synthetic oligonucleotide
  Target: LAMA2; (-) strand; PAM type: NNNNGHTT; PAM sequence: TATTGATT
aaatgttgctaattttagta

SEQ ID NO: 36219 - DNA, 20 bp, Artificial Sequence
  Description of Artificial Sequence: Synthetic oligonucleotide
  Target: LAMA2; (-) strand; PAM type: NNNNGHTT; PAM sequence: GTTAGTTT
ttttttaaagatagttcctc

SEQ ID NO: 36220 - DNA, 20 bp, Artificial Sequence
  Description of Artificial Sequence: Synthetic oligonucleotide
  Target: LAMA2; (-) strand; PAM type: NNNNGHTT; PAM sequence: TATTGATT
tatggtgaatgggattattt

SEQ ID NO: 36221 - DNA, 20 bp, Artificial Sequence
  Description of Artificial Sequence: Synthetic oligonucleotide
  Target: LAMA2; (-) strand; PAM type: NNNNGHTT; PAM sequence: ATGGGATT
ttttcttttagctatggtga

SEQ ID NO: 36222 - DNA, 20 bp, Artificial Sequence
  Description of Artificial Sequence: Synthetic oligonucleotide
  Target: LAMA2; (-) strand; PAM type: NNNNGHTT; PAM sequence: CCATGATT
cagcatgggggaaaacactc

SEQ ID NO: 36223 - DNA, 20 bp, Artificial Sequence
  Description of Artificial Sequence: Synthetic oligonucleotide
  Target: LAMA2; (-) strand; PAM type: NNNNGHTT; PAM sequence: AGAGGTTT
ctgggcaatttacaaaagaa

SEQ ID NO: 36224 - DNA, 20 bp, Artificial Sequence
  Description of Artificial Sequence: Synthetic oligonucleotide
  Target: LAMA2; (-) strand; PAM type: NNNNGHTT; PAM sequence: CGGAGCTT
aatggcatgaacccgggagg

SEQ ID NO: 36225 - DNA, 20 bp, Artificial Sequence
  Description of Artificial Sequence: Synthetic oligonucleotide
  Target: LAMA2; (-) strand; PAM type: NNNNGHTT; PAM sequence: GTCTGTTT
agtctttcatctctgtatta

SEQ ID NO: 36226 - DNA, 20 bp, Artificial Sequence
  Description of Artificial Sequence: Synthetic oligonucleotide
  Target: LAMA2; (-) strand; PAM type: NNNNGHTT; PAM sequence: TACAGTTT
aatttatttcatcactgttt

SEQ ID NO: 36227 - DNA, 20 bp, Artificial Sequence
  Description of Artificial Sequence: Synthetic oligonucleotide
  Target: LAMA2; (-) strand; PAM type: NNNNGHTT; PAM sequence: CACTGTTT
gtgtcttcaatttatttcat

SEQ ID NO: 36228 - DNA, 20 bp, Artificial Sequence
  Description of Artificial Sequence: Synthetic oligonucleotide
  Target: LAMA2; (-) strand; PAM type: NNNNGHTT; PAM sequence: GGATGTTT
tagttattccacaaaacaca

SEQ ID NO: 36229 - DNA, 20 bp, Artificial Sequence
  Description of Artificial Sequence: Synthetic oligonucleotide
  Target: LAMA2; (-) strand; PAM type: NNNNGHTT; PAM sequence: TTAGGATT
tttgtggttccataaaatat

SEQ ID NO: 36230 - DNA, 20 bp, Artificial Sequence
  Description of Artificial Sequence: Synthetic oligonucleotide
  Target: LAMA2; (-) strand; PAM type: NNNNGHTT; PAM sequence: GATTGCTT
gctttgttctttttgctcaa

SEQ ID NO: 36231 - DNA, 20 bp, Artificial Sequence
  Description of Artificial Sequence: Synthetic oligonucleotide
  Target: LAMA2; (-) strand; PAM type: NNNNGHTT; PAM sequence: TCAAGATT
tccagctttgttctttttgc

SEQ ID NO: 36232 - DNA, 20 bp, Artificial Sequence
  Description of Artificial Sequence: Synthetic oligonucleotide
  Target: LAMA2; (-) strand; PAM type: NNNNGHTT; PAM sequence: TCCAGCTT
aagtcagatagtgtgatgct

SEQ ID NO: 36233 - DNA, 20 bp, Artificial Sequence
  Description of Artificial Sequence: Synthetic oligonucleotide
  Target: LAMA2; (-) strand; PAM type: NNNNGHTT; PAM sequence: TGATGCTT
tattttaaagtcagatagtg

SEQ ID NO: 36234 - DNA, 20 bp, Artificial Sequence
  Description of Artificial Sequence: Synthetic oligonucleotide
  Target: LAMA2; (-) strand; PAM type: NNNNGHTT; PAM sequence: TACAGCTT
cagcatactgttttgattac

SEQ ID NO: 36235 - DNA, 20 bp, Artificial Sequence
  Description of Artificial Sequence: Synthetic oligonucleotide
  Target: LAMA2; (-) strand; PAM type: NNNNGHTT; PAM sequence: TTTTGATT
tttaagttagcagcatactg

SEQ ID NO: 36236 - DNA, 20 bp, Artificial Sequence
  Description of Artificial Sequence: Synthetic oligonucleotide
  Target: LAMA2; (-) strand; PAM type: NNNNGHTT; PAM sequence: TACTGTTT
ctgtttttaagttagcagca

SEQ ID NO: 36237 - DNA, 20 bp, Artificial Sequence
  Description of Artificial Sequence: Synthetic oligonucleotide
  Target: LAMA2; (-) strand; PAM type: NNNNGHTT; PAM sequence: ATCTGTTT
tctattctgttggtctatgt

SEQ ID NO: 36238 - DNA, 20 bp, Artificial Sequence
  Description of Artificial Sequence: Synthetic oligonucleotide
  Target: LAMA2; (-) strand; PAM type: NNNNGHTT; PAM sequence: CTTAGATT
aaatcaattgaccataaatg

SEQ ID NO: 36239 - DNA, 20 bp, Artificial Sequence
  Description of Artificial Sequence: Synthetic oligonucleotide
  Target: LAMA2; (-) strand; PAM type: NNNNGHTT; PAM sequence: AAATGCTT
gtcaaaaatcaattgaccat

SEQ ID NO: 36240 - DNA, 20 bp, Artificial Sequence
  Description of Artificial Sequence: Synthetic oligonucleotide
  Target: LAMA2; (-) strand; PAM type: NNNNGHTT; PAM sequence: AATGGATT
tttaattcatttagaatttg

SEQ ID NO: 36241 - DNA, 20 bp, Artificial Sequence
  Description of Artificial Sequence: Synthetic oligonucleotide
  Target: LAMA2; (-) strand; PAM type: NNNNGHTT; PAM sequence: TACAGTTT
gtgttttctttcagtagttt

SEQ ID NO: 36242 - DNA, 20 bp, Artificial Sequence
  Description of Artificial Sequence: Synthetic oligonucleotide
  Target: LAMA2; (-) strand; PAM type: NNNNGHTT; PAM sequence: AGTAGTTT
tttcccctgtgttttctttc

SEQ ID NO: 36243 - DNA, 20 bp, Artificial Sequence
  Description of Artificial Sequence: Synthetic oligonucleotide
  Target: LAMA2; (-) strand; PAM type: NNNNGHTT; PAM sequence: CTGTGTTT
aatgtcatggaacttttccc

SEQ ID NO: 36244 - DNA, 20 bp, Artificial Sequence
  Description of Artificial Sequence: Synthetic oligonucleotide
  Target: LAMA2; (-) strand; PAM type: NNNNGHTT; PAM sequence: TGGGGTTT
ttattgtgtttcctgtgctt

SEQ ID NO: 36245 - DNA, 20 bp, Artificial Sequence
  Description of Artificial Sequence: Synthetic oligonucleotide
  Target: LAMA2; (-) strand; PAM type: NNNNGHTT; PAM sequence: CTGTGCTT
tctatgttttattgtgtttc

SEQ ID NO: 36246 - DNA, 20 bp, Artificial Sequence
  Description of Artificial Sequence: Synthetic oligonucleotide
  Target: LAMA2; (-) strand; PAM type: NNNNGHTT; PAM sequence: TTGTGTTT
tctcatttgtctatgtttta

SEQ ID NO: 36247 - DNA, 20 bp, Artificial Sequence
  Description of Artificial Sequence: Synthetic oligonucleotide
  Target: LAMA2; (-) strand; PAM type: NNNNGHTT; PAM sequence: CTATGTTT
tttaatgtaatctcatttgt

SEQ ID NO: 36248 - DNA, 20 bp, Artificial Sequence
  Description of Artificial Sequence: Synthetic oligonucleotide
  Target: LAMA2; (-) strand; PAM type: NNNNGHTT; PAM sequence: TTCAGTTT
ccctggttatccagatgtgt

SEQ ID NO: 36249 - DNA, 20 bp, Artificial Sequence
  Description of Artificial Sequence: Synthetic oligonucleotide
  Target: LAMA2; (-) strand; PAM type: NNNNGHTT; PAM sequence: ATGTGTTT
ttgtttccctggttatccag

SEQ ID NO: 36250 - DNA, 20 bp, Artificial Sequence
  Description of Artificial Sequence: Synthetic oligonucleotide
  Target: LAMA2; (-) strand; PAM type: NNNNGHTT; PAM sequence: GATTGTTT
atttgaagagcagccatgtt

SEQ ID NO: 36251 - DNA, 20 bp, Artificial Sequence
  Description of Artificial Sequence: Synthetic oligonucleotide
  Target: LAMA2; (-) strand; PAM type: NNNNGHTT; PAM sequence: TGTTGATT
agtgatttgaagagcagcca

SEQ ID NO: 36252 - DNA, 20 bp, Artificial Sequence
  Description of Artificial Sequence: Synthetic oligonucleotide
  Target: LAMA2; (-) strand; PAM type: NNNNGHTT; PAM sequence: CAGTGATT
tagtaccaacaaaataaatt

SEQ ID NO: 36253 - DNA, 20 bp, Artificial Sequence
  Description of Artificial Sequence: Synthetic oligonucleotide
  Target: LAMA2; (-) strand; PAM type: NNNNGHTT; PAM sequence: GTTAGTTT
tatattataatctcttctgt

SEQ ID NO: 36254 - DNA, 20 bp, Artificial Sequence
  Description of Artificial Sequence: Synthetic oligonucleotide
  Target: LAMA2; (-) strand; PAM type: NNNNGHTT; PAM sequence: CTGTGATT
caattaaaacaggtaaagaa

SEQ ID NO: 36255 - DNA, 20 bp, Artificial Sequence
  Description of Artificial Sequence: Synthetic oligonucleotide
  Target: LAMA2; (-) strand; PAM type: NNNNGHTT; PAM sequence: CACAGATT
aaatatattttctaattaac

SEQ ID NO: 36256 - DNA, 20 bp, Artificial Sequence
  Description of Artificial Sequence: Synthetic oligonucleotide
  Target: LAMA2; (-) strand; PAM type: NNNNGHTT; PAM sequence: ATGAGATT
gtgttatgtgatctgtacta

SEQ ID NO: 36257 - DNA, 20 bp, Artificial Sequence
  Description of Artificial Sequence: Synthetic oligonucleotide
  Target: LAMA2; (-) strand; PAM type: NNNNGHTT; PAM sequence: ATAAGATT
gtgttgtgtgatctgtacta

SEQ ID NO: 36258 - DNA, 20 bp, Artificial Sequence
  Description of Artificial Sequence: Synthetic oligonucleotide
  Target: LAMA2; (-) strand; PAM type: NNNNGHTT; PAM sequence: TTGTGCTT
ccttaaggccttgtgggtca

SEQ ID NO: 36259 - DNA, 20 bp, Artificial Sequence
  Description of Artificial Sequence: Synthetic oligonucleotide
  Target: LAMA2; (-) strand; PAM type: NNNNGHTT; PAM sequence: AGTGGTTT
ggagaaaaataaagcaggaa

SEQ ID NO: 36260 - DNA, 20 bp, Artificial Sequence
  Description of Artificial Sequence: Synthetic oligonucleotide
  Target: LAMA2; (-) strand; PAM type: NNNNGHTT; PAM sequence: CAATGATT
tattctaagtgcttagaaag

SEQ ID NO: 36261 - DNA, 20 bp, Artificial Sequence
  Description of Artificial Sequence: Synthetic oligonucleotide
  Target: LAMA2; (-) strand; PAM type: NNNNGHTT; PAM sequence: AAGTGCTT
tatatgttgtgcactattct

SEQ ID NO: 36262 - DNA, 20 bp, Artificial Sequence
  Description of Artificial Sequence: Synthetic oligonucleotide
  Target: LAMA2; (-) strand; PAM type: NNNNGHTT; PAM sequence: GAATGCTT
taacttaatacaaacacatt

SEQ ID NO: 36263 - DNA, 20 bp, Artificial Sequence
  Description of Artificial Sequence: Synthetic oligonucleotide
  Target: LAMA2; (-) strand; PAM type: NNNNGHTT; PAM sequence: GGTGGTTT
agattcttaaattatggatt

SEQ ID NO: 36264 - DNA, 20 bp, Artificial Sequence
  Description of Artificial Sequence: Synthetic oligonucleotide
  Target: LAMA2; (-) strand; PAM type: NNNNGHTT; PAM sequence: TATGGATT
attcaataagattcttaaat

SEQ ID NO: 36265 - DNA, 20 bp, Artificial Sequence
  Description of Artificial Sequence: Synthetic oligonucleotide
  Target: LAMA2; (-) strand; PAM type: NNNNGHTT; PAM sequence: ATAAGATT
tcctttaattctcagattca

SEQ ID NO: 36266 - DNA, 20 bp, Artificial Sequence
  Description of Artificial Sequence: Synthetic oligonucleotide
  Target: LAMA2; (-) strand; PAM type: NNNNGHTT; PAM sequence: CTCAGATT
aatcacttaatcctttaatt

SEQ ID NO: 36267 - DNA, 20 bp, Artificial Sequence
  Description of Artificial Sequence: Synthetic oligonucleotide
  Target: LAMA2; (-) strand; PAM type: NNNNGHTT; PAM sequence: GTGTGTTT
tcataattagaaaaagtgca

SEQ ID NO: 36268 - DNA, 20 bp, Artificial Sequence
  Description of Artificial Sequence: Synthetic oligonucleotide
  Target: LAMA2; (-) strand; PAM type: NNNNGHTT; PAM sequence: TGCAGTTT
aactatgagaaataaattgc

SEQ ID NO: 36269 - DNA, 20 bp, Artificial Sequence
  Description of Artificial Sequence: Synthetic oligonucleotide
  Target: LAMA2; (-) strand; PAM type: NNNNGHTT; PAM sequence: CAGTGCTT
tcaccagacattgaatctgc

SEQ ID NO: 36270 - DNA, 20 bp, Artificial Sequence
  Description of Artificial Sequence: Synthetic oligonucleotide
  Target: LAMA2; (-) strand; PAM type: NNNNGHTT; PAM sequence: GAAAGCTT
cccttataaatgaaacccca

SEQ ID NO: 36271 - DNA, 20 bp, Artificial Sequence
  Description of Artificial Sequence: Synthetic oligonucleotide
  Target: LAMA2; (-) strand; PAM type: NNNNGHTT; PAM sequence: TGGGGATT
aatgtgatggtattaggtga

SEQ ID NO: 36272 - DNA, 20 bp, Artificial Sequence
  Description of Artificial Sequence: Synthetic oligonucleotide
  Target: LAMA2; (-) strand; PAM type: NNNNGHTT; PAM sequence: GAATGTTT
cttcacgctttctatagact

SEQ ID NO: 36273 - DNA, 20 bp, Artificial Sequence
  Description of Artificial Sequence: Synthetic oligonucleotide
  Target: LAMA2; (-) strand; PAM type: NNNNGHTT; PAM sequence: TCACGCTT
gaactggaagaaaatttact

SEQ ID NO: 36274 - DNA, 20 bp, Artificial Sequence
  Description of Artificial Sequence: Synthetic oligonucleotide
  Target: LAMA2; (-) strand; PAM type: NNNNGHTT; PAM sequence: ATACGCTT
agatacaactgaaatttaga

SEQ ID NO: 36275 - DNA, 20 bp, Artificial Sequence
  Description of Artificial Sequence: Synthetic oligonucleotide
  Target: LAMA2; (-) strand; PAM type: NNNNGHTT; PAM sequence: TCTTGTTT
tacatatcctacatttacac

SEQ ID NO: 36276 - DNA, 20 bp, Artificial Sequence
  Description of Artificial Sequence: Synthetic oligonucleotide
  Target: LAMA2; (-) strand; PAM type: NNNNGHTT; PAM sequence: TTTGGTTT
ttttcatggtattgctagaa

SEQ ID NO: 36277 - DNA, 20 bp, Artificial Sequence
  Description of Artificial Sequence: Synthetic oligonucleotide
  Target: LAMA2; (-) strand; PAM type: NNNNGHTT; PAM sequence: AAATGTTT
aaataggatctgggtctcca

SEQ ID NO: 36278 - DNA, 20 bp, Artificial Sequence
  Description of Artificial Sequence: Synthetic oligonucleotide
  Target: LAMA2; (-) strand; PAM type: NNNNGHTT; PAM sequence: CACAGATT
cattttaacagctctttcct

SEQ ID NO: 36279 - DNA, 20 bp, Artificial Sequence
  Description of Artificial Sequence: Synthetic oligonucleotide
  Target: LAMA2; (-) strand; PAM type: NNNNGHTT; PAM sequence: TGTGGTTT
actttccataacagaattca

SEQ ID NO: 36280 - DNA, 20 bp, Artificial Sequence
  Description of Artificial Sequence: Synthetic oligonucleotide
  Target: LAMA2; (-) strand; PAM type: NNNNGHTT; PAM sequence: GGATGTTT
ccaccaaaaggatgaaatgt

SEQ ID NO: 36281 - DNA, 20 bp, Artificial Sequence
  Description of Artificial Sequence: Synthetic oligonucleotide
  Target: LAMA2; (-) strand; PAM type: NNNNGHTT; PAM sequence: AATTGTTT
tatttaaaaacaaataatat

SEQ ID NO: 36282 - DNA, 20 bp, Artificial Sequence
  Description of Artificial Sequence: Synthetic oligonucleotide
  Target: LAMA2; (-) strand; PAM type: NNNNGHTT; PAM sequence: CACAGTTT
ctgtgcatggggtttttagt

SEQ ID NO: 36283 - DNA, 20 bp, Artificial Sequence
  Description of Artificial Sequence: Synthetic oligonucleotide
  Target: LAMA2; (-) strand; PAM type: NNNNGHTT; PAM sequence: TGGGGTTT
tcaagaattttctctgtgca

SEQ ID NO: 36284 - DNA, 20 bp, Artificial Sequence
  Description of Artificial Sequence: Synthetic oligonucleotide
  Target: LAMA2; (-) strand; PAM type: NNNNGHTT; PAM sequence: CCATGTTT
ctcactccagcctttttttg

SEQ ID NO: 36285 - DNA, 20 bp, Artificial Sequence
  Description of Artificial Sequence: Synthetic oligonucleotide
  Target: LAMA2; (-) strand; PAM type: NNNNGHTT; PAM sequence: TTTTGTTT
taattaaagcatttttgagc

SEQ ID NO: 36286 - DNA, 20 bp, Artificial Sequence
  Description of Artificial Sequence: Synthetic oligonucleotide
  Target: LAMA2; (-) strand; PAM type: NNNNGHTT; PAM sequence: TTGAGCTT
atccagtaattaaagcattt

SEQ ID NO: 36287 - DNA, 20 bp, Artificial Sequence
  Description of Artificial Sequence: Synthetic oligonucleotide
  Target: LAMA2; (-) strand; PAM type: NNNNGHTT; PAM sequence: TTAAGCTT
caatgcacaagtgacacttt

SEQ ID NO: 36288 - DNA, 20 bp, Artificial Sequence
  Description of Artificial Sequence: Synthetic oligonucleotide
  Target: LAMA2; (-) strand; PAM type: NNNNGHTT; PAM sequence: AAGAGTTT
gagtaaagaagctgttacaa

SEQ ID NO: 36289 - DNA, 20 bp, Artificial Sequence
  Description of Artificial Sequence: Synthetic oligonucleotide
  Target: LAMA2; (-) strand; PAM type: NNNNGHTT; PAM sequence: AAAAGCTT
attaaaataacataaatcag

SEQ ID NO: 36290 - DNA, 20 bp, Artificial Sequence
  Description of Artificial Sequence: Synthetic oligonucleotide
  Target: LAMA2; (-) strand; PAM type: NNNNGHTT; PAM sequence: ACAAGATT
attaaaaactgtacataata

SEQ ID NO: 36291 - DNA, 20 bp, Artificial Sequence
  Description of Artificial Sequence: Synthetic oligonucleotide
  Target: LAMA2; (-) strand; PAM type: NNNNGHTT; PAM sequence: GCATGTTT
cacacagatccactgaaaat

SEQ ID NO: 36292 - DNA, 20 bp, Artificial Sequence
  Description of Artificial Sequence: Synthetic oligonucleotide
  Target: LAMA2; (-) strand; PAM type: NNNNGHTT; PAM sequence: ACATGCTT
atttgtcaccttttctgtgt

SEQ ID NO: 36293 - DNA, 20 bp, Artificial Sequence
  Description of Artificial Sequence: Synthetic oligonucleotide
  Target: LAMA2; (-) strand; PAM type: NNNNGHTT; PAM sequence: GGAAGTTT
gtgattggaaaaggcatgag

SEQ ID NO: 36294 - DNA, 20 bp, Artificial Sequence
  Description of Artificial Sequence: Synthetic oligonucleotide
  Target: LAMA2; (-) strand; PAM type: NNNNGHTT; PAM sequence: TAGTGATT
tattaggggagaaggcaaga

SEQ ID NO: 36295 - DNA, 20 bp, Artificial Sequence
  Description of Artificial Sequence: Synthetic oligonucleotide
  Target: LAMA2; (-) strand; PAM type: NNNNGHTT; PAM sequence: AATGGCTT
cagagaaaactcctagatca

SEQ ID NO: 36296 - DNA, 20 bp, Artificial Sequence
  Description of Artificial Sequence: Synthetic oligonucleotide
  Target: LAMA2; (-) strand; PAM type: NNNNGHTT; PAM sequence: GCAGGATT
aaaaaacaagacatataaga

SEQ ID NO: 36297 - DNA, 20 bp, Artificial Sequence
  Description of Artificial Sequence: Synthetic oligonucleotide
  Target: LAMA2; (-) strand; PAM type: NNNNGHTT; PAM sequence: AAACGATT
aaggaataacaacaaaaaca

SEQ ID NO: 36298 - DNA, 20 bp, Artificial Sequence
  Description of Artificial Sequence: Synthetic oligonucleotide
  Target: LAMA2; (-) strand; PAM type: NNNNGHTT; PAM sequence: AAAAGTTT
ttggataaaaacaagtctca

SEQ ID NO: 36299 - DNA, 20 bp, Artificial Sequence
  Description of Artificial Sequence: Synthetic oligonucleotide
  Target: LAMA2; (-) strand; PAM type: NNNNGHTT; PAM sequence: CATTGTTT
gagccagggcaactggtcca

SEQ ID NO: 36300 - DNA, 20 bp, Artificial Sequence
  Description of Artificial Sequence: Synthetic oligonucleotide
  Target: LAMA2; (-) strand; PAM type: NNNNGHTT; PAM sequence: CTGGGATT
tgccttggcctcccaaagtg

SEQ ID NO: 36301 - DNA, 20 bp, Artificial Sequence
  Description of Artificial Sequence: Synthetic oligonucleotide
  Target: LAMA2; (-) strand; PAM type: NNNNGHTT; PAM sequence: TGAGGTTT
tttgttttgtttggtagaga

SEQ ID NO: 36302 - DNA, 20 bp, Artificial Sequence
  Description of Artificial Sequence: Synthetic oligonucleotide
  Target: LAMA2; (-) strand; PAM type: NNNNGHTT; PAM sequence: TTTTGTTT
ttttgttttgttttgttttg

SEQ ID NO: 36303 - DNA, 20 bp, Artificial Sequence
  Description of Artificial Sequence: Synthetic oligonucleotide
  Target: LAMA2; (-) strand; PAM type: NNNNGHTT; PAM sequence: TTTTGTTT
tggggttttgttttgttttg

SEQ ID NO: 36304 - DNA, 20 bp, Artificial Sequence
  Description of Artificial Sequence: Synthetic oligonucleotide
  Target: LAMA2; (-) strand; PAM type: NNNNGHTT; PAM sequence: TTTTGTTT
tgttttggggttttgttttg

SEQ ID NO: 36305 - DNA, 20 bp, Artificial Sequence
  Description of Artificial Sequence: Synthetic oligonucleotide
  Target: LAMA2; (-) strand; PAM type: NNNNGHTT; PAM sequence: TTTTGTTT
taatttgttttggggttttg

SEQ ID NO: 36306 - DNA, 20 bp, Artificial Sequence
  Description of Artificial Sequence: Synthetic oligonucleotide
  Target: LAMA2; (-) strand; PAM type: NNNNGHTT; PAM sequence: TTTTGTTT
ccagctaatttgttttgggg

SEQ ID NO: 36307 - DNA, 20 bp, Artificial Sequence
  Description of Artificial Sequence: Synthetic oligonucleotide
  Target: LAMA2; (-) strand; PAM type: NNNNGHTT; PAM sequence: TGGGGTTT
cacacccagctaatttgttt

SEQ ID NO: 36308 - DNA, 20 bp, Artificial Sequence
  Description of Artificial Sequence: Synthetic oligonucleotide
  Target: LAMA2; (-) strand; PAM type: NNNNGHTT; PAM sequence: ATTTGTTT
tacaggcacacacccagcta

SEQ ID NO: 36309 - DNA, 20 bp, Artificial Sequence
  Description of Artificial Sequence: Synthetic oligonucleotide
  Target: LAMA2; (-) strand; PAM type: NNNNGHTT; PAM sequence: AAGTGATT
aacctctacctcctgggttg

SEQ ID NO: 36310 - DNA, 20 bp, Artificial Sequence
  Description of Artificial Sequence: Synthetic oligonucleotide
  Target: LAMA2; (-) strand; PAM type: NNNNGHTT; PAM sequence: CTTTGCTT
tatagaatctgcattctttt

SEQ ID NO: 36311 - DNA, 20 bp, Artificial Sequence
  Description of Artificial Sequence: Synthetic oligonucleotide
  Target: LAMA2; (-) strand; PAM type: NNNNGHTT; PAM sequence: ATCAGATT
ccaatttaaaggaaaagatt

SEQ ID NO: 36312 - DNA, 20 bp, Artificial Sequence
  Description of Artificial Sequence: Synthetic oligonucleotide
  Target: LAMA2; (-) strand; PAM type: NNNNGHTT; PAM sequence: AAAAGATT
ttaagtatccaatttaaagg

SEQ ID NO: 36313 - DNA, 20 bp, Artificial Sequence
  Description of Artificial Sequence: Synthetic oligonucleotide
  Target: LAMA2; (-) strand; PAM type: NNNNGHTT; PAM sequence: TGGAGTTT
atggtaacaattacttccta

SEQ ID NO: 36314 - DNA, 20 bp, Artificial Sequence
  Description of Artificial Sequence: Synthetic oligonucleotide
  Target: LAMA2; (-) strand; PAM type: NNNNGHTT; PAM sequence: GCATGTTT
tttaaaattagatgaaaact

SEQ ID NO: 36315 - DNA, 20 bp, Artificial Sequence
  Description of Artificial Sequence: Synthetic oligonucleotide
  Target: LAMA2; (-) strand; PAM type: NNNNGHTT; PAM sequence: AGGTGTTT
aaaataaacaaaaaagttaa

SEQ ID NO: 36316 - DNA, 20 bp, Artificial Sequence
  Description of Artificial Sequence: Synthetic oligonucleotide
  Target: LAMA2; (-) strand; PAM type: NNNNGHTT; PAM sequence: GGAAGTTT
aaatgggatactttcttgat

SEQ ID NO: 36317 - DNA, 20 bp, Artificial Sequence
  Description of Artificial Sequence: Synthetic oligonucleotide
  Target: LAMA2; (-) strand; PAM type: NNNNGHTT; PAM sequence: GCAGGCTT
agatgagagatttatcacta

SEQ ID NO: 36318 - DNA, 20 bp, Artificial Sequence
  Description of Artificial Sequence: Synthetic oligonucleotide
  Target: LAMA2; (-) strand; PAM type: NNNNGHTT; PAM sequence: GAGAGATT
tgaaaaaacaaacaaaagat

SEQ ID NO: 36319 - DNA, 20 bp, Artificial Sequence
  Description of Artificial Sequence: Synthetic oligonucleotide
  Target: LAMA2; (-) strand; PAM type: NNNNGHTT; PAM sequence: TTCCGCTT
caagaaccagcaataagact

SEQ ID NO: 36320 - DNA, 20 bp, Artificial Sequence
  Description of Artificial Sequence: Synthetic oligonucleotide
  Target: LAMA2; (-) strand; PAM type: NNNNGHTT; PAM sequence: TCTTGTTT
tggagtgaaaggaaaaatga

SEQ ID NO: 36321 - DNA, 20 bp, Artificial Sequence
  Description of Artificial Sequence: Synthetic oligonucleotide
  Target: LAMA2; (-) strand; PAM type: NNNNGHTT; PAM sequence: AGAAGCTT
gacattgatccacagaatct

SEQ ID NO: 36322 - DNA, 20 bp, Artificial Sequence
  Description of Artificial Sequence: Synthetic oligonucleotide
  Target: LAMA2; (-) strand; PAM type: NNNNGHTT; PAM sequence: AAGGGATT
agattgaatccagcagaaaa

SEQ ID NO: 36323 - DNA, 20 bp, Artificial Sequence
  Description of Artificial Sequence: Synthetic oligonucleotide
  Target: LAMA2; (-) strand; PAM type: NNNNGHTT; PAM sequence: AGAAGATT
atccagtaaatgtatgtaat

SEQ ID NO: 36324 - DNA, 20 bp, Artificial Sequence
  Description of Artificial Sequence: Synthetic oligonucleotide
  Target: LAMA2; (-) strand; PAM type: NNNNGHTT; PAM sequence: AGTTGTTT
gacaatagaaacagactccc

SEQ ID NO: 36325 - DNA, 20 bp, Artificial Sequence
  Description of Artificial Sequence: Synthetic oligonucleotide
  Target: LAMA2; (-) strand; PAM type: NNNNGHTT; PAM sequence: CCAAGCTT
cattatttaatcaaaaacga

SEQ ID NO: 36326 - DNA, 20 bp, Artificial Sequence
  Description of Artificial Sequence: Synthetic oligonucleotide
  Target: LAMA2; (-) strand; PAM type: NNNNGHTT; PAM sequence: CGGGGTTT
aaagagtgtggtaaacaagt

SEQ ID NO: 36327 - DNA, 20 bp, Artificial Sequence
  Description of Artificial Sequence: Synthetic oligonucleotide
  Target: LAMA2; (-) strand; PAM type: NNNNGHTT; PAM sequence: AAGAGATT
tcttcacagcttttgccttc

SEQ ID NO: 36328 - DNA, 20 bp, Artificial Sequence
  Description of Artificial Sequence: Synthetic oligonucleotide
  Target: LAMA2; (-) strand; PAM type: NNNNGHTT; PAM sequence: CACAGCTT
gaaatgagacctacattctt

SEQ ID NO: 36329 - DNA, 20 bp, Artificial Sequence
  Description of Artificial Sequence: Synthetic oligonucleotide
  Target: LAMA2; (-) strand; PAM type: NNNNGHTT; PAM sequence: TATTGATT
ttttcctctcagggtacttt

SEQ ID NO: 36330 - DNA, 20 bp, Artificial Sequence
  Description of Artificial Sequence: Synthetic oligonucleotide
  Target: LAMA2; (-) strand; PAM type: NNNNGHTT; PAM sequence: AGCAGTTT
ctggataaaatactaaaaac

SEQ ID NO: 36331 - DNA, 20 bp, Artificial Sequence
  Description of Artificial Sequence: Synthetic oligonucleotide
  Target: LAMA2; (-) strand; PAM type: NNNNGHTT; PAM sequence: TTTTGTTT
ttatcagataatatgctgat

SEQ ID NO: 36332 - DNA, 20 bp, Artificial Sequence
  Description of Artificial Sequence: Synthetic oligonucleotide
  Target: LAMA2; (-) strand; PAM type: NNNNGHTT; PAM sequence: TGCTGATT
aataattttatcagataata

SEQ ID NO: 36333 - DNA, 20 bp, Artificial Sequence
  Description of Artificial Sequence: Synthetic oligonucleotide
  Target: LAMA2; (-) strand; PAM type: NNNNGHTT; PAM sequence: TATTGTTT
catcaaaatgttccaataat

SEQ ID NO: 36334 - DNA, 20 bp, Artificial Sequence
  Description of Artificial Sequence: Synthetic oligonucleotide
  Target: LAMA2; (-) strand; PAM type: NNNNGHTT; PAM sequence: ACCAGATT
tatatgccaatttcatgcat

SEQ ID NO: 36335 - DNA, 20 bp, Artificial Sequence
  Description of Artificial Sequence: Synthetic oligonucleotide
  Target: LAMA2; (-) strand; PAM type: NNNNGHTT; PAM sequence: CTTTGTTT
cttactaagaatagcacctg

SEQ ID NO: 36336 - DNA, 20 bp, Artificial Sequence
  Description of Artificial Sequence: Synthetic oligonucleotide
  Target: LAMA2; (-) strand; PAM type: NNNNGHTT; PAM sequence: ACCTGCTT
agcttcttactaagaatagc

SEQ ID NO: 36337 - DNA, 20 bp, Artificial Sequence
  Description of Artificial Sequence: Synthetic oligonucleotide
  Target: LAMA2; (-) strand; PAM type: NNNNGHTT; PAM sequence: TGAAGCTT
cagatatgccataaggggca

SEQ ID NO: 36338 - DNA, 20 bp, Artificial Sequence
  Description of Artificial Sequence: Synthetic oligonucleotide
  Target: LAMA2; (-) strand; PAM type: NNNNGHTT; PAM sequence: CACTGCTT
acagacctacaggcttagaa

SEQ ID NO: 36339 - DNA, 20 bp, Artificial Sequence
  Description of Artificial Sequence: Synthetic oligonucleotide
  Target: LAMA2; (-) strand; PAM type: NNNNGHTT; PAM sequence: ACAGGCTT
tctccttcatggacagacct

SEQ ID NO: 36340 - DNA, 20 bp, Artificial Sequence
  Description of Artificial Sequence: Synthetic oligonucleotide
  Target: LAMA2; (-) strand; PAM type: NNNNGHTT; PAM sequence: AATTGTTT
catgaacttgcactattcta

SEQ ID NO: 36341 - DNA, 20 bp, Artificial Sequence
  Description of Artificial Sequence: Synthetic oligonucleotide
  Target: LAMA2; (-) strand; PAM type: NNNNGHTT; PAM sequence: TTATGCTT
tctataatcttattataatc

SEQ ID NO: 36342 - DNA, 20 bp, Artificial Sequence
  Description of Artificial Sequence: Synthetic oligonucleotide
  Target: LAMA2; (-) strand; PAM type: NNNNGHTT; PAM sequence: TCTGGTTT
tttttctatgactggtattt

SEQ ID NO: 36343 - DNA, 20 bp, Artificial Sequence
  Description of Artificial Sequence: Synthetic oligonucleotide
  Target: LAMA2; (-) strand; PAM type: NNNNGHTT; PAM sequence: CCCAGATT
cctgctggtaataaactcta

SEQ ID NO: 36344 - DNA, 20 bp, Artificial Sequence
  Description of Artificial Sequence: Synthetic oligonucleotide
  Target: LAMA2; (-) strand; PAM type: NNNNGHTT; PAM sequence: AACTGTTT
tatacccagaattcaatata

SEQ ID NO: 36345 - DNA, 20 bp, Artificial Sequence
  Description of Artificial Sequence: Synthetic oligonucleotide
  Target: LAMA2; (-) strand; PAM type: NNNNGHTT; PAM sequence: GCGGGTTT
acacctgcttaaataccact

SEQ ID NO: 36346 - DNA, 20 bp, Artificial Sequence
  Description of Artificial Sequence: Synthetic oligonucleotide
  Target: LAMA2; (-) strand; PAM type: NNNNGHTT; PAM sequence: ACCTGCTT
gataaaggaaatcatgttac

SEQ ID NO: 36347 - DNA, 20 bp, Artificial Sequence
  Description of Artificial Sequence: Synthetic oligonucleotide
  Target: LAMA2; (-) strand; PAM type: NNNNGHTT; PAM sequence: CCTAGTTT
ctatggtttcctgactgcca

SEQ ID NO: 36348 - DNA, 20 bp, Artificial Sequence
  Description of Artificial Sequence: Synthetic oligonucleotide
  Target: LAMA2; (-) strand; PAM type: NNNNGHTT; PAM sequence: TATGGTTT
tctctttgctaaaaaagtac

SEQ ID NO: 36349 - DNA, 20 bp, Artificial Sequence
  Description of Artificial Sequence: Synthetic oligonucleotide
  Target: LAMA2; (-) strand; PAM type: NNNNGHTT; PAM sequence: GAATGCTT
caccatgcctggcaccactc

SEQ ID NO: 36350 - DNA, 20 bp, Artificial Sequence
  Description of Artificial Sequence: Synthetic oligonucleotide
  Target: LAMA2; (-) strand; PAM type: NNNNGHTT; PAM sequence: CTGGGCTT
cacctcaacctcccaaagtg

SEQ ID NO: 36351 - DNA, 20 bp, Artificial Sequence
  Description of Artificial Sequence: Synthetic oligonucleotide
  Target: LAMA2; (-) strand; PAM type: NNNNGHTT; PAM sequence: CTGGGCTT
tggttgctggtctcgaatac

SEQ ID NO: 36352 - DNA, 20 bp, Artificial Sequence
  Description of Artificial Sequence: Synthetic oligonucleotide
  Target: LAMA2; (-) strand; PAM type: NNNNGHTT; PAM sequence: TTTTGCTT
actactatgcctggctaatt

SEQ ID NO: 36353 - DNA, 20 bp, Artificial Sequence
  Description of Artificial Sequence: Synthetic oligonucleotide
  Target: LAMA2; (-) strand; PAM type: NNNNGHTT; PAM sequence: AAGTGATT
agccttgacctcctggaccc

SEQ ID NO: 36354 - DNA, 20 bp, Artificial Sequence
  Description of Artificial Sequence: Synthetic oligonucleotide
  Target: LAMA2; (-) strand; PAM type: NNNNGHTT; PAM sequence: TTTTGTTT
ccacttgaataatttttttg

SEQ ID NO: 36355 - DNA, 20 bp, Artificial Sequence
  Description of Artificial Sequence: Synthetic oligonucleotide
  Target: LAMA2; (-) strand; PAM type: NNNNGHTT; PAM sequence: TTTTGTTT
tatttccacttgaataattt

SEQ ID NO: 36356 - DNA, 20 bp, Artificial Sequence
  Description of Artificial Sequence: Synthetic oligonucleotide
  Target: LAMA2; (-) strand; PAM type: NNNNGHTT; PAM sequence: ACCTGCTT
ggccctctttttatctctat

SEQ ID NO: 36357 - DNA, 20 bp, Artificial Sequence
  Description of Artificial Sequence: Synthetic oligonucleotide
  Target: LAMA2; (-) strand; PAM type: NNNNGHTT; PAM sequence: CTAGGATT
cacctttaaatttgaagtgc

SEQ ID NO: 36358 - DNA, 20 bp, Artificial Sequence
  Description of Artificial Sequence: Synthetic oligonucleotide
  Target: LAMA2; (-) strand; PAM type: NNNNGHTT; PAM sequence: TGAAGATT
agcatctgcattgccatagc

SEQ ID NO: 36359 - DNA, 20 bp, Artificial Sequence
  Description of Artificial Sequence: Synthetic oligonucleotide
  Target: LAMA2; (-) strand; PAM type: NNNNGHTT; PAM sequence: AGTGGTTT
ttaggtatttccaagacctg

SEQ ID NO: 36360 - DNA, 20 bp, Artificial Sequence
  Description of Artificial Sequence: Synthetic oligonucleotide
  Target: LAMA2; (-) strand; PAM type: NNNNGHTT; PAM sequence: CTATGTTT
aatttaggtgttttttcccc

SEQ ID NO: 36361 - DNA, 20 bp, Artificial Sequence
  Description of Artificial Sequence: Synthetic oligonucleotide
  Target: LAMA2; (-) strand; PAM type: NNNNGHTT; PAM sequence: AGGTGTTT
acatatactcattacaattt

SEQ ID NO: 36362 - DNA, 20 bp, Artificial Sequence
  Description of Artificial Sequence: Synthetic oligonucleotide
  Target: LAMA2; (-) strand; PAM type: NNNNGHTT; PAM sequence: TAAAGATT
tggagccattcacctcttat

SEQ ID NO: 36363 - DNA, 20 bp, Artificial Sequence
  Description of Artificial Sequence: Synthetic oligonucleotide
  Target: LAMA2; (-) strand; PAM type: NNNNGHTT; PAM sequence: CTGTGTTT
tgggagcttccaaattaaat

SEQ ID NO: 36364 - DNA, 20 bp, Artificial Sequence
  Description of Artificial Sequence: Synthetic oligonucleotide
  Target: LAMA2; (-) strand; PAM type: NNNNGHTT; PAM sequence: GGGAGCTT
ccagtaggtattgctagggt

SEQ ID NO: 36365 - DNA, 20 bp, Artificial Sequence
  Description of Artificial Sequence: Synthetic oligonucleotide
  Target: LAMA2; (-) strand; PAM type: NNNNGHTT; PAM sequence: GTGTGTTT
aaattacatagtcaacattt

SEQ ID NO: 36366 - DNA, 20 bp, Artificial Sequence
  Description of Artificial Sequence: Synthetic oligonucleotide
  Target: LAMA2; (-) strand; PAM type: NNNNGHTT; PAM sequence: AAGTGTTT
tgtgaaaacaaacaaaaatg

SEQ ID NO: 36367 - DNA, 20 bp, Artificial Sequence
  Description of Artificial Sequence: Synthetic oligonucleotide
  Target: LAMA2; (-) strand; PAM type: NNNNGHTT; PAM sequence: TATTGTTT
atttttcttttcattgtgtt

SEQ ID NO: 36368 - DNA, 20 bp, Artificial Sequence
  Description of Artificial Sequence: Synthetic oligonucleotide
  Target: LAMA2; (-) strand; PAM type: NNNNGHTT; PAM sequence: TTGTGTTT
aaggctgatttttcttttca

SEQ ID NO: 36369 - DNA, 20 bp, Artificial Sequence
  Description of Artificial Sequence: Synthetic oligonucleotide
  Target: LAMA2; (-) strand; PAM type: NNNNGHTT; PAM sequence: GGCTGATT
ttagttgtactgtcttacaa

SEQ ID NO: 36370 - DNA, 20 bp, Artificial Sequence
  Description of Artificial Sequence: Synthetic oligonucleotide
  Target: LAMA2; (-) strand; PAM type: NNNNGHTT; PAM sequence: TAGTGTTT
gctgagaggcaactcctcat

SEQ ID NO: 36371 - DNA, 20 bp, Artificial Sequence
  Description of Artificial Sequence: Synthetic oligonucleotide
  Target: LAMA2; (-) strand; PAM type: NNNNGHTT; PAM sequence: CTTTGCTT
gccttttgaagattattcat

SEQ ID NO: 36372 - DNA, 20 bp, Artificial Sequence
  Description of Artificial Sequence: Synthetic oligonucleotide
  Target: LAMA2; (-) strand; PAM type: NNNNGHTT; PAM sequence: TGAAGATT
tgactatttactgtgccttt

SEQ ID NO: 36373 - DNA, 20 bp, Artificial Sequence
  Description of Artificial Sequence: Synthetic oligonucleotide
  Target: LAMA2; (-) strand; PAM type: NNNNGHTT; PAM sequence: GTAAGCTT
atatattctagcccacaact

SEQ ID NO: 36374 - DNA, 20 bp, Artificial Sequence
  Description of Artificial Sequence: Synthetic oligonucleotide
  Target: LAMA2; (-) strand; PAM type: NNNNGHTT; PAM sequence: TTTCGTTT
tccatttcttaatttttgta

SEQ ID NO: 36375 - DNA, 20 bp, Artificial Sequence
  Description of Artificial Sequence: Synthetic oligonucleotide
  Target: LAMA2; (-) strand; PAM type: NNNNGHTT; PAM sequence: ACTAGTTT
ttaaataaatctattttgtc

SEQ ID NO: 36376 - DNA, 20 bp, Artificial Sequence
  Description of Artificial Sequence: Synthetic oligonucleotide
  Target: LAMA2; (-) strand; PAM type: NNNNGHTT; PAM sequence: ATTAGCTT
attttgccattaatttatga

SEQ ID NO: 36377 - DNA, 20 bp, Artificial Sequence
  Description of Artificial Sequence: Synthetic oligonucleotide
  Target: LAMA2; (-) strand; PAM type: NNNNGHTT; PAM sequence: AACAGCTT
gcaatgatgtggatgagaac

SEQ ID NO: 36378 - DNA, 20 bp, Artificial Sequence
  Description of Artificial Sequence: Synthetic oligonucleotide
  Target: LAMA2; (-) strand; PAM type: NNNNGHTT; PAM sequence: TCTTGATT
aaagaaagtgagaaatagtg

SEQ ID NO: 36379 - DNA, 20 bp, Artificial Sequence
  Description of Artificial Sequence: Synthetic oligonucleotide
  Target: LAMA2; (-) strand; PAM type: NNNNGHTT; PAM sequence: TTTAGTTT
tccactccctcaaatcctga

SEQ ID NO: 36380 - DNA, 20 bp, Artificial Sequence
  Description of Artificial Sequence: Synthetic oligonucleotide
  Target: LAMA2; (-) strand; PAM type: NNNNGHTT; PAM sequence: TCCTGATT
catccctccactccctcaaa

SEQ ID NO: 36381 - DNA, 20 bp, Artificial Sequence
  Description of Artificial Sequence: Synthetic oligonucleotide
  Target: LAMA2; (-) strand; PAM type: NNNNGHTT; PAM sequence: GCGGGTTT
ctcttggccttgcacgtcct

SEQ ID NO: 36382 - DNA, 20 bp, Artificial Sequence
  Description of Artificial Sequence: Synthetic oligonucleotide
  Target: LAMA2; (-) strand; PAM type: NNNNGHTT; PAM sequence: TTCGGCTT
cccaaagcctatagtttaca

SEQ ID NO: 36383 - DNA, 20 bp, Artificial Sequence
  Description of Artificial Sequence: Synthetic oligonucleotide
  Target: LAMA2; (-) strand; PAM type: NNNNGHTT; PAM sequence: TATAGTTT
cgtcaaaattacccaaagcc

SEQ ID NO: 36384 - DNA, 20 bp, Artificial Sequence
  Description of Artificial Sequence: Synthetic oligonucleotide
  Target: LAMA2; (-) strand; PAM type: NNNNGHTT; PAM sequence: CAGAGATT
aaaagaaaaaaaaaaaaata

SEQ ID NO: 36385 - DNA, 20 bp, Artificial Sequence
  Description of Artificial Sequence: Synthetic oligonucleotide
  Target: LAMA2; (-) strand; PAM type: NNNNGHTT; PAM sequence: AATCGCTT
tcaggaagccgaggcaggag

SEQ ID NO: 36386 - DNA, 20 bp, Artificial Sequence
  Description of Artificial Sequence: Synthetic oligonucleotide
  Target: LAMA2; (-) strand; PAM type: NNNNGHTT; PAM sequence: CAGAGATT
gcaaaattgaaaggaagata

SEQ ID NO: 36387 - DNA, 20 bp, Artificial Sequence
  Description of Artificial Sequence: Synthetic oligonucleotide
  Target: LAMA2; (-) strand; PAM type: NNNNGHTT; PAM sequence: TAGAGTTT
caaagagtcagtagggtaca

SEQ ID NO: 36388 - DNA, 20 bp, Artificial Sequence
  Description of Artificial Sequence: Synthetic oligonucleotide
  Target: LAMA2; (-) strand; PAM type: NNNNGHTT; PAM sequence: AATTGTTT
taaaagtggctaagataaaa

SEQ ID NO: 36389 - DNA, 20 bp, Artificial Sequence
  Description of Artificial Sequence: Synthetic oligonucleotide
  Target: LAMA2; (-) strand; PAM type: NNNNGHTT; PAM sequence: TAGTGTTT
tatagagacagaaggtagaa

SEQ ID NO: 36390 - DNA, 20 bp, Artificial Sequence
  Description of Artificial Sequence: Synthetic oligonucleotide
  Target: LAMA2; (-) strand; PAM type: NNNNGHTT; PAM sequence: AATGGATT
ggaattaacctgtgttcatc

SEQ ID NO: 36391 - DNA, 20 bp, Artificial Sequence
  Description of Artificial Sequence: Synthetic oligonucleotide
  Target: LAMA2; (-) strand; PAM type: NNNNGHTT; PAM sequence: TAAAGATT
accatgagtaactgaaacct

SEQ ID NO: 36392 - DNA, 20 bp, Artificial Sequence
  Description of Artificial Sequence: Synthetic oligonucleotide
  Target: LAMA2; (-) strand; PAM type: NNNNGHTT; PAM sequence: TTCAGTTT
tgtatgtaatattttcagac

SEQ ID NO: 36393 - DNA, 20 bp, Artificial Sequence
  Description of Artificial Sequence: Synthetic oligonucleotide
  Target: LAMA2; (-) strand; PAM type: NNNNGHTT; PAM sequence: AAATGTTT
ttctccctctctctctctta

SEQ ID NO: 36394 - DNA, 20 bp, Artificial Sequence
  Description of Artificial Sequence: Synthetic oligonucleotide
  Target: LAMA2; (-) strand; PAM type: NNNNGHTT; PAM sequence: TGTAGCTT
tataataaaagttatgtgaa

SEQ ID NO: 36395 - DNA, 20 bp, Artificial Sequence
  Description of Artificial Sequence: Synthetic oligonucleotide
  Target: LAMA2; (-) strand; PAM type: NNNNGHTT; PAM sequence: AAGAGATT
atttataaaataggcacagt

SEQ ID NO: 36396 - DNA, 20 bp, Artificial Sequence
  Description of Artificial Sequence: Synthetic oligonucleotide
  Target: LAMA2; (-) strand; PAM type: NNNNGHTT; PAM sequence: TGAAGTTT
ctatacacacacatctttga

SEQ ID NO: 36397 - DNA, 20 bp, Artificial Sequence
  Description of Artificial Sequence: Synthetic oligonucleotide
  Target: LAMA2; (-) strand; PAM type: NNNNGHTT; PAM sequence: TCAAGATT
aatgttgtatctgtcatgtt

SEQ ID NO: 36398 - DNA, 20 bp, Artificial Sequence
  Description of Artificial Sequence: Synthetic oligonucleotide
  Target: LAMA2; (-) strand; PAM type: NNNNGHTT; PAM sequence: TCATGTTT
ttaatgcaatgttgtatctg

SEQ ID NO: 36399 - DNA, 20 bp, Artificial Sequence
  Description of Artificial Sequence: Synthetic oligonucleotide
  Target: LAMA2; (-) strand; PAM type: NNNNGHTT; PAM sequence: CCAGGATT
tacaagctaagcaaaattgt

SEQ ID NO: 36400 - DNA, 20 bp, Artificial Sequence
  Description of Artificial Sequence: Synthetic oligonucleotide
  Target: LAMA2; (-) strand; PAM type: NNNNGHTT; PAM sequence: TTGAGTTT
catttactaactgactcttt

SEQ ID NO: 36401 - DNA, 20 bp, Artificial Sequence
  Description of Artificial Sequence: Synthetic oligonucleotide
  Target: LAMA2; (-) strand; PAM type: NNNNGHTT; PAM sequence: ACAGGATT
tgtccagtgtctaggacaaa

SEQ ID NO: 36402 - DNA, 20 bp, Artificial Sequence
  Description of Artificial Sequence: Synthetic oligonucleotide
  Target: LAMA2; (-) strand; PAM type: NNNNGHTT; PAM sequence: AGTTGTTT
taactgtgtcattttgagga

SEQ ID NO: 36403 - DNA, 20 bp, Artificial Sequence
  Description of Artificial Sequence: Synthetic oligonucleotide
  Target: LAMA2; (-) strand; PAM type: NNNNGHTT; PAM sequence: TATTGTTT
actggattcatcttgtgctc

SEQ ID NO: 36404 - DNA, 20 bp, Artificial Sequence
  Description of Artificial Sequence: Synthetic oligonucleotide
  Target: LAMA2; (-) strand; PAM type: NNNNGHTT; PAM sequence: ACTGGATT
aggctttgacatcagaaaga

SEQ ID NO: 36405 - DNA, 20 bp, Artificial Sequence
  Description of Artificial Sequence: Synthetic oligonucleotide
  Target: LAMA2; (-) strand; PAM type: NNNNGHTT; PAM sequence: GCAGGCTT
ggtcatctggagtatacacg

SEQ ID NO: 36406 - DNA, 20 bp, Artificial Sequence
  Description of Artificial Sequence: Synthetic oligonucleotide
  Target: LAMA2; (-) strand; PAM type: NNNNGHTT; PAM sequence: TGATGCTT
attatatatcagagaagccc

SEQ ID NO: 36407 - DNA, 20 bp, Artificial Sequence
  Description of Artificial Sequence: Synthetic oligonucleotide
  Target: LAMA2; (-) strand; PAM type: NNNNGHTT; PAM sequence: GTGAGATT
gtaatttaatcttgttttta

SEQ ID NO: 36408 - DNA, 20 bp, Artificial Sequence
  Description of Artificial Sequence: Synthetic oligonucleotide
  Target: LAMA2; (-) strand; PAM type: NNNNGHTT; PAM sequence: TCTTGTTT
actcctctgtagtaatttaa

SEQ ID NO: 36409 - DNA, 20 bp, Artificial Sequence
  Description of Artificial Sequence: Synthetic oligonucleotide
  Target: LAMA2; (-) strand; PAM type: NNNNGHTT; PAM sequence: TAGAGTTT
aaatcctaagtttcactttt

SEQ ID NO: 36410 - DNA, 20 bp, Artificial Sequence
  Description of Artificial Sequence: Synthetic oligonucleotide
  Target: LAMA2; (-) strand; PAM type: NNNNGHTT; PAM sequence: CTAAGTTT
agaaacatttttggtaaatc

SEQ ID NO: 36411 - DNA, 20 bp, Artificial Sequence
  Description of Artificial Sequence: Synthetic oligonucleotide
  Target: LAMA2; (-) strand; PAM type: NNNNGHTT; PAM sequence: GTTTGATT
gcccactttttgatggggta

SEQ ID NO: 36412 - DNA, 20 bp, Artificial Sequence
  Description of Artificial Sequence: Synthetic oligonucleotide
  Target: LAMA2; (-) strand; PAM type: NNNNGHTT; PAM sequence: GGTAGTTT
ctttgcccactttttgatgg

SEQ ID NO: 36413 - DNA, 20 bp, Artificial Sequence
  Description of Artificial Sequence: Synthetic oligonucleotide
  Target: LAMA2; (-) strand; PAM type: NNNNGHTT; PAM sequence: TTTTGATT
gggatggtatctctttgtgg

SEQ ID NO: 36414 - DNA, 20 bp, Artificial Sequence
  Description of Artificial Sequence: Synthetic oligonucleotide
  Target: LAMA2; (-) strand; PAM type: NNNNGHTT; PAM sequence: TGTGGTTT
ggtgtgggatggtatctctt

SEQ ID NO: 36415 - DNA, 20 bp, Artificial Sequence
  Description of Artificial Sequence: Synthetic oligonucleotide
  Target: LAMA2; (-) strand; PAM type: NNNNGHTT; PAM sequence: TGTTGTTT
tccacatcctctccagcacc

SEQ ID NO: 36416 - DNA, 20 bp, Artificial Sequence
  Description of Artificial Sequence: Synthetic oligonucleotide
  Target: LAMA2; (-) strand; PAM type: NNNNGHTT; PAM sequence: ACTAGTTT
ctgtcttccacaatggttta

SEQ ID NO: 36417 - DNA, 20 bp, Artificial Sequence
  Description of Artificial Sequence: Synthetic oligonucleotide
  Target: LAMA2; (-) strand; PAM type: NNNNGHTT; PAM sequence: AATGGTTT
atcgccacactgtcttccac

SEQ ID NO: 36418 - DNA, 20 bp, Artificial Sequence
  Description of Artificial Sequence: Synthetic oligonucleotide
  Target: LAMA2; (-) strand; PAM type: NNNNGHTT; PAM sequence: GCATGATT
gtgcatgtgtctttatagca

SEQ ID NO: 36419 - DNA, 20 bp, Artificial Sequence
  Description of Artificial Sequence: Synthetic oligonucleotide
  Target: LAMA2; (-) strand; PAM type: NNNNGHTT; PAM sequence: TCCAGCTT
gtttgctgagaatgatggtt

SEQ ID NO: 36420 - DNA, 20 bp, Artificial Sequence
  Description of Artificial Sequence: Synthetic oligonucleotide
  Target: LAMA2; (-) strand; PAM type: NNNNGHTT; PAM sequence: GATGGTTT
tgctatagtttgctgagaat

SEQ ID NO: 36421 - DNA, 20 bp, Artificial Sequence
  Description of Artificial Sequence: Synthetic oligonucleotide
  Target: LAMA2; (-) strand; PAM type: NNNNGHTT; PAM sequence: TATAGTTT
gtttggtttcctgtccttgc

SEQ ID NO: 36422 - DNA, 20 bp, Artificial Sequence
  Description of Artificial Sequence: Synthetic oligonucleotide
  Target: LAMA2; (-) strand; PAM type: NNNNGHTT; PAM sequence: TTTGGTTT
atgagtgagaacatgcggtg

SEQ ID NO: 36423 - DNA, 20 bp, Artificial Sequence
  Description of Artificial Sequence: Synthetic oligonucleotide
  Target: LAMA2; (-) strand; PAM type: NNNNGHTT; PAM sequence: CGGTGTTT
cacctatgagtgagaacatg

SEQ ID NO: 36424 - DNA, 20 bp, Artificial Sequence
  Description of Artificial Sequence: Synthetic oligonucleotide
  Target: LAMA2; (-) strand; PAM type: NNNNGHTT; PAM sequence: GTTCGTTT
tgtgtccaagtgttctcatt

SEQ ID NO: 36425 - DNA, 20 bp, Artificial Sequence
  Description of Artificial Sequence: Synthetic oligonucleotide
  Target: LAMA2; (-) strand; PAM type: NNNNGHTT; PAM sequence: GCAGGTTT
aggatacatgtgcacaatgt

SEQ ID NO: 36426 - DNA, 20 bp, Artificial Sequence
  Description of Artificial Sequence: Synthetic oligonucleotide
  Target: LAMA2; (-) strand; PAM type: NNNNGHTT; PAM sequence: TTATGCTT
ttaagtttctttttttatta

SEQ ID NO: 36427 - DNA, 20 bp, Artificial Sequence
  Description of Artificial Sequence: Synthetic oligonucleotide
  Target: LAMA2; (-) strand; PAM type: NNNNGHTT; PAM sequence: TTAAGTTT
atacggacatttcatttttt

SEQ ID NO: 36428 - DNA, 20 bp, Artificial Sequence
  Description of Artificial Sequence: Synthetic oligonucleotide
  Target: LAMA2; (-) strand; PAM type: NNNNGHTT; PAM sequence: AGAAGATT
tttctgaatgatttcttaaa

SEQ ID NO: 36429 - DNA, 20 bp, Artificial Sequence
  Description of Artificial Sequence: Synthetic oligonucleotide
  Target: LAMA2; (-) strand; PAM type: NNNNGHTT; PAM sequence: GAATGATT
atcaaggacctacaatttct

SEQ ID NO: 36430 - DNA, 20 bp, Artificial Sequence
  Description of Artificial Sequence: Synthetic oligonucleotide
  Target: LAMA2; (-) strand; PAM type: NNNNGHTT; PAM sequence: CAGTGTTT
ctttctcaaatcttccagca

SEQ ID NO: 36431 - DNA, 20 bp, Artificial Sequence
  Description of Artificial Sequence: Synthetic oligonucleotide
  Target: LAMA2; (-) strand; PAM type: NNNNGHTT; PAM sequence: AAATGATT
aaaaggacttaaacttctgg

SEQ ID NO: 36432 - DNA, 20 bp, Artificial Sequence
  Description of Artificial Sequence: Synthetic oligonucleotide
  Target: LAMA2; (-) strand; PAM type: NNNNGHTT; PAM sequence: AAATGCTT
tccttattttctatcttcag

SEQ ID NO: 36433 - DNA, 20 bp, Artificial Sequence
  Description of Artificial Sequence: Synthetic oligonucleotide
  Target: LAMA2; (-) strand; PAM type: NNNNGHTT; PAM sequence: TTGTGTTT
tatgaaaagcatgtgatttc

SEQ ID NO: 36434 - DNA, 20 bp, Artificial Sequence
  Description of Artificial Sequence: Synthetic oligonucleotide
  Target: LAMA2; (-) strand; PAM type: NNNNGHTT; PAM sequence: ATGTGATT
ttgataatgatatgaaaagc

SEQ ID NO: 36435 - DNA, 20 bp, Artificial Sequence
  Description of Artificial Sequence: Synthetic oligonucleotide
  Target: LAMA2; (-) strand; PAM type: NNNNGHTT; PAM sequence: AGTTGTTT
ataaatggtttttaatagca

SEQ ID NO: 36436 - DNA, 20 bp, Artificial Sequence
  Description of Artificial Sequence: Synthetic oligonucleotide
  Target: LAMA2; (-) strand; PAM type: NNNNGHTT; PAM sequence: AATGGTTT
aattaaacaagtttctgata

SEQ ID NO: 36437 - DNA, 20 bp, Artificial Sequence
  Description of Artificial Sequence: Synthetic oligonucleotide
  Target: LAMA2; (-) strand; PAM type: NNNNGHTT; PAM sequence: ACAAGTTT
atatttgacatattaattaa

SEQ ID NO: 36438 - DNA, 20 bp, Artificial Sequence
  Description of Artificial Sequence: Synthetic oligonucleotide
  Target: LAMA2; (-) strand; PAM type: NNNNGHTT; PAM sequence: ACATGATT
aggaatattttgattgttat

SEQ ID NO: 36439 - DNA, 20 bp, Artificial Sequence
  Description of Artificial Sequence: Synthetic oligonucleotide
  Target: LAMA2; (-) strand; PAM type: NNNNGHTT; PAM sequence: TTTTGATT
tcaatatgtttttaggaata

SEQ ID NO: 36440 - DNA, 20 bp, Artificial Sequence
  Description of Artificial Sequence: Synthetic oligonucleotide
  Target: LAMA2; (-) strand; PAM type: NNNNGHTT; PAM sequence: ATATGTTT
atgttttgttaaagttctca

SEQ ID NO: 36441 - DNA, 20 bp, Artificial Sequence
  Description of Artificial Sequence: Synthetic oligonucleotide
  Target: LAMA2; (-) strand; PAM type: NNNNGHTT; PAM sequence: AAATGTTT
ctaatttcattccaactgta

SEQ ID NO: 36442 - DNA, 20 bp, Artificial Sequence
  Description of Artificial Sequence: Synthetic oligonucleotide
  Target: LAMA2; (-) strand; PAM type: NNNNGHTT; PAM sequence: ACTGGCTT
taggataatatataatttct

SEQ ID NO: 36443 - DNA, 20 bp, Artificial Sequence
  Description of Artificial Sequence: Synthetic oligonucleotide
  Target: LAMA2; (-) strand; PAM type: NNNNGHTT; PAM sequence: AAAGGATT
aaaagtaataaaattacgaa

SEQ ID NO: 36444 - DNA, 20 bp, Artificial Sequence
  Description of Artificial Sequence: Synthetic oligonucleotide
  Target: LAMA2; (-) strand; PAM type: NNNNGHTT; PAM sequence: GTTGGATT
caaaaaatttcatttgaggg

SEQ ID NO: 36445 - DNA, 20 bp, Artificial Sequence
  Description of Artificial Sequence: Synthetic oligonucleotide
  Target: LAMA2; (-) strand; PAM type: NNNNGHTT; PAM sequence: AAACGTTT
atatctttattggatgttta

SEQ ID NO: 36446 - DNA, 20 bp, Artificial Sequence
  Description of Artificial Sequence: Synthetic oligonucleotide
  Target: LAMA2; (-) strand; PAM type: NNNNGHTT; PAM sequence: GGATGTTT
tagcatgttatatctttatt

SEQ ID NO: 36447 - DNA, 20 bp, Artificial Sequence
  Description of Artificial Sequence: Synthetic oligonucleotide
  Target: LAMA2; (-) strand; PAM type: NNNNGHTT; PAM sequence: AAACGTTT
atatataaatgtttttgttg

SEQ ID NO: 36448 - DNA, 20 bp, Artificial Sequence
  Description of Artificial Sequence: Synthetic oligonucleotide
  Target: LAMA2; (-) strand; PAM type: NNNNGHTT; PAM sequence: AAATGTTT
caatcaatagagaaatatat

SEQ ID NO: 36449 - DNA, 20 bp, Artificial Sequence
  Description of Artificial Sequence: Synthetic oligonucleotide
  Target: LAMA2; (-) strand; PAM type: NNNNGHTT; PAM sequence: ATAAGATT
tatccagagaggctataaag

SEQ ID NO: 36450 - DNA, 20 bp, Artificial Sequence
  Description of Artificial Sequence: Synthetic oligonucleotide
  Target: LAMA2; (-) strand; PAM type: NNNNGHTT; PAM sequence: AGAAGTTT
tcacgaataaagttggaatt

SEQ ID NO: 36451 - DNA, 20 bp, Artificial Sequence
  Description of Artificial Sequence: Synthetic oligonucleotide
  Target: LAMA2; (-) strand; PAM type: NNNNGHTT; PAM sequence: AGCTGTTT
ttttaaagagataaagagaa

SEQ ID NO: 36452 - DNA, 20 bp, Artificial Sequence
  Description of Artificial Sequence: Synthetic oligonucleotide
  Target: LAMA2; (-) strand; PAM type: NNNNGHTT; PAM sequence: TAATGATT
atactgaaaataataaaagg

SEQ ID NO: 36453 - DNA, 20 bp, Artificial Sequence
  Description of Artificial Sequence: Synthetic oligonucleotide
  Target: LAMA2; (-) strand; PAM type: NNNNGHTT; PAM sequence: AAATGTTT
aaagtagcaatggaaaaacc

SEQ ID NO: 36454 - DNA, 20 bp, Artificial Sequence
  Description of Artificial Sequence: Synthetic oligonucleotide
  Target: LAMA2; (-) strand; PAM type: NNNNGHTT; PAM sequence: CTATGCTT
aaaaatatctgtaaatatag

SEQ ID NO: 36455 - DNA, 20 bp, Artificial Sequence
  Description of Artificial Sequence: Synthetic oligonucleotide
  Target: LAMA2; (-) strand; PAM type: NNNNGHTT; PAM sequence: TAAAGTTT
ttacaaaatgtaaaacttta

SEQ ID NO: 36456 - DNA, 20 bp, Artificial Sequence
  Description of Artificial Sequence: Synthetic oligonucleotide
  Target: LAMA2; (-) strand; PAM type: NNNNGHTT; PAM sequence: CTAAGTTT
gcaatttaatttttaaataa

SEQ ID NO: 36457 - DNA, 20 bp, Artificial Sequence
  Description of Artificial Sequence: Synthetic oligonucleotide
  Target: LAMA2; (-) strand; PAM type: NNNNGHTT; PAM sequence: TCTCGCTT
aggttctgctagctgttctg

SEQ ID NO: 36458 - DNA, 20 bp, Artificial Sequence
  Description of Artificial Sequence: Synthetic oligonucleotide
  Target: LAMA2; (-) strand; PAM type: NNNNGHTT; PAM sequence: CTTGGTTT
ttattgatagaaatgtatca

SEQ ID NO: 36459 - DNA, 20 bp, Artificial Sequence
  Description of Artificial Sequence: Synthetic oligonucleotide
  Target: LAMA2; (-) strand; PAM type: NNNNGHTT; PAM sequence: AGAAGATT
aatgaataaagaacaaagaa

SEQ ID NO: 36460 - DNA, 20 bp, Artificial Sequence
  Description of Artificial Sequence: Synthetic oligonucleotide
  Target: LAMA2; (-) strand; PAM type: NNNNGHTT; PAM sequence: GTTTGTTT
tttggtgttgttttttgttt

SEQ ID NO: 36461 - DNA, 20 bp, Artificial Sequence
  Description of Artificial Sequence: Synthetic oligonucleotide
  Target: LAMA2; (-) strand; PAM type: NNNNGHTT; PAM sequence: GTTTGTTT
ttgatttggtgttgtttttt

SEQ ID NO: 36462 - DNA, 20 bp, Artificial Sequence
  Description of Artificial Sequence: Synthetic oligonucleotide
  Target: LAMA2; (-) strand; PAM type: NNNNGHTT; PAM sequence: TTTTGTTT
tcatttgatttggtgttgtt

SEQ ID NO: 36463 - DNA, 20 bp, Artificial Sequence
  Description of Artificial Sequence: Synthetic oligonucleotide
  Target: LAMA2; (-) strand; PAM type: NNNNGHTT; PAM sequence: TGTTGTTT
tcaacagtcatttgatttgg

SEQ ID NO: 36464 - DNA, 20 bp, Artificial Sequence
  Description of Artificial Sequence: Synthetic oligonucleotide
  Target: LAMA2; (-) strand; PAM type: NNNNGHTT; PAM sequence: ATTTGATT
taattcccccatcaacagtc

SEQ ID NO: 36465 - DNA, 20 bp, Artificial Sequence
  Description of Artificial Sequence: Synthetic oligonucleotide
  Target: LAMA2; (-) strand; PAM type: NNNNGHTT; PAM sequence: GTCAGCTT
atctttgagttggaggtaaa

SEQ ID NO: 36466 - DNA, 20 bp, Artificial Sequence
  Description of Artificial Sequence: Synthetic oligonucleotide
  Target: LAMA2; (-) strand; PAM type: NNNNGHTT; PAM sequence: ATTAGATT
aaacacagagagaaagagaa

SEQ ID NO: 36467 - DNA, 20 bp, Artificial Sequence
  Description of Artificial Sequence: Synthetic oligonucleotide
  Target: LAMA2; (-) strand; PAM type: NNNNGHTT; PAM sequence: CAGTGTTT
tacatgtgaaatacctagat

SEQ ID NO: 36468 - DNA, 20 bp, Artificial Sequence
  Description of Artificial Sequence: Synthetic oligonucleotide
  Target: LAMA2; (-) strand; PAM type: NNNNGHTT; PAM sequence: TGAGGATT
atacttccttcataaagttg

SEQ ID NO: 36469 - DNA, 20 bp, Artificial Sequence
  Description of Artificial Sequence: Synthetic oligonucleotide
  Target: LAMA2; (-) strand; PAM type: NNNNGHTT; PAM sequence: TGCAGTTT
aacaggcaatacacctgcgg

SEQ ID NO: 36470 - DNA, 20 bp, Artificial Sequence
  Description of Artificial Sequence: Synthetic oligonucleotide
  Target: LAMA2; (-) strand; PAM type: NNNNGHTT; PAM sequence: CATTGCTT
acaaatattatcaagcaaca

SEQ ID NO: 36471 - DNA, 20 bp, Artificial Sequence
  Description of Artificial Sequence: Synthetic oligonucleotide
  Target: LAMA2; (-) strand; PAM type: NNNNGHTT; PAM sequence: ATTTGTTT
attaacttgttcactaatcc

SEQ ID NO: 36472 - DNA, 20 bp, Artificial Sequence
  Description of Artificial Sequence: Synthetic oligonucleotide
  Target: LAMA2; (-) strand; PAM type: NNNNGHTT; PAM sequence: TGCAGATT
ttgtttttcaaaatatgtat

SEQ ID NO: 36473 - DNA, 20 bp, Artificial Sequence
  Description of Artificial Sequence: Synthetic oligonucleotide
  Target: LAMA2; (-) strand; PAM type: NNNNGHTT; PAM sequence: CTTTGTTT
ttggctagcattactctcac

SEQ ID NO: 36474 - DNA, 20 bp, Artificial Sequence
  Description of Artificial Sequence: Synthetic oligonucleotide
  Target: LAMA2; (-) strand; PAM type: NNNNGHTT; PAM sequence: ACCTGCTT
acagttgtgcctgcagtcaa

SEQ ID NO: 36475 - DNA, 20 bp, Artificial Sequence
  Description of Artificial Sequence: Synthetic oligonucleotide
  Target: LAMA2; (-) strand; PAM type: NNNNGHTT; PAM sequence: TGGGGATT
ttgaaaagagaacattcaaa

SEQ ID NO: 36476 - DNA, 20 bp, Artificial Sequence
  Description of Artificial Sequence: Synthetic oligonucleotide
  Target: LAMA2; (-) strand; PAM type: NNNNGHTT; PAM sequence: TGCAGCTT
actaacttcagatcaatttt

SEQ ID NO: 36477 - DNA, 20 bp, Artificial Sequence
  Description of Artificial Sequence: Synthetic oligonucleotide
  Target: LAMA2; (-) strand; PAM type: NNNNGHTT; PAM sequence: ACATGCTT
caacattttagaaatgtatc

SEQ ID NO: 36478 - DNA, 20 bp, Artificial Sequence
  Description of Artificial Sequence: Synthetic oligonucleotide
  Target: LAMA2; (-) strand; PAM type: NNNNGHTT; PAM sequence: TCATGATT
gaatacaagccaaaagaagg

SEQ ID NO: 36479 - DNA, 20 bp, Artificial Sequence
  Description of Artificial Sequence: Synthetic oligonucleotide
  Target: LAMA2; (-) strand; PAM type: NNNNGHTT; PAM sequence: CATTGTTT
ttgcatggaggggacttttt

SEQ ID NO: 36480 - DNA, 20 bp, Artificial Sequence
  Description of Artificial Sequence: Synthetic oligonucleotide
  Target: LAMA2; (-) strand; PAM type: NNNNGHTT; PAM sequence: AGCTGATT
aatactgttcacttattgaa

SEQ ID NO: 36481 - DNA, 20 bp, Artificial Sequence
  Description of Artificial Sequence: Synthetic oligonucleotide
  Target: LAMA2; (-) strand; PAM type: NNNNGHTT; PAM sequence: CAGGGTTT
ggcttaacttttccttatcc

SEQ ID NO: 36482 - DNA, 20 bp, Artificial Sequence
  Description of Artificial Sequence: Synthetic oligonucleotide
  Target: LAMA2; (-) strand; PAM type: NNNNGHTT; PAM sequence: GGAGGCTT
ttattagaggtatgaagaat

SEQ ID NO: 36483 - DNA, 20 bp, Artificial Sequence
  Description of Artificial Sequence: Synthetic oligonucleotide
  Target: LAMA2; (-) strand; PAM type: NNNNGHTT; PAM sequence: AAATGATT
aacataagtggatggttgta

SEQ ID NO: 36484 - DNA, 20 bp, Artificial Sequence
  Description of Artificial Sequence: Synthetic oligonucleotide
  Target: LAMA2; (-) strand; PAM type: NNNNGHTT; PAM sequence: TGGGGCTT
aagggataaaactgagtcca

SEQ ID NO: 36485 - DNA, 20 bp, Artificial Sequence
  Description of Artificial Sequence: Synthetic oligonucleotide
  Target: LAMA2; (-) strand; PAM type: NNNNGHTT; PAM sequence: TTCTGATT
taggacaaaatgtcatgaaa

SEQ ID NO: 36486 - DNA, 20 bp, Artificial Sequence
  Description of Artificial Sequence: Synthetic oligonucleotide
  Target: LAMA2; (-) strand; PAM type: NNNNGHTT; PAM sequence: AACAGATT
aattttaaaagtgacatgag

SEQ ID NO: 36487 - DNA, 20 bp, Artificial Sequence
  Description of Artificial Sequence: Synthetic oligonucleotide
  Target: LAMA2; (-) strand; PAM type: NNNNGHTT; PAM sequence: TCTAGTTT
ccattggagaaaatcaagtg

SEQ ID NO: 36488 - DNA, 20 bp, Artificial Sequence
  Description of Artificial Sequence: Synthetic oligonucleotide
  Target: LAMA2; (-) strand; PAM type: NNNNGHTT; PAM sequence: GCAAGTTT
aaaaatacgttttgctgtta

SEQ ID NO: 36489 - DNA, 20 bp, Artificial Sequence
  Description of Artificial Sequence: Synthetic oligonucleotide
  Target: LAMA2; (-) strand; PAM type: NNNNGHTT; PAM sequence: ATACGTTT
ttcatgctgccttcagaaaa

SEQ ID NO: 36490 - DNA, 20 bp, Artificial Sequence
  Description of Artificial Sequence: Synthetic oligonucleotide
  Target: LAMA2; (-) strand; PAM type: NNNNGHTT; PAM sequence: GCTGGATT
tgatttatgaagtgctgaga

SEQ ID NO: 36491 - DNA, 20 bp, Artificial Sequence
  Description of Artificial Sequence: Synthetic oligonucleotide
  Target: LAMA2; (-) strand; PAM type: NNNNGHTT; PAM sequence: AAATGATT
cttcagtgacatcaggtcag

SEQ ID NO: 36492 - DNA, 20 bp, Artificial Sequence
  Description of Artificial Sequence: Synthetic oligonucleotide
  Target: LAMA2; (-) strand; PAM type: NNNNGHTT; PAM sequence: AAAAGTTT
tggaatgcaaagcagttaac

SEQ ID NO: 36493 - DNA, 20 bp, Artificial Sequence
  Description of Artificial Sequence: Synthetic oligonucleotide
  Target: LAMA2; (-) strand; PAM type: NNNNGHTT; PAM sequence: ATGTGATT
caagcctgatgtcattttgg

SEQ ID NO: 36494 - DNA, 20 bp, Artificial Sequence
  Description of Artificial Sequence: Synthetic oligonucleotide
  Target: LAMA2; (-) strand; PAM type: NNNNGHTT; PAM sequence: AACAGTTT
gcaaaagagagcattccgcc

SEQ ID NO: 36495 - DNA, 20 bp, Artificial Sequence
  Description of Artificial Sequence: Synthetic oligonucleotide
  Target: LAMA2; (-) strand; PAM type: NNNNGHTT; PAM sequence: GATGGTTT
aaatgggataccacctctca

SEQ ID NO: 36496 - DNA, 20 bp, Artificial Sequence
  Description of Artificial Sequence: Synthetic oligonucleotide
  Target: LAMA2; (-) strand; PAM type: NNNNGHTT; PAM sequence: AATAGATT
ttatttttaaagttcaattg

SEQ ID NO: 36497 - DNA, 20 bp, Artificial Sequence
  Description of Artificial Sequence: Synthetic oligonucleotide
  Target: LAMA2; (-) strand; PAM type: NNNNGHTT; PAM sequence: GCAAGTTT
taattttgttttgttatgaa

SEQ ID NO: 36498 - DNA, 20 bp, Artificial Sequence
  Description of Artificial Sequence: Synthetic oligonucleotide
  Target: LAMA2; (-) strand; PAM type: NNNNGHTT; PAM sequence: TTTTGTTT
atttctttttgataatttaa

SEQ ID NO: 36499 - DNA, 20 bp, Artificial Sequence
  Description of Artificial Sequence: Synthetic oligonucleotide
  Target: LAMA2; (-) strand; PAM type: NNNNGHTT; PAM sequence: TTTTGCTT
atagatccagttttgcctac

SEQ ID NO: 36500 - DNA, 20 bp, Artificial Sequence
  Description of Artificial Sequence: Synthetic oligonucleotide
  Target: LAMA2; (-) strand; PAM type: NNNNGHTT; PAM sequence: TCCAGTTT
ttatggagcaacttcataga

SEQ ID NO: 36501 - DNA, 20 bp, Artificial Sequence
  Description of Artificial Sequence: Synthetic oligonucleotide
  Target: LAMA2; (-) strand; PAM type: NNNNGHTT; PAM sequence: TTAAGTTT
atttgtgaggttttaagcca

SEQ ID NO: 36502 - DNA, 20 bp, Artificial Sequence
  Description of Artificial Sequence: Synthetic oligonucleotide
  Target: LAMA2; (-) strand; PAM type: NNNNGHTT; PAM sequence: TGAGGTTT
taaactgtgagataaatttg

SEQ ID NO: 36503 - DNA, 20 bp, Artificial Sequence
  Description of Artificial Sequence: Synthetic oligonucleotide
  Target: LAMA2; (-) strand; PAM type: NNNNGHTT; PAM sequence: TTCAGCTT
agcctgtagaaactgattct

SEQ ID NO: 36504 - DNA, 20 bp, Artificial Sequence
  Description of Artificial Sequence: Synthetic oligonucleotide
  Target: LAMA2; (-) strand; PAM type: NNNNGHTT; PAM sequence: AACTGATT
ggatgcaggtagcctgtaga

SEQ ID NO: 36505 - DNA, 20 bp, Artificial Sequence
  Description of Artificial Sequence: Synthetic oligonucleotide
  Target: LAMA2; (-) strand; PAM type: NNNNGHTT; PAM sequence: CCTGGCTT
aacgaaggattcaacctgtt

SEQ ID NO: 36506 - DNA, 20 bp, Artificial Sequence
  Description of Artificial Sequence: Synthetic oligonucleotide
  Target: LAMA2; (-) strand; PAM type: NNNNGHTT; PAM sequence: GAAGGATT
agaggttagggtggtacaac

SEQ ID NO: 36507 - DNA, 20 bp, Artificial Sequence
  Description of Artificial Sequence: Synthetic oligonucleotide
  Target: LAMA2; (-) strand; PAM type: NNNNGHTT; PAM sequence: ATATGATT
tggcaaagggaactttgtag

SEQ ID NO: 36508 - DNA, 20 bp, Artificial Sequence
  Description of Artificial Sequence: Synthetic oligonucleotide
  Target: LAMA2; (-) strand; PAM type: NNNNGHTT; PAM sequence: AACTGATT
aactctaagagacaggtagt

SEQ ID NO: 36509 - DNA, 20 bp, Artificial Sequence
  Description of Artificial Sequence: Synthetic oligonucleotide
  Target: LAMA2; (-) strand; PAM type: NNNNGHTT; PAM sequence: ATTTGTTT
aggcactttattacacagaa

SEQ ID NO: 36510 - DNA, 20 bp, Artificial Sequence
  Description of Artificial Sequence: Synthetic oligonucleotide
  Target: LAMA2; (-) strand; PAM type: NNNNGHTT; PAM sequence: TAGAGCTT
ctgctgtggttcttgttaat

SEQ ID NO: 36511 - DNA, 20 bp, Artificial Sequence
  Description of Artificial Sequence: Synthetic oligonucleotide
  Target: LAMA2; (-) strand; PAM type: NNNNGHTT; PAM sequence: TAGAGATT
agtaatatctattaataatt

SEQ ID NO: 36512 - DNA, 20 bp, Artificial Sequence
  Description of Artificial Sequence: Synthetic oligonucleotide
  Target: LAMA2; (-) strand; PAM type: NNNNGHTT; PAM sequence: TTTTGATT
atctttaaagtgtccacaga

SEQ ID NO: 36513 - DNA, 20 bp, Artificial Sequence
  Description of Artificial Sequence: Synthetic oligonucleotide
  Target: LAMA2; (-) strand; PAM type: NNNNGHTT; PAM sequence: CACAGATT
atccttatctttaaagtgtc

SEQ ID NO: 36514 - DNA, 20 bp, Artificial Sequence
  Description of Artificial Sequence: Synthetic oligonucleotide
  Target: LAMA2; (-) strand; PAM type: NNNNGHTT; PAM sequence: ACCTGCTT
cactctcaggagttattata

SEQ ID NO: 36515 - DNA, 20 bp, Artificial Sequence
  Description of Artificial Sequence: Synthetic oligonucleotide
  Target: LAMA2; (-) strand; PAM type: NNNNGHTT; PAM sequence: TGCTGTTT
taagagtagcctgtaccctc

SEQ ID NO: 36516 - DNA, 20 bp, Artificial Sequence
  Description of Artificial Sequence: Synthetic oligonucleotide
  Target: LAMA2; (-) strand; PAM type: NNNNGHTT; PAM sequence: CCAAGCTT
agaaatatcatcatctattt

SEQ ID NO: 36517 - DNA, 20 bp, Artificial Sequence
  Description of Artificial Sequence: Synthetic oligonucleotide
  Target: LAMA2; (-) strand; PAM type: NNNNGHTT; PAM sequence: GAATGATT
cctctgtgagaaacacccaa

SEQ ID NO: 36518 - DNA, 20 bp, Artificial Sequence
  Description of Artificial Sequence: Synthetic oligonucleotide
  Target: LAMA2; (-) strand; PAM type: NNNNGHTT; PAM sequence: ACTTGTTT
aaaaccagagacctttgttc

SEQ ID NO: 36519 - DNA, 20 bp, Artificial Sequence
  Description of Artificial Sequence: Synthetic oligonucleotide
  Target: LAMA2; (-) strand; PAM type: NNNNGHTT; PAM sequence: AGATGCTT
caagatgtgctttgttaaac

SEQ ID NO: 36520 - DNA, 20 bp, Artificial Sequence
  Description of Artificial Sequence: Synthetic oligonucleotide
  Target: LAMA2; (-) strand; PAM type: NNNNGHTT; PAM sequence: ATGTGCTT
tggattaagggcggtacaag

SEQ ID NO: 36521 - DNA, 20 bp, Artificial Sequence
  Description of Artificial Sequence: Synthetic oligonucleotide
  Target: LAMA2; (-) strand; PAM type: NNNNGHTT; PAM sequence: AATGGATT
gctgtgtccactcagggttg

SEQ ID NO: 36522 - DNA, 20 bp, Artificial Sequence
  Description of Artificial Sequence: Synthetic oligonucleotide
  Target: LAMA2; (-) strand; PAM type: NNNNGHTT; PAM sequence: GAAAGATT
tccattttgttctgtactaa

SEQ ID NO: 36523 - DNA, 20 bp, Artificial Sequence
  Description of Artificial Sequence: Synthetic oligonucleotide
  Target: LAMA2; (-) strand; PAM type: NNNNGHTT; PAM sequence: ATCAGATT
tgtggggaaaagatagagaa

SEQ ID NO: 36524 - DNA, 20 bp, Artificial Sequence
  Description of Artificial Sequence: Synthetic oligonucleotide
  Target: LAMA2; (-) strand; PAM type: NNNNGHTT; PAM sequence: GGTGGTTT
gaacgggccatgatgatgat

SEQ ID NO: 36525 - DNA, 20 bp, Artificial Sequence
  Description of Artificial Sequence: Synthetic oligonucleotide
  Target: LAMA2; (-) strand; PAM type: NNNNGHTT; PAM sequence: CCGAGTTT
tgccttggcctcccaaagtg

SEQ ID NO: 36526 - DNA, 20 bp, Artificial Sequence
  Description of Artificial Sequence: Synthetic oligonucleotide
  Target: LAMA2; (-) strand; PAM type: NNNNGHTT; PAM sequence: CCGAGATT
agcctcggcctcccgaggtg

SEQ ID NO: 36527 - DNA, 20 bp, Artificial Sequence
  Description of Artificial Sequence: Synthetic oligonucleotide
  Target: LAMA2; (-) strand; PAM type: NNNNGHTT; PAM sequence: GAAAGTTT
ataacaaatcaaagacagaa

SEQ ID NO: 36528 - DNA, 20 bp, Artificial Sequence
  Description of Artificial Sequence: Synthetic oligonucleotide
  Target: LAMA2; (-) strand; PAM type: NNNNGHTT; PAM sequence: CAAAGATT
aagcatttggggactaatag

SEQ ID NO: 36529 - DNA, 20 bp, Artificial Sequence
  Description of Artificial Sequence: Synthetic oligonucleotide
  Target: LAMA2; (-) strand; PAM type: NNNNGHTT; PAM sequence: TTGTGCTT
cctggcattgcctttgtttt

SEQ ID NO: 36530 - DNA, 20 bp, Artificial Sequence
  Description of Artificial Sequence: Synthetic oligonucleotide
  Target: LAMA2; (-) strand; PAM type: NNNNGHTT; PAM sequence: CTTTGTTT
ggagaaatacctggcattgc

SEQ ID NO: 36531 - DNA, 20 bp, Artificial Sequence
  Description of Artificial Sequence: Synthetic oligonucleotide
  Target: LAMA2; (-) strand; PAM type: NNNNGHTT; PAM sequence: GACAGTTT
tcacaggcaatcagaaatat

SEQ ID NO: 36532 - DNA, 20 bp, Artificial Sequence
  Description of Artificial Sequence: Synthetic oligonucleotide
  Target: LAMA2; (-) strand; PAM type: NNNNGHTT; PAM sequence: CATGGCTT
tgaataagtcattggcacag

SEQ ID NO: 36533 - DNA, 20 bp, Artificial Sequence
  Description of Artificial Sequence: Synthetic oligonucleotide
  Target: LAMA2; (-) strand; PAM type: NNNNGHTT; PAM sequence: AAAAGATT
ttgaaacaatctgtggtttc

SEQ ID NO: 36534 - DNA, 20 bp, Artificial Sequence
  Description of Artificial Sequence: Synthetic oligonucleotide
  Target: LAMA2; (-) strand; PAM type: NNNNGHTT; PAM sequence: TGTGGTTT
ttctctcatttgaaacaatc

SEQ ID NO: 36535 - DNA, 20 bp, Artificial Sequence
  Description of Artificial Sequence: Synthetic oligonucleotide
  Target: LAMA2; (-) strand; PAM type: NNNNGHTT; PAM sequence: CCATGCTT
ttattaatgcatttagtacg

SEQ ID NO: 36536 - DNA, 20 bp, Artificial Sequence
  Description of Artificial Sequence: Synthetic oligonucleotide
  Target: LAMA2; (-) strand; PAM type: NNNNGHTT; PAM sequence: CTCAGCTT
tggaatgaataaggtcctcc

SEQ ID NO: 36537 - DNA, 20 bp, Artificial Sequence
  Description of Artificial Sequence: Synthetic oligonucleotide
  Target: LAMA2; (-) strand; PAM type: NNNNGHTT; PAM sequence: ATATGCTT
ctgcattcttagctcaagaa

SEQ ID NO: 36538 - DNA, 20 bp, Artificial Sequence
  Description of Artificial Sequence: Synthetic oligonucleotide
  Target: LAMA2; (-) strand; PAM type: NNNNGHTT; PAM sequence: TAGTGCTT
tattactactactggtaatt

SEQ ID NO: 36539 - DNA, 20 bp, Artificial Sequence
  Description of Artificial Sequence: Synthetic oligonucleotide
  Target: LAMA2; (-) strand; PAM type: NNNNGHTT; PAM sequence: TATTGATT
tctcattttagtaaacaaac

SEQ ID NO: 36540 - DNA, 20 bp, Artificial Sequence
  Description of Artificial Sequence: Synthetic oligonucleotide
  Target: LAMA2; (-) strand; PAM type: NNNNGHTT; PAM sequence: AAAAGCTT
aaatttttatatcagaataa

SEQ ID NO: 36541 - DNA, 20 bp, Artificial Sequence
  Description of Artificial Sequence: Synthetic oligonucleotide
  Target: LAMA2; (-) strand; PAM type: NNNNGHTT; PAM sequence: ATTTGCTT
aagcgagtaatacatatgga

SEQ ID NO: 36542 - DNA, 20 bp, Artificial Sequence
  Description of Artificial Sequence: Synthetic oligonucleotide
  Target: LAMA2; (-) strand; PAM type: NNNNGHTT; PAM sequence: AATGGTTT
tattaatttttagatgtgac

SEQ ID NO: 36543 - DNA, 20 bp, Artificial Sequence
  Description of Artificial Sequence: Synthetic oligonucleotide
  Target: LAMA2; (-) strand; PAM type: NNNNGHTT; PAM sequence: AACTGTTT
cttcttgtgaatcctgattc

SEQ ID NO: 36544 - DNA, 20 bp, Artificial Sequence
  Description of Artificial Sequence: Synthetic oligonucleotide
  Target: LAMA2; (-) strand; PAM type: NNNNGHTT; PAM sequence: TCCTGATT
agtatgtgacttcttgtgaa

SEQ ID NO: 36545 - DNA, 20 bp, Artificial Sequence
  Description of Artificial Sequence: Synthetic oligonucleotide
  Target: LAMA2; (-) strand; PAM type: NNNNGHTT; PAM sequence: TATTGATT
ttgcaaggaagttaaaatgt

SEQ ID NO: 36546 - DNA, 20 bp, Artificial Sequence
  Description of Artificial Sequence: Synthetic oligonucleotide
  Target: LAMA2; (-) strand; PAM type: NNNNGHTT; PAM sequence: CGTGGTTT
aaacactactggacacacaa

SEQ ID NO: 36547 - DNA, 20 bp, Artificial Sequence
  Description of Artificial Sequence: Synthetic oligonucleotide
  Target: LAMA2; (-) strand; PAM type: NNNNGHTT; PAM sequence: ATCAGTTT
gtaactctctaaatttatct

SEQ ID NO: 36548 - DNA, 20 bp, Artificial Sequence
  Description of Artificial Sequence: Synthetic oligonucleotide
  Target: LAMA2; (-) strand; PAM type: NNNNGHTT; PAM sequence: TGCAGTTT
tcactgtgtatagtttactg

SEQ ID NO: 36549 - DNA, 20 bp, Artificial Sequence
  Description of Artificial Sequence: Synthetic oligonucleotide
  Target: LAMA2; (-) strand; PAM type: NNNNGHTT; PAM sequence: TATAGTTT
ttaccacaaggttcactgtg

SEQ ID NO: 36550 - DNA, 20 bp, Artificial Sequence
  Description of Artificial Sequence: Synthetic oligonucleotide
  Target: LAMA2; (-) strand; PAM type: NNNNGHTT; PAM sequence: TACAGTTT
tgctatagtacacaggatgc

SEQ ID NO: 36551 - DNA, 20 bp, Artificial Sequence
  Description of Artificial Sequence: Synthetic oligonucleotide
  Target: LAMA2; (-) strand; PAM type: NNNNGHTT; PAM sequence: GCGGGATT
agatggaagagcaatgaatg

SEQ ID NO: 36552 - DNA, 20 bp, Artificial Sequence
  Description of Artificial Sequence: Synthetic oligonucleotide
  Target: LAMA2; (-) strand; PAM type: NNNNGHTT; PAM sequence: ATGTGATT
gctgaacgacttgattataa

SEQ ID NO: 36553 - DNA, 20 bp, Artificial Sequence
  Description of Artificial Sequence: Synthetic oligonucleotide
  Target: LAMA2; (-) strand; PAM type: NNNNGHTT; PAM sequence: ACTTGATT
tttttccttagtgctgaacg

SEQ ID NO: 36554 - DNA, 20 bp, Artificial Sequence
  Description of Artificial Sequence: Synthetic oligonucleotide
  Target: LAMA2; (-) strand; PAM type: NNNNGHTT; PAM sequence: AAGGGTTT
ttgttgaaattgtttttcaa

SEQ ID NO: 36555 - DNA, 20 bp, Artificial Sequence
  Description of Artificial Sequence: Synthetic oligonucleotide
  Target: LAMA2; (-) strand; PAM type: NNNNGHTT; PAM sequence: AATTGTTT
cattttcaattatttgttga

SEQ ID NO: 36556 - DNA, 20 bp, Artificial Sequence
  Description of Artificial Sequence: Synthetic oligonucleotide
  Target: LAMA2; (-) strand; PAM type: NNNNGHTT; PAM sequence: AAACGATT
aaatactttcacatatagtg

SEQ ID NO: 36557 - DNA, 20 bp, Artificial Sequence
  Description of Artificial Sequence: Synthetic oligonucleotide
  Target: LAMA2; (-) strand; PAM type: NNNNGHTT; PAM sequence: AGGAGCTT
aatgtggtggggagttcagg

SEQ ID NO: 36558 - DNA, 20 bp, Artificial Sequence
  Description of Artificial Sequence: Synthetic oligonucleotide
  Target: LAMA2; (-) strand; PAM type: NNNNGHTT; PAM sequence: ATAAGTTT
tgtgagttttatgtcccctt

SEQ ID NO: 36559 - DNA, 20 bp, Artificial Sequence
  Description of Artificial Sequence: Synthetic oligonucleotide
  Target: LAMA2; (-) strand; PAM type: NNNNGHTT; PAM sequence: GTGAGTTT
gtctaattattattttctgt

SEQ ID NO: 36560 - DNA, 20 bp, Artificial Sequence
  Description of Artificial Sequence: Synthetic oligonucleotide
  Target: LAMA2; (-) strand; PAM type: NNNNGHTT; PAM sequence: TGATGTTT
tcagtgataaaatttttaaa

SEQ ID NO: 36561 - DNA, 20 bp, Artificial Sequence
  Description of Artificial Sequence: Synthetic oligonucleotide
  Target: LAMA2; (-) strand; PAM type: NNNNGHTT; PAM sequence: ACTTGTTT
tctgacaatgctataagtgg

SEQ ID NO: 36562 - DNA, 20 bp, Artificial Sequence
  Description of Artificial Sequence: Synthetic oligonucleotide
  Target: LAMA2; (-) strand; PAM type: NNNNGHTT; PAM sequence: TACAGATT
attccctgaagagatactta

SEQ ID NO: 36563 - DNA, 20 bp, Artificial Sequence
  Description of Artificial Sequence: Synthetic oligonucleotide
  Target: LAMA2; (-) strand; PAM type: NNNNGHTT; PAM sequence: AGAGGATT
gtattaagtctgtgtacaac

SEQ ID NO: 36564 - DNA, 20 bp, Artificial Sequence
  Description of Artificial Sequence: Synthetic oligonucleotide
  Target: LAMA2; (-) strand; PAM type: NNNNGHTT; PAM sequence: AAGGGTTT
aataacaagaaaaggatgag

SEQ ID NO: 36565 - DNA, 20 bp, Artificial Sequence
  Description of Artificial Sequence: Synthetic oligonucleotide
  Target: LAMA2; (-) strand; PAM type: NNNNGHTT; PAM sequence: CTCTGTTT
tagaactgcaggtaatgtct

SEQ ID NO: 36566 - DNA, 20 bp, Artificial Sequence
  Description of Artificial Sequence: Synthetic oligonucleotide
  Target: LAMA2; (-) strand; PAM type: NNNNGHTT; PAM sequence: TCAAGCTT
ggatcatagacatcatgttt

SEQ ID NO: 36567 - DNA, 20 bp, Artificial Sequence
  Description of Artificial Sequence: Synthetic oligonucleotide
  Target: LAMA2; (-) strand; PAM type: NNNNGHTT; PAM sequence: TCATGTTT
accagaaaggatcatagaca

SEQ ID NO: 36568 - DNA, 20 bp, Artificial Sequence
  Description of Artificial Sequence: Synthetic oligonucleotide
  Target: LAMA2; (-) strand; PAM type: NNNNGHTT; PAM sequence: GGTGGCTT
ttatttatccaaataggaac

SEQ ID NO: 36569 - DNA, 20 bp, Artificial Sequence
  Description of Artificial Sequence: Synthetic oligonucleotide
  Target: LAMA2; (-) strand; PAM type: NNNNGHTT; PAM sequence: GTGCGTTT
ctgtactctcagttctaata

SEQ ID NO: 36570 - DNA, 20 bp, Artificial Sequence
  Description of Artificial Sequence: Synthetic oligonucleotide
  Target: LAMA2; (-) strand; PAM type: NNNNGHTT; PAM sequence: TATGGATT
gtatgtgctcttgcccatgt

SEQ ID NO: 36571 - DNA, 20 bp, Artificial Sequence
  Description of Artificial Sequence: Synthetic oligonucleotide
  Target: LAMA2; (-) strand; PAM type: NNNNGHTT; PAM sequence: AAATGCTT
aattgatgtgcatggaacga

SEQ ID NO: 36572 - DNA, 20 bp, Artificial Sequence
  Description of Artificial Sequence: Synthetic oligonucleotide
  Target: LAMA2; (-) strand; PAM type: NNNNGHTT; PAM sequence: CAATGCTT
aggtcactctctatggaaga

SEQ ID NO: 36573 - DNA, 20 bp, Artificial Sequence
  Description of Artificial Sequence: Synthetic oligonucleotide
  Target: LAMA2; (-) strand; PAM type: NNNNGHTT; PAM sequence: TTCTGTTT
atgtaataaggccataggac

SEQ ID NO: 36574 - DNA, 20 bp, Artificial Sequence
  Description of Artificial Sequence: Synthetic oligonucleotide
  Target: LAMA2; (-) strand; PAM type: NNNNGHTT; PAM sequence: GTGTGATT
agttaagagacccagccaaa

SEQ ID NO: 36575 - DNA, 20 bp, Artificial Sequence
  Description of Artificial Sequence: Synthetic oligonucleotide
  Target: LAMA2; (-) strand; PAM type: NNNNGHTT; PAM sequence: TGGAGATT
tactaaagagtattgtgttt

SEQ ID NO: 36576 - DNA, 20 bp, Artificial Sequence
  Description of Artificial Sequence: Synthetic oligonucleotide
  Target: LAMA2; (-) strand; PAM type: NNNNGHTT; PAM sequence: TTGTGTTT
agaaatgctactaaagagta

SEQ ID NO: 36577 - DNA, 20 bp, Artificial Sequence
  Description of Artificial Sequence: Synthetic oligonucleotide
  Target: LAMA2; (-) strand; PAM type: NNNNGHTT; PAM sequence: AATCGCTT
tccggaagctgaggcaggag

SEQ ID NO: 36578 - DNA, 20 bp, Artificial Sequence
  Description of Artificial Sequence: Synthetic oligonucleotide
  Target: LAMA2; (-) strand; PAM type: NNNNGHTT; PAM sequence: TCTTGATT
ctagaacatgcattgctaag

SEQ ID NO: 36579 - DNA, 20 bp, Artificial Sequence
  Description of Artificial Sequence: Synthetic oligonucleotide
  Target: LAMA2; (-) strand; PAM type: NNNNGHTT; PAM sequence: ATCAGTTT
agttaagtctgaaaaccaga

SEQ ID NO: 36580 - DNA, 20 bp, Artificial Sequence
  Description of Artificial Sequence: Synthetic oligonucleotide
  Target: LAMA2; (-) strand; PAM type: NNNNGHTT; PAM sequence: TGCAGCTT
agctactctagacccttccc

SEQ ID NO: 36581 - DNA, 20 bp, Artificial Sequence
  Description of Artificial Sequence: Synthetic oligonucleotide
  Target: LAMA2; (-) strand; PAM type: NNNNGHTT; PAM sequence: CATAGCTT
taccagtgttcaggagacct

SEQ ID NO: 36582 - DNA, 20 bp, Artificial Sequence
  Description of Artificial Sequence: Synthetic oligonucleotide
  Target: LAMA2; (-) strand; PAM type: NNNNGHTT; PAM sequence: TGGGGTTT
aaatgatatttgtacagcac

SEQ ID NO: 36583 - DNA, 20 bp, Artificial Sequence
  Description of Artificial Sequence: Synthetic oligonucleotide
  Target: LAMA2; (-) strand; PAM type: NNNNGHTT; PAM sequence: TTATGCTT
acaatgatcatcacatagag

SEQ ID NO: 36584 - DNA, 20 bp, Artificial Sequence
  Description of Artificial Sequence: Synthetic oligonucleotide
  Target: LAMA2; (-) strand; PAM type: NNNNGHTT; PAM sequence: AAGTGTTT
ataactttaaaaacaatatc

SEQ ID NO: 36585 - DNA, 20 bp, Artificial Sequence
  Description of Artificial Sequence: Synthetic oligonucleotide
  Target: LAMA2; (-) strand; PAM type: NNNNGHTT; PAM sequence: CTAGGCTT
gtattaaaatgctatgactg

SEQ ID NO: 36586 - DNA, 20 bp, Artificial Sequence
  Description of Artificial Sequence: Synthetic oligonucleotide
  Target: LAMA2; (-) strand; PAM type: NNNNGHTT; PAM sequence: AGATGATT
agttataatacctcatttcc

SEQ ID NO: 36587 - DNA, 20 bp, Artificial Sequence
  Description of Artificial Sequence: Synthetic oligonucleotide
  Target: LAMA2; (-) strand; PAM type: NNNNGHTT; PAM sequence: TCTTGTTT
tgctacttttattaactgtg

SEQ ID NO: 36588 - DNA, 20 bp, Artificial Sequence
  Description of Artificial Sequence: Synthetic oligonucleotide
  Target: LAMA2; (-) strand; PAM type: NNNNGHTT; PAM sequence: TAATGTTT
gccctaataaaataactctc

SEQ ID NO: 36589 - DNA, 20 bp, Artificial Sequence
  Description of Artificial Sequence: Synthetic oligonucleotide
  Target: LAMA2; (-) strand; PAM type: NNNNGHTT; PAM sequence: CAGTGATT
agtaactgtaacaattttaa

SEQ ID NO: 36590 - DNA, 20 bp, Artificial Sequence
  Description of Artificial Sequence: Synthetic oligonucleotide
  Target: LAMA2; (-) strand; PAM type: NNNNGHTT; PAM sequence: GCAGGCTT
aataaatagcagtattctta

SEQ ID NO: 36591 - DNA, 20 bp, Artificial Sequence
  Description of Artificial Sequence: Synthetic oligonucleotide
  Target: LAMA2; (-) strand; PAM type: NNNNGHTT; PAM sequence: TGTAGTTT
cttaaatgacttgaaagtca

SEQ ID NO: 36592 - DNA, 20 bp, Artificial Sequence
  Description of Artificial Sequence: Synthetic oligonucleotide
  Target: LAMA2; (-) strand; PAM type: NNNNGHTT; PAM sequence: TGTGGATT
aagttctcatgcagctacaa

SEQ ID NO: 36593 - DNA, 20 bp, Artificial Sequence
  Description of Artificial Sequence: Synthetic oligonucleotide
  Target: LAMA2; (-) strand; PAM type: NNNNGHTT; PAM sequence: CTTTGCTT
ctaaggttatggataaagaa

SEQ ID NO: 36594 - DNA, 20 bp, Artificial Sequence
  Description of Artificial Sequence: Synthetic oligonucleotide
  Target: LAMA2; (-) strand; PAM type: NNNNGHTT; PAM sequence: TAGAGATT
ttccagaaaaaataaaaaca

SEQ ID NO: 36595 - DNA, 20 bp, Artificial Sequence
  Description of Artificial Sequence: Synthetic oligonucleotide
  Target: LAMA2; (-) strand; PAM type: NNNNGHTT; PAM sequence: GCCTGTTT
taggtaaatattccaagtga

SEQ ID NO: 36596 - DNA, 20 bp, Artificial Sequence
  Description of Artificial Sequence: Synthetic oligonucleotide
  Target: LAMA2; (-) strand; PAM type: NNNNGHTT; PAM sequence: CATTGTTT
ctcttttaccctctgttatc

SEQ ID NO: 36597 - DNA, 20 bp, Artificial Sequence
  Description of Artificial Sequence: Synthetic oligonucleotide
  Target: LAMA2; (-) strand; PAM type: NNNNGHTT; PAM sequence: TAGAGCTT
cattggtcttgcctgtttgt

SEQ ID NO: 36598 - DNA, 20 bp, Artificial Sequence
  Description of Artificial Sequence: Synthetic oligonucleotide
  Target: LAMA2; (-) strand; PAM type: NNNNGHTT; PAM sequence: GCCTGTTT
attagtttgacattggtctt

SEQ ID NO: 36599 - DNA, 20 bp, Artificial Sequence
  Description of Artificial Sequence: Synthetic oligonucleotide
  Target: LAMA2; (-) strand; PAM type: NNNNGHTT; PAM sequence: ATTAGTTT
tgtgcttccacgttatggtt

SEQ ID NO: 36600 - DNA, 20 bp, Artificial Sequence
  Description of Artificial Sequence: Synthetic oligonucleotide
  Target: LAMA2; (-) strand; PAM type: NNNNGHTT; PAM sequence: ATGTGCTT
ggatagccaaaatcactgta

SEQ ID NO: 36601 - DNA, 20 bp, Artificial Sequence
  Description of Artificial Sequence: Synthetic oligonucleotide
  Target: LAMA2; (-) strand; PAM type: NNNNGHTT; PAM sequence: TTTTGTTT
gctacaaatagaatgatgtc

SEQ ID NO: 36602 - DNA, 20 bp, Artificial Sequence
  Description of Artificial Sequence: Synthetic oligonucleotide
  Target: LAMA2; (-) strand; PAM type: NNNNGHTT; PAM sequence: ATTTGATT
ggaatgctgtattttctagg

SEQ ID NO: 36603 - DNA, 20 bp, Artificial Sequence
  Description of Artificial Sequence: Synthetic oligonucleotide
  Target: LAMA2; (-) strand; PAM type: NNNNGHTT; PAM sequence: CTAGGATT
atataggaatgctgtatttt

SEQ ID NO: 36604 - DNA, 20 bp, Artificial Sequence
  Description of Artificial Sequence: Synthetic oligonucleotide
  Target: LAMA2; (-) strand; PAM type: NNNNGHTT; PAM sequence: AAACGTTT
aatgtgaaaataaaatataa

SEQ ID NO: 36605 - DNA, 20 bp, Artificial Sequence
  Description of Artificial Sequence: Synthetic oligonucleotide
  Target: LAMA2; (-) strand; PAM type: NNNNGHTT; PAM sequence: GCCAGCTT
ggcatgagccaccgtgcccg

SEQ ID NO: 36606 - DNA, 20 bp, Artificial Sequence
  Description of Artificial Sequence: Synthetic oligonucleotide
  Target: LAMA2; (-) strand; PAM type: NNNNGHTT; PAM sequence: TTGGGATT
tgcctcagcctcacaaagtg

SEQ ID NO: 36607 - DNA, 20 bp, Artificial Sequence
  Description of Artificial Sequence: Synthetic oligonucleotide
  Target: LAMA2; (-) strand; PAM type: NNNNGHTT; PAM sequence: TGGAGTTT
ttttttgtatttagtagaga

SEQ ID NO: 36608 - DNA, 20 bp, Artificial Sequence
  Description of Artificial Sequence: Synthetic oligonucleotide
  Target: LAMA2; (-) strand; PAM type: NNNNGHTT; PAM sequence: GCTGGATT
ctgcctcagcctcccaagta

SEQ ID NO: 36609 - DNA, 20 bp, Artificial Sequence
  Description of Artificial Sequence: Synthetic oligonucleotide
  Target: LAMA2; (-) strand; PAM type: NNNNGHTT; PAM sequence: GCAAGCTT
ccaggatggagtgcaatggc

SEQ ID NO: 36610 - DNA, 20 bp, Artificial Sequence
  Description of Artificial Sequence: Synthetic oligonucleotide
  Target: LAMA2; (-) strand; PAM type: NNNNGHTT; PAM sequence: TCTAGCTT
ggcttgtggaggccagggcc

SEQ ID NO: 36611 - DNA, 20 bp, Artificial Sequence
  Description of Artificial Sequence: Synthetic oligonucleotide
  Target: LAMA2; (-) strand; PAM type: NNNNGHTT; PAM sequence: GTGGGCTT
agaagaagaataactaaatt

SEQ ID NO: 36612 - DNA, 20 bp, Artificial Sequence
  Description of Artificial Sequence: Synthetic oligonucleotide
  Target: LAMA2; (-) strand; PAM type: NNNNGHTT; PAM sequence: AATGGATT
aattcaacaagaaacatacc

SEQ ID NO: 36613 - DNA, 20 bp, Artificial Sequence
  Description of Artificial Sequence: Synthetic oligonucleotide
  Target: LAMA2; (-) strand; PAM type: NNNNGHTT; PAM sequence: AATTGTTT
tttaggtattattcataagg

SEQ ID NO: 36614 - DNA, 20 bp, Artificial Sequence
  Description of Artificial Sequence: Synthetic oligonucleotide
  Target: LAMA2; (-) strand; PAM type: NNNNGHTT; PAM sequence: AAATGTTT
tatattttttgtatgaacat

SEQ ID NO: 36615 - DNA, 20 bp, Artificial Sequence
  Description of Artificial Sequence: Synthetic oligonucleotide
  Target: LAMA2; (-) strand; PAM type: NNNNGHTT; PAM sequence: AACTGCTT
atatctatgtatgtgcctgt

SEQ ID NO: 36616 - DNA, 20 bp, Artificial Sequence
  Description of Artificial Sequence: Synthetic oligonucleotide
  Target: LAMA2; (-) strand; PAM type: NNNNGHTT; PAM sequence: TTCTGTTT
aggggtctgggctttgagca

SEQ ID NO: 36617 - DNA, 20 bp, Artificial Sequence
  Description of Artificial Sequence: Synthetic oligonucleotide
  Target: LAMA2; (-) strand; PAM type: NNNNGHTT; PAM sequence: CTGGGCTT
agatatttgtcctgaggggt

SEQ ID NO: 36618 - DNA, 20 bp, Artificial Sequence
  Description of Artificial Sequence: Synthetic oligonucleotide
  Target: LAMA2; (-) strand; PAM type: NNNNGHTT; PAM sequence: ATCTGATT
gcctcctctcccctgagacc

SEQ ID NO: 36619 - DNA, 20 bp, Artificial Sequence
  Description of Artificial Sequence: Synthetic oligonucleotide
  Target: LAMA2; (-) strand; PAM type: NNNNGHTT; PAM sequence: AAATGCTT
aactagtggataaaatactg

SEQ ID NO: 36620 - DNA, 20 bp, Artificial Sequence
  Description of Artificial Sequence: Synthetic oligonucleotide
  Target: LAMA2; (-) strand; PAM type: NNNNGHTT; PAM sequence: GCATGCTT
agatgtttacttgaatgcat

SEQ ID NO: 36621 - DNA, 20 bp, Artificial Sequence
  Description of Artificial Sequence: Synthetic oligonucleotide
  Target: LAMA2; (-) strand; PAM type: NNNNGHTT; PAM sequence: AGATGTTT
gctctgatgctattccttca

SEQ ID NO: 36622 - DNA, 20 bp, Artificial Sequence
  Description of Artificial Sequence: Synthetic oligonucleotide
  Target: LAMA2; (-) strand; PAM type: NNNNGHTT; PAM sequence: ACTAGATT
tctatggtataccctaaggg

SEQ ID NO: 36623 - DNA, 20 bp, Artificial Sequence
  Description of Artificial Sequence: Synthetic oligonucleotide
  Target: LAMA2; (-) strand; PAM type: NNNNGHTT; PAM sequence: CATAGTTT
gaaacaaattttatctgctt

SEQ ID NO: 36624 - DNA, 20 bp, Artificial Sequence
  Description of Artificial Sequence: Synthetic oligonucleotide
  Target: LAMA2; (-) strand; PAM type: NNNNGHTT; PAM sequence: ATCTGCTT
atgctctagaaacaaatttt

SEQ ID NO: 36625 - DNA, 20 bp, Artificial Sequence
  Description of Artificial Sequence: Synthetic oligonucleotide
  Target: LAMA2; (-) strand; PAM type: NNNNGHTT; PAM sequence: ATGTGATT
gggaggacaggctcactaca

SEQ ID NO: 36626 - DNA, 20 bp, Artificial Sequence
  Description of Artificial Sequence: Synthetic oligonucleotide
  Target: LAMA2; (-) strand; PAM type: NNNNGHTT; PAM sequence: GAGAGCTT
tagtaaatgctatgaggtat

SEQ ID NO: 36627 - DNA, 20 bp, Artificial Sequence
  Description of Artificial Sequence: Synthetic oligonucleotide
  Target: LAMA2; (-) strand; PAM type: NNNNGHTT; PAM sequence: ATTAGTTT
aggtagaaagacagatatga

SEQ ID NO: 36628 - DNA, 20 bp, Artificial Sequence
  Description of Artificial Sequence: Synthetic oligonucleotide
  Target: LAMA2; (-) strand; PAM type: NNNNGHTT; PAM sequence: AGATGTTT
cgtaaaaaaagaaatattct

SEQ ID NO: 36629 - DNA, 20 bp, Artificial Sequence
  Description of Artificial Sequence: Synthetic oligonucleotide
  Target: LAMA2; (-) strand; PAM type: NNNNGHTT; PAM sequence: AAGGGTTT
aacctgaaacacattaaatg

SEQ ID NO: 36630 - DNA, 20 bp, Artificial Sequence
  Description of Artificial Sequence: Synthetic oligonucleotide
  Target: LAMA2; (-) strand; PAM type: NNNNGHTT; PAM sequence: AACGGATT
aattccagtgttatgaagac

SEQ ID NO: 36631 - DNA, 20 bp, Artificial Sequence
  Description of Artificial Sequence: Synthetic oligonucleotide
  Target: LAMA2; (-) strand; PAM type: NNNNGHTT; PAM sequence: TTCAGATT
aacataaacacattcctatg

SEQ ID NO: 36632 - DNA, 20 bp, Artificial Sequence
  Description of Artificial Sequence: Synthetic oligonucleotide
  Target: LAMA2; (-) strand; PAM type: NNNNGHTT; PAM sequence: ACTTGTTT
agtgcttgatagtttagaaa

SEQ ID NO: 36633 - DNA, 20 bp, Artificial Sequence
  Description of Artificial Sequence: Synthetic oligonucleotide
  Target: LAMA2; (-) strand; PAM type: NNNNGHTT; PAM sequence: GATAGTTT
tcccagtgtgaatagtgctt

SEQ ID NO: 36634 - DNA, 20 bp, Artificial Sequence
  Description of Artificial Sequence: Synthetic oligonucleotide
  Target: LAMA2; (-) strand; PAM type: NNNNGHTT; PAM sequence: TAGTGCTT
ctagaaattcccagtgtgaa

SEQ ID NO: 36635 - DNA, 20 bp, Artificial Sequence
  Description of Artificial Sequence: Synthetic oligonucleotide
  Target: LAMA2; (-) strand; PAM type: NNNNGHTT; PAM sequence: TGATGTTT
ctcattggcaacatttcacc

SEQ ID NO: 36636 - DNA, 20 bp, Artificial Sequence
  Description of Artificial Sequence: Synthetic oligonucleotide
  Target: LAMA2; (-) strand; PAM type: NNNNGHTT; PAM sequence: ACTGGATT
tttaaaagaaatggattaag

SEQ ID NO: 36637 - DNA, 20 bp, Artificial Sequence
  Description of Artificial Sequence: Synthetic oligonucleotide
  Target: LAMA2; (-) strand; PAM type: NNNNGHTT; PAM sequence: AATGGATT
acaaccatggctttaaaaga

SEQ ID NO: 36638 - DNA, 20 bp, Artificial Sequence
  Description of Artificial Sequence: Synthetic oligonucleotide
  Target: LAMA2; (-) strand; PAM type: NNNNGHTT; PAM sequence: CATGGCTT
tgatgttttgttttgacaac

SEQ ID NO: 36639 - DNA, 20 bp, Artificial Sequence
  Description of Artificial Sequence: Synthetic oligonucleotide
  Target: LAMA2; (-) strand; PAM type: NNNNGHTT; PAM sequence: TTTTGTTT
ttttttgctaagaagtgatg

SEQ ID NO: 36640 - DNA, 20 bp, Artificial Sequence
  Description of Artificial Sequence: Synthetic oligonucleotide
  Target: LAMA2; (-) strand; PAM type: NNNNGHTT; PAM sequence: TGATGTTT
aataattttttgctaagaag

SEQ ID NO: 36641 - DNA, 20 bp, Artificial Sequence
  Description of Artificial Sequence: Synthetic oligonucleotide
  Target: LAMA2; (-) strand; PAM type: NNNNGHTT; PAM sequence: AAATGATT
taatcttataatgttctctg

SEQ ID NO: 36642 - DNA, 20 bp, Artificial Sequence
  Description of Artificial Sequence: Synthetic oligonucleotide
  Target: LAMA2; (-) strand; PAM type: NNNNGHTT; PAM sequence: TTCAGATT
aatgctacagtagattttat

SEQ ID NO: 36643 - DNA, 20 bp, Artificial Sequence
  Description of Artificial Sequence: Synthetic oligonucleotide
  Target: LAMA2; (-) strand; PAM type: NNNNGHTT; PAM sequence: AGTAGATT
aatataagtctaaatgctac

SEQ ID NO: 36644 - DNA, 20 bp, Artificial Sequence
  Description of Artificial Sequence: Synthetic oligonucleotide
  Target: LAMA2; (-) strand; PAM type: NNNNGHTT; PAM sequence: TCCAGTTT
atcaagagagcgttccaaaa

SEQ ID NO: 36645 - DNA, 20 bp, Artificial Sequence
  Description of Artificial Sequence: Synthetic oligonucleotide
  Target: LAMA2; (-) strand; PAM type: NNNNGHTT; PAM sequence: CAGGGCTT
ctgtcacagcatgatactgc

SEQ ID NO: 36646 - DNA, 20 bp, Artificial Sequence
  Description of Artificial Sequence: Synthetic oligonucleotide
  Target: LAMA2; (-) strand; PAM type: NNNNGHTT; PAM sequence: GTGAGTTT
gtatcaaatgtgcttaaatg

SEQ ID NO: 36647 - DNA, 20 bp, Artificial Sequence
  Description of Artificial Sequence: Synthetic oligonucleotide
  Target: LAMA2; (-) strand; PAM type: NNNNGHTT; PAM sequence: ATGTGCTT
ggcctatttcaccgtatcaa

SEQ ID NO: 36648 - DNA, 20 bp, Artificial Sequence
  Description of Artificial Sequence: Synthetic oligonucleotide
  Target: LAMA2; (-) strand; PAM type: NNNNGHTT; PAM sequence: TCAGGTTT
tagttaaaattctaatcacc

SEQ ID NO: 36649 - DNA, 20 bp, Artificial Sequence
  Description of Artificial Sequence: Synthetic oligonucleotide
  Target: LAMA2; (-) strand; PAM type: NNNNGHTT; PAM sequence: TCCAGATT
gtaaaattaatcattgactt

SEQ ID NO: 36650 - DNA, 20 bp, Artificial Sequence
  Description of Artificial Sequence: Synthetic oligonucleotide
  Target: LAMA2; (-) strand; PAM type: NNNNGHTT; PAM sequence: TGTGGATT
cttttcatttgggtctttca

SEQ ID NO: 36651 - DNA, 20 bp, Artificial Sequence
  Description of Artificial Sequence: Synthetic oligonucleotide
  Target: LAMA2; (-) strand; PAM type: NNNNGHTT; PAM sequence: AAAAGATT
ggtgacagcagaaaaacatc

SEQ ID NO: 36652 - DNA, 20 bp, Artificial Sequence
  Description of Artificial Sequence: Synthetic oligonucleotide
  Target: LAMA2; (-) strand; PAM type: NNNNGHTT; PAM sequence: CCTAGCTT
tatttgaactaagcacgtaa

SEQ ID NO: 36653 - DNA, 20 bp, Artificial Sequence
  Description of Artificial Sequence: Synthetic oligonucleotide
  Target: LAMA2; (-) strand; PAM type: NNNNGHTT; PAM sequence: TGTGGCTT
ctgaagccatggttagaata

SEQ ID NO: 36654 - DNA, 20 bp, Artificial Sequence
  Description of Artificial Sequence: Synthetic oligonucleotide
  Target: LAMA2; (-) strand; PAM type: NNNNGHTT; PAM sequence: TCCTGATT
gaggtaagaactattattat

SEQ ID NO: 36655 - DNA, 20 bp, Artificial Sequence
  Description of Artificial Sequence: Synthetic oligonucleotide
  Target: LAMA2; (-) strand; PAM type: NNNNGHTT; PAM sequence: TAATGCTT
tgtgcatttcagcattgttc

SEQ ID NO: 36656 - DNA, 20 bp, Artificial Sequence
  Description of Artificial Sequence: Synthetic oligonucleotide
  Target: LAMA2; (-) strand; PAM type: NNNNGHTT; PAM sequence: CAAAGTTT
attcaagagagtcactaagt

SEQ ID NO: 36657 - DNA, 20 bp, Artificial Sequence
  Description of Artificial Sequence: Synthetic oligonucleotide
  Target: LAMA2; (-) strand; PAM type: NNNNGHTT; PAM sequence: AGATGTTT
taaatgatgatactagcttc

SEQ ID NO: 36658 - DNA, 20 bp, Artificial Sequence
  Description of Artificial Sequence: Synthetic oligonucleotide
  Target: LAMA2; (-) strand; PAM type: NNNNGHTT; PAM sequence: ACTAGCTT
atgtaaatataaatgatgat

SEQ ID NO: 36659 - DNA, 20 bp, Artificial Sequence
  Description of Artificial Sequence: Synthetic oligonucleotide
  Target: LAMA2; (-) strand; PAM type: NNNNGHTT; PAM sequence: ATGGGTTT
gggcatgatagaatgtgaat

SEQ ID NO: 36660 - DNA, 20 bp, Artificial Sequence
  Description of Artificial Sequence: Synthetic oligonucleotide
  Target: LAMA2; (-) strand; PAM type: NNNNGHTT; PAM sequence: CCTAGATT
tagaagtgttgagagataac

SEQ ID NO: 36661 - DNA, 20 bp, Artificial Sequence
  Description of Artificial Sequence: Synthetic oligonucleotide
  Target: LAMA2; (-) strand; PAM type: NNNNGHTT; PAM sequence: GACAGATT
atagtgcctaatgagggtct

SEQ ID NO: 36662 - DNA, 20 bp, Artificial Sequence
  Description of Artificial Sequence: Synthetic oligonucleotide
  Target: LAMA2; (-) strand; PAM type: NNNNGHTT; PAM sequence: GAATGTTT
tctgctgagagtaccatttg

SEQ ID NO: 36663 - DNA, 20 bp, Artificial Sequence
  Description of Artificial Sequence: Synthetic oligonucleotide
  Target: LAMA2; (-) strand; PAM type: NNNNGHTT; PAM sequence: TTGAGATT
agtccttgtcatttggcaga

SEQ ID NO: 36664 - DNA, 20 bp, Artificial Sequence
  Description of Artificial Sequence: Synthetic oligonucleotide
  Target: LAMA2; (-) strand; PAM type: NNNNGHTT; PAM sequence: GGCAGATT
catttgagtccttgtcattt

SEQ ID NO: 36665 - DNA, 20 bp, Artificial Sequence
  Description of Artificial Sequence: Synthetic oligonucleotide
  Target: LAMA2; (-) strand; PAM type: NNNNGHTT; PAM sequence: AGCTGTTT
aggcacaaagcaggttgaac

SEQ ID NO: 36666 - DNA, 20 bp, Artificial Sequence
  Description of Artificial Sequence: Synthetic oligonucleotide
  Target: LAMA2; (-) strand; PAM type: NNNNGHTT; PAM sequence: AATTGTTT
aaaggtatagaatagtctta

SEQ ID NO: 36667 - DNA, 20 bp, Artificial Sequence
  Description of Artificial Sequence: Synthetic oligonucleotide
  Target: LAMA2; (-) strand; PAM type: NNNNGHTT; PAM sequence: TATTGCTT
acctgccgaagtgtatttta

SEQ ID NO: 36668 - DNA, 20 bp, Artificial Sequence
  Description of Artificial Sequence: Synthetic oligonucleotide
  Target: LAMA2; (-) strand; PAM type: NNNNGHTT; PAM sequence: ATATGCTT
agggagagaatgggtagggt

SEQ ID NO: 36669 - DNA, 20 bp, Artificial Sequence
  Description of Artificial Sequence: Synthetic oligonucleotide
  Target: LAMA2; (-) strand; PAM type: NNNNGHTT; PAM sequence: CTTGGTTT
gtttcatattggcaggctga

SEQ ID NO: 36670 - DNA, 20 bp, Artificial Sequence
  Description of Artificial Sequence: Synthetic oligonucleotide
  Target: LAMA2; (-) strand; PAM type: NNNNGHTT; PAM sequence: TTTTGTTT
aattaactaataaacatgtc

SEQ ID NO: 36671 - DNA, 20 bp, Artificial Sequence
  Description of Artificial Sequence: Synthetic oligonucleotide
  Target: LAMA2; (-) strand; PAM type: NNNNGHTT; PAM sequence: TGTTGTTT
aataagcagtttttagtaag

SEQ ID NO: 36672 - DNA, 20 bp, Artificial Sequence
  Description of Artificial Sequence: Synthetic oligonucleotide
  Target: LAMA2; (-) strand; PAM type: NNNNGHTT; PAM sequence: AGCAGTTT
cctaatagttaccatcaata

SEQ ID NO: 36673 - DNA, 20 bp, Artificial Sequence
  Description of Artificial Sequence: Synthetic oligonucleotide
  Target: LAMA2; (-) strand; PAM type: NNNNGHTT; PAM sequence: ACCAGATT
aaagtcaacttttaatcctt

SEQ ID NO: 36674 - DNA, 20 bp, Artificial Sequence
  Description of Artificial Sequence: Synthetic oligonucleotide
  Target: LAMA2; (-) strand; PAM type: NNNNGHTT; PAM sequence: TAGCGATT
ctctgaaccatttttaagtt

SEQ ID NO: 36675 - DNA, 20 bp, Artificial Sequence
  Description of Artificial Sequence: Synthetic oligonucleotide
  Target: LAMA2; (-) strand; PAM type: NNNNGHTT; PAM sequence: TTAAGTTT
gtatctcctctgaaccattt

SEQ ID NO: 36676 - DNA, 20 bp, Artificial Sequence
  Description of Artificial Sequence: Synthetic oligonucleotide
  Target: LAMA2; (-) strand; PAM type: NNNNGHTT; PAM sequence: TTAGGATT
tatgccatgatatatcagaa

SEQ ID NO: 36677 - DNA, 20 bp, Artificial Sequence
  Description of Artificial Sequence: Synthetic oligonucleotide
  Target: LAMA2; (-) strand; PAM type: NNNNGHTT; PAM sequence: GAGAGATT
attaaagaaatttaatccca

SEQ ID NO: 36678 - DNA, 20 bp, Artificial Sequence
  Description of Artificial Sequence: Synthetic oligonucleotide
  Target: LAMA2; (-) strand; PAM type: NNNNGHTT; PAM sequence: GTGAGATT
tttaaaactaaagctgacga

SEQ ID NO: 36679 - DNA, 20 bp, Artificial Sequence
  Description of Artificial Sequence: Synthetic oligonucleotide
  Target: LAMA2; (-) strand; PAM type: NNNNGHTT; PAM sequence: CAGGGATT
aacaattaataattgtattc

SEQ ID NO: 36680 - DNA, 20 bp, Artificial Sequence
  Description of Artificial Sequence: Synthetic oligonucleotide
  Target: LAMA2; (-) strand; PAM type: NNNNGHTT; PAM sequence: TAAAGTTT
atttgactgtcacttctctg

SEQ ID NO: 36681 - DNA, 20 bp, Artificial Sequence
  Description of Artificial Sequence: Synthetic oligonucleotide
  Target: LAMA2; (-) strand; PAM type: NNNNGHTT; PAM sequence: GTTTGTTT
ttttatttactggtttatat

SEQ ID NO: 36682 - DNA, 20 bp, Artificial Sequence
  Description of Artificial Sequence: Synthetic oligonucleotide
  Target: LAMA2; (-) strand; PAM type: NNNNGHTT; PAM sequence: ATATGTTT
catgttttatttactggttt

SEQ ID NO: 36683 - DNA, 20 bp, Artificial Sequence
  Description of Artificial Sequence: Synthetic oligonucleotide
  Target: LAMA2; (-) strand; PAM type: NNNNGHTT; PAM sequence: ACTGGTTT
tatgcaatcatgttttattt

SEQ ID NO: 36684 - DNA, 20 bp, Artificial Sequence
  Description of Artificial Sequence: Synthetic oligonucleotide
  Target: LAMA2; (-) strand; PAM type: NNNNGHTT; PAM sequence: TCATGTTT
ctgttacagtacttatgcaa

SEQ ID NO: 36685 - DNA, 20 bp, Artificial Sequence
  Description of Artificial Sequence: Synthetic oligonucleotide
  Target: LAMA2; (-) strand; PAM type: NNNNGHTT; PAM sequence: GGGAGATT
cctccttccactcaagcagg

SEQ ID NO: 36686 - DNA, 20 bp, Artificial Sequence
  Description of Artificial Sequence: Synthetic oligonucleotide
  Target: LAMA2; (-) strand; PAM type: NNNNGHTT; PAM sequence: GCTGGTTT
cttttgagataagagttgtt

SEQ ID NO: 36687 - DNA, 20 bp, Artificial Sequence
  Description of Artificial Sequence: Synthetic oligonucleotide
  Target: LAMA2; (-) strand; PAM type: NNNNGHTT; PAM sequence: ATTGGCTT
tattggagatgaatttgcat

SEQ ID NO: 36688 - DNA, 20 bp, Artificial Sequence
  Description of Artificial Sequence: Synthetic oligonucleotide
  Target: LAMA2; (-) strand; PAM type: NNNNGHTT; PAM sequence: CCGAGTTT
ggaggtaaattctgtatgta

SEQ ID NO: 36689 - DNA, 20 bp, Artificial Sequence
  Description of Artificial Sequence: Synthetic oligonucleotide
  Target: LAMA2; (-) strand; PAM type: NNNNGHTT; PAM sequence: TTTTGATT
gaaatggaattttaatttaa

SEQ ID NO: 36690 - DNA, 20 bp, Artificial Sequence
  Description of Artificial Sequence: Synthetic oligonucleotide
  Target: LAMA2; (-) strand; PAM type: NNNNGHTT; PAM sequence: TGTTGCTT
actttgtgcaataatggcag

SEQ ID NO: 36691 - DNA, 20 bp, Artificial Sequence
  Description of Artificial Sequence: Synthetic oligonucleotide
  Target: LAMA2; (-) strand; PAM type: NNNNGHTT; PAM sequence: AACAGTTT
atttagagaggtaatgactg

SEQ ID NO: 36692 - DNA, 20 bp, Artificial Sequence
  Description of Artificial Sequence: Synthetic oligonucleotide
  Target: LAMA2; (-) strand; PAM type: NNNNGHTT; PAM sequence: GAGAGTTT
aaaggatgaaaactaaagaa

SEQ ID NO: 36693 - DNA, 20 bp, Artificial Sequence
  Description of Artificial Sequence: Synthetic oligonucleotide
  Target: LAMA2; (-) strand; PAM type: NNNNGHTT; PAM sequence: AGGAGATT
taatttttactttatgctca

SEQ ID NO: 36694 - DNA, 20 bp, Artificial Sequence
  Description of Artificial Sequence: Synthetic oligonucleotide
  Target: LAMA2; (-) strand; PAM type: NNNNGHTT; PAM sequence: TCCAGATT
ctaaaattgaattaagatga

SEQ ID NO: 36695 - DNA, 20 bp, Artificial Sequence
  Description of Artificial Sequence: Synthetic oligonucleotide
  Target: LAMA2; (-) strand; PAM type: NNNNGHTT; PAM sequence: CAATGCTT
cagctgtcactgggttatag

SEQ ID NO: 36696 - DNA, 20 bp, Artificial Sequence
  Description of Artificial Sequence: Synthetic oligonucleotide
  Target: LAMA2; (-) strand; PAM type: NNNNGHTT; PAM sequence: GCTGGCTT
ctttcgtaattcccacacac

SEQ ID NO: 36697 - DNA, 20 bp, Artificial Sequence
  Description of Artificial Sequence: Synthetic oligonucleotide
  Target: LAMA2; (-) strand; PAM type: NNNNGHTT; PAM sequence: GTTGGATT
gctgtattaggaggacaaaa

SEQ ID NO: 36698 - DNA, 20 bp, Artificial Sequence
  Description of Artificial Sequence: Synthetic oligonucleotide
  Target: LAMA2; (-) strand; PAM type: NNNNGHTT; PAM sequence: GACAGCTT
acaggtgattggtacgttgt

SEQ ID NO: 36699 - DNA, 20 bp, Artificial Sequence
  Description of Artificial Sequence: Synthetic oligonucleotide
  Target: LAMA2; (-) strand; PAM type: NNNNGHTT; PAM sequence: AGGTGATT
gacaaaagagatgtctagac

SEQ ID NO: 36700 - DNA, 20 bp, Artificial Sequence
  Description of Artificial Sequence: Synthetic oligonucleotide
  Target: LAMA2; (-) strand; PAM type: NNNNGHTT; PAM sequence: ATATGTTT
ctggataaatatacaaaaac

SEQ ID NO: 36701 - DNA, 20 bp, Artificial Sequence
  Description of Artificial Sequence: Synthetic oligonucleotide
  Target: LAMA2; (-) strand; PAM type: NNNNGHTT; PAM sequence: GGTAGATT
gcaacttcgcttctatttat

SEQ ID NO: 36702 - DNA, 20 bp, Artificial Sequence
  Description of Artificial Sequence: Synthetic oligonucleotide
  Target: LAMA2; (-) strand; PAM type: NNNNGHTT; PAM sequence: CTTCGCTT
aaaattaaatgcatgtgcaa

SEQ ID NO: 36703 - DNA, 20 bp, Artificial Sequence
  Description of Artificial Sequence: Synthetic oligonucleotide
  Target: LAMA2; (-) strand; PAM type: NNNNGHTT; PAM sequence: TGAGGATT
gatagctggatgagggaatg

SEQ ID NO: 36704 - DNA, 20 bp, Artificial Sequence
  Description of Artificial Sequence: Synthetic oligonucleotide
  Target: LAMA2; (-) strand; PAM type: NNNNGHTT; PAM sequence: CTTAGTTT
taatgtatcaatgctaactt

SEQ ID NO: 36705 - DNA, 20 bp, Artificial Sequence
  Description of Artificial Sequence: Synthetic oligonucleotide
  Target: LAMA2; (-) strand; PAM type: NNNNGHTT; PAM sequence: TGTGGTTT
aatgaaacctgaataaggtc

SEQ ID NO: 36706 - DNA, 20 bp, Artificial Sequence
  Description of Artificial Sequence: Synthetic oligonucleotide
  Target: LAMA2; (-) strand; PAM type: NNNNGHTT; PAM sequence: CCCAGTTT
tggttcccaaaatccagaag

SEQ ID NO: 36707 - DNA, 20 bp, Artificial Sequence
  Description of Artificial Sequence: Synthetic oligonucleotide
  Target: LAMA2; (-) strand; PAM type: NNNNGHTT; PAM sequence: AACTGTTT
aaatgattgatgcaatgaga

SEQ ID NO: 36708 - DNA, 20 bp, Artificial Sequence
  Description of Artificial Sequence: Synthetic oligonucleotide
  Target: LAMA2; (-) strand; PAM type: NNNNGHTT; PAM sequence: AAATGATT
aatatgcatatattaataaa

SEQ ID NO: 36709 - DNA, 20 bp, Artificial Sequence
  Description of Artificial Sequence: Synthetic oligonucleotide
  Target: LAMA2; (-) strand; PAM type: NNNNGHTT; PAM sequence: CAATGCTT
tctggaagaaaatgaccatt

SEQ ID NO: 36710 - DNA, 20 bp, Artificial Sequence
  Description of Artificial Sequence: Synthetic oligonucleotide
  Target: LAMA2; (-) strand; PAM type: NNNNGHTT; PAM sequence: ACTTGTTT
aggaaggcagagagggaggg

SEQ ID NO: 36711 - DNA, 20 bp, Artificial Sequence
  Description of Artificial Sequence: Synthetic oligonucleotide
  Target: LAMA2; (-) strand; PAM type: NNNNGHTT; PAM sequence: ACCTGTTT
gcctgatcaacacaatgaga

SEQ ID NO: 36712 - DNA, 20 bp, Artificial Sequence
  Description of Artificial Sequence: Synthetic oligonucleotide
  Target: LAMA2; (-) strand; PAM type: NNNNGHTT; PAM sequence: AGGAGTTT
taggaagatttcttgagcct

SEQ ID NO: 36713 - DNA, 20 bp, Artificial Sequence
  Description of Artificial Sequence: Synthetic oligonucleotide
  Target: LAMA2; (-) strand; PAM type: NNNNGHTT; PAM sequence: GGAAGATT
ggaggctgattttttaggta

SEQ ID NO: 36714 - DNA, 20 bp, Artificial Sequence
  Description of Artificial Sequence: Synthetic oligonucleotide
  Target: LAMA2; (-) strand; PAM type: NNNNGHTT; PAM sequence: GGCTGATT
attttaaaaaattagctgga

SEQ ID NO: 36715 - DNA, 20 bp, Artificial Sequence
  Description of Artificial Sequence: Synthetic oligonucleotide
  Target: LAMA2; (-) strand; PAM type: NNNNGHTT; PAM sequence: AGGAGTTT
tggaaagatcacttgaggcc

SEQ ID NO: 36716 - DNA, 20 bp, Artificial Sequence
  Description of Artificial Sequence: Synthetic oligonucleotide
  Target: LAMA2; (-) strand; PAM type: NNNNGHTT; PAM sequence: ACATGTTT
actagtgtgtaacaattgag

SEQ ID NO: 36717 - DNA, 20 bp, Artificial Sequence
  Description of Artificial Sequence: Synthetic oligonucleotide
  Target: LAMA2; (-) strand; PAM type: NNNNGHTT; PAM sequence: AGTGGATT
atgtaataaactttagactc

SEQ ID NO: 36718 - DNA, 20 bp, Artificial Sequence
  Description of Artificial Sequence: Synthetic oligonucleotide
  Target: LAMA2; (-) strand; PAM type: NNNNGHTT; PAM sequence: TAAAGATT
atctttcagctctaatgttc

SEQ ID NO: 36719 - DNA, 20 bp, Artificial Sequence
  Description of Artificial Sequence: Synthetic oligonucleotide
  Target: LAMA2; (-) strand; PAM type: NNNNGHTT; PAM sequence: AATAGATT
tgggggcttgaatatccttt

SEQ ID NO: 36720 - DNA, 20 bp, Artificial Sequence
  Description of Artificial Sequence: Synthetic oligonucleotide
  Target: LAMA2; (-) strand; PAM type: NNNNGHTT; PAM sequence: GGGGGCTT
tggatacagaggctgaaatt

SEQ ID NO: 36721 - DNA, 20 bp, Artificial Sequence
  Description of Artificial Sequence: Synthetic oligonucleotide
  Target: LAMA2; (-) strand; PAM type: NNNNGHTT; PAM sequence: TGAAGTTT
atatgaacatagggcagtat

SEQ ID NO: 36722 - DNA, 20 bp, Artificial Sequence
  Description of Artificial Sequence: Synthetic oligonucleotide
  Target: LAMA2; (-) strand; PAM type: NNNNGHTT; PAM sequence: TTAAGATT
aaacatcagagatgatgcaa

SEQ ID NO: 36723 - DNA, 20 bp, Artificial Sequence
  Description of Artificial Sequence: Synthetic oligonucleotide
  Target: LAMA2; (-) strand; PAM type: NNNNGHTT; PAM sequence: CTAGGTTT
ttgggtgcaggcctaggatg

SEQ ID NO: 36724 - DNA, 20 bp, Artificial Sequence
  Description of Artificial Sequence: Synthetic oligonucleotide
  Target: LAMA2; (-) strand; PAM type: NNNNGHTT; PAM sequence: ATAAGCTT
cgattatctcatagctcaga

SEQ ID NO: 36725 - DNA, 20 bp, Artificial Sequence
  Description of Artificial Sequence: Synthetic oligonucleotide
  Target: LAMA2; (-) strand; PAM type: NNNNGHTT; PAM sequence: TTACGATT
aggccctgagacttgatacc

SEQ ID NO: 36726 - DNA, 20 bp, Artificial Sequence
  Description of Artificial Sequence: Synthetic oligonucleotide
  Target: LAMA2; (-) strand; PAM type: NNNNGHTT; PAM sequence: TAAGGCTT
cttctaaaataaaactgttt

SEQ ID NO: 36727 - DNA, 20 bp, Artificial Sequence
  Description of Artificial Sequence: Synthetic oligonucleotide
  Target: LAMA2; (-) strand; PAM type: NNNNGHTT; PAM sequence: AACTGTTT
aaattgcccttctaaaataa

SEQ ID NO: 36728 - DNA, 20 bp, Artificial Sequence
  Description of Artificial Sequence: Synthetic oligonucleotide
  Target: LAMA2; (-) strand; PAM type: NNNNGHTT; PAM sequence: TGTTGCTT
taatggaggcccctgcagtc

SEQ ID NO: 36729 - DNA, 20 bp, Artificial Sequence
  Description of Artificial Sequence: Synthetic oligonucleotide
  Target: LAMA2; (-) strand; PAM type: NNNNGHTT; PAM sequence: GATGGCTT
gggctgtgatagtagctctc

SEQ ID NO: 36730 - DNA, 20 bp, Artificial Sequence
  Description of Artificial Sequence: Synthetic oligonucleotide
  Target: LAMA2; (-) strand; PAM type: NNNNGHTT; PAM sequence: TACTGCTT
gttctcaatagcatctgggc

SEQ ID NO: 36731 - DNA, 20 bp, Artificial Sequence
  Description of Artificial Sequence: Synthetic oligonucleotide
  Target: LAMA2; (-) strand; PAM type: NNNNGHTT; PAM sequence: GGGTGCTT
caagtaaagccaagttctca

SEQ ID NO: 36732 - DNA, 20 bp, Artificial Sequence
  Description of Artificial Sequence: Synthetic oligonucleotide
  Target: LAMA2; (-) strand; PAM type: NNNNGHTT; PAM sequence: AGGTGATT
gctatttttcaaatgctcct

SEQ ID NO: 36733 - DNA, 20 bp, Artificial Sequence
  Description of Artificial Sequence: Synthetic oligonucleotide
  Target: LAMA2; (-) strand; PAM type: NNNNGHTT; PAM sequence: TAGGGCTT
gtacttgtttaaaatataca

SEQ ID NO: 36734 - DNA, 20 bp, Artificial Sequence
  Description of Artificial Sequence: Synthetic oligonucleotide
  Target: LAMA2; (-) strand; PAM type: NNNNGHTT; PAM sequence: ACTTGTTT
acataagaatcaccaagagt

SEQ ID NO: 36735 - DNA, 20 bp, Artificial Sequence
  Description of Artificial Sequence: Synthetic oligonucleotide
  Target: LAMA2; (-) strand; PAM type: NNNNGHTT; PAM sequence: CAGGGTTT
actggtgccctgttctccta

SEQ ID NO: 36736 - DNA, 20 bp, Artificial Sequence
  Description of Artificial Sequence: Synthetic oligonucleotide
  Target: LAMA2; (-) strand; PAM type: NNNNGHTT; PAM sequence: CGAAGTTT
tcaataacctagttttagtt

SEQ ID NO: 36737 - DNA, 20 bp, Artificial Sequence
  Description of Artificial Sequence: Synthetic oligonucleotide
  Target: LAMA2; (-) strand; PAM type: NNNNGHTT; PAM sequence: CCTAGTTT
acccctttgaccatcaataa

SEQ ID NO: 36738 - DNA, 20 bp, Artificial Sequence
  Description of Artificial Sequence: Synthetic oligonucleotide
  Target: LAMA2; (-) strand; PAM type: NNNNGHTT; PAM sequence: CTGTGATT
cgtcctcctcaatattatta

SEQ ID NO: 36739 - DNA, 20 bp, Artificial Sequence
  Description of Artificial Sequence: Synthetic oligonucleotide
  Target: LAMA2; (-) strand; PAM type: NNNNGHTT; PAM sequence: CCATGTTT
gggatttttatacaagcctg

SEQ ID NO: 36740 - DNA, 20 bp, Artificial Sequence
  Description of Artificial Sequence: Synthetic oligonucleotide
  Target: LAMA2; (-) strand; PAM type: NNNNGHTT; PAM sequence: CAGGGATT
agatttaatgatggtttctc

SEQ ID NO: 36741 - DNA, 20 bp, Artificial Sequence
  Description of Artificial Sequence: Synthetic oligonucleotide
  Target: LAMA2; (-) strand; PAM type: NNNNGHTT; PAM sequence: GATGGTTT
aagtgtcttcaagatttaat

SEQ ID NO: 36742 - DNA, 20 bp, Artificial Sequence
  Description of Artificial Sequence: Synthetic oligonucleotide
  Target: LAMA2; (-) strand; PAM type: NNNNGHTT; PAM sequence: TCAAGATT
aaaaaaaaaaaaaagtgtct

SEQ ID NO: 36743 - DNA, 20 bp, Artificial Sequence
  Description of Artificial Sequence: Synthetic oligonucleotide
  Target: LAMA2; (-) strand; PAM type: NNNNGHTT; PAM sequence: TACAGTTT
aataatatcaaagctctaca

SEQ ID NO: 36744 - DNA, 20 bp, Artificial Sequence
  Description of Artificial Sequence: Synthetic oligonucleotide
  Target: LAMA2; (-) strand; PAM type: NNNNGHTT; PAM sequence: TTGGGTTT
aaacattttttaatacagtc

SEQ ID NO: 36745 - DNA, 20 bp, Artificial Sequence
  Description of Artificial Sequence: Synthetic oligonucleotide
  Target: LAMA2; (-) strand; PAM type: NNNNGHTT; PAM sequence: CGCTGTTT
aatacaaattagtaatactc

SEQ ID NO: 36746 - DNA, 20 bp, Artificial Sequence
  Description of Artificial Sequence: Synthetic oligonucleotide
  Target: LAMA2; (-) strand; PAM type: NNNNGHTT; PAM sequence: TACTGATT
tttaatattgttgctccagg

SEQ ID NO: 36747 - DNA, 20 bp, Artificial Sequence
  Description of Artificial Sequence: Synthetic oligonucleotide
  Target: LAMA2; (-) strand; PAM type: NNNNGHTT; PAM sequence: CAGGGATT
acaatactgcattaatttaa

SEQ ID NO: 36748 - DNA, 20 bp, Artificial Sequence
  Description of Artificial Sequence: Synthetic oligonucleotide
  Target: LAMA2; (-) strand; PAM type: NNNNGHTT; PAM sequence: CTTTGTTT
cattcagtttctctggccat

SEQ ID NO: 36749 - DNA, 20 bp, Artificial Sequence
  Description of Artificial Sequence: Synthetic oligonucleotide
  Target: LAMA2; (-) strand; PAM type: NNNNGHTT; PAM sequence: TTCAGTTT
tcctcaggattccattctca

SEQ ID NO: 36750 - DNA, 20 bp, Artificial Sequence
  Description of Artificial Sequence: Synthetic oligonucleotide
  Target: LAMA2; (-) strand; PAM type: NNNNGHTT; PAM sequence: TCAGGATT
taaatattggtgttttctcc

SEQ ID NO: 36751 - DNA, 20 bp, Artificial Sequence
  Description of Artificial Sequence: Synthetic oligonucleotide
  Target: LAMA2; (-) strand; PAM type: NNNNGHTT; PAM sequence: TGGTGTTT
gaaccaggtctcttaaatat

SEQ ID NO: 36752 - DNA, 20 bp, Artificial Sequence
  Description of Artificial Sequence: Synthetic oligonucleotide
  Target: LAMA2; (-) strand; PAM type: NNNNGHTT; PAM sequence: AGAAGCTT
gcttccttacctagcttaac

SEQ ID NO: 36753 - DNA, 20 bp, Artificial Sequence
  Description of Artificial Sequence: Synthetic oligonucleotide
  Target: LAMA2; (-) strand; PAM type: NNNNGHTT; PAM sequence: CCTAGCTT
cacaaccctaagcttcctta

SEQ ID NO: 36754 - DNA, 20 bp, Artificial Sequence
  Description of Artificial Sequence: Synthetic oligonucleotide
  Target: LAMA2; (-) strand; PAM type: NNNNGHTT; PAM sequence: CTAAGCTT
ttgtaccttctttcacaacc

SEQ ID NO: 36755 - DNA, 20 bp, Artificial Sequence
  Description of Artificial Sequence: Synthetic oligonucleotide
  Target: LAMA2; (-) strand; PAM type: NNNNGHTT; PAM sequence: GATGGTTT
actggctggggcacatatta

SEQ ID NO: 36756 - DNA, 20 bp, Artificial Sequence
  Description of Artificial Sequence: Synthetic oligonucleotide
  Target: LAMA2; (-) strand; PAM type: NNNNGHTT; PAM sequence: GAGAGTTT
atcatatcgtagaggttaaa

SEQ ID NO: 36757 - DNA, 20 bp, Artificial Sequence
  Description of Artificial Sequence: Synthetic oligonucleotide
  Target: LAMA2; (-) strand; PAM type: NNNNGHTT; PAM sequence: GTGGGCTT
cagtcatttcatagttagga

SEQ ID NO: 36758 - DNA, 20 bp, Artificial Sequence
  Description of Artificial Sequence: Synthetic oligonucleotide
  Target: LAMA2; (-) strand; PAM type: NNNNGHTT; PAM sequence: CTTTGCTT
agcaagcttgtggttttttg

SEQ ID NO: 36759 - DNA, 20 bp, Artificial Sequence
  Description of Artificial Sequence: Synthetic oligonucleotide
  Target: LAMA2; (-) strand; PAM type: NNNNGHTT; PAM sequence: TTTTGCTT
acttcagcaagcttgtggtt

SEQ ID NO: 36760 - DNA, 20 bp, Artificial Sequence
  Description of Artificial Sequence: Synthetic oligonucleotide
  Target: LAMA2; (-) strand; PAM type: NNNNGHTT; PAM sequence: TGTGGTTT
tcctccaacttcagcaagct

SEQ ID NO: 36761 - DNA, 20 bp, Artificial Sequence
  Description of Artificial Sequence: Synthetic oligonucleotide
  Target: LAMA2; (-) strand; PAM type: NNNNGHTT; PAM sequence: GCAAGCTT
cttctggtcctccaacttca

SEQ ID NO: 36762 - DNA, 20 bp, Artificial Sequence
  Description of Artificial Sequence: Synthetic oligonucleotide
  Target: LAMA2; (-) strand; PAM type: NNNNGHTT; PAM sequence: CCTGGATT
attatttttgtctacttggc

SEQ ID NO: 36763 - DNA, 20 bp, Artificial Sequence
  Description of Artificial Sequence: Synthetic oligonucleotide
  Target: LAMA2; (-) strand; PAM type: NNNNGHTT; PAM sequence: TGTGGTTT
tttattattattattattgt

SEQ ID NO: 36764 - DNA, 20 bp, Artificial Sequence
  Description of Artificial Sequence: Synthetic oligonucleotide
  Target: LAMA2; (-) strand; PAM type: NNNNGHTT; PAM sequence: CTTAGATT
aatttatacatgggaaattt

SEQ ID NO: 36765 - DNA, 20 bp, Artificial Sequence
  Description of Artificial Sequence: Synthetic oligonucleotide
  Target: LAMA2; (-) strand; PAM type: NNNNGHTT; PAM sequence: ACCTGTTT
ttatttgacctctctgtaat

SEQ ID NO: 36766 - DNA, 20 bp, Artificial Sequence
  Description of Artificial Sequence: Synthetic oligonucleotide
  Target: LAMA2; (-) strand; PAM type: NNNNGHTT; PAM sequence: TTTAGCTT
cccagacacagaaggaaact

SEQ ID NO: 36767 - DNA, 20 bp, Artificial Sequence
  Description of Artificial Sequence: Synthetic oligonucleotide
  Target: LAMA2; (-) strand; PAM type: NNNNGHTT; PAM sequence: AGCAGATT
ctcctgagcttatagggcag

SEQ ID NO: 36768 - DNA, 20 bp, Artificial Sequence
  Description of Artificial Sequence: Synthetic oligonucleotide
  Target: LAMA2; (-) strand; PAM type: NNNNGHTT; PAM sequence: CTGAGCTT
actgctaggaggggggactc

SEQ ID NO: 36769 - DNA, 20 bp, Artificial Sequence
  Description of Artificial Sequence: Synthetic oligonucleotide
  Target: LAMA2; (-) strand; PAM type: NNNNGHTT; PAM sequence: TAGAGCTT
caggtctgtgcaatctcaca

SEQ ID NO: 36770 - DNA, 20 bp, Artificial Sequence
  Description of Artificial Sequence: Synthetic oligonucleotide
  Target: LAMA2; (-) strand; PAM type: NNNNGHTT; PAM sequence: AAAAGATT
tcagcattttaaaatcatta

SEQ ID NO: 36771 - DNA, 20 bp, Artificial Sequence
  Description of Artificial Sequence: Synthetic oligonucleotide
  Target: LAMA2; (-) strand; PAM type: NNNNGHTT; PAM sequence: TAAAGCTT
atatacatcatttgccagaa

SEQ ID NO: 36772 - DNA, 20 bp, Artificial Sequence
  Description of Artificial Sequence: Synthetic oligonucleotide
  Target: LAMA2; (-) strand; PAM type: NNNNGHTT; PAM sequence: TGAGGTTT
taaatgtgggttactttcac

SEQ ID NO: 36773 - DNA, 20 bp, Artificial Sequence
  Description of Artificial Sequence: Synthetic oligonucleotide
  Target: LAMA2; (-) strand; PAM type: NNNNGHTT; PAM sequence: GCGGGATT
tgggtggggtgtgtagaggg

SEQ ID NO: 36774 - DNA, 20 bp, Artificial Sequence
  Description of Artificial Sequence: Synthetic oligonucleotide
  Target: LAMA2; (-) strand; PAM type: NNNNGHTT; PAM sequence: TTGGGATT
ttctgtattgctattagctt

SEQ ID NO: 36775 - DNA, 20 bp, Artificial Sequence
  Description of Artificial Sequence: Synthetic oligonucleotide
  Target: LAMA2; (-) strand; PAM type: NNNNGHTT; PAM sequence: ATTAGCTT
agtggatcttctgtattgct

SEQ ID NO: 36776 - DNA, 20 bp, Artificial Sequence
  Description of Artificial Sequence: Synthetic oligonucleotide
  Target: LAMA2; (-) strand; PAM type: NNNNGHTT; PAM sequence: AATTGCTT
aaaacaaaacaaaatcttaa

SEQ ID NO: 36777 - DNA, 20 bp, Artificial Sequence
  Description of Artificial Sequence: Synthetic oligonucleotide
  Target: LAMA2; (-) strand; PAM type: NNNNGHTT; PAM sequence: ATGTGTTT
aaacccatatcaccttcctt

SEQ ID NO: 36778 - DNA, 20 bp, Artificial Sequence
  Description of Artificial Sequence: Synthetic oligonucleotide
  Target: LAMA2; (-) strand; PAM type: NNNNGHTT; PAM sequence: ATGCGTTT
ttattaaaaccaaatcaggt

SEQ ID NO: 36779 - DNA, 20 bp, Artificial Sequence
  Description of Artificial Sequence: Synthetic oligonucleotide
  Target: LAMA2; (-) strand; PAM type: NNNNGHTT; PAM sequence: AGTAGCTT
attttctaaaacacttttta

SEQ ID NO: 36780 - DNA, 20 bp, Artificial Sequence
  Description of Artificial Sequence: Synthetic oligonucleotide
  Target: LAMA2; (-) strand; PAM type: NNNNGHTT; PAM sequence: CTGTGTTT
caacacagaatcaacagatt

SEQ ID NO: 36781 - DNA, 20 bp, Artificial Sequence
  Description of Artificial Sequence: Synthetic oligonucleotide
  Target: LAMA2; (-) strand; PAM type: NNNNGHTT; PAM sequence: AACAGATT
tctgcccccaacacagaatc

SEQ ID NO: 36782 - DNA, 20 bp, Artificial Sequence
  Description of Artificial Sequence: Synthetic oligonucleotide
  Target: LAMA2; (-) strand; PAM type: NNNNGHTT; PAM sequence: CAATGCTT
gtcaaaaactgaaacgtgta

SEQ ID NO: 36783 - DNA, 20 bp, Artificial Sequence
  Description of Artificial Sequence: Synthetic oligonucleotide
  Target: LAMA2; (-) strand; PAM type: NNNNGHTT; PAM sequence: AAAAGATT
tcttatagaaatggacacga

SEQ ID NO: 36784 - DNA, 20 bp, Artificial Sequence
  Description of Artificial Sequence: Synthetic oligonucleotide
  Target: LAMA2; (-) strand; PAM type: NNNNGHTT; PAM sequence: AAAGGATT
ccaattttaaagacttcata

SEQ ID NO: 36785 - DNA, 20 bp, Artificial Sequence
  Description of Artificial Sequence: Synthetic oligonucleotide
  Target: LAMA2; (-) strand; PAM type: NNNNGHTT; PAM sequence: ATTGGTTT
tgttccaaaaatataatttt

SEQ ID NO: 36786 - DNA, 20 bp, Artificial Sequence
  Description of Artificial Sequence: Synthetic oligonucleotide
  Target: LAMA2; (-) strand; PAM type: NNNNGHTT; PAM sequence: CCTAGTTT
cttttaagtcatttaaaaac

SEQ ID NO: 36787 - DNA, 20 bp, Artificial Sequence
  Description of Artificial Sequence: Synthetic oligonucleotide
  Target: LAMA2; (-) strand; PAM type: NNNNGHTT; PAM sequence: TATAGTTT
gtaatattgatataattacc

SEQ ID NO: 36788 - DNA, 20 bp, Artificial Sequence
  Description of Artificial Sequence: Synthetic oligonucleotide
  Target: LAMA2; (-) strand; PAM type: NNNNGHTT; PAM sequence: TAATGTTT
tatttacctgttggtttact

SEQ ID NO: 36789 - DNA, 20 bp, Artificial Sequence
  Description of Artificial Sequence: Synthetic oligonucleotide
  Target: LAMA2; (-) strand; PAM type: NNNNGHTT; PAM sequence: GTTGGTTT
gaccaaaaatgtatttacct

SEQ ID NO: 36790 - DNA, 20 bp, Artificial Sequence
  Description of Artificial Sequence: Synthetic oligonucleotide
  Target: LAMA2; (-) strand; PAM type: NNNNGHTT; PAM sequence: TTTTGTTT
gaaaaacataatttttaaag

SEQ ID NO: 36791 - DNA, 20 bp, Artificial Sequence
  Description of Artificial Sequence: Synthetic oligonucleotide
  Target: LAMA2; (-) strand; PAM type: NNNNGHTT; PAM sequence: TAAAGTTT
taaaagaaaaacataatttt

SEQ ID NO: 36792 - DNA, 20 bp, Artificial Sequence
  Description of Artificial Sequence: Synthetic oligonucleotide
  Target: LAMA2; (-) strand; PAM type: NNNNGHTT; PAM sequence: ATTAGCTT
taataaaaataacagaaaga

SEQ ID NO: 36793 - DNA, 20 bp, Artificial Sequence
  Description of Artificial Sequence: Synthetic oligonucleotide
  Target: LAMA2; (-) strand; PAM type: NNNNGHTT; PAM sequence: AGCAGTTT
gaagaaaagtccagaagatt

SEQ ID NO: 36794 - DNA, 20 bp, Artificial Sequence
  Description of Artificial Sequence: Synthetic oligonucleotide
  Target: LAMA2; (-) strand; PAM type: NNNNGHTT; PAM sequence: AGAAGATT
caagctttgaagaaaagtcc

SEQ ID NO: 36795 - DNA, 20 bp, Artificial Sequence
  Description of Artificial Sequence: Synthetic oligonucleotide
  Target: LAMA2; (-) strand; PAM type: NNNNGHTT; PAM sequence: ACAAGCTT
gtttttttggatcaaaactg

SEQ ID NO: 36796 - DNA, 20 bp, Artificial Sequence
  Description of Artificial Sequence: Synthetic oligonucleotide
  Target: LAMA2; (-) strand; PAM type: NNNNGHTT; PAM sequence: TGAAGTTT
caggtccacacaatgaaatc

SEQ ID NO: 36797 - DNA, 20 bp, Artificial Sequence
  Description of Artificial Sequence: Synthetic oligonucleotide
  Target: LAMA2; (-) strand; PAM type: NNNNGHTT; PAM sequence: TACTGTTT
gagtggattccatgaaacca

SEQ ID NO: 36798 - DNA, 20 bp, Artificial Sequence
  Description of Artificial Sequence: Synthetic oligonucleotide
  Target: LAMA2; (-) strand; PAM type: NNNNGHTT; PAM sequence: AGTGGATT
caatattaacaatggccaag

SEQ ID NO: 36799 - DNA, 20 bp, Artificial Sequence
  Description of Artificial Sequence: Synthetic oligonucleotide
  Target: LAMA2; (-) strand; PAM type: NNNNGHTT; PAM sequence: AAATGCTT
aataaggtgctagcatattt

SEQ ID NO: 36800 - DNA, 20 bp, Artificial Sequence
  Description of Artificial Sequence: Synthetic oligonucleotide
  Target: LAMA2; (-) strand; PAM type: NNNNGHTT; PAM sequence: AACAGTTT
ttgggacctgaattattgac

SEQ ID NO: 36801 - DNA, 20 bp, Artificial Sequence
  Description of Artificial Sequence: Synthetic oligonucleotide
  Target: LAMA2; (-) strand; PAM type: NNNNGHTT; PAM sequence: CACAGTTT
aataaatattgttcctgctt

SEQ ID NO: 36802 - DNA, 20 bp, Artificial Sequence
  Description of Artificial Sequence: Synthetic oligonucleotide
  Target: LAMA2; (-) strand; PAM type: NNNNGHTT; PAM sequence: TCCTGCTT
atgtagagaataaatattgt

SEQ ID NO: 36803 - DNA, 20 bp, Artificial Sequence
  Description of Artificial Sequence: Synthetic oligonucleotide
  Target: LAMA2; (-) strand; PAM type: NNNNGHTT; PAM sequence: AAGTGCTT
atatgagttttgacaacctg

SEQ ID NO: 36804 - DNA, 20 bp, Artificial Sequence
  Description of Artificial Sequence: Synthetic oligonucleotide
  Target: LAMA2; (-) strand; PAM type: NNNNGHTT; PAM sequence: ATGAGTTT
cagattatagatgtcataat

SEQ ID NO: 36805 - DNA, 20 bp, Artificial Sequence
  Description of Artificial Sequence: Synthetic oligonucleotide
  Target: LAMA2; (-) strand; PAM type: NNNNGHTT; PAM sequence: GCCAGATT
atgtttgcttgtgattttag

SEQ ID NO: 36806 - DNA, 20 bp, Artificial Sequence
  Description of Artificial Sequence: Synthetic oligonucleotide
  Target: LAMA2; (-) strand; PAM type: NNNNGHTT; PAM sequence: TTGTGATT
ttccatcatggaatgtttgc

SEQ ID NO: 36807 - DNA, 20 bp, Artificial Sequence
  Description of Artificial Sequence: Synthetic oligonucleotide
  Target: LAMA2; (-) strand; PAM type: NNNNGHTT; PAM sequence: GTTTGCTT
ctgccattccatcatggaat

SEQ ID NO: 36808 - DNA, 20 bp, Artificial Sequence
  Description of Artificial Sequence: Synthetic oligonucleotide
  Target: LAMA2; (-) strand; PAM type: NNNNGHTT; PAM sequence: GAATGTTT
tgatctgccattccatcatg

SEQ ID NO: 36809 - DNA, 20 bp, Artificial Sequence
  Description of Artificial Sequence: Synthetic oligonucleotide
  Target: LAMA2; (-) strand; PAM type: NNNNGHTT; PAM sequence: AAAGGCTT
tgggagtcatattttaactg

SEQ ID NO: 36810 - DNA, 20 bp, Artificial Sequence
  Description of Artificial Sequence: Synthetic oligonucleotide
  Target: LAMA2; (-) strand; PAM type: NNNNGHTT; PAM sequence: TTTTGCTT
taatccattaatcctcttcc

SEQ ID NO: 36811 - DNA, 20 bp, Artificial Sequence
  Description of Artificial Sequence: Synthetic oligonucleotide
  Target: LAMA2; (-) strand; PAM type: NNNNGHTT; PAM sequence: CAAGGCTT
attttggcttgaagcatctc

SEQ ID NO: 36812 - DNA, 20 bp, Artificial Sequence
  Description of Artificial Sequence: Synthetic oligonucleotide
  Target: LAMA2; (-) strand; PAM type: NNNNGHTT; PAM sequence: TTTGGCTT
aaaatgagaataataacaat

SEQ ID NO: 36813 - DNA, 20 bp, Artificial Sequence
  Description of Artificial Sequence: Synthetic oligonucleotide
  Target: LAMA2; (-) strand; PAM type: NNNNGHTT; PAM sequence: CAGAGATT
gatctggactggacctggac

SEQ ID NO: 36814 - DNA, 20 bp, Artificial Sequence
  Description of Artificial Sequence: Synthetic oligonucleotide
  Target: LAMA2; (-) strand; PAM type: NNNNGHTT; PAM sequence: TAAGGTTT
tttatgaagtggaatgatta

SEQ ID NO: 36815 - DNA, 20 bp, Artificial Sequence
  Description of Artificial Sequence: Synthetic oligonucleotide
  Target: LAMA2; (-) strand; PAM type: NNNNGHTT; PAM sequence: GAATGATT
agtgttccatttatgaagtg

SEQ ID NO: 36816 - DNA, 20 bp, Artificial Sequence
  Description of Artificial Sequence: Synthetic oligonucleotide
  Target: LAMA2; (-) strand; PAM type: NNNNGHTT; PAM sequence: GACTGATT
taaatacacatttagaaaat

SEQ ID NO: 36817 - DNA, 20 bp, Artificial Sequence
  Description of Artificial Sequence: Synthetic oligonucleotide
  Target: LAMA2; (-) strand; PAM type: NNNNGHTT; PAM sequence: TTGGGTTT
actgattaactgacacaccc

SEQ ID NO: 36818 - DNA, 20 bp, Artificial Sequence
  Description of Artificial Sequence: Synthetic oligonucleotide
  Target: LAMA2; (-) strand; PAM type: NNNNGHTT; PAM sequence: GACTGATT
tacattatctttcctgttaa

SEQ ID NO: 36819 - DNA, 20 bp, Artificial Sequence
  Description of Artificial Sequence: Synthetic oligonucleotide
  Target: LAMA2; (-) strand; PAM type: NNNNGHTT; PAM sequence: AATAGCTT
aaggataagaagcttatttt

SEQ ID NO: 36820 - DNA, 20 bp, Artificial Sequence
  Description of Artificial Sequence: Synthetic oligonucleotide
  Target: LAMA2; (-) strand; PAM type: NNNNGHTT; PAM sequence: AGAAGCTT
aaatagtttccctaaggata

SEQ ID NO: 36821 - DNA, 20 bp, Artificial Sequence
  Description of Artificial Sequence: Synthetic oligonucleotide
  Target: LAMA2; (-) strand; PAM type: NNNNGHTT; PAM sequence: AATAGTTT
gatgatagctctagtgttga

SEQ ID NO: 36822 - DNA, 20 bp, Artificial Sequence
  Description of Artificial Sequence: Synthetic oligonucleotide
  Target: LAMA2; (-) strand; PAM type: NNNNGHTT; PAM sequence: GTTTGCTT
agctcctgatatctttttaa

SEQ ID NO: 36823 - DNA, 20 bp, Artificial Sequence
  Description of Artificial Sequence: Synthetic oligonucleotide
  Target: LAMA2; (-) strand; PAM type: NNNNGHTT; PAM sequence: TTAAGTTT
aagcagctcctgatatcttt

SEQ ID NO: 36824 - DNA, 20 bp, Artificial Sequence
  Description of Artificial Sequence: Synthetic oligonucleotide
  Target: LAMA2; (-) strand; PAM type: NNNNGHTT; PAM sequence: TCCAGTTT
tgctttgctgtagatttttc

SEQ ID NO: 36825 - DNA, 20 bp, Artificial Sequence
  Description of Artificial Sequence: Synthetic oligonucleotide
  Target: LAMA2; (-) strand; PAM type: NNNNGHTT; PAM sequence: TGTAGATT
ctcaggctagaatgctttgc

SEQ ID NO: 36826 - DNA, 20 bp, Artificial Sequence
  Description of Artificial Sequence: Synthetic oligonucleotide
  Target: LAMA2; (-) strand; PAM type: NNNNGHTT; PAM sequence: GAATGCTT
tagtacacatcctcaggcta

SEQ ID NO: 36827 - DNA, 20 bp, Artificial Sequence
  Description of Artificial Sequence: Synthetic oligonucleotide
  Target: LAMA2; (-) strand; PAM type: NNNNGHTT; PAM sequence: CCCTGATT
tatcataggatttttgttat

SEQ ID NO: 36828 - DNA, 20 bp, Artificial Sequence
  Description of Artificial Sequence: Synthetic oligonucleotide
  Target: LAMA2; (-) strand; PAM type: NNNNGHTT; PAM sequence: ATAGGATT
tcctttgcaaaataagtatc

SEQ ID NO: 36829 - DNA, 20 bp, Artificial Sequence
  Description of Artificial Sequence: Synthetic oligonucleotide
  Target: LAMA2; (-) strand; PAM type: NNNNGHTT; PAM sequence: TTCTGATT
ttgaataaggaaataaataa

SEQ ID NO: 36830 - DNA, 20 bp, Artificial Sequence
  Description of Artificial Sequence: Synthetic oligonucleotide
  Target: LAMA2; (-) strand; PAM type: NNNNGHTT; PAM sequence: TCGGGTTT
tcaacataatagtagtaggc

SEQ ID NO: 36831 - DNA, 20 bp, Artificial Sequence
  Description of Artificial Sequence: Synthetic oligonucleotide
  Target: LAMA2; (-) strand; PAM type: NNNNGHTT; PAM sequence: ATTAGTTT
ctattcatgctttggcacat

SEQ ID NO: 36832 - DNA, 20 bp, Artificial Sequence
  Description of Artificial Sequence: Synthetic oligonucleotide
  Target: LAMA2; (-) strand; PAM type: NNNNGHTT; PAM sequence: TCATGCTT
attcctgcaagtatttctat

SEQ ID NO: 36833 - DNA, 20 bp, Artificial Sequence
  Description of Artificial Sequence: Synthetic oligonucleotide
  Target: LAMA2; (-) strand; PAM type: NNNNGHTT; PAM sequence: GCCTGATT
ttgtttcagtgaaaggactt

SEQ ID NO: 36834 - DNA, 20 bp, Artificial Sequence
  Description of Artificial Sequence: Synthetic oligonucleotide
  Target: LAMA2; (-) strand; PAM type: NNNNGHTT; PAM sequence: AATTGTTT
aataaattattatacttata

SEQ ID NO: 36835 - DNA, 20 bp, Artificial Sequence
  Description of Artificial Sequence: Synthetic oligonucleotide
  Target: LAMA2; (-) strand; PAM type: NNNNGHTT; PAM sequence: TTTAGTTT
caaatgtagtatgactcagg

SEQ ID NO: 36836 - DNA, 20 bp, Artificial Sequence
  Description of Artificial Sequence: Synthetic oligonucleotide
  Target: LAMA2; (-) strand; PAM type: NNNNGHTT; PAM sequence: TCAGGTTT
aaaaacaaatgtagtatgac

SEQ ID NO: 36837 - DNA, 20 bp, Artificial Sequence
  Description of Artificial Sequence: Synthetic oligonucleotide
  Target: LAMA2; (-) strand; PAM type: NNNNGHTT; PAM sequence: GCCTGATT
cttacaacaactgatataat

SEQ ID NO: 36838 - DNA, 20 bp, Artificial Sequence
  Description of Artificial Sequence: Synthetic oligonucleotide
  Target: LAMA2; (-) strand; PAM type: NNNNGHTT; PAM sequence: ACACGCTT
ggaaacacaggtatatacat

SEQ ID NO: 36839 - DNA, 20 bp, Artificial Sequence
  Description of Artificial Sequence: Synthetic oligonucleotide
  Target: LAMA2; (-) strand; PAM type: NNNNGHTT; PAM sequence: ATGTGATT
gatacaatgaacatctacac

SEQ ID NO: 36840 - DNA, 20 bp, Artificial Sequence
  Description of Artificial Sequence: Synthetic oligonucleotide
  Target: LAMA2; (-) strand; PAM type: NNNNGHTT; PAM sequence: TCAGGTTT
ataagtgctgtaagtggatg

SEQ ID NO: 36841 - DNA, 20 bp, Artificial Sequence
  Description of Artificial Sequence: Synthetic oligonucleotide
  Target: LAMA2; (-) strand; PAM type: NNNNGHTT; PAM sequence: GGTAGTTT
agcaaaagtcttgcaataaa

SEQ ID NO: 36842 - DNA, 20 bp, Artificial Sequence
  Description of Artificial Sequence: Synthetic oligonucleotide
  Target: LAMA2; (-) strand; PAM type: NNNNGHTT; PAM sequence: AGAGGATT
ttttttctttaaaaagcaat

SEQ ID NO: 36843 - DNA, 20 bp, Artificial Sequence
  Description of Artificial Sequence: Synthetic oligonucleotide
  Target: LAMA2; (-) strand; PAM type: NNNNGHTT; PAM sequence: AAAAGTTT
ttccacagctaattcaacac

SEQ ID NO: 36844 - DNA, 20 bp, Artificial Sequence
  Description of Artificial Sequence: Synthetic oligonucleotide
  Target: LAMA2; (-) strand; PAM type: NNNNGHTT; PAM sequence: TAGTGATT
tttgtaacgcatttgcttag

SEQ ID NO: 36845 - DNA, 20 bp, Artificial Sequence
  Description of Artificial Sequence: Synthetic oligonucleotide
  Target: LAMA2; (-) strand; PAM type: NNNNGHTT; PAM sequence: ATTTGCTT
tcctctcttttttgtaacgc

SEQ ID NO: 36846 - DNA, 20 bp, Artificial Sequence
  Description of Artificial Sequence: Synthetic oligonucleotide
  Target: LAMA2; (-) strand; PAM type: NNNNGHTT; PAM sequence: AATCGTTT
gaaatttattcatgatatca

SEQ ID NO: 36847 - DNA, 20 bp, Artificial Sequence
  Description of Artificial Sequence: Synthetic oligonucleotide
  Target: LAMA2; (-) strand; PAM type: NNNNGHTT; PAM sequence: CAGTGTTT
attatcccctgcacctaaga

SEQ ID NO: 36848 - DNA, 20 bp, Artificial Sequence
  Description of Artificial Sequence: Synthetic oligonucleotide
  Target: LAMA2; (-) strand; PAM type: NNNNGHTT; PAM sequence: TACAGTTT
cagttccctagacaagtcac

SEQ ID NO: 36849 - DNA, 20 bp, Artificial Sequence
  Description of Artificial Sequence: Synthetic oligonucleotide
  Target: LAMA2; (-) strand; PAM type: NNNNGHTT; PAM sequence: TACAGTTT
ttctcatcctgaaactgttt

SEQ ID NO: 36850 - DNA, 20 bp, Artificial Sequence
  Description of Artificial Sequence: Synthetic oligonucleotide
  Target: LAMA2; (-) strand; PAM type: NNNNGHTT; PAM sequence: AACTGTTT
atgtaattttctcatcctga

SEQ ID NO: 36851 - DNA, 20 bp, Artificial Sequence
  Description of Artificial Sequence: Synthetic oligonucleotide
  Target: LAMA2; (-) strand; PAM type: NNNNGHTT; PAM sequence: GTATGTTT
tgtttttgttttccctaagt

SEQ ID NO: 36852 - DNA, 20 bp, Artificial Sequence
  Description of Artificial Sequence: Synthetic oligonucleotide
  Target: LAMA2; (-) strand; PAM type: NNNNGHTT; PAM sequence: TTTTGTTT
ggcaggtgttttgtttttgt

SEQ ID NO: 36853 - DNA, 20 bp, Artificial Sequence
  Description of Artificial Sequence: Synthetic oligonucleotide
  Target: LAMA2; (-) strand; PAM type: NNNNGHTT; PAM sequence: TTTTGTTT
ctgcaaggcaggtgttttgt

SEQ ID NO: 36854 - DNA, 20 bp, Artificial Sequence
  Description of Artificial Sequence: Synthetic oligonucleotide
  Target: LAMA2; (-) strand; PAM type: NNNNGHTT; PAM sequence: TTTTGTTT
atgtttctgcaaggcaggtg

SEQ ID NO: 36855 - DNA, 20 bp, Artificial Sequence
  Description of Artificial Sequence: Synthetic oligonucleotide
  Target: LAMA2; (-) strand; PAM type: NNNNGHTT; PAM sequence: AGGTGTTT
atgacatgtttctgcaaggc

SEQ ID NO: 36856 - DNA, 20 bp, Artificial Sequence
  Description of Artificial Sequence: Synthetic oligonucleotide
  Target: LAMA2; (-) strand; PAM type: NNNNGHTT; PAM sequence: ACATGTTT
gcctaaaatctgtttctatg

SEQ ID NO: 36857 - DNA, 20 bp, Artificial Sequence
  Description of Artificial Sequence: Synthetic oligonucleotide
  Target: LAMA2; (-) strand; PAM type: NNNNGHTT; PAM sequence: ATCTGTTT
gggaaataattctgcctaaa

SEQ ID NO: 36858 - DNA, 20 bp, Artificial Sequence
  Description of Artificial Sequence: Synthetic oligonucleotide
  Target: LAMA2; (-) strand; PAM type: NNNNGHTT; PAM sequence: AAATGTTT
taagctaaagctaaaactcc

SEQ ID NO: 36859 - DNA, 20 bp, Artificial Sequence
  Description of Artificial Sequence: Synthetic oligonucleotide
  Target: LAMA2; (-) strand; PAM type: NNNNGHTT; PAM sequence: GAAAGATT
ttattaaaagattgtcaatg

SEQ ID NO: 36860 - DNA, 20 bp, Artificial Sequence
  Description of Artificial Sequence: Synthetic oligonucleotide
  Target: LAMA2; (-) strand; PAM type: NNNNGHTT; PAM sequence: AAAAGATT
cgattgttttggaaattatt

SEQ ID NO: 36861 - DNA, 20 bp, Artificial Sequence
  Description of Artificial Sequence: Synthetic oligonucleotide
  Target: LAMA2; (-) strand; PAM type: NNNNGHTT; PAM sequence: GATTGTTT
agaattcgaacattaccccc

SEQ ID NO: 36862 - DNA, 20 bp, Artificial Sequence
  Description of Artificial Sequence: Synthetic oligonucleotide
  Target: LAMA2; (-) strand; PAM type: NNNNGHTT; PAM sequence: CCCCGATT
acttagaattcgaacattac

SEQ ID NO: 36863 - DNA, 20 bp, Artificial Sequence
  Description of Artificial Sequence: Synthetic oligonucleotide
  Target: LAMA2; (-) strand; PAM type: NNNNGHTT; PAM sequence: GATTGATT
catccatctcctgccaactg

SEQ ID NO: 36864 - DNA, 20 bp, Artificial Sequence
  Description of Artificial Sequence: Synthetic oligonucleotide
  Target: LAMA2; (-) strand; PAM type: NNNNGHTT; PAM sequence: ACTGGATT
actacatccatctcctgcca

SEQ ID NO: 36865 - DNA, 20 bp, Artificial Sequence
  Description of Artificial Sequence: Synthetic oligonucleotide
  Target: LAMA2; (-) strand; PAM type: NNNNGHTT; PAM sequence: GTGTGCTT
catactctcaagaaaaatgt

SEQ ID NO: 36866 - DNA, 20 bp, Artificial Sequence
  Description of Artificial Sequence: Synthetic oligonucleotide
  Target: LAMA2; (-) strand; PAM type: NNNNGHTT; PAM sequence: AGATGCTT
ttaggattccatcaattctc

SEQ ID NO: 36867 - DNA, 20 bp, Artificial Sequence
  Description of Artificial Sequence: Synthetic oligonucleotide
  Target: LAMA2; (-) strand; PAM type: NNNNGHTT; PAM sequence: TTAGGATT
ttttggcgtttctgtctgcc

SEQ ID NO: 36868 - DNA, 20 bp, Artificial Sequence
  Description of Artificial Sequence: Synthetic oligonucleotide
  Target: LAMA2; (-) strand; PAM type: NNNNGHTT; PAM sequence: TGGCGTTT
aaaaccagttacttgacttt

SEQ ID NO: 36869 - DNA, 20 bp, Artificial Sequence
  Description of Artificial Sequence: Synthetic oligonucleotide
  Target: LAMA2; (-) strand; PAM type: NNNNGHTT; PAM sequence: TGTTGCTT
gcctatatttaaatggccca

SEQ ID NO: 36870 - DNA, 20 bp, Artificial Sequence
  Description of Artificial Sequence: Synthetic oligonucleotide
  Target: LAMA2; (-) strand; PAM type: NNNNGHTT; PAM sequence: TGTTGTTT
acttgtttgctttgttttgt

SEQ ID NO: 36871 - DNA, 20 bp, Artificial Sequence
  Description of Artificial Sequence: Synthetic oligonucleotide
  Target: LAMA2; (-) strand; PAM type: NNNNGHTT; PAM sequence: CTTTGTTT
acagagtttttacttgtttg

SEQ ID NO: 36872 - DNA, 20 bp, Artificial Sequence
  Description of Artificial Sequence: Synthetic oligonucleotide
  Target: LAMA2; (-) strand; PAM type: NNNNGHTT; PAM sequence: GTTTGCTT
tggtcacagagtttttactt

SEQ ID NO: 36873 - DNA, 20 bp, Artificial Sequence
  Description of Artificial Sequence: Synthetic oligonucleotide
  Target: LAMA2; (-) strand; PAM type: NNNNGHTT; PAM sequence: ACTTGTTT
tctgtggtcacagagttttt

SEQ ID NO: 36874 - DNA, 20 bp, Artificial Sequence
  Description of Artificial Sequence: Synthetic oligonucleotide
  Target: LAMA2; (-) strand; PAM type: NNNNGHTT; PAM sequence: CAGAGTTT
acaggctctttctgtggtca

SEQ ID NO: 36875 - DNA, 20 bp, Artificial Sequence
  Description of Artificial Sequence: Synthetic oligonucleotide
  Target: LAMA2; (-) strand; PAM type: NNNNGHTT; PAM sequence: TAATGATT
ttctcattttgctactgtct

SEQ ID NO: 36876 - DNA, 20 bp, Artificial Sequence
  Description of Artificial Sequence: Synthetic oligonucleotide
  Target: LAMA2; (-) strand; PAM type: NNNNGHTT; PAM sequence: GAGTGTTT
agccttggcaaatttcagtt

SEQ ID NO: 36877 - DNA, 20 bp, Artificial Sequence
  Description of Artificial Sequence: Synthetic oligonucleotide
  Target: LAMA2; (-) strand; PAM type: NNNNGHTT; PAM sequence: GCTTGCTT
ccttttcacattctgccttt

SEQ ID NO: 36878 - DNA, 20 bp, Artificial Sequence
  Description of Artificial Sequence: Synthetic oligonucleotide
  Target: LAMA2; (-) strand; PAM type: NNNNGHTT; PAM sequence: CTTTGCTT
agctccttttcacattctgc

SEQ ID NO: 36879 - DNA, 20 bp, Artificial Sequence
  Description of Artificial Sequence: Synthetic oligonucleotide
  Target: LAMA2; (-) strand; PAM type: NNNNGHTT; PAM sequence: TTGGGATT
cttatgctgtacaagttctc

SEQ ID NO: 36880 - DNA, 20 bp, Artificial Sequence
  Description of Artificial Sequence: Synthetic oligonucleotide
  Target: LAMA2; (-) strand; PAM type: NNNNGHTT; PAM sequence: CCTTGATT
attattttatacctgttcaa

SEQ ID NO: 36881 - DNA, 20 bp, Artificial Sequence
  Description of Artificial Sequence: Synthetic oligonucleotide
  Target: LAMA2; (-) strand; PAM type: NNNNGHTT; PAM sequence: TGCTGATT
gtttggttctgcatatattt

SEQ ID NO: 36882 - DNA, 20 bp, Artificial Sequence
  Description of Artificial Sequence: Synthetic oligonucleotide
  Target: LAMA2; (-) strand; PAM type: NNNNGHTT; PAM sequence: TATTGTTT
tccagaccagaatatcaaag

SEQ ID NO: 36883 - DNA, 20 bp, Artificial Sequence
  Description of Artificial Sequence: Synthetic oligonucleotide
  Target: LAMA2; (-) strand; PAM type: NNNNGHTT; PAM sequence: ACTTGTTT
tgcagtcttctaataagatg

SEQ ID NO: 36884 - DNA, 20 bp, Artificial Sequence
  Description of Artificial Sequence: Synthetic oligonucleotide
  Target: LAMA2; (-) strand; PAM type: NNNNGHTT; PAM sequence: TTTAGTTT
gggaactaacaagaatgtca

SEQ ID NO: 36885 - DNA, 20 bp, Artificial Sequence
  Description of Artificial Sequence: Synthetic oligonucleotide
  Target: LAMA2; (-) strand; PAM type: NNNNGHTT; PAM sequence: TGTAGTTT
atctcaagaaacatcctttt

SEQ ID NO: 36886 - DNA, 20 bp, Artificial Sequence
  Description of Artificial Sequence: Synthetic oligonucleotide
  Target: LAMA2; (-) strand; PAM type: NNNNGHTT; PAM sequence: AAAAGTTT
aacaaaacaaacaaacaagc

SEQ ID NO: 36887 - DNA, 20 bp, Artificial Sequence
  Description of Artificial Sequence: Synthetic oligonucleotide
  Target: LAMA2; (-) strand; PAM type: NNNNGHTT; PAM sequence: ACTGGATT
agaaaacattcattcttatc

SEQ ID NO: 36888 - DNA, 20 bp, Artificial Sequence
  Description of Artificial Sequence: Synthetic oligonucleotide
  Target: LAMA2; (-) strand; PAM type: NNNNGHTT; PAM sequence: TAGAGTTT
aaatgtctgcacataaaata

SEQ ID NO: 36889 - DNA, 20 bp, Artificial Sequence
  Description of Artificial Sequence: Synthetic oligonucleotide
  Target: LAMA2; (-) strand; PAM type: NNNNGHTT; PAM sequence: AAAAGATT
catctaagaaagacattggg

SEQ ID NO: 36890 - DNA, 20 bp, Artificial Sequence
  Description of Artificial Sequence: Synthetic oligonucleotide
  Target: LAMA2; (-) strand; PAM type: NNNNGHTT; PAM sequence: AAAAGCTT
ccctctccctcatggaaccc

SEQ ID NO: 36891 - DNA, 20 bp, Artificial Sequence
  Description of Artificial Sequence: Synthetic oligonucleotide
  Target: LAMA2; (-) strand; PAM type: NNNNGHTT; PAM sequence: ATATGTTT
ctgcatggaagaccatacat

SEQ ID NO: 36892 - DNA, 20 bp, Artificial Sequence
  Description of Artificial Sequence: Synthetic oligonucleotide
  Target: LAMA2; (-) strand; PAM type: NNNNGHTT; PAM sequence: GTCTGATT
tcaactcctaggcatgattt

SEQ ID NO: 36893 - DNA, 20 bp, Artificial Sequence
  Description of Artificial Sequence: Synthetic oligonucleotide
  Target: LAMA2; (-) strand; PAM type: NNNNGHTT; PAM sequence: GCATGATT
ttcccactttcaactcctag

SEQ ID NO: 36894 - DNA, 20 bp, Artificial Sequence
  Description of Artificial Sequence: Synthetic oligonucleotide
  Target: LAMA2; (-) strand; PAM type: NNNNGHTT; PAM sequence: CTGGGATT
ttattttgttaccgattttt

SEQ ID NO: 36895 - DNA, 20 bp, Artificial Sequence
  Description of Artificial Sequence: Synthetic oligonucleotide
  Target: LAMA2; (-) strand; PAM type: NNNNGHTT; PAM sequence: TACCGATT
agaataataggttattttgt

SEQ ID NO: 36896 - DNA, 20 bp, Artificial Sequence
  Description of Artificial Sequence: Synthetic oligonucleotide
  Target: LAMA2; (-) strand; PAM type: NNNNGHTT; PAM sequence: TGTGGATT
ttgtgttattaatattctta

SEQ ID NO: 36897 - DNA, 20 bp, Artificial Sequence
  Description of Artificial Sequence: Synthetic oligonucleotide
  Target: LAMA2; (-) strand; PAM type: NNNNGHTT; PAM sequence: TGTTGTTT
tctgtaacattttgcttctg

SEQ ID NO: 36898 - DNA, 20 bp, Artificial Sequence
  Description of Artificial Sequence: Synthetic oligonucleotide
  Target: LAMA2; (-) strand; PAM type: NNNNGHTT; PAM sequence: TTTTGCTT
attctggtgtctctgtaaca

SEQ ID NO: 36899 - DNA, 20 bp, Artificial Sequence
  Description of Artificial Sequence: Synthetic oligonucleotide
  Target: LAMA2; (-) strand; PAM type: NNNNGHTT; PAM sequence: CATGGTTT
cctggcttgagtaattaatg

SEQ ID NO: 36900 - DNA, 20 bp, Artificial Sequence
  Description of Artificial Sequence: Synthetic oligonucleotide
  Target: LAMA2; (-) strand; PAM type: NNNNGHTT; PAM sequence: CCTGGCTT
agttgcaaaattgggaattt

SEQ ID NO: 36901 - DNA, 20 bp, Artificial Sequence
  Description of Artificial Sequence: Synthetic oligonucleotide
  Target: LAMA2; (-) strand; PAM type: NNNNGHTT; PAM sequence: TTGTGTTT
gacttcagattaaacatggt

SEQ ID NO: 36902 - DNA, 20 bp, Artificial Sequence
  Description of Artificial Sequence: Synthetic oligonucleotide
  Target: LAMA2; (-) strand; PAM type: NNNNGHTT; PAM sequence: CATGGTTT
tggcaggacttcagattaaa

SEQ ID NO: 36903 - DNA, 20 bp, Artificial Sequence
  Description of Artificial Sequence: Synthetic oligonucleotide
  Target: LAMA2; (-) strand; PAM type: NNNNGHTT; PAM sequence: TTCAGATT
agaaaacagactggcaggac

SEQ ID NO: 36904 - DNA, 20 bp, Artificial Sequence
  Description of Artificial Sequence: Synthetic oligonucleotide
  Target: LAMA2; (-) strand; PAM type: NNNNGHTT; PAM sequence: GCCTGATT
ggaccaagattccaaaccag

SEQ ID NO: 36905 - DNA, 20 bp, Artificial Sequence
  Description of Artificial Sequence: Synthetic oligonucleotide
  Target: LAMA2; (-) strand; PAM type: NNNNGHTT; PAM sequence: CCAAGATT
cacagctattgattgctgga

SEQ ID NO: 36906 - DNA, 20 bp, Artificial Sequence
  Description of Artificial Sequence: Synthetic oligonucleotide
  Target: LAMA2; (-) strand; PAM type: NNNNGHTT; PAM sequence: TATTGATT
gttacctaagattacacagc

SEQ ID NO: 36907 - DNA, 20 bp, Artificial Sequence
  Description of Artificial Sequence: Synthetic oligonucleotide
  Target: LAMA2; (-) strand; PAM type: NNNNGHTT; PAM sequence: CTAAGATT
actaaacttcaaagagttac

SEQ ID NO: 36908 - DNA, 20 bp, Artificial Sequence
  Description of Artificial Sequence: Synthetic oligonucleotide
  Target: LAMA2; (-) strand; PAM type: NNNNGHTT; PAM sequence: AGTTGCTT
caggaaaagaagaaattgta

SEQ ID NO: 36909 - DNA, 20 bp, Artificial Sequence
  Description of Artificial Sequence: Synthetic oligonucleotide
  Target: LAMA2; (-) strand; PAM type: NNNNGHTT; PAM sequence: ATAAGATT
aaagagcaagtttctaaaga

SEQ ID NO: 36910 - DNA, 20 bp, Artificial Sequence
  Description of Artificial Sequence: Synthetic oligonucleotide
  Target: LAMA2; (-) strand; PAM type: NNNNGHTT; PAM sequence: GCAAGTTT
ccttttcctccactcaaaga

SEQ ID NO: 36911 - DNA, 20 bp, Artificial Sequence
  Description of Artificial Sequence: Synthetic oligonucleotide
  Target: LAMA2; (-) strand; PAM type: NNNNGHTT; PAM sequence: CTTAGTTT
tttataatgtcattagtcaa

SEQ ID NO: 36912 - DNA, 20 bp, Artificial Sequence
  Description of Artificial Sequence: Synthetic oligonucleotide
  Target: LAMA2; (-) strand; PAM type: NNNNGHTT; PAM sequence: ACCTGCTT
tcagaaagaaatgattctct

SEQ ID NO: 36913 - DNA, 20 bp, Artificial Sequence
  Description of Artificial Sequence: Synthetic oligonucleotide
  Target: LAMA2; (-) strand; PAM type: NNNNGHTT; PAM sequence: AAATGATT
tgctacagaagctcagaaag

SEQ ID NO: 36914 - DNA, 20 bp, Artificial Sequence
  Description of Artificial Sequence: Synthetic oligonucleotide
  Target: LAMA2; (-) strand; PAM type: NNNNGHTT; PAM sequence: CTTTGCTT
tattatggtgatttctgaaa

SEQ ID NO: 36915 - DNA, 20 bp, Artificial Sequence
  Description of Artificial Sequence: Synthetic oligonucleotide
  Target: LAMA2; (-) strand; PAM type: NNNNGHTT; PAM sequence: TGGTGATT
ttacagactttattttatta

SEQ ID NO: 36916 - DNA, 20 bp, Artificial Sequence
  Description of Artificial Sequence: Synthetic oligonucleotide
  Target: LAMA2; (-) strand; PAM type: NNNNGHTT; PAM sequence: GCCAGTTT
tttaatgaatgtaggtccct

SEQ ID NO: 36917 - DNA, 20 bp, Artificial Sequence
  Description of Artificial Sequence: Synthetic oligonucleotide
  Target: LAMA2; (-) strand; PAM type: NNNNGHTT; PAM sequence: AGAAGATT
tacatatcccaaaaatattt

SEQ ID NO: 36918 - DNA, 20 bp, Artificial Sequence
  Description of Artificial Sequence: Synthetic oligonucleotide
  Target: LAMA2; (-) strand; PAM type: NNNNGHTT; PAM sequence: AATTGTTT
tataaaatgcatgttattaa

SEQ ID NO: 36919 - DNA, 20 bp, Artificial Sequence
  Description of Artificial Sequence: Synthetic oligonucleotide
  Target: LAMA2; (-) strand; PAM type: NNNNGHTT; PAM sequence: TACTGTTT
gaaaatagtatattgaaaat

SEQ ID NO: 36920 - DNA, 20 bp, Artificial Sequence
  Description of Artificial Sequence: Synthetic oligonucleotide
  Target: LAMA2; (-) strand; PAM type: NNNNGHTT; PAM sequence: TTGTGTTT
tttttgttgtcattttaaag

SEQ ID NO: 36921 - DNA, 20 bp, Artificial Sequence
  Description of Artificial Sequence: Synthetic oligonucleotide
  Target: LAMA2; (-) strand; PAM type: NNNNGHTT; PAM sequence: GAAAGCTT
aatgttcgtcttgaaagttt

SEQ ID NO: 36922 - DNA, 20 bp, Artificial Sequence
  Description of Artificial Sequence: Synthetic oligonucleotide
  Target: LAMA2; (-) strand; PAM type: NNNNGHTT; PAM sequence: GAAAGTTT
gctaataaaatgttcgtctt

SEQ ID NO: 36923 - DNA, 20 bp, Artificial Sequence
  Description of Artificial Sequence: Synthetic oligonucleotide
  Target: LAMA2; (-) strand; PAM type: NNNNGHTT; PAM sequence: TGATGCTT
aatattgtcctttgcactag

SEQ ID NO: 36924 - DNA, 20 bp, Artificial Sequence
  Description of Artificial Sequence: Synthetic oligonucleotide
  Target: LAMA2; (-) strand; PAM type: NNNNGHTT; PAM sequence: CTTAGTTT
acagaattaaatcatattat

SEQ ID NO: 36925 - DNA, 20 bp, Artificial Sequence
  Description of Artificial Sequence: Synthetic oligonucleotide
  Target: LAMA2; (-) strand; PAM type: NNNNGHTT; PAM sequence: GGATGCTT
gactacctggcaacaaatac

SEQ ID NO: 36926 - DNA, 20 bp, Artificial Sequence
  Description of Artificial Sequence: Synthetic oligonucleotide
  Target: LAMA2; (-) strand; PAM type: NNNNGHTT; PAM sequence: CTCTGCTT
tgtgtggcaacgggccgcct

SEQ ID NO: 36927 - DNA, 20 bp, Artificial Sequence
  Description of Artificial Sequence: Synthetic oligonucleotide
  Target: LAMA2; (-) strand; PAM type: NNNNGHTT; PAM sequence: AAAGGTTT
acattgcatgaggttactgt

SEQ ID NO: 36928 - DNA, 20 bp, Artificial Sequence
  Description of Artificial Sequence: Synthetic oligonucleotide
  Target: LAMA2; (-) strand; PAM type: NNNNGHTT; PAM sequence: ATCAGTTT
tgggcaaggtaatattgccc

SEQ ID NO: 36929 - DNA, 20 bp, Artificial Sequence
  Description of Artificial Sequence: Synthetic oligonucleotide
  Target: LAMA2; (-) strand; PAM type: NNNNGHTT; PAM sequence: TCATGATT
caggcagtttgagggtaagt

SEQ ID NO: 36930 - DNA, 20 bp, Artificial Sequence
  Description of Artificial Sequence: Synthetic oligonucleotide
  Target: LAMA2; (-) strand; PAM type: NNNNGHTT; PAM sequence: GGCAGTTT
cacatgattatgcaaacaca

SEQ ID NO: 36931 - DNA, 20 bp, Artificial Sequence
  Description of Artificial Sequence: Synthetic oligonucleotide
  Target: LAMA2; (-) strand; PAM type: NNNNGHTT; PAM sequence: ACATGATT
gaatctatcctgtagtatcc

SEQ ID NO: 36932 - DNA, 20 bp, Artificial Sequence
  Description of Artificial Sequence: Synthetic oligonucleotide
  Target: LAMA2; (-) strand; PAM type: NNNNGHTT; PAM sequence: CAAAGTTT
tctttcatgggtaagacaag

SEQ ID NO: 36933 - DNA, 20 bp, Artificial Sequence
  Description of Artificial Sequence: Synthetic oligonucleotide
  Target: LAMA2; (-) strand; PAM type: NNNNGHTT; PAM sequence: TGCAGTTT
attttttacttcaaatccag

SEQ ID NO: 36934 - DNA, 20 bp, Artificial Sequence
  Description of Artificial Sequence: Synthetic oligonucleotide
  Target: LAMA2; (-) strand; PAM type: NNNNGHTT; PAM sequence: TTTTGTTT
aattggaaattagatccagt

SEQ ID NO: 36935 - DNA, 20 bp, Artificial Sequence
  Description of Artificial Sequence: Synthetic oligonucleotide
  Target: LAMA2; (-) strand; PAM type: NNNNGHTT; PAM sequence: TCCAGTTT
tgatagaattggaaattaga

SEQ ID NO: 36936 - DNA, 20 bp, Artificial Sequence
  Description of Artificial Sequence: Synthetic oligonucleotide
  Target: LAMA2; (-) strand; PAM type: NNNNGHTT; PAM sequence: TTTAGCTT
ccaactcacagataagaaaa

SEQ ID NO: 36937 - DNA, 20 bp, Artificial Sequence
  Description of Artificial Sequence: Synthetic oligonucleotide
  Target: LAMA2; (-) strand; PAM type: NNNNGHTT; PAM sequence: GATAGCTT
ttaaatatggcacattttca

SEQ ID NO: 36938 - DNA, 20 bp, Artificial Sequence
  Description of Artificial Sequence: Synthetic oligonucleotide
  Target: LAMA2; (-) strand; PAM type: NNNNGHTT; PAM sequence: GTATGTTT
atgtcttttaactatgttca

SEQ ID NO: 36939 - DNA, 20 bp, Artificial Sequence
  Description of Artificial Sequence: Synthetic oligonucleotide
  Target: LAMA2; (-) strand; PAM type: NNNNGHTT; PAM sequence: TATAGTTT
agtggactacaataaattgg

SEQ ID NO: 36940 - DNA, 20 bp, Artificial Sequence
  Description of Artificial Sequence: Synthetic oligonucleotide
  Target: LAMA2; (-) strand; PAM type: NNNNGHTT; PAM sequence: AAGAGATT
acaggatcacagtagttggg

SEQ ID NO: 36941 - DNA, 20 bp, Artificial Sequence
  Description of Artificial Sequence: Synthetic oligonucleotide
  Target: LAMA2; (-) strand; PAM type: NNNNGHTT; PAM sequence: GAGAGATT
tcatcagtctttgattctta

SEQ ID NO: 36942 - DNA, 20 bp, Artificial Sequence
  Description of Artificial Sequence: Synthetic oligonucleotide
  Target: LAMA2; (-) strand; PAM type: NNNNGHTT; PAM sequence: CTTTGATT
ttcagaggtttctcatcagt

SEQ ID NO: 36943 - DNA, 20 bp, Artificial Sequence
  Description of Artificial Sequence: Synthetic oligonucleotide
  Target: LAMA2; (-) strand; PAM type: NNNNGHTT; PAM sequence: AGAGGTTT
acacacttttcacagctttc

SEQ ID NO: 36944 - DNA, 20 bp, Artificial Sequence
  Description of Artificial Sequence: Synthetic oligonucleotide
  Target: LAMA2; (-) strand; PAM type: NNNNGHTT; PAM sequence: CACAGCTT
aaaaacaataacacactttt

SEQ ID NO: 36945 - DNA, 20 bp, Artificial Sequence
  Description of Artificial Sequence: Synthetic oligonucleotide
  Target: LAMA2; (-) strand; PAM type: NNNNGHTT; PAM sequence: CCCAGCTT
cccatcaataccactagggt

SEQ ID NO: 36946 - DNA, 20 bp, Artificial Sequence
  Description of Artificial Sequence: Synthetic oligonucleotide
  Target: LAMA2; (-) strand; PAM type: NNNNGHTT; PAM sequence: AAAAGTTT
atactgctattttcccctta

SEQ ID NO: 36947 - DNA, 20 bp, Artificial Sequence
  Description of Artificial Sequence: Synthetic oligonucleotide
  Target: LAMA2; (-) strand; PAM type: NNNNGHTT; PAM sequence: CATTGCTT
gtacaagatagtcattacaa

SEQ ID NO: 36948 - DNA, 20 bp, Artificial Sequence
  Description of Artificial Sequence: Synthetic oligonucleotide
  Target: LAMA2; (-) strand; PAM type: NNNNGHTT; PAM sequence: ATCAGATT
tttagcctacaatttccctt

SEQ ID NO: 36949 - DNA, 20 bp, Artificial Sequence
  Description of Artificial Sequence: Synthetic oligonucleotide
  Target: LAMA2; (-) strand; PAM type: NNNNGHTT; PAM sequence: ATATGCTT
aataaaataaaatgtataat

SEQ ID NO: 36950 - DNA, 20 bp, Artificial Sequence
  Description of Artificial Sequence: Synthetic oligonucleotide
  Target: LAMA2; (-) strand; PAM type: NNNNGHTT; PAM sequence: CGGAGCTT
aatggcgtgaacccgggagg

SEQ ID NO: 36951 - DNA, 20 bp, Artificial Sequence
  Description of Artificial Sequence: Synthetic oligonucleotide
  Target: LAMA2; (-) strand; PAM type: NNNNGHTT; PAM sequence: TCAAGTTT
acgtgctagaaattatattt

SEQ ID NO: 36952 - DNA, 20 bp, Artificial Sequence
  Description of Artificial Sequence: Synthetic oligonucleotide
  Target: LAMA2; (-) strand; PAM type: NNNNGHTT; PAM sequence: ATTTGTTT
ctttaaaatgttctagacat

SEQ ID NO: 36953 - DNA, 20 bp, Artificial Sequence
  Description of Artificial Sequence: Synthetic oligonucleotide
  Target: LAMA2; (-) strand; PAM type: NNNNGHTT; PAM sequence: TATGGATT
aattttacaaatgattacat

SEQ ID NO: 36954 - DNA, 20 bp, Artificial Sequence
  Description of Artificial Sequence: Synthetic oligonucleotide
  Target: LAMA2; (-) strand; PAM type: NNNNGHTT; PAM sequence: AAATGATT
gataaactttaaaattttac

SEQ ID NO: 36955 - DNA, 20 bp, Artificial Sequence
  Description of Artificial Sequence: Synthetic oligonucleotide
  Target: LAMA2; (-) strand; PAM type: NNNNGHTT; PAM sequence: ATTTGATT
aacaaagcttgttttatttc

SEQ ID NO: 36956 - DNA, 20 bp, Artificial Sequence
  Description of Artificial Sequence: Synthetic oligonucleotide
  Target: LAMA2; (-) strand; PAM type: NNNNGHTT; PAM sequence: GCTTGTTT
acactatcccatggaacaaa

SEQ ID NO: 36957 - DNA, 20 bp, Artificial Sequence
  Description of Artificial Sequence: Synthetic oligonucleotide
  Target: LAMA2; (-) strand; PAM type: NNNNGHTT; PAM sequence: CAAAGCTT
actgacactatcccatggaa

SEQ ID NO: 36958 - DNA, 20 bp, Artificial Sequence
  Description of Artificial Sequence: Synthetic oligonucleotide
  Target: LAMA2; (-) strand; PAM type: NNNNGHTT; PAM sequence: TCTTGATT
aatattgtaaaacttcttac

SEQ ID NO: 36959 - DNA, 20 bp, Artificial Sequence
  Description of Artificial Sequence: Synthetic oligonucleotide
  Target: LAMA2; (-) strand; PAM type: NNNNGHTT; PAM sequence: AGATGTTT
ataaataatatctaaagttc

SEQ ID NO: 36960 - DNA, 20 bp, Artificial Sequence
  Description of Artificial Sequence: Synthetic oligonucleotide
  Target: LAMA2; (-) strand; PAM type: NNNNGHTT; PAM sequence: TGAAGATT
cccgaggatattaatttcct

SEQ ID NO: 36961 - DNA, 20 bp, Artificial Sequence
  Description of Artificial Sequence: Synthetic oligonucleotide
  Target: LAMA2; (-) strand; PAM type: NNNNGHTT; PAM sequence: TTTGGATT
tgaagaagacattagacaca

SEQ ID NO: 36962 - DNA, 20 bp, Artificial Sequence
  Description of Artificial Sequence: Synthetic oligonucleotide
  Target: LAMA2; (-) strand; PAM type: NNNNGHTT; PAM sequence: TGTGGCTT
tgaaggggcatactgattca

SEQ ID NO: 36963 - DNA, 20 bp, Artificial Sequence
  Description of Artificial Sequence: Synthetic oligonucleotide
  Target: LAMA2; (-) strand; PAM type: NNNNGHTT; PAM sequence: TACTGATT
aaagtccagctgaaggggca

SEQ ID NO: 36964 - DNA, 20 bp, Artificial Sequence
  Description of Artificial Sequence: Synthetic oligonucleotide
  Target: LAMA2; (-) strand; PAM type: NNNNGHTT; PAM sequence: TTTAGCTT
ggttccacggttcagtgcaa

SEQ ID NO: 36965 - DNA, 20 bp, Artificial Sequence
  Description of Artificial Sequence: Synthetic oligonucleotide
  Target: LAMA2; (-) strand; PAM type: NNNNGHTT; PAM sequence: ATTTGTTT
cacagtgatgagggtgattc

SEQ ID NO: 36966 - DNA, 20 bp, Artificial Sequence
  Description of Artificial Sequence: Synthetic oligonucleotide
  Target: LAMA2; (-) strand; PAM type: NNNNGHTT; PAM sequence: GGGTGATT
cggaacaagcacagtgatga

SEQ ID NO: 36967 - DNA, 20 bp, Artificial Sequence
  Description of Artificial Sequence: Synthetic oligonucleotide
  Target: LAMA2; (-) strand; PAM type: NNNNGHTT; PAM sequence: TCCTGCTT
tagcatcatcttccagaact

SEQ ID NO: 36968 - DNA, 20 bp, Artificial Sequence
  Description of Artificial Sequence: Synthetic oligonucleotide
  Target: LAMA2; (-) strand; PAM type: NNNNGHTT; PAM sequence: TCCAGATT
tttttctaaagcctacaatt

SEQ ID NO: 36969 - DNA, 20 bp, Artificial Sequence
  Description of Artificial Sequence: Synthetic oligonucleotide
  Target: LAMA2; (-) strand; PAM type: NNNNGHTT; PAM sequence: TAGAGATT
aggtattagaaagtctaata

SEQ ID NO: 36970 - DNA, 20 bp, Artificial Sequence
  Description of Artificial Sequence: Synthetic oligonucleotide
  Target: LAMA2; (-) strand; PAM type: NNNNGHTT; PAM sequence: ACCTGTTT
aatataattaatttctgaaa

SEQ ID NO: 36971 - DNA, 20 bp, Artificial Sequence
  Description of Artificial Sequence: Synthetic oligonucleotide
  Target: LAMA2; (-) strand; PAM type: NNNNGHTT; PAM sequence: CCTAGTTT
ctttgagatccagctttttc

SEQ ID NO: 36972 - DNA, 20 bp, Artificial Sequence
  Description of Artificial Sequence: Synthetic oligonucleotide
  Target: LAMA2; (-) strand; PAM type: NNNNGHTT; PAM sequence: TCCAGCTT
ttgtaataatgtctttgaga

SEQ ID NO: 36973 - DNA, 20 bp, Artificial Sequence
  Description of Artificial Sequence: Synthetic oligonucleotide
  Target: LAMA2; (-) strand; PAM type: NNNNGHTT; PAM sequence: TACTGCTT
atatattgtttataatttac

SEQ ID NO: 36974 - DNA, 20 bp, Artificial Sequence
  Description of Artificial Sequence: Synthetic oligonucleotide
  Target: LAMA2; (-) strand; PAM type: NNNNGHTT; PAM sequence: TATTGTTT
ttaattatgaattcaaaata

SEQ ID NO: 36975 - DNA, 20 bp, Artificial Sequence
  Description of Artificial Sequence: Synthetic oligonucleotide
  Target: LAMA2; (-) strand; PAM type: NNNNGHTT; PAM sequence: TTGGGATT
gctattacctcagggaagat

SEQ ID NO: 36976 - DNA, 20 bp, Artificial Sequence
  Description of Artificial Sequence: Synthetic oligonucleotide
  Target: LAMA2; (-) strand; PAM type: NNNNGHTT; PAM sequence: GGAAGATT
aactgaagctattacctcag

SEQ ID NO: 36977 - DNA, 20 bp, Artificial Sequence
  Description of Artificial Sequence: Synthetic oligonucleotide
  Target: LAMA2; (-) strand; PAM type: NNNNGHTT; PAM sequence: ATAAGTTT
aaaacttgaaagttttgctt

SEQ ID NO: 36978 - DNA, 20 bp, Artificial Sequence
  Description of Artificial Sequence: Synthetic oligonucleotide
  Target: LAMA2; (-) strand; PAM type: NNNNGHTT; PAM sequence: TTTTGCTT
cagtttaaaaaacttgaaag

SEQ ID NO: 36979 - DNA, 20 bp, Artificial Sequence
  Description of Artificial Sequence: Synthetic oligonucleotide
  Target: LAMA2; (-) strand; PAM type: NNNNGHTT; PAM sequence: GAAAGTTT
taaatcagtttaaaaaactt

SEQ ID NO: 36980 - DNA, 20 bp, Artificial Sequence
  Description of Artificial Sequence: Synthetic oligonucleotide
  Target: LAMA2; (-) strand; PAM type: NNNNGHTT; PAM sequence: ATCAGTTT
gctacatatacaaccagtaa

SEQ ID NO: 36981 - DNA, 20 bp, Artificial Sequence
  Description of Artificial Sequence: Synthetic oligonucleotide
  Target: LAMA2; (-) strand; PAM type: NNNNGHTT; PAM sequence: TCAAGTTT
ggtctacaaagagttaagct

SEQ ID NO: 36982 - DNA, 20 bp, Artificial Sequence
  Description of Artificial Sequence: Synthetic oligonucleotide
  Target: LAMA2; (-) strand; PAM type: NNNNGHTT; PAM sequence: TTAAGCTT
gatggaaggtctacaaagag

SEQ ID NO: 36983 - DNA, 20 bp, Artificial Sequence
  Description of Artificial Sequence: Synthetic oligonucleotide
  Target: LAMA2; (-) strand; PAM type: NNNNGHTT; PAM sequence: AAAAGTTT
ttgcataaatatggttagaa

SEQ ID NO: 36984 - DNA, 20 bp, Artificial Sequence
  Description of Artificial Sequence: Synthetic oligonucleotide
  Target: LAMA2; (-) strand; PAM type: NNNNGHTT; PAM sequence: TATTGATT
ctcaaaaactacctaataaa

SEQ ID NO: 36985 - DNA, 20 bp, Artificial Sequence
  Description of Artificial Sequence: Synthetic oligonucleotide
  Target: LAMA2; (-) strand; PAM type: NNNNGHTT; PAM sequence: ATAAGATT
tacaaggaataagttctcat

SEQ ID NO: 36986 - DNA, 20 bp, Artificial Sequence
  Description of Artificial Sequence: Synthetic oligonucleotide
  Target: LAMA2; (-) strand; PAM type: NNNNGHTT; PAM sequence: GATGGTTT
tggactctaagtatcggtaa

SEQ ID NO: 36987 - DNA, 20 bp, Artificial Sequence
  Description of Artificial Sequence: Synthetic oligonucleotide
  Target: LAMA2; (-) strand; PAM type: NNNNGHTT; PAM sequence: GAAAGCTT
tgaagcaaagaatagcacat

SEQ ID NO: 36988 - DNA, 20 bp, Artificial Sequence
  Description of Artificial Sequence: Synthetic oligonucleotide
  Target: LAMA2; (-) strand; PAM type: NNNNGHTT; PAM sequence: CATAGATT
tctagtgatacagggtctcc

SEQ ID NO: 36989 - DNA, 20 bp, Artificial Sequence
  Description of Artificial Sequence: Synthetic oligonucleotide
  Target: LAMA2; (-) strand; PAM type: NNNNGHTT; PAM sequence: TCCTGCTT
atggtaaacttcatatgtaa

SEQ ID NO: 36990 - DNA, 20 bp, Artificial Sequence
  Description of Artificial Sequence: Synthetic oligonucleotide
  Target: LAMA2; (-) strand; PAM type: NNNNGHTT; PAM sequence: TGGAGATT
caacccctgttcagtaaacc

SEQ ID NO: 36991 - DNA, 20 bp, Artificial Sequence
  Description of Artificial Sequence: Synthetic oligonucleotide
  Target: LAMA2; (-) strand; PAM type: NNNNGHTT; PAM sequence: CCTAGATT
ccagctagaaagtggcagag

SEQ ID NO: 36992 - DNA, 20 bp, Artificial Sequence
  Description of Artificial Sequence: Synthetic oligonucleotide
  Target: LAMA2; (-) strand; PAM type: NNNNGHTT; PAM sequence: TTAAGCTT
ctctgtgctgattttataat

SEQ ID NO: 36993 - DNA, 20 bp, Artificial Sequence
  Description of Artificial Sequence: Synthetic oligonucleotide
  Target: LAMA2; (-) strand; PAM type: NNNNGHTT; PAM sequence: TGCTGATT
accaatttacattccctctg

SEQ ID NO: 36994 - DNA, 20 bp, Artificial Sequence
  Description of Artificial Sequence: Synthetic oligonucleotide
  Target: LAMA2; (-) strand; PAM type: NNNNGHTT; PAM sequence: ACAGGCTT
cctcccaaagtgctgagatt

SEQ ID NO: 36995 - DNA, 20 bp, Artificial Sequence
  Description of Artificial Sequence: Synthetic oligonucleotide
  Target: LAMA2; (-) strand; PAM type: NNNNGHTT; PAM sequence: CTGAGATT
tgcctcagcctcccaaagtg

SEQ ID NO: 36996 - DNA, 20 bp, Artificial Sequence
  Description of Artificial Sequence: Synthetic oligonucleotide
  Target: LAMA2; (-) strand; PAM type: NNNNGHTT; PAM sequence: CAGGGTTT
tggatgttttttagtagaga

SEQ ID NO: 36997 - DNA, 20 bp, Artificial Sequence
  Description of Artificial Sequence: Synthetic oligonucleotide
  Target: LAMA2; (-) strand; PAM type: NNNNGHTT; PAM sequence: GGATGTTT
actatgcctggctaattttt

SEQ ID NO: 36998 - DNA, 20 bp, Artificial Sequence
  Description of Artificial Sequence: Synthetic oligonucleotide
  Target: LAMA2; (-) strand; PAM type: NNNNGHTT; PAM sequence: CTGGGATT
tgcctcagcctcccaagtag

SEQ ID NO: 36999 - DNA, 20 bp, Artificial Sequence
  Description of Artificial Sequence: Synthetic oligonucleotide
  Target: LAMA2; (-) strand; PAM type: NNNNGHTT; PAM sequence: AATTGCTT
ctctttgagatcctgatttc

SEQ ID NO: 37000 - DNA, 20 bp, Artificial Sequence
  Description of Artificial Sequence: Synthetic oligonucleotide
  Target: LAMA2; (-) strand; PAM type: NNNNGHTT; PAM sequence: TCCTGATT
atgcagatatctctttgaga

SEQ ID NO: 37001 - DNA, 20 bp, Artificial Sequence
  Description of Artificial Sequence: Synthetic oligonucleotide
  Target: LAMA2; (-) strand; PAM type: NNNNGHTT; PAM sequence: GGTTGCTT
catctgtcaacagatattta

SEQ ID NO: 37002 - DNA, 20 bp, Artificial Sequence
  Description of Artificial Sequence: Synthetic oligonucleotide
  Target: LAMA2; (-) strand; PAM type: NNNNGHTT; PAM sequence: GCAGGATT
tgtccacattgcctgaaatg

SEQ ID NO: 37003 - DNA, 20 bp, Artificial Sequence
  Description of Artificial Sequence: Synthetic oligonucleotide
  Target: LAMA2; (-) strand; PAM type: NNNNGHTT; PAM sequence: CCTGGCTT
gtaatatttgtccttccact

SEQ ID NO: 37004 - DNA, 20 bp, Artificial Sequence
  Description of Artificial Sequence: Synthetic oligonucleotide
  Target: LAMA2; (-) strand; PAM type: NNNNGHTT; PAM sequence: TTTAGTTT
tgtttctgagttttgactat

SEQ ID NO: 37005 - DNA, 20 bp, Artificial Sequence
  Description of Artificial Sequence: Synthetic oligonucleotide
  Target: LAMA2; (-) strand; PAM type: NNNNGHTT; PAM sequence: CTGAGTTT
accattctactctcatgttt

SEQ ID NO: 37006 - DNA, 20 bp, Artificial Sequence
  Description of Artificial Sequence: Synthetic oligonucleotide
  Target: LAMA2; (-) strand; PAM type: NNNNGHTT; PAM sequence: TCATGTTT
tggtaactaccattctactc

SEQ ID NO: 37007 - DNA, 20 bp, Artificial Sequence
  Description of Artificial Sequence: Synthetic oligonucleotide
  Target: LAMA2; (-) strand; PAM type: NNNNGHTT; PAM sequence: TCCTGTTT
ttatcctttcactaatactt

SEQ ID NO: 37008 - DNA, 20 bp, Artificial Sequence
  Description of Artificial Sequence: Synthetic oligonucleotide
  Target: LAMA2; (-) strand; PAM type: NNNNGHTT; PAM sequence: GTAAGATT
attttgtgataagaacattt

SEQ ID NO: 37009 - DNA, 20 bp, Artificial Sequence
  Description of Artificial Sequence: Synthetic oligonucleotide
  Target: LAMA2; (-) strand; PAM type: NNNNGHTT; PAM sequence: AAAAGTTT
catatatatcaataacctcc

SEQ ID NO: 37010 - DNA, 20 bp, Artificial Sequence
  Description of Artificial Sequence: Synthetic oligonucleotide
  Target: LAMA2; (-) strand; PAM type: NNNNGHTT; PAM sequence: ATGAGTTT
tatttgatgtatacaaccta

SEQ ID NO: 37011 - DNA, 20 bp, Artificial Sequence
  Description of Artificial Sequence: Synthetic oligonucleotide
  Target: LAMA2; (-) strand; PAM type: NNNNGHTT; PAM sequence: GGTTGATT
ctttaaaaaaaacatgttga

SEQ ID NO: 37012 - DNA, 20 bp, Artificial Sequence
  Description of Artificial Sequence: Synthetic oligonucleotide
  Target: LAMA2; (-) strand; PAM type: NNNNGHTT; PAM sequence: TACTGCTT
ttaaaaaataggtatttcta

SEQ ID NO: 37013 - DNA, 20 bp, Artificial Sequence
  Description of Artificial Sequence: Synthetic oligonucleotide
  Target: LAMA2; (-) strand; PAM type: NNNNGHTT; PAM sequence: GAAGGCTT
caagaaaacaccacaagtta

SEQ ID NO: 37014 - DNA, 20 bp, Artificial Sequence
  Description of Artificial Sequence: Synthetic oligonucleotide
  Target: LAMA2; (-) strand; PAM type: NNNNGHTT; PAM sequence: ATACGATT
gatctcaactattaaccaag

SEQ ID NO: 37015 - DNA, 20 bp, Artificial Sequence
  Description of Artificial Sequence: Synthetic oligonucleotide
  Target: LAMA2; (-) strand; PAM type: NNNNGHTT; PAM sequence: CTAAGCTT
ctttctatctgaatttaggc

SEQ ID NO: 37016 - DNA, 20 bp, Artificial Sequence
  Description of Artificial Sequence: Synthetic oligonucleotide
  Target: LAMA2; (-) strand; PAM type: NNNNGHTT; PAM sequence: CCAAGCTT
caaaacttacaacagatgtg

SEQ ID NO: 37017 - DNA, 20 bp, Artificial Sequence
  Description of Artificial Sequence: Synthetic oligonucleotide
  Target: LAMA2; (-) strand; PAM type: NNNNGHTT; PAM sequence: CCTGGTTT
gaacaaagatggtctgtgca

SEQ ID NO: 37018 - DNA, 20 bp, Artificial Sequence
  Description of Artificial Sequence: Synthetic oligonucleotide
  Target: LAMA2; (-) strand; PAM type: NNNNGHTT; PAM sequence: CTTTGCTT
aagctatgagtaaacctacc

SEQ ID NO: 37019 - DNA, 20 bp, Artificial Sequence
  Description of Artificial Sequence: Synthetic oligonucleotide
  Target: LAMA2; (-) strand; PAM type: NNNNGHTT; PAM sequence: CTCAGCTT
ggtgttacagaagaggaacc

SEQ ID NO: 37020 - DNA, 20 bp, Artificial Sequence
  Description of Artificial Sequence: Synthetic oligonucleotide
  Target: LAMA2; (-) strand; PAM type: NNNNGHTT; PAM sequence: ATAAGCTT
ctcacagcccaggaagcagc

SEQ ID NO: 37021 - DNA, 20 bp, Artificial Sequence
  Description of Artificial Sequence: Synthetic oligonucleotide
  Target: LAMA2; (-) strand; PAM type: NNNNGHTT; PAM sequence: CACAGCTT
aagacagcaatttagcctga

SEQ ID NO: 37022 - DNA, 20 bp, Artificial Sequence
  Description of Artificial Sequence: Synthetic oligonucleotide
  Target: LAMA2; (-) strand; PAM type: NNNNGHTT; PAM sequence: CTGGGATT
tgaaaaagattgcaaagggt

SEQ ID NO: 37023 - DNA, 20 bp, Artificial Sequence
  Description of Artificial Sequence: Synthetic oligonucleotide
  Target: LAMA2; (-) strand; PAM type: NNNNGHTT; PAM sequence: AAAAGATT
atttaaaattttttttatga

SEQ ID NO: 37024 - DNA, 20 bp, Artificial Sequence
  Description of Artificial Sequence: Synthetic oligonucleotide
  Target: LAMA2; (-) strand; PAM type: NNNNGHTT; PAM sequence: ATTGGATT
agttgttgaaatgatctaaa

SEQ ID NO: 37025 - DNA, 20 bp, Artificial Sequence
  Description of Artificial Sequence: Synthetic oligonucleotide
  Target: LAMA2; (-) strand; PAM type: NNNNGHTT; PAM sequence: CAAGGTTT
ggaatgacacttaacgtgta

SEQ ID NO: 37026 - DNA, 20 bp, Artificial Sequence
  Description of Artificial Sequence: Synthetic oligonucleotide
  Target: LAMA2; (-) strand; PAM type: NNNNGHTT; PAM sequence: AGCAGATT
aatccaacacagctagagca

SEQ ID NO: 37027 - DNA, 20 bp, Artificial Sequence
  Description of Artificial Sequence: Synthetic oligonucleotide
  Target: LAMA2; (-) strand; PAM type: NNNNGHTT; PAM sequence: TTCAGCTT
agaatactatacactatcta

SEQ ID NO: 37028 - DNA, 20 bp, Artificial Sequence
  Description of Artificial Sequence: Synthetic oligonucleotide
  Target: LAMA2; (-) strand; PAM type: NNNNGHTT; PAM sequence: TCATGATT
ctgggtgatattatgcagtc

SEQ ID NO: 37029 - DNA, 20 bp, Artificial Sequence
  Description of Artificial Sequence: Synthetic oligonucleotide
  Target: LAMA2; (-) strand; PAM type: NNNNGHTT; PAM sequence: CTTGGTTT
aaaactgtgtgtgcttgctc

SEQ ID NO: 37030 - DNA, 20 bp, Artificial Sequence
  Description of Artificial Sequence: Synthetic oligonucleotide
  Target: LAMA2; (-) strand; PAM type: NNNNGHTT; PAM sequence: GTGTGCTT
atctctgtgtccaaaactgt

SEQ ID NO: 37031 - DNA, 20 bp, Artificial Sequence
  Description of Artificial Sequence: Synthetic oligonucleotide
  Target: LAMA2; (-) strand; PAM type: NNNNGHTT; PAM sequence: TAACGTTT
catccaacaaagagaatatg

SEQ ID NO: 37032 - DNA, 20 bp, Artificial Sequence
  Description of Artificial Sequence: Synthetic oligonucleotide
  Target: LAMA2; (-) strand; PAM type: NNNNGHTT; PAM sequence: AAAAGATT
ggtctaagcacacatttccc

SEQ ID NO: 37033 - DNA, 20 bp, Artificial Sequence
  Description of Artificial Sequence: Synthetic oligonucleotide
  Target: LAMA2; (-) strand; PAM type: NNNNGHTT; PAM sequence: CGCTGTTT
acctggactccttgccctga

SEQ ID NO: 37034 - DNA, 20 bp, Artificial Sequence
  Description of Artificial Sequence: Synthetic oligonucleotide
  Target: LAMA2; (-) strand; PAM type: NNNNGHTT; PAM sequence: GCAAGTTT
aattttattcaccatgctgt

SEQ ID NO: 37035 - DNA, 20 bp, Artificial Sequence
  Description of Artificial Sequence: Synthetic oligonucleotide
  Target: LAMA2; (-) strand; PAM type: NNNNGHTT; PAM sequence: GATGGCTT
atttttgcctggcgtttttt

SEQ ID NO: 37036 - DNA, 20 bp, Artificial Sequence
  Description of Artificial Sequence: Synthetic oligonucleotide
  Target: LAMA2; (-) strand; PAM type: NNNNGHTT; PAM sequence: TGGCGTTT
gtatatcacatatttttgcc

SEQ ID NO: 37037 - DNA, 20 bp, Artificial Sequence
  Description of Artificial Sequence: Synthetic oligonucleotide
  Target: LAMA2; (-) strand; PAM type: NNNNGHTT; PAM sequence: GTAGGTTT
atttaaatataatttatggt

SEQ ID NO: 37038 - DNA, 20 bp, Artificial Sequence
  Description of Artificial Sequence: Synthetic oligonucleotide
  Target: LAMA2; (-) strand; PAM type: NNNNGHTT; PAM sequence: CTGTGCTT
gtgttgaaatttgatttaac

SEQ ID NO: 37039 - DNA, 20 bp, Artificial Sequence
  Description of Artificial Sequence: Synthetic oligonucleotide
  Target: LAMA2; (-) strand; PAM type: NNNNGHTT; PAM sequence: ATTTGATT
tgaaatgatactgtgttgaa

SEQ ID NO: 37040 - DNA, 20 bp, Artificial Sequence
  Description of Artificial Sequence: Synthetic oligonucleotide
  Target: LAMA2; (-) strand; PAM type: NNNNGHTT; PAM sequence: ATGAGATT
atgtttgttttattcaaaat

SEQ ID NO: 37041 - DNA, 20 bp, Artificial Sequence
  Description of Artificial Sequence: Synthetic oligonucleotide
  Target: LAMA2; (-) strand; PAM type: NNNNGHTT; PAM sequence: GTTTGTTT
ttaataatgtgtaaagatat

SEQ ID NO: 37042 - DNA, 20 bp, Artificial Sequence
  Description of Artificial Sequence: Synthetic oligonucleotide
  Target: LAMA2; (-) strand; PAM type: NNNNGHTT; PAM sequence: ATATGTTT
tcatttaataatgtgtaaag

SEQ ID NO: 37043 - DNA, 20 bp, Artificial Sequence
  Description of Artificial Sequence: Synthetic oligonucleotide
  Target: LAMA2; (-) strand; PAM type: NNNNGHTT; PAM sequence: AATTGTTT
tagatggcccatctaagtat

SEQ ID NO: 37044 - DNA, 20 bp, Artificial Sequence
  Description of Artificial Sequence: Synthetic oligonucleotide
  Target: LAMA2; (-) strand; PAM type: NNNNGHTT; PAM sequence: CAACGTTT
tgaaaaatatagttagtcat

SEQ ID NO: 37045 - DNA, 20 bp, Artificial Sequence
  Description of Artificial Sequence: Synthetic oligonucleotide
  Target: LAMA2; (-) strand; PAM type: NNNNGHTT; PAM sequence: ATTAGTTT
aaccattctgcttcattcat

SEQ ID NO: 37046 - DNA, 20 bp, Artificial Sequence
  Description of Artificial Sequence: Synthetic oligonucleotide
  Target: LAMA2; (-) strand; PAM type: NNNNGHTT; PAM sequence: TTCTGCTT
ttgagaaaaaaaatgaacca

SEQ ID NO: 37047 - DNA, 20 bp, Artificial Sequence
  Description of Artificial Sequence: Synthetic oligonucleotide
  Target: LAMA2; (-) strand; PAM type: NNNNGHTT; PAM sequence: AAAAGTTT
ctggctttctttgtatttgt

SEQ ID NO: 37048 - DNA, 20 bp, Artificial Sequence
  Description of Artificial Sequence: Synthetic oligonucleotide
  Target: LAMA2; (-) strand; PAM type: NNNNGHTT; PAM sequence: TCTGGCTT
attcaaaattgggttttgat

SEQ ID NO: 37049 - DNA, 20 bp, Artificial Sequence
  Description of Artificial Sequence: Synthetic oligonucleotide
  Target: LAMA2; (-) strand; PAM type: NNNNGHTT; PAM sequence: TTTTGATT
acttgatattcaaaattggg

SEQ ID NO: 37050 - DNA, 20 bp, Artificial Sequence
  Description of Artificial Sequence: Synthetic oligonucleotide
  Target: LAMA2; (-) strand; PAM type: NNNNGHTT; PAM sequence: TTGGGTTT
ttaacacttgatattcaaaa

SEQ ID NO: 37051 - DNA, 20 bp, Artificial Sequence
  Description of Artificial Sequence: Synthetic oligonucleotide
  Target: LAMA2; (-) strand; PAM type: NNNNGHTT; PAM sequence: TTCAGTTT
aaatttgtattgatgatata

SEQ ID NO: 37052 - DNA, 20 bp, Artificial Sequence
  Description of Artificial Sequence: Synthetic oligonucleotide
  Target: LAMA2; (-) strand; PAM type: NNNNGHTT; PAM sequence: ATATGCTT
caaggatatgtcactatgat

SEQ ID NO: 37053 - DNA, 20 bp, Artificial Sequence
  Description of Artificial Sequence: Synthetic oligonucleotide
  Target: LAMA2; (-) strand; PAM type: NNNNGHTT; PAM sequence: TGGCGTTT
taattttgcattttttctgg

SEQ ID NO: 37054 - DNA, 20 bp, Artificial Sequence
  Description of Artificial Sequence: Synthetic oligonucleotide
  Target: LAMA2; (-) strand; PAM type: NNNNGHTT; PAM sequence: CTCAGCTT
ctgaagtgcagtagcacagt

SEQ ID NO: 37055 - DNA, 20 bp, Artificial Sequence
  Description of Artificial Sequence: Synthetic oligonucleotide
  Target: LAMA2; (-) strand; PAM type: NNNNGHTT; PAM sequence: ATCAGATT
cccatattctaaattatcat

SEQ ID NO: 37056 - DNA, 20 bp, Artificial Sequence
  Description of Artificial Sequence: Synthetic oligonucleotide
  Target: LAMA2; (-) strand; PAM type: NNNNGHTT; PAM sequence: TGCTGTTT
aaagccaacaaactagcata

SEQ ID NO: 37057 - DNA, 20 bp, Artificial Sequence
  Description of Artificial Sequence: Synthetic oligonucleotide
  Target: LAMA2; (-) strand; PAM type: NNNNGHTT; PAM sequence: ATGGGCTT
acaaaatctcagttaaaaga

SEQ ID NO: 37058 - DNA, 20 bp, Artificial Sequence
  Description of Artificial Sequence: Synthetic oligonucleotide
  Target: LAMA2; (-) strand; PAM type: NNNNGHTT; PAM sequence: GAGAGATT
ggctgagggctgtgggaatg

SEQ ID NO: 37059 - DNA, 20 bp, Artificial Sequence
  Description of Artificial Sequence: Synthetic oligonucleotide
  Target: LAMA2; (-) strand; PAM type: NNNNGHTT; PAM sequence: GAAAGATT
aaagaaaattctgtcatttg

SEQ ID NO: 37060 - DNA, 20 bp, Artificial Sequence
  Description of Artificial Sequence: Synthetic oligonucleotide
  Target: LAMA2; (-) strand; PAM type: NNNNGHTT; PAM sequence: TTTAGCTT
acatacacgatgaaatacta

SEQ ID NO: 37061 - DNA, 20 bp, Artificial Sequence
  Description of Artificial Sequence: Synthetic oligonucleotide
  Target: LAMA2; (-) strand; PAM type: NNNNGHTT; PAM sequence: ATCAGTTT
atttacccaaaagatgtgaa

SEQ ID NO: 37062 - DNA, 20 bp, Artificial Sequence
  Description of Artificial Sequence: Synthetic oligonucleotide
  Target: LAMA2; (-) strand; PAM type: NNNNGHTT; PAM sequence: TGGAGTTT
agccattatggaaaactaca

SEQ ID NO: 37063 - DNA, 20 bp, Artificial Sequence
  Description of Artificial Sequence: Synthetic oligonucleotide
  Target: LAMA2; (-) strand; PAM type: NNNNGHTT; PAM sequence: AAAAGCTT
aattgggtcatatcaaacta

SEQ ID NO: 37064 - DNA, 20 bp, Artificial Sequence
  Description of Artificial Sequence: Synthetic oligonucleotide
  Target: LAMA2; (-) strand; PAM type: NNNNGHTT; PAM sequence: TAATGTTT
tatgacattgatctgggtaa

SEQ ID NO: 37065 - DNA, 20 bp, Artificial Sequence
  Description of Artificial Sequence: Synthetic oligonucleotide
  Target: LAMA2; (-) strand; PAM type: NNNNGHTT; PAM sequence: TCAAGATT
agatttcagtgcaaccacta

SEQ ID NO: 37066 - DNA, 20 bp, Artificial Sequence
  Description of Artificial Sequence: Synthetic oligonucleotide
  Target: LAMA2; (-) strand; PAM type: NNNNGHTT; PAM sequence: TACAGATT
tcataatacccaaagcaatc

SEQ ID NO: 37067 - DNA, 20 bp, Artificial Sequence
  Description of Artificial Sequence: Synthetic oligonucleotide
  Target: LAMA2; (-) strand; PAM type: NNNNGHTT; PAM sequence: CATGGATT
atggaaagatatcctgtgtt

SEQ ID NO: 37068 - DNA, 20 bp, Artificial Sequence
  Description of Artificial Sequence: Synthetic oligonucleotide
  Target: LAMA2; (-) strand; PAM type: NNNNGHTT; PAM sequence: AAATGCTT
caatagctataaaaaagatt

SEQ ID NO: 37069 - DNA, 20 bp, Artificial Sequence
  Description of Artificial Sequence: Synthetic oligonucleotide
  Target: LAMA2; (-) strand; PAM type: NNNNGHTT; PAM sequence: AAAAGATT
cccatttacaatagctataa

SEQ ID NO: 37070 - DNA, 20 bp, Artificial Sequence
  Description of Artificial Sequence: Synthetic oligonucleotide
  Target: LAMA2; (-) strand; PAM type: NNNNGHTT; PAM sequence: AAAGGATT
ataaatgccatttacagaat

SEQ ID NO: 37071 - DNA, 20 bp, Artificial Sequence
  Description of Artificial Sequence: Synthetic oligonucleotide
  Target: LAMA2; (-) strand; PAM type: NNNNGHTT; PAM sequence: AAAAGATT
ctaataatcattcaccatgg

SEQ ID NO: 37072 - DNA, 20 bp, Artificial Sequence
  Description of Artificial Sequence: Synthetic oligonucleotide
  Target: LAMA2; (-) strand; PAM type: NNNNGHTT; PAM sequence: GATAGTTT
gaaagaaactggcagccaag

SEQ ID NO: 37073 - DNA, 20 bp, Artificial Sequence
  Description of Artificial Sequence: Synthetic oligonucleotide
  Target: LAMA2; (-) strand; PAM type: NNNNGHTT; PAM sequence: TTCAGCTT
cccagaattgctgggctcct

SEQ ID NO: 37074 - DNA, 20 bp, Artificial Sequence
  Description of Artificial Sequence: Synthetic oligonucleotide
  Target: LAMA2; (-) strand; PAM type: NNNNGHTT; PAM sequence: CTGTGTTT
gtttctccattttaatactc

SEQ ID NO: 37075 - DNA, 20 bp, Artificial Sequence
  Description of Artificial Sequence: Synthetic oligonucleotide
  Target: LAMA2; (-) strand; PAM type: NNNNGHTT; PAM sequence: TGATGTTT
tgctctgtttataacaatat

SEQ ID NO: 37076 - DNA, 20 bp, Artificial Sequence
  Description of Artificial Sequence: Synthetic oligonucleotide
  Target: LAMA2; (-) strand; PAM type: NNNNGHTT; PAM sequence: CTCTGTTT
aaaataattattttggggtg

SEQ ID NO: 37077 - DNA, 20 bp, Artificial Sequence
  Description of Artificial Sequence: Synthetic oligonucleotide
  Target: LAMA2; (-) strand; PAM type: NNNNGHTT; PAM sequence: CAGAGTTT
taattttaaaataagcattc

SEQ ID NO: 37078 - DNA, 20 bp, Artificial Sequence
  Description of Artificial Sequence: Synthetic oligonucleotide
  Target: LAMA2; (-) strand; PAM type: NNNNGHTT; PAM sequence: TGCTGCTT
cacatgtgcactaccagcaa

SEQ ID NO: 37079 - DNA, 20 bp, Artificial Sequence
  Description of Artificial Sequence: Synthetic oligonucleotide
  Target: LAMA2; (-) strand; PAM type: NNNNGHTT; PAM sequence: AAATGATT
ggccctgataaaaagagagg

SEQ ID NO: 37080 - DNA, 20 bp, Artificial Sequence
  Description of Artificial Sequence: Synthetic oligonucleotide
  Target: LAMA2; (-) strand; PAM type: NNNNGHTT; PAM sequence: TCTGGTTT
atttgtaggatatgcaccac

SEQ ID NO: 37081 - DNA, 20 bp, Artificial Sequence
  Description of Artificial Sequence: Synthetic oligonucleotide
  Target: LAMA2; (-) strand; PAM type: NNNNGHTT; PAM sequence: CTGGGATT
cgcctcggcctcccaaagtg

SEQ ID NO: 37082 - DNA, 20 bp, Artificial Sequence
  Description of Artificial Sequence: Synthetic oligonucleotide
  Target: LAMA2; (-) strand; PAM type: NNNNGHTT; PAM sequence: CACCGTTT
ttttagtagagacggggttt

SEQ ID NO: 37083 - DNA, 20 bp, Artificial Sequence
  Description of Artificial Sequence: Synthetic oligonucleotide
  Target: LAMA2; (-) strand; PAM type: NNNNGHTT; PAM sequence: CGGGGTTT
ttttgtatttttagtagaga

SEQ ID NO: 37084 - DNA, 20 bp, Artificial Sequence
  Description of Artificial Sequence: Synthetic oligonucleotide
  Target: LAMA2; (-) strand; PAM type: NNNNGHTT; PAM sequence: TAATGCTT
ataatgtgctgtagctgaaa

SEQ ID NO: 37085 - DNA, 20 bp, Artificial Sequence
  Description of Artificial Sequence: Synthetic oligonucleotide
  Target: LAMA2; (-) strand; PAM type: NNNNGHTT; PAM sequence: TTCTGTTT
tcctgataatccaccttctt

SEQ ID NO: 37086 - DNA, 20 bp, Artificial Sequence
  Description of Artificial Sequence: Synthetic oligonucleotide
  Target: LAMA2; (-) strand; PAM type: NNNNGHTT; PAM sequence: GCAGGTTT
gtatgtggtggggtttgttt

SEQ ID NO: 37087 - DNA, 20 bp, Artificial Sequence
  Description of Artificial Sequence: Synthetic oligonucleotide
  Target: LAMA2; (-) strand; PAM type: NNNNGHTT; PAM sequence: GTTTGTTT
tagtgctagtatgtggtggg

SEQ ID NO: 37088 - DNA, 20 bp, Artificial Sequence
  Description of Artificial Sequence: Synthetic oligonucleotide
  Target: LAMA2; (-) strand; PAM type: NNNNGHTT; PAM sequence: TGGGGTTT
tgactagtgctagtatgtgg

SEQ ID NO: 37089 - DNA, 20 bp, Artificial Sequence
  Description of Artificial Sequence: Synthetic oligonucleotide
  Target: LAMA2; (-) strand; PAM type: NNNNGHTT; PAM sequence: GCTAGCTT
ccagagtgcaccagaagaga

SEQ ID NO: 37090 - DNA, 20 bp, Artificial Sequence
  Description of Artificial Sequence: Synthetic oligonucleotide
  Target: LAMA2; (-) strand; PAM type: NNNNGHTT; PAM sequence: TATTGCTT
acaggcagcccaatcagctc

SEQ ID NO: 37091 - DNA, 20 bp, Artificial Sequence
  Description of Artificial Sequence: Synthetic oligonucleotide
  Target: LAMA2; (-) strand; PAM type: NNNNGHTT; PAM sequence: TCTTGTTT
agaaaagtgagtctctaaaa

SEQ ID NO: 37092 - DNA, 20 bp, Artificial Sequence
  Description of Artificial Sequence: Synthetic oligonucleotide
  Target: LAMA2; (-) strand; PAM type: NNNNGHTT; PAM sequence: CCCAGTTT
cactgccatcttcagtatct

SEQ ID NO: 37093 - DNA, 20 bp, Artificial Sequence
  Description of Artificial Sequence: Synthetic oligonucleotide
  Target: LAMA2; (-) strand; PAM type: NNNNGHTT; PAM sequence: GTAGGTTT
ctcctatctcaggcttcttt

SEQ ID NO: 37094 - DNA, 20 bp, Artificial Sequence
  Description of Artificial Sequence: Synthetic oligonucleotide
  Target: LAMA2; (-) strand; PAM type: NNNNGHTT; PAM sequence: TCAGGCTT
attaccctttctctcctatc

SEQ ID NO: 37095 - DNA, 20 bp, Artificial Sequence
  Description of Artificial Sequence: Synthetic oligonucleotide
  Target: LAMA2; (-) strand; PAM type: NNNNGHTT; PAM sequence: TCATGATT
atttttatgcttatttgatg

SEQ ID NO: 37096 - DNA, 20 bp, Artificial Sequence
  Description of Artificial Sequence: Synthetic oligonucleotide
  Target: LAMA2; (-) strand; PAM type: NNNNGHTT; PAM sequence: TTATGCTT
attaaaaataagcattattt

SEQ ID NO: 37097 - DNA, 20 bp, Artificial Sequence
  Description of Artificial Sequence: Synthetic oligonucleotide
  Target: LAMA2; (-) strand; PAM type: NNNNGHTT; PAM sequence: GATAGTTT
aacattaatctctttataga

SEQ ID NO: 37098 - DNA, 20 bp, Artificial Sequence
  Description of Artificial Sequence: Synthetic oligonucleotide
  Target: LAMA2; (-) strand; PAM type: NNNNGHTT; PAM sequence: AACTGTTT
acaatgagagatggcaacaa

SEQ ID NO: 37099 - DNA, 20 bp, Artificial Sequence
  Description of Artificial Sequence: Synthetic oligonucleotide
  Target: LAMA2; (-) strand; PAM type: NNNNGHTT; PAM sequence: GTTTGTTT
gcttaagagttgttttgttt

SEQ ID NO: 37100 - DNA, 20 bp, Artificial Sequence
  Description of Artificial Sequence: Synthetic oligonucleotide
  Target: LAMA2; (-) strand; PAM type: NNNNGHTT; PAM sequence: GTTTGTTT
ttgggcttaagagttgtttt

SEQ ID NO: 37101 - DNA, 20 bp, Artificial Sequence
  Description of Artificial Sequence: Synthetic oligonucleotide
  Target: LAMA2; (-) strand; PAM type: NNNNGHTT; PAM sequence: TTTTGTTT
gctgttgggcttaagagttg

SEQ ID NO: 37102 - DNA, 20 bp, Artificial Sequence
  Description of Artificial Sequence: Synthetic oligonucleotide
  Target: LAMA2; (-) strand; PAM type: NNNNGHTT; PAM sequence: AGTTGTTT
atgttgctgttgggcttaag

SEQ ID NO: 37103 - DNA, 20 bp, Artificial Sequence
  Description of Artificial Sequence: Synthetic oligonucleotide
  Target: LAMA2; (-) strand; PAM type: NNNNGHTT; PAM sequence: TTGGGCTT
aattataatgaatgttgctg

SEQ ID NO: 37104 - DNA, 20 bp, Artificial Sequence
  Description of Artificial Sequence: Synthetic oligonucleotide
  Target: LAMA2; (-) strand; PAM type: NNNNGHTT; PAM sequence: GGTTGTTT
tcccagaagaatttataata

SEQ ID NO: 37105 - DNA, 20 bp, Artificial Sequence
  Description of Artificial Sequence: Synthetic oligonucleotide
  Target: LAMA2; (-) strand; PAM type: NNNNGHTT; PAM sequence: ATATGCTT
gttgttttcaattatttgta

SEQ ID NO: 37106 - DNA, 20 bp, Artificial Sequence
  Description of Artificial Sequence: Synthetic oligonucleotide
  Target: LAMA2; (-) strand; PAM type: NNNNGHTT; PAM sequence: GGTTGTTT
tgccaagttcacagaatcag

SEQ ID NO: 37107 - DNA, 20 bp, Artificial Sequence
  Description of Artificial Sequence: Synthetic oligonucleotide
  Target: LAMA2; (-) strand; PAM type: NNNNGHTT; PAM sequence: AATTGCTT
tcatccaggggccagggctg

SEQ ID NO: 37108 - DNA, 20 bp, Artificial Sequence
  Description of Artificial Sequence: Synthetic oligonucleotide
  Target: LAMA2; (-) strand; PAM type: NNNNGHTT; PAM sequence: TACAGCTT
tgccctcaaagaagctcaga

SEQ ID NO: 37109 - DNA, 20 bp, Artificial Sequence
  Description of Artificial Sequence: Synthetic oligonucleotide
  Target: LAMA2; (-) strand; PAM type: NNNNGHTT; PAM sequence: TGTAGATT
aaccagaagatgaagttttc

SEQ ID NO: 37110 - DNA, 20 bp, Artificial Sequence
  Description of Artificial Sequence: Synthetic oligonucleotide
  Target: LAMA2; (-) strand; PAM type: NNNNGHTT; PAM sequence: TGAAGTTT
cctcccacacaaccagaaga

SEQ ID NO: 37111 - DNA, 20 bp, Artificial Sequence
  Description of Artificial Sequence: Synthetic oligonucleotide
  Target: LAMA2; (-) strand; PAM type: NNNNGHTT; PAM sequence: ACTAGTTT
tggatcctaatcatctattt

SEQ ID NO: 37112 - DNA, 20 bp, Artificial Sequence
  Description of Artificial Sequence: Synthetic oligonucleotide
  Target: LAMA2; (-) strand; PAM type: NNNNGHTT; PAM sequence: CAAGGTTT
gatacaagtaaacagtaccc

SEQ ID NO: 37113 - DNA, 20 bp, Artificial Sequence
  Description of Artificial Sequence: Synthetic oligonucleotide
  Target: LAMA2; (-) strand; PAM type: NNNNGHTT; PAM sequence: CATGGCTT
gagatttgtagttaatttta

SEQ ID NO: 37114 - DNA, 20 bp, Artificial Sequence
  Description of Artificial Sequence: Synthetic oligonucleotide
  Target: LAMA2; (-) strand; PAM type: NNNNGHTT; PAM sequence: AGGAGATT
tctaagaaagtgtttcattg

SEQ ID NO: 37115 - DNA, 20 bp, Artificial Sequence
  Description of Artificial Sequence: Synthetic oligonucleotide
  Target: LAMA2; (-) strand; PAM type: NNNNGHTT; PAM sequence: AAGTGTTT
aaaatatcaaagttctaaga

SEQ ID NO: 37116 - DNA, 20 bp, Artificial Sequence
  Description of Artificial Sequence: Synthetic oligonucleotide
  Target: LAMA2; (-) strand; PAM type: NNNNGHTT; PAM sequence: AGTAGTTT
agaattattgacatctgggg

SEQ ID NO: 37117 - DNA, 20 bp, Artificial Sequence
  Description of Artificial Sequence: Synthetic oligonucleotide
  Target: LAMA2; (-) strand; PAM type: NNNNGHTT; PAM sequence: AGGAGATT
aacacgaaggttgtaggaag

SEQ ID NO: 37118 - DNA, 20 bp, Artificial Sequence
  Description of Artificial Sequence: Synthetic oligonucleotide
  Target: LAMA2; (-) strand; PAM type: NNNNGHTT; PAM sequence: CCGAGATT
gaggtggagcttgcagtgag

SEQ ID NO: 37119 - DNA, 20 bp, Artificial Sequence
  Description of Artificial Sequence: Synthetic oligonucleotide
  Target: LAMA2; (-) strand; PAM type: NNNNGHTT; PAM sequence: TGGAGCTT
aatggcatgaacccgggagg

SEQ ID NO: 37120 - DNA, 20 bp, Artificial Sequence
  Description of Artificial Sequence: Synthetic oligonucleotide
  Target: LAMA2; (-) strand; PAM type: NNNNGHTT; PAM sequence: TTGGGTTT
aaggaaagcaggacatgttc

SEQ ID NO: 37121 - DNA, 20 bp, Artificial Sequence
  Description of Artificial Sequence: Synthetic oligonucleotide
  Target: LAMA2; (-) strand; PAM type: NNNNGHTT; PAM sequence: AGGTGCTT
agtttccatccacaataaag

SEQ ID NO: 37122 - DNA, 20 bp, Artificial Sequence
  Description of Artificial Sequence: Synthetic oligonucleotide
  Target: LAMA2; (-) strand; PAM type: NNNNGHTT; PAM sequence: GTAAGTTT
gcctgagacaacatgaataa

SEQ ID NO: 37123 - DNA, 20 bp, Artificial Sequence
  Description of Artificial Sequence: Synthetic oligonucleotide
  Target: LAMA2; (-) strand; PAM type: NNNNGHTT; PAM sequence: AAATGATT
taaaagaaataatttatgta

SEQ ID NO: 37124 - DNA, 20 bp, Artificial Sequence
  Description of Artificial Sequence: Synthetic oligonucleotide
  Target: LAMA2; (-) strand; PAM type: NNNNGHTT; PAM sequence: GGTGGATT
tctatcttatagtgctgttt

SEQ ID NO: 37125 - DNA, 20 bp, Artificial Sequence
  Description of Artificial Sequence: Synthetic oligonucleotide
  Target: LAMA2; (-) strand; PAM type: NNNNGHTT; PAM sequence: TGCTGTTT
aaataatatctatcttatag

SEQ ID NO: 37126 - DNA, 20 bp, Artificial Sequence
  Description of Artificial Sequence: Synthetic oligonucleotide
  Target: LAMA2; (-) strand; PAM type: NNNNGHTT; PAM sequence: CTCAGTTT
tttacttaatctctctatac

SEQ ID NO: 37127 - DNA, 20 bp, Artificial Sequence
  Description of Artificial Sequence: Synthetic oligonucleotide
  Target: LAMA2; (-) strand; PAM type: NNNNGHTT; PAM sequence: AATTGCTT
gatcaaatttgttggagaca

SEQ ID NO: 37128 - DNA, 20 bp, Artificial Sequence
  Description of Artificial Sequence: Synthetic oligonucleotide
  Target: LAMA2; (-) strand; PAM type: NNNNGHTT; PAM sequence: CATAGTTT
tgtgtgttcagagagttaac

SEQ ID NO: 37129 - DNA, 20 bp, Artificial Sequence
  Description of Artificial Sequence: Synthetic oligonucleotide
  Target: LAMA2; (-) strand; PAM type: NNNNGHTT; PAM sequence: GTGTGTTT
gtgtgattgcatgtacgtat

SEQ ID NO: 37130 - DNA, 20 bp, Artificial Sequence
  Description of Artificial Sequence: Synthetic oligonucleotide
  Target: LAMA2; (-) strand; PAM type: NNNNGHTT; PAM sequence: GTGTGATT
ccccatgtgcctgatacttt

SEQ ID NO: 37131 - DNA, 20 bp, Artificial Sequence
  Description of Artificial Sequence: Synthetic oligonucleotide
  Target: LAMA2; (-) strand; PAM type: NNNNGHTT; PAM sequence: ATATGCTT
ctgtaaggatgtttgtatgt

SEQ ID NO: 37132 - DNA, 20 bp, Artificial Sequence
  Description of Artificial Sequence: Synthetic oligonucleotide
  Target: LAMA2; (-) strand; PAM type: NNNNGHTT; PAM sequence: GGATGTTT
gtctatgtgtacaactgtaa

SEQ ID NO: 37133 - DNA, 20 bp, Artificial Sequence
  Description of Artificial Sequence: Synthetic oligonucleotide
  Target: LAMA2; (-) strand; PAM type: NNNNGHTT; PAM sequence: GTGGGTTT
aatgatgagtcttcacttca

SEQ ID NO: 37134 - DNA, 20 bp, Artificial Sequence
  Description of Artificial Sequence: Synthetic oligonucleotide
  Target: LAMA2; (-) strand; PAM type: NNNNGHTT; PAM sequence: TCAAGTTT
aattgcatattcacagttgg

SEQ ID NO: 37135 - DNA, 20 bp, Artificial Sequence
  Description of Artificial Sequence: Synthetic oligonucleotide
  Target: LAMA2; (-) strand; PAM type: NNNNGHTT; PAM sequence: CCCCGTTT
tccattcttctttacttttg

SEQ ID NO: 37136 - DNA, 20 bp, Artificial Sequence
  Description of Artificial Sequence: Synthetic oligonucleotide
  Target: LAMA2; (-) strand; PAM type: NNNNGHTT; PAM sequence: TTTTGCTT
acctttccctctcctcttag

SEQ ID NO: 37137 - DNA, 20 bp, Artificial Sequence
  Description of Artificial Sequence: Synthetic oligonucleotide
  Target: LAMA2; (-) strand; PAM type: NNNNGHTT; PAM sequence: CTTAGTTT
ttgccacctttccctctcct

SEQ ID NO: 37138 - DNA, 20 bp, Artificial Sequence
  Description of Artificial Sequence: Synthetic oligonucleotide
  Target: LAMA2; (-) strand; PAM type: NNNNGHTT; PAM sequence: AGGAGTTT
ggaatcatactaatgcatac

SEQ ID NO: 37139 - DNA, 20 bp, Artificial Sequence
  Description of Artificial Sequence: Synthetic oligonucleotide
  Target: LAMA2; (-) strand; PAM type: NNNNGHTT; PAM sequence: GAAAGCTT
ctccactgatttaatgttca

SEQ ID NO: 37140 - DNA, 20 bp, Artificial Sequence
  Description of Artificial Sequence: Synthetic oligonucleotide
  Target: LAMA2; (-) strand; PAM type: NNNNGHTT; PAM sequence: CACTGATT
ggatagctactagcagcctc

SEQ ID NO: 37141 - DNA, 20 bp, Artificial Sequence
  Description of Artificial Sequence: Synthetic oligonucleotide
  Target: LAMA2; (-) strand; PAM type: NNNNGHTT; PAM sequence: TTTGGATT
aagctgtataaatacattaa

SEQ ID NO: 37142 - DNA, 20 bp, Artificial Sequence
  Description of Artificial Sequence: Synthetic oligonucleotide
  Target: LAMA2; (-) strand; PAM type: NNNNGHTT; PAM sequence: ATTAGATT
acagtgccagatcctgtgtc

SEQ ID NO: 37143 - DNA, 20 bp, Artificial Sequence
  Description of Artificial Sequence: Synthetic oligonucleotide
  Target: LAMA2; (-) strand; PAM type: NNNNGHTT; PAM sequence: ACTTGTTT
ttcagtccccgtgtgggaac

SEQ ID NO: 37144 - DNA, 20 bp, Artificial Sequence
  Description of Artificial Sequence: Synthetic oligonucleotide
  Target: LAMA2; (-) strand; PAM type: NNNNGHTT; PAM sequence: TTTTGTTT
acttaagcaacattttcctg

SEQ ID NO: 37145 - DNA, 20 bp, Artificial Sequence
  Description of Artificial Sequence: Synthetic oligonucleotide
  Target: LAMA2; (-) strand; PAM type: NNNNGHTT; PAM sequence: TCCTGTTT
ggaaaacttaagcaacattt

SEQ ID NO: 37146 - DNA, 20 bp, Artificial Sequence
  Description of Artificial Sequence: Synthetic oligonucleotide
  Target: LAMA2; (-) strand; PAM type: NNNNGHTT; PAM sequence: GTATGCTT
tccctagttttcaaaaatac

SEQ ID NO: 37147 - DNA, 20 bp, Artificial Sequence
  Description of Artificial Sequence: Synthetic oligonucleotide
  Target: LAMA2; (-) strand; PAM type: NNNNGHTT; PAM sequence: CCTAGTTT
ttagtaagtaaaagctattc

SEQ ID NO: 37148 - DNA, 20 bp, Artificial Sequence
  Description of Artificial Sequence: Synthetic oligonucleotide
  Target: LAMA2; (-) strand; PAM type: NNNNGHTT; PAM sequence: ATAGGTTT
aataaatgaaattggttatg

SEQ ID NO: 37149 - DNA, 20 bp, Artificial Sequence
  Description of Artificial Sequence: Synthetic oligonucleotide
  Target: LAMA2; (-) strand; PAM type: NNNNGHTT; PAM sequence: AACAGTTT
tgcttgatgatatgaggtaa

SEQ ID NO: 37150 - DNA, 20 bp, Artificial Sequence
  Description of Artificial Sequence: Synthetic oligonucleotide
  Target: LAMA2; (-) strand; PAM type: NNNNGHTT; PAM sequence: TAATGCTT
gctccttatgagactctaac

SEQ ID NO: 37151 - DNA, 20 bp, Artificial Sequence
  Description of Artificial Sequence: Synthetic oligonucleotide
  Target: LAMA2; (-) strand; PAM type: NNNNGHTT; PAM sequence: CCTAGCTT
taaactgtgcatgtgaggga

SEQ ID NO: 37152 - DNA, 20 bp, Artificial Sequence
  Description of Artificial Sequence: Synthetic oligonucleotide
  Target: LAMA2; (-) strand; PAM type: NNNNGHTT; PAM sequence: GGCAGATT
ctgagaaggggcaggagtga

SEQ ID NO: 37153 - DNA, 20 bp, Artificial Sequence
  Description of Artificial Sequence: Synthetic oligonucleotide
  Target: LAMA2; (-) strand; PAM type: NNNNGHTT; PAM sequence: CTAGGCTT
gaatttgtattctatccatt

SEQ ID NO: 37154 - DNA, 20 bp, Artificial Sequence
  Description of Artificial Sequence: Synthetic oligonucleotide
  Target: LAMA2; (-) strand; PAM type: NNNNGHTT; PAM sequence: CTTGGCTT
ctgtttgattttctgcagat

SEQ ID NO: 37155 - DNA, 20 bp, Artificial Sequence
  Description of Artificial Sequence: Synthetic oligonucleotide
  Target: LAMA2; (-) strand; PAM type: NNNNGHTT; PAM sequence: GTTTGATT
cttctggaatagtctttact

SEQ ID NO: 37156 - DNA, 20 bp, Artificial Sequence
  Description of Artificial Sequence: Synthetic oligonucleotide
  Target: LAMA2; (-) strand; PAM type: NNNNGHTT; PAM sequence: TACTGTTT
tgctcttctggaatagtctt

SEQ ID NO: 37157 - DNA, 20 bp, Artificial Sequence
  Description of Artificial Sequence: Synthetic oligonucleotide
  Target: LAMA2; (-) strand; PAM type: NNNNGHTT; PAM sequence: TTGGGATT
ccttcattctatcatctgat

SEQ ID NO: 37158 - DNA, 20 bp, Artificial Sequence
  Description of Artificial Sequence: Synthetic oligonucleotide
  Target: LAMA2; (-) strand; PAM type: NNNNGHTT; PAM sequence: ATCTGATT
taccttcccttcattctatc

SEQ ID NO: 37159 - DNA, 20 bp, Artificial Sequence
  Description of Artificial Sequence: Synthetic oligonucleotide
  Target: LAMA2; (-) strand; PAM type: NNNNGHTT; PAM sequence: GTTCGATT
tcatttaatggttacaatgt

SEQ ID NO: 37160 - DNA, 20 bp, Artificial Sequence
  Description of Artificial Sequence: Synthetic oligonucleotide
  Target: LAMA2; (-) strand; PAM type: NNNNGHTT; PAM sequence: ATAAGATT
atctgtatgtatgaactcat

SEQ ID NO: 37161 - DNA, 20 bp, Artificial Sequence
  Description of Artificial Sequence: Synthetic oligonucleotide
  Target: LAMA2; (-) strand; PAM type: NNNNGHTT; PAM sequence: TTTTGTTT
aacatttgcattgctccaaa

SEQ ID NO: 37162 - DNA, 20 bp, Artificial Sequence
  Description of Artificial Sequence: Synthetic oligonucleotide
  Target: LAMA2; (-) strand; PAM type: NNNNGHTT; PAM sequence: AGTAGCTT
ctaggaaagaatctaagagg

SEQ ID NO: 37163 - DNA, 20 bp, Artificial Sequence
  Description of Artificial Sequence: Synthetic oligonucleotide
  Target: LAMA2; (-) strand; PAM type: NNNNGHTT; PAM sequence: GGGAGCTT
agagcttctcaatctctttt

SEQ ID NO: 37164 - DNA, 20 bp, Artificial Sequence
  Description of Artificial Sequence: Synthetic oligonucleotide
  Target: LAMA2; (-) strand; PAM type: NNNNGHTT; PAM sequence: TAGAGCTT
taaaagaagagttgtcaaaa

SEQ ID NO: 37165 - DNA, 20 bp, Artificial Sequence
  Description of Artificial Sequence: Synthetic oligonucleotide
  Target: LAMA2; (-) strand; PAM type: NNNNGHTT; PAM sequence: TTGTGTTT
ttgaaatattgtatttatct

SEQ ID NO: 37166 - DNA, 20 bp, Artificial Sequence
  Description of Artificial Sequence: Synthetic oligonucleotide
  Target: LAMA2; (-) strand; PAM type: NNNNGHTT; PAM sequence: AAATGCTT
ttcattttacatctattttt

SEQ ID NO: 37167 - DNA, 20 bp, Artificial Sequence
  Description of Artificial Sequence: Synthetic oligonucleotide
  Target: LAMA2; (-) strand; PAM type: NNNNGHTT; PAM sequence: CAGTGATT
ggcatgacgtacaaaaggaa

SEQ ID NO: 37168 - DNA, 20 bp, Artificial Sequence
  Description of Artificial Sequence: Synthetic oligonucleotide
  Target: LAMA2; (-) strand; PAM type: NNNNGHTT; PAM sequence: GTTAGTTT
cttactcaagatgagcttag

SEQ ID NO: 37169 - DNA, 20 bp, Artificial Sequence
  Description of Artificial Sequence: Synthetic oligonucleotide
  Target: LAMA2; (-) strand; PAM type: NNNNGHTT; PAM sequence: ATGAGCTT
ttctaagccccttactcaag

SEQ ID NO: 37170 - DNA, 20 bp, Artificial Sequence
  Description of Artificial Sequence: Synthetic oligonucleotide
  Target: LAMA2; (-) strand; PAM type: NNNNGHTT; PAM sequence: TCCTGCTT
tagaaagcctctggtggtcg

SEQ ID NO: 37171 - DNA, 20 bp, Artificial Sequence
  Description of Artificial Sequence: Synthetic oligonucleotide
  Target: LAMA2; (-) strand; PAM type: NNNNGHTT; PAM sequence: CTATGATT
ttccaattttatcaaagtct

SEQ ID NO: 37172 - DNA, 20 bp, Artificial Sequence
  Description of Artificial Sequence: Synthetic oligonucleotide
  Target: LAMA2; (-) strand; PAM type: NNNNGHTT; PAM sequence: AGCTGCTT
aaaaatagaagcaaagcctt

SEQ ID NO: 37173 - DNA, 20 bp, Artificial Sequence
  Description of Artificial Sequence: Synthetic oligonucleotide
  Target: LAMA2; (-) strand; PAM type: NNNNGHTT; PAM sequence: CAGTGCTT
caatagcagatttcatgtgg

SEQ ID NO: 37174 - DNA, 20 bp, Artificial Sequence
  Description of Artificial Sequence: Synthetic oligonucleotide
  Target: LAMA2; (-) strand; PAM type: NNNNGHTT; PAM sequence: AGCAGATT
cattttctttttctaccaat

SEQ ID NO: 37175 - DNA, 20 bp, Artificial Sequence
  Description of Artificial Sequence: Synthetic oligonucleotide
  Target: LAMA2; (-) strand; PAM type: NNNNGHTT; PAM sequence: TGCAGCTT
gaaactagttaaaaggtttg

SEQ ID NO: 37176 - DNA, 20 bp, Artificial Sequence
  Description of Artificial Sequence: Synthetic oligonucleotide
  Target: LAMA2; (-) strand; PAM type: NNNNGHTT; PAM sequence: AAAGGTTT
tctgctagtgaaactagtta

SEQ ID NO: 37177 - DNA, 20 bp, Artificial Sequence
  Description of Artificial Sequence: Synthetic oligonucleotide
  Target: LAMA2; (-) strand; PAM type: NNNNGHTT; PAM sequence: TAAAGATT
ataagaaaatcagttttctt

SEQ ID NO: 37178 - DNA, 20 bp, Artificial Sequence
  Description of Artificial Sequence: Synthetic oligonucleotide
  Target: LAMA2; (-) strand; PAM type: NNNNGHTT; PAM sequence: ATCAGTTT
aatttcagcataataagaaa

SEQ ID NO: 37179 - DNA, 20 bp, Artificial Sequence
  Description of Artificial Sequence: Synthetic oligonucleotide
  Target: LAMA2; (-) strand; PAM type: NNNNGHTT; PAM sequence: GAAAGCTT
tgcacttgtcattcctgaat

SEQ ID NO: 37180 - DNA, 20 bp, Artificial Sequence
  Description of Artificial Sequence: Synthetic oligonucleotide
  Target: LAMA2; (-) strand; PAM type: NNNNGHTT; PAM sequence: GCTTGATT
aaaagctgtaaatcattact

SEQ ID NO: 37181 - DNA, 20 bp, Artificial Sequence
  Description of Artificial Sequence: Synthetic oligonucleotide
  Target: LAMA2; (-) strand; PAM type: NNNNGHTT; PAM sequence: TACTGCTT
tttaaaaagctgtaaatcat

SEQ ID NO: 37182 - DNA, 20 bp, Artificial Sequence
  Description of Artificial Sequence: Synthetic oligonucleotide
  Target: LAMA2; (-) strand; PAM type: NNNNGHTT; PAM sequence: TTATGCTT
ccttcttagataagaaggta

SEQ ID NO: 37183 - DNA, 20 bp, Artificial Sequence
  Description of Artificial Sequence: Synthetic oligonucleotide
  Target: LAMA2; (-) strand; PAM type: NNNNGHTT; PAM sequence: CTAAGCTT
tatcgttgacaactctaccc

SEQ ID NO: 37184 - DNA, 20 bp, Artificial Sequence
  Description of Artificial Sequence: Synthetic oligonucleotide
  Target: LAMA2; (-) strand; PAM type: NNNNGHTT; PAM sequence: AGTGGCTT
tacatgtccgatgactactg

SEQ ID NO: 37185 - DNA, 20 bp, Artificial Sequence
  Description of Artificial Sequence: Synthetic oligonucleotide
  Target: LAMA2; (-) strand; PAM type: NNNNGHTT; PAM sequence: ATTAGTTT
tgcagcatgtagggcactga

SEQ ID NO: 37186 - DNA, 20 bp, Artificial Sequence
  Description of Artificial Sequence: Synthetic oligonucleotide
  Target: LAMA2; (-) strand; PAM type: NNNNGHTT; PAM sequence: AATGGATT
aaaagaaaaataattttata

SEQ ID NO: 37187 - DNA, 20 bp, Artificial Sequence
  Description of Artificial Sequence: Synthetic oligonucleotide
  Target: LAMA2; (-) strand; PAM type: NNNNGHTT; PAM sequence: GAAGGATT
atacgtttaggtaaatcaat

SEQ ID NO: 37188 - DNA, 20 bp, Artificial Sequence
  Description of Artificial Sequence: Synthetic oligonucleotide
  Target: LAMA2; (-) strand; PAM type: NNNNGHTT; PAM sequence: ATACGTTT
aatattatatgggtatcttc

SEQ ID NO: 37189 - DNA, 20 bp, Artificial Sequence
  Description of Artificial Sequence: Synthetic oligonucleotide
  Target: LAMA2; (-) strand; PAM type: NNNNGHTT; PAM sequence: TAGAGCTT
ccaaatactatagactggac

SEQ ID NO: 37190 - DNA, 20 bp, Artificial Sequence
  Description of Artificial Sequence: Synthetic oligonucleotide
  Target: LAMA2; (-) strand; PAM type: NNNNGHTT; PAM sequence: TAATGATT
taaaccctcagtgtttagca

SEQ ID NO: 37191 - DNA, 20 bp, Artificial Sequence
  Description of Artificial Sequence: Synthetic oligonucleotide
  Target: LAMA2; (-) strand; PAM type: NNNNGHTT; PAM sequence: CAGTGTTT
tcttatttattgtaaaccct

SEQ ID NO: 37192 - DNA, 20 bp, Artificial Sequence
  Description of Artificial Sequence: Synthetic oligonucleotide
  Target: LAMA2; (-) strand; PAM type: NNNNGHTT; PAM sequence: ACTAGATT
tttacttgcttgtgtctgct

SEQ ID NO: 37193 - DNA, 20 bp, Artificial Sequence
  Description of Artificial Sequence: Synthetic oligonucleotide
  Target: LAMA2; (-) strand; PAM type: NNNNGHTT; PAM sequence: ACTTGCTT
cctatttttattgccaattt

SEQ ID NO: 37194 - DNA, 20 bp, Artificial Sequence
  Description of Artificial Sequence: Synthetic oligonucleotide
  Target: LAMA2; (-) strand; PAM type: NNNNGHTT; PAM sequence: AGGAGCTT
aatacctccatggactgtct

SEQ ID NO: 37195 - DNA, 20 bp, Artificial Sequence
  Description of Artificial Sequence: Synthetic oligonucleotide
  Target: LAMA2; (-) strand; PAM type: NNNNGHTT; PAM sequence: CACTGCTT
aaacaccttttctgtgttct

SEQ ID NO: 37196 - DNA, 20 bp, Artificial Sequence
  Description of Artificial Sequence: Synthetic oligonucleotide
  Target: LAMA2; (-) strand; PAM type: NNNNGHTT; PAM sequence: CAGAGCTT
taaaatatatgcttaccttt

SEQ ID NO: 37197 - DNA, 20 bp, Artificial Sequence
  Description of Artificial Sequence: Synthetic oligonucleotide
  Target: LAMA2; (-) strand; PAM type: NNNNGHTT; PAM sequence: ATATGCTT
gtactctgaagtcttaaaat

SEQ ID NO: 37198 - DNA, 20 bp, Artificial Sequence
  Description of Artificial Sequence: Synthetic oligonucleotide
  Target: LAMA2; (-) strand; PAM type: NNNNGHTT; PAM sequence: CACAGTTT
ttatttccaattatatcagg

SEQ ID NO: 37199 - DNA, 20 bp, Artificial Sequence
  Description of Artificial Sequence: Synthetic oligonucleotide
  Target: LAMA2; (-) strand; PAM type: NNNNGHTT; PAM sequence: ATCTGTTT
catacaggattatggactca

SEQ ID NO: 37200 - DNA, 20 bp, Artificial Sequence
  Description of Artificial Sequence: Synthetic oligonucleotide
  Target: LAMA2; (-) strand; PAM type: NNNNGHTT; PAM sequence: ACAGGATT
cctggccttaatgaacacat

SEQ ID NO: 37201 - DNA, 20 bp, Artificial Sequence
  Description of Artificial Sequence: Synthetic oligonucleotide
  Target: LAMA2; (-) strand; PAM type: NNNNGHTT; PAM sequence: TACAGATT
tcataagatataatttatta

SEQ ID NO: 37202 - DNA, 20 bp, Artificial Sequence
  Description of Artificial Sequence: Synthetic oligonucleotide
  Target: LAMA2; (-) strand; PAM type: NNNNGHTT; PAM sequence: AAGAGTTT
aaatatactggataaatgac

SEQ ID NO: 37203 - DNA, 20 bp, Artificial Sequence
  Description of Artificial Sequence: Synthetic oligonucleotide
  Target: LAMA2; (-) strand; PAM type: NNNNGHTT; PAM sequence: GAAAGCTT
aatcttaccataccttatca

SEQ ID NO: 37204 - DNA, 20 bp, Artificial Sequence
  Description of Artificial Sequence: Synthetic oligonucleotide
  Target: LAMA2; (-) strand; PAM type: NNNNGHTT; PAM sequence: AGTAGCTT
tatcatctttatgaattgtc

SEQ ID NO: 37205 - DNA, 20 bp, Artificial Sequence
  Description of Artificial Sequence: Synthetic oligonucleotide
  Target: LAMA2; (-) strand; PAM type: NNNNGHTT; PAM sequence: CTCAGTTT
atttagtaatcccattgaag

SEQ ID NO: 37206 - DNA, 20 bp, Artificial Sequence
  Description of Artificial Sequence: Synthetic oligonucleotide
  Target: LAMA2; (-) strand; PAM type: NNNNGHTT; PAM sequence: TACCGCTT
cactgttcttgttttccttc

SEQ ID NO: 37207 - DNA, 20 bp, Artificial Sequence
  Description of Artificial Sequence: Synthetic oligonucleotide
  Target: LAMA2; (-) strand; PAM type: NNNNGHTT; PAM sequence: TCTTGTTT
tgacttccaggacacactgt

SEQ ID NO: 37208 - DNA, 20 bp, Artificial Sequence
  Description of Artificial Sequence: Synthetic oligonucleotide
  Target: LAMA2; (-) strand; PAM type: NNNNGHTT; PAM sequence: AAGTGATT
ctattagcagcatttgagac

SEQ ID NO: 37209 - DNA, 20 bp, Artificial Sequence
  Description of Artificial Sequence: Synthetic oligonucleotide
  Target: LAMA2; (-) strand; PAM type: NNNNGHTT; PAM sequence: TTTGGTTT
tggatggtaaataggtacat

SEQ ID NO: 37210 - DNA, 20 bp, Artificial Sequence
  Description of Artificial Sequence: Synthetic oligonucleotide
  Target: LAMA2; (-) strand; PAM type: NNNNGHTT; PAM sequence: TTGTGTTT
aacaatgcaacaattggtca

SEQ ID NO: 37211 - DNA, 20 bp, Artificial Sequence
  Description of Artificial Sequence: Synthetic oligonucleotide
  Target: LAMA2; (-) strand; PAM type: NNNNGHTT; PAM sequence: ACATGTTT
agattcagaggtctgattgt

SEQ ID NO: 37212 - DNA, 20 bp, Artificial Sequence
  Description of Artificial Sequence: Synthetic oligonucleotide
  Target: LAMA2; (-) strand; PAM type: NNNNGHTT; PAM sequence: GTCTGATT
tggaatccacagattcagag

SEQ ID NO: 37213 - DNA, 20 bp, Artificial Sequence
  Description of Artificial Sequence: Synthetic oligonucleotide
  Target: LAMA2; (-) strand; PAM type: NNNNGHTT; PAM sequence: CACAGATT
gaatccatggatgtggaatc

SEQ ID NO: 37214 - DNA, 20 bp, Artificial Sequence
  Description of Artificial Sequence: Synthetic oligonucleotide
  Target: LAMA2; (-) strand; PAM type: NNNNGHTT; PAM sequence: TGCAGATT
ctgcacatgttcggtacaga

SEQ ID NO: 37215 - DNA, 20 bp, Artificial Sequence
  Description of Artificial Sequence: Synthetic oligonucleotide
  Target: LAMA2; (-) strand; PAM type: NNNNGHTT; PAM sequence: TGGGGATT
ttatagtttcaggggatttg

SEQ ID NO: 37216 - DNA, 20 bp, Artificial Sequence
  Description of Artificial Sequence: Synthetic oligonucleotide
  Target: LAMA2; (-) strand; PAM type: NNNNGHTT; PAM sequence: AGGGGATT
ccctcatcagttatagtttc

SEQ ID NO: 37217 - DNA, 20 bp, Artificial Sequence
  Description of Artificial Sequence: Synthetic oligonucleotide
  Target: LAMA2; (-) strand; PAM type: NNNNGHTT; PAM sequence: TATAGTTT
taccatcacccctcatcagt

SEQ ID NO: 37218 - DNA, 20 bp, Artificial Sequence
  Description of Artificial Sequence: Synthetic oligonucleotide
  Target: LAMA2; (-) strand; PAM type: NNNNGHTT; PAM sequence: TTGAGATT
agtaaatccatatgtgtagc

SEQ ID NO: 37219 - DNA, 20 bp, Artificial Sequence
  Description of Artificial Sequence: Synthetic oligonucleotide
  Target: LAMA2; (-) strand; PAM type: NNNNGHTT; PAM sequence: TGTAGCTT
cagaacagtaaatccatatg

SEQ ID NO: 37220 - DNA, 20 bp, Artificial Sequence
  Description of Artificial Sequence: Synthetic oligonucleotide
  Target: LAMA2; (-) strand; PAM type: NNNNGHTT; PAM sequence: ACAAGTTT
ctaatacattccctaacaat

SEQ ID NO: 37221 - DNA, 20 bp, Artificial Sequence
  Description of Artificial Sequence: Synthetic oligonucleotide
  Target: LAMA2; (-) strand; PAM type: NNNNGHTT; PAM sequence: GAAAGCTT
atgttgctacatttgttttg

SEQ ID NO: 37222 - DNA, 20 bp, Artificial Sequence
  Description of Artificial Sequence: Synthetic oligonucleotide
  Target: LAMA2; (-) strand; PAM type: NNNNGHTT; PAM sequence: ATTTGTTT
ttgtctatttatgttgctac

SEQ ID NO: 37223 - DNA, 20 bp, Artificial Sequence
  Description of Artificial Sequence: Synthetic oligonucleotide
  Target: LAMA2; (-) strand; PAM type: NNNNGHTT; PAM sequence: TTATGCTT
gtatagacgattttccatta

SEQ ID NO: 37224 - DNA, 20 bp, Artificial Sequence
  Description of Artificial Sequence: Synthetic oligonucleotide
  Target: LAMA2; (-) strand; PAM type: NNNNGHTT; PAM sequence: AGACGATT
aataattagatttctcgtat

SEQ ID NO: 37225 - DNA, 20 bp, Artificial Sequence
  Description of Artificial Sequence: Synthetic oligonucleotide
  Target: LAMA2; (-) strand; PAM type: NNNNGHTT; PAM sequence: ATTAGATT
aatgatttgtgcctaaaata

SEQ ID NO: 37226 - DNA, 20 bp, Artificial Sequence
  Description of Artificial Sequence: Synthetic oligonucleotide
  Target: LAMA2; (-) strand; PAM type: NNNNGHTT; PAM sequence: AAATGATT
attttagaatacattttaaa

SEQ ID NO: 37227 - DNA, 20 bp, Artificial Sequence
  Description of Artificial Sequence: Synthetic oligonucleotide
  Target: LAMA2; (-) strand; PAM type: NNNNGHTT; PAM sequence: TACAGATT
tatataaatcatgtttgctt

SEQ ID NO: 37228 - DNA, 20 bp, Artificial Sequence
  Description of Artificial Sequence: Synthetic oligonucleotide
  Target: LAMA2; (-) strand; PAM type: NNNNGHTT; PAM sequence: GTTTGCTT
aagcatactatataaatcat

SEQ ID NO: 37229 - DNA, 20 bp, Artificial Sequence
  Description of Artificial Sequence: Synthetic oligonucleotide
  Target: LAMA2; (-) strand; PAM type: NNNNGHTT; PAM sequence: TCATGTTT
atgtaagcatactatataaa

SEQ ID NO: 37230 - DNA, 20 bp, Artificial Sequence
  Description of Artificial Sequence: Synthetic oligonucleotide
  Target: LAMA2; (-) strand; PAM type: NNNNGHTT; PAM sequence: TCCTGATT
tactctgttcacccaaataa

SEQ ID NO: 37231 - DNA, 20 bp, Artificial Sequence
  Description of Artificial Sequence: Synthetic oligonucleotide
  Target: LAMA2; (-) strand; PAM type: NNNNGHTT; PAM sequence: ATTTGTTT
aaatgacactcttctttgaa

SEQ ID NO: 37232 - DNA, 20 bp, Artificial Sequence
  Description of Artificial Sequence: Synthetic oligonucleotide
  Target: LAMA2; (-) strand; PAM type: NNNNGHTT; PAM sequence: TAGAGTTT
atggttatcaactggttttt

SEQ ID NO: 37233 - DNA, 20 bp, Artificial Sequence
  Description of Artificial Sequence: Synthetic oligonucleotide
  Target: LAMA2; (-) strand; PAM type: NNNNGHTT; PAM sequence: ACTGGTTT
atatcagactatggttatca

SEQ ID NO: 37234 - DNA, 20 bp, Artificial Sequence
  Description of Artificial Sequence: Synthetic oligonucleotide
  Target: LAMA2; (-) strand; PAM type: NNNNGHTT; PAM sequence: AGTGGTTT
cagcctctagtgtcttccaa

SEQ ID NO: 37235 - DNA, 20 bp, Artificial Sequence
  Description of Artificial Sequence: Synthetic oligonucleotide
  Target: LAMA2; (-) strand; PAM type: NNNNGHTT; PAM sequence: TCCTGATT
actggatagcttagcatact

SEQ ID NO: 37236 - DNA, 20 bp, Artificial Sequence
  Description of Artificial Sequence: Synthetic oligonucleotide
  Target: LAMA2; (-) strand; PAM type: NNNNGHTT; PAM sequence: GATAGCTT
gtgtaattccaagtccactg

SEQ ID NO: 37237 - DNA, 20 bp, Artificial Sequence
  Description of Artificial Sequence: Synthetic oligonucleotide
  Target: LAMA2; (-) strand; PAM type: NNNNGHTT; PAM sequence: CACCGTTT
tgttgtgtgcagcttccttc

SEQ ID NO: 37238 - DNA, 20 bp, Artificial Sequence
  Description of Artificial Sequence: Synthetic oligonucleotide
  Target: LAMA2; (-) strand; PAM type: NNNNGHTT; PAM sequence: TGCAGCTT
agctgtttggcgatgttgtg

SEQ ID NO: 37239 - DNA, 20 bp, Artificial Sequence
  Description of Artificial Sequence: Synthetic oligonucleotide
  Target: LAMA2; (-) strand; PAM type: NNNNGHTT; PAM sequence: AGCTGTTT
tctgggatataaaacaagcc

SEQ ID NO: 37240 - DNA, 20 bp, Artificial Sequence
  Description of Artificial Sequence: Synthetic oligonucleotide
  Target: LAMA2; (-) strand; PAM type: NNNNGHTT; PAM sequence: AGCTGTTT
tgtgaatatagttagtccca

SEQ ID NO: 37241 - DNA, 20 bp, Artificial Sequence
  Description of Artificial Sequence: Synthetic oligonucleotide
  Target: LAMA2; (-) strand; PAM type: NNNNGHTT; PAM sequence: CACAGCTT
ttcagcaaaagaacacttct

SEQ ID NO: 37242 - DNA, 20 bp, Artificial Sequence
  Description of Artificial Sequence: Synthetic oligonucleotide
  Target: LAMA2; (-) strand; PAM type: NNNNGHTT; PAM sequence: GAAGGATT
aaaccgtgtgatagctacat

SEQ ID NO: 37243 - DNA, 20 bp, Artificial Sequence
  Description of Artificial Sequence: Synthetic oligonucleotide
  Target: LAMA2; (-) strand; PAM type: NNNNGHTT; PAM sequence: GTAAGTTT
ttgtgccgtatgaagaatca

SEQ ID NO: 37244 - DNA, 20 bp, Artificial Sequence
  Description of Artificial Sequence: Synthetic oligonucleotide
  Target: LAMA2; (-) strand; PAM type: NNNNGHTT; PAM sequence: TCATGTTT
ggtgtgaatgctgtggtgaa

SEQ ID NO: 37245 - DNA, 20 bp, Artificial Sequence
  Description of Artificial Sequence: Synthetic oligonucleotide
  Target: LAMA2; (-) strand; PAM type: NNNNGHTT; PAM sequence: TAGAGTTT
ttatagtttctgaacattat

SEQ ID NO: 37246 - DNA, 20 bp, Artificial Sequence
  Description of Artificial Sequence: Synthetic oligonucleotide
  Target: LAMA2; (-) strand; PAM type: NNNNGHTT; PAM sequence: TATAGTTT
aatcgctacatgtctaggat

SEQ ID NO: 37247 - DNA, 20 bp, Artificial Sequence
  Description of Artificial Sequence: Synthetic oligonucleotide
  Target: LAMA2; (-) strand; PAM type: NNNNGHTT; PAM sequence: CTAGGATT
aggaggaaatcgctacatgt

SEQ ID NO: 37248 - DNA, 20 bp, Artificial Sequence
  Description of Artificial Sequence: Synthetic oligonucleotide
  Target: LAMA2; (-) strand; PAM type: NNNNGHTT; PAM sequence: TCAGGCTT
agtcaccagtgccattgaac

SEQ ID NO: 37249 - DNA, 20 bp, Artificial Sequence
  Description of Artificial Sequence: Synthetic oligonucleotide
  Target: LAMA2; (-) strand; PAM type: NNNNGHTT; PAM sequence: CTGAGATT
ccattaaaactaatttccct

SEQ ID NO: 37250 - DNA, 20 bp, Artificial Sequence
  Description of Artificial Sequence: Synthetic oligonucleotide
  Target: LAMA2; (-) strand; PAM type: NNNNGHTT; PAM sequence: TTTGGCTT
gtttagaattgagttatatt

SEQ ID NO: 37251 - DNA, 20 bp, Artificial Sequence
  Description of Artificial Sequence: Synthetic oligonucleotide
  Target: LAMA2; (-) strand; PAM type: NNNNGHTT; PAM sequence: ATGTGTTT
acctagcaggtgagccagaa

SEQ ID NO: 37252 - DNA, 20 bp, Artificial Sequence
  Description of Artificial Sequence: Synthetic oligonucleotide
  Target: LAMA2; (-) strand; PAM type: NNNNGHTT; PAM sequence: CAGGGATT
atactgaatcctctctaatg

SEQ ID NO: 37253 - DNA, 20 bp, Artificial Sequence
  Description of Artificial Sequence: Synthetic oligonucleotide
  Target: LAMA2; (-) strand; PAM type: NNNNGHTT; PAM sequence: GGATGCTT
cacctaattgaatctacctg

SEQ ID NO: 37254 - DNA, 20 bp, Artificial Sequence
  Description of Artificial Sequence: Synthetic oligonucleotide
  Target: LAMA2; (-) strand; PAM type: NNNNGHTT; PAM sequence: AGATGCTT
ggagttctgtgctatctggg

SEQ ID NO: 37255 - DNA, 20 bp, Artificial Sequence
  Description of Artificial Sequence: Synthetic oligonucleotide
  Target: LAMA2; (-) strand; PAM type: NNNNGHTT; PAM sequence: GGTAGATT
taaagaaagtgaaattgagt

SEQ ID NO: 37256 - DNA, 20 bp, Artificial Sequence
  Description of Artificial Sequence: Synthetic oligonucleotide
  Target: LAMA2; (-) strand; PAM type: NNNNGHTT; PAM sequence: AATGGATT
cactatttttgtattctgta

SEQ ID NO: 37257 - DNA, 20 bp, Artificial Sequence
  Description of Artificial Sequence: Synthetic oligonucleotide
  Target: LAMA2; (-) strand; PAM type: NNNNGHTT; PAM sequence: TCTTGTTT
actgtggggaaataaatttc

SEQ ID NO: 37258 - DNA, 20 bp, Artificial Sequence
  Description of Artificial Sequence: Synthetic oligonucleotide
  Target: LAMA2; (-) strand; PAM type: NNNNGHTT; PAM sequence: CTCAGATT
aaccatgcggacaccctgat

SEQ ID NO: 37259 - DNA, 20 bp, Artificial Sequence
  Description of Artificial Sequence: Synthetic oligonucleotide
  Target: LAMA2; (-) strand; PAM type: NNNNGHTT; PAM sequence: ATGAGATT
tgagggtggagccctcctga

SEQ ID NO: 37260 - DNA, 20 bp, Artificial Sequence
  Description of Artificial Sequence: Synthetic oligonucleotide
  Target: LAMA2; (-) strand; PAM type: NNNNGHTT; PAM sequence: AGGCGTTT
tgtgatgatatttgggggca

SEQ ID NO: 37261 - DNA, 20 bp, Artificial Sequence
  Description of Artificial Sequence: Synthetic oligonucleotide
  Target: LAMA2; (-) strand; PAM type: NNNNGHTT; PAM sequence: GAATGTTT
ctgaatatggctaatggact

SEQ ID NO: 37262 - DNA, 20 bp, Artificial Sequence
  Description of Artificial Sequence: Synthetic oligonucleotide
  Target: LAMA2; (-) strand; PAM type: NNNNGHTT; PAM sequence: AAAAGTTT
agaaaattaaaatgactgtt

SEQ ID NO: 37263 - DNA, 20 bp, Artificial Sequence
  Description of Artificial Sequence: Synthetic oligonucleotide
  Target: LAMA2; (-) strand; PAM type: NNNNGHTT; PAM sequence: GGTTGTTT
cacagtgagatatttcaata

SEQ ID NO: 37264 - DNA, 20 bp, Artificial Sequence
  Description of Artificial Sequence: Synthetic oligonucleotide
  Target: LAMA2; (-) strand; PAM type: NNNNGHTT; PAM sequence: ATCAGATT
tggggaaaaagttataaaat

SEQ ID NO: 37265 - DNA, 20 bp, Artificial Sequence
  Description of Artificial Sequence: Synthetic oligonucleotide
  Target: LAMA2; (-) strand; PAM type: NNNNGHTT; PAM sequence: CTAAGATT
actgcgtcaattcgaccttc

SEQ ID NO: 37266 - DNA, 20 bp, Artificial Sequence
  Description of Artificial Sequence: Synthetic oligonucleotide
  Target: LAMA2; (-) strand; PAM type: NNNNGHTT; PAM sequence: GTTTGTTT
aatacatgtacatgcaattt

SEQ ID NO: 37267 - DNA, 20 bp, Artificial Sequence
  Description of Artificial Sequence: Synthetic oligonucleotide
  Target: LAMA2; (-) strand; PAM type: NNNNGHTT; PAM sequence: ATTTGTTT
tcttaatacatgtacatgca

SEQ ID NO: 37268 - DNA, 20 bp, Artificial Sequence
  Description of Artificial Sequence: Synthetic oligonucleotide
  Target: LAMA2; (-) strand; PAM type: NNNNGHTT; PAM sequence: CGCAGATT
cccattctcccaattagtta

SEQ ID NO: 37269 - DNA, 20 bp, Artificial Sequence
  Description of Artificial Sequence: Synthetic oligonucleotide
  Target: LAMA2; (-) strand; PAM type: NNNNGHTT; PAM sequence: TTTTGTTT
ttccaaaatttaaatattga

SEQ ID NO: 37270 - DNA, 20 bp, Artificial Sequence
  Description of Artificial Sequence: Synthetic oligonucleotide
  Target: LAMA2; (-) strand; PAM type: NNNNGHTT; PAM sequence: TATTGATT
tatgttttccaaaatttaaa

SEQ ID NO: 37271 - DNA, 20 bp, Artificial Sequence
  Description of Artificial Sequence: Synthetic oligonucleotide
  Target: LAMA2; (-) strand; PAM type: NNNNGHTT; PAM sequence: TTATGTTT
tatgaaaaataatttaacaa

SEQ ID NO: 37272 - DNA, 20 bp, Artificial Sequence
  Description of Artificial Sequence: Synthetic oligonucleotide
  Target: LAMA2; (-) strand; PAM type: NNNNGHTT; PAM sequence: CATTGATT
atcatcggcacttggtctcc

SEQ ID NO: 37273 - DNA, 20 bp, Artificial Sequence
  Description of Artificial Sequence: Synthetic oligonucleotide
  Target: LAMA2; (-) strand; PAM type: NNNNGHTT; PAM sequence: ATATGATT
gatatcatttgtaggctcta

SEQ ID NO: 37274 - DNA, 20 bp, Artificial Sequence
  Description of Artificial Sequence: Synthetic oligonucleotide
  Target: LAMA2; (-) strand; PAM type: NNNNGHTT; PAM sequence: CACAGCTT
gttacacatgtaataagcgg

SEQ ID NO: 37275 - DNA, 20 bp, Artificial Sequence
  Description of Artificial Sequence: Synthetic oligonucleotide
  Target: LAMA2; (-) strand; PAM type: NNNNGHTT; PAM sequence: AAATGTTT
attaaagtttgagaaggcta

SEQ ID NO: 37276 - DNA, 20 bp, Artificial Sequence
  Description of Artificial Sequence: Synthetic oligonucleotide
  Target: LAMA2; (-) strand; PAM type: NNNNGHTT; PAM sequence: TAAAGTTT
cattttacaaaagaagaaat

SEQ ID NO: 37277 - DNA, 20 bp, Artificial Sequence
  Description of Artificial Sequence: Synthetic oligonucleotide
  Target: LAMA2; (-) strand; PAM type: NNNNGHTT; PAM sequence: TTGTGATT
ataagattattaagtagaca

SEQ ID NO: 37278 - DNA, 20 bp, Artificial Sequence
  Description of Artificial Sequence: Synthetic oligonucleotide
  Target: LAMA2; (-) strand; PAM type: NNNNGHTT; PAM sequence: ATAAGATT
ggctaattttattctgaaaa

SEQ ID NO: 37279 - DNA, 20 bp, Artificial Sequence
  Description of Artificial Sequence: Synthetic oligonucleotide
  Target: LAMA2; (-) strand; PAM type: NNNNGHTT; PAM sequence: AAATGTTT
ctggctcagtggtggcaaaa

SEQ ID NO: 37280 - DNA, 20 bp, Artificial Sequence
  Description of Artificial Sequence: Synthetic oligonucleotide
  Target: LAMA2; (-) strand; PAM type: NNNNGHTT; PAM sequence: TAAGGTTT
ctggctaatcccatacacat

SEQ ID NO: 37281 - DNA, 20 bp, Artificial Sequence
  Description of Artificial Sequence: Synthetic oligonucleotide
  Target: LAMA2; (-) strand; PAM type: NNNNGHTT; PAM sequence: GAAAGTTT
ggcaacatcagcatcacctg

SEQ ID NO: 37282 - DNA, 20 bp, Artificial Sequence
  Description of Artificial Sequence: Synthetic oligonucleotide
  Target: LAMA2; (-) strand; PAM type: NNNNGHTT; PAM sequence: TTGTGATT
tgcatttttaaaactatggc

SEQ ID NO: 37283 - DNA, 20 bp, Artificial Sequence
  Description of Artificial Sequence: Synthetic oligonucleotide
  Target: LAMA2; (-) strand; PAM type: NNNNGHTT; PAM sequence: TATGGCTT
tagcactgcatttttaaaac

SEQ ID NO: 37284 - DNA, 20 bp, Artificial Sequence
  Description of Artificial Sequence: Synthetic oligonucleotide
  Target: LAMA2; (-) strand; PAM type: NNNNGHTT; PAM sequence: ATCAGTTT
aaaataaaacagtatgtaga

SEQ ID NO: 37285 - DNA, 20 bp, Artificial Sequence
  Description of Artificial Sequence: Synthetic oligonucleotide
  Target: LAMA2; (-) strand; PAM type: NNNNGHTT; PAM sequence: AGATGCTT
tgttcaaaaagcttttgaaa

SEQ ID NO: 37286 - DNA, 20 bp, Artificial Sequence
  Description of Artificial Sequence: Synthetic oligonucleotide
  Target: LAMA2; (-) strand; PAM type: NNNNGHTT; PAM sequence: AAAAGCTT
tctgttagctcttgtgttca

SEQ ID NO: 37287 - DNA, 20 bp, Artificial Sequence
  Description of Artificial Sequence: Synthetic oligonucleotide
  Target: LAMA2; (-) strand; PAM type: NNNNGHTT; PAM sequence: TCCTGTTT
tatcttgtaatcccacaaat

SEQ ID NO: 37288 - DNA, 20 bp, Artificial Sequence
  Description of Artificial Sequence: Synthetic oligonucleotide
  Target: LAMA2; (-) strand; PAM type: NNNNGHTT; PAM sequence: AGGAGTTT
acagtagatactctattcac

SEQ ID NO: 37289 - DNA, 20 bp, Artificial Sequence
  Description of Artificial Sequence: Synthetic oligonucleotide
  Target: LAMA2; (-) strand; PAM type: NNNNGHTT; PAM sequence: AAATGCTT
agtgggatcattctagaatt

SEQ ID NO: 37290 - DNA, 20 bp, Artificial Sequence
  Description of Artificial Sequence: Synthetic oligonucleotide
  Target: LAMA2; (-) strand; PAM type: NNNNGHTT; PAM sequence: TAGTGATT
ggatctgtaactattaaccc

SEQ ID NO: 37291 - DNA, 20 bp, Artificial Sequence
  Description of Artificial Sequence: Synthetic oligonucleotide
  Target: LAMA2; (-) strand; PAM type: NNNNGHTT; PAM sequence: TCAAGTTT
taatacaaggggaaattatt

SEQ ID NO: 37292 - DNA, 20 bp, Artificial Sequence
  Description of Artificial Sequence: Synthetic oligonucleotide
  Target: LAMA2; (-) strand; PAM type: NNNNGHTT; PAM sequence: ATTAGTTT
aacattgctataaaataatg

SEQ ID NO: 37293 - DNA, 20 bp, Artificial Sequence
  Description of Artificial Sequence: Synthetic oligonucleotide
  Target: LAMA2; (-) strand; PAM type: NNNNGHTT; PAM sequence: TAATGATT
atccaaacattgctataaaa

SEQ ID NO: 37294 - DNA, 20 bp, Artificial Sequence
  Description of Artificial Sequence: Synthetic oligonucleotide
  Target: LAMA2; (-) strand; PAM type: NNNNGHTT; PAM sequence: AAATGTTT
cccgccaaaattagaattga

SEQ ID NO: 37295 - DNA, 20 bp, Artificial Sequence
  Description of Artificial Sequence: Synthetic oligonucleotide
  Target: LAMA2; (-) strand; PAM type: NNNNGHTT; PAM sequence: GAAAGATT
tctgatagacatactgtcaa

SEQ ID NO: 37296 - DNA, 20 bp, Artificial Sequence
  Description of Artificial Sequence: Synthetic oligonucleotide
  Target: LAMA2; (-) strand; PAM type: NNNNGHTT; PAM sequence: CATTGATT
aaagaacactaatttatttt

SEQ ID NO: 37297 - DNA, 20 bp, Artificial Sequence
  Description of Artificial Sequence: Synthetic oligonucleotide
  Target: LAMA2; (-) strand; PAM type: NNNNGHTT; PAM sequence: GAGTGTTT
ttatttttatatatttaaat

SEQ ID NO: 37298 - DNA, 20 bp, Artificial Sequence
  Description of Artificial Sequence: Synthetic oligonucleotide
  Target: LAMA2; (-) strand; PAM type: NNNNGHTT; PAM sequence: CTTTGCTT
ttaaatataaatgtataatg

SEQ ID NO: 37299 - DNA, 20 bp, Artificial Sequence
  Description of Artificial Sequence: Synthetic oligonucleotide
  Target: LAMA2; (-) strand; PAM type: NNNNGHTT; PAM sequence: TAATGCTT
ctattttaaatataaatgta

SEQ ID NO: 37300 - DNA, 20 bp, Artificial Sequence
  Description of Artificial Sequence: Synthetic oligonucleotide
  Target: LAMA2; (-) strand; PAM type: NNNNGHTT; PAM sequence: AAATGCTT
gctgatacagtagtatttgt

SEQ ID NO: 37301 - DNA, 20 bp, Artificial Sequence
  Description of Artificial Sequence: Synthetic oligonucleotide
  Target: LAMA2; (-) strand; PAM type: NNNNGHTT; PAM sequence: ATTTGCTT
atatagacacaaatagagat

SEQ ID NO: 37302 - DNA, 20 bp, Artificial Sequence
  Description of Artificial Sequence: Synthetic oligonucleotide
  Target: LAMA2; (-) strand; PAM type: NNNNGHTT; PAM sequence: GGGAGTTT
tgaactaatggaactggcta

SEQ ID NO: 37303 - DNA, 20 bp, Artificial Sequence
  Description of Artificial Sequence: Synthetic oligonucleotide
  Target: LAMA2; (-) strand; PAM type: NNNNGHTT; PAM sequence: ATTTGTTT
ctttgtttctttttccttct

SEQ ID NO: 37304 - DNA, 20 bp, Artificial Sequence
  Description of Artificial Sequence: Synthetic oligonucleotide
  Target: LAMA2; (-) strand; PAM type: NNNNGHTT; PAM sequence: CTTTGTTT
cccctttttccaatttactt

SEQ ID NO: 37305 - DNA, 20 bp, Artificial Sequence
  Description of Artificial Sequence: Synthetic oligonucleotide
  Target: LAMA2; (-) strand; PAM type: NNNNGHTT; PAM sequence: AACAGATT
ttatacacacacacaaaaaa

SEQ ID NO: 37306 - DNA, 20 bp, Artificial Sequence
  Description of Artificial Sequence: Synthetic oligonucleotide
  Target: LAMA2; (-) strand; PAM type: NNNNGHTT; PAM sequence: GTAAGTTT
aaattaaaaagtcattaact

SEQ ID NO: 37307 - DNA, 20 bp, Artificial Sequence
  Description of Artificial Sequence: Synthetic oligonucleotide
  Target: LAMA2; (-) strand; PAM type: NNNNGHTT; PAM sequence: GATGGATT
atacgcacactgttttactt

SEQ ID NO: 37308 - DNA, 20 bp, Artificial Sequence
  Description of Artificial Sequence: Synthetic oligonucleotide
  Target: LAMA2; (-) strand; PAM type: NNNNGHTT; PAM sequence: CACTGTTT
gtattcacaaatcatacgca

SEQ ID NO: 37309 - DNA, 20 bp, Artificial Sequence
  Description of Artificial Sequence: Synthetic oligonucleotide
  Target: LAMA2; (-) strand; PAM type: NNNNGHTT; PAM sequence: TTGTGATT
ttgcaagaaaccctctttta

SEQ ID NO: 37310 - DNA, 20 bp, Artificial Sequence
  Description of Artificial Sequence: Synthetic oligonucleotide
  Target: LAMA2; (-) strand; PAM type: NNNNGHTT; PAM sequence: CATAGTTT
tcttcataaaagttgtttta

SEQ ID NO: 37311 - DNA, 20 bp, Artificial Sequence
  Description of Artificial Sequence: Synthetic oligonucleotide
  Target: LAMA2; (-) strand; PAM type: NNNNGHTT; PAM sequence: AGTTGTTT
ggacagctattcttcataaa

SEQ ID NO: 37312 - DNA, 20 bp, Artificial Sequence
  Description of Artificial Sequence: Synthetic oligonucleotide
  Target: LAMA2; (-) strand; PAM type: NNNNGHTT; PAM sequence: AGTAGTTT
ctagagtacctgtggctgac

SEQ ID NO: 37313 - DNA, 20 bp, Artificial Sequence
  Description of Artificial Sequence: Synthetic oligonucleotide
  Target: LAMA2; (-) strand; PAM type: NNNNGHTT; PAM sequence: TTGTGTTT
atccttagtttgaaggacat

SEQ ID NO: 37314 - DNA, 20 bp, Artificial Sequence
  Description of Artificial Sequence: Synthetic oligonucleotide
  Target: LAMA2; (-) strand; PAM type: NNNNGHTT; PAM sequence: CTTAGTTT
ctttattttctgcttttatc

SEQ ID NO: 37315 - DNA, 20 bp, Artificial Sequence
  Description of Artificial Sequence: Synthetic oligonucleotide
  Target: LAMA2; (-) strand; PAM type: NNNNGHTT; PAM sequence: TTCTGCTT
cattcagtaaaaactttatt

SEQ ID NO: 37316 - DNA, 20 bp, Artificial Sequence
  Description of Artificial Sequence: Synthetic oligonucleotide
  Target: LAMA2; (-) strand; PAM type: NNNNGHTT; PAM sequence: CAGGGCTT
tcatgaaacattttacagct

SEQ ID NO: 37317 - DNA, 20 bp, Artificial Sequence
  Description of Artificial Sequence: Synthetic oligonucleotide
  Target: LAMA2; (-) strand; PAM type: NNNNGHTT; PAM sequence: CATGGATT
cagctcttatttcaccctgg

SEQ ID NO: 37318 - DNA, 20 bp, Artificial Sequence
  Description of Artificial Sequence: Synthetic oligonucleotide
  Target: LAMA2; (-) strand; PAM type: NNNNGHTT; PAM sequence: GGCTGATT
ctgttttcttatactgtgat

SEQ ID NO: 37319 - DNA, 20 bp, Artificial Sequence
  Description of Artificial Sequence: Synthetic oligonucleotide
  Target: LAMA2; (-) strand; PAM type: NNNNGHTT; PAM sequence: ATCTGTTT
aaaaaaaaaaggaaaaacta

SEQ ID NO: 37320 - DNA, 20 bp, Artificial Sequence
  Description of Artificial Sequence: Synthetic oligonucleotide
  Target: LAMA2; (-) strand; PAM type: NNNNGHTT; PAM sequence: ACCAGTTT
ctagagagatttcaaaatag

SEQ ID NO: 37321 - DNA, 20 bp, Artificial Sequence
  Description of Artificial Sequence: Synthetic oligonucleotide
  Target: LAMA2; (-) strand; PAM type: NNNNGHTT; PAM sequence: GAGAGATT
gaggcaggctgtcatagcta

SEQ ID NO: 37322 - DNA, 20 bp, Artificial Sequence
  Description of Artificial Sequence: Synthetic oligonucleotide
  Target: LAMA2; (-) strand; PAM type: NNNNGHTT; PAM sequence: GGTTGATT
aactttaaaagaaatggtca

SEQ ID NO: 37323 - DNA, 20 bp, Artificial Sequence
  Description of Artificial Sequence: Synthetic oligonucleotide
  Target: LAMA2; (-) strand; PAM type: NNNNGHTT; PAM sequence: TTTTGATT
tttactcatttgcattaatt

SEQ ID NO: 37324 - DNA, 20 bp, Artificial Sequence
  Description of Artificial Sequence: Synthetic oligonucleotide
  Target: LAMA2; (-) strand; PAM type: NNNNGHTT; PAM sequence: TCCGGCTT
caaaaagcattctggcattt

SEQ ID NO: 37325 - DNA, 20 bp, Artificial Sequence
  Description of Artificial Sequence: Synthetic oligonucleotide
  Target: LAMA2; (-) strand; PAM type: NNNNGHTT; PAM sequence: ACCAGTTT
aggagatgagtttgaatttc

SEQ ID NO: 37326 - DNA, 20 bp, Artificial Sequence
  Description of Artificial Sequence: Synthetic oligonucleotide
  Target: LAMA2; (-) strand; PAM type: NNNNGHTT; PAM sequence: ATGAGTTT
ttccatatactatacaggag

SEQ ID NO: 37327 - DNA, 20 bp, Artificial Sequence
  Description of Artificial Sequence: Synthetic oligonucleotide
  Target: LAMA2; (-) strand; PAM type: NNNNGHTT; PAM sequence: GCCCGATT
tttgagaaaaaaaatctgtg

SEQ ID NO: 37328 - DNA, 20 bp, Artificial Sequence
  Description of Artificial Sequence: Synthetic oligonucleotide
  Target: LAMA2; (-) strand; PAM type: NNNNGHTT; PAM sequence: ACTAGCTT
tataatccaatcatcagaaa

SEQ ID NO: 37329 - DNA, 20 bp, Artificial Sequence
  Description of Artificial Sequence: Synthetic oligonucleotide
  Target: LAMA2; (-) strand; PAM type: NNNNGHTT; PAM sequence: TGCAGCTT
taccaggcagaaagcagcac

SEQ ID NO: 37330 - DNA, 20 bp, Artificial Sequence
  Description of Artificial Sequence: Synthetic oligonucleotide
  Target: LAMA2; (-) strand; PAM type: NNNNGHTT; PAM sequence: CCAGGATT
tgcatgttgtgcacgagtat

SEQ ID NO: 37331 - DNA, 20 bp, Artificial Sequence
  Description of Artificial Sequence: Synthetic oligonucleotide
  Target: LAMA2; (-) strand; PAM type: NNNNGHTT; PAM sequence: AAGGGATT
ctccaaataaaataacagta

SEQ ID NO: 37332 - DNA, 20 bp, Artificial Sequence
  Description of Artificial Sequence: Synthetic oligonucleotide
  Target: LAMA2; (-) strand; PAM type: NNNNGHTT; PAM sequence: TCCAGCTT
gtttcctgaggaccatggtt

SEQ ID NO: 37333 - DNA, 20 bp, Artificial Sequence
  Description of Artificial Sequence: Synthetic oligonucleotide
  Target: LAMA2; (-) strand; PAM type: NNNNGHTT; PAM sequence: CATGGTTT
tgtgttagtttcctgaggac

SEQ ID NO: 37334 - DNA, 20 bp, Artificial Sequence
  Description of Artificial Sequence: Synthetic oligonucleotide
  Target: LAMA2; (-) strand; PAM type: NNNNGHTT; PAM sequence: GTTAGTTT
gtttggttttctgttcctgt

SEQ ID NO: 37335 - DNA, 20 bp, Artificial Sequence
  Description of Artificial Sequence: Synthetic oligonucleotide
  Target: LAMA2; (-) strand; PAM type: NNNNGHTT; PAM sequence: TTTGGTTT
atgagtgagaacatatagtg

SEQ ID NO: 37336 - DNA, 20 bp, Artificial Sequence
  Description of Artificial Sequence: Synthetic oligonucleotide
  Target: LAMA2; (-) strand; PAM type: NNNNGHTT; PAM sequence: TAGTGTTT
catttatgagtgagaacata

SEQ ID NO: 37337 - DNA, 20 bp, Artificial Sequence
  Description of Artificial Sequence: Synthetic oligonucleotide
  Target: LAMA2; (-) strand; PAM type: NNNNGHTT; PAM sequence: CATTGTTT
tccttgagtccatgtgttct

SEQ ID NO: 37338 - DNA, 20 bp, Artificial Sequence
  Description of Artificial Sequence: Synthetic oligonucleotide
  Target: LAMA2; (-) strand; PAM type: NNNNGHTT; PAM sequence: AGTTGATT
ggatatggcaagaaggaggg

SEQ ID NO: 37339 - DNA, 20 bp, Artificial Sequence
  Description of Artificial Sequence: Synthetic oligonucleotide
  Target: LAMA2; (-) strand; PAM type: NNNNGHTT; PAM sequence: GCTTGTTT
tgttttttgggggtcgatta

SEQ ID NO: 37340 - DNA, 20 bp, Artificial Sequence
  Description of Artificial Sequence: Synthetic oligonucleotide
  Target: LAMA2; (-) strand; PAM type: NNNNGHTT; PAM sequence: ATTAGCTT
tatgtgttttttgggggtcg

SEQ ID NO: 37341 - DNA, 20 bp, Artificial Sequence
  Description of Artificial Sequence: Synthetic oligonucleotide
  Target: LAMA2; (-) strand; PAM type: NNNNGHTT; PAM sequence: GGTCGATT
ggatctatgtgttttttggg

SEQ ID NO: 37342 - DNA, 20 bp, Artificial Sequence
  Description of Artificial Sequence: Synthetic oligonucleotide
  Target: LAMA2; (-) strand; PAM type: NNNNGHTT; PAM sequence: ATGTGTTT
ttctctgatgcctgggatct

SEQ ID NO: 37343 - DNA, 20 bp, Artificial Sequence
  Description of Artificial Sequence: Synthetic oligonucleotide
  Target: LAMA2; (-) strand; PAM type: NNNNGHTT; PAM sequence: CTGGGTTT
ccaggctggttctttaatca

SEQ ID NO: 37344 - DNA, 20 bp, Artificial Sequence
  Description of Artificial Sequence: Synthetic oligonucleotide
  Target: LAMA2; (-) strand; PAM type: NNNNGHTT; PAM sequence: CCAGGCTT
agcctgggaagaaagtggtg

SEQ ID NO: 37345 - DNA, 20 bp, Artificial Sequence
  Description of Artificial Sequence: Synthetic oligonucleotide
  Target: LAMA2; (-) strand; PAM type: NNNNGHTT; PAM sequence: GCGAGATT
gtgttatgctcacactcaca

SEQ ID NO: 37346 - DNA, 20 bp, Artificial Sequence
  Description of Artificial Sequence: Synthetic oligonucleotide
  Target: LAMA2; (-) strand; PAM type: NNNNGHTT; PAM sequence: CAGGGTTT
ttagaaaagttccagctctc

SEQ ID NO: 37347 - DNA, 20 bp, Artificial Sequence
  Description of Artificial Sequence: Synthetic oligonucleotide
  Target: LAMA2; (-) strand; PAM type: NNNNGHTT; PAM sequence: TTCAGTTT
ctaaagaacataccttcaca

SEQ ID NO: 37348 - DNA, 20 bp, Artificial Sequence
  Description of Artificial Sequence: Synthetic oligonucleotide
  Target: LAMA2; (-) strand; PAM type: NNNNGHTT; PAM sequence: GTTGGCTT
aaggaagaatgacatatttt

SEQ ID NO: 37349 - DNA, 20 bp, Artificial Sequence
  Description of Artificial Sequence: Synthetic oligonucleotide
  Target: LAMA2; (-) strand; PAM type: NNNNGHTT; PAM sequence: ACTGGCTT
ccatttcactatttttcatt

SEQ ID NO: 37350 - DNA, 20 bp, Artificial Sequence
  Description of Artificial Sequence: Synthetic oligonucleotide
  Target: LAMA2; (-) strand; PAM type: NNNNGHTT; PAM sequence: ACAGGTTT
ttgagaaaatctccagaaac

SEQ ID NO: 37351 - DNA, 20 bp, Artificial Sequence
  Description of Artificial Sequence: Synthetic oligonucleotide
  Target: LAMA2; (-) strand; PAM type: NNNNGHTT; PAM sequence: TTAGGTTT
gaattggacttcatactagt

SEQ ID NO: 37352 - DNA, 20 bp, Artificial Sequence
  Description of Artificial Sequence: Synthetic oligonucleotide
  Target: LAMA2; (-) strand; PAM type: NNNNGHTT; PAM sequence: ACTAGTTT
tcagttgaattggacttcat

SEQ ID NO: 37353 - DNA, 20 bp, Artificial Sequence
  Description of Artificial Sequence: Synthetic oligonucleotide
  Target: LAMA2; (-) strand; PAM type: NNNNGHTT; PAM sequence: GGCTGATT
gctgaaaaaaatgtggttag

SEQ ID NO: 37354 - DNA, 20 bp, Artificial Sequence
  Description of Artificial Sequence: Synthetic oligonucleotide
  Target: LAMA2; (-) strand; PAM type: NNNNGHTT; PAM sequence: AGCTGTTT
ttaatttaaaatgtctatca

SEQ ID NO: 37355 - DNA, 20 bp, Artificial Sequence
  Description of Artificial Sequence: Synthetic oligonucleotide
  Target: LAMA2; (-) strand; PAM type: NNNNGHTT; PAM sequence: AATAGTTT
attaaggtgtgttatgattc

SEQ ID NO: 37356 - DNA, 20 bp, Artificial Sequence
  Description of Artificial Sequence: Synthetic oligonucleotide
  Target: LAMA2; (-) strand; PAM type: NNNNGHTT; PAM sequence: TTATGATT
cattttgtgattaaggtgtg

SEQ ID NO: 37357 - DNA, 20 bp, Artificial Sequence
  Description of Artificial Sequence: Synthetic oligonucleotide
  Target: LAMA2; (-) strand; PAM type: NNNNGHTT; PAM sequence: TTGTGATT
tcttataggtggggaacatt

SEQ ID NO: 37358 - DNA, 20 bp, Artificial Sequence
  Description of Artificial Sequence: Synthetic oligonucleotide
  Target: LAMA2; (-) strand; PAM type: NNNNGHTT; PAM sequence: TATTGCTT
tgctatataaatagttgtta

SEQ ID NO: 37359 - DNA, 20 bp, Artificial Sequence
  Description of Artificial Sequence: Synthetic oligonucleotide
  Target: LAMA2; (-) strand; PAM type: NNNNGHTT; PAM sequence: TCTAGATT
cctgtacactttagatcatc

SEQ ID NO: 37360 - DNA, 20 bp, Artificial Sequence
  Description of Artificial Sequence: Synthetic oligonucleotide
  Target: LAMA2; (-) strand; PAM type: NNNNGHTT; PAM sequence: CCAAGATT
tccaggacctccctcaaaca

SEQ ID NO: 37361 - DNA, 20 bp, Artificial Sequence
  Description of Artificial Sequence: Synthetic oligonucleotide
  Target: LAMA2; (-) strand; PAM type: NNNNGHTT; PAM sequence: GGGAGATT
agatatgcttttgtaataat

SEQ ID NO: 37362 - DNA, 20 bp, Artificial Sequence
  Description of Artificial Sequence: Synthetic oligonucleotide
  Target: LAMA2; (-) strand; PAM type: NNNNGHTT; PAM sequence: ATATGCTT
atggtggctcatgcctccag

SEQ ID NO: 37363 - DNA, 20 bp, Artificial Sequence
  Description of Artificial Sequence: Synthetic oligonucleotide
  Target: LAMA2; (-) strand; PAM type: NNNNGHTT; PAM sequence: CTGGGCTT
tagttgaaggaaacaaaagg

SEQ ID NO: 37364 - DNA, 20 bp, Artificial Sequence
  Description of Artificial Sequence: Synthetic oligonucleotide
  Target: LAMA2; (-) strand; PAM type: NNNNGHTT; PAM sequence: AAGGGATT
tggagaagctgtggagaact

SEQ ID NO: 37365 - DNA, 20 bp, Artificial Sequence
  Description of Artificial Sequence: Synthetic oligonucleotide
  Target: LAMA2; (-) strand; PAM type: NNNNGHTT; PAM sequence: TTATGATT
ccttcaagtgctgctcccac

SEQ ID NO: 37366 - DNA, 20 bp, Artificial Sequence
  Description of Artificial Sequence: Synthetic oligonucleotide
  Target: LAMA2; (-) strand; PAM type: NNNNGHTT; PAM sequence: AAAGGATT
aaacacaagtaaagagtggt

SEQ ID NO: 37367 - DNA, 20 bp, Artificial Sequence
  Description of Artificial Sequence: Synthetic oligonucleotide
  Target: LAMA2; (-) strand; PAM type: NNNNGHTT; PAM sequence: TTTTGTTT
ctaacaagttgctcgattgt

SEQ ID NO: 37368 - DNA, 20 bp, Artificial Sequence
  Description of Artificial Sequence: Synthetic oligonucleotide
  Target: LAMA2; (-) strand; PAM type: NNNNGHTT; PAM sequence: GATTGTTT
ctattgctaacaagttgctc

SEQ ID NO: 37369 - DNA, 20 bp, Artificial Sequence
  Description of Artificial Sequence: Synthetic oligonucleotide
  Target: LAMA2; (-) strand; PAM type: NNNNGHTT; PAM sequence: GCTCGATT
acctctattgctaacaagtt

SEQ ID NO: 37370 - DNA, 20 bp, Artificial Sequence
  Description of Artificial Sequence: Synthetic oligonucleotide
  Target: LAMA2; (-) strand; PAM type: NNNNGHTT; PAM sequence: CCTTGCTT
tagcagtttgaaatgtcttg

SEQ ID NO: 37371 - DNA, 20 bp, Artificial Sequence
  Description of Artificial Sequence: Synthetic oligonucleotide
  Target: LAMA2; (-) strand; PAM type: NNNNGHTT; PAM sequence: AGCAGTTT
attttaaaaatgtgtacagt

SEQ ID NO: 37372 - DNA, 20 bp, Artificial Sequence
  Description of Artificial Sequence: Synthetic oligonucleotide
  Target: LAMA2; (-) strand; PAM type: NNNNGHTT; PAM sequence: AAGTGTTT
tccctacagggaaagaaaaa

SEQ ID NO: 37373 - DNA, 20 bp, Artificial Sequence
  Description of Artificial Sequence: Synthetic oligonucleotide
  Target: LAMA2; (-) strand; PAM type: NNNNGHTT; PAM sequence: TTCAGTTT
cgtttttaaaatgtttgttt

SEQ ID NO: 37374 - DNA, 20 bp, Artificial Sequence
  Description of Artificial Sequence: Synthetic oligonucleotide
  Target: LAMA2; (-) strand; PAM type: NNNNGHTT; PAM sequence: GTTTGTTT
aatttctgcgtttttaaaat

SEQ ID NO: 37375 - DNA, 20 bp, Artificial Sequence
  Description of Artificial Sequence: Synthetic oligonucleotide
  Target: LAMA2; (-) strand; PAM type: NNNNGHTT; PAM sequence: AAATGTTT
cttgaatttctgcgttttta

SEQ ID NO: 37376 - DNA, 20 bp, Artificial Sequence
  Description of Artificial Sequence: Synthetic oligonucleotide
  Target: LAMA2; (-) strand; PAM type: NNNNGHTT; PAM sequence: CTGCGTTT
aagatccccatcttgaattt

SEQ ID NO: 37377 - DNA, 20 bp, Artificial Sequence
  Description of Artificial Sequence: Synthetic oligonucleotide
  Target: LAMA2; (-) strand; PAM type: NNNNGHTT; PAM sequence: TATGGCTT
ctgaaagtgtgatttttatg

SEQ ID NO: 37378 - DNA, 20 bp, Artificial Sequence
  Description of Artificial Sequence: Synthetic oligonucleotide
  Target: LAMA2; (-) strand; PAM type: NNNNGHTT; PAM sequence: GTGTGATT
gaatgtactcattgctgaaa

SEQ ID NO: 37379 - DNA, 20 bp, Artificial Sequence
  Description of Artificial Sequence: Synthetic oligonucleotide
  Target: LAMA2; (-) strand; PAM type: NNNNGHTT; PAM sequence: TTAAGCTT
ttggaaaagaaaatttttac

SEQ ID NO: 37380 - DNA, 20 bp, Artificial Sequence
  Description of Artificial Sequence: Synthetic oligonucleotide
  Target: LAMA2; (-) strand; PAM type: NNNNGHTT; PAM sequence: ATATGATT
taaatattaaggtgattgga

SEQ ID NO: 37381 - DNA, 20 bp, Artificial Sequence
  Description of Artificial Sequence: Synthetic oligonucleotide
  Target: LAMA2; (-) strand; PAM type: NNNNGHTT; PAM sequence: AGGTGATT
aaggatttttctaaatatta

SEQ ID NO: 37382 - DNA, 20 bp, Artificial Sequence
  Description of Artificial Sequence: Synthetic oligonucleotide
  Target: LAMA2; (-) strand; PAM type: NNNNGHTT; PAM sequence: GAAGGATT
gagggatttgtcatgtcatg

SEQ ID NO: 37383 - DNA, 20 bp, Artificial Sequence
  Description of Artificial Sequence: Synthetic oligonucleotide
  Target: LAMA2; (-) strand; PAM type: NNNNGHTT; PAM sequence: GAGGGATT
atgtgattattcattttatg

SEQ ID NO: 37384 - DNA, 20 bp, Artificial Sequence
  Description of Artificial Sequence: Synthetic oligonucleotide
  Target: LAMA2; (-) strand; PAM type: NNNNGHTT; PAM sequence: ATGTGATT
ttaaactcaaatgaattaga

SEQ ID NO: 37385 - DNA, 20 bp, Artificial Sequence
  Description of Artificial Sequence: Synthetic oligonucleotide
  Target: LAMA2; (-) strand; PAM type: NNNNGHTT; PAM sequence: GCTAGATT
tattatcttgccttatgtaa

SEQ ID NO: 37386 - DNA, 20 bp, Artificial Sequence
  Description of Artificial Sequence: Synthetic oligonucleotide
  Target: LAMA2; (-) strand; PAM type: NNNNGHTT; PAM sequence: CTATGCTT
tcagcaactgaatgaatatt

SEQ ID NO: 37387 - DNA, 20 bp, Artificial Sequence
  Description of Artificial Sequence: Synthetic oligonucleotide
  Target: LAMA2; (-) strand; PAM type: NNNNGHTT; PAM sequence: TGTTGTTT
caagatatatcatatgaaac

SEQ ID NO: 37388 - DNA, 20 bp, Artificial Sequence
  Description of Artificial Sequence: Synthetic oligonucleotide
  Target: LAMA2; (-) strand; PAM type: NNNNGHTT; PAM sequence: CCATGTTT
gctagtaactgatcacaaag

SEQ ID NO: 37389 - DNA, 20 bp, Artificial Sequence
  Description of Artificial Sequence: Synthetic oligonucleotide
  Target: LAMA2; (-) strand; PAM type: NNNNGHTT; PAM sequence: GAGTGTTT
tttagaattcgtgttgtcaa

SEQ ID NO: 37390 - DNA, 20 bp, Artificial Sequence
  Description of Artificial Sequence: Synthetic oligonucleotide
  Target: LAMA2; (-) strand; PAM type: NNNNGHTT; PAM sequence: AAAAGCTT
ggacctggctatgaattctt

SEQ ID NO: 37391 - DNA, 20 bp, Artificial Sequence
  Description of Artificial Sequence: Synthetic oligonucleotide
  Target: LAMA2; (-) strand; PAM type: NNNNGHTT; PAM sequence: CTGGGATT
ccatagcttctttccagtag

SEQ ID NO: 37392 - DNA, 20 bp, Artificial Sequence
  Description of Artificial Sequence: Synthetic oligonucleotide
  Target: LAMA2; (-) strand; PAM type: NNNNGHTT; PAM sequence: CATAGCTT
ggctcaagagatcctcccac

SEQ ID NO: 37393 - DNA, 20 bp, Artificial Sequence
  Description of Artificial Sequence: Synthetic oligonucleotide
  Target: LAMA2; (-) strand; PAM type: NNNNGHTT; PAM sequence: ATAAGTTT
ctccctcttcccctttgatc

SEQ ID NO: 37394 - DNA, 20 bp, Artificial Sequence
  Description of Artificial Sequence: Synthetic oligonucleotide
  Target: LAMA2; (-) strand; PAM type: NNNNGHTT; PAM sequence: GATGGTTT
agtgagttcgtacaagatct

SEQ ID NO: 37395 - DNA, 20 bp, Artificial Sequence
  Description of Artificial Sequence: Synthetic oligonucleotide
  Target: LAMA2; (-) strand; PAM type: NNNNGHTT; PAM sequence: TATGGTTT
tttcttcagaaagacagtga

SEQ ID NO: 37396 - DNA, 20 bp, Artificial Sequence
  Description of Artificial Sequence: Synthetic oligonucleotide
  Target: LAMA2; (-) strand; PAM type: NNNNGHTT; PAM sequence: AGCAGTTT
acaaatcactaggcattgta

SEQ ID NO: 37397 - DNA, 20 bp, Artificial Sequence
  Description of Artificial Sequence: Synthetic oligonucleotide
  Target: LAMA2; (-) strand; PAM type: NNNNGHTT; PAM sequence: GAGAGTTT
gtagttttgctatgttaatg

SEQ ID NO: 37398 - DNA, 20 bp, Artificial Sequence
  Description of Artificial Sequence: Synthetic oligonucleotide
  Target: LAMA2; (-) strand; PAM type: NNNNGHTT; PAM sequence: AGTAGTTT
tgacatttgatttagaatat

SEQ ID NO: 37399 - DNA, 20 bp, Artificial Sequence
  Description of Artificial Sequence: Synthetic oligonucleotide
  Target: LAMA2; (-) strand; PAM type: NNNNGHTT; PAM sequence: ATTTGATT
acctttcccaacctgctgac

SEQ ID NO: 37400 - DNA, 20 bp, Artificial Sequence
  Description of Artificial Sequence: Synthetic oligonucleotide
  Target: LAMA2; (-) strand; PAM type: NNNNGHTT; PAM sequence: TCATGTTT
gaaaggttattatccccttg

SEQ ID NO: 37401 - DNA, 20 bp, Artificial Sequence
  Description of Artificial Sequence: Synthetic oligonucleotide
  Target: LAMA2; (-) strand; PAM type: NNNNGHTT; PAM sequence: ACCTGTTT
atatgtcatttctgaggaat

SEQ ID NO: 37402 - DNA, 20 bp, Artificial Sequence
  Description of Artificial Sequence: Synthetic oligonucleotide
  Target: LAMA2; (-) strand; PAM type: NNNNGHTT; PAM sequence: CATTGTTT
ataggtgaaaaataatatgt

SEQ ID NO: 37403 - DNA, 20 bp, Artificial Sequence
  Description of Artificial Sequence: Synthetic oligonucleotide
  Target: LAMA2; (-) strand; PAM type: NNNNGHTT; PAM sequence: AATCGCTT
atatgtaaaatttaaatttt

SEQ ID NO: 37404 - DNA, 20 bp, Artificial Sequence
  Description of Artificial Sequence: Synthetic oligonucleotide
  Target: LAMA2; (-) strand; PAM type: NNNNGHTT; PAM sequence: GAATGCTT
ttgtctcatacatgttttga

SEQ ID NO: 37405 - DNA, 20 bp, Artificial Sequence
  Description of Artificial Sequence: Synthetic oligonucleotide
  Target: LAMA2; (-) strand; PAM type: NNNNGHTT; PAM sequence: ACATGTTT
cactttagtacttgtctcat

SEQ ID NO: 37406 - DNA, 20 bp, Artificial Sequence
  Description of Artificial Sequence: Synthetic oligonucleotide
  Target: LAMA2; (-) strand; PAM type: NNNNGHTT; PAM sequence: AAAAGTTT
gggaggcgctctaatgttag

SEQ ID NO: 37407 - DNA, 20 bp, Artificial Sequence
  Description of Artificial Sequence: Synthetic oligonucleotide
  Target: LAMA2; (-) strand; PAM type: NNNNGHTT; PAM sequence: CCATGTTT
aatgaacagttacacagttt

SEQ ID NO: 37408 - DNA, 20 bp, Artificial Sequence
  Description of Artificial Sequence: Synthetic oligonucleotide
  Target: LAMA2; (-) strand; PAM type: NNNNGHTT; PAM sequence: CACAGTTT
tccctattaatgaacagtta

SEQ ID NO: 37409 - DNA, 20 bp, Artificial Sequence
  Description of Artificial Sequence: Synthetic oligonucleotide
  Target: LAMA2; (-) strand; PAM type: NNNNGHTT; PAM sequence: TACTGTTT
aaagggaaggggcatttgta

SEQ ID NO: 37410 - DNA, 20 bp, Artificial Sequence
  Description of Artificial Sequence: Synthetic oligonucleotide
  Target: LAMA2; (-) strand; PAM type: NNNNGHTT; PAM sequence: GTGTGCTT
gtgtgtgtgtgtgtgtgtag

SEQ ID NO: 37411 - DNA, 20 bp, Artificial Sequence
  Description of Artificial Sequence: Synthetic oligonucleotide
  Target: LAMA2; (-) strand; PAM type: NNNNGHTT; PAM sequence: TTGAGTTT
tctccttcctacctgacatg

SEQ ID NO: 37412 - DNA, 20 bp, Artificial Sequence
  Description of Artificial Sequence: Synthetic oligonucleotide
  Target: LAMA2; (-) strand; PAM type: NNNNGHTT; PAM sequence: AAAGGATT
tgaaaaatcactttctccag

SEQ ID NO: 37413 - DNA, 20 bp, Artificial Sequence
  Description of Artificial Sequence: Synthetic oligonucleotide
  Target: LAMA2; (-) strand; PAM type: NNNNGHTT; PAM sequence: AATTGATT
tgtcttataaagaagttagc

SEQ ID NO: 37414 - DNA, 20 bp, Artificial Sequence
  Description of Artificial Sequence: Synthetic oligonucleotide
  Target: LAMA2; (-) strand; PAM type: NNNNGHTT; PAM sequence: ACTAGATT
tggagtggtcaatagtaatt

SEQ ID NO: 37415 - DNA, 20 bp, Artificial Sequence
  Description of Artificial Sequence: Synthetic oligonucleotide
  Target: LAMA2; (-) strand; PAM type: NNNNGHTT; PAM sequence: CTCAGTTT
acttcttaatttcacgaagg

SEQ ID NO: 37416 - DNA, 20 bp, Artificial Sequence
  Description of Artificial Sequence: Synthetic oligonucleotide
  Target: LAMA2; (-) strand; PAM type: NNNNGHTT; PAM sequence: GCTAGTTT
ggaattaagacaaaccgaga

SEQ ID NO: 37417 - DNA, 20 bp, Artificial Sequence
  Description of Artificial Sequence: Synthetic oligonucleotide
  Target: LAMA2; (-) strand; PAM type: NNNNGHTT; PAM sequence: AAATGCTT
ctactgattttaatcctcaa

SEQ ID NO: 37418 - DNA, 20 bp, Artificial Sequence
  Description of Artificial Sequence: Synthetic oligonucleotide
  Target: LAMA2; (-) strand; PAM type: NNNNGHTT; PAM sequence: TACTGATT
aaatgctccatatttgttgc

SEQ ID NO: 37419 - DNA, 20 bp, Artificial Sequence
  Description of Artificial Sequence: Synthetic oligonucleotide
  Target: LAMA2; (-) strand; PAM type: NNNNGHTT; PAM sequence: ATAGGTTT
atactaataacaactaaaac

SEQ ID NO: 37420 - DNA, 20 bp, Artificial Sequence
  Description of Artificial Sequence: Synthetic oligonucleotide
  Target: LAMA2; (-) strand; PAM type: NNNNGHTT; PAM sequence: GAATGATT
aattattcaatgatggcact

SEQ ID NO: 37421 - DNA, 20 bp, Artificial Sequence
  Description of Artificial Sequence: Synthetic oligonucleotide
  Target: LAMA2; (-) strand; PAM type: NNNNGHTT; PAM sequence: TTTGGTTT
atcatatgcaattgccaata

SEQ ID NO: 37422 - DNA, 20 bp, Artificial Sequence
  Description of Artificial Sequence: Synthetic oligonucleotide
  Target: LAMA2; (-) strand; PAM type: NNNNGHTT; PAM sequence: AAATGATT
acacattttaatagaatttg

SEQ ID NO: 37423 - DNA, 20 bp, Artificial Sequence
  Description of Artificial Sequence: Synthetic oligonucleotide
  Target: LAMA2; (-) strand; PAM type: NNNNGHTT; PAM sequence: TGGGGCTT
ttctgtatttttagtagaga

SEQ ID NO: 37424 - DNA, 20 bp, Artificial Sequence
  Description of Artificial Sequence: Synthetic oligonucleotide
  Target: LAMA2; (-) strand; PAM type: NNNNGHTT; PAM sequence: AATAGATT
aaatcatttctgttatacat

SEQ ID NO: 37425 - DNA, 20 bp, Artificial Sequence
  Description of Artificial Sequence: Synthetic oligonucleotide
  Target: LAMA2; (-) strand; PAM type: NNNNGHTT; PAM sequence: ATTTGATT
aaataaattaataaacatca

SEQ ID NO: 37426 - DNA, 20 bp, Artificial Sequence
  Description of Artificial Sequence: Synthetic oligonucleotide
  Target: LAMA2; (-) strand; PAM type: NNNNGHTT; PAM sequence: TTCAGCTT
ttttcatcataatagcattc

SEQ ID NO: 37427 - DNA, 20 bp, Artificial Sequence
  Description of Artificial Sequence: Synthetic oligonucleotide
  Target: LAMA2; (-) strand; PAM type: NNNNGHTT; PAM sequence: CTCAGATT
actttccacgtatattcaaa

SEQ ID NO: 37428 - DNA, 20 bp, Artificial Sequence
  Description of Artificial Sequence: Synthetic oligonucleotide
  Target: LAMA2; (-) strand; PAM type: NNNNGHTT; PAM sequence: CAGTGTTT
tgtctcgcagtttataccag

SEQ ID NO: 37429 - DNA, 20 bp, Artificial Sequence
  Description of Artificial Sequence: Synthetic oligonucleotide
  Target: LAMA2; (-) strand; PAM type: NNNNGHTT; PAM sequence: CGCAGTTT
gaagccatcagtacatgtct

SEQ ID NO: 37430 - DNA, 20 bp, Artificial Sequence
  Description of Artificial Sequence: Synthetic oligonucleotide
  Target: LAMA2; (-) strand; PAM type: NNNNGHTT; PAM sequence: AGAAGCTT
tttgaagttcaactgtttac

SEQ ID NO: 37431 - DNA, 20 bp, Artificial Sequence
  Description of Artificial Sequence: Synthetic oligonucleotide
  Target: LAMA2; (-) strand; PAM type: NNNNGHTT; PAM sequence: AACTGTTT
taccttttaatttgaagttc

SEQ ID NO: 37432 - DNA, 20 bp, Artificial Sequence
  Description of Artificial Sequence: Synthetic oligonucleotide
  Target: LAMA2; (-) strand; PAM type: NNNNGHTT; PAM sequence: GTCAGTTT
ttacatcctcaaagatttag

SEQ ID NO: 37433 - DNA, 20 bp, Artificial Sequence
  Description of Artificial Sequence: Synthetic oligonucleotide
  Target: LAMA2; (-) strand; PAM type: NNNNGHTT; PAM sequence: CAAAGATT
aaagttttatcttacatcct

SEQ ID NO: 37434 - DNA, 20 bp, Artificial Sequence
  Description of Artificial Sequence: Synthetic oligonucleotide
  Target: LAMA2; (-) strand; PAM type: NNNNGHTT; PAM sequence: AAAAGTTT
aaaactttctggagtgatgg

SEQ ID NO: 37435 - DNA, 20 bp, Artificial Sequence
  Description of Artificial Sequence: Synthetic oligonucleotide
  Target: LAMA2; (-) strand; PAM type: NNNNGHTT; PAM sequence: CAGAGTTT
ttacgttctaaaaatcagaa

SEQ ID NO: 37436 - DNA, 20 bp, Artificial Sequence
  Description of Artificial Sequence: Synthetic oligonucleotide
  Target: LAMA2; (-) strand; PAM type: NNNNGHTT; PAM sequence: GTATGATT
aagactcactagtatgtact

SEQ ID NO: 37437 - DNA, 20 bp, Artificial Sequence
  Description of Artificial Sequence: Synthetic oligonucleotide
  Target: LAMA2; (-) strand; PAM type: NNNNGHTT; PAM sequence: AATGGATT
ctaatttctatcaacaggag

SEQ ID NO: 37438 - DNA, 20 bp, Artificial Sequence
  Description of Artificial Sequence: Synthetic oligonucleotide
  Target: LAMA2; (-) strand; PAM type: NNNNGHTT; PAM sequence: AAAAGCTT
gcatctacctatcctatgaa

SEQ ID NO: 37439 - DNA, 20 bp, Artificial Sequence
  Description of Artificial Sequence: Synthetic oligonucleotide
  Target: LAMA2; (-) strand; PAM type: NNNNGHTT; PAM sequence: GACGGTTT
tactaatttggcaaaatgtt

SEQ ID NO: 37440 - DNA, 20 bp, Artificial Sequence
  Description of Artificial Sequence: Synthetic oligonucleotide
  Target: LAMA2; (-) strand; PAM type: NNNNGHTT; PAM sequence: TTACGATT
caggaatggtcaataagccc

SEQ ID NO: 37441 - DNA, 20 bp, Artificial Sequence
  Description of Artificial Sequence: Synthetic oligonucleotide
  Target: LAMA2; (-) strand; PAM type: NNNNGHTT; PAM sequence: TTTGGTTT
atagctctataagttaaaat

SEQ ID NO: 37442 - DNA, 20 bp, Artificial Sequence
  Description of Artificial Sequence: Synthetic oligonucleotide
  Target: LAMA2; (-) strand; PAM type: NNNNGHTT; PAM sequence: AATTGATT
ttgatccatgtaatatgatc

SEQ ID NO: 37443 - DNA, 20 bp, Artificial Sequence
  Description of Artificial Sequence: Synthetic oligonucleotide
  Target: LAMA2; (-) strand; PAM type: NNNNGHTT; PAM sequence: AGTTGATT
aatattttctgtaattgaca

SEQ ID NO: 37444 - DNA, 20 bp, Artificial Sequence
  Description of Artificial Sequence: Synthetic oligonucleotide
  Target: LAMA2; (-) strand; PAM type: NNNNGHTT; PAM sequence: TAAAGTTT
cctcaatacttgtttgcttt

SEQ ID NO: 37445 - DNA, 20 bp, Artificial Sequence
  Description of Artificial Sequence: Synthetic oligonucleotide
  Target: LAMA2; (-) strand; PAM type: NNNNGHTT; PAM sequence: GTTTGCTT
tgttattttcctcaatactt

SEQ ID NO: 37446 - DNA, 20 bp, Artificial Sequence
  Description of Artificial Sequence: Synthetic oligonucleotide
  Target: LAMA2; (-) strand; PAM type: NNNNGHTT; PAM sequence: ACTTGTTT
atgatgttattttcctcaat

SEQ ID NO: 37447 - DNA, 20 bp, Artificial Sequence
  Description of Artificial Sequence: Synthetic oligonucleotide
  Target: LAMA2; (-) strand; PAM type: NNNNGHTT; PAM sequence: AAATGATT
atatgctatgttcattggtt

SEQ ID NO: 37448 - DNA, 20 bp, Artificial Sequence
  Description of Artificial Sequence: Synthetic oligonucleotide
  Target: LAMA2; (-) strand; PAM type: NNNNGHTT; PAM sequence: TAAAGATT
agtcatgcaaagcaaaattc

SEQ ID NO: 37449 - DNA, 20 bp, Artificial Sequence
  Description of Artificial Sequence: Synthetic oligonucleotide
  Target: LAMA2; (-) strand; PAM type: NNNNGHTT; PAM sequence: CCATGCTT
ggagcttctattgccatgaa

SEQ ID NO: 37450 - DNA, 20 bp, Artificial Sequence
  Description of Artificial Sequence: Synthetic oligonucleotide
  Target: LAMA2; (-) strand; PAM type: NNNNGHTT; PAM sequence: TGGAGCTT
gaaaacatcctctcctaagt

SEQ ID NO: 37451 - DNA, 20 bp, Artificial Sequence
  Description of Artificial Sequence: Synthetic oligonucleotide
  Target: LAMA2; (-) strand; PAM type: NNNNGHTT; PAM sequence: GACTGTTT
ttaaagcatctgtaaatttg

SEQ ID NO: 37452 - DNA, 20 bp, Artificial Sequence
  Description of Artificial Sequence: Synthetic oligonucleotide
  Target: LAMA2; (-) strand; PAM type: NNNNGHTT; PAM sequence: AGAAGTTT
aagctgatgccaaggccaaa

SEQ ID NO: 37453 - DNA, 20 bp, Artificial Sequence
  Description of Artificial Sequence: Synthetic oligonucleotide
  Target: LAMA2; (-) strand; PAM type: NNNNGHTT; PAM sequence: ACCAGCTT
gcaagtgagatagcttcccc

SEQ ID NO: 37454 - DNA, 20 bp, Artificial Sequence
  Description of Artificial Sequence: Synthetic oligonucleotide
  Target: LAMA2; (-) strand; PAM type: NNNNGHTT; PAM sequence: GATAGCTT
gccatttactttgcaagtga

SEQ ID NO: 37455 - DNA, 20 bp, Artificial Sequence
  Description of Artificial Sequence: Synthetic oligonucleotide
  Target: LAMA2; (-) strand; PAM type: NNNNGHTT; PAM sequence: CCAAGATT
tttaaaaatgcaatatctga

SEQ ID NO: 37456 - DNA, 20 bp, Artificial Sequence
  Description of Artificial Sequence: Synthetic oligonucleotide
  Target: LAMA2; (-) strand; PAM type: NNNNGHTT; PAM sequence: TTGTGCTT
gatattggtggccggtggtt

SEQ ID NO: 37457 - DNA, 20 bp, Artificial Sequence
  Description of Artificial Sequence: Synthetic oligonucleotide
  Target: LAMA2; (-) strand; PAM type: NNNNGHTT; PAM sequence: GGTGGTTT
acaggaagatattggtggcc

SEQ ID NO: 37458 - DNA, 20 bp, Artificial Sequence
  Description of Artificial Sequence: Synthetic oligonucleotide
  Target: LAMA2; (-) strand; PAM type: NNNNGHTT; PAM sequence: CCAGGATT
tgtctccatgcacatgcacg

SEQ ID NO: 37459 - DNA, 20 bp, Artificial Sequence
  Description of Artificial Sequence: Synthetic oligonucleotide
  Target: LAMA2; (-) strand; PAM type: NNNNGHTT; PAM sequence: GATAGTTT
tgggatactgcttagtttat

SEQ ID NO: 37460 - DNA, 20 bp, Artificial Sequence
  Description of Artificial Sequence: Synthetic oligonucleotide
  Target: LAMA2; (-) strand; PAM type: NNNNGHTT; PAM sequence: CTTAGTTT
atgatgtgtttgggatactg

SEQ ID NO: 37461 - DNA, 20 bp, Artificial Sequence
  Description of Artificial Sequence: Synthetic oligonucleotide
  Target: LAMA2; (-) strand; PAM type: NNNNGHTT; PAM sequence: TACTGCTT
agatgatgatgtgtttggga

SEQ ID NO: 37462 - DNA, 20 bp, Artificial Sequence
  Description of Artificial Sequence: Synthetic oligonucleotide
  Target: LAMA2; (-) strand; PAM type: NNNNGHTT; PAM sequence: ATGTGTTT
aaaacagcctatagatgatg

SEQ ID NO: 37463 - DNA, 20 bp, Artificial Sequence
  Description of Artificial Sequence: Synthetic oligonucleotide
  Target: LAMA2; (-) strand; PAM type: NNNNGHTT; PAM sequence: GTTCGTTT
ccttttacctgagacattca

SEQ ID NO: 37464 - DNA, 20 bp, Artificial Sequence
  Description of Artificial Sequence: Synthetic oligonucleotide
  Target: LAMA2; (-) strand; PAM type: NNNNGHTT; PAM sequence: CGGTGCTT
tgaattgcctgttcataaaa

SEQ ID NO: 37465 - DNA, 20 bp, Artificial Sequence
  Description of Artificial Sequence: Synthetic oligonucleotide
  Target: LAMA2; (-) strand; PAM type: NNNNGHTT; PAM sequence: TCCTGATT
gaactgcatcaagacttcaa

SEQ ID NO: 37466 - DNA, 20 bp, Artificial Sequence
  Description of Artificial Sequence: Synthetic oligonucleotide
  Target: LAMA2; (-) strand; PAM type: NNNNGHTT; PAM sequence: ATGGGTTT
tttttgatgcctttttttaa

SEQ ID NO: 37467 - DNA, 20 bp, Artificial Sequence
  Description of Artificial Sequence: Synthetic oligonucleotide
  Target: LAMA2; (-) strand; PAM type: NNNNGHTT; PAM sequence: TGTGGTTT
atggacaactttattttaaa

SEQ ID NO: 37468 - DNA, 20 bp, Artificial Sequence
  Description of Artificial Sequence: Synthetic oligonucleotide
  Target: LAMA2; (-) strand; PAM type: NNNNGHTT; PAM sequence: AACTGTTT
gagaaactctagactgcaag

SEQ ID NO: 37469 - DNA, 20 bp, Artificial Sequence
  Description of Artificial Sequence: Synthetic oligonucleotide
  Target: LAMA2; (-) strand; PAM type: NNNNGHTT; PAM sequence: AGACGCTT
cacagcgttgagaattaaga

SEQ ID NO: 37470 - DNA, 20 bp, Artificial Sequence
  Description of Artificial Sequence: Synthetic oligonucleotide
  Target: LAMA2; (-) strand; PAM type: NNNNGHTT; PAM sequence: AGCAGTTT
aacagtgatgaatgtctacg

SEQ ID NO: 37471 - DNA, 20 bp, Artificial Sequence
  Description of Artificial Sequence: Synthetic oligonucleotide
  Target: LAMA2; (-) strand; PAM type: NNNNGHTT; PAM sequence: AAACGTTT
tgcgtgaggttgtgtgtgtc

SEQ ID NO: 37472 - DNA, 20 bp, Artificial Sequence
  Description of Artificial Sequence: Synthetic oligonucleotide
  Target: LAMA2; (-) strand; PAM type: NNNNGHTT; PAM sequence: TACAGCTT
cctacatcatggctgatatc

SEQ ID NO: 37473 - DNA, 20 bp, Artificial Sequence
  Description of Artificial Sequence: Synthetic oligonucleotide
  Target: LAMA2; (-) strand; PAM type: NNNNGHTT; PAM sequence: ATTGGCTT
gacaccagagccctgcttaa

SEQ ID NO: 37474 - DNA, 20 bp, Artificial Sequence
  Description of Artificial Sequence: Synthetic oligonucleotide
  Target: LAMA2; (-) strand; PAM type: NNNNGHTT; PAM sequence: CCCTGCTT
tgctacgctggacaccagag

SEQ ID NO: 37475 - DNA, 20 bp, Artificial Sequence
  Description of Artificial Sequence: Synthetic oligonucleotide
  Target: LAMA2; (-) strand; PAM type: NNNNGHTT; PAM sequence: TACTGATT
tggactcagctctatttgat

SEQ ID NO: 37476 - DNA, 20 bp, Artificial Sequence
  Description of Artificial Sequence: Synthetic oligonucleotide
  Target: LAMA2; (-) strand; PAM type: NNNNGHTT; PAM sequence: ATTTGATT
aggttcctggactcagctct

SEQ ID NO: 37477 - DNA, 20 bp, Artificial Sequence
  Description of Artificial Sequence: Synthetic oligonucleotide
  Target: LAMA2; (-) strand; PAM type: NNNNGHTT; PAM sequence: CTTGGTTT
taatgcgccatgaaaacata

SEQ ID NO: 37478 - DNA, 20 bp, Artificial Sequence
  Description of Artificial Sequence: Synthetic oligonucleotide
  Target: LAMA2; (-) strand; PAM type: NNNNGHTT; PAM sequence: GCTGGTTT
ctttaccactgaagaagcca

SEQ ID NO: 37479 - DNA, 20 bp, Artificial Sequence
  Description of Artificial Sequence: Synthetic oligonucleotide
  Target: LAMA2; (-) strand; PAM type: NNNNGHTT; PAM sequence: AACAGATT
ggttcagcgaactattgcca

SEQ ID NO: 37480 - DNA, 20 bp, Artificial Sequence
  Description of Artificial Sequence: Synthetic oligonucleotide
  Target: LAMA2; (-) strand; PAM type: NNNNGHTT; PAM sequence: TCGTGATT
tcaagcagacgtcgttacaa

SEQ ID NO: 37481 - DNA, 20 bp, Artificial Sequence
  Description of Artificial Sequence: Synthetic oligonucleotide
  Target: LAMA2; (-) strand; PAM type: NNNNGHTT; PAM sequence: AGCTGCTT
ttgctatgatcatcttctcc

SEQ ID NO: 37482 - DNA, 20 bp, Artificial Sequence
  Description of Artificial Sequence: Synthetic oligonucleotide
  Target: LAMA2; (-) strand; PAM type: NNNNGHTT; PAM sequence: GCTGGTTT
tttgatggcagcattcgatg

SEQ ID NO: 37483 - DNA, 20 bp, Artificial Sequence
  Description of Artificial Sequence: Synthetic oligonucleotide
  Target: LAMA2; (-) strand; PAM type: NNNNGHTT; PAM sequence: GTCCGTTT
catgccccctgttgtcatag

SEQ ID NO: 37484 - DNA, 20 bp, Artificial Sequence
  Description of Artificial Sequence: Synthetic oligonucleotide
  Target: LAMA2; (-) strand; PAM type: NNNNGHTT; PAM sequence: CAAAGATT
gaaggatctgattttcagtg

SEQ ID NO: 37485 - DNA, 20 bp, Artificial Sequence
  Description of Artificial Sequence: Synthetic oligonucleotide
  Target: LAMA2; (-) strand; PAM type: NNNNGHTT; PAM sequence: ATCTGATT
gggtgtatgaaatatgaagg

SEQ ID NO: 37486 - DNA, 20 bp, Artificial Sequence
  Description of Artificial Sequence: Synthetic oligonucleotide
  Target: LAMA2; (-) strand; PAM type: NNNNGHTT; PAM sequence: ATTAGCTT
gatgaccagggagaaaccac

SEQ ID NO: 37487 - DNA, 20 bp, Artificial Sequence
  Description of Artificial Sequence: Synthetic oligonucleotide
  Target: LAMA2; (-) strand; PAM type: NNNNGHTT; PAM sequence: CGTTGCTT
acacatgcataactaatgga

SEQ ID NO: 37488 - DNA, 20 bp, Artificial Sequence
  Description of Artificial Sequence: Synthetic oligonucleotide
  Target: LAMA2; (-) strand; PAM type: NNNNGHTT; PAM sequence: ATCAGATT
tgactcagctatacatttac

SEQ ID NO: 37489 - DNA, 20 bp, Artificial Sequence
  Description of Artificial Sequence: Synthetic oligonucleotide
  Target: LAMA2; (-) strand; PAM type: NNNNGHTT; PAM sequence: AAGTGCTT
tgggagttgaagtcattgtc

SEQ ID NO: 37490 - DNA, 20 bp, Artificial Sequence
  Description of Artificial Sequence: Synthetic oligonucleotide
  Target: LAMA2; (-) strand; PAM type: NNNNGHTT; PAM sequence: TACAGTTT
tgtttggagaaaatcggaag

SEQ ID NO: 37491 - DNA, 20 bp, Artificial Sequence
  Description of Artificial Sequence: Synthetic oligonucleotide
  Target: LAMA2; (-) strand; PAM type: NNNNGHTT; PAM sequence: AGCTGTTT
gagatggaagcataggtcaa

SEQ ID NO: 37492 - DNA, 20 bp, Artificial Sequence
  Description of Artificial Sequence: Synthetic oligonucleotide
  Target: LAMA2; (-) strand; PAM type: NNNNGHTT; PAM sequence: ATCAGTTT
agcgacttatgaaaatatgc

SEQ ID NO: 37493 - DNA, 20 bp, Artificial Sequence
  Description of Artificial Sequence: Synthetic oligonucleotide
  Target: LAMA2; (-) strand; PAM type: NNNNGHTT; PAM sequence: TGTAGTTT
atgtgtacgtttctaaagca

SEQ ID NO: 37494 - DNA, 20 bp, Artificial Sequence
  Description of Artificial Sequence: Synthetic oligonucleotide
  Target: LAMA2; (-) strand; PAM type: NNNNGHTT; PAM sequence: GTACGTTT
ggtaaaatgattgtttatgt

SEQ ID NO: 37495 - DNA, 20 bp, Artificial Sequence
  Description of Artificial Sequence: Synthetic oligonucleotide
  Target: LAMA2; (-) strand; PAM type: NNNNGHTT; PAM sequence: GATTGTTT
aatgtacttgcaggtaaaat

SEQ ID NO: 37496 - DNA, 20 bp, Artificial Sequence
  Description of Artificial Sequence: Synthetic oligonucleotide
  Target: LAMA2; (-) strand; PAM type: NNNNGHTT; PAM sequence: AAATGATT
cctgaatgtacttgcaggta

SEQ ID NO: 37497 - DNA, 20 bp, Artificial Sequence
  Description of Artificial Sequence: Synthetic oligonucleotide
  Target: LAMA2; (-) strand; PAM type: NNNNGHTT; PAM sequence: TAAAGATT
atttttagttaaccttggca

SEQ ID NO: 37498 - DNA, 20 bp, Artificial Sequence
  Description of Artificial Sequence: Synthetic oligonucleotide
  Target: LAMA2; (-) strand; PAM type: NNNNGHTT; PAM sequence: TTAGGTTT
tcatactccatagtgaaata

SEQ ID NO: 37499 - DNA, 20 bp, Artificial Sequence
  Description of Artificial Sequence: Synthetic oligonucleotide
  Target: LAMA2; (-) strand; PAM type: NNNNGHTT; PAM sequence: GTAGGTTT
aaatccttatgttcatttca

SEQ ID NO: 37500 - DNA, 20 bp, Artificial Sequence
  Description of Artificial Sequence: Synthetic oligonucleotide
  Target: LAMA2; (-) strand; PAM type: NNNNGHTT; PAM sequence: TGGAGATT
gataatatatcataaccaaa

SEQ ID NO: 37501 - DNA, 20 bp, Artificial Sequence
  Description of Artificial Sequence: Synthetic oligonucleotide
  Target: LAMA2; (-) strand; PAM type: NNNNGHTT; PAM sequence: GATAGTTT
cgaagaaaactagagactca

SEQ ID NO: 37502 - DNA, 20 bp, Artificial Sequence
  Description of Artificial Sequence: Synthetic oligonucleotide
  Target: LAMA2; (-) strand; PAM type: NNNNGHTT; PAM sequence: CAATGATT
tttttaaaactgccaattgc

SEQ ID NO: 37503 - DNA, 20 bp, Artificial Sequence
  Description of Artificial Sequence: Synthetic oligonucleotide
  Target: LAMA2; (-) strand; PAM type: NNNNGHTT; PAM sequence: AAAAGATT
aaaggcagaagtttttttgg

SEQ ID NO: 37504 - DNA, 20 bp, Artificial Sequence
  Description of Artificial Sequence: Synthetic oligonucleotide
  Target: LAMA2; (-) strand; PAM type: NNNNGHTT; PAM sequence: AGAAGTTT
aacacaaaaaataaaaaggc

SEQ ID NO: 37505 - DNA, 20 bp, Artificial Sequence
  Description of Artificial Sequence: Synthetic oligonucleotide
  Target: LAMA2; (-) strand; PAM type: NNNNGHTT; PAM sequence: AAAAGTTT
ctagaaggaaatctatattt

SEQ ID NO: 37506 - DNA, 20 bp, Artificial Sequence
  Description of Artificial Sequence: Synthetic oligonucleotide
  Target: LAMA2; (-) strand; PAM type: NNNNGHTT; PAM sequence: TAAAGTTT
gttaaatttcaataaacttc

SEQ ID NO: 37507 - DNA, 20 bp, Artificial Sequence
  Description of Artificial Sequence: Synthetic oligonucleotide
  Target: LAMA2; (-) strand; PAM type: NNNNGHTT; PAM sequence: ATTTGTTT
gattggaaaaatccacattt

SEQ ID NO: 37508 - DNA, 20 bp, Artificial Sequence
  Description of Artificial Sequence: Synthetic oligonucleotide
  Target: LAMA2; (-) strand; PAM type: NNNNGHTT; PAM sequence: CGCAGATT
gaaaggtaggaatccataat

SEQ ID NO: 37509 - DNA, 20 bp, Artificial Sequence
  Description of Artificial Sequence: Synthetic oligonucleotide
  Target: LAMA2; (-) strand; PAM type: NNNNGHTT; PAM sequence: CAGTGCTT
aatatgtatgtgcctcataa

SEQ ID NO: 37510 - DNA, 20 bp, Artificial Sequence
  Description of Artificial Sequence: Synthetic oligonucleotide
  Target: LAMA2; (-) strand; PAM type: NNNNGHTT; PAM sequence: TAAAGATT
atttataagatataaaaatc

SEQ ID NO: 37511 - DNA, 20 bp, Artificial Sequence
  Description of Artificial Sequence: Synthetic oligonucleotide
  Target: LAMA2; (-) strand; PAM type: NNNNGHTT; PAM sequence: CTGAGATT
tttaggacaaaaagtgatat

SEQ ID NO: 37512 - DNA, 20 bp, Artificial Sequence
  Description of Artificial Sequence: Synthetic oligonucleotide
  Target: LAMA2; (-) strand; PAM type: NNNNGHTT; PAM sequence: ATTTGTTT
aaaatggaatactgaaaaat

SEQ ID NO: 37513 - DNA, 20 bp, Artificial Sequence
  Description of Artificial Sequence: Synthetic oligonucleotide
  Target: LAMA2; (-) strand; PAM type: NNNNGHTT; PAM sequence: TTATGCTT
ggtgaagattgaaaatttta

SEQ ID NO: 37514 - DNA, 20 bp, Artificial Sequence
  Description of Artificial Sequence: Synthetic oligonucleotide
  Target: LAMA2; (-) strand; PAM type: NNNNGHTT; PAM sequence: TGAAGATT
tgaaaagggtgggagggggg

SEQ ID NO: 37515 - DNA, 20 bp, Artificial Sequence
  Description of Artificial Sequence: Synthetic oligonucleotide
  Target: LAMA2; (-) strand; PAM type: NNNNGHTT; PAM sequence: GCCTGCTT
aggcaacaatagacaccagg

SEQ ID NO: 37516 - DNA, 20 bp, Artificial Sequence
  Description of Artificial Sequence: Synthetic oligonucleotide
  Target: LAMA2; (-) strand; PAM type: NNNNGHTT; PAM sequence: GGGAGATT
agacactgtgggaagccgtt

SEQ ID NO: 37517 - DNA, 20 bp, Artificial Sequence
  Description of Artificial Sequence: Synthetic oligonucleotide
  Target: LAMA2; (-) strand; PAM type: NNNNGHTT; PAM sequence: ATGAGCTT
taggactatatcactatatc

SEQ ID NO: 37518 - DNA, 20 bp, Artificial Sequence
  Description of Artificial Sequence: Synthetic oligonucleotide
  Target: LAMA2; (-) strand; PAM type: NNNNGHTT; PAM sequence: GCTGGCTT
aaaaatgacaacattgtatt

SEQ ID NO: 37519 - DNA, 20 bp, Artificial Sequence
  Description of Artificial Sequence: Synthetic oligonucleotide
  Target: LAMA2; (-) strand; PAM type: NNNNGHTT; PAM sequence: CATAGTTT
catttctttaagattgtttt

SEQ ID NO: 37520 - DNA, 20 bp, Artificial Sequence
  Description of Artificial Sequence: Synthetic oligonucleotide
  Target: LAMA2; (-) strand; PAM type: NNNNGHTT; PAM sequence: GATTGTTT
ccttcttttcatttctttaa

SEQ ID NO: 37521 - DNA, 20 bp, Artificial Sequence
  Description of Artificial Sequence: Synthetic oligonucleotide
  Target: LAMA2; (-) strand; PAM type: NNNNGHTT; PAM sequence: TTAAGATT
ttttccttcttttcatttct

SEQ ID NO: 37522 - DNA, 20 bp, Artificial Sequence
  Description of Artificial Sequence: Synthetic oligonucleotide
  Target: LAMA2; (-) strand; PAM type: NNNNGHTT; PAM sequence: AGTAGATT
aaatatccttcaataatgaa

SEQ ID NO: 37523 - DNA, 20 bp, Artificial Sequence
  Description of Artificial Sequence: Synthetic oligonucleotide
  Target: LAMA2; (-) strand; PAM type: NNNNGHTT; PAM sequence: CAAAGTTT
gtcagatttggtctacgggc

SEQ ID NO: 37524 - DNA, 20 bp, Artificial Sequence
  Description of Artificial Sequence: Synthetic oligonucleotide
  Target: LAMA2; (-) strand; PAM type: NNNNGHTT; PAM sequence: GTCAGATT
catacaaatataggccatga

SEQ ID NO: 37525 - DNA, 20 bp, Artificial Sequence
  Description of Artificial Sequence: Synthetic oligonucleotide
  Target: LAMA2; (-) strand; PAM type: NNNNGHTT; PAM sequence: CTTTGCTT
tttacaaatgtaaaaacatc

SEQ ID NO: 37526 - DNA, 20 bp, Artificial Sequence
  Description of Artificial Sequence: Synthetic oligonucleotide
  Target: LAMA2; (-) strand; PAM type: NNNNGHTT; PAM sequence: CATAGTTT
aaagccaaacatagacacat

SEQ ID NO: 37527 - DNA, 20 bp, Artificial Sequence
  Description of Artificial Sequence: Synthetic oligonucleotide
  Target: LAMA2; (-) strand; PAM type: NNNNGHTT; PAM sequence: GTAAGCTT
agctttgtgaatcaagcaag

SEQ ID NO: 37528 - DNA, 20 bp, Artificial Sequence
  Description of Artificial Sequence: Synthetic oligonucleotide
  Target: LAMA2; (-) strand; PAM type: NNNNGHTT; PAM sequence: AGAAGCTT
aatctcaatttatagttcct

SEQ ID NO: 37529 - DNA, 20 bp, Artificial Sequence
  Description of Artificial Sequence: Synthetic oligonucleotide
  Target: LAMA2; (-) strand; PAM type: NNNNGHTT; PAM sequence: ACAGGTTT
ggaaaaacactggtcaaaaa

SEQ ID NO: 37530 - DNA, 20 bp, Artificial Sequence
  Description of Artificial Sequence: Synthetic oligonucleotide
  Target: LAMA2; (-) strand; PAM type: NNNNGHTT; PAM sequence: CTGGGATT
tgcttcggccttccaaagta

SEQ ID NO: 37531 - DNA, 20 bp, Artificial Sequence
  Description of Artificial Sequence: Synthetic oligonucleotide
  Target: LAMA2; (-) strand; PAM type: NNNNGHTT; PAM sequence: GCCTGCTT
ctcctgaccgcaagcgactt

SEQ ID NO: 37532 - DNA, 20 bp, Artificial Sequence
  Description of Artificial Sequence: Synthetic oligonucleotide
  Target: LAMA2; (-) strand; PAM type: NNNNGHTT; PAM sequence: CAGGGTTT
ttttgtatttttaatagaga

SEQ ID NO: 37533 - DNA, 20 bp, Artificial Sequence
  Description of Artificial Sequence: Synthetic oligonucleotide
  Target: LAMA2; (-) strand; PAM type: NNNNGHTT; PAM sequence: GCAAGCTT
ccaggctgaagtgcactggt

SEQ ID NO: 37534 - DNA, 20 bp, Artificial Sequence
  Description of Artificial Sequence: Synthetic oligonucleotide
  Target: LAMA2; (-) strand; PAM type: NNNNGHTT; PAM sequence: CAAAGTTT
ccaggatttggtctacaggc

SEQ ID NO: 37535 - DNA, 20 bp, Artificial Sequence
  Description of Artificial Sequence: Synthetic oligonucleotide
  Target: LAMA2; (-) strand; PAM type: NNNNGHTT; PAM sequence: CCAGGATT
tgtagtcatctggccatagg

SEQ ID NO: 37536 - DNA, 20 bp, Artificial Sequence
  Description of Artificial Sequence: Synthetic oligonucleotide
  Target: LAMA2; (-) strand; PAM type: NNNNGHTT; PAM sequence: ATATGCTT
tcaatttaataattcactgg

SEQ ID NO: 37537 - DNA, 20 bp, Artificial Sequence
  Description of Artificial Sequence: Synthetic oligonucleotide
  Target: LAMA2; (-) strand; PAM type: NNNNGHTT; PAM sequence: CAATGTTT
gtccgagaatataaaggaaa

SEQ ID NO: 37538 - DNA, 20 bp, Artificial Sequence
  Description of Artificial Sequence: Synthetic oligonucleotide
  Target: LAMA2; (-) strand; PAM type: NNNNGHTT; PAM sequence: CTGTGATT
atatataggtttggtactat

SEQ ID NO: 37539 - DNA, 20 bp, Artificial Sequence
  Description of Artificial Sequence: Synthetic oligonucleotide
  Target: LAMA2; (-) strand; PAM type: NNNNGHTT; PAM sequence: ATAGGTTT
atagaaaaaacatagtatat

SEQ ID NO: 37540 - DNA, 20 bp, Artificial Sequence
  Description of Artificial Sequence: Synthetic oligonucleotide
  Target: LAMA2; (-) strand; PAM type: NNNNGHTT; PAM sequence: AAAAGTTT
actccagaaataaataattg

SEQ ID NO: 37541 - DNA, 20 bp, Artificial Sequence
  Description of Artificial Sequence: Synthetic oligonucleotide
  Target: LAMA2; (-) strand; PAM type: NNNNGHTT; PAM sequence: TGAGGTTT
tcatctgtagttttgctgtc

SEQ ID NO: 37542 - DNA, 20 bp, Artificial Sequence
  Description of Artificial Sequence: Synthetic oligonucleotide
  Target: LAMA2; (-) strand; PAM type: NNNNGHTT; PAM sequence: TGTAGTTT
acagtagtcctcacctcatc

SEQ ID NO: 37543 - DNA, 20 bp, Artificial Sequence
  Description of Artificial Sequence: Synthetic oligonucleotide
  Target: LAMA2; (-) strand; PAM type: NNNNGHTT; PAM sequence: GCAAGTTT
gacttcatggtgatcactca

SEQ ID NO: 37544 - DNA, 20 bp, Artificial Sequence
  Description of Artificial Sequence: Synthetic oligonucleotide
  Target: LAMA2; (-) strand; PAM type: NNNNGHTT; PAM sequence: TGGAGTTT
agaaatgtttgatgaatacc

SEQ ID NO: 37545 - DNA, 20 bp, Artificial Sequence
  Description of Artificial Sequence: Synthetic oligonucleotide
  Target: LAMA2; (-) strand; PAM type: NNNNGHTT; PAM sequence: AAATGTTT
ctttaagttaactacattag

SEQ ID NO: 37546 - DNA, 20 bp, Artificial Sequence
  Description of Artificial Sequence: Synthetic oligonucleotide
  Target: LAMA2; (-) strand; PAM type: NNNNGHTT; PAM sequence: AAGAGTTT
tggaaactgaacaaggtgag

SEQ ID NO: 37547 - DNA, 20 bp, Artificial Sequence
  Description of Artificial Sequence: Synthetic oligonucleotide
  Target: LAMA2; (-) strand; PAM type: NNNNGHTT; PAM sequence: AGGAGATT
cctttattgtatattcactc

SEQ ID NO: 37548 - DNA, 20 bp, Artificial Sequence
  Description of Artificial Sequence: Synthetic oligonucleotide
  Target: LAMA2; (-) strand; PAM type: NNNNGHTT; PAM sequence: ATTTGTTT
aggtcagtttcaaaatcatc

SEQ ID NO: 37549 - DNA, 20 bp, Artificial Sequence
  Description of Artificial Sequence: Synthetic oligonucleotide
  Target: LAMA2; (-) strand; PAM type: NNNNGHTT; PAM sequence: GTCAGTTT
tcaattaactaagttcacag

SEQ ID NO: 37550 - DNA, 20 bp, Artificial Sequence
  Description of Artificial Sequence: Synthetic oligonucleotide
  Target: LAMA2; (-) strand; PAM type: NNNNGHTT; PAM sequence: ACTTGTTT
ggcttaatttacaaatgaaa

SEQ ID NO: 37551 - DNA, 20 bp, Artificial Sequence
  Description of Artificial Sequence: Synthetic oligonucleotide
  Target: LAMA2; (-) strand; PAM type: NNNNGHTT; PAM sequence: CTAGGCTT
tagttcatatgtatatatat

SEQ ID NO: 37552 - DNA, 20 bp, Artificial Sequence
  Description of Artificial Sequence: Synthetic oligonucleotide
  Target: LAMA2; (-) strand; PAM type: NNNNGHTT; PAM sequence: ACAAGATT
tgtgttcatatactgtatat

SEQ ID NO: 37553 - DNA, 20 bp, Artificial Sequence
  Description of Artificial Sequence: Synthetic oligonucleotide
  Target: LAMA2; (-) strand; PAM type: NNNNGHTT; PAM sequence: GCTAGTTT
atacatagtatatcaacaaa

SEQ ID NO: 37554 - DNA, 20 bp, Artificial Sequence
  Description of Artificial Sequence: Synthetic oligonucleotide
  Target: LAMA2; (-) strand; PAM type: NNNNGHTT; PAM sequence: TCATGTTT
ttcaatacttattgatattt

SEQ ID NO: 37555 - DNA, 20 bp, Artificial Sequence
  Description of Artificial Sequence: Synthetic oligonucleotide
  Target: LAMA2; (-) strand; PAM type: NNNNGHTT; PAM sequence: CTTAGATT
aaattcctatatatttgtta

SEQ ID NO: 37556 - DNA, 20 bp, Artificial Sequence
  Description of Artificial Sequence: Synthetic oligonucleotide
  Target: LAMA2; (-) strand; PAM type: NNNNGHTT; PAM sequence: ACATGCTT
ttctaaaatccagttctttt

SEQ ID NO: 37557 - DNA, 20 bp, Artificial Sequence
  Description of Artificial Sequence: Synthetic oligonucleotide
  Target: LAMA2; (-) strand; PAM type: NNNNGHTT; PAM sequence: ACATGTTT
ctataagaattacctttaat

SEQ ID NO: 37558 - DNA, 20 bp, Artificial Sequence
  Description of Artificial Sequence: Synthetic oligonucleotide
  Target: LAMA2; (-) strand; PAM type: NNNNGHTT; PAM sequence: AGTAGTTT
cagcaaacttttatagacaa

SEQ ID NO: 37559 - DNA, 20 bp, Artificial Sequence
  Description of Artificial Sequence: Synthetic oligonucleotide
  Target: LAMA2; (-) strand; PAM type: NNNNGHTT; PAM sequence: GCATGTTT
tgcagctctcacctcgtcga

SEQ ID NO: 37560 - DNA, 20 bp, Artificial Sequence
  Description of Artificial Sequence: Synthetic oligonucleotide
  Target: LAMA2; (-) strand; PAM type: NNNNGHTT; PAM sequence: TTTGGCTT
ttcttctgaaaataatcata

SEQ ID NO: 37561 - DNA, 20 bp, Artificial Sequence
  Description of Artificial Sequence: Synthetic oligonucleotide
  Target: LAMA2; (-) strand; PAM type: NNNNGHTT; PAM sequence: GATAGATT
ggagggaacgctaatacact

SEQ ID NO: 37562 - DNA, 20 bp, Artificial Sequence
  Description of Artificial Sequence: Synthetic oligonucleotide
  Target: LAMA2; (-) strand; PAM type: NNNNGHTT; PAM sequence: ATGAGTTT
acatgaaagtaattattgag

SEQ ID NO: 37563 - DNA, 20 bp, Artificial Sequence
  Description of Artificial Sequence: Synthetic oligonucleotide
  Target: LAMA2; (-) strand; PAM type: NNNNGHTT; PAM sequence: TTGTGATT
aaattacatataccacagat

SEQ ID NO: 37564 - DNA, 20 bp, Artificial Sequence
  Description of Artificial Sequence: Synthetic oligonucleotide
  Target: LAMA2; (-) strand; PAM type: NNNNGHTT; PAM sequence: CACAGATT
tatgaaaaaattacatatac

SEQ ID NO: 37565 - DNA, 20 bp, Artificial Sequence
  Description of Artificial Sequence: Synthetic oligonucleotide
  Target: LAMA2; (-) strand; PAM type: NNNNGHTT; PAM sequence: ATTTGCTT
ctcagtgtgtgagttcttct

SEQ ID NO: 37566 - DNA, 20 bp, Artificial Sequence
  Description of Artificial Sequence: Synthetic oligonucleotide
  Target: LAMA2; (-) strand; PAM type: NNNNGHTT; PAM sequence: TCTTGCTT
cttagtcctttatgaacact

SEQ ID NO: 37567 - DNA, 20 bp, Artificial Sequence
  Description of Artificial Sequence: Synthetic oligonucleotide
  Target: LAMA2; (-) strand; PAM type: NNNNGHTT; PAM sequence: TTTAGCTT
ttcattcctcaaaggaaggc

SEQ ID NO: 37568 - DNA, 20 bp, Artificial Sequence
  Description of Artificial Sequence: Synthetic oligonucleotide
  Target: LAMA2; (-) strand; PAM type: NNNNGHTT; PAM sequence: GAAGGCTT
atgaatttcattcctcaaag

SEQ ID NO: 37569 - DNA, 20 bp, Artificial Sequence
  Description of Artificial Sequence: Synthetic oligonucleotide
  Target: LAMA2; (-) strand; PAM type: NNNNGHTT; PAM sequence: TAATGTTT
tatgttggcatttgatttct

SEQ ID NO: 37570 - DNA, 20 bp, Artificial Sequence
  Description of Artificial Sequence: Synthetic oligonucleotide
  Target: LAMA2; (-) strand; PAM type: NNNNGHTT; PAM sequence: ATTTGATT
tatcaaggagttatgttggc

SEQ ID NO: 37571 - DNA, 20 bp, Artificial Sequence
  Description of Artificial Sequence: Synthetic oligonucleotide
  Target: LAMA2; (-) strand; PAM type: NNNNGHTT; PAM sequence: AAACGCTT
ctgccctggaagtagctccc

SEQ ID NO: 37572 - DNA, 20 bp, Artificial Sequence
  Description of Artificial Sequence: Synthetic oligonucleotide
  Target: LAMA2; (-) strand; PAM type: NNNNGHTT; PAM sequence: CCTTGATT
aaaaaaacactacattgtag

SEQ ID NO: 37573 - DNA, 20 bp, Artificial Sequence
  Description of Artificial Sequence: Synthetic oligonucleotide
  Target: LAMA2; (-) strand; PAM type: NNNNGHTT; PAM sequence: TACAGTTT
aatgctcagattgataatcc

SEQ ID NO: 37574 - DNA, 20 bp, Artificial Sequence
  Description of Artificial Sequence: Synthetic oligonucleotide
  Target: LAMA2; (-) strand; PAM type: NNNNGHTT; PAM sequence: CTCAGATT
aatttagtctacatgtaatg

SEQ ID NO: 37575 - DNA, 20 bp, Artificial Sequence
  Description of Artificial Sequence: Synthetic oligonucleotide
  Target: LAMA2; (-) strand; PAM type: NNNNGHTT; PAM sequence: ATCCGTTT
tcattcgactatcaaaacgt

SEQ ID NO: 37576 - DNA, 20 bp, Artificial Sequence
  Description of Artificial Sequence: Synthetic oligonucleotide
  Target: LAMA2; (-) strand; PAM type: NNNNGHTT; PAM sequence: AAAGGCTT
tacttgtaaacacaaagaga

SEQ ID NO: 37577 - DNA, 20 bp, Artificial Sequence
  Description of Artificial Sequence: Synthetic oligonucleotide
  Target: LAMA2; (-) strand; PAM type: NNNNGHTT; PAM sequence: TTGTGATT
tgatattaatgaaaacaaca

SEQ ID NO: 37578 - DNA, 20 bp, Artificial Sequence
  Description of Artificial Sequence: Synthetic oligonucleotide
  Target: LAMA2; (-) strand; PAM type: NNNNGHTT; PAM sequence: CATAGATT
cagacttcagagaaagtttt

SEQ ID NO: 37579 - DNA, 20 bp, Artificial Sequence
  Description of Artificial Sequence: Synthetic oligonucleotide
  Target: LAMA2; (-) strand; PAM type: NNNNGHTT; PAM sequence: GAAAGTTT
tgctgaagccagacttcaga

SEQ ID NO: 37580 - DNA, 20 bp, Artificial Sequence
  Description of Artificial Sequence: Synthetic oligonucleotide
  Target: LAMA2; (-) strand; PAM type: NNNNGHTT; PAM sequence: AAAGGATT
tatatggaataagtattatt

SEQ ID NO: 37581 - DNA, 20 bp, Artificial Sequence
  Description of Artificial Sequence: Synthetic oligonucleotide
  Target: LAMA2; (-) strand; PAM type: NNNNGHTT; PAM sequence: TATTGTTT
taagaatttattttactatg

SEQ ID NO: 37582 - DNA, 20 bp, Artificial Sequence
  Description of Artificial Sequence: Synthetic oligonucleotide
  Target: LAMA2; (-) strand; PAM type: NNNNGHTT; PAM sequence: AAACGATT
tggaaaacatcattctcagt

SEQ ID NO: 37583 - DNA, 20 bp, Artificial Sequence
  Description of Artificial Sequence: Synthetic oligonucleotide
  Target: LAMA2; (-) strand; PAM type: NNNNGHTT; PAM sequence: ACTGGATT
caaatgtccaacaatgatag

SEQ ID NO: 37584 - DNA, 20 bp, Artificial Sequence
  Description of Artificial Sequence: Synthetic oligonucleotide
  Target: LAMA2; (-) strand; PAM type: NNNNGHTT; PAM sequence: GTATGTTT
ctatgaagacacatgcacac

SEQ ID NO: 37585 - DNA, 20 bp, Artificial Sequence
  Description of Artificial Sequence: Synthetic oligonucleotide
  Target: LAMA2; (-) strand; PAM type: NNNNGHTT; PAM sequence: AAGAGCTT
aatgggatctaattaaacta

SEQ ID NO: 37586 - DNA, 20 bp, Artificial Sequence
  Description of Artificial Sequence: Synthetic oligonucleotide
  Target: LAMA2; (-) strand; PAM type: NNNNGHTT; PAM sequence: GATGGATT
ttatacaaaaatcaattcaa

SEQ ID NO: 37587 - DNA, 20 bp, Artificial Sequence
  Description of Artificial Sequence: Synthetic oligonucleotide
  Target: LAMA2; (-) strand; PAM type: NNNNGHTT; PAM sequence: CCCTGTTT
caagcaatggggaaaggatt

SEQ ID NO: 37588 - DNA, 20 bp, Artificial Sequence
  Description of Artificial Sequence: Synthetic oligonucleotide
  Target: LAMA2; (-) strand; PAM type: NNNNGHTT; PAM sequence: AAAGGATT
gagaaaaacaagcaatgggg

SEQ ID NO: 37589 - DNA, 20 bp, Artificial Sequence
  Description of Artificial Sequence: Synthetic oligonucleotide
  Target: LAMA2; (-) strand; PAM type: NNNNGHTT; PAM sequence: TACAGATT
ccatactgcccaaggtaatt

SEQ ID NO: 37590 - DNA, 20 bp, Artificial Sequence
  Description of Artificial Sequence: Synthetic oligonucleotide
  Target: LAMA2; (-) strand; PAM type: NNNNGHTT; PAM sequence: AATTGCTT
atgagtgaactcccattcac

SEQ ID NO: 37591 - DNA, 20 bp, Artificial Sequence
  Description of Artificial Sequence: Synthetic oligonucleotide
  Target: LAMA2; (-) strand; PAM type: NNNNGHTT; PAM sequence: ACATGATT
attgtccccgtttgcagacg

SEQ ID NO: 37592 - DNA, 20 bp, Artificial Sequence
  Description of Artificial Sequence: Synthetic oligonucleotide
  Target: LAMA2; (-) strand; PAM type: NNNNGHTT; PAM sequence: CCCCGTTT
aaaagaggaagtcaaattgt

SEQ ID NO: 37593 - DNA, 20 bp, Artificial Sequence
  Description of Artificial Sequence: Synthetic oligonucleotide
  Target: LAMA2; (-) strand; PAM type: NNNNGHTT; PAM sequence: ACATGATT
cagagccaaagacaaaaacc

SEQ ID NO: 37594 - DNA, 20 bp, Artificial Sequence
  Description of Artificial Sequence: Synthetic oligonucleotide
  Target: LAMA2; (-) strand; PAM type: NNNNGHTT; PAM sequence: GTAGGCTT
agcttatccaccatgatcaa

SEQ ID NO: 37595 - DNA, 20 bp, Artificial Sequence
  Description of Artificial Sequence: Synthetic oligonucleotide
  Target: LAMA2; (-) strand; PAM type: NNNNGHTT; PAM sequence: AAAAGCTT
acgaatccagcagcacatca

SEQ ID NO: 37596 - DNA, 20 bp, Artificial Sequence
  Description of Artificial Sequence: Synthetic oligonucleotide
  Target: LAMA2; (-) strand; PAM type: NNNNGHTT; PAM sequence: GATGGATT
ccaaaaagagtccaggacca

SEQ ID NO: 37597 - DNA, 20 bp, Artificial Sequence
  Description of Artificial Sequence: Synthetic oligonucleotide
  Target: LAMA2; (-) strand; PAM type: NNNNGHTT; PAM sequence: AATAGCTT
ctgaaattgtggcaataatc

SEQ ID NO: 37598 - DNA, 20 bp, Artificial Sequence
  Description of Artificial Sequence: Synthetic oligonucleotide
  Target: LAMA2; (-) strand; PAM type: NNNNGHTT; PAM sequence: GCTGGTTT
aaaaattaatgaatccagga

SEQ ID NO: 37599 - DNA, 20 bp, Artificial Sequence
  Description of Artificial Sequence: Synthetic oligonucleotide
  Target: LAMA2; (-) strand; PAM type: NNNNGHTT; PAM sequence: TCAGGATT
cagtgcaatcaaactagaac

SEQ ID NO: 37600 - DNA, 20 bp, Artificial Sequence
  Description of Artificial Sequence: Synthetic oligonucleotide
  Target: LAMA2; (-) strand; PAM type: NNNNGHTT; PAM sequence: CCCAGATT
atgcacccaatacaggagca

SEQ ID NO: 37601 - DNA, 20 bp, Artificial Sequence
  Description of Artificial Sequence: Synthetic oligonucleotide
  Target: LAMA2; (-) strand; PAM type: NNNNGHTT; PAM sequence: GAGAGATT
tttacagacaagcaaatgct

SEQ ID NO: 37602 - DNA, 20 bp, Artificial Sequence
  Description of Artificial Sequence: Synthetic oligonucleotide
  Target: LAMA2; (-) strand; PAM type: NNNNGHTT; PAM sequence: CTAAGCTT
gaatttcatatccagccaaa

SEQ ID NO: 37603 - DNA, 20 bp, Artificial Sequence
  Description of Artificial Sequence: Synthetic oligonucleotide
  Target: LAMA2; (-) strand; PAM type: NNNNGHTT; PAM sequence: GTCAGATT
caactccaagacacataatt

SEQ ID NO: 37604 - DNA, 20 bp, Artificial Sequence
  Description of Artificial Sequence: Synthetic oligonucleotide
  Target: LAMA2; (-) strand; PAM type: NNNNGHTT; PAM sequence: TTCAGATT
tctagcaaggcaggccaacg

SEQ ID NO: 37605 - DNA, 20 bp, Artificial Sequence
  Description of Artificial Sequence: Synthetic oligonucleotide
  Target: LAMA2; (-) strand; PAM type: NNNNGHTT; PAM sequence: GTCTGATT
tgtgaaaagaccaaatctac

SEQ ID NO: 37606 - DNA, 20 bp, Artificial Sequence
  Description of Artificial Sequence: Synthetic oligonucleotide
  Target: LAMA2; (-) strand; PAM type: NNNNGHTT; PAM sequence: GGAAGTTT
gaatgaaatgaagtgagaag

SEQ ID NO: 37607 - DNA, 20 bp, Artificial Sequence
  Description of Artificial Sequence: Synthetic oligonucleotide
  Target: LAMA2; (-) strand; PAM type: NNNNGHTT; PAM sequence: AAGTGCTT
ctagaataaccaatacagag

SEQ ID NO: 37608 - DNA, 20 bp, Artificial Sequence
  Description of Artificial Sequence: Synthetic oligonucleotide
  Target: LAMA2; (-) strand; PAM type: NNNNGHTT; PAM sequence: GAAGGCTT
actttgacgagctgagagaa

SEQ ID NO: 37609 - DNA, 20 bp, Artificial Sequence
  Description of Artificial Sequence: Synthetic oligonucleotide
  Target: LAMA2; (-) strand; PAM type: NNNNGHTT; PAM sequence: GACAGCTT
gcagacttaaatgtccctct

SEQ ID NO: 37610 - DNA, 20 bp, Artificial Sequence
  Description of Artificial Sequence: Synthetic oligonucleotide
  Target: LAMA2; (-) strand; PAM type: NNNNGHTT; PAM sequence: GCTTGATT
ggggcgccgccattgcccag

SEQ ID NO: 37611 - DNA, 20 bp, Artificial Sequence
  Description of Artificial Sequence: Synthetic oligonucleotide
  Target: LAMA2; (-) strand; PAM type: NNNNGHTT; PAM sequence: CCAGGCTT
gggaggggcgccgccattgc

SEQ ID NO: 37612 - DNA, 20 bp, Artificial Sequence
  Description of Artificial Sequence: Synthetic oligonucleotide
  Target: LAMA2; (-) strand; PAM type: NNNNGHTT; PAM sequence: CGCTGATT
gtcctacgcccatggagtct

SEQ ID NO: 37613 - DNA, 20 bp, Artificial Sequence
  Description of Artificial Sequence: Synthetic oligonucleotide
  Target: LAMA2; (-) strand; PAM type: NNNNGHTT; PAM sequence: CCTGGCTT
ccatgagattatatcctgca

SEQ ID NO: 37614 - DNA, 20 bp, Artificial Sequence
  Description of Artificial Sequence: Synthetic oligonucleotide
  Target: LAMA2; (-) strand; PAM type: NNNNGHTT; PAM sequence: ATGAGATT
ggcttaaaaaacggtgaacc

SEQ ID NO: 37615 - DNA, 20 bp, Artificial Sequence
  Description of Artificial Sequence: Synthetic oligonucleotide
  Target: LAMA2; (-) strand; PAM type: NNNNGHTT; PAM sequence: ACGGGCTT
cggaatactgcgcttttccg

SEQ ID NO: 37616 - DNA, 20 bp, Artificial Sequence
  Description of Artificial Sequence: Synthetic oligonucleotide
  Target: LAMA2; (-) strand; PAM type: NNNNGHTT; PAM sequence: CTGCGCTT
gggtcactcccaccggaata

SEQ ID NO: 37617 - DNA, 20 bp, Artificial Sequence
  Description of Artificial Sequence: Synthetic oligonucleotide
  Target: LAMA2; (-) strand; PAM type: NNNNGHTT; PAM sequence: CGGTGATT
agcgtgagcgacgcagaaga

SEQ ID NO: 37618 - DNA, 20 bp, Artificial Sequence
  Description of Artificial Sequence: Synthetic oligonucleotide
  Target: LAMA2; (-) strand; PAM type: NNNNGHTT; PAM sequence: AAAAGATT
tgtaactgtgaaaatctttg

SEQ ID NO: 37619 - DNA, 20 bp, Artificial Sequence
  Description of Artificial Sequence: Synthetic oligonucleotide
  Target: LAMA2; (-) strand; PAM type: NNNNGHTT; PAM sequence: TCTTGATT
atctaattacagtattacaa

SEQ ID NO: 37620 - DNA, 20 bp, Artificial Sequence
  Description of Artificial Sequence: Synthetic oligonucleotide
  Target: LAMA2; (-) strand; PAM type: NNNNGHTT; PAM sequence: CACTGTTT
attaaaaaatgatatactat

SEQ ID NO: 37621 - DNA, 20 bp, Artificial Sequence
  Description of Artificial Sequence: Synthetic oligonucleotide
  Target: LAMA2; (-) strand; PAM type: NNNNGHTT; PAM sequence: AACTGATT
agacacaaagcaaatctgaa

SEQ ID NO: 37622 - DNA, 20 bp, Artificial Sequence
  Description of Artificial Sequence: Synthetic oligonucleotide
  Target: LAMA2; (-) strand; PAM type: NNNNGHTT; PAM sequence: TGAAGTTT
agctgattacataaaatttt

SEQ ID NO: 37623 - DNA, 20 bp, Artificial Sequence
  Description of Artificial Sequence: Synthetic oligonucleotide
  Target: LAMA2; (-) strand; PAM type: NNNNGHTT; PAM sequence: AGCTGATT
aattttacctgaactttgac

SEQ ID NO: 37624 - DNA, 20 bp, Artificial Sequence
  Description of Artificial Sequence: Synthetic oligonucleotide
  Target: LAMA2; (-) strand; PAM type: NNNNGHTT; PAM sequence: CTAGGATT
tcttgggatagatgagagtt

SEQ ID NO: 37625 - DNA, 20 bp, Artificial Sequence
  Description of Artificial Sequence: Synthetic oligonucleotide
  Target: LAMA2; (-) strand; PAM type: NNNNGHTT; PAM sequence: TGTAGTTT
aagagtattggaaaacaaaa

SEQ ID NO: 37626 - DNA, 20 bp, Artificial Sequence
  Description of Artificial Sequence: Synthetic oligonucleotide
  Target: LAMA2; (-) strand; PAM type: NNNNGHTT; PAM sequence: AACAGATT
ctcaataacagagtgcttct

SEQ ID NO: 37627 - DNA, 20 bp, Artificial Sequence
  Description of Artificial Sequence: Synthetic oligonucleotide
  Target: LAMA2; (-) strand; PAM type: NNNNGHTT; PAM sequence: GAGTGCTT
cagactcagactcaataaca

SEQ ID NO: 37628 - DNA, 20 bp, Artificial Sequence
  Description of Artificial Sequence: Synthetic oligonucleotide
  Target: LAMA2; (-) strand; PAM type: NNNNGHTT; PAM sequence: CAAGGCTT
cacataacttcatgtaaatt

SEQ ID NO: 37629 - DNA, 20 bp, Artificial Sequence
  Description of Artificial Sequence: Synthetic oligonucleotide
  Target: LAMA2; (-) strand; PAM type: NNNNGHTT; PAM sequence: CATGGTTT
ctagactacagttcagggag

SEQ ID NO: 37630 - DNA, 20 bp, Artificial Sequence
  Description of Artificial Sequence: Synthetic oligonucleotide
  Target: LAMA2; (-) strand; PAM type: NNNNGHTT; PAM sequence: GAAAGCTT
aactacaaaattgacttcta

SEQ ID NO: 37631 - DNA, 20 bp, Artificial Sequence
  Description of Artificial Sequence: Synthetic oligonucleotide
  Target: LAMA2; (-) strand; PAM type: NNNNGHTT; PAM sequence: AATAGTTT
taaagtttgcaaaggcatta

SEQ ID NO: 37632 - DNA, 20 bp, Artificial Sequence
  Description of Artificial Sequence: Synthetic oligonucleotide
  Target: LAMA2; (-) strand; PAM type: NNNNGHTT; PAM sequence: TAAAGTTT
aataaatctgataattttaa

SEQ ID NO: 37633 - DNA, 20 bp, Artificial Sequence
  Description of Artificial Sequence: Synthetic oligonucleotide
  Target: LAMA2; (-) strand; PAM type: NNNNGHTT; PAM sequence: AATAGATT
atattagtaagttcgtttct

SEQ ID NO: 37634 - DNA, 20 bp, Artificial Sequence
  Description of Artificial Sequence: Synthetic oligonucleotide
  Target: LAMA2; (-) strand; PAM type: NNNNGHTT; PAM sequence: GTTCGTTT
atattgtttgatattagtaa

SEQ ID NO: 37635 - DNA, 20 bp, Artificial Sequence
  Description of Artificial Sequence: Synthetic oligonucleotide
  Target: LAMA2; (-) strand; PAM type: NNNNGHTT; PAM sequence: TATTGTTT
acatactctggtaaaataaa

SEQ ID NO: 37636 - DNA, 20 bp, Artificial Sequence
  Description of Artificial Sequence: Synthetic oligonucleotide
  Target: LAMA2; (-) strand; PAM type: NNNNGHTT; PAM sequence: AAGTGATT
aactaaggcatggagaaatt

SEQ ID NO: 37637 - DNA, 20 bp, Artificial Sequence
  Description of Artificial Sequence: Synthetic oligonucleotide
  Target: LAMA2; (-) strand; PAM type: NNNNGHTT; PAM sequence: TCCTGTTT
gagatagacactattatttt

SEQ ID NO: 37638 - DNA, 20 bp, Artificial Sequence
  Description of Artificial Sequence: Synthetic oligonucleotide
  Target: LAMA2; (-) strand; PAM type: NNNNGHTT; PAM sequence: GACTGTTT
aatgctagttaatttttaca

SEQ ID NO: 37639 - DNA, 20 bp, Artificial Sequence
  Description of Artificial Sequence: Synthetic oligonucleotide
  Target: LAMA2; (-) strand; PAM type: NNNNGHTT; PAM sequence: TTTGGTTT
acgagtaagaacatgcggtg

SEQ ID NO: 37640 - DNA, 20 bp, Artificial Sequence
  Description of Artificial Sequence: Synthetic oligonucleotide
  Target: LAMA2; (-) strand; PAM type: NNNNGHTT; PAM sequence: CGGTGTTT
cacttacgagtaagaacatg

SEQ ID NO: 37641 - DNA, 20 bp, Artificial Sequence
  Description of Artificial Sequence: Synthetic oligonucleotide
  Target: LAMA2; (-) strand; PAM type: NNNNGHTT; PAM sequence: GGTGGTTT
cataggtatgcacgtgccat

SEQ ID NO: 37642 - DNA, 20 bp, Artificial Sequence
  Description of Artificial Sequence: Synthetic oligonucleotide
  Target: LAMA2; (-) strand; PAM type: NNNNGHTT; PAM sequence: CCAGGTTT
ggaatacatgtgcagaacat

SEQ ID NO: 37643 - DNA, 20 bp, Artificial Sequence
  Description of Artificial Sequence: Synthetic oligonucleotide
  Target: LAMA2; (-) strand; PAM type: NNNNGHTT; PAM sequence: ACATGTTT
ttatcaaagaactaccacaa

SEQ ID NO: 37644 - DNA, 20 bp, Artificial Sequence
  Description of Artificial Sequence: Synthetic oligonucleotide
  Target: LAMA2; (-) strand; PAM type: NNNNGHTT; PAM sequence: AAGAGATT
tataaacaccacaggaagta

SEQ ID NO: 37645 - DNA, 20 bp, Artificial Sequence
  Description of Artificial Sequence: Synthetic oligonucleotide
  Target: LAMA2; (-) strand; PAM type: NNNNGHTT; PAM sequence: ATAGGCTT
ctgtacccaaaagtaaactt

SEQ ID NO: 37646 - DNA, 20 bp, Artificial Sequence
  Description of Artificial Sequence: Synthetic oligonucleotide
  Target: LAMA2; (-) strand; PAM type: NNNNGHTT; PAM sequence: TTAAGATT
tgtatcaaatgccacaaaaa

SEQ ID NO: 37647 - DNA, 20 bp, Artificial Sequence
  Description of Artificial Sequence: Synthetic oligonucleotide
  Target: LAMA2; (-) strand; PAM type: NNNNGHTT; PAM sequence: TAAGGCTT
ttatcaaagcagaaattatc

SEQ ID NO: 37648 - DNA, 20 bp, Artificial Sequence
  Description of Artificial Sequence: Synthetic oligonucleotide
  Target: LAMA2; (-) strand; PAM type: NNNNGHTT; PAM sequence: TTGTGATT
aactaaatatttaccatagt

SEQ ID NO: 37649 - DNA, 20 bp, Artificial Sequence
  Description of Artificial Sequence: Synthetic oligonucleotide
  Target: LAMA2; (-) strand; PAM type: NNNNGHTT; PAM sequence: CATAGTTT
gtatataactaaatatttac

SEQ ID NO: 37650 - DNA, 20 bp, Artificial Sequence
  Description of Artificial Sequence: Synthetic oligonucleotide
  Target: LAMA2; (-) strand; PAM type: NNNNGHTT; PAM sequence: TTATGCTT
catgatttaaattattatgt

SEQ ID NO: 37651 - DNA, 20 bp, Artificial Sequence
  Description of Artificial Sequence: Synthetic oligonucleotide
  Target: LAMA2; (-) strand; PAM type: NNNNGHTT; PAM sequence: TTATGTTT
taaaaacatgatttaaatta

SEQ ID NO: 37652 - DNA, 20 bp, Artificial Sequence
  Description of Artificial Sequence: Synthetic oligonucleotide
  Target: LAMA2; (-) strand; PAM type: NNNNGHTT; PAM sequence: ACATGATT
ttgataaaaatataataaaa

SEQ ID NO: 37653 - DNA, 20 bp, Artificial Sequence
  Description of Artificial Sequence: Synthetic oligonucleotide
  Target: LAMA2; (-) strand; PAM type: NNNNGHTT; PAM sequence: CTTTGATT
aacacaatgtttattcatgt

SEQ ID NO: 37654 - DNA, 20 bp, Artificial Sequence
  Description of Artificial Sequence: Synthetic oligonucleotide
  Target: LAMA2; (-) strand; PAM type: NNNNGHTT; PAM sequence: CAATGTTT
acatacagaaatacaaaaca

SEQ ID NO: 37655 - DNA, 20 bp, Artificial Sequence
  Description of Artificial Sequence: Synthetic oligonucleotide
  Target: LAMA2; (-) strand; PAM type: NNNNGHTT; PAM sequence: AAAAGTTT
agcaatagatgaggggaatg

SEQ ID NO: 37656 - DNA, 20 bp, Artificial Sequence
  Description of Artificial Sequence: Synthetic oligonucleotide
  Target: LAMA2; (-) strand; PAM type: NNNNGHTT; PAM sequence: AACAGTTT
aaagacatattacttaaaat

SEQ ID NO: 37657 - DNA, 20 bp, Artificial Sequence
  Description of Artificial Sequence: Synthetic oligonucleotide
  Target: LAMA2; (-) strand; PAM type: NNNNGHTT; PAM sequence: CTATGATT
agggtttaattaaaagcttt

SEQ ID NO: 37658 - DNA, 20 bp, Artificial Sequence
  Description of Artificial Sequence: Synthetic oligonucleotide
  Target: LAMA2; (-) strand; PAM type: NNNNGHTT; PAM sequence: AAAAGCTT
aaagagtagagggtttaatt

SEQ ID NO: 37659 - DNA, 20 bp, Artificial Sequence
  Description of Artificial Sequence: Synthetic oligonucleotide
  Target: LAMA2; (-) strand; PAM type: NNNNGHTT; PAM sequence: GAGGGTTT
aaagttaaaaccaaagagta

SEQ ID NO: 37660 - DNA, 20 bp, Artificial Sequence
  Description of Artificial Sequence: Synthetic oligonucleotide
  Target: LAMA2; (-) strand; PAM type: NNNNGHTT; PAM sequence: AATAGATT
aaatgctattttgacacaaa

SEQ ID NO: 37661 - DNA, 20 bp, Artificial Sequence
  Description of Artificial Sequence: Synthetic oligonucleotide
  Target: LAMA2; (-) strand; PAM type: NNNNGHTT; PAM sequence: TAAAGTTT
caagtacataatttagttgt

SEQ ID NO: 37662 - DNA, 20 bp, Artificial Sequence
  Description of Artificial Sequence: Synthetic oligonucleotide
  Target: LAMA2; (-) strand; PAM type: NNNNGHTT; PAM sequence: ACCAGTTT
tcacagctcacacctccaaa

SEQ ID NO: 37663 - DNA, 20 bp, Artificial Sequence
  Description of Artificial Sequence: Synthetic oligonucleotide
  Target: LAMA2; (-) strand; PAM type: NNNNGHTT; PAM sequence: ACAGGCTT
ctccctaacccactgcagtt

SEQ ID NO: 37664 - DNA, 20 bp, Artificial Sequence
  Description of Artificial Sequence: Synthetic oligonucleotide
  Target: LAMA2; (-) strand; PAM type: NNNNGHTT; PAM sequence: AATTGCTT
atacttccagaagtcattaa

SEQ ID NO: 37665 - DNA, 20 bp, Artificial Sequence
  Description of Artificial Sequence: Synthetic oligonucleotide
  Target: LAMA2; (-) strand; PAM type: NNNNGHTT; PAM sequence: AATAGATT
tggtgggtcaccacacgtag

SEQ ID NO: 37666 - DNA, 20 bp, Artificial Sequence
  Description of Artificial Sequence: Synthetic oligonucleotide
  Target: LAMA2; (-) strand; PAM type: NNNNGHTT; PAM sequence: GTAGGCTT
ggtttatcctccgtgcattt

SEQ ID NO: 37667 - DNA, 20 bp, Artificial Sequence
  Description of Artificial Sequence: Synthetic oligonucleotide
  Target: LAMA2; (-) strand; PAM type: NNNNGHTT; PAM sequence: CGTGGTTT
taaaataacaagcctttaaa

SEQ ID NO: 37668 - DNA, 20 bp, Artificial Sequence
  Description of Artificial Sequence: Synthetic oligonucleotide
  Target: LAMA2; (-) strand; PAM type: NNNNGHTT; PAM sequence: AAGTGTTT
ctagttgggcaatggggtga

SEQ ID NO: 37669 - DNA, 20 bp, Artificial Sequence
  Description of Artificial Sequence: Synthetic oligonucleotide
  Target: LAMA2; (-) strand; PAM type: NNNNGHTT; PAM sequence: TTTAGTTT
aaaggtagatttgaatgcac

SEQ ID NO: 37670 - DNA, 20 bp, Artificial Sequence
  Description of Artificial Sequence: Synthetic oligonucleotide
  Target: LAMA2; (-) strand; PAM type: NNNNGHTT; PAM sequence: GGTAGATT
attactgaattagatgcaaa

SEQ ID NO: 37671 - DNA, 20 bp, Artificial Sequence
  Description of Artificial Sequence: Synthetic oligonucleotide
  Target: LAMA2; (-) strand; PAM type: NNNNGHTT; PAM sequence: AGAAGATT
cttatctgggttcaaacttt

SEQ ID NO: 37672 - DNA, 20 bp, Artificial Sequence
  Description of Artificial Sequence: Synthetic oligonucleotide
  Target: LAMA2; (-) strand; PAM type: NNNNGHTT; PAM sequence: TAAGGCTT
tttgaatataatgagtattt

SEQ ID NO: 37673 - DNA, 20 bp, Artificial Sequence
  Description of Artificial Sequence: Synthetic oligonucleotide
  Target: LAMA2; (-) strand; PAM type: NNNNGHTT; PAM sequence: TAGGGCTT
gagcctttaattaattccat

SEQ ID NO: 37674 - DNA, 20 bp, Artificial Sequence
  Description of Artificial Sequence: Synthetic oligonucleotide
  Target: LAMA2; (-) strand; PAM type: NNNNGHTT; PAM sequence: ACATGATT
taatgcatcccttggtgtta

SEQ ID NO: 37675 - DNA, 20 bp, Artificial Sequence
  Description of Artificial Sequence: Synthetic oligonucleotide
  Target: LAMA2; (-) strand; PAM type: NNNNGHTT; PAM sequence: TAATGTTT
gtgcatgcctgtatgcttca

SEQ ID NO: 37676 - DNA, 20 bp, Artificial Sequence
  Description of Artificial Sequence: Synthetic oligonucleotide
  Target: LAMA2; (-) strand; PAM type: NNNNGHTT; PAM sequence: GTATGCTT
tttttcacttgtgcatgcct

SEQ ID NO: 37677 - DNA, 20 bp, Artificial Sequence
  Description of Artificial Sequence: Synthetic oligonucleotide
  Target: LAMA2; (-) strand; PAM type: NNNNGHTT; PAM sequence: TATGGCTT
ctaatatttactacttatat

SEQ ID NO: 37678 - DNA, 20 bp, Artificial Sequence
  Description of Artificial Sequence: Synthetic oligonucleotide
  Target: LAMA2; (-) strand; PAM type: NNNNGHTT; PAM sequence: TTTAGCTT
atgtaactattattattata

SEQ ID NO: 37679 - DNA, 20 bp, Artificial Sequence
  Description of Artificial Sequence: Synthetic oligonucleotide
  Target: LAMA2; (-) strand; PAM type: NNNNGHTT; PAM sequence: AGGAGTTT
tttctgcttactgtgtccac

SEQ ID NO: 37680 - DNA, 20 bp, Artificial Sequence
  Description of Artificial Sequence: Synthetic oligonucleotide
  Target: LAMA2; (-) strand; PAM type: NNNNGHTT; PAM sequence: TTCTGCTT
tactatgggcttgtggactt

SEQ ID NO: 37681 - DNA, 20 bp, Artificial Sequence
  Description of Artificial Sequence: Synthetic oligonucleotide
  Target: LAMA2; (-) strand; PAM type: NNNNGHTT; PAM sequence: ATGGGCTT
ggacatggcaactttttact

SEQ ID NO: 37682 - DNA, 20 bp, Artificial Sequence
  Description of Artificial Sequence: Synthetic oligonucleotide
  Target: LAMA2; (-) strand; PAM type: NNNNGHTT; PAM sequence: AATAGATT
ataatattggaatgaaatgt

SEQ ID NO: 37683 - DNA, 20 bp, Artificial Sequence
  Description of Artificial Sequence: Synthetic oligonucleotide
  Target: LAMA2; (-) strand; PAM type: NNNNGHTT; PAM sequence: GCAGGATT
agaagatgcactaagagcct

SEQ ID NO: 37684 - DNA, 20 bp, Artificial Sequence
  Description of Artificial Sequence: Synthetic oligonucleotide
  Target: LAMA2; (-) strand; PAM type: NNNNGHTT; PAM sequence: ACATGTTT
gagaataaagcacacacaag

SEQ ID NO: 37685 - DNA, 20 bp, Artificial Sequence
  Description of Artificial Sequence: Synthetic oligonucleotide
  Target: LAMA2; (-) strand; PAM type: NNNNGHTT; PAM sequence: TGGAGTTT
gtaaaggttagagatttctg

SEQ ID NO: 37686 - DNA, 20 bp, Artificial Sequence
  Description of Artificial Sequence: Synthetic oligonucleotide
  Target: LAMA2; (-) strand; PAM type: NNNNGHTT; PAM sequence: TAGAGATT
tttgagcaagtggtaaaggt

SEQ ID NO: 37687 - DNA, 20 bp, Artificial Sequence
  Description of Artificial Sequence: Synthetic oligonucleotide
  Target: LAMA2; (-) strand; PAM type: NNNNGHTT; PAM sequence: CTTAGTTT
ggtttcttttccattttaag

SEQ ID NO: 37688 - DNA, 20 bp, Artificial Sequence
  Description of Artificial Sequence: Synthetic oligonucleotide
  Target: LAMA2; (-) strand; PAM type: NNNNGHTT; PAM sequence: TTAAGCTT
caggaggtttcttttccatt

SEQ ID NO: 37689 - DNA, 20 bp, Artificial Sequence
  Description of Artificial Sequence: Synthetic oligonucleotide
  Target: LAMA2; (-) strand; PAM type: NNNNGHTT; PAM sequence: GGAGGTTT
ttatatattctagaaactca

SEQ ID NO: 37690 - DNA, 20 bp, Artificial Sequence
  Description of Artificial Sequence: Synthetic oligonucleotide
  Target: LAMA2; (-) strand; PAM type: NNNNGHTT; PAM sequence: GTTTGATT
agcacttgtttttcttccct

SEQ ID NO: 37691 - DNA, 20 bp, Artificial Sequence
  Description of Artificial Sequence: Synthetic oligonucleotide
  Target: LAMA2; (-) strand; PAM type: NNNNGHTT; PAM sequence: CCCTGTTT
gaaaagcacttgtttttctt

SEQ ID NO: 37692 - DNA, 20 bp, Artificial Sequence
  Description of Artificial Sequence: Synthetic oligonucleotide
  Target: LAMA2; (-) strand; PAM type: NNNNGHTT; PAM sequence: ACTTGTTT
agtggtaggtgtagaaaagc

SEQ ID NO: 37693 - DNA, 20 bp, Artificial Sequence
  Description of Artificial Sequence: Synthetic oligonucleotide
  Target: LAMA2; (-) strand; PAM type: NNNNGHTT; PAM sequence: ACTCGCTT
atatttaccaaagaaaatta

SEQ ID NO: 37694 - DNA, 20 bp, Artificial Sequence
  Description of Artificial Sequence: Synthetic oligonucleotide
  Target: LAMA2; (-) strand; PAM type: NNNNGHTT; PAM sequence: AGGGGCTT
agcaggcagtaagtagctca

SEQ ID NO: 37695 - DNA, 20 bp, Artificial Sequence
  Description of Artificial Sequence: Synthetic oligonucleotide
  Target: LAMA2; (-) strand; PAM type: NNNNGHTT; PAM sequence: TTAGGATT
cacaggaggcatctttctta

SEQ ID NO: 37696 - DNA, 20 bp, Artificial Sequence
  Description of Artificial Sequence: Synthetic oligonucleotide
  Target: LAMA2; (-) strand; PAM type: NNNNGHTT; PAM sequence: TAGAGCTT
ttgcattttaattgtctgtg

SEQ ID NO: 37697 - DNA, 20 bp, Artificial Sequence
  Description of Artificial Sequence: Synthetic oligonucleotide
  Target: LAMA2; (-) strand; PAM type: NNNNGHTT; PAM sequence: TGCTGTTT
ctcttttatgatttcttaat

SEQ ID NO: 37698 - DNA, 20 bp, Artificial Sequence
  Description of Artificial Sequence: Synthetic oligonucleotide
  Target: LAMA2; (-) strand; PAM type: NNNNGHTT; PAM sequence: TTATGATT
tacttaattttcattctctt

SEQ ID NO: 37699 - DNA, 20 bp, Artificial Sequence
  Description of Artificial Sequence: Synthetic oligonucleotide
  Target: LAMA2; (-) strand; PAM type: NNNNGHTT; PAM sequence: TACAGTTT
caatttagtttataagaact

SEQ ID NO: 37700 - DNA, 20 bp, Artificial Sequence
  Description of Artificial Sequence: Synthetic oligonucleotide
  Target: LAMA2; (-) strand; PAM type: NNNNGHTT; PAM sequence: TTTAGTTT
agtttttaatcctgaaacaa

SEQ ID NO: 37701 - DNA, 20 bp, Artificial Sequence
  Description of Artificial Sequence: Synthetic oligonucleotide
  Target: LAMA2; (-) strand; PAM type: NNNNGHTT; PAM sequence: GCAAGTTT
ttttatgaaacttgctttct

SEQ ID NO: 37702 - DNA, 20 bp, Artificial Sequence
  Description of Artificial Sequence: Synthetic oligonucleotide
  Target: LAMA2; (-) strand; PAM type: NNNNGHTT; PAM sequence: ACTTGCTT
ttatgtagatgttttatgaa

SEQ ID NO: 37703 - DNA, 20 bp, Artificial Sequence
  Description of Artificial Sequence: Synthetic oligonucleotide
  Target: LAMA2; (-) strand; PAM type: NNNNGHTT; PAM sequence: AGATGTTT
tgtgatttttataattatgt

SEQ ID NO: 37704 - DNA, 20 bp, Artificial Sequence
  Description of Artificial Sequence: Synthetic oligonucleotide
  Target: LAMA2; (-) strand; PAM type: NNNNGHTT; PAM sequence: TTGTGATT
tcatgttatatgcatataat

SEQ ID NO: 37705 - DNA, 20 bp, Artificial Sequence
  Description of Artificial Sequence: Synthetic oligonucleotide
  Target: LAMA2; (-) strand; PAM type: NNNNGHTT; PAM sequence: TCATGTTT
gttgacatatctatgtcaaa

SEQ ID NO: 37706 - DNA, 20 bp, Artificial Sequence
  Description of Artificial Sequence: Synthetic oligonucleotide
  Target: LAMA2; (-) strand; PAM type: NNNNGHTT; PAM sequence: TGCTGTTT
ttaagcagcattttgatcca

SEQ ID NO: 37707 - DNA, 20 bp, Artificial Sequence
  Description of Artificial Sequence: Synthetic oligonucleotide
  Target: LAMA2; (-) strand; PAM type: NNNNGHTT; PAM sequence: TTTTGCTT
attttagtctttcaataaaa

SEQ ID NO: 37708 - DNA, 20 bp, Artificial Sequence
  Description of Artificial Sequence: Synthetic oligonucleotide
  Target: LAMA2; (-) strand; PAM type: NNNNGHTT; PAM sequence: ATGTGATT
ttatatacacattatttcat

SEQ ID NO: 37709 - DNA, 20 bp, Artificial Sequence
  Description of Artificial Sequence: Synthetic oligonucleotide
  Target: LAMA2; (-) strand; PAM type: NNNNGHTT; PAM sequence: AAATGTTT
gtataagagaataaaggtac

SEQ ID NO: 37710 - DNA, 20 bp, Artificial Sequence
  Description of Artificial Sequence: Synthetic oligonucleotide
  Target: LAMA2; (-) strand; PAM type: NNNNGHTT; PAM sequence: CTATGTTT
aatgtttataaatctatttg

SEQ ID NO: 37711 - DNA, 20 bp, Artificial Sequence
  Description of Artificial Sequence: Synthetic oligonucleotide
  Target: LAMA2; (-) strand; PAM type: NNNNGHTT; PAM sequence: AAATGTTT
tccctttctttcttgaatct

SEQ ID NO: 37712 - DNA, 20 bp, Artificial Sequence
  Description of Artificial Sequence: Synthetic oligonucleotide
  Target: LAMA2; (-) strand; PAM type: NNNNGHTT; PAM sequence: CTTAGATT
gagcttttgcttatgcttaa

SEQ ID NO: 37713 - DNA, 20 bp, Artificial Sequence
  Description of Artificial Sequence: Synthetic oligonucleotide
  Target: LAMA2; (-) strand; PAM type: NNNNGHTT; PAM sequence: TTATGCTT
agtttagcttgagcttttgc

SEQ ID NO: 37714 - DNA, 20 bp, Artificial Sequence
  Description of Artificial Sequence: Synthetic oligonucleotide
  Target: LAMA2; (-) strand; PAM type: NNNNGHTT; PAM sequence: TTTTGCTT
ttgctcagtttagcttgagc

SEQ ID NO: 37715 - DNA, 20 bp, Artificial Sequence
  Description of Artificial Sequence: Synthetic oligonucleotide
  Target: LAMA2; (-) strand; PAM type: NNNNGHTT; PAM sequence: TTGAGCTT
ccccagttgctcagtttagc

SEQ ID NO: 37716 - DNA, 20 bp, Artificial Sequence
  Description of Artificial Sequence: Synthetic oligonucleotide
  Target: LAMA2; (-) strand; PAM type: NNNNGHTT; PAM sequence: TTTAGCTT
ccatgaccccagttgctcag

SEQ ID NO: 37717 - DNA, 20 bp, Artificial Sequence
  Description of Artificial Sequence: Synthetic oligonucleotide
  Target: LAMA2; (-) strand; PAM type: NNNNGHTT; PAM sequence: CTCAGTTT
ccaccccatgaccccagttg

SEQ ID NO: 37718 - DNA, 20 bp, Artificial Sequence
  Description of Artificial Sequence: Synthetic oligonucleotide
  Target: LAMA2; (-) strand; PAM type: NNNNGHTT; PAM sequence: CCCTGCTT
tctgaaagcatttctagtgt

SEQ ID NO: 37719 - DNA, 20 bp, Artificial Sequence
  Description of Artificial Sequence: Synthetic oligonucleotide
  Target: LAMA2; (-) strand; PAM type: NNNNGHTT; PAM sequence: GTAGGCTT
aaaattttctagctgcctct

SEQ ID NO: 37720 - DNA, 20 bp, Artificial Sequence
  Description of Artificial Sequence: Synthetic oligonucleotide
  Target: LAMA2; (-) strand; PAM type: NNNNGHTT; PAM sequence: TGGGGATT
tcccacgtggcacacaggtt

SEQ ID NO: 37721 - DNA, 20 bp, Artificial Sequence
  Description of Artificial Sequence: Synthetic oligonucleotide
  Target: LAMA2; (-) strand; PAM type: NNNNGHTT; PAM sequence: ACAGGTTT
atcccattcccacgtggcac

SEQ ID NO: 37722 - DNA, 20 bp, Artificial Sequence
  Description of Artificial Sequence: Synthetic oligonucleotide
  Target: LAMA2; (-) strand; PAM type: NNNNGHTT; PAM sequence: ACTTGCTT
attttccttttgtgtacttt

SEQ ID NO: 37723 - DNA, 20 bp, Artificial Sequence
  Description of Artificial Sequence: Synthetic oligonucleotide
  Target: LAMA2; (-) strand; PAM type: NNNNGHTT; PAM sequence: ACTGGTTT
atatcctcatttttgtggct

SEQ ID NO: 37724 - DNA, 20 bp, Artificial Sequence
  Description of Artificial Sequence: Synthetic oligonucleotide
  Target: LAMA2; (-) strand; PAM type: NNNNGHTT; PAM sequence: CACAGATT
ttatgtgataagaatatgat

SEQ ID NO: 37725 - DNA, 20 bp, Artificial Sequence
  Description of Artificial Sequence: Synthetic oligonucleotide
  Target: LAMA2; (-) strand; PAM type: NNNNGHTT; PAM sequence: TTATGATT
tgtacattttaaacatattt

SEQ ID NO: 37726 - DNA, 20 bp, Artificial Sequence
  Description of Artificial Sequence: Synthetic oligonucleotide
  Target: LAMA2; (-) strand; PAM type: NNNNGHTT; PAM sequence: TCATGCTT
tttattcttcaatcttctaa

SEQ ID NO: 37727 - DNA, 20 bp, Artificial Sequence
  Description of Artificial Sequence: Synthetic oligonucleotide
  Target: LAMA2; (-) strand; PAM type: NNNNGHTT; PAM sequence: CTTTGTTT
attacttttttctattcctt

SEQ ID NO: 37728 - DNA, 20 bp, Artificial Sequence
  Description of Artificial Sequence: Synthetic oligonucleotide
  Target: LAMA2; (-) strand; PAM type: NNNNGHTT; PAM sequence: ACATGTTT
catttctggaagtaaattat

SEQ ID NO: 37729 - DNA, 20 bp, Artificial Sequence
  Description of Artificial Sequence: Synthetic oligonucleotide
  Target: LAMA2; (-) strand; PAM type: NNNNGHTT; PAM sequence: TCTTGTTT
ctatcctgcagtttctcatc

SEQ ID NO: 37730 - DNA, 20 bp, Artificial Sequence
  Description of Artificial Sequence: Synthetic oligonucleotide
  Target: LAMA2; (-) strand; PAM type: NNNNGHTT; PAM sequence: TGCAGTTT
atatttctgattttctatcc

SEQ ID NO: 37731 - DNA, 20 bp, Artificial Sequence
  Description of Artificial Sequence: Synthetic oligonucleotide
  Target: LAMA2; (-) strand; PAM type: NNNNGHTT; PAM sequence: TTCTGATT
taattttttcaggcctatat

SEQ ID NO: 37732 - DNA, 20 bp, Artificial Sequence
  Description of Artificial Sequence: Synthetic oligonucleotide
  Target: LAMA2; (-) strand; PAM type: NNNNGHTT; PAM sequence: TATTGTTT
tccttcattatttttttgaa

SEQ ID NO: 37733 - DNA, 20 bp, Artificial Sequence
  Description of Artificial Sequence: Synthetic oligonucleotide
  Target: LAMA2; (-) strand; PAM type: NNNNGHTT; PAM sequence: AATAGTTT
tcctcaaactgaggatttat

SEQ ID NO: 37734 - DNA, 20 bp, Artificial Sequence
  Description of Artificial Sequence: Synthetic oligonucleotide
  Target: LAMA2; (-) strand; PAM type: NNNNGHTT; PAM sequence: TGAGGATT
attttttatcatcctcaaac

SEQ ID NO: 37735 - DNA, 20 bp, Artificial Sequence
  Description of Artificial Sequence: Synthetic oligonucleotide
  Target: LAMA2; (-) strand; PAM type: NNNNGHTT; PAM sequence: ACAGGTTT
tctctttgtcttgctggttg

SEQ ID NO: 37736 - DNA, 20 bp, Artificial Sequence
  Description of Artificial Sequence: Synthetic oligonucleotide
  Target: LAMA2; (-) strand; PAM type: NNNNGHTT; PAM sequence: CCCAGTTT
tcacaataaagatatttgcc

SEQ ID NO: 37737 - DNA, 20 bp, Artificial Sequence
  Description of Artificial Sequence: Synthetic oligonucleotide
  Target: LAMA2; (-) strand; PAM type: NNNNGHTT; PAM sequence: GATTGATT
aaatactactgctttttata

SEQ ID NO: 37738 - DNA, 20 bp, Artificial Sequence
  Description of Artificial Sequence: Synthetic oligonucleotide
  Target: LAMA2; (-) strand; PAM type: NNNNGHTT; PAM sequence: TATAGATT
atagaaatactactgctttt

SEQ ID NO: 37739 - DNA, 20 bp, Artificial Sequence
  Description of Artificial Sequence: Synthetic oligonucleotide
  Target: LAMA2; (-) strand; PAM type: NNNNGHTT; PAM sequence: TACTGCTT
tcactgacatatagaaatac

SEQ ID NO: 37740 - DNA, 20 bp, Artificial Sequence
  Description of Artificial Sequence: Synthetic oligonucleotide
  Target: LAMA2; (-) strand; PAM type: NNNNGHTT; PAM sequence: ATTTGCTT
gtatttttattacatttttt

SEQ ID NO: 37741 - DNA, 20 bp, Artificial Sequence
  Description of Artificial Sequence: Synthetic oligonucleotide
  Target: LAMA2; (-) strand; PAM type: NNNNGHTT; PAM sequence: TGAAGTTT
acacttatttttaggtatca

SEQ ID NO: 37742 - DNA, 20 bp, Artificial Sequence
  Description of Artificial Sequence: Synthetic oligonucleotide
  Target: LAMA2; (-) strand; PAM type: NNNNGHTT; PAM sequence: CACAGATT
atggtaaacatttcaaattt

SEQ ID NO: 37743 - DNA, 20 bp, Artificial Sequence
  Description of Artificial Sequence: Synthetic oligonucleotide
  Target: LAMA2; (-) strand; PAM type: NNNNGHTT; PAM sequence: CAGGGTTT
gatgtggaattgctggttga

SEQ ID NO: 37744 - DNA, 20 bp, Artificial Sequence
  Description of Artificial Sequence: Synthetic oligonucleotide
  Target: LAMA2; (-) strand; PAM type: NNNNGHTT; PAM sequence: AAATGTTT
ttgtaagagttttttggggt

SEQ ID NO: 37745 - DNA, 20 bp, Artificial Sequence
  Description of Artificial Sequence: Synthetic oligonucleotide
  Target: LAMA2; (-) strand; PAM type: NNNNGHTT; PAM sequence: AAGAGTTT
ggtttttctctatacattgt

SEQ ID NO: 37746 - DNA, 20 bp, Artificial Sequence
  Description of Artificial Sequence: Synthetic oligonucleotide
  Target: LAMA2; (-) strand; PAM type: NNNNGHTT; PAM sequence: GATGGTTT
tttacgttgagcacatttta

SEQ ID NO: 37747 - DNA, 20 bp, Artificial Sequence
  Description of Artificial Sequence: Synthetic oligonucleotide
  Target: LAMA2; (-) strand; PAM type: NNNNGHTT; PAM sequence: ATCAGATT
ccactttaactgtttctttt

SEQ ID NO: 37748 - DNA, 20 bp, Artificial Sequence
  Description of Artificial Sequence: Synthetic oligonucleotide
  Target: LAMA2; (-) strand; PAM type: NNNNGHTT; PAM sequence: AACTGTTT
agatctatttcaaccacttt

SEQ ID NO: 37749 - DNA, 20 bp, Artificial Sequence
  Description of Artificial Sequence: Synthetic oligonucleotide
  Target: LAMA2; (-) strand; PAM type: NNNNGHTT; PAM sequence: CATGGTTT
ctgaagtttctgaaatttat

SEQ ID NO: 37750 - DNA, 20 bp, Artificial Sequence
  Description of Artificial Sequence: Synthetic oligonucleotide
  Target: LAMA2; (-) strand; PAM type: NNNNGHTT; PAM sequence: TGAAGTTT
atgacattgttttttccacc

SEQ ID NO: 37751 - DNA, 20 bp, Artificial Sequence
  Description of Artificial Sequence: Synthetic oligonucleotide
  Target: LAMA2; (-) strand; PAM type: NNNNGHTT; PAM sequence: CATTGTTT
tataaataataccataatga

SEQ ID NO: 37752 - DNA, 20 bp, Artificial Sequence
  Description of Artificial Sequence: Synthetic oligonucleotide
  Target: LAMA2; (-) strand; PAM type: NNNNGHTT; PAM sequence: TTATGTTT
acaaacaatgtagcattgtt

SEQ ID NO: 37753 - DNA, 20 bp, Artificial Sequence
  Description of Artificial Sequence: Synthetic oligonucleotide
  Target: LAMA2; (-) strand; PAM type: NNNNGHTT; PAM sequence: CATTGTTT
tgtattcacaaacaatgtag

SEQ ID NO: 37754 - DNA, 20 bp, Artificial Sequence
  Description of Artificial Sequence: Synthetic oligonucleotide
  Target: LAMA2; (-) strand; PAM type: NNNNGHTT; PAM sequence: TCCTGTTT
cacttctgttttattccctt

SEQ ID NO: 37755 - DNA, 20 bp, Artificial Sequence
  Description of Artificial Sequence: Synthetic oligonucleotide
  Target: LAMA2; (-) strand; PAM type: NNNNGHTT; PAM sequence: TTCTGTTT
acaaatgaatctcatttcac

SEQ ID NO: 37756 - DNA, 20 bp, Artificial Sequence
  Description of Artificial Sequence: Synthetic oligonucleotide
  Target: LAMA2; (-) strand; PAM type: NNNNGHTT; PAM sequence: CACTGCTT
atttgagtgtcttgagctag

SEQ ID NO: 37757 - DNA, 20 bp, Artificial Sequence
  Description of Artificial Sequence: Synthetic oligonucleotide
  Target: LAMA2; (-) strand; PAM type: NNNNGHTT; PAM sequence: CTGAGATT
gtcaatgacttgtcatatat

SEQ ID NO: 37758 - DNA, 20 bp, Artificial Sequence
  Description of Artificial Sequence: Synthetic oligonucleotide
  Target: LAMA2; (-) strand; PAM type: NNNNGHTT; PAM sequence: AACTGATT
tgtgtgagattctacatacc

SEQ ID NO: 37759 - DNA, 20 bp, Artificial Sequence
  Description of Artificial Sequence: Synthetic oligonucleotide
  Target: LAMA2; (-) strand; PAM type: NNNNGHTT; PAM sequence: GTGAGATT
aatgtcaatttatattatgt

SEQ ID NO: 37760 - DNA, 20 bp, Artificial Sequence
  Description of Artificial Sequence: Synthetic oligonucleotide
  Target: LAMA2; (-) strand; PAM type: NNNNGHTT; PAM sequence: CTTTGATT
aaacaagatgaaaatacaga

SEQ ID NO: 37761 - DNA, 20 bp, Artificial Sequence
  Description of Artificial Sequence: Synthetic oligonucleotide
  Target: LAMA2; (-) strand; PAM type: NNNNGHTT; PAM sequence: GGCAGCTT
atatgacttgaggatgcagg

SEQ ID NO: 37762 - DNA, 20 bp, Artificial Sequence
  Description of Artificial Sequence: Synthetic oligonucleotide
  Target: LAMA2; (-) strand; PAM type: NNNNGHTT; PAM sequence: AAGTGATT
agaaaagaaaaaggtttgaa

SEQ ID NO: 37763 - DNA, 20 bp, Artificial Sequence
  Description of Artificial Sequence: Synthetic oligonucleotide
  Target: LAMA2; (-) strand; PAM type: NNNNGHTT; PAM sequence: AAAGGTTT
gagatcataaaagaaaagaa

SEQ ID NO: 37764 - DNA, 20 bp, Artificial Sequence
  Description of Artificial Sequence: Synthetic oligonucleotide
  Target: LAMA2; (-) strand; PAM type: NNNNGHTT; PAM sequence: ACGAGATT
taaatgactgtcaaagcttc

SEQ ID NO: 37765 - DNA, 20 bp, Artificial Sequence
  Description of Artificial Sequence: Synthetic oligonucleotide
  Target: LAMA2; (-) strand; PAM type: NNNNGHTT; PAM sequence: CAAAGCTT
cggaaaggctaaatgactgt

SEQ ID NO: 37766 - DNA, 20 bp, Artificial Sequence
  Description of Artificial Sequence: Synthetic oligonucleotide
  Target: LAMA2; (-) strand; PAM type: NNNNGHTT; PAM sequence: CATAGATT
aagattcaataacaccattt

SEQ ID NO: 37767 - DNA, 20 bp, Artificial Sequence
  Description of Artificial Sequence: Synthetic oligonucleotide
  Target: LAMA2; (-) strand; PAM type: NNNNGHTT; PAM sequence: AAAAGATT
ttatacctactgagaggcag

SEQ ID NO: 37768 - DNA, 20 bp, Artificial Sequence
  Description of Artificial Sequence: Synthetic oligonucleotide
  Target: LAMA2; (-) strand; PAM type: NNNNGHTT; PAM sequence: CAGGGCTT
ggttatactttatacttgta

SEQ ID NO: 37769 - DNA, 20 bp, Artificial Sequence
  Description of Artificial Sequence: Synthetic oligonucleotide
  Target: LAMA2; (-) strand; PAM type: NNNNGHTT; PAM sequence: TCAGGATT
tctacatctgtaatttagat

SEQ ID NO: 37770 - DNA, 20 bp, Artificial Sequence
  Description of Artificial Sequence: Synthetic oligonucleotide
  Target: LAMA2; (-) strand; PAM type: NNNNGHTT; PAM sequence: TTTAGATT
caaaaattctacatctgtaa

SEQ ID NO: 37771 - DNA, 20 bp, Artificial Sequence
  Description of Artificial Sequence: Synthetic oligonucleotide
  Target: LAMA2; (-) strand; PAM type: NNNNGHTT; PAM sequence: CTAGGTTT
gaattcttgctttaaccaag

SEQ ID NO: 37772 - DNA, 20 bp, Artificial Sequence
  Description of Artificial Sequence: Synthetic oligonucleotide
  Target: LAMA2; (-) strand; PAM type: NNNNGHTT; PAM sequence: TCTTGCTT
acacactgacttagcagaat

SEQ ID NO: 37773 - DNA, 20 bp, Artificial Sequence
  Description of Artificial Sequence: Synthetic oligonucleotide
  Target: LAMA2; (-) strand; PAM type: NNNNGHTT; PAM sequence: ACAGGATT
attcttgctaaaccaaatta

SEQ ID NO: 37774 - DNA, 20 bp, Artificial Sequence
  Description of Artificial Sequence: Synthetic oligonucleotide
  Target: LAMA2; (-) strand; PAM type: NNNNGHTT; PAM sequence: GGGGGATT
gagacatcaggggtaggtag

SEQ ID NO: 37775 - DNA, 20 bp, Artificial Sequence
  Description of Artificial Sequence: Synthetic oligonucleotide
  Target: LAMA2; (-) strand; PAM type: NNNNGHTT; PAM sequence: TAGAGATT
ttcagtgccaaggaaaaggg

SEQ ID NO: 37776 - DNA, 20 bp, Artificial Sequence
  Description of Artificial Sequence: Synthetic oligonucleotide
  Target: LAMA2; (-) strand; PAM type: NNNNGHTT; PAM sequence: TAGGGATT
cccaatacaacatgaacaag

SEQ ID NO: 37777 - DNA, 20 bp, Artificial Sequence
  Description of Artificial Sequence: Synthetic oligonucleotide
  Target: LAMA2; (-) strand; PAM type: NNNNGHTT; PAM sequence: ATAGGCTT
cagtagttaaaacgatgaaa

SEQ ID NO: 37778 - DNA, 20 bp, Artificial Sequence
  Description of Artificial Sequence: Synthetic oligonucleotide
  Target: LAMA2; (-) strand; PAM type: NNNNGHTT; PAM sequence: TTCAGCTT
tagttctcaattttcacaag

SEQ ID NO: 37779 - DNA, 20 bp, Artificial Sequence
  Description of Artificial Sequence: Synthetic oligonucleotide
  Target: LAMA2; (-) strand; PAM type: NNNNGHTT; PAM sequence: ACAGGTTT
ttggtagtttgtagttaatt

SEQ ID NO: 37780 - DNA, 20 bp, Artificial Sequence
  Description of Artificial Sequence: Synthetic oligonucleotide
  Target: LAMA2; (-) strand; PAM type: NNNNGHTT; PAM sequence: GGTAGTTT
tcagtcatgcttggtttttt

SEQ ID NO: 37781 - DNA, 20 bp, Artificial Sequence
  Description of Artificial Sequence: Synthetic oligonucleotide
  Target: LAMA2; (-) strand; PAM type: NNNNGHTT; PAM sequence: CTTGGTTT
tcaggaatttctcagtcatg

SEQ ID NO: 37782 - DNA, 20 bp, Artificial Sequence
  Description of Artificial Sequence: Synthetic oligonucleotide
  Target: LAMA2; (-) strand; PAM type: NNNNGHTT; PAM sequence: TCATGCTT
ttgcttcaggaatttctcag

SEQ ID NO: 37783 - DNA, 20 bp, Artificial Sequence
  Description of Artificial Sequence: Synthetic oligonucleotide
  Target: LAMA2; (-) strand; PAM type: NNNNGHTT; PAM sequence: AATTGCTT
agttattttttttgtgtgat

SEQ ID NO: 37784 - DNA, 20 bp, Artificial Sequence
  Description of Artificial Sequence: Synthetic oligonucleotide
  Target: LAMA2; (-) strand; PAM type: NNNNGHTT; PAM sequence: CTGTGATT
cttcagcagtacatattgaa

SEQ ID NO: 37785 - DNA, 20 bp, Artificial Sequence
  Description of Artificial Sequence: Synthetic oligonucleotide
  Target: LAMA2; (-) strand; PAM type: NNNNGHTT; PAM sequence: TACTGCTT
gtattctttctcatagaagc

SEQ ID NO: 37786 - DNA, 20 bp, Artificial Sequence
  Description of Artificial Sequence: Synthetic oligonucleotide
  Target: LAMA2; (-) strand; PAM type: NNNNGHTT; PAM sequence: CGTAGTTT
ttctctggagaaatagtcac

SEQ ID NO: 37787 - DNA, 20 bp, Artificial Sequence
  Description of Artificial Sequence: Synthetic oligonucleotide
  Target: LAMA2; (-) strand; PAM type: NNNNGHTT; PAM sequence: TACAGTTT
ttttgctatagtttcctcag

SEQ ID NO: 37788 - DNA, 20 bp, Artificial Sequence
  Description of Artificial Sequence: Synthetic oligonucleotide
  Target: LAMA2; (-) strand; PAM type: NNNNGHTT; PAM sequence: TATAGTTT
gacatcaattttctttttgc

SEQ ID NO: 37789 - DNA, 20 bp, Artificial Sequence
  Description of Artificial Sequence: Synthetic oligonucleotide
  Target: LAMA2; (-) strand; PAM type: NNNNGHTT; PAM sequence: TTTTGATT
attttactaagttcttttgt

SEQ ID NO: 37790 - DNA, 20 bp, Artificial Sequence
  Description of Artificial Sequence: Synthetic oligonucleotide
  Target: LAMA2; (-) strand; PAM type: NNNNGHTT; PAM sequence: TTTTGTTT
agaaaaattttactaagttc

SEQ ID NO: 37791 - DNA, 20 bp, Artificial Sequence
  Description of Artificial Sequence: Synthetic oligonucleotide
  Target: LAMA2; (-) strand; PAM type: NNNNGHTT; PAM sequence: GTGTGCTT
tcattcttttaggaagaaat

SEQ ID NO: 37792 - DNA, 20 bp, Artificial Sequence
  Description of Artificial Sequence: Synthetic oligonucleotide
  Target: LAMA2; (-) strand; PAM type: NNNNGHTT; PAM sequence: GAATGTTT
tatgtacagatgcaccatgt

SEQ ID NO: 37793 - DNA, 20 bp, Artificial Sequence
  Description of Artificial Sequence: Synthetic oligonucleotide
  Target: LAMA2; (-) strand; PAM type: NNNNGHTT; PAM sequence: TAGTGTTT
cacatcacttcactttagac

SEQ ID NO: 37794 - DNA, 20 bp, Artificial Sequence
  Description of Artificial Sequence: Synthetic oligonucleotide
  Target: LAMA2; (-) strand; PAM type: NNNNGHTT; PAM sequence: TTCTGCTT
tattttcttaaaaccaaata

SEQ ID NO: 37795 - DNA, 20 bp, Artificial Sequence
  Description of Artificial Sequence: Synthetic oligonucleotide
  Target: LAMA2; (-) strand; PAM type: NNNNGHTT; PAM sequence: TAGTGATT
tttatttgtatagagtccat

SEQ ID NO: 37796 - DNA, 20 bp, Artificial Sequence
  Description of Artificial Sequence: Synthetic oligonucleotide
  Target: LAMA2; (-) strand; PAM type: NNNNGHTT; PAM sequence: AGTTGTTT
aatttaataaaaatttttaa

SEQ ID NO: 37797 - DNA, 20 bp, Artificial Sequence
  Description of Artificial Sequence: Synthetic oligonucleotide
  Target: LAMA2; (-) strand; PAM type: NNNNGHTT; PAM sequence: TTTTGTTT
tataattaatttttttcttt

SEQ ID NO: 37798 - DNA, 20 bp, Artificial Sequence
  Description of Artificial Sequence: Synthetic oligonucleotide
  Target: LAMA2; (-) strand; PAM type: NNNNGHTT; PAM sequence: TTATGATT
catgagatttctattttcct

SEQ ID NO: 37799 - DNA, 20 bp, Artificial Sequence
  Description of Artificial Sequence: Synthetic oligonucleotide
  Target: LAMA2; (-) strand; PAM type: NNNNGHTT; PAM sequence: ATGAGATT
tgaatgttattttaatcatc

SEQ ID NO: 37800 - DNA, 20 bp, Artificial Sequence
  Description of Artificial Sequence: Synthetic oligonucleotide
  Target: LAMA2; (-) strand; PAM type: NNNNGHTT; PAM sequence: AAAAGTTT
aaatatcgaatgatgaaggt

SEQ ID NO: 37801 - DNA, 20 bp, Artificial Sequence
  Description of Artificial Sequence: Synthetic oligonucleotide
  Target: LAMA2; (-) strand; PAM type: NNNNGHTT; PAM sequence: ATAAGATT
ttgttcttttcttgccatcc

SEQ ID NO: 37802 - DNA, 20 bp, Artificial Sequence
  Description of Artificial Sequence: Synthetic oligonucleotide
  Target: LAMA2; (-) strand; PAM type: NNNNGHTT; PAM sequence: ACAAGATT
tgtatcccaagattttcatg

SEQ ID NO: 37803 - DNA, 20 bp, Artificial Sequence
  Description of Artificial Sequence: Synthetic oligonucleotide
  Target: LAMA2; (-) strand; PAM type: NNNNGHTT; PAM sequence: CCAAGATT
ttgagcaaaaaagatgtatc

SEQ ID NO: 37804 - DNA, 20 bp, Artificial Sequence
  Description of Artificial Sequence: Synthetic oligonucleotide
  Target: LAMA2; (-) strand; PAM type: NNNNGHTT; PAM sequence: GATAGTTT
acttggagaaatagagtcac

SEQ ID NO: 37805 - DNA, 20 bp, Artificial Sequence
  Description of Artificial Sequence: Synthetic oligonucleotide
  Target: LAMA2; (-) strand; PAM type: NNNNGHTT; PAM sequence: CACAGTTT
ttttgctttagttcccttag

SEQ ID NO: 37806 - DNA, 20 bp, Artificial Sequence
  Description of Artificial Sequence: Synthetic oligonucleotide
  Target: LAMA2; (-) strand; PAM type: NNNNGHTT; PAM sequence: TTTTGCTT
aaggaagtaggaattttctt

SEQ ID NO: 37807 - DNA, 20 bp, Artificial Sequence
  Description of Artificial Sequence: Synthetic oligonucleotide
  Target: LAMA2; (-) strand; PAM type: NNNNGHTT; PAM sequence: AGAGGATT
ggaatataaaaatgccctca

SEQ ID NO: 37808 - DNA, 20 bp, Artificial Sequence
  Description of Artificial Sequence: Synthetic oligonucleotide
  Target: LAMA2; (-) strand; PAM type: NNNNGHTT; PAM sequence: CGTTGCTT
ctctgctcattatttcttat

SEQ ID NO: 37809 - DNA, 20 bp, Artificial Sequence
  Description of Artificial Sequence: Synthetic oligonucleotide
  Target: LAMA2; (-) strand; PAM type: NNNNGHTT; PAM sequence: ATCTGCTT
cccagcttgaaagtgaagcc

SEQ ID NO: 37810 - DNA, 20 bp, Artificial Sequence
  Description of Artificial Sequence: Synthetic oligonucleotide
  Target: LAMA2; (-) strand; PAM type: NNNNGHTT; PAM sequence: CCCAGCTT
gcacttaaagttttttgatt

SEQ ID NO: 37811 - DNA, 20 bp, Artificial Sequence
  Description of Artificial Sequence: Synthetic oligonucleotide
  Target: LAMA2; (-) strand; PAM type: NNNNGHTT; PAM sequence: TTTTGATT
atattctagcacttaaagtt

SEQ ID NO: 37812 - DNA, 20 bp, Artificial Sequence
  Description of Artificial Sequence: Synthetic oligonucleotide
  Target: LAMA2; (-) strand; PAM type: NNNNGHTT; PAM sequence: TAAAGTTT
gacatgaatattctagcact

SEQ ID NO: 37813 - DNA, 20 bp, Artificial Sequence
  Description of Artificial Sequence: Synthetic oligonucleotide
  Target: LAMA2; (-) strand; PAM type: NNNNGHTT; PAM sequence: CCTGGCTT
agtcagcccctaattgcatt

SEQ ID NO: 37814 - DNA, 20 bp, Artificial Sequence
  Description of Artificial Sequence: Synthetic oligonucleotide
  Target: LAMA2; (-) strand; PAM type: NNNNGHTT; PAM sequence: CATTGTTT
ctatgtgtccccagggacat

SEQ ID NO: 37815 - DNA, 20 bp, Artificial Sequence
  Description of Artificial Sequence: Synthetic oligonucleotide
  Target: LAMA2; (-) strand; PAM type: NNNNGHTT; PAM sequence: ATTAGCTT
accaaaatttcccgccttct

SEQ ID NO: 37816 - DNA, 20 bp, Artificial Sequence
  Description of Artificial Sequence: Synthetic oligonucleotide
  Target: LAMA2; (-) strand; PAM type: NNNNGHTT; PAM sequence: TTCTGATT
agcatttcagattttggatt

SEQ ID NO: 37817 - DNA, 20 bp, Artificial Sequence
  Description of Artificial Sequence: Synthetic oligonucleotide
  Target: LAMA2; (-) strand; PAM type: NNNNGHTT; PAM sequence: TTTGGATT
ttcactagagcatttcagat

SEQ ID NO: 37818 - DNA, 20 bp, Artificial Sequence
  Description of Artificial Sequence: Synthetic oligonucleotide
  Target: LAMA2; (-) strand; PAM type: NNNNGHTT; PAM sequence: TTCAGATT
tggaatgttcactagagcat

SEQ ID NO: 37819 - DNA, 20 bp, Artificial Sequence
  Description of Artificial Sequence: Synthetic oligonucleotide
  Target: LAMA2; (-) strand; PAM type: NNNNGHTT; PAM sequence: AAATGTTT
atcagaaaatccaaaatctt

SEQ ID NO: 37820 - DNA, 20 bp, Artificial Sequence
  Description of Artificial Sequence: Synthetic oligonucleotide
  Target: LAMA2; (-) strand; PAM type: NNNNGHTT; PAM sequence: GGAGGTTT
aagaattcattttaaaagtt

SEQ ID NO: 37821 - DNA, 20 bp, Artificial Sequence
  Description of Artificial Sequence: Synthetic oligonucleotide
  Target: LAMA2; (-) strand; PAM type: NNNNGHTT; PAM sequence: CATGGTTT
gtttgacctgatccttgaag

SEQ ID NO: 37822 - DNA, 20 bp, Artificial Sequence
  Description of Artificial Sequence: Synthetic oligonucleotide
  Target: LAMA2; (-) strand; PAM type: NNNNGHTT; PAM sequence: TGGAGTTT
aggaagctttatgacaggag

SEQ ID NO: 37823 - DNA, 20 bp, Artificial Sequence
  Description of Artificial Sequence: Synthetic oligonucleotide
  Target: LAMA2; (-) strand; PAM type: NNNNGHTT; PAM sequence: GGAAGCTT
atttttgctataaggcttaa

SEQ ID NO: 37824 - DNA, 20 bp, Artificial Sequence
  Description of Artificial Sequence: Synthetic oligonucleotide
  Target: LAMA2; (-) strand; PAM type: NNNNGHTT; PAM sequence: TAAGGCTT
ggaagcactaatttttgcta

SEQ ID NO: 37825 - DNA, 20 bp, Artificial Sequence
  Description of Artificial Sequence: Synthetic oligonucleotide
  Target: LAMA2; (-) strand; PAM type: NNNNGHTT; PAM sequence: ATATGATT
agtaaaatgaccttgaaaaa

SEQ ID NO: 37826 - DNA, 20 bp, Artificial Sequence
  Description of Artificial Sequence: Synthetic oligonucleotide
  Target: LAMA2; (-) strand; PAM type: NNNNGHTT; PAM sequence: CTGAGATT
aagcttataatgccactatt

SEQ ID NO: 37827 - DNA, 20 bp, Artificial Sequence
  Description of Artificial Sequence: Synthetic oligonucleotide
  Target: LAMA2; (-) strand; PAM type: NNNNGHTT; PAM sequence: GAAAGCTT
cttttcatttactctaattt

SEQ ID NO: 37828 - DNA, 20 bp, Artificial Sequence
  Description of Artificial Sequence: Synthetic oligonucleotide
  Target: LAMA2; (-) strand; PAM type: NNNNGHTT; PAM sequence: ATGCGCTT
gttctgtatactgtgttctt

SEQ ID NO: 37829 - DNA, 20 bp, Artificial Sequence
  Description of Artificial Sequence: Synthetic oligonucleotide
  Target: LAMA2; (-) strand; PAM type: NNNNGHTT; PAM sequence: TTTAGTTT
aaacatatctgtaattatga

SEQ ID NO: 37830 - DNA, 20 bp, Artificial Sequence
  Description of Artificial Sequence: Synthetic oligonucleotide
  Target: LAMA2; (-) strand; PAM type: NNNNGHTT; PAM sequence: TTATGATT
aagatgaaacatatctgtaa

SEQ ID NO: 37831 - DNA, 20 bp, Artificial Sequence
  Description of Artificial Sequence: Synthetic oligonucleotide
  Target: LAMA2; (-) strand; PAM type: NNNNGHTT; PAM sequence: GGCAGATT
tgtgccagcttactttttaa

SEQ ID NO: 37832 - DNA, 20 bp, Artificial Sequence
  Description of Artificial Sequence: Synthetic oligonucleotide
  Target: LAMA2; (-) strand; PAM type: NNNNGHTT; PAM sequence: GCCAGCTT
agcactgccccaagatttgt

SEQ ID NO: 37833 - DNA, 20 bp, Artificial Sequence
  Description of Artificial Sequence: Synthetic oligonucleotide
  Target: LAMA2; (-) strand; PAM type: NNNNGHTT; PAM sequence: CCAAGATT
gaaccttaataagcactgcc

SEQ ID NO: 37834 - DNA, 20 bp, Artificial Sequence
  Description of Artificial Sequence: Synthetic oligonucleotide
  Target: LAMA2; (-) strand; PAM type: NNNNGHTT; PAM sequence: ATTTGTTT
tccttatatccaagagaata

SEQ ID NO: 37835 - DNA, 20 bp, Artificial Sequence
  Description of Artificial Sequence: Synthetic oligonucleotide
  Target: LAMA2; (-) strand; PAM type: NNNNGHTT; PAM sequence: CCCAGATT
ataaaaacactttaaacaaa

SEQ ID NO: 37836 - DNA, 20 bp, Artificial Sequence
  Description of Artificial Sequence: Synthetic oligonucleotide
  Target: LAMA2; (-) strand; PAM type: NNNNGHTT; PAM sequence: TCATGTTT
tcaaataaatctcttggcag

SEQ ID NO: 37837 - DNA, 20 bp, Artificial Sequence
  Description of Artificial Sequence: Synthetic oligonucleotide
  Target: LAMA2; (-) strand; PAM type: NNNNGHTT; PAM sequence: ATTAGCTT
ttcctggtacagcactgagc

SEQ ID NO: 37838 - DNA, 20 bp, Artificial Sequence
  Description of Artificial Sequence: Synthetic oligonucleotide
  Target: LAMA2; (-) strand; PAM type: NNNNGHTT; PAM sequence: CAAAGATT
aaccacaaaaaagtattgct

SEQ ID NO: 37839 - DNA, 20 bp, Artificial Sequence
  Description of Artificial Sequence: Synthetic oligonucleotide
  Target: LAMA2; (-) strand; PAM type: NNNNGHTT; PAM sequence: TGTAGTTT
acaactaacttctctctcca

SEQ ID NO: 37840 - DNA, 20 bp, Artificial Sequence
  Description of Artificial Sequence: Synthetic oligonucleotide
  Target: LAMA2; (-) strand; PAM type: NNNNGHTT; PAM sequence: TGAGGCTT
aattcccttattatcaatac

SEQ ID NO: 37841 - DNA, 20 bp, Artificial Sequence
  Description of Artificial Sequence: Synthetic oligonucleotide
  Target: LAMA2; (-) strand; PAM type: NNNNGHTT; PAM sequence: AACAGATT
aggcatcctgctttccagga

SEQ ID NO: 37842 - DNA, 20 bp, Artificial Sequence
  Description of Artificial Sequence: Synthetic oligonucleotide
  Target: LAMA2; (-) strand; PAM type: NNNNGHTT; PAM sequence: TCCTGCTT
aataattctaaaggaaggca

SEQ ID NO: 37843 - DNA, 20 bp, Artificial Sequence
  Description of Artificial Sequence: Synthetic oligonucleotide
  Target: LAMA2; (-) strand; PAM type: NNNNGHTT; PAM sequence: TTGAGCTT
gaaaaattatttgtatatag

SEQ ID NO: 37844 - DNA, 20 bp, Artificial Sequence
  Description of Artificial Sequence: Synthetic oligonucleotide
  Target: LAMA2; (-) strand; PAM type: NNNNGHTT; PAM sequence: ACTGGTTT
attctgtgactgctctccag

SEQ ID NO: 37845 - DNA, 20 bp, Artificial Sequence
  Description of Artificial Sequence: Synthetic oligonucleotide
  Target: LAMA2; (-) strand; PAM type: NNNNGHTT; PAM sequence: CAGTGTTT
ttcctctggttaacttttta

SEQ ID NO: 37846 - DNA, 20 bp, Artificial Sequence
  Description of Artificial Sequence: Synthetic oligonucleotide
  Target: LAMA2; (-) strand; PAM type: NNNNGHTT; PAM sequence: CAAAGTTT
agatcagataaagtagaaag

SEQ ID NO: 37847 - DNA, 20 bp, Artificial Sequence
  Description of Artificial Sequence: Synthetic oligonucleotide
  Target: LAMA2; (-) strand; PAM type: NNNNGHTT; PAM sequence: TTCAGATT
gttataaatacttttcacat

SEQ ID NO: 37848 - DNA, 20 bp, Artificial Sequence
  Description of Artificial Sequence: Synthetic oligonucleotide
  Target: LAMA2; (-) strand; PAM type: NNNNGHTT; PAM sequence: ATTAGATT
aaatacctgtgcaggaatgc

SEQ ID NO: 37849 - DNA, 20 bp, Artificial Sequence
  Description of Artificial Sequence: Synthetic oligonucleotide
  Target: LAMA2; (-) strand; PAM type: NNNNGHTT; PAM sequence: GAAAGATT
ctttctaattacactggtga

SEQ ID NO: 37850 - DNA, 20 bp, Artificial Sequence
  Description of Artificial Sequence: Synthetic oligonucleotide
  Target: LAMA2; (-) strand; PAM type: NNNNGHTT; PAM sequence: GCCGGATT
tcctcttgcaaattgaagaa

SEQ ID NO: 37851 - DNA, 20 bp, Artificial Sequence
  Description of Artificial Sequence: Synthetic oligonucleotide
  Target: LAMA2; (-) strand; PAM type: NNNNGHTT; PAM sequence: ATCTGTTT
ggtccagtaggaactctgac

SEQ ID NO: 37852 - DNA, 20 bp, Artificial Sequence
  Description of Artificial Sequence: Synthetic oligonucleotide
  Target: LAMA2; (-) strand; PAM type: NNNNGHTT; PAM sequence: GCTTGCTT
agcaaacagaaccaaatggt

SEQ ID NO: 37853 - DNA, 20 bp, Artificial Sequence
  Description of Artificial Sequence: Synthetic oligonucleotide
  Target: LAMA2; (-) strand; PAM type: NNNNGHTT; PAM sequence: TGGTGCTT
gggcagcaaacagaaccaaa

SEQ ID NO: 37854 - DNA, 20 bp, Artificial Sequence
  Description of Artificial Sequence: Synthetic oligonucleotide
  Target: LAMA2; (-) strand; PAM type: NNNNGHTT; PAM sequence: AAAGGCTT
aatattacaaatacaacctc

SEQ ID NO: 37855 - DNA, 20 bp, Artificial Sequence
  Description of Artificial Sequence: Synthetic oligonucleotide
  Target: LAMA2; (-) strand; PAM type: NNNNGHTT; PAM sequence: TATTGTTT
agttgaaaccttaattgcat

SEQ ID NO: 37856 - DNA, 20 bp, Artificial Sequence
  Description of Artificial Sequence: Synthetic oligonucleotide
  Target: LAMA2; (-) strand; PAM type: NNNNGHTT; PAM sequence: TAGTGTTT
atataattcatatcacaatg

SEQ ID NO: 37857 - DNA, 20 bp, Artificial Sequence
  Description of Artificial Sequence: Synthetic oligonucleotide
  Target: LAMA2; (-) strand; PAM type: NNNNGHTT; PAM sequence: CAGAGTTT
tattatgtatacagatgata

SEQ ID NO: 37858 - DNA, 20 bp, Artificial Sequence
  Description of Artificial Sequence: Synthetic oligonucleotide
  Target: LAMA2; (-) strand; PAM type: NNNNGHTT; PAM sequence: AATAGTTT
gaaaatttcagttgctatta

SEQ ID NO: 37859 - DNA, 20 bp, Artificial Sequence
  Description of Artificial Sequence: Synthetic oligonucleotide
  Target: LAMA2; (-) strand; PAM type: NNNNGHTT; PAM sequence: CACAGATT
gggagacaacatgctctttg

SEQ ID NO: 37860 - DNA, 20 bp, Artificial Sequence
  Description of Artificial Sequence: Synthetic oligonucleotide
  Target: LAMA2; (-) strand; PAM type: NNNNGHTT; PAM sequence: TCTAGATT
gtatattcaaccctataagt

SEQ ID NO: 37861 - DNA, 20 bp, Artificial Sequence
  Description of Artificial Sequence: Synthetic oligonucleotide
  Target: LAMA2; (-) strand; PAM type: NNNNGHTT; PAM sequence: TTTAGCTT
caactctgataatgtcagtc

SEQ ID NO: 37862 - DNA, 20 bp, Artificial Sequence
  Description of Artificial Sequence: Synthetic oligonucleotide
  Target: LAMA2; (-) strand; PAM type: NNNNGHTT; PAM sequence: AATAGTTT
aaaggaagaagtgtttagga

SEQ ID NO: 37863 - DNA, 20 bp, Artificial Sequence
  Description of Artificial Sequence: Synthetic oligonucleotide
  Target: LAMA2; (-) strand; PAM type: NNNNGHTT; PAM sequence: AAGTGTTT
tgattaaagttgaaaggaag

SEQ ID NO: 37864 - DNA, 20 bp, Artificial Sequence
  Description of Artificial Sequence: Synthetic oligonucleotide
  Target: LAMA2; (-) strand; PAM type: NNNNGHTT; PAM sequence: CACTGATT
agctctgttcaggattagtt

SEQ ID NO: 37865 - DNA, 20 bp, Artificial Sequence
  Description of Artificial Sequence: Synthetic oligonucleotide
  Target: LAMA2; (-) strand; PAM type: NNNNGHTT; PAM sequence: TCAGGATT
aaaatattttatagctctgt

SEQ ID NO: 37866 - DNA, 20 bp, Artificial Sequence
  Description of Artificial Sequence: Synthetic oligonucleotide
  Target: LAMA2; (-) strand; PAM type: NNNNGHTT; PAM sequence: TGAGGCTT
atagataatatttcataata

SEQ ID NO: 37867 - DNA, 20 bp, Artificial Sequence
  Description of Artificial Sequence: Synthetic oligonucleotide
  Target: LAMA2; (-) strand; PAM type: NNNNGHTT; PAM sequence: GGTTGATT
tagactagatgtccatctgt

SEQ ID NO: 37868 - DNA, 20 bp, Artificial Sequence
  Description of Artificial Sequence: Synthetic oligonucleotide
  Target: LAMA2; (-) strand; PAM type: NNNNGHTT; PAM sequence: CAAAGCTT
tgtctctagcatctgatgat

SEQ ID NO: 37869 - DNA, 20 bp, Artificial Sequence
  Description of Artificial Sequence: Synthetic oligonucleotide
  Target: LAMA2; (-) strand; PAM type: NNNNGHTT; PAM sequence: ATGGGATT
aggcattgtaagacagttga

SEQ ID NO: 37870 - DNA, 20 bp, Artificial Sequence
  Description of Artificial Sequence: Synthetic oligonucleotide
  Target: LAMA2; (-) strand; PAM type: NNNNGHTT; PAM sequence: CTCTGCTT
tttcttcatagactatttga

SEQ ID NO: 37871 - DNA, 20 bp, Artificial Sequence
  Description of Artificial Sequence: Synthetic oligonucleotide
  Target: LAMA2; (-) strand; PAM type: NNNNGHTT; PAM sequence: AGCTGCTT
gaacctactagacatgcatg

SEQ ID NO: 37872 - DNA, 20 bp, Artificial Sequence
  Description of Artificial Sequence: Synthetic oligonucleotide
  Target: LAMA2; (-) strand; PAM type: NNNNGHTT; PAM sequence: GAGGGCTT
aggacaaaacactgattact

SEQ ID NO: 37873 - DNA, 20 bp, Artificial Sequence
  Description of Artificial Sequence: Synthetic oligonucleotide
  Target: LAMA2; (-) strand; PAM type: NNNNGHTT; PAM sequence: CACTGATT
cctacctagtcaggacaaaa

SEQ ID NO: 37874 - DNA, 20 bp, Artificial Sequence
  Description of Artificial Sequence: Synthetic oligonucleotide
  Target: LAMA2; (-) strand; PAM type: NNNNGHTT; PAM sequence: TTATGCTT
aatgatttgtttttacatct

SEQ ID NO: 37875 - DNA, 20 bp, Artificial Sequence
  Description of Artificial Sequence: Synthetic oligonucleotide
  Target: LAMA2; (-) strand; PAM type: NNNNGHTT; PAM sequence: ATTTGTTT
gaatctgggaatgcataatg

SEQ ID NO: 37876 - DNA, 20 bp, Artificial Sequence
  Description of Artificial Sequence: Synthetic oligonucleotide
  Target: LAMA2; (-) strand; PAM type: NNNNGHTT; PAM sequence: TAATGATT
aggaggaatctgggaatgca

SEQ ID NO: 37877 - DNA, 20 bp, Artificial Sequence
  Description of Artificial Sequence: Synthetic oligonucleotide
  Target: LAMA2; (-) strand; PAM type: NNNNGHTT; PAM sequence: TGAGGCTT
actttttaaaatttctactt

SEQ ID NO: 37878 - DNA, 20 bp, Artificial Sequence
  Description of Artificial Sequence: Synthetic oligonucleotide
  Target: LAMA2; (-) strand; PAM type: NNNNGHTT; PAM sequence: TGGTGTTT
ctatgcaagtacctgaaagg

SEQ ID NO: 37879 - DNA, 20 bp, Artificial Sequence
  Description of Artificial Sequence: Synthetic oligonucleotide
  Target: LAMA2; (-) strand; PAM type: NNNNGHTT; PAM sequence: TGTTGCTT
ttactccactagtagtttat

SEQ ID NO: 37880 - DNA, 20 bp, Artificial Sequence
  Description of Artificial Sequence: Synthetic oligonucleotide
  Target: LAMA2; (-) strand; PAM type: NNNNGHTT; PAM sequence: AGTAGTTT
tccgtattttttactccact

SEQ ID NO: 37881 - DNA, 20 bp, Artificial Sequence
  Description of Artificial Sequence: Synthetic oligonucleotide
  Target: LAMA2; (-) strand; PAM type: NNNNGHTT; PAM sequence: CTATGCTT
ataatctgttttcattgaac

SEQ ID NO: 37882 - DNA, 20 bp, Artificial Sequence
  Description of Artificial Sequence: Synthetic oligonucleotide
  Target: LAMA2; (-) strand; PAM type: NNNNGHTT; PAM sequence: ATCTGTTT
ttccaaggtattctataata

SEQ ID NO: 37883 - DNA, 20 bp, Artificial Sequence
  Description of Artificial Sequence: Synthetic oligonucleotide
  Target: LAMA2; (-) strand; PAM type: NNNNGHTT; PAM sequence: AGGAGTTT
tttttttccttgatgtttct

SEQ ID NO: 37884 - DNA, 20 bp, Artificial Sequence
  Description of Artificial Sequence: Synthetic oligonucleotide
  Target: LAMA2; (-) strand; PAM type: NNNNGHTT; PAM sequence: TGATGTTT
cattgtttattttttttcct

SEQ ID NO: 37885 - DNA, 20 bp, Artificial Sequence
  Description of Artificial Sequence: Synthetic oligonucleotide
  Target: LAMA2; (-) strand; PAM type: NNNNGHTT; PAM sequence: CATTGTTT
tatgtactcacataggcttc

SEQ ID NO: 37886 - DNA, 20 bp, Artificial Sequence
  Description of Artificial Sequence: Synthetic oligonucleotide
  Target: LAMA2; (-) strand; PAM type: NNNNGHTT; PAM sequence: ATAGGCTT
gacatattatatgtactcac

SEQ ID NO: 37887 - DNA, 20 bp, Artificial Sequence
  Description of Artificial Sequence: Synthetic oligonucleotide
  Target: LAMA2; (-) strand; PAM type: NNNNGHTT; PAM sequence: AGCTGCTT
atttttaaaaaatatctatc

SEQ ID NO: 37888 - DNA, 20 bp, Artificial Sequence
  Description of Artificial Sequence: Synthetic oligonucleotide
  Target: LAMA2; (-) strand; PAM type: NNNNGHTT; PAM sequence: CAGGGCTT
ctccagtagtagctgtgcgg

SEQ ID NO: 37889 - DNA, 20 bp, Artificial Sequence
  Description of Artificial Sequence: Synthetic oligonucleotide
  Target: LAMA2; (-) strand; PAM type: NNNNGHTT; PAM sequence: CTTTGTTT
gggaagcaagcgtggactta

SEQ ID NO: 37890 - DNA, 20 bp, Artificial Sequence
  Description of Artificial Sequence: Synthetic oligonucleotide
  Target: LAMA2; (-) strand; PAM type: NNNNGHTT; PAM sequence: ATTTGATT
ggcaatccaattcagtgtgt

SEQ ID NO: 37891 - DNA, 20 bp, Artificial Sequence
  Description of Artificial Sequence: Synthetic oligonucleotide
  Target: LAMA2; (-) strand; PAM type: NNNNGHTT; PAM sequence: ATGTGATT
tggaagaaacgcccaactca

SEQ ID NO: 37892 - DNA, 20 bp, Artificial Sequence
  Description of Artificial Sequence: Synthetic oligonucleotide
  Target: LAMA2; (-) strand; PAM type: NNNNGHTT; PAM sequence: AAAAGTTT
ttaatttatttgcccattca

SEQ ID NO: 37893 - DNA, 20 bp, Artificial Sequence
  Description of Artificial Sequence: Synthetic oligonucleotide
  Target: LAMA2; (-) strand; PAM type: NNNNGHTT; PAM sequence: AGCGGCTT
ttgctttacgaaaatacact

SEQ ID NO: 37894 - DNA, 20 bp, Artificial Sequence
  Description of Artificial Sequence: Synthetic oligonucleotide
  Target: LAMA2; (-) strand; PAM type: NNNNGHTT; PAM sequence: ATTTGCTT
agtttcttccaatacctata

SEQ ID NO: 37895 - DNA, 20 bp, Artificial Sequence
  Description of Artificial Sequence: Synthetic oligonucleotide
  Target: LAMA2; (-) strand; PAM type: NNNNGHTT; PAM sequence: CACAGTTT
ctcttttcacataaacacaa

SEQ ID NO: 37896 - DNA, 20 bp, Artificial Sequence
  Description of Artificial Sequence: Synthetic oligonucleotide
  Target: LAMA2; (-) strand; PAM type: NNNNGHTT; PAM sequence: ATCAGTTT
gaaaagtaaatctcctgagt

SEQ ID NO: 37897 - DNA, 20 bp, Artificial Sequence
  Description of Artificial Sequence: Synthetic oligonucleotide
  Target: LAMA2; (-) strand; PAM type: NNNNGHTT; PAM sequence: TGTTGTTT
tgcctgagctccagcaaata

SEQ ID NO: 37898 - DNA, 20 bp, Artificial Sequence
  Description of Artificial Sequence: Synthetic oligonucleotide
  Target: LAMA2; (-) strand; PAM type: NNNNGHTT; PAM sequence: GGTAGTTT
ttccaatctggcacttttag

SEQ ID NO: 37899 - DNA, 20 bp, Artificial Sequence
  Description of Artificial Sequence: Synthetic oligonucleotide
  Target: LAMA2; (-) strand; PAM type: NNNNGHTT; PAM sequence: ACGTGCTT
atgtgtgggctttaaaacaa

SEQ ID NO: 37900 - DNA, 20 bp, Artificial Sequence
  Description of Artificial Sequence: Synthetic oligonucleotide
  Target: LAMA2; (-) strand; PAM type: NNNNGHTT; PAM sequence: GTGGGCTT
gtgtatgtttttacatatgt

SEQ ID NO: 37901 - DNA, 20 bp, Artificial Sequence
  Description of Artificial Sequence: Synthetic oligonucleotide
  Target: LAMA2; (-) strand; PAM type: NNNNGHTT; PAM sequence: GTATGTTT
tgctacatttgtttatctgt

SEQ ID NO: 37902 - DNA, 20 bp, Artificial Sequence
  Description of Artificial Sequence: Synthetic oligonucleotide
  Target: LAMA2; (-) strand; PAM type: NNNNGHTT; PAM sequence: ATTTGTTT
tgtatttctgaggctgctac

SEQ ID NO: 37903 - DNA, 20 bp, Artificial Sequence
  Description of Artificial Sequence: Synthetic oligonucleotide
  Target: LAMA2; (-) strand; PAM type: NNNNGHTT; PAM sequence: TTTTGTTT
tttataaataagtcaccaaa

SEQ ID NO: 37904 - DNA, 20 bp, Artificial Sequence
  Description of Artificial Sequence: Synthetic oligonucleotide
  Target: LAMA2; (-) strand; PAM type: NNNNGHTT; PAM sequence: TCACGTTT
ttcacagaacaagcaagtat

SEQ ID NO: 37905 - DNA, 20 bp, Artificial Sequence
  Description of Artificial Sequence: Synthetic oligonucleotide
  Target: LAMA2; (-) strand; PAM type: NNNNGHTT; PAM sequence: AAGGGATT
ttaaacaacattaatttagg

SEQ ID NO: 37906 - DNA, 20 bp, Artificial Sequence
  Description of Artificial Sequence: Synthetic oligonucleotide
  Target: LAMA2; (-) strand; PAM type: NNNNGHTT; PAM sequence: CTAGGCTT
tatattttgttaggtgtaaa

SEQ ID NO: 37907 - DNA, 20 bp, Artificial Sequence
  Description of Artificial Sequence: Synthetic oligonucleotide
  Target: LAMA2; (-) strand; PAM type: NNNNGHTT; PAM sequence: TTATGATT
acttttatttgcttaatcaa

SEQ ID NO: 37908 - DNA, 20 bp, Artificial Sequence
  Description of Artificial Sequence: Synthetic oligonucleotide
  Target: LAMA2; (-) strand; PAM type: NNNNGHTT; PAM sequence: ATTTGCTT
ctgactataaacatactttt

SEQ ID NO: 37909 - DNA, 20 bp, Artificial Sequence
  Description of Artificial Sequence: Synthetic oligonucleotide
  Target: LAMA2; (-) strand; PAM type: NNNNGHTT; PAM sequence: CTAAGTTT
actgagtagcatatgagata

SEQ ID NO: 37910 - DNA, 20 bp, Artificial Sequence
  Description of Artificial Sequence: Synthetic oligonucleotide
  Target: LAMA2; (-) strand; PAM type: NNNNGHTT; PAM sequence: AAGTGTTT
agaaactggccataagttaa

SEQ ID NO: 37911 - DNA, 20 bp, Artificial Sequence
  Description of Artificial Sequence: Synthetic oligonucleotide
  Target: LAMA2; (-) strand; PAM type: NNNNGHTT; PAM sequence: ATTCGATT
gccttgcaaataaaagttta

SEQ ID NO: 37912 - DNA, 20 bp, Artificial Sequence
  Description of Artificial Sequence: Synthetic oligonucleotide
  Target: LAMA2; (-) strand; PAM type: NNNNGHTT; PAM sequence: AAAAGTTT
ctgtaaagggccttgcaaat

SEQ ID NO: 37913 - DNA, 20 bp, Artificial Sequence
  Description of Artificial Sequence: Synthetic oligonucleotide
  Target: LAMA2; (-) strand; PAM type: NNNNGHTT; PAM sequence: CAGAGTTT
ttttgttcttttgggaatac

SEQ ID NO: 37914 - DNA, 20 bp, Artificial Sequence
  Description of Artificial Sequence: Synthetic oligonucleotide
  Target: LAMA2; (-) strand; PAM type: NNNNGHTT; PAM sequence: TGCTGTTT
gtagaaattcaagtcttatg

SEQ ID NO: 37915 - DNA, 20 bp, Artificial Sequence
  Description of Artificial Sequence: Synthetic oligonucleotide
  Target: LAMA2; (-) strand; PAM type: NNNNGHTT; PAM sequence: AGTTGTTT
aggctcttcttggagctctc

SEQ ID NO: 37916 - DNA, 20 bp, Artificial Sequence
  Description of Artificial Sequence: Synthetic oligonucleotide
  Target: LAMA2; (-) strand; PAM type: NNNNGHTT; PAM sequence: GTTTGATT
tgcttgctttccttctgtca

SEQ ID NO: 37917 - DNA, 20 bp, Artificial Sequence
  Description of Artificial Sequence: Synthetic oligonucleotide
  Target: LAMA2; (-) strand; PAM type: NNNNGHTT; PAM sequence: GTCAGTTT
catttgcttgctttccttct

SEQ ID NO: 37918 - DNA, 20 bp, Artificial Sequence
  Description of Artificial Sequence: Synthetic oligonucleotide
  Target: LAMA2; (-) strand; PAM type: NNNNGHTT; PAM sequence: GCTTGCTT
ttctaccgaatattccattt

SEQ ID NO: 37919 - DNA, 20 bp, Artificial Sequence
  Description of Artificial Sequence: Synthetic oligonucleotide
  Target: LAMA2; (-) strand; PAM type: NNNNGHTT; PAM sequence: ATTTGCTT
ctgattctaccgaatattcc

SEQ ID NO: 37920 - DNA, 20 bp, Artificial Sequence
  Description of Artificial Sequence: Synthetic oligonucleotide
  Target: LAMA2; (-) strand; PAM type: NNNNGHTT; PAM sequence: TTCTGATT
tgggatgtccaaattctttg

SEQ ID NO: 37921 - DNA, 20 bp, Artificial Sequence
  Description of Artificial Sequence: Synthetic oligonucleotide
  Target: LAMA2; (-) strand; PAM type: NNNNGHTT; PAM sequence: AAGAGCTT
atgatcggtaggggaatatg

SEQ ID NO: 37922 - DNA, 20 bp, Artificial Sequence
  Description of Artificial Sequence: Synthetic oligonucleotide
  Target: LAMA2; (-) strand; PAM type: NNNNGHTT; PAM sequence: CAGTGTTT
aacggcagtacaggcaagaa

SEQ ID NO: 37923 - DNA, 20 bp, Artificial Sequence
  Description of Artificial Sequence: Synthetic oligonucleotide
  Target: LAMA2; (-) strand; PAM type: NNNNGHTT; PAM sequence: AAGGGCTT
atgcctgacagtaaaccacc

SEQ ID NO: 37924 - DNA, 20 bp, Artificial Sequence
  Description of Artificial Sequence: Synthetic oligonucleotide
  Target: LAMA2; (-) strand; PAM type: NNNNGHTT; PAM sequence: AATTGTTT
atggttcagttattaaggca

SEQ ID NO: 37925 - DNA, 20 bp, Artificial Sequence
  Description of Artificial Sequence: Synthetic oligonucleotide
  Target: LAMA2; (-) strand; PAM type: NNNNGHTT; PAM sequence: GAGAGCTT
gatgtactgtggtaatttct

SEQ ID NO: 37926 - DNA, 20 bp, Artificial Sequence
  Description of Artificial Sequence: Synthetic oligonucleotide
  Target: LAMA2; (-) strand; PAM type: NNNNGHTT; PAM sequence: AGTGGCTT
tagcctcaactatttagaaa

SEQ ID NO: 37927 - DNA, 20 bp, Artificial Sequence
  Description of Artificial Sequence: Synthetic oligonucleotide
  Target: LAMA2; (-) strand; PAM type: NNNNGHTT; PAM sequence: TTCTGATT
ctgtcagattctggcaatgg

SEQ ID NO: 37928 - DNA, 20 bp, Artificial Sequence
  Description of Artificial Sequence: Synthetic oligonucleotide
  Target: LAMA2; (-) strand; PAM type: NNNNGHTT; PAM sequence: GTCAGATT
tatcttgatacgctatttct

SEQ ID NO: 37929 - DNA, 20 bp, Artificial Sequence
  Description of Artificial Sequence: Synthetic oligonucleotide
  Target: LAMA2; (-) strand; PAM type: NNNNGHTT; PAM sequence: GAAGGATT
ataacactaaaaaagcagag

SEQ ID NO: 37930 - DNA, 20 bp, Artificial Sequence
  Description of Artificial Sequence: Synthetic oligonucleotide
  Target: LAMA2; (-) strand; PAM type: NNNNGHTT; PAM sequence: AAATGTTT
ttataaccaagcaacttgga

SEQ ID NO: 37931 - DNA, 20 bp, Artificial Sequence
  Description of Artificial Sequence: Synthetic oligonucleotide
  Target: LAMA2; (-) strand; PAM type: NNNNGHTT; PAM sequence: TTGGGATT
atgtgagccacttttattat

SEQ ID NO: 37932 - DNA, 20 bp, Artificial Sequence
  Description of Artificial Sequence: Synthetic oligonucleotide
  Target: LAMA2; (-) strand; PAM type: NNNNGHTT; PAM sequence: TTGAGTTT
tgctaaattggctagtattc

SEQ ID NO: 37933 - DNA, 20 bp, Artificial Sequence
  Description of Artificial Sequence: Synthetic oligonucleotide
  Target: LAMA2; (-) strand; PAM type: NNNNGHTT; PAM sequence: AAATGTTT
caaaacagtaaaaatgtgaa

SEQ ID NO: 37934 - DNA, 20 bp, Artificial Sequence
  Description of Artificial Sequence: Synthetic oligonucleotide
  Target: LAMA2; (-) strand; PAM type: NNNNGHTT; PAM sequence: CTAAGTTT
atagaaagtataaaaacgtg

SEQ ID NO: 37935 - DNA, 20 bp, Artificial Sequence
  Description of Artificial Sequence: Synthetic oligonucleotide
  Target: LAMA2; (-) strand; PAM type: NNNNGHTT; PAM sequence: ACTTGATT
aacgaggcgggaaaattaac

SEQ ID NO: 37936 - DNA, 20 bp, Artificial Sequence
  Description of Artificial Sequence: Synthetic oligonucleotide
  Target: LAMA2; (-) strand; PAM type: NNNNGHTT; PAM sequence: GCCTGATT
cctaggatagccctgtgggt

SEQ ID NO: 37937 - DNA, 20 bp, Artificial Sequence
  Description of Artificial Sequence: Synthetic oligonucleotide
  Target: LAMA2; (-) strand; PAM type: NNNNGHTT; PAM sequence: AGTTGCTT
agctctttccactgctgcct

SEQ ID NO: 37938 - DNA, 20 bp, Artificial Sequence
  Description of Artificial Sequence: Synthetic oligonucleotide
  Target: LAMA2; (-) strand; PAM type: NNNNGHTT; PAM sequence: GCAGGATT
ctgtagcctgcagcaaacca

SEQ ID NO: 37939 - DNA, 20 bp, Artificial Sequence
  Description of Artificial Sequence: Synthetic oligonucleotide
  Target: LAMA2; (-) strand; PAM type: NNNNGHTT; PAM sequence: AACTGTTT
tcccaactctgaaattccca

SEQ ID NO: 37940 - DNA, 20 bp, Artificial Sequence
  Description of Artificial Sequence: Synthetic oligonucleotide
  Target: LAMA2; (-) strand; PAM type: NNNNGHTT; PAM sequence: CTTAGTTT
gttgcaatgttccagtagca

SEQ ID NO: 37941 - DNA, 20 bp, Artificial Sequence
  Description of Artificial Sequence: Synthetic oligonucleotide
  Target: LAMA2; (-) strand; PAM type: NNNNGHTT; PAM sequence: AATTGCTT
aactttacagatgcaaagag

SEQ ID NO: 37942 - DNA, 20 bp, Artificial Sequence
  Description of Artificial Sequence: Synthetic oligonucleotide
  Target: LAMA2; (-) strand; PAM type: NNNNGHTT; PAM sequence: GCTAGCTT
aggaacagcagacaagccaa

SEQ ID NO: 37943 - DNA, 20 bp, Artificial Sequence
  Description of Artificial Sequence: Synthetic oligonucleotide
  Target: LAMA2; (-) strand; PAM type: NNNNGHTT; PAM sequence: ATAAGATT
tttggtaaagaacaaatcac

SEQ ID NO: 37944 - DNA, 20 bp, Artificial Sequence
  Description of Artificial Sequence: Synthetic oligonucleotide
  Target: LAMA2; (-) strand; PAM type: NNNNGHTT; PAM sequence: GCAGGTTT
cataatgctgtagaaaataa

SEQ ID NO: 37945 - DNA, 20 bp, Artificial Sequence
  Description of Artificial Sequence: Synthetic oligonucleotide
  Target: LAMA2; (-) strand; PAM type: NNNNGHTT; PAM sequence: AAAGGCTT
gcaactatatgaacaaattt

SEQ ID NO: 37946 - DNA, 20 bp, Artificial Sequence
  Description of Artificial Sequence: Synthetic oligonucleotide
  Target: LAMA2; (-) strand; PAM type: NNNNGHTT; PAM sequence: CAGAGATT
aacaaaacaaaagagtttac

SEQ ID NO: 37947 - DNA, 20 bp, Artificial Sequence
  Description of Artificial Sequence: Synthetic oligonucleotide
  Target: LAMA2; (-) strand; PAM type: NNNNGHTT; PAM sequence: AAGAGTTT
aagcaagaacaacaaaacaa

SEQ ID NO: 37948 - DNA, 20 bp, Artificial Sequence
  Description of Artificial Sequence: Synthetic oligonucleotide
  Target: LAMA2; (-) strand; PAM type: NNNNGHTT; PAM sequence: TATAGCTT
tcagtttccttcttcaaatc

SEQ ID NO: 37949 - DNA, 20 bp, Artificial Sequence
  Description of Artificial Sequence: Synthetic oligonucleotide
  Target: LAMA2; (-) strand; PAM type: NNNNGHTT; PAM sequence: ATCAGTTT
ctgtcctacaaatctcaaat

SEQ ID NO: 37950 - DNA, 20 bp, Artificial Sequence
  Description of Artificial Sequence: Synthetic oligonucleotide
  Target: LAMA2; (-) strand; PAM type: NNNNGHTT; PAM sequence: TTGAGCTT
catcaattacaaggtatttg

SEQ ID NO: 37951 - DNA, 20 bp, Artificial Sequence
  Description of Artificial Sequence: Synthetic oligonucleotide
  Target: LAMA2; (-) strand; PAM type: NNNNGHTT; PAM sequence: GTTTGTTT
aaacaatttcttagagtttt

SEQ ID NO: 37952 - DNA, 20 bp, Artificial Sequence
  Description of Artificial Sequence: Synthetic oligonucleotide
  Target: LAMA2; (-) strand; PAM type: NNNNGHTT; PAM sequence: TTTTGTTT
aaaaaaacaatttcttagag

SEQ ID NO: 37953 - DNA, 20 bp, Artificial Sequence
  Description of Artificial Sequence: Synthetic oligonucleotide
  Target: LAMA2; (-) strand; PAM type: NNNNGHTT; PAM sequence: TAGAGTTT
acctaaaaaaaacaatttct

SEQ ID NO: 37954 - DNA, 20 bp, Artificial Sequence
  Description of Artificial Sequence: Synthetic oligonucleotide
  Target: LAMA2; (-) strand; PAM type: NNNNGHTT; PAM sequence: GCGAGTTT
agagtggaacatatttgtta

SEQ ID NO: 37955 - DNA, 20 bp, Artificial Sequence
  Description of Artificial Sequence: Synthetic oligonucleotide
  Target: LAMA2; (-) strand; PAM type: NNNNGHTT; PAM sequence: AGGGGTTT
ggaagttatggatggcgagg

SEQ ID NO: 37956 - DNA, 20 bp, Artificial Sequence
  Description of Artificial Sequence: Synthetic oligonucleotide
  Target: LAMA2; (-) strand; PAM type: NNNNGHTT; PAM sequence: CCAAGATT
tcttaactaacccatttaat

SEQ ID NO: 37957 - DNA, 20 bp, Artificial Sequence
  Description of Artificial Sequence: Synthetic oligonucleotide
  Target: LAMA2; (-) strand; PAM type: NNNNGHTT; PAM sequence: AGTTGATT
tggaataaaaaatcaaccac

SEQ ID NO: 37958 - DNA, 20 bp, Artificial Sequence
  Description of Artificial Sequence: Synthetic oligonucleotide
  Target: LAMA2; (-) strand; PAM type: NNNNGHTT; PAM sequence: ATCTGATT
gccaagttagtcttgatggg

SEQ ID NO: 37959 - DNA, 20 bp, Artificial Sequence
  Description of Artificial Sequence: Synthetic oligonucleotide
  Target: LAMA2; (-) strand; PAM type: NNNNGHTT; PAM sequence: TTCAGTTT
atttttggtttacaaattca

SEQ ID NO: 37960 - DNA, 20 bp, Artificial Sequence
  Description of Artificial Sequence: Synthetic oligonucleotide
  Target: LAMA2; (-) strand; PAM type: NNNNGHTT; PAM sequence: TTTGGTTT
aggggtcttagaattttatt

SEQ ID NO: 37961 - DNA, 20 bp, Artificial Sequence
  Description of Artificial Sequence: Synthetic oligonucleotide
  Target: LAMA2; (-) strand; PAM type: NNNNGHTT; PAM sequence: TTGGGATT
tcaggtttctttaggtttct

SEQ ID NO: 37962 - DNA, 20 bp, Artificial Sequence
  Description of Artificial Sequence: Synthetic oligonucleotide
  Target: LAMA2; (-) strand; PAM type: NNNNGHTT; PAM sequence: TTAGGTTT
cccatgatgttcaggtttct

SEQ ID NO: 37963 - DNA, 20 bp, Artificial Sequence
  Description of Artificial Sequence: Synthetic oligonucleotide
  Target: LAMA2; (-) strand; PAM type: NNNNGHTT; PAM sequence: TCAGGTTT
atcgtcccttcccatgatgt

SEQ ID NO: 37964 - DNA, 20 bp, Artificial Sequence
  Description of Artificial Sequence: Synthetic oligonucleotide
  Target: LAMA2; (-) strand; PAM type: NNNNGHTT; PAM sequence: CTCTGTTT
tgtctagtcagttttaaaat

SEQ ID NO: 37965 - DNA, 20 bp, Artificial Sequence
  Description of Artificial Sequence: Synthetic oligonucleotide
  Target: LAMA2; (-) strand; PAM type: NNNNGHTT; PAM sequence: GTCAGTTT
tgctgtaaagtgtctgtcta

SEQ ID NO: 37966 - DNA, 20 bp, Artificial Sequence
  Description of Artificial Sequence: Synthetic oligonucleotide
  Target: LAMA2; (-) strand; PAM type: NNNNGHTT; PAM sequence: CTTTGATT
atatattttggtataaaata

SEQ ID NO: 37967 - DNA, 20 bp, Artificial Sequence
  Description of Artificial Sequence: Synthetic oligonucleotide
  Target: LAMA2; (-) strand; PAM type: NNNNGHTT; PAM sequence: GACAGCTT
gaatgcaaatttccccaaga

SEQ ID NO: 37968 - DNA, 20 bp, Artificial Sequence
  Description of Artificial Sequence: Synthetic oligonucleotide
  Target: LAMA2; (-) strand; PAM type: NNNNGHTT; PAM sequence: AGGAGATT
agaaaagacttagtaaggga

SEQ ID NO: 37969 - DNA, 20 bp, Artificial Sequence
  Description of Artificial Sequence: Synthetic oligonucleotide
  Target: LAMA2; (-) strand; PAM type: NNNNGHTT; PAM sequence: GTCAGCTT
attctgcctgaacagttgaa

SEQ ID NO: 37970 - DNA, 20 bp, Artificial Sequence
  Description of Artificial Sequence: Synthetic oligonucleotide
  Target: LAMA2; (-) strand; PAM type: NNNNGHTT; PAM sequence: CAAAGATT
ttccaagtcattgatggatt

SEQ ID NO: 37971 - DNA, 20 bp, Artificial Sequence
  Description of Artificial Sequence: Synthetic oligonucleotide
  Target: LAMA2; (-) strand; PAM type: NNNNGHTT; PAM sequence: GATGGATT
gtgggggcttccaagtcatt

SEQ ID NO: 37972 - DNA, 20 bp, Artificial Sequence
  Description of Artificial Sequence: Synthetic oligonucleotide
  Target: LAMA2; (-) strand; PAM type: NNNNGHTT; PAM sequence: GGGGGCTT
aggacatcttgaagcgaggt

SEQ ID NO: 37973 - DNA, 20 bp, Artificial Sequence
  Description of Artificial Sequence: Synthetic oligonucleotide
  Target: LAMA2; (-) strand; PAM type: NNNNGHTT; PAM sequence: TACAGCTT
tgtgccaaagatgactgggt

SEQ ID NO: 37974 - DNA, 20 bp, Artificial Sequence
  Description of Artificial Sequence: Synthetic oligonucleotide
  Target: LAMA2; (-) strand; PAM type: NNNNGHTT; PAM sequence: AGAGGTTT
aaacaggtctcaatcaattt

SEQ ID NO: 37975 - DNA, 20 bp, Artificial Sequence
  Description of Artificial Sequence: Synthetic oligonucleotide
  Target: LAMA2; (-) strand; PAM type: NNNNGHTT; PAM sequence: TTTTGTTT
ataaatgagtccttgatttt

SEQ ID NO: 37976 - DNA, 20 bp, Artificial Sequence
  Description of Artificial Sequence: Synthetic oligonucleotide
  Target: LAMA2; (-) strand; PAM type: NNNNGHTT; PAM sequence: CCTTGATT
gctatgggaaataaatgagt

SEQ ID NO: 37977 - DNA, 20 bp, Artificial Sequence
  Description of Artificial Sequence: Synthetic oligonucleotide
  Target: LAMA2; (-) strand; PAM type: NNNNGHTT; PAM sequence: AGCAGATT
catttgtgttacttttacac

SEQ ID NO: 37978 - DNA, 20 bp, Artificial Sequence
  Description of Artificial Sequence: Synthetic oligonucleotide
  Target: LAMA2; (-) strand; PAM type: NNNNGHTT; PAM sequence: CTATGTTT
gatatgtaagacagaggttt

SEQ ID NO: 37979 - DNA, 20 bp, Artificial Sequence
  Description of Artificial Sequence: Synthetic oligonucleotide
  Target: LAMA2; (-) strand; PAM type: NNNNGHTT; PAM sequence: AGAGGTTT
ttatgacggatatgtaagac

SEQ ID NO: 37980 - DNA, 20 bp, Artificial Sequence
  Description of Artificial Sequence: Synthetic oligonucleotide
  Target: LAMA2; (-) strand; PAM type: NNNNGHTT; PAM sequence: TAATGCTT
acaatttttaacattagaac

SEQ ID NO: 37981 - DNA, 20 bp, Artificial Sequence
  Description of Artificial Sequence: Synthetic oligonucleotide
  Target: LAMA2; (-) strand; PAM type: NNNNGHTT; PAM sequence: AAATGCTT
acagatgcatgtgaatatta

SEQ ID NO: 37982 - DNA, 20 bp, Artificial Sequence
  Description of Artificial Sequence: Synthetic oligonucleotide
  Target: LAMA2; (-) strand; PAM type: NNNNGHTT; PAM sequence: AAGAGTTT
taagctattttatttttctc

SEQ ID NO: 37983 - DNA, 20 bp, Artificial Sequence
  Description of Artificial Sequence: Synthetic oligonucleotide
  Target: LAMA2; (-) strand; PAM type: NNNNGHTT; PAM sequence: GTAAGTTT
ccaatgtagccctagattac

SEQ ID NO: 37984 - DNA, 20 bp, Artificial Sequence
  Description of Artificial Sequence: Synthetic oligonucleotide
  Target: LAMA2; (-) strand; PAM type: NNNNGHTT; PAM sequence: CCTAGATT
taaattcctgccaatgtagc

SEQ ID NO: 37985 - DNA, 20 bp, Artificial Sequence
  Description of Artificial Sequence: Synthetic oligonucleotide
  Target: LAMA2; (-) strand; PAM type: NNNNGHTT; PAM sequence: ATGCGTTT
taataataatattaggtgac

SEQ ID NO: 37986 - DNA, 20 bp, Artificial Sequence
  Description of Artificial Sequence: Synthetic oligonucleotide
  Target: LAMA2; (-) strand; PAM type: NNNNGHTT; PAM sequence: CTTGGTTT
tttcttcctaatttggattt

SEQ ID NO: 37987 - DNA, 20 bp, Artificial Sequence
  Description of Artificial Sequence: Synthetic oligonucleotide
  Target: LAMA2; (-) strand; PAM type: NNNNGHTT; PAM sequence: TTTGGATT
ctggctctatttcttcctaa

SEQ ID NO: 37988 - DNA, 20 bp, Artificial Sequence
  Description of Artificial Sequence: Synthetic oligonucleotide
  Target: LAMA2; (-) strand; PAM type: NNNNGHTT; PAM sequence: TCTGGATT
tggaatgggctatagacaca

SEQ ID NO: 37989 - DNA, 20 bp, Artificial Sequence
  Description of Artificial Sequence: Synthetic oligonucleotide
  Target: LAMA2; (-) strand; PAM type: NNNNGHTT; PAM sequence: AAATGCTT
ataaacttaactgattgaaa

SEQ ID NO: 37990 - DNA, 20 bp, Artificial Sequence
  Description of Artificial Sequence: Synthetic oligonucleotide
  Target: LAMA2; (-) strand; PAM type: NNNNGHTT; PAM sequence: AACTGATT
ttgcaagaactaataaactt

SEQ ID NO: 37991 - DNA, 20 bp, Artificial Sequence
  Description of Artificial Sequence: Synthetic oligonucleotide
  Target: LAMA2; (-) strand; PAM type: NNNNGHTT; PAM sequence: AGCTGCTT
cgttccctttcttttgaata

SEQ ID NO: 37992 - DNA, 20 bp, Artificial Sequence
  Description of Artificial Sequence: Synthetic oligonucleotide
  Target: LAMA2; (-) strand; PAM type: NNNNGHTT; PAM sequence: GTTGGATT
tgaaaccatttaaaaaactt

SEQ ID NO: 37993 - DNA, 20 bp, Artificial Sequence
  Description of Artificial Sequence: Synthetic oligonucleotide
  Target: LAMA2; (-) strand; PAM type: NNNNGHTT; PAM sequence: CAGAGCTT
ttttgcttgattaatcttgc

SEQ ID NO: 37994 - DNA, 20 bp, Artificial Sequence
  Description of Artificial Sequence: Synthetic oligonucleotide
  Target: LAMA2; (-) strand; PAM type: NNNNGHTT; PAM sequence: GCTTGATT
ttgtgttttacccacgtttt

SEQ ID NO: 37995 - DNA, 20 bp, Artificial Sequence
  Description of Artificial Sequence: Synthetic oligonucleotide
  Target: LAMA2; (-) strand; PAM type: NNNNGHTT; PAM sequence: TTTTGCTT
ttatttgtgttttacccacg

SEQ ID NO: 37996 - DNA, 20 bp, Artificial Sequence
  Description of Artificial Sequence: Synthetic oligonucleotide
  Target: LAMA2; (-) strand; PAM type: NNNNGHTT; PAM sequence: CCACGTTT
attgtttatttgtgttttac

SEQ ID NO: 37997 - DNA, 20 bp, Artificial Sequence
  Description of Artificial Sequence: Synthetic oligonucleotide
  Target: LAMA2; (-) strand; PAM type: NNNNGHTT; PAM sequence: TTGTGTTT
acatttctaaaattgtttat

SEQ ID NO: 37998 - DNA, 20 bp, Artificial Sequence
  Description of Artificial Sequence: Synthetic oligonucleotide
  Target: LAMA2; (-) strand; PAM type: NNNNGHTT; PAM sequence: AATTGTTT
gcccatttttacatttctaa

SEQ ID NO: 37999 - DNA, 20 bp, Artificial Sequence
  Description of Artificial Sequence: Synthetic oligonucleotide
  Target: LAMA2; (-) strand; PAM type: NNNNGHTT; PAM sequence: ATTTGTTT
ttattttctgatacttcctt

SEQ ID NO: 38000 - DNA, 20 bp, Artificial Sequence
  Description of Artificial Sequence: Synthetic oligonucleotide
  Target: LAMA2; (-) strand; PAM type: NNNNGHTT; PAM sequence: ATTTGTTT
aaattttcataatactctta

SEQ ID NO: 38001 - DNA, 20 bp, Artificial Sequence
  Description of Artificial Sequence: Synthetic oligonucleotide
  Target: LAMA2; (-) strand; PAM type: NNNNGHTT; PAM sequence: GTCAGTTT
tatagattttttttctttga

SEQ ID NO: 38002 - DNA, 20 bp, Artificial Sequence
  Description of Artificial Sequence: Synthetic oligonucleotide
  Target: LAMA2; (-) strand; PAM type: NNNNGHTT; PAM sequence: TATAGATT
ctttaatgtttatctgacat

SEQ ID NO: 38003 - DNA, 20 bp, Artificial Sequence
  Description of Artificial Sequence: Synthetic oligonucleotide
  Target: LAMA2; (-) strand; PAM type: NNNNGHTT; PAM sequence: TAATGTTT
gactgctgattcaattactt

SEQ ID NO: 38004 - DNA, 20 bp, Artificial Sequence
  Description of Artificial Sequence: Synthetic oligonucleotide
  Target: LAMA2; (-) strand; PAM type: NNNNGHTT; PAM sequence: TGCTGATT
cattggaaggtttatttgac

SEQ ID NO: 38005 - DNA, 20 bp, Artificial Sequence
  Description of Artificial Sequence: Synthetic oligonucleotide
  Target: LAMA2; (-) strand; PAM type: NNNNGHTT; PAM sequence: GAAGGTTT
gcttggagttaacttcattg

SEQ ID NO: 38006 - DNA, 20 bp, Artificial Sequence
  Description of Artificial Sequence: Synthetic oligonucleotide
  Target: LAMA2; (-) strand; PAM type: NNNNGHTT; PAM sequence: ATAGGCTT
ttgatattacttgcaaatca

SEQ ID NO: 38007 - DNA, 20 bp, Artificial Sequence
  Description of Artificial Sequence: Synthetic oligonucleotide
  Target: LAMA2; (-) strand; PAM type: NNNNGHTT; PAM sequence: TTTTGATT
catttttaaaaatttttgaa

SEQ ID NO: 38008 - DNA, 20 bp, Artificial Sequence
  Description of Artificial Sequence: Synthetic oligonucleotide
  Target: LAMA2; (-) strand; PAM type: NNNNGHTT; PAM sequence: GAAAGTTT
cccagttgttctattctctg

SEQ ID NO: 38009 - DNA, 20 bp, Artificial Sequence
  Description of Artificial Sequence: Synthetic oligonucleotide
  Target: LAMA2; (-) strand; PAM type: NNNNGHTT; PAM sequence: TCAAGATT
tcttcttcatagtcctcttg

SEQ ID NO: 38010 - DNA, 20 bp, Artificial Sequence
  Description of Artificial Sequence: Synthetic oligonucleotide
  Target: LAMA2; (-) strand; PAM type: NNNNGHTT; PAM sequence: AGGGGTTT
gttcatgagtgactttgggt

SEQ ID NO: 38011 - DNA, 20 bp, Artificial Sequence
  Description of Artificial Sequence: Synthetic oligonucleotide
  Target: LAMA2; (-) strand; PAM type: NNNNGHTT; PAM sequence: GATGGATT
cctgactatttttataaact

SEQ ID NO: 38012 - DNA, 20 bp, Artificial Sequence
  Description of Artificial Sequence: Synthetic oligonucleotide
  Target: LAMA2; (-) strand; PAM type: NNNNGHTT; PAM sequence: ACTGGTTT
caatatggtcaattacttaa

SEQ ID NO: 38013 - DNA, 20 bp, Artificial Sequence
  Description of Artificial Sequence: Synthetic oligonucleotide
  Target: LAMA2; (-) strand; PAM type: NNNNGHTT; PAM sequence: AATTGATT
ttttctgtgtctattgagat

SEQ ID NO: 38014 - DNA, 20 bp, Artificial Sequence
  Description of Artificial Sequence: Synthetic oligonucleotide
  Target: LAMA2; (-) strand; PAM type: NNNNGHTT; PAM sequence: GAATGTTT
caaaatttttcagacatgaa

SEQ ID NO: 38015 - DNA, 20 bp, Artificial Sequence
  Description of Artificial Sequence: Synthetic oligonucleotide
  Target: LAMA2; (-) strand; PAM type: NNNNGHTT; PAM sequence: TCTAGTTT
agttaaagtgcttttccaat

SEQ ID NO: 38016 - DNA, 20 bp, Artificial Sequence
  Description of Artificial Sequence: Synthetic oligonucleotide
  Target: LAMA2; (-) strand; PAM type: NNNNGHTT; PAM sequence: AAGTGCTT
tagatagccttcatcagtta

SEQ ID NO: 38017 - DNA, 20 bp, Artificial Sequence
  Description of Artificial Sequence: Synthetic oligonucleotide
  Target: LAMA2; (-) strand; PAM type: NNNNGHTT; PAM sequence: TATTGATT
atattaaataagatatttgc

SEQ ID NO: 38018 - DNA, 20 bp, Artificial Sequence
  Description of Artificial Sequence: Synthetic oligonucleotide
  Target: LAMA2; (-) strand; PAM type: NNNNGHTT; PAM sequence: TCATGTTT
tcgttatagtgagaattgtt

SEQ ID NO: 38019 - DNA, 20 bp, Artificial Sequence
  Description of Artificial Sequence: Synthetic oligonucleotide
  Target: LAMA2; (-) strand; PAM type: NNNNGHTT; PAM sequence: AATTGTTT
gtgggagtcgttatagtgag

SEQ ID NO: 38020 - DNA, 20 bp, Artificial Sequence
  Description of Artificial Sequence: Synthetic oligonucleotide
  Target: LAMA2; (-) strand; PAM type: NNNNGHTT; PAM sequence: GTGAGTTT
gataagtatatcatctataa

SEQ ID NO: 38021 - DNA, 20 bp, Artificial Sequence
  Description of Artificial Sequence: Synthetic oligonucleotide
  Target: LAMA2; (-) strand; PAM type: NNNNGHTT; PAM sequence: TCTTGATT
aagaatttgtctgtagattc

SEQ ID NO: 38022 - DNA, 20 bp, Artificial Sequence
  Description of Artificial Sequence: Synthetic oligonucleotide
  Target: LAMA2; (-) strand; PAM type: NNNNGHTT; PAM sequence: TGTAGATT
tcactgattaagaatttgtc

SEQ ID NO: 38023 - DNA, 20 bp, Artificial Sequence
  Description of Artificial Sequence: Synthetic oligonucleotide
  Target: LAMA2; (-) strand; PAM type: NNNNGHTT; PAM sequence: CACTGATT
atatagtctccttattgact

SEQ ID NO: 38024 - DNA, 20 bp, Artificial Sequence
  Description of Artificial Sequence: Synthetic oligonucleotide
  Target: LAMA2; (-) strand; PAM type: NNNNGHTT; PAM sequence: ACATGATT
agtgttgttgatataaagaa

SEQ ID NO: 38025 - DNA, 20 bp, Artificial Sequence
  Description of Artificial Sequence: Synthetic oligonucleotide
  Target: LAMA2; (-) strand; PAM type: NNNNGHTT; PAM sequence: ATTGGCTT
tcttttgattattcttggcc

SEQ ID NO: 38026 - DNA, 20 bp, Artificial Sequence
  Description of Artificial Sequence: Synthetic oligonucleotide
  Target: LAMA2; (-) strand; PAM type: NNNNGHTT; PAM sequence: TTTTGATT
cgcaccccatctataatttc

SEQ ID NO: 38027 - DNA, 20 bp, Artificial Sequence
  Description of Artificial Sequence: Synthetic oligonucleotide
  Target: LAMA2; (-) strand; PAM type: NNNNGHTT; PAM sequence: CTGGGATT
taccttggcctcccaaagtg

SEQ ID NO: 38028 - DNA, 20 bp, Artificial Sequence
  Description of Artificial Sequence: Synthetic oligonucleotide
  Target: LAMA2; (-) strand; PAM type: NNNNGHTT; PAM sequence: CAGGGTTT
ttttgtatttttagtagaga

SEQ ID NO: 38029 - DNA, 20 bp, Artificial Sequence
  Description of Artificial Sequence: Synthetic oligonucleotide
  Target: LAMA2; (-) strand; PAM type: NNNNGHTT; PAM sequence: AGGCGTTT
tcccgagtagctgggattgc

SEQ ID NO: 38030 - DNA, 20 bp, Artificial Sequence
  Description of Artificial Sequence: Synthetic oligonucleotide
  Target: LAMA2; (-) strand; PAM type: NNNNGHTT; PAM sequence: CTGGGATT
tgcatcagcctcccgagtag

SEQ ID NO: 38031 - DNA, 20 bp, Artificial Sequence
  Description of Artificial Sequence: Synthetic oligonucleotide
  Target: LAMA2; (-) strand; PAM type: NNNNGHTT; PAM sequence: TGGAGATT
aagggcattaattccattca

SEQ ID NO: 38032 - DNA, 20 bp, Artificial Sequence
  Description of Artificial Sequence: Synthetic oligonucleotide
  Target: LAMA2; (-) strand; PAM type: NNNNGHTT; PAM sequence: ATAAGATT
gtcctaactctttatatcag

SEQ ID NO: 38033 - DNA, 20 bp, Artificial Sequence
  Description of Artificial Sequence: Synthetic oligonucleotide
  Target: LAMA2; (-) strand; PAM type: NNNNGHTT; PAM sequence: ATTGGTTT
tgggctattttttcaggtct

SEQ ID NO: 38034 - DNA, 20 bp, Artificial Sequence
  Description of Artificial Sequence: Synthetic oligonucleotide
  Target: LAMA2; (-) strand; PAM type: NNNNGHTT; PAM sequence: GGGAGTTT
aatttatgatttgtttcaag

SEQ ID NO: 38035 - DNA, 20 bp, Artificial Sequence
  Description of Artificial Sequence: Synthetic oligonucleotide
  Target: LAMA2; (-) strand; PAM type: NNNNGHTT; PAM sequence: ATTTGTTT
ataatttttgaaaatttatg

SEQ ID NO: 38036 - DNA, 20 bp, Artificial Sequence
  Description of Artificial Sequence: Synthetic oligonucleotide
  Target: LAMA2; (-) strand; PAM type: NNNNGHTT; PAM sequence: TTATGATT
ttagcataatttttgaaaat

SEQ ID NO: 38037 - DNA, 20 bp, Artificial Sequence
  Description of Artificial Sequence: Synthetic oligonucleotide
  Target: LAMA2; (-) strand; PAM type: NNNNGHTT; PAM sequence: AAAGGTTT
tctcaatgtgttgtctttat

SEQ ID NO: 38038 - DNA, 20 bp, Artificial Sequence
  Description of Artificial Sequence: Synthetic oligonucleotide
  Target: LAMA2; (-) strand; PAM type: NNNNGHTT; PAM sequence: TGTTGTTT
ttttccccctcaggctttgt

SEQ ID NO: 38039 - DNA, 20 bp, Artificial Sequence
  Description of Artificial Sequence: Synthetic oligonucleotide
  Target: LAMA2; (-) strand; PAM type: NNNNGHTT; PAM sequence: TCAGGCTT
tgttccacattttttccccc

SEQ ID NO: 38040 - DNA, 20 bp, Artificial Sequence
  Description of Artificial Sequence: Synthetic oligonucleotide
  Target: LAMA2; (-) strand; PAM type: NNNNGHTT; PAM sequence: CACAGTTT
tgtttctctttttcagagat

SEQ ID NO: 38041 - DNA, 20 bp, Artificial Sequence
  Description of Artificial Sequence: Synthetic oligonucleotide
  Target: LAMA2; (-) strand; PAM type: NNNNGHTT; PAM sequence: ATTTGTTT
gcaattgtaaacctcacccc

SEQ ID NO: 38042 - DNA, 20 bp, Artificial Sequence
  Description of Artificial Sequence: Synthetic oligonucleotide
  Target: LAMA2; (-) strand; PAM type: NNNNGHTT; PAM sequence: TTTGGCTT
tttggcaaggccaggctgtg

SEQ ID NO: 38043 - DNA, 20 bp, Artificial Sequence
  Description of Artificial Sequence: Synthetic oligonucleotide
  Target: LAMA2; (-) strand; PAM type: NNNNGHTT; PAM sequence: CTGTGTTT
ttcaatttggcaaggccagg

SEQ ID NO: 38044 - DNA, 20 bp, Artificial Sequence
  Description of Artificial Sequence: Synthetic oligonucleotide
  Target: LAMA2; (-) strand; PAM type: NNNNGHTT; PAM sequence: TCCGGTTT
acatatttgcaactcagtac

SEQ ID NO: 38045 - DNA, 20 bp, Artificial Sequence
  Description of Artificial Sequence: Synthetic oligonucleotide
  Target: LAMA2; (-) strand; PAM type: NNNNGHTT; PAM sequence: GGTAGTTT
tgattctttcattagcctta

SEQ ID NO: 38046 - DNA, 20 bp, Artificial Sequence
  Description of Artificial Sequence: Synthetic oligonucleotide
  Target: LAMA2; (-) strand; PAM type: NNNNGHTT; PAM sequence: TAGTGATT
ttgtttctcttactactttt

SEQ ID NO: 38047 - DNA, 20 bp, Artificial Sequence
  Description of Artificial Sequence: Synthetic oligonucleotide
  Target: LAMA2; (-) strand; PAM type: NNNNGHTT; PAM sequence: AATTGTTT
cagccctgtatcagctcagg

SEQ ID NO: 38048 - DNA, 20 bp, Artificial Sequence
  Description of Artificial Sequence: Synthetic oligonucleotide
  Target: LAMA2; (-) strand; PAM type: NNNNGHTT; PAM sequence: TGTAGTTT
ggggtgaacctagagtagct

SEQ ID NO: 38049 - DNA, 20 bp, Artificial Sequence
  Description of Artificial Sequence: Synthetic oligonucleotide
  Target: LAMA2; (-) strand; PAM type: NNNNGHTT; PAM sequence: AGTAGCTT
atttgttggggtgaacctag

SEQ ID NO: 38050 - DNA, 20 bp, Artificial Sequence
  Description of Artificial Sequence: Synthetic oligonucleotide
  Target: LAMA2; (-) strand; PAM type: NNNNGHTT; PAM sequence: TCAAGATT
gacttcttttaaggctgttt

SEQ ID NO: 38051 - DNA, 20 bp, Artificial Sequence
  Description of Artificial Sequence: Synthetic oligonucleotide
  Target: LAMA2; (-) strand; PAM type: NNNNGHTT; PAM sequence: GGCTGTTT
aataagttgacttcttttaa

SEQ ID NO: 38052 - DNA, 20 bp, Artificial Sequence
  Description of Artificial Sequence: Synthetic oligonucleotide
  Target: LAMA2; (-) strand; PAM type: NNNNGHTT; PAM sequence: GCTGGATT
tgaattttacattgttgagt

SEQ ID NO: 38053 - DNA, 20 bp, Artificial Sequence
  Description of Artificial Sequence: Synthetic oligonucleotide
  Target: LAMA2; (-) strand; PAM type: NNNNGHTT; PAM sequence: TTTTGATT
ttgtttatgtacctggtagt

SEQ ID NO: 38054 - DNA, 20 bp, Artificial Sequence
  Description of Artificial Sequence: Synthetic oligonucleotide
  Target: LAMA2; (-) strand; PAM type: NNNNGHTT; PAM sequence: GGTAGTTT
ctctgcttgtttatgtacct

SEQ ID NO: 38055 - DNA, 20 bp, Artificial Sequence
  Description of Artificial Sequence: Synthetic oligonucleotide
  Target: LAMA2; (-) strand; PAM type: NNNNGHTT; PAM sequence: GCTTGTTT
ggtagtggcttatatgctct

SEQ ID NO: 38056 - DNA, 20 bp, Artificial Sequence
  Description of Artificial Sequence: Synthetic oligonucleotide
  Target: LAMA2; (-) strand; PAM type: NNNNGHTT; PAM sequence: CTCTGCTT
tcctggtagtggcttatatg

SEQ ID NO: 38057 - DNA, 20 bp, Artificial Sequence
  Description of Artificial Sequence: Synthetic oligonucleotide
  Target: LAMA2; (-) strand; PAM type: NNNNGHTT; PAM sequence: AGTGGCTT
tgattgattttcctcctggt

SEQ ID NO: 38058 - DNA, 20 bp, Artificial Sequence
  Description of Artificial Sequence: Synthetic oligonucleotide
  Target: LAMA2; (-) strand; PAM type: NNNNGHTT; PAM sequence: GATTGATT
tttggggttctgtttccatt

SEQ ID NO: 38059 - DNA, 20 bp, Artificial Sequence
  Description of Artificial Sequence: Synthetic oligonucleotide
  Target: LAMA2; (-) strand; PAM type: NNNNGHTT; PAM sequence: CATTGATT
gccatttggggttctgtttc

SEQ ID NO: 38060 - DNA, 20 bp, Artificial Sequence
  Description of Artificial Sequence: Synthetic oligonucleotide
  Target: LAMA2; (-) strand; PAM type: NNNNGHTT; PAM sequence: TTCTGTTT
gattttcttgccatttgggg

SEQ ID NO: 38061 - DNA, 20 bp, Artificial Sequence
  Description of Artificial Sequence: Synthetic oligonucleotide
  Target: LAMA2; (-) strand; PAM type: NNNNGHTT; PAM sequence: ACATGATT
tttgattctgatatatcttg

SEQ ID NO: 38062 - DNA, 20 bp, Artificial Sequence
  Description of Artificial Sequence: Synthetic oligonucleotide
  Target: LAMA2; (-) strand; PAM type: NNNNGHTT; PAM sequence: ATTTGATT
agttatctgtctttttaata

SEQ ID NO: 38063 - DNA, 20 bp, Artificial Sequence
  Description of Artificial Sequence: Synthetic oligonucleotide
  Target: LAMA2; (-) strand; PAM type: NNNNGHTT; PAM sequence: GATTGCTT
ggccatgttagtttttttct

SEQ ID NO: 38064 - DNA, 20 bp, Artificial Sequence
  Description of Artificial Sequence: Synthetic oligonucleotide
  Target: LAMA2; (-) strand; PAM type: NNNNGHTT; PAM sequence: TTCTGATT
gcctggccatgttagttttt

SEQ ID NO: 38065 - DNA, 20 bp, Artificial Sequence
  Description of Artificial Sequence: Synthetic oligonucleotide
  Target: LAMA2; (-) strand; PAM type: NNNNGHTT; PAM sequence: GTTAGTTT
gagccaccgcgcctggccat

SEQ ID NO: 38066 - DNA, 20 bp, Artificial Sequence
  Description of Artificial Sequence: Synthetic oligonucleotide
  Target: LAMA2; (-) strand; PAM type: NNNNGHTT; PAM sequence: CTGGGATT
tgccttggcctcccaaagtg

SEQ ID NO: 38067 - DNA, 20 bp, Artificial Sequence
  Description of Artificial Sequence: Synthetic oligonucleotide
  Target: LAMA2; (-) strand; PAM type: NNNNGHTT; PAM sequence: TGGGGTTT
ttttgtatttttagtagaga

SEQ ID NO: 38068 - DNA, 20 bp, Artificial Sequence
  Description of Artificial Sequence: Synthetic oligonucleotide
  Target: LAMA2; (-) strand; PAM type: NNNNGHTT; PAM sequence: AAGTGATT
aaccatcgcctcccaggttc

SEQ ID NO: 38069 - DNA, 20 bp, Artificial Sequence
  Description of Artificial Sequence: Synthetic oligonucleotide
  Target: LAMA2; (-) strand; PAM type: NNNNGHTT; PAM sequence: TGTTGCTT
tttgagacagactctcgctc

SEQ ID NO: 38070 - DNA, 20 bp, Artificial Sequence
  Description of Artificial Sequence: Synthetic oligonucleotide
  Target: LAMA2; (-) strand; PAM type: NNNNGHTT; PAM sequence: TTGTGTTT
tctttgttcctctgcacctg

SEQ ID NO: 38071 - DNA, 20 bp, Artificial Sequence
  Description of Artificial Sequence: Synthetic oligonucleotide
  Target: LAMA2; (-) strand; PAM type: NNNNGHTT; PAM sequence: ATAAGTTT
taggcattaggttccagcat

SEQ ID NO: 38072 - DNA, 20 bp, Artificial Sequence
  Description of Artificial Sequence: Synthetic oligonucleotide
  Target: LAMA2; (-) strand; PAM type: NNNNGHTT; PAM sequence: TGGAGATT
aaggatgttaatcccattca

SEQ ID NO: 38073 - DNA, 20 bp, Artificial Sequence
  Description of Artificial Sequence: Synthetic oligonucleotide
  Target: LAMA2; (-) strand; PAM type: NNNNGHTT; PAM sequence: CTCTGCTT
atgtgtggtgagggcttgct

SEQ ID NO: 38074 - DNA, 20 bp, Artificial Sequence
  Description of Artificial Sequence: Synthetic oligonucleotide
  Target: LAMA2; (-) strand; PAM type: NNNNGHTT; PAM sequence: GAGGGCTT
cagcagatttgatgtgtggt

SEQ ID NO: 38075 - DNA, 20 bp, Artificial Sequence
  Description of Artificial Sequence: Synthetic oligonucleotide
  Target: LAMA2; (-) strand; PAM type: NNNNGHTT; PAM sequence: AGCAGATT
aaatccaagatccaggcatc

SEQ ID NO: 38076 - DNA, 20 bp, Artificial Sequence
  Description of Artificial Sequence: Synthetic oligonucleotide
  Target: LAMA2; (-) strand; PAM type: NNNNGHTT; PAM sequence: GGTAGTTT
caacaaaataacagggacta

SEQ ID NO: 38077 - DNA, 20 bp, Artificial Sequence
  Description of Artificial Sequence: Synthetic oligonucleotide
  Target: LAMA2; (-) strand; PAM type: NNNNGHTT; PAM sequence: TCTGGCTT
aacatatctctgtattgtat

SEQ ID NO: 38078 - DNA, 20 bp, Artificial Sequence
  Description of Artificial Sequence: Synthetic oligonucleotide
  Target: LAMA2; (-) strand; PAM type: NNNNGHTT; PAM sequence: CGTTGTTT
tttgttcatttgattgcttg

SEQ ID NO: 38079 - DNA, 20 bp, Artificial Sequence
  Description of Artificial Sequence: Synthetic oligonucleotide
  Target: LAMA2; (-) strand; PAM type: NNNNGHTT; PAM sequence: GATTGCTT
agtatttgttttgttcattt

SEQ ID NO: 38080 - DNA, 20 bp, Artificial Sequence
  Description of Artificial Sequence: Synthetic oligonucleotide
  Target: LAMA2; (-) strand; PAM type: NNNNGHTT; PAM sequence: ATTTGATT
tgatagtatttgttttgttc

SEQ ID NO: 38081 - DNA, 20 bp, Artificial Sequence
  Description of Artificial Sequence: Synthetic oligonucleotide
  Target: LAMA2; (-) strand; PAM type: NNNNGHTT; PAM sequence: ATTTGTTT
aagaattatagactgatagt

SEQ ID NO: 38082 - DNA, 20 bp, Artificial Sequence
  Description of Artificial Sequence: Synthetic oligonucleotide
  Target: LAMA2; (-) strand; PAM type: NNNNGHTT; PAM sequence: TTCAGTTT
gaaacaatctttgttttttc

SEQ ID NO: 38083 - DNA, 20 bp, Artificial Sequence
  Description of Artificial Sequence: Synthetic oligonucleotide
  Target: LAMA2; (-) strand; PAM type: NNNNGHTT; PAM sequence: CTTTGTTT
ttctatttctctgaaacaat

SEQ ID NO: 38084 - DNA, 20 bp, Artificial Sequence
  Description of Artificial Sequence: Synthetic oligonucleotide
  Target: LAMA2; (-) strand; PAM type: NNNNGHTT; PAM sequence: ACCTGTTT
gtgacaaagcattgctattc

SEQ ID NO: 38085 - DNA, 20 bp, Artificial Sequence
  Description of Artificial Sequence: Synthetic oligonucleotide
  Target: LAMA2; (-) strand; PAM type: NNNNGHTT; PAM sequence: TTAAGTTT
gaagtatttgaagttctact

SEQ ID NO: 38086 - DNA, 20 bp, Artificial Sequence
  Description of Artificial Sequence: Synthetic oligonucleotide
  Target: LAMA2; (-) strand; PAM type: NNNNGHTT; PAM sequence: TTAAGTTT
ttggtgctggttttctttct

SEQ ID NO: 38087 - DNA, 20 bp, Artificial Sequence
  Description of Artificial Sequence: Synthetic oligonucleotide
  Target: LAMA2; (-) strand; PAM type: NNNNGHTT; PAM sequence: GCTGGTTT
tgaaacactttcaaattggt

SEQ ID NO: 38088 - DNA, 20 bp, Artificial Sequence
  Description of Artificial Sequence: Synthetic oligonucleotide
  Target: LAMA2; (-) strand; PAM type: NNNNGHTT; PAM sequence: GAGAGTTT
acaacgtgaagttttacatt

SEQ ID NO: 38089 - DNA, 20 bp, Artificial Sequence
  Description of Artificial Sequence: Synthetic oligonucleotide
  Target: LAMA2; (-) strand; PAM type: NNNNGHTT; PAM sequence: TGAAGTTT
aaaagctacagaaaacaacg

SEQ ID NO: 38090 - DNA, 20 bp, Artificial Sequence
  Description of Artificial Sequence: Synthetic oligonucleotide
  Target: LAMA2; (-) strand; PAM type: NNNNGHTT; PAM sequence: CCAGGTTT
caacaacagtaaacaaaatg

SEQ ID NO: 38091 - DNA, 20 bp, Artificial Sequence
  Description of Artificial Sequence: Synthetic oligonucleotide
  Target: LAMA2; (-) strand; PAM type: NNNNGHTT; PAM sequence: CTTAGCTT
agctgttgcagccctctctc

SEQ ID NO: 38092 - DNA, 20 bp, Artificial Sequence
  Description of Artificial Sequence: Synthetic oligonucleotide
  Target: LAMA2; (-) strand; PAM type: NNNNGHTT; PAM sequence: GCAGGATT
tatgtgagatcaagctgtca

SEQ ID NO: 38093 - DNA, 20 bp, Artificial Sequence
  Description of Artificial Sequence: Synthetic oligonucleotide
  Target: LAMA2; (-) strand; PAM type: NNNNGHTT; PAM sequence: AATAGCTT
ggtcatccgcttatatgagt

SEQ ID NO: 38094 - DNA, 20 bp, Artificial Sequence
  Description of Artificial Sequence: Synthetic oligonucleotide
  Target: LAMA2; (-) strand; PAM type: NNNNGHTT; PAM sequence: ATCCGCTT
aaaaatgagagaatcaggtc

SEQ ID NO: 38095 - DNA, 20 bp, Artificial Sequence
  Description of Artificial Sequence: Synthetic oligonucleotide
  Target: LAMA2; (-) strand; PAM type: NNNNGHTT; PAM sequence: ACTAGATT
gataatgagaatctggctca

SEQ ID NO: 38096 - DNA, 20 bp, Artificial Sequence
  Description of Artificial Sequence: Synthetic oligonucleotide
  Target: LAMA2; (-) strand; PAM type: NNNNGHTT; PAM sequence: GAGAGCTT
tgtgtgctaaggacattttc

SEQ ID NO: 38097 - DNA, 20 bp, Artificial Sequence
  Description of Artificial Sequence: Synthetic oligonucleotide
  Target: LAMA2; (-) strand; PAM type: NNNNGHTT; PAM sequence: GACAGCTT
aaagcaattggcatttatcg

SEQ ID NO: 38098 - DNA, 20 bp, Artificial Sequence
  Description of Artificial Sequence: Synthetic oligonucleotide
  Target: LAMA2; (-) strand; PAM type: NNNNGHTT; PAM sequence: AAGTGTTT
actatgtcagacaggtgaca

SEQ ID NO: 38099 - DNA, 20 bp, Artificial Sequence
  Description of Artificial Sequence: Synthetic oligonucleotide
  Target: LAMA2; (-) strand; PAM type: NNNNGHTT; PAM sequence: CTCTGATT
tacttgctaaaattaactct

SEQ ID NO: 38100 - DNA, 20 bp, Artificial Sequence
  Description of Artificial Sequence: Synthetic oligonucleotide
  Target: LAMA2; (-) strand; PAM type: NNNNGHTT; PAM sequence: TTATGTTT
aatctggttaactgatttat

SEQ ID NO: 38101 - DNA, 20 bp, Artificial Sequence
  Description of Artificial Sequence: Synthetic oligonucleotide
  Target: LAMA2; (-) strand; PAM type: NNNNGHTT; PAM sequence: AACTGATT
ggtatttcacaaatctggtt

SEQ ID NO: 38102 - DNA, 20 bp, Artificial Sequence
  Description of Artificial Sequence: Synthetic oligonucleotide
  Target: LAMA2; (-) strand; PAM type: NNNNGHTT; PAM sequence: GTGTGTTT
acatggtgtttaccctgtcg

SEQ ID NO: 38103 - DNA, 20 bp, Artificial Sequence
  Description of Artificial Sequence: Synthetic oligonucleotide
  Target: LAMA2; (-) strand; PAM type: NNNNGHTT; PAM sequence: TGGTGTTT
tggccatcatcatgttcaca

SEQ ID NO: 38104 - DNA, 20 bp, Artificial Sequence
  Description of Artificial Sequence: Synthetic oligonucleotide
  Target: LAMA2; (-) strand; PAM type: NNNNGHTT; PAM sequence: CTTTGCTT
atctgttccaggcctctctc

SEQ ID NO: 38105 - DNA, 20 bp, Artificial Sequence
  Description of Artificial Sequence: Synthetic oligonucleotide
  Target: LAMA2; (-) strand; PAM type: NNNNGHTT; PAM sequence: TATTGTTT
tggcttatacaacagaaatg

SEQ ID NO: 38106 - DNA, 20 bp, Artificial Sequence
  Description of Artificial Sequence: Synthetic oligonucleotide
  Target: LAMA2; (-) strand; PAM type: NNNNGHTT; PAM sequence: GGTGGCTT
taataaaataccatagactg

SEQ ID NO: 38107 - DNA, 20 bp, Artificial Sequence
  Description of Artificial Sequence: Synthetic oligonucleotide
  Target: LAMA2; (-) strand; PAM type: NNNNGHTT; PAM sequence: ATTGGTTT
attgatgttttatgatttgt

SEQ ID NO: 38108 - DNA, 20 bp, Artificial Sequence
  Description of Artificial Sequence: Synthetic oligonucleotide
  Target: LAMA2; (-) strand; PAM type: NNNNGHTT; PAM sequence: TTATGATT
ttttaaaaataattgatgtt

SEQ ID NO: 38109 - DNA, 20 bp, Artificial Sequence
  Description of Artificial Sequence: Synthetic oligonucleotide
  Target: LAMA2; (-) strand; PAM type: NNNNGHTT; PAM sequence: TGATGTTT
tatgagattttaaaaataat

SEQ ID NO: 38110 - DNA, 20 bp, Artificial Sequence
  Description of Artificial Sequence: Synthetic oligonucleotide
  Target: LAMA2; (-) strand; PAM type: NNNNGHTT; PAM sequence: ATGAGATT
atataacaagaatgaaaatt

SEQ ID NO: 38111 - DNA, 20 bp, Artificial Sequence
  Description of Artificial Sequence: Synthetic oligonucleotide
  Target: LAMA2; (-) strand; PAM type: NNNNGHTT; PAM sequence: ATTTGTTT
attagagagagtcacctttt

SEQ ID NO: 38112 - DNA, 20 bp, Artificial Sequence
  Description of Artificial Sequence: Synthetic oligonucleotide
  Target: LAMA2; (-) strand; PAM type: NNNNGHTT; PAM sequence: TACCGTTT
atactatgagtcgggttgag

SEQ ID NO: 38113 - DNA, 20 bp, Artificial Sequence
  Description of Artificial Sequence: Synthetic oligonucleotide
  Target: LAMA2; (-) strand; PAM type: NNNNGHTT; PAM sequence: CAATGATT
ctttcctatatgttagaaga

SEQ ID NO: 38114 - DNA, 20 bp, Artificial Sequence
  Description of Artificial Sequence: Synthetic oligonucleotide
  Target: LAMA2; (-) strand; PAM type: NNNNGHTT; PAM sequence: TTTGGATT
ctataactttggattttttt

SEQ ID NO: 38115 - DNA, 20 bp, Artificial Sequence
  Description of Artificial Sequence: Synthetic oligonucleotide
  Target: LAMA2; (-) strand; PAM type: NNNNGHTT; PAM sequence: TTTGGATT
ccaccctgcccagctataac

SEQ ID NO: 38116 - DNA, 20 bp, Artificial Sequence
  Description of Artificial Sequence: Synthetic oligonucleotide
  Target: LAMA2; (-) strand; PAM type: NNNNGHTT; PAM sequence: CTGGGATT
tgcctcagcctcccaaagtg

SEQ ID NO: 38117 - DNA, 20 bp, Artificial Sequence
  Description of Artificial Sequence: Synthetic oligonucleotide
  Target: LAMA2; (-) strand; PAM type: NNNNGHTT; PAM sequence: CGGGGTTT
tgtattttttttagtagaga

SEQ ID NO: 38118 - DNA, 20 bp, Artificial Sequence
  Description of Artificial Sequence: Synthetic oligonucleotide
  Target: LAMA2; (-) strand; PAM type: NNNNGHTT; PAM sequence: AAGCGATT
aacctctgcctcctggattc

SEQ ID NO: 38119 - DNA, 20 bp, Artificial Sequence
  Description of Artificial Sequence: Synthetic oligonucleotide
  Target: LAMA2; (-) strand; PAM type: NNNNGHTT; PAM sequence: CCTGGATT
gctcactgcaacctctgcct

SEQ ID NO: 38120 - DNA, 20 bp, Artificial Sequence
  Description of Artificial Sequence: Synthetic oligonucleotide
  Target: LAMA2; (-) strand; PAM type: NNNNGHTT; PAM sequence: TTTGGATT
taagactgtgcatttataac

SEQ ID NO: 38121 - DNA, 20 bp, Artificial Sequence
  Description of Artificial Sequence: Synthetic oligonucleotide
  Target: LAMA2; (-) strand; PAM type: NNNNGHTT; PAM sequence: GGCAGCTT
taatcagtctctcagtgatt

SEQ ID NO: 38122 - DNA, 20 bp, Artificial Sequence
  Description of Artificial Sequence: Synthetic oligonucleotide
  Target: LAMA2; (-) strand; PAM type: NNNNGHTT; PAM sequence: CAGTGATT
aactcatttaatcagtctct

SEQ ID NO: 38123 - DNA, 20 bp, Artificial Sequence
  Description of Artificial Sequence: Synthetic oligonucleotide
  Target: LAMA2; (-) strand; PAM type: NNNNGHTT; PAM sequence: TAGTGTTT
ttccttttttaataatttta

SEQ ID NO: 38124 - DNA, 20 bp, Artificial Sequence
  Description of Artificial Sequence: Synthetic oligonucleotide
  Target: LAMA2; (-) strand; PAM type: NNNNGHTT; PAM sequence: CTAAGTTT
gagccagtgcacctggcctc

SEQ ID NO: 38125 - DNA, 20 bp, Artificial Sequence
  Description of Artificial Sequence: Synthetic oligonucleotide
  Target: LAMA2; (-) strand; PAM type: NNNNGHTT; PAM sequence: TTGGGATT
tgtctcaaccaccaaaagtg

SEQ ID NO: 38126 - DNA, 20 bp, Artificial Sequence
  Description of Artificial Sequence: Synthetic oligonucleotide
  Target: LAMA2; (-) strand; PAM type: NNNNGHTT; PAM sequence: TGGGGTTT
tttttgtatttttagtagag

SEQ ID NO: 38127 - DNA, 20 bp, Artificial Sequence
  Description of Artificial Sequence: Synthetic oligonucleotide
  Target: LAMA2; (-) strand; PAM type: NNNNGHTT; PAM sequence: AGGTGATT
aatctccgcctccggagttc

SEQ ID NO: 38128 - DNA, 20 bp, Artificial Sequence
  Description of Artificial Sequence: Synthetic oligonucleotide
  Target: LAMA2; (-) strand; PAM type: NNNNGHTT; PAM sequence: CTAGGTTT
atagataaactactttgttc

SEQ ID NO: 38129 - DNA, 20 bp, Artificial Sequence
  Description of Artificial Sequence: Synthetic oligonucleotide
  Target: LAMA2; (-) strand; PAM type: NNNNGHTT; PAM sequence: TATAGATT
agacaaatagtagtcataca

SEQ ID NO: 38130 - DNA, 20 bp, Artificial Sequence
  Description of Artificial Sequence: Synthetic oligonucleotide
  Target: LAMA2; (-) strand; PAM type: NNNNGHTT; PAM sequence: ATTCGTTT
ccttataattacaaggacat

SEQ ID NO: 38131 - DNA, 20 bp, Artificial Sequence
  Description of Artificial Sequence: Synthetic oligonucleotide
  Target: LAMA2; (-) strand; PAM type: NNNNGHTT; PAM sequence: CAGAGCTT
tcttgagtggggcactagaa

SEQ ID NO: 38132 - DNA, 20 bp, Artificial Sequence
  Description of Artificial Sequence: Synthetic oligonucleotide
  Target: LAMA2; (-) strand; PAM type: NNNNGHTT; PAM sequence: AATAGATT
atagaaaagcaatagtttgt

SEQ ID NO: 38133 - DNA, 20 bp, Artificial Sequence
  Description of Artificial Sequence: Synthetic oligonucleotide
  Target: LAMA2; (-) strand; PAM type: NNNNGHTT; PAM sequence: AATAGTTT
acagcttagaatagaaaagc

SEQ ID NO: 38134 - DNA, 20 bp, Artificial Sequence
  Description of Artificial Sequence: Synthetic oligonucleotide
  Target: LAMA2; (-) strand; PAM type: NNNNGHTT; PAM sequence: AACAGCTT
attaaagcaataatttttac

SEQ ID NO: 38135 - DNA, 20 bp, Artificial Sequence
  Description of Artificial Sequence: Synthetic oligonucleotide
  Target: LAMA2; (-) strand; PAM type: NNNNGHTT; PAM sequence: TAATGCTT
gcagataggattggggcatt

SEQ ID NO: 38136 - DNA, 20 bp, Artificial Sequence
  Description of Artificial Sequence: Synthetic oligonucleotide
  Target: LAMA2; (-) strand; PAM type: NNNNGHTT; PAM sequence: ATAGGATT
tgccaaacaatttttagcag

SEQ ID NO: 38137 - DNA, 20 bp, Artificial Sequence
  Description of Artificial Sequence: Synthetic oligonucleotide
  Target: LAMA2; (-) strand; PAM type: NNNNGHTT; PAM sequence: TTATGTTT
aggaataaaaaatgtaagct

SEQ ID NO: 38138 - DNA, 20 bp, Artificial Sequence
  Description of Artificial Sequence: Synthetic oligonucleotide
  Target: LAMA2; (-) strand; PAM type: NNNNGHTT; PAM sequence: GTAAGCTT
agacatcaggaataaaaaat

SEQ ID NO: 38139 - DNA, 20 bp, Artificial Sequence
  Description of Artificial Sequence: Synthetic oligonucleotide
  Target: LAMA2; (-) strand; PAM type: NNNNGHTT; PAM sequence: AACTGCTT
aaaaagtaaggaaagagagc

SEQ ID NO: 38140 - DNA, 20 bp, Artificial Sequence
  Description of Artificial Sequence: Synthetic oligonucleotide
  Target: LAMA2; (-) strand; PAM type: NNNNGHTT; PAM sequence: GAGAGCTT
agacacagctaatatagagg

SEQ ID NO: 38141 - DNA, 20 bp, Artificial Sequence
  Description of Artificial Sequence: Synthetic oligonucleotide
  Target: LAMA2; (-) strand; PAM type: NNNNGHTT; PAM sequence: GTTGGATT
cctttttcagtgtgccaaat

SEQ ID NO: 38142 - DNA, 20 bp, Artificial Sequence
  Description of Artificial Sequence: Synthetic oligonucleotide
  Target: LAMA2; (-) strand; PAM type: NNNNGHTT; PAM sequence: ACCTGTTT
tttcaatcacccaacaaact

SEQ ID NO: 38143 - DNA, 20 bp, Artificial Sequence
  Description of Artificial Sequence: Synthetic oligonucleotide
  Target: LAMA2; (-) strand; PAM type: NNNNGHTT; PAM sequence: GTCAGCTT
agtctaattggctcaattcc

SEQ ID NO: 38144 - DNA, 20 bp, Artificial Sequence
  Description of Artificial Sequence: Synthetic oligonucleotide
  Target: LAMA2; (-) strand; PAM type: NNNNGHTT; PAM sequence: TTCAGTTT
gctgaagtgtgtactcaggc

SEQ ID NO: 38145 - DNA, 20 bp, Artificial Sequence
  Description of Artificial Sequence: Synthetic oligonucleotide
  Target: LAMA2; (-) strand; PAM type: NNNNGHTT; PAM sequence: TCAGGCTT
gcaactgctgaagtgtgtac

SEQ ID NO: 38146 - DNA, 20 bp, Artificial Sequence
  Description of Artificial Sequence: Synthetic oligonucleotide
  Target: LAMA2; (-) strand; PAM type: NNNNGHTT; PAM sequence: TCATGATT
gaagttgagaggcaatggcc

SEQ ID NO: 38147 - DNA, 20 bp, Artificial Sequence
  Description of Artificial Sequence: Synthetic oligonucleotide
  Target: LAMA2; (-) strand; PAM type: NNNNGHTT; PAM sequence: GCCCGTTT
atacacaatgcaaaagaagg

SEQ ID NO: 38148 - DNA, 20 bp, Artificial Sequence
  Description of Artificial Sequence: Synthetic oligonucleotide
  Target: LAMA2; (-) strand; PAM type: NNNNGHTT; PAM sequence: ACTTGTTT
aattaattttttaaaaacat

SEQ ID NO: 38149 - DNA, 20 bp, Artificial Sequence
  Description of Artificial Sequence: Synthetic oligonucleotide
  Target: LAMA2; (-) strand; PAM type: NNNNGHTT; PAM sequence: GTATGATT
aaacaaaactatttacactt

SEQ ID NO: 38150 - DNA, 20 bp, Artificial Sequence
  Description of Artificial Sequence: Synthetic oligonucleotide
  Target: LAMA2; (-) strand; PAM type: NNNNGHTT; PAM sequence: GGAAGATT
tctaatacttattaggaact

SEQ ID NO: 38151 - DNA, 20 bp, Artificial Sequence
  Description of Artificial Sequence: Synthetic oligonucleotide
  Target: LAMA2; (-) strand; PAM type: NNNNGHTT; PAM sequence: ACAGGTTT
ttcgtgaactttcttgacca

SEQ ID NO: 38152 - DNA, 20 bp, Artificial Sequence
  Description of Artificial Sequence: Synthetic oligonucleotide
  Target: LAMA2; (-) strand; PAM type: NNNNGHTT; PAM sequence: TCTTGTTT
taagaatatcaaggtgatgt

SEQ ID NO: 38153 - DNA, 20 bp, Artificial Sequence
  Description of Artificial Sequence: Synthetic oligonucleotide
  Target: LAMA2; (-) strand; PAM type: NNNNGHTT; PAM sequence: TCAAGATT
cccaaccagttccctctcac

SEQ ID NO: 38154 - DNA, 20 bp, Artificial Sequence
  Description of Artificial Sequence: Synthetic oligonucleotide
  Target: LAMA2; (-) strand; PAM type: NNNNGHTT; PAM sequence: CAATGTTT
tagactcataacatgttctt

SEQ ID NO: 38155 - DNA, 20 bp, Artificial Sequence
  Description of Artificial Sequence: Synthetic oligonucleotide
  Target: LAMA2; (-) strand; PAM type: NNNNGHTT; PAM sequence: AGAAGATT
acattaagaaacagtgtcac

SEQ ID NO: 38156 - DNA, 20 bp, Artificial Sequence
  Description of Artificial Sequence: Synthetic oligonucleotide
  Target: LAMA2; (-) strand; PAM type: NNNNGHTT; PAM sequence: AAATGCTT
taataataatagctaatacc

SEQ ID NO: 38157 - DNA, 20 bp, Artificial Sequence
  Description of Artificial Sequence: Synthetic oligonucleotide
  Target: LAMA2; (-) strand; PAM type: NNNNGHTT; PAM sequence: GTCTGTTT
ttcttcctctctctctttct

SEQ ID NO: 38158 - DNA, 20 bp, Artificial Sequence
  Description of Artificial Sequence: Synthetic oligonucleotide
  Target: LAMA2; (-) strand; PAM type: NNNNGHTT; PAM sequence: CCCTGCTT
tgttttcctttccttgccct

SEQ ID NO: 38159 - DNA, 20 bp, Artificial Sequence
  Description of Artificial Sequence: Synthetic oligonucleotide
  Target: LAMA2; (-) strand; PAM type: NNNNGHTT; PAM sequence: CATTGTTT
atttatttctttattctttc

SEQ ID NO: 38160 - DNA, 20 bp, Artificial Sequence
  Description of Artificial Sequence: Synthetic oligonucleotide
  Target: LAMA2; (-) strand; PAM type: NNNNGHTT; PAM sequence: CAAAGCTT
aggggaacttcaatggcttg

SEQ ID NO: 38161 - DNA, 20 bp, Artificial Sequence
  Description of Artificial Sequence: Synthetic oligonucleotide
  Target: LAMA2; (-) strand; PAM type: NNNNGHTT; PAM sequence: AATGGCTT
aaatggcctaggggaacttc

SEQ ID NO: 38162 - DNA, 20 bp, Artificial Sequence
  Description of Artificial Sequence: Synthetic oligonucleotide
  Target: LAMA2; (-) strand; PAM type: NNNNGHTT; PAM sequence: ACGAGCTT
ttcctgcagtatgagtaaaa

SEQ ID NO: 38163 - DNA, 20 bp, Artificial Sequence
  Description of Artificial Sequence: Synthetic oligonucleotide
  Target: LAMA2; (-) strand; PAM type: NNNNGHTT; PAM sequence: TTTTGCTT
aaaaaagcaaaataaagcat

SEQ ID NO: 38164 - DNA, 20 bp, Artificial Sequence
  Description of Artificial Sequence: Synthetic oligonucleotide
  Target: LAMA2; (-) strand; PAM type: NNNNGHTT; PAM sequence: TTAAGATT
gtttcggatcaagagcagac

SEQ ID NO: 38165 - DNA, 20 bp, Artificial Sequence
  Description of Artificial Sequence: Synthetic oligonucleotide
  Target: LAMA2; (-) strand; PAM type: NNNNGHTT; PAM sequence: AAGAGTTT
ttttctaggtaaagtttcaa

SEQ ID NO: 38166 - DNA, 20 bp, Artificial Sequence
  Description of Artificial Sequence: Synthetic oligonucleotide
  Target: LAMA2; (-) strand; PAM type: NNNNGHTT; PAM sequence: TAAAGTTT
ttgctctatcattttctagg

SEQ ID NO: 38167 - DNA, 20 bp, Artificial Sequence
  Description of Artificial Sequence: Synthetic oligonucleotide
  Target: LAMA2; (-) strand; PAM type: NNNNGHTT; PAM sequence: GCTAGATT
ccatcaccctccaaatctct

SEQ ID NO: 38168 - DNA, 20 bp, Artificial Sequence
  Description of Artificial Sequence: Synthetic oligonucleotide
  Target: LAMA2; (-) strand; PAM type: NNNNGHTT; PAM sequence: ATGAGCTT
tttcaccatgcatgaagctc

SEQ ID NO: 38169 - DNA, 20 bp, Artificial Sequence
  Description of Artificial Sequence: Synthetic oligonucleotide
  Target: LAMA2; (-) strand; PAM type: NNNNGHTT; PAM sequence: ACGAGTTT
ttttatgggatcaagctgtc

SEQ ID NO: 38170 - DNA, 20 bp, Artificial Sequence
  Description of Artificial Sequence: Synthetic oligonucleotide
  Target: LAMA2; (-) strand; PAM type: NNNNGHTT; PAM sequence: CTGAGTTT
agagtcaaacctcatccttg

SEQ ID NO: 38171 - DNA, 20 bp, Artificial Sequence
  Description of Artificial Sequence: Synthetic oligonucleotide
  Target: LAMA2; (-) strand; PAM type: NNNNGHTT; PAM sequence: CCTGGCTT
agttttgctgaaccccttaa

SEQ ID NO: 38172 - DNA, 20 bp, Artificial Sequence
  Description of Artificial Sequence: Synthetic oligonucleotide
  Target: LAMA2; (-) strand; PAM type: NNNNGHTT; PAM sequence: AACAGTTT
atttttaaaggagttaattt

SEQ ID NO: 38173 - DNA, 20 bp, Artificial Sequence
  Description of Artificial Sequence: Synthetic oligonucleotide
  Target: LAMA2; (-) strand; PAM type: NNNNGHTT; PAM sequence: ACTAGATT
gagagactttcatagcaata

SEQ ID NO: 38174 - DNA, 20 bp, Artificial Sequence
  Description of Artificial Sequence: Synthetic oligonucleotide
  Target: LAMA2; (-) strand; PAM type: NNNNGHTT; PAM sequence: CTGGGATT
cgcctcagcctcccaaagtg

SEQ ID NO: 38175 - DNA, 20 bp, Artificial Sequence
  Description of Artificial Sequence: Synthetic oligonucleotide
  Target: LAMA2; (-) strand; PAM type: NNNNGHTT; PAM sequence: ATGGGATT
tttatgtatatttagtagag

SEQ ID NO: 38176 - DNA, 20 bp, Artificial Sequence
  Description of Artificial Sequence: Synthetic oligonucleotide
  Target: LAMA2; (-) strand; PAM type: NNNNGHTT; PAM sequence: CTGGGATT
tgcctcagcctcccgagtag

SEQ ID NO: 38177 - DNA, 20 bp, Artificial Sequence
  Description of Artificial Sequence: Synthetic oligonucleotide
  Target: LAMA2; (-) strand; PAM type: NNNNGHTT; PAM sequence: CCCGGCTT
gctcactgcaagctccacct

SEQ ID NO: 38178 - DNA, 20 bp, Artificial Sequence
  Description of Artificial Sequence: Synthetic oligonucleotide
  Target: LAMA2; (-) strand; PAM type: NNNNGHTT; PAM sequence: CGTAGATT
cttggggagctgattaaaaa

SEQ ID NO: 38179 - DNA, 20 bp, Artificial Sequence
  Description of Artificial Sequence: Synthetic oligonucleotide
  Target: LAMA2; (-) strand; PAM type: NNNNGHTT; PAM sequence: AGCTGATT
gggtaaataatcacttgggg

SEQ ID NO: 38180 - DNA, 20 bp, Artificial Sequence
  Description of Artificial Sequence: Synthetic oligonucleotide
  Target: LAMA2; (-) strand; PAM type: NNNNGHTT; PAM sequence: GTTTGTTT
tactgcaggtttttttgttt

SEQ ID NO: 38181 - DNA, 20 bp, Artificial Sequence
  Description of Artificial Sequence: Synthetic oligonucleotide
  Target: LAMA2; (-) strand; PAM type: NNNNGHTT; PAM sequence: GTTTGTTT
agcatactgcaggttttttt

SEQ ID NO: 38182 - DNA, 20 bp, Artificial Sequence
  Description of Artificial Sequence: Synthetic oligonucleotide
  Target: LAMA2; (-) strand; PAM type: NNNNGHTT; PAM sequence: TTTTGTTT
taaaagcatactgcaggttt

SEQ ID NO: 38183 - DNA, 20 bp, Artificial Sequence
  Description of Artificial Sequence: Synthetic oligonucleotide
  Target: LAMA2; (-) strand; PAM type: NNNNGHTT; PAM sequence: GCAGGTTT
attcagactaaaagcatact

SEQ ID NO: 38184 - DNA, 20 bp, Artificial Sequence
  Description of Artificial Sequence: Synthetic oligonucleotide
  Target: LAMA2; (-) strand; PAM type: NNNNGHTT; PAM sequence: ATGAGATT
catgcgtggttcggtttcta

SEQ ID NO: 38185 - DNA, 20 bp, Artificial Sequence
  Description of Artificial Sequence: Synthetic oligonucleotide
  Target: LAMA2; (-) strand; PAM type: NNNNGHTT; PAM sequence: TTCGGTTT
gtgtgcgtgcacatgcgtgg

SEQ ID NO: 38186 - DNA, 20 bp, Artificial Sequence
  Description of Artificial Sequence: Synthetic oligonucleotide
  Target: LAMA2; (-) strand; PAM type: NNNNGHTT; PAM sequence: CTAAGATT
tctttaaaaatagctgcttt

SEQ ID NO: 38187 - DNA, 20 bp, Artificial Sequence
  Description of Artificial Sequence: Synthetic oligonucleotide
  Target: LAMA2; (-) strand; PAM type: NNNNGHTT; PAM sequence: AGCTGCTT
cttcctgtttctttaaaaat

SEQ ID NO: 38188 - DNA, 20 bp, Artificial Sequence
  Description of Artificial Sequence: Synthetic oligonucleotide
  Target: LAMA2; (-) strand; PAM type: NNNNGHTT; PAM sequence: TCCTGTTT
atggcagtacatgttagact

SEQ ID NO: 38189 - DNA, 20 bp, Artificial Sequence
  Description of Artificial Sequence: Synthetic oligonucleotide
  Target: LAMA2; (-) strand; PAM type: NNNNGHTT; PAM sequence: CTGTGTTT
tgtgaagttaagggtcttac

SEQ ID NO: 38190 - DNA, 20 bp, Artificial Sequence
  Description of Artificial Sequence: Synthetic oligonucleotide
  Target: LAMA2; (-) strand; PAM type: NNNNGHTT; PAM sequence: TTTTGTTT
tttgggtgttctaattagga

SEQ ID NO: 38191 - DNA, 20 bp, Artificial Sequence
  Description of Artificial Sequence: Synthetic oligonucleotide
  Target: LAMA2; (-) strand; PAM type: NNNNGHTT; PAM sequence: TTAGGATT
tttgtttttgggtgttctaa

SEQ ID NO: 38192 - DNA, 20 bp, Artificial Sequence
  Description of Artificial Sequence: Synthetic oligonucleotide
  Target: LAMA2; (-) strand; PAM type: NNNNGHTT; PAM sequence: GTTTGTTT
ccatttgaatcctttatttt

SEQ ID NO: 38193 - DNA, 20 bp, Artificial Sequence
  Description of Artificial Sequence: Synthetic oligonucleotide
  Target: LAMA2; (-) strand; PAM type: NNNNGHTT; PAM sequence: TTTTGTTT
tcacccatttgaatccttta

SEQ ID NO: 38194 - DNA, 20 bp, Artificial Sequence
  Description of Artificial Sequence: Synthetic oligonucleotide
  Target: LAMA2; (-) strand; PAM type: NNNNGHTT; PAM sequence: TTCTGCTT
taacaagcaccagccctacc

SEQ ID NO: 38195 - DNA, 20 bp, Artificial Sequence
  Description of Artificial Sequence: Synthetic oligonucleotide
  Target: LAMA2; (-) strand; PAM type: NNNNGHTT; PAM sequence: GGTAGTTT
tgtatcatgttttcccaaaa

SEQ ID NO: 38196 - DNA, 20 bp, Artificial Sequence
  Description of Artificial Sequence: Synthetic oligonucleotide
  Target: LAMA2; (-) strand; PAM type: NNNNGHTT; PAM sequence: TCATGTTT
attcacctgatctgtttgta

SEQ ID NO: 38197 - DNA, 20 bp, Artificial Sequence
  Description of Artificial Sequence: Synthetic oligonucleotide
  Target: LAMA2; (-) strand; PAM type: NNNNGHTT; PAM sequence: ATCTGTTT
gagaccttctaattcacctg

SEQ ID NO: 38198 - DNA, 20 bp, Artificial Sequence
  Description of Artificial Sequence: Synthetic oligonucleotide
  Target: LAMA2; (-) strand; PAM type: NNNNGHTT; PAM sequence: GTAAGATT
ttattagtagtcaactgagt

SEQ ID NO: 38199 - DNA, 20 bp, Artificial Sequence
  Description of Artificial Sequence: Synthetic oligonucleotide
  Target: LAMA2; (-) strand; PAM type: NNNNGHTT; PAM sequence: CTGGGTTT
acatgccacattttctgtgg

SEQ ID NO: 38200 - DNA, 20 bp, Artificial Sequence
  Description of Artificial Sequence: Synthetic oligonucleotide
  Target: LAMA2; (-) strand; PAM type: NNNNGHTT; PAM sequence: AGTTGCTT
tcagtgtcttgaatcattct

SEQ ID NO: 38201 - DNA, 20 bp, Artificial Sequence
  Description of Artificial Sequence: Synthetic oligonucleotide
  Target: LAMA2; (-) strand; PAM type: NNNNGHTT; PAM sequence: CGTAGCTT
gtaatataggtaagaaatta

SEQ ID NO: 38202 - DNA, 20 bp, Artificial Sequence
  Description of Artificial Sequence: Synthetic oligonucleotide
  Target: LAMA2; (-) strand; PAM type: NNNNGHTT; PAM sequence: GATGGTTT
tggaggtagaaaaagagtta

SEQ ID NO: 38203 - DNA, 20 bp, Artificial Sequence
  Description of Artificial Sequence: Synthetic oligonucleotide
  Target: LAMA2; (-) strand; PAM type: NNNNGHTT; PAM sequence: TAAAGATT
gtaatcaaatttgagtttta

SEQ ID NO: 38204 - DNA, 20 bp, Artificial Sequence
  Description of Artificial Sequence: Synthetic oligonucleotide
  Target: LAMA2; (-) strand; PAM type: NNNNGHTT; PAM sequence: TTGAGTTT
gaggactaaggtaatcaaat

SEQ ID NO: 38205 - DNA, 20 bp, Artificial Sequence
  Description of Artificial Sequence: Synthetic oligonucleotide
  Target: LAMA2; (-) strand; PAM type: NNNNGHTT; PAM sequence: CTGAGCTT
ttataagtccagaatggtct

SEQ ID NO: 38206 - DNA, 20 bp, Artificial Sequence
  Description of Artificial Sequence: Synthetic oligonucleotide
  Target: LAMA2; (-) strand; PAM type: NNNNGHTT; PAM sequence: AAATGCTT
tcctatagaattcaatgctt

SEQ ID NO: 38207 - DNA, 20 bp, Artificial Sequence
  Description of Artificial Sequence: Synthetic oligonucleotide
  Target: LAMA2; (-) strand; PAM type: NNNNGHTT; PAM sequence: CAATGCTT
gaaacatttcctatagaatt

SEQ ID NO: 38208 - DNA, 20 bp, Artificial Sequence
  Description of Artificial Sequence: Synthetic oligonucleotide
  Target: LAMA2; (-) strand; PAM type: NNNNGHTT; PAM sequence: GGGTGATT
tcagccagagctgggggata

SEQ ID NO: 38209 - DNA, 20 bp, Artificial Sequence
  Description of Artificial Sequence: Synthetic oligonucleotide
  Target: LAMA2; (-) strand; PAM type: NNNNGHTT; PAM sequence: AGGTGCTT
atttctgcctgctgggtggt

SEQ ID NO: 38210 - DNA, 20 bp, Artificial Sequence
  Description of Artificial Sequence: Synthetic oligonucleotide
  Target: LAMA2; (-) strand; PAM type: NNNNGHTT; PAM sequence: TGCAGTTT
gttgtcactcaccaggaatt

SEQ ID NO: 38211 - DNA, 20 bp, Artificial Sequence
  Description of Artificial Sequence: Synthetic oligonucleotide
  Target: LAMA2; (-) strand; PAM type: NNNNGHTT; PAM sequence: GTAAGTTT
acttaaatccaacacttttt

SEQ ID NO: 38212 - DNA, 20 bp, Artificial Sequence
  Description of Artificial Sequence: Synthetic oligonucleotide
  Target: LAMA2; (-) strand; PAM type: NNNNGHTT; PAM sequence: CTTTGTTT
ttctttccagtcttcaaatt

SEQ ID NO: 38213 - DNA, 20 bp, Artificial Sequence
  Description of Artificial Sequence: Synthetic oligonucleotide
  Target: LAMA2; (-) strand; PAM type: NNNNGHTT; PAM sequence: TCCGGTTT
aactgattttaaaaaaaaca

SEQ ID NO: 38214 - DNA, 20 bp, Artificial Sequence
  Description of Artificial Sequence: Synthetic oligonucleotide
  Target: LAMA2; (-) strand; PAM type: NNNNGHTT; PAM sequence: AACTGATT
catggactctcaacatataa

SEQ ID NO: 38215 - DNA, 20 bp, Artificial Sequence
  Description of Artificial Sequence: Synthetic oligonucleotide
  Target: LAMA2; (-) strand; PAM type: NNNNGHTT; PAM sequence: CTCAGTTT
gtgacttaatctttcagggt

SEQ ID NO: 38216 - DNA, 20 bp, Artificial Sequence
  Description of Artificial Sequence: Synthetic oligonucleotide
  Target: LAMA2; (-) strand; PAM type: NNNNGHTT; PAM sequence: AGCTGATT
accttgactagaaagtaaat

SEQ ID NO: 38217 - DNA, 20 bp, Artificial Sequence
  Description of Artificial Sequence: Synthetic oligonucleotide
  Target: LAMA2; (-) strand; PAM type: NNNNGHTT; PAM sequence: GCTTGATT
tcgatgtttgaaaacaagtg

SEQ ID NO: 38218 - DNA, 20 bp, Artificial Sequence
  Description of Artificial Sequence: Synthetic oligonucleotide
  Target: LAMA2; (-) strand; PAM type: NNNNGHTT; PAM sequence: AGTGGCTT
gaaatcgatgtttgaaaaca

SEQ ID NO: 38219 - DNA, 20 bp, Artificial Sequence
  Description of Artificial Sequence: Synthetic oligonucleotide
  Target: LAMA2; (-) strand; PAM type: NNNNGHTT; PAM sequence: CGATGTTT
tgatggcatgaacccgaaat

SEQ ID NO: 38220 - DNA, 20 bp, Artificial Sequence
  Description of Artificial Sequence: Synthetic oligonucleotide
  Target: LAMA2; (-) strand; PAM type: NNNNGHTT; PAM sequence: AGCTGCTT
attttattatcttgaaaggc

SEQ ID NO: 38221 - DNA, 20 bp, Artificial Sequence
  Description of Artificial Sequence: Synthetic oligonucleotide
  Target: LAMA2; (-) strand; PAM type: NNNNGHTT; PAM sequence: ATCTGTTT
agctgaccaaatattattgt

SEQ ID NO: 38222 - DNA, 20 bp, Artificial Sequence
  Description of Artificial Sequence: Synthetic oligonucleotide
  Target: LAMA2; (-) strand; PAM type: NNNNGHTT; PAM sequence: GTATGCTT
tttgaaatgctttagaatgt

SEQ ID NO: 38223 - DNA, 20 bp, Artificial Sequence
  Description of Artificial Sequence: Synthetic oligonucleotide
  Target: LAMA2; (-) strand; PAM type: NNNNGHTT; PAM sequence: AAATGCTT
gacatcataataaacatttg

SEQ ID NO: 38224 - DNA, 20 bp, Artificial Sequence
  Description of Artificial Sequence: Synthetic oligonucleotide
  Target: LAMA2; (-) strand; PAM type: NNNNGHTT; PAM sequence: ATGTGCTT
taatatgtctatcagaaaat

SEQ ID NO: 38225 - DNA, 20 bp, Artificial Sequence
  Description of Artificial Sequence: Synthetic oligonucleotide
  Target: LAMA2; (-) strand; PAM type: NNNNGHTT; PAM sequence: TTTAGATT
ttttgtcacttctgaaaaat

SEQ ID NO: 38226 - DNA, 20 bp, Artificial Sequence
  Description of Artificial Sequence: Synthetic oligonucleotide
  Target: LAMA2; (-) strand; PAM type: NNNNGHTT; PAM sequence: GTATGATT
acctgaaaagacaacacatt

SEQ ID NO: 38227 - DNA, 20 bp, Artificial Sequence
  Description of Artificial Sequence: Synthetic oligonucleotide
  Target: LAMA2; (-) strand; PAM type: NNNNGHTT; PAM sequence: GGATGTTT
ccagaacatggtagcaagca

SEQ ID NO: 38228 - DNA, 20 bp, Artificial Sequence
  Description of Artificial Sequence: Synthetic oligonucleotide
  Target: LAMA2; (-) strand; PAM type: NNNNGHTT; PAM sequence: GCTTGATT
tcacataagtgtttatagca

SEQ ID NO: 38229 - DNA, 20 bp, Artificial Sequence
  Description of Artificial Sequence: Synthetic oligonucleotide
  Target: LAMA2; (-) strand; PAM type: NNNNGHTT; PAM sequence: AGCAGCTT
cttatcacataagtgtttat

SEQ ID NO: 38230 - DNA, 20 bp, Artificial Sequence
  Description of Artificial Sequence: Synthetic oligonucleotide
  Target: LAMA2; (-) strand; PAM type: NNNNGHTT; PAM sequence: AAGTGTTT
ccacacaagacttatcacat

SEQ ID NO: 38231 - DNA, 20 bp, Artificial Sequence
  Description of Artificial Sequence: Synthetic oligonucleotide
  Target: LAMA2; (-) strand; PAM type: NNNNGHTT; PAM sequence: GGCAGTTT
accatattggaagatagttt

SEQ ID NO: 38232 - DNA, 20 bp, Artificial Sequence
  Description of Artificial Sequence: Synthetic oligonucleotide
  Target: LAMA2; (-) strand; PAM type: NNNNGHTT; PAM sequence: GATAGTTT
attatacaaccatattggaa

SEQ ID NO: 38233 - DNA, 20 bp, Artificial Sequence
  Description of Artificial Sequence: Synthetic oligonucleotide
  Target: LAMA2; (-) strand; PAM type: NNNNGHTT; PAM sequence: CAAAGCTT
aatctaaacagatacctcag

SEQ ID NO: 38234 - DNA, 20 bp, Artificial Sequence
  Description of Artificial Sequence: Synthetic oligonucleotide
  Target: LAMA2; (-) strand; PAM type: NNNNGHTT; PAM sequence: TTTAGATT
tccatgaaataaaaattcat

SEQ ID NO: 38235 - DNA, 20 bp, Artificial Sequence
  Description of Artificial Sequence: Synthetic oligonucleotide
  Target: LAMA2; (-) strand; PAM type: NNNNGHTT; PAM sequence: CTGAGTTT
agaagaaaatctaaataacc

SEQ ID NO: 38236 - DNA, 20 bp, Artificial Sequence
  Description of Artificial Sequence: Synthetic oligonucleotide
  Target: LAMA2; (-) strand; PAM type: NNNNGHTT; PAM sequence: TTGTGTTT
ttaaaaaggaaggctccctc

SEQ ID NO: 38237 - DNA, 20 bp, Artificial Sequence
  Description of Artificial Sequence: Synthetic oligonucleotide
  Target: LAMA2; (-) strand; PAM type: NNNNGHTT; PAM sequence: ACTGGATT
tgagttcttgctcttgtagg

SEQ ID NO: 38238 - DNA, 20 bp, Artificial Sequence
  Description of Artificial Sequence: Synthetic oligonucleotide
  Target: LAMA2; (-) strand; PAM type: NNNNGHTT; PAM sequence: TTAGGTTT
gtggtgccttggagaggtga

SEQ ID NO: 38239 - DNA, 20 bp, Artificial Sequence
  Description of Artificial Sequence: Synthetic oligonucleotide
  Target: LAMA2; (-) strand; PAM type: NNNNGHTT; PAM sequence: AGGTGATT
tgagaggtggtgccttggag

SEQ ID NO: 38240 - DNA, 20 bp, Artificial Sequence
  Description of Artificial Sequence: Synthetic oligonucleotide
  Target: LAMA2; (-) strand; PAM type: NNNNGHTT; PAM sequence: TGAGGTTT
gtcacaatcaaaatccatag

SEQ ID NO: 38241 - DNA, 20 bp, Artificial Sequence
  Description of Artificial Sequence: Synthetic oligonucleotide
  Target: LAMA2; (-) strand; PAM type: NNNNGHTT; PAM sequence: TATGGTTT
catttgtgttatggttagaa

SEQ ID NO: 38242 - DNA, 20 bp, Artificial Sequence
  Description of Artificial Sequence: Synthetic oligonucleotide
  Target: LAMA2; (-) strand; PAM type: NNNNGHTT; PAM sequence: AAGTGTTT
ggaattcaatgaagaaagga

SEQ ID NO: 38243 - DNA, 20 bp, Artificial Sequence
  Description of Artificial Sequence: Synthetic oligonucleotide
  Target: LAMA2; (-) strand; PAM type: NNNNGHTT; PAM sequence: CACTGATT
ttattttttggatatcaaca

SEQ ID NO: 38244 - DNA, 20 bp, Artificial Sequence
  Description of Artificial Sequence: Synthetic oligonucleotide
  Target: LAMA2; (-) strand; PAM type: NNNNGHTT; PAM sequence: TGTAGATT
tgtcagttcttcccaatttg

SEQ ID NO: 38245 - DNA, 20 bp, Artificial Sequence
  Description of Artificial Sequence: Synthetic oligonucleotide
  Target: LAMA2; (-) strand; PAM type: NNNNGHTT; PAM sequence: AATTGCTT
aaaaaggtggtataaaagtc

SEQ ID NO: 38246 - DNA, 20 bp, Artificial Sequence
  Description of Artificial Sequence: Synthetic oligonucleotide
  Target: LAMA2; (-) strand; PAM type: NNNNGHTT; PAM sequence: ACTTGATT
acaaagccaatttctaagtc

SEQ ID NO: 38247 - DNA, 20 bp, Artificial Sequence
  Description of Artificial Sequence: Synthetic oligonucleotide
  Target: LAMA2; (-) strand; PAM type: NNNNGHTT; PAM sequence: CAAGGATT
cttttagactgtaagcatta

SEQ ID NO: 38248 - DNA, 20 bp, Artificial Sequence
  Description of Artificial Sequence: Synthetic oligonucleotide
  Target: LAMA2; (-) strand; PAM type: NNNNGHTT; PAM sequence: CTCTGATT
actctactgggaatcaacaa

SEQ ID NO: 38249 - DNA, 20 bp, Artificial Sequence
  Description of Artificial Sequence: Synthetic oligonucleotide
  Target: LAMA2; (-) strand; PAM type: NNNNGHTT; PAM sequence: ATAGGATT
tggaagtcagaagctttgat

SEQ ID NO: 38250 - DNA, 20 bp, Artificial Sequence
  Description of Artificial Sequence: Synthetic oligonucleotide
  Target: LAMA2; (-) strand; PAM type: NNNNGHTT; PAM sequence: AGAAGCTT
gatatgggggagtggaagtc

SEQ ID NO: 38251 - DNA, 20 bp, Artificial Sequence
  Description of Artificial Sequence: Synthetic oligonucleotide
  Target: LAMA2; (-) strand; PAM type: NNNNGHTT; PAM sequence: CTGGGCTT
ccttgagaaatagatatgag

SEQ ID NO: 38252 - DNA, 20 bp, Artificial Sequence
  Description of Artificial Sequence: Synthetic oligonucleotide
  Target: LAMA2; (-) strand; PAM type: NNNNGHTT; PAM sequence: ATCAGATT
gttaagttctaaaaaattaa

SEQ ID NO: 38253 - DNA, 20 bp, Artificial Sequence
  Description of Artificial Sequence: Synthetic oligonucleotide
  Target: LAMA2; (-) strand; PAM type: NNNNGHTT; PAM sequence: ATTAGATT
tatccagtgtctcatgagtt

SEQ ID NO: 38254 - DNA, 20 bp, Artificial Sequence
  Description of Artificial Sequence: Synthetic oligonucleotide
  Target: LAMA2; (-) strand; PAM type: NNNNGHTT; PAM sequence: TCAAGTTT
atataatcttagatactcaa

SEQ ID NO: 38255 - DNA, 20 bp, Artificial Sequence
  Description of Artificial Sequence: Synthetic oligonucleotide
  Target: LAMA2; (-) strand; PAM type: NNNNGHTT; PAM sequence: CTCAGATT
aagtgacaaatacatcttcc

SEQ ID NO: 38256 - DNA, 20 bp, Artificial Sequence
  Description of Artificial Sequence: Synthetic oligonucleotide
  Target: LAMA2; (-) strand; PAM type: NNNNGHTT; PAM sequence: TACTGATT
cacagaaatttgtttatagt

SEQ ID NO: 38257 - DNA, 20 bp, Artificial Sequence
  Description of Artificial Sequence: Synthetic oligonucleotide
  Target: LAMA2; (-) strand; PAM type: NNNNGHTT; PAM sequence: ATTTGTTT
tactggatcagtacacagaa

SEQ ID NO: 38258 - DNA, 20 bp, Artificial Sequence
  Description of Artificial Sequence: Synthetic oligonucleotide
  Target: LAMA2; (-) strand; PAM type: NNNNGHTT; PAM sequence: TTCTGATT
tttgtaaaacgaaattctct

SEQ ID NO: 38259 - DNA, 20 bp, Artificial Sequence
  Description of Artificial Sequence: Synthetic oligonucleotide
  Target: LAMA2; (-) strand; PAM type: NNNNGHTT; PAM sequence: AGTTGTTT
aatcagagattgtatgtcct

SEQ ID NO: 38260 - DNA, 20 bp, Artificial Sequence
  Description of Artificial Sequence: Synthetic oligonucleotide
  Target: LAMA2; (-) strand; PAM type: NNNNGHTT; PAM sequence: CAGAGATT
atagactgcagttgtgtaat

SEQ ID NO: 38261 - DNA, 20 bp, Artificial Sequence
  Description of Artificial Sequence: Synthetic oligonucleotide
  Target: LAMA2; (-) strand; PAM type: NNNNGHTT; PAM sequence: TGGTGTTT
taaagtttccatctctactg

SEQ ID NO: 38262 - DNA, 20 bp, Artificial Sequence
  Description of Artificial Sequence: Synthetic oligonucleotide
  Target: LAMA2; (-) strand; PAM type: NNNNGHTT; PAM sequence: TAAAGTTT
ttttcataaaatataaacaa

SEQ ID NO: 38263 - DNA, 20 bp, Artificial Sequence
  Description of Artificial Sequence: Synthetic oligonucleotide
  Target: LAMA2; (-) strand; PAM type: NNNNGHTT; PAM sequence: AACAGTTT
ctgacataaaaacaaaagag

SEQ ID NO: 38264 - DNA, 20 bp, Artificial Sequence
  Description of Artificial Sequence: Synthetic oligonucleotide
  Target: LAMA2; (-) strand; PAM type: NNNNGHTT; PAM sequence: GCATGTTT
gcagctctaatgtatgaaag

SEQ ID NO: 38265 - DNA, 20 bp, Artificial Sequence
  Description of Artificial Sequence: Synthetic oligonucleotide
  Target: LAMA2; (-) strand; PAM type: NNNNGHTT; PAM sequence: ATCAGTTT
ccatcctcattccaaagaac

SEQ ID NO: 38266 - DNA, 20 bp, Artificial Sequence
  Description of Artificial Sequence: Synthetic oligonucleotide
  Target: LAMA2; (-) strand; PAM type: NNNNGHTT; PAM sequence: ACTAGCTT
aaaaatctacttattgcaaa

SEQ ID NO: 38267 - DNA, 20 bp, Artificial Sequence
  Description of Artificial Sequence: Synthetic oligonucleotide
  Target: LAMA2; (-) strand; PAM type: NNNNGHTT; PAM sequence: GCATGATT
taatacttacttgtaacata

SEQ ID NO: 38268 - DNA, 20 bp, Artificial Sequence
  Description of Artificial Sequence: Synthetic oligonucleotide
  Target: LAMA2; (-) strand; PAM type: NNNNGHTT; PAM sequence: AGATGTTT
attatcatataattcaagga

SEQ ID NO: 38269 - DNA, 20 bp, Artificial Sequence
  Description of Artificial Sequence: Synthetic oligonucleotide
  Target: LAMA2; (-) strand; PAM type: NNNNGHTT; PAM sequence: TGTAGATT
ataaattcctttcactgtga

SEQ ID NO: 38270 - DNA, 20 bp, Artificial Sequence
  Description of Artificial Sequence: Synthetic oligonucleotide
  Target: LAMA2; (-) strand; PAM type: NNNNGHTT; PAM sequence: CTGTGATT
aatggatctcatatagccct

SEQ ID NO: 38271 - DNA, 20 bp, Artificial Sequence
  Description of Artificial Sequence: Synthetic oligonucleotide
  Target: LAMA2; (-) strand; PAM type: NNNNGHTT; PAM sequence: ATTAGTTT
tattacaaattgcacttcat

SEQ ID NO: 38272 - DNA, 20 bp, Artificial Sequence
  Description of Artificial Sequence: Synthetic oligonucleotide
  Target: LAMA2; (-) strand; PAM type: NNNNGHTT; PAM sequence: ATGTGTTT
aatacatgtttaggtataat

SEQ ID NO: 38273 - DNA, 20 bp, Artificial Sequence
  Description of Artificial Sequence: Synthetic oligonucleotide
  Target: LAMA2; (-) strand; PAM type: NNNNGHTT; PAM sequence: ACATGTTT
ttttaaaacaaggtcttaat

SEQ ID NO: 38274 - DNA, 20 bp, Artificial Sequence
  Description of Artificial Sequence: Synthetic oligonucleotide
  Target: LAMA2; (-) strand; PAM type: NNNNGHTT; PAM sequence: TACAGCTT
gtattctaagaacgtaatga

SEQ ID NO: 38275 - DNA, 20 bp, Artificial Sequence
  Description of Artificial Sequence: Synthetic oligonucleotide
  Target: LAMA2; (-) strand; PAM type: NNNNGHTT; PAM sequence: CTGGGATT
cgcctcagcctcccaaaatg

SEQ ID NO: 38276 - DNA, 20 bp, Artificial Sequence
  Description of Artificial Sequence: Synthetic oligonucleotide
  Target: LAMA2; (-) strand; PAM type: NNNNGHTT; PAM sequence: CAGGGTTT
ttttgtatttttagtacaga

SEQ ID NO: 38277 - DNA, 20 bp, Artificial Sequence
  Description of Artificial Sequence: Synthetic oligonucleotide
  Target: LAMA2; (-) strand; PAM type: NNNNGHTT; PAM sequence: CTGGGATT
tgcctcagcctcccaagtag

SEQ ID NO: 38278 - DNA, 20 bp, Artificial Sequence
  Description of Artificial Sequence: Synthetic oligonucleotide
  Target: LAMA2; (-) strand; PAM type: NNNNGHTT; PAM sequence: AAGCGATT
aacctccgcctcctgggttc

SEQ ID NO: 38279 - DNA, 20 bp, Artificial Sequence
  Description of Artificial Sequence: Synthetic oligonucleotide
  Target: LAMA2; (-) strand; PAM type: NNNNGHTT; PAM sequence: TTGAGATT
gaagaaagtaactcatgggt

SEQ ID NO: 38280 - DNA, 20 bp, Artificial Sequence
  Description of Artificial Sequence: Synthetic oligonucleotide
  Target: LAMA2; (-) strand; PAM type: NNNNGHTT; PAM sequence: ATGGGTTT
tatatggaagaaagtaactc

SEQ ID NO: 38281 - DNA, 20 bp, Artificial Sequence
  Description of Artificial Sequence: Synthetic oligonucleotide
  Target: LAMA2; (-) strand; PAM type: NNNNGHTT; PAM sequence: GACTGATT
ttacacatctaatagacata

SEQ ID NO: 38282 - DNA, 20 bp, Artificial Sequence
  Description of Artificial Sequence: Synthetic oligonucleotide
  Target: LAMA2; (-) strand; PAM type: NNNNGHTT; PAM sequence: CGAAGATT
tataattgctaaaagaaatt

SEQ ID NO: 38283 - DNA, 20 bp, Artificial Sequence
  Description of Artificial Sequence: Synthetic oligonucleotide
  Target: LAMA2; (-) strand; PAM type: NNNNGHTT; PAM sequence: CACTGATT
tacagaaggtagcctgttga

SEQ ID NO: 38284 - DNA, 20 bp, Artificial Sequence
  Description of Artificial Sequence: Synthetic oligonucleotide
  Target: LAMA2; (-) strand; PAM type: NNNNGHTT; PAM sequence: AACAGATT
gaatttactgacaacatgat

SEQ ID NO: 38285 - DNA, 20 bp, Artificial Sequence
  Description of Artificial Sequence: Synthetic oligonucleotide
  Target: LAMA2; (-) strand; PAM type: NNNNGHTT; PAM sequence: TCTTGTTT
gtttcaaagaaggaaacagc

SEQ ID NO: 38286 - DNA, 20 bp, Artificial Sequence
  Description of Artificial Sequence: Synthetic oligonucleotide
  Target: LAMA2; (-) strand; PAM type: NNNNGHTT; PAM sequence: ACTTGTTT
taaccacataaatataaata

SEQ ID NO: 38287 - DNA, 20 bp, Artificial Sequence
  Description of Artificial Sequence: Synthetic oligonucleotide
  Target: LAMA2; (-) strand; PAM type: NNNNGHTT; PAM sequence: TATGGTTT
tgaagtattcaaaaaggtct

SEQ ID NO: 38288 - DNA, 20 bp, Artificial Sequence
  Description of Artificial Sequence: Synthetic oligonucleotide
  Target: LAMA2; (-) strand; PAM type: NNNNGHTT; PAM sequence: ATTTGTTT
gggttcccagcaactctgat

SEQ ID NO: 38289 - DNA, 20 bp, Artificial Sequence
  Description of Artificial Sequence: Synthetic oligonucleotide
  Target: LAMA2; (-) strand; PAM type: NNNNGHTT; PAM sequence: AGTAGATT
gtctatgaatgactatccac

SEQ ID NO: 38290 - DNA, 20 bp, Artificial Sequence
  Description of Artificial Sequence: Synthetic oligonucleotide
  Target: LAMA2; (-) strand; PAM type: NNNNGHTT; PAM sequence: CCAAGTTT
acaaactattggctacaggc

SEQ ID NO: 38291 - DNA, 20 bp, Artificial Sequence
  Description of Artificial Sequence: Synthetic oligonucleotide
  Target: LAMA2; (-) strand; PAM type: NNNNGHTT; PAM sequence: TGATGTTT
cccctatggcaatgaaaatc

SEQ ID NO: 38292 - DNA, 20 bp, Artificial Sequence
  Description of Artificial Sequence: Synthetic oligonucleotide
  Target: LAMA2; (-) strand; PAM type: NNNNGHTT; PAM sequence: GATAGTTT
ttaagttttgattcattaca

SEQ ID NO: 38293 - DNA, 20 bp, Artificial Sequence
  Description of Artificial Sequence: Synthetic oligonucleotide
  Target: LAMA2; (-) strand; PAM type: NNNNGHTT; PAM sequence: TTTTGATT
ttaatgtcatctgatttaag

SEQ ID NO: 38294 - DNA, 20 bp, Artificial Sequence
  Description of Artificial Sequence: Synthetic oligonucleotide
  Target: LAMA2; (-) strand; PAM type: NNNNGHTT; PAM sequence: TTAAGTTT
tggtcttaatgtcatctgat

SEQ ID NO: 38295 - DNA, 20 bp, Artificial Sequence
  Description of Artificial Sequence: Synthetic oligonucleotide
  Target: LAMA2; (-) strand; PAM type: NNNNGHTT; PAM sequence: ATCTGATT
gcaaagctggtcttaatgtc

SEQ ID NO: 38296 - DNA, 20 bp, Artificial Sequence
  Description of Artificial Sequence: Synthetic oligonucleotide
  Target: LAMA2; (-) strand; PAM type: NNNNGHTT; PAM sequence: CCAAGATT
tgtatatcaagctttttaaa

SEQ ID NO: 38297 - DNA, 20 bp, Artificial Sequence
  Description of Artificial Sequence: Synthetic oligonucleotide
  Target: LAMA2; (-) strand; PAM type: NNNNGHTT; PAM sequence: TCAAGCTT
caagtatgtttcattgtata

SEQ ID NO: 38298 - DNA, 20 bp, Artificial Sequence
  Description of Artificial Sequence: Synthetic oligonucleotide
  Target: LAMA2; (-) strand; PAM type: NNNNGHTT; PAM sequence: GTATGTTT
cagctttataatttgcccaa

SEQ ID NO: 38299 - DNA, 20 bp, Artificial Sequence
  Description of Artificial Sequence: Synthetic oligonucleotide
  Target: LAMA2; (-) strand; PAM type: NNNNGHTT; PAM sequence: AACAGCTT
tgtattagctcattctcagg

SEQ ID NO: 38300 - DNA, 20 bp, Artificial Sequence
  Description of Artificial Sequence: Synthetic oligonucleotide
  Target: LAMA2; (-) strand; PAM type: NNNNGHTT; PAM sequence: AAATGATT
atgttactgaaaaatgagaa

SEQ ID NO: 38301 - DNA, 20 bp, Artificial Sequence
  Description of Artificial Sequence: Synthetic oligonucleotide
  Target: LAMA2; (-) strand; PAM type: NNNNGHTT; PAM sequence: CCAGGATT
ggatgacaattttataatgg

SEQ ID NO: 38302 - DNA, 20 bp, Artificial Sequence
  Description of Artificial Sequence: Synthetic oligonucleotide
  Target: LAMA2; (-) strand; PAM type: NNNNGHTT; PAM sequence: AAATGCTT
tttcagctgttctctaattt

SEQ ID NO: 38303 - DNA, 20 bp, Artificial Sequence
  Description of Artificial Sequence: Synthetic oligonucleotide
  Target: LAMA2; (-) strand; PAM type: NNNNGHTT; PAM sequence: AAATGTTT
atagaaaatgaacaacactg

SEQ ID NO: 38304 - DNA, 20 bp, Artificial Sequence
  Description of Artificial Sequence: Synthetic oligonucleotide
  Target: LAMA2; (-) strand; PAM type: NNNNGHTT; PAM sequence: AAATGATT
taatagctgctgtttgatca

SEQ ID NO: 38305 - DNA, 20 bp, Artificial Sequence
  Description of Artificial Sequence: Synthetic oligonucleotide
  Target: LAMA2; (-) strand; PAM type: NNNNGHTT; PAM sequence: TGCTGTTT
attgaataataaataatagc

SEQ ID NO: 38306 - DNA, 20 bp, Artificial Sequence
  Description of Artificial Sequence: Synthetic oligonucleotide
  Target: LAMA2; (-) strand; PAM type: NNNNGHTT; PAM sequence: TCAGGTTT
cattaaggtagatgaaagtt

SEQ ID NO: 38307 - DNA, 20 bp, Artificial Sequence
  Description of Artificial Sequence: Synthetic oligonucleotide
  Target: LAMA2; (-) strand; PAM type: NNNNGHTT; PAM sequence: GAAAGTTT
ataccatcattaaggtagat

SEQ ID NO: 38308 - DNA, 20 bp, Artificial Sequence
  Description of Artificial Sequence: Synthetic oligonucleotide
  Target: LAMA2; (-) strand; PAM type: NNNNGHTT; PAM sequence: ATGTGTTT
gtgatggtgagcattttttc

SEQ ID NO: 38309 - DNA, 20 bp, Artificial Sequence
  Description of Artificial Sequence: Synthetic oligonucleotide
  Target: LAMA2; (-) strand; PAM type: NNNNGHTT; PAM sequence: TTTTGATT
gagatggtatctcattgtgg

SEQ ID NO: 38310 - DNA, 20 bp, Artificial Sequence
  Description of Artificial Sequence: Synthetic oligonucleotide
  Target: LAMA2; (-) strand; PAM type: NNNNGHTT; PAM sequence: TGTGGTTT
ggtgtgagatggtatctcat

SEQ ID NO: 38311 - DNA, 20 bp, Artificial Sequence
  Description of Artificial Sequence: Synthetic oligonucleotide
  Target: LAMA2; (-) strand; PAM type: NNNNGHTT; PAM sequence: TGTTGTTT
tccacatcctctccagcatc

SEQ ID NO: 38312 - DNA, 20 bp, Artificial Sequence
  Description of Artificial Sequence: Synthetic oligonucleotide
  Target: LAMA2; (-) strand; PAM type: NNNNGHTT; PAM sequence: ACTAGTTT
ctgacttccacaatggttaa

SEQ ID NO: 38313 - DNA, 20 bp, Artificial Sequence
  Description of Artificial Sequence: Synthetic oligonucleotide
  Target: LAMA2; (-) strand; PAM type: NNNNGHTT; PAM sequence: GCATGATT
gtgcatgtgtctttatagca

SEQ ID NO: 38314 - DNA, 20 bp, Artificial Sequence
  Description of Artificial Sequence: Synthetic oligonucleotide
  Target: LAMA2; (-) strand; PAM type: NNNNGHTT; PAM sequence: TGATGATT
ttgtgatagtttactgagaa

SEQ ID NO: 38315 - DNA, 20 bp, Artificial Sequence
  Description of Artificial Sequence: Synthetic oligonucleotide
  Target: LAMA2; (-) strand; PAM type: NNNNGHTT; PAM sequence: GATAGTTT
gtttgtttttttgtccttgt

SEQ ID NO: 38316 - DNA, 20 bp, Artificial Sequence
  Description of Artificial Sequence: Synthetic oligonucleotide
  Target: LAMA2; (-) strand; PAM type: NNNNGHTT; PAM sequence: GTTTGTTT
tatgagtgagaacatgtggt

SEQ ID NO: 38317 - DNA, 20 bp, Artificial Sequence
  Description of Artificial Sequence: Synthetic oligonucleotide
  Target: LAMA2; (-) strand; PAM type: NNNNGHTT; PAM sequence: TGGTGTTT
cacctatgagtgagaacatg

SEQ ID NO: 38318 - DNA, 20 bp, Artificial Sequence
  Description of Artificial Sequence: Synthetic oligonucleotide
  Target: LAMA2; (-) strand; PAM type: NNNNGHTT; PAM sequence: TTAAGTTT
tattttattattattatact

SEQ ID NO: 38319 - DNA, 20 bp, Artificial Sequence
  Description of Artificial Sequence: Synthetic oligonucleotide
  Target: LAMA2; (-) strand; PAM type: NNNNGHTT; PAM sequence: CAAAGCTT
taagtcatgtatttattcag

SEQ ID NO: 38320 - DNA, 20 bp, Artificial Sequence
  Description of Artificial Sequence: Synthetic oligonucleotide
  Target: LAMA2; (-) strand; PAM type: NNNNGHTT; PAM sequence: ATATGTTT
gtagttaatattatttcact

SEQ ID NO: 38321 - DNA, 20 bp, Artificial Sequence
  Description of Artificial Sequence: Synthetic oligonucleotide
  Target: LAMA2; (-) strand; PAM type: NNNNGHTT; PAM sequence: CATTGCTT
agcactagtgtttttttgct

SEQ ID NO: 38322 - DNA, 20 bp, Artificial Sequence
  Description of Artificial Sequence: Synthetic oligonucleotide
  Target: LAMA2; (-) strand; PAM type: NNNNGHTT; PAM sequence: TAGTGTTT
ccaagagcagtggtaagcac

SEQ ID NO: 38323 - DNA, 20 bp, Artificial Sequence
  Description of Artificial Sequence: Synthetic oligonucleotide
  Target: LAMA2; (-) strand; PAM type: NNNNGHTT; PAM sequence: TCCAGTTT
cacttgttgaccaattttca

SEQ ID NO: 38324 - DNA, 20 bp, Artificial Sequence
  Description of Artificial Sequence: Synthetic oligonucleotide
  Target: LAMA2; (-) strand; PAM type: NNNNGHTT; PAM sequence: AACTGCTT
aatggtttctgtataataaa

SEQ ID NO: 38325 - DNA, 20 bp, Artificial Sequence
  Description of Artificial Sequence: Synthetic oligonucleotide
  Target: LAMA2; (-) strand; PAM type: NNNNGHTT; PAM sequence: AATGGTTT
ttctgaataactgctttcaa

SEQ ID NO: 38326 - DNA, 20 bp, Artificial Sequence
  Description of Artificial Sequence: Synthetic oligonucleotide
  Target: LAMA2; (-) strand; PAM type: NNNNGHTT; PAM sequence: AACTGCTT
ctgatagaaactttctgaat

SEQ ID NO: 38327 - DNA, 20 bp, Artificial Sequence
  Description of Artificial Sequence: Synthetic oligonucleotide
  Target: LAMA2; (-) strand; PAM type: NNNNGHTT; PAM sequence: TTGTGATT
tattatgcagaaaatagtat

SEQ ID NO: 38328 - DNA, 20 bp, Artificial Sequence
  Description of Artificial Sequence: Synthetic oligonucleotide
  Target: LAMA2; (-) strand; PAM type: NNNNGHTT; PAM sequence: TCATGTTT
cttcaaagctcactgaaact

SEQ ID NO: 38329 - DNA, 20 bp, Artificial Sequence
  Description of Artificial Sequence: Synthetic oligonucleotide
  Target: LAMA2; (-) strand; PAM type: NNNNGHTT; PAM sequence: AAAAGCTT
acattttaacatatttaaca

SEQ ID NO: 38330 - DNA, 20 bp, Artificial Sequence
  Description of Artificial Sequence: Synthetic oligonucleotide
  Target: LAMA2; (-) strand; PAM type: NNNNGHTT; PAM sequence: AATAGTTT
ttgttttaatacttagtaat

SEQ ID NO: 38331 - DNA, 20 bp, Artificial Sequence
  Description of Artificial Sequence: Synthetic oligonucleotide
  Target: LAMA2; (-) strand; PAM type: NNNNGHTT; PAM sequence: GTTTGTTT
gccaccgtgccttgccctca

SEQ ID NO: 38332 - DNA, 20 bp, Artificial Sequence
  Description of Artificial Sequence: Synthetic oligonucleotide
  Target: LAMA2; (-) strand; PAM type: NNNNGHTT; PAM sequence: CTCAGTTT
atgagccaccgtgccttgcc

SEQ ID NO: 38333 - DNA, 20 bp, Artificial Sequence
  Description of Artificial Sequence: Synthetic oligonucleotide
  Target: LAMA2; (-) strand; PAM type: NNNNGHTT; PAM sequence: CAGGGTTT
ttttgtatttttagtagaga

SEQ ID NO: 38334 - DNA, 20 bp, Artificial Sequence
  Description of Artificial Sequence: Synthetic oligonucleotide
  Target: LAMA2; (-) strand; PAM type: NNNNGHTT; PAM sequence: CTGGGATT
tgcctcagcctcacgagtag

SEQ ID NO: 38335 - DNA, 20 bp, Artificial Sequence
  Description of Artificial Sequence: Synthetic oligonucleotide
  Target: LAMA2; (-) strand; PAM type: NNNNGHTT; PAM sequence: AAGCGATT
acctcttgtctcccaggttc

SEQ ID NO: 38336 - DNA, 20 bp, Artificial Sequence
  Description of Artificial Sequence: Synthetic oligonucleotide
  Target: LAMA2; (-) strand; PAM type: NNNNGHTT; PAM sequence: TCAGGCTT
ttgtaggtccgtttctaggt

SEQ ID NO: 38337 - DNA, 20 bp, Artificial Sequence
  Description of Artificial Sequence: Synthetic oligonucleotide
  Target: LAMA2; (-) strand; PAM type: NNNNGHTT; PAM sequence: GTCCGTTT
ctaagtattgacatttgtag

SEQ ID NO: 38338 - DNA, 20 bp, Artificial Sequence
  Description of Artificial Sequence: Synthetic oligonucleotide
  Target: LAMA2; (-) strand; PAM type: NNNNGHTT; PAM sequence: CTTGGCTT
cttttcttatttttggaaat

SEQ ID NO: 38339 - DNA, 20 bp, Artificial Sequence
  Description of Artificial Sequence: Synthetic oligonucleotide
  Target: LAMA2; (-) strand; PAM type: NNNNGHTT; PAM sequence: TTATGCTT
aaagaaaccagtataatcaa

SEQ ID NO: 38340 - DNA, 20 bp, Artificial Sequence
  Description of Artificial Sequence: Synthetic oligonucleotide
  Target: LAMA2; (-) strand; PAM type: NNNNGHTT; PAM sequence: TAAAGCTT
tctttacatatgcttgatac

SEQ ID NO: 38341 - DNA, 20 bp, Artificial Sequence
  Description of Artificial Sequence: Synthetic oligonucleotide
  Target: LAMA2; (-) strand; PAM type: NNNNGHTT; PAM sequence: ATATGCTT
attattttatgagtctttac

SEQ ID NO: 38342 - DNA, 20 bp, Artificial Sequence
  Description of Artificial Sequence: Synthetic oligonucleotide
  Target: LAMA2; (-) strand; PAM type: NNNNGHTT; PAM sequence: GGCAGTTT
tttttttttttggtctatca

SEQ ID NO: 38343 - DNA, 20 bp, Artificial Sequence
  Description of Artificial Sequence: Synthetic oligonucleotide
  Target: LAMA2; (-) strand; PAM type: NNNNGHTT; PAM sequence: TGTTGATT
ctcctctgtaaaatgtttat

SEQ ID NO: 38344 - DNA, 20 bp, Artificial Sequence
  Description of Artificial Sequence: Synthetic oligonucleotide
  Target: LAMA2; (-) strand; PAM type: NNNNGHTT; PAM sequence: AAATGTTT
ttctctgtttctcctctgta

SEQ ID NO: 38345 - DNA, 20 bp, Artificial Sequence
  Description of Artificial Sequence: Synthetic oligonucleotide
  Target: LAMA2; (-) strand; PAM type: NNNNGHTT; PAM sequence: CTCTGTTT
gtttttagctgtatatgttt

SEQ ID NO: 38346 - DNA, 20 bp, Artificial Sequence
  Description of Artificial Sequence: Synthetic oligonucleotide
  Target: LAMA2; (-) strand; PAM type: NNNNGHTT; PAM sequence: ATATGTTT
ttccatatgtttttagctgt

SEQ ID NO: 38347 - DNA, 20 bp, Artificial Sequence
  Description of Artificial Sequence: Synthetic oligonucleotide
  Target: LAMA2; (-) strand; PAM type: NNNNGHTT; PAM sequence: ATATGTTT
ataagactcaagatccttcc

SEQ ID NO: 38348 - DNA, 20 bp, Artificial Sequence
  Description of Artificial Sequence: Synthetic oligonucleotide
  Target: LAMA2; (-) strand; PAM type: NNNNGHTT; PAM sequence: TATTGATT
tactgatttgctattctaca

SEQ ID NO: 38349 - DNA, 20 bp, Artificial Sequence
  Description of Artificial Sequence: Synthetic oligonucleotide
  Target: LAMA2; (-) strand; PAM type: NNNNGHTT; PAM sequence: TACTGATT
cattatctctttgataatga

SEQ ID NO: 38350 - DNA, 20 bp, Artificial Sequence
  Description of Artificial Sequence: Synthetic oligonucleotide
  Target: LAMA2; (-) strand; PAM type: NNNNGHTT; PAM sequence: TGTAGTTT
caaatacttttcaatatttc

SEQ ID NO: 38351 - DNA, 20 bp, Artificial Sequence
  Description of Artificial Sequence: Synthetic oligonucleotide
  Target: LAMA2; (-) strand; PAM type: NNNNGHTT; PAM sequence: GGTTGATT
tagcactatataagaaatct

SEQ ID NO: 38352 - DNA, 20 bp, Artificial Sequence
  Description of Artificial Sequence: Synthetic oligonucleotide
  Target: LAMA2; (-) strand; PAM type: NNNNGHTT; PAM sequence: ATGTGTTT
gtacttttatgaacactttt

SEQ ID NO: 38353 - DNA, 20 bp, Artificial Sequence
  Description of Artificial Sequence: Synthetic oligonucleotide
  Target: LAMA2; (-) strand; PAM type: NNNNGHTT; PAM sequence: ATTTGTTT
gttattccagatatattaca

SEQ ID NO: 38354 - DNA, 20 bp, Artificial Sequence
  Description of Artificial Sequence: Synthetic oligonucleotide
  Target: LAMA2; (-) strand; PAM type: NNNNGHTT; PAM sequence: TATTGCTT
atatgtttgctcaaaaatgt

SEQ ID NO: 38355 - DNA, 20 bp, Artificial Sequence
  Description of Artificial Sequence: Synthetic oligonucleotide
  Target: LAMA2; (-) strand; PAM type: NNNNGHTT; PAM sequence: ATATGTTT
aaaagataatttcagcaaat

SEQ ID NO: 38356 - DNA, 20 bp, Artificial Sequence
  Description of Artificial Sequence: Synthetic oligonucleotide
  Target: LAMA2; (-) strand; PAM type: NNNNGHTT; PAM sequence: TTGTGTTT
taaccctgacatgctgaatt

SEQ ID NO: 38357 - DNA, 20 bp, Artificial Sequence
  Description of Artificial Sequence: Synthetic oligonucleotide
  Target: LAMA2; (-) strand; PAM type: NNNNGHTT; PAM sequence: CAATGTTT
cccaagaagttgaacatgag

SEQ ID NO: 38358 - DNA, 20 bp, Artificial Sequence
  Description of Artificial Sequence: Synthetic oligonucleotide
  Target: LAMA2; (-) strand; PAM type: NNNNGHTT; PAM sequence: CCTGGCTT
ttcatttacccattgtattc

SEQ ID NO: 38359 - DNA, 20 bp, Artificial Sequence
  Description of Artificial Sequence: Synthetic oligonucleotide
  Target: LAMA2; (-) strand; PAM type: NNNNGHTT; PAM sequence: ACTTGATT
tccattttaaagatgagaag

SEQ ID NO: 38360 - DNA, 20 bp, Artificial Sequence
  Description of Artificial Sequence: Synthetic oligonucleotide
  Target: LAMA2; (-) strand; PAM type: NNNNGHTT; PAM sequence: ACTGGATT
caaatgtccatcaatgatag

SEQ ID NO: 38361 - DNA, 20 bp, Artificial Sequence
  Description of Artificial Sequence: Synthetic oligonucleotide
  Target: LAMA2; (-) strand; PAM type: NNNNGHTT; PAM sequence: GTATGTTT
ctataaagacacatgcacat

SEQ ID NO: 38362 - DNA, 20 bp, Artificial Sequence
  Description of Artificial Sequence: Synthetic oligonucleotide
  Target: LAMA2; (-) strand; PAM type: NNNNGHTT; PAM sequence: AAAGGATT
ccattactgggtatataccc

SEQ ID NO: 38363 - DNA, 20 bp, Artificial Sequence
  Description of Artificial Sequence: Synthetic oligonucleotide
  Target: LAMA2; (-) strand; PAM type: NNNNGHTT; PAM sequence: GGGCGATT
aaccattgtggaagacagtg

SEQ ID NO: 38364 - DNA, 20 bp, Artificial Sequence
  Description of Artificial Sequence: Synthetic oligonucleotide
  Target: LAMA2; (-) strand; PAM type: NNNNGHTT; PAM sequence: GTGGGATT
ggaacacttttacactgttg

SEQ ID NO: 38365 - DNA, 20 bp, Artificial Sequence
  Description of Artificial Sequence: Synthetic oligonucleotide
  Target: LAMA2; (-) strand; PAM type: NNNNGHTT; PAM sequence: AGAAGATT
caggcaacctacagaatggg

SEQ ID NO: 38366 - DNA, 20 bp, Artificial Sequence
  Description of Artificial Sequence: Synthetic oligonucleotide
  Target: LAMA2; (-) strand; PAM type: NNNNGHTT; PAM sequence: AAGAGCTT
aatgggatctaattaaacta

SEQ ID NO: 38367 - DNA, 20 bp, Artificial Sequence
  Description of Artificial Sequence: Synthetic oligonucleotide
  Target: LAMA2; (-) strand; PAM type: NNNNGHTT; PAM sequence: GATGGATT
ttatacaaaaattaattcaa

SEQ ID NO: 38368 - DNA, 20 bp, Artificial Sequence
  Description of Artificial Sequence: Synthetic oligonucleotide
  Target: LAMA2; (-) strand; PAM type: NNNNGHTT; PAM sequence: AATGGATT
gacaaaaacaagcaatgggg

SEQ ID NO: 38369 - DNA, 20 bp, Artificial Sequence
  Description of Artificial Sequence: Synthetic oligonucleotide
  Target: LAMA2; (-) strand; PAM type: NNNNGHTT; PAM sequence: CATAGATT
ccatactgcccaaggtaatt

SEQ ID NO: 38370 - DNA, 20 bp, Artificial Sequence
  Description of Artificial Sequence: Synthetic oligonucleotide
  Target: LAMA2; (-) strand; PAM type: NNNNGHTT; PAM sequence: CCATGCTT
caaacaaatggaagaacatt

SEQ ID NO: 38371 - DNA, 20 bp, Artificial Sequence
  Description of Artificial Sequence: Synthetic oligonucleotide
  Target: LAMA2; (-) strand; PAM type: NNNNGHTT; PAM sequence: AATTGCTT
atgagtgaactcctattcac

SEQ ID NO: 38372 - DNA, 20 bp, Artificial Sequence
  Description of Artificial Sequence: Synthetic oligonucleotide
  Target: LAMA2; (-) strand; PAM type: NNNNGHTT; PAM sequence: CCCTGTTT
aaaagaggtagtcaaattgt

SEQ ID NO: 38373 - DNA, 20 bp, Artificial Sequence
  Description of Artificial Sequence: Synthetic oligonucleotide
  Target: LAMA2; (-) strand; PAM type: NNNNGHTT; PAM sequence: ACATGATT
ccagcatataaacaaaaacc

SEQ ID NO: 38374 - DNA, 20 bp, Artificial Sequence
  Description of Artificial Sequence: Synthetic oligonucleotide
  Target: LAMA2; (-) strand; PAM type: NNNNGHTT; PAM sequence: GTGGGCTT
agcttatccaccacgatcaa

SEQ ID NO: 38375 - DNA, 20 bp, Artificial Sequence
  Description of Artificial Sequence: Synthetic oligonucleotide
  Target: LAMA2; (-) strand; PAM type: NNNNGHTT; PAM sequence: AAAAGCTT
ctgaatgcagcagcacatca

SEQ ID NO: 38376 - DNA, 20 bp, Artificial Sequence
  Description of Artificial Sequence: Synthetic oligonucleotide
  Target: LAMA2; (-) strand; PAM type: NNNNGHTT; PAM sequence: GATGGATT
ccaaaaaaagtccaggacca

SEQ ID NO: 38377 - DNA, 20 bp, Artificial Sequence
  Description of Artificial Sequence: Synthetic oligonucleotide
  Target: LAMA2; (-) strand; PAM type: NNNNGHTT; PAM sequence: GATAGATT
tagaaaatcttgaagaaatg

SEQ ID NO: 38378 - DNA, 20 bp, Artificial Sequence
  Description of Artificial Sequence: Synthetic oligonucleotide
  Target: LAMA2; (-) strand; PAM type: NNNNGHTT; PAM sequence: AGATGATT
aacaaatcagtgaatccagg

SEQ ID NO: 38379 - DNA, 20 bp, Artificial Sequence
  Description of Artificial Sequence: Synthetic oligonucleotide
  Target: LAMA2; (-) strand; PAM type: NNNNGHTT; PAM sequence: TCAGGATT
cagtgcaatcaaactagaac

SEQ ID NO: 38380 - DNA, 20 bp, Artificial Sequence
  Description of Artificial Sequence: Synthetic oligonucleotide
  Target: LAMA2; (-) strand; PAM type: NNNNGHTT; PAM sequence: CTCAGATT
atgcacccaatacaggagca

SEQ ID NO: 38381 - DNA, 20 bp, Artificial Sequence
  Description of Artificial Sequence: Synthetic oligonucleotide
  Target: LAMA2; (-) strand; PAM type: NNNNGHTT; PAM sequence: GAGAGATT
tttacagacaagcaaatgct

SEQ ID NO: 38382 - DNA, 20 bp, Artificial Sequence
  Description of Artificial Sequence: Synthetic oligonucleotide
  Target: LAMA2; (-) strand; PAM type: NNNNGHTT; PAM sequence: CTAAGCTT
gaatttcatatccagccaaa

SEQ ID NO: 38383 - DNA, 20 bp, Artificial Sequence
  Description of Artificial Sequence: Synthetic oligonucleotide
  Target: LAMA2; (-) strand; PAM type: NNNNGHTT; PAM sequence: GTCAGATT
caacttcaagacacataatt

SEQ ID NO: 38384 - DNA, 20 bp, Artificial Sequence
  Description of Artificial Sequence: Synthetic oligonucleotide
  Target: LAMA2; (-) strand; PAM type: NNNNGHTT; PAM sequence: GCCTGATT
tgtgaaaagaccaaatctat

SEQ ID NO: 38385 - DNA, 20 bp, Artificial Sequence
  Description of Artificial Sequence: Synthetic oligonucleotide
  Target: LAMA2; (-) strand; PAM type: NNNNGHTT; PAM sequence: AGAAGTTT
gaatgaaatgaagtgagaag

SEQ ID NO: 38386 - DNA, 20 bp, Artificial Sequence
  Description of Artificial Sequence: Synthetic oligonucleotide
  Target: LAMA2; (-) strand; PAM type: NNNNGHTT; PAM sequence: CAGTGATT
tcaactggaagaaagggtat

SEQ ID NO: 38387 - DNA, 20 bp, Artificial Sequence
  Description of Artificial Sequence: Synthetic oligonucleotide
  Target: LAMA2; (-) strand; PAM type: NNNNGHTT; PAM sequence: AGCTGATT
acaaatgcacaagcctcagg

SEQ ID NO: 38388 - DNA, 20 bp, Artificial Sequence
  Description of Artificial Sequence: Synthetic oligonucleotide
  Target: LAMA2; (-) strand; PAM type: NNNNGHTT; PAM sequence: GAAGGCTT
actttgaggagttgagagaa

SEQ ID NO: 38389 - DNA, 20 bp, Artificial Sequence
  Description of Artificial Sequence: Synthetic oligonucleotide
  Target: LAMA2; (-) strand; PAM type: NNNNGHTT; PAM sequence: CGAAGCTT
ggccgagtacccctctgaga

SEQ ID NO: 38390 - DNA, 20 bp, Artificial Sequence
  Description of Artificial Sequence: Synthetic oligonucleotide
  Target: LAMA2; (-) strand; PAM type: NNNNGHTT; PAM sequence: TGGAGTTT
gagtagtggttctcccagca

SEQ ID NO: 38391 - DNA, 20 bp, Artificial Sequence
  Description of Artificial Sequence: Synthetic oligonucleotide
  Target: LAMA2; (-) strand; PAM type: NNNNGHTT; PAM sequence: GACAGCTT
agacttaaatgtccctgtct

SEQ ID NO: 38392 - DNA, 20 bp, Artificial Sequence
  Description of Artificial Sequence: Synthetic oligonucleotide
  Target: LAMA2; (-) strand; PAM type: NNNNGHTT; PAM sequence: GGAAGCTT
aggcaaacaaactgtggctg

SEQ ID NO: 38393 - DNA, 20 bp, Artificial Sequence
  Description of Artificial Sequence: Synthetic oligonucleotide
  Target: LAMA2; (-) strand; PAM type: NNNNGHTT; PAM sequence: CGAGGCTT
agaggggcgcccgccattgc

SEQ ID NO: 38394 - DNA, 20 bp, Artificial Sequence
  Description of Artificial Sequence: Synthetic oligonucleotide
  Target: LAMA2; (-) strand; PAM type: NNNNGHTT; PAM sequence: AGGAGATT
gtcttagcaaacggcacacc

SEQ ID NO: 38395 - DNA, 20 bp, Artificial Sequence
  Description of Artificial Sequence: Synthetic oligonucleotide
  Target: LAMA2; (-) strand; PAM type: NNNNGHTT; PAM sequence: CCACGCTT
gggtcactcccaccctaata

SEQ ID NO: 38396 - DNA, 20 bp, Artificial Sequence
  Description of Artificial Sequence: Synthetic oligonucleotide
  Target: LAMA2; (-) strand; PAM type: NNNNGHTT; PAM sequence: TGGGGCTT
aggtaccaggttcacctcac

SEQ ID NO: 38397 - DNA, 20 bp, Artificial Sequence
  Description of Artificial Sequence: Synthetic oligonucleotide
  Target: LAMA2; (-) strand; PAM type: NNNNGHTT; PAM sequence: TTTGGTTT
tagaacaggagtctttagag

SEQ ID NO: 38398 - DNA, 20 bp, Artificial Sequence
  Description of Artificial Sequence: Synthetic oligonucleotide
  Target: LAMA2; (-) strand; PAM type: NNNNGHTT; PAM sequence: TAGAGTTT
ttacctagaacaggagtctt

SEQ ID NO: 38399 - DNA, 20 bp, Artificial Sequence
  Description of Artificial Sequence: Synthetic oligonucleotide
  Target: LAMA2; (-) strand; PAM type: NNNNGHTT; PAM sequence: GAAAGATT
agaaaggtgttattgtgcat

SEQ ID NO: 38400 - DNA, 20 bp, Artificial Sequence
  Description of Artificial Sequence: Synthetic oligonucleotide
  Target: LAMA2; (-) strand; PAM type: NNNNGHTT; PAM sequence: AATGGATT
ctggatgtctaaaaccatat

SEQ ID NO: 38401 - DNA, 20 bp, Artificial Sequence
  Description of Artificial Sequence: Synthetic oligonucleotide
  Target: LAMA2; (-) strand; PAM type: NNNNGHTT; PAM sequence: GAAAGTTT
tattcactgtttggaaacta

SEQ ID NO: 38402 - DNA, 20 bp, Artificial Sequence
  Description of Artificial Sequence: Synthetic oligonucleotide
  Target: LAMA2; (-) strand; PAM type: NNNNGHTT; PAM sequence: CACTGTTT
catgaggtctaagttgtatt

SEQ ID NO: 38403 - DNA, 20 bp, Artificial Sequence
  Description of Artificial Sequence: Synthetic oligonucleotide
  Target: LAMA2; (-) strand; PAM type: NNNNGHTT; PAM sequence: GTAAGCTT
ttctctcttctaactagaat

SEQ ID NO: 38404 - DNA, 20 bp, Artificial Sequence
  Description of Artificial Sequence: Synthetic oligonucleotide
  Target: LAMA2; (-) strand; PAM type: NNNNGHTT; PAM sequence: ATGTGCTT
atctaacacatgtatatttt

SEQ ID NO: 38405 - DNA, 20 bp, Artificial Sequence
  Description of Artificial Sequence: Synthetic oligonucleotide
  Target: LAMA2; (-) strand; PAM type: NNNNGHTT; PAM sequence: CTGTGTTT
taactcagatcattacatgt

SEQ ID NO: 38406 - DNA, 20 bp, Artificial Sequence
  Description of Artificial Sequence: Synthetic oligonucleotide
  Target: LAMA2; (-) strand; PAM type: NNNNGHTT; PAM sequence: ATCTGTTT
ccaagtctcttaactggtct

SEQ ID NO: 38407 - DNA, 20 bp, Artificial Sequence
  Description of Artificial Sequence: Synthetic oligonucleotide
  Target: LAMA2; (-) strand; PAM type: NNNNGHTT; PAM sequence: ATTTGTTT
ttcatgatctcctgtaaaaa

SEQ ID NO: 38408 - DNA, 20 bp, Artificial Sequence
  Description of Artificial Sequence: Synthetic oligonucleotide
  Target: LAMA2; (-) strand; PAM type: NNNNGHTT; PAM sequence: TGATGATT
ggtttaaatgacatatggat

SEQ ID NO: 38409 - DNA, 20 bp, Artificial Sequence
  Description of Artificial Sequence: Synthetic oligonucleotide
  Target: LAMA2; (-) strand; PAM type: NNNNGHTT; PAM sequence: TATGGATT
gtcttctggtttaaatgaca

SEQ ID NO: 38410 - DNA, 20 bp, Artificial Sequence
  Description of Artificial Sequence: Synthetic oligonucleotide
  Target: LAMA2; (-) strand; PAM type: NNNNGHTT; PAM sequence: TCTGGTTT
ttggttatcacatctagtct

SEQ ID NO: 38411 - DNA, 20 bp, Artificial Sequence
  Description of Artificial Sequence: Synthetic oligonucleotide
  Target: LAMA2; (-) strand; PAM type: NNNNGHTT; PAM sequence: CTCAGTTT
agtctcctttctagttcgtc

SEQ ID NO: 38412 - DNA, 20 bp, Artificial Sequence
  Description of Artificial Sequence: Synthetic oligonucleotide
  Target: LAMA2; (-) strand; PAM type: NNNNGHTT; PAM sequence: CACTGATT
tttccttctacttttttggt

SEQ ID NO: 38413 - DNA, 20 bp, Artificial Sequence
  Description of Artificial Sequence: Synthetic oligonucleotide
  Target: LAMA2; (-) strand; PAM type: NNNNGHTT; PAM sequence: TGTGGTTT
gactttcaatacatgacttc

SEQ ID NO: 38414 - DNA, 20 bp, Artificial Sequence
  Description of Artificial Sequence: Synthetic oligonucleotide
  Target: LAMA2; (-) strand; PAM type: NNNNGHTT; PAM sequence: ACTTGATT
agtatctgacaaagttgatc

SEQ ID NO: 38415 - DNA, 20 bp, Artificial Sequence
  Description of Artificial Sequence: Synthetic oligonucleotide
  Target: LAMA2; (-) strand; PAM type: NNNNGHTT; PAM sequence: TCTAGTTT
ttattctctcttaaatccac

SEQ ID NO: 38416 - DNA, 20 bp, Artificial Sequence
  Description of Artificial Sequence: Synthetic oligonucleotide
  Target: LAMA2; (-) strand; PAM type: NNNNGHTT; PAM sequence: TCATGATT
tgactgaccttgcttcaaat

SEQ ID NO: 38417 - DNA, 20 bp, Artificial Sequence
  Description of Artificial Sequence: Synthetic oligonucleotide
  Target: LAMA2; (-) strand; PAM type: NNNNGHTT; PAM sequence: CCTTGCTT
tcatagtacctgttgactga

SEQ ID NO: 38418 - DNA, 20 bp, Artificial Sequence
  Description of Artificial Sequence: Synthetic oligonucleotide
  Target: LAMA2; (-) strand; PAM type: NNNNGHTT; PAM sequence: CTTGGCTT
ctctagttttactgtattca

SEQ ID NO: 38419 - DNA, 20 bp, Artificial Sequence
  Description of Artificial Sequence: Synthetic oligonucleotide
  Target: LAMA2; (-) strand; PAM type: NNNNGHTT; PAM sequence: TCTAGTTT
catggtcaattattttaatc

SEQ ID NO: 38420 - DNA, 20 bp, Artificial Sequence
  Description of Artificial Sequence: Synthetic oligonucleotide
  Target: LAMA2; (-) strand; PAM type: NNNNGHTT; PAM sequence: CTTAGATT
tgagggtttctcatcactgt

SEQ ID NO: 38421 - DNA, 20 bp, Artificial Sequence
  Description of Artificial Sequence: Synthetic oligonucleotide
  Target: LAMA2; (-) strand; PAM type: NNNNGHTT; PAM sequence: GAGGGTTT
atgggaaatcgctgtagctt

SEQ ID NO: 38422 - DNA, 20 bp, Artificial Sequence
  Description of Artificial Sequence: Synthetic oligonucleotide
  Target: LAMA2; (-) strand; PAM type: NNNNGHTT; PAM sequence: TGTAGCTT
gggagacaatgggaaatcgc

SEQ ID NO: 38423 - DNA, 20 bp, Artificial Sequence
  Description of Artificial Sequence: Synthetic oligonucleotide
  Target: LAMA2; (-) strand; PAM type: NNNNGHTT; PAM sequence: CAAGGATT
caatggagttaaagcactgt

SEQ ID NO: 38424 - DNA, 20 bp, Artificial Sequence
  Description of Artificial Sequence: Synthetic oligonucleotide
  Target: LAMA2; (-) strand; PAM type: NNNNGHTT; PAM sequence: CCTTGCTT
tttaatgttatataaactag

SEQ ID NO: 38425 - DNA, 20 bp, Artificial Sequence
  Description of Artificial Sequence: Synthetic oligonucleotide
  Target: LAMA2; (-) strand; PAM type: NNNNGHTT; PAM sequence: TTCAGATT
ctagatataataaatagatg

SEQ ID NO: 38426 - DNA, 20 bp, Artificial Sequence
  Description of Artificial Sequence: Synthetic oligonucleotide
  Target: LAMA2; (-) strand; PAM type: NNNNGHTT; PAM sequence: CTATGTTT
aacctatgccttctttgttt

SEQ ID NO: 38427 - DNA, 20 bp, Artificial Sequence
  Description of Artificial Sequence: Synthetic oligonucleotide
  Target: LAMA2; (-) strand; PAM type: NNNNGHTT; PAM sequence: CTTTGTTT
aaaataataacctatgcctt

SEQ ID NO: 38428 - DNA, 20 bp, Artificial Sequence
  Description of Artificial Sequence: Synthetic oligonucleotide
  Target: LAMA2; (-) strand; PAM type: NNNNGHTT; PAM sequence: AAACGATT
aagaaataaggcaactattt

SEQ ID NO: 38429 - DNA, 20 bp, Artificial Sequence
  Description of Artificial Sequence: Synthetic oligonucleotide
  Target: LAMA2; (-) strand; PAM type: NNNNGHTT; PAM sequence: TACTGTTT
aagtcatagacacattttta

SEQ ID NO: 38430 - DNA, 20 bp, Artificial Sequence
  Description of Artificial Sequence: Synthetic oligonucleotide
  Target: LAMA2; (-) strand; PAM type: NNNNGHTT; PAM sequence: CGTGGCTT
gtgtgtatgcctagaaaaaa

SEQ ID NO: 38431 - DNA, 20 bp, Artificial Sequence
  Description of Artificial Sequence: Synthetic oligonucleotide
  Target: LAMA2; (-) strand; PAM type: NNNNGHTT; PAM sequence: GGTAGTTT
aaagaggaggaaagtgcatg

SEQ ID NO: 38432 - DNA, 20 bp, Artificial Sequence
  Description of Artificial Sequence: Synthetic oligonucleotide
  Target: LAMA2; (-) strand; PAM type: NNNNGHTT; PAM sequence: GTTGGTTT
aataaataataaaaaactta

SEQ ID NO: 38433 - DNA, 20 bp, Artificial Sequence
  Description of Artificial Sequence: Synthetic oligonucleotide
  Target: LAMA2; (-) strand; PAM type: NNNNGHTT; PAM sequence: AATTGTTT
acattttcttcaagcagtta

SEQ ID NO: 38434 - DNA, 20 bp, Artificial Sequence
  Description of Artificial Sequence: Synthetic oligonucleotide
  Target: LAMA2; (-) strand; PAM type: NNNNGHTT; PAM sequence: ATTTGTTT
catagaggttgaagacattt

SEQ ID NO: 38435 - DNA, 20 bp, Artificial Sequence
  Description of Artificial Sequence: Synthetic oligonucleotide
  Target: LAMA2; (-) strand; PAM type: NNNNGHTT; PAM sequence: TGCAGTTT
aaggaaagaacttcgtataa

SEQ ID NO: 38436 - DNA, 20 bp, Artificial Sequence
  Description of Artificial Sequence: Synthetic oligonucleotide
  Target: LAMA2; (-) strand; PAM type: NNNNGHTT; PAM sequence: GTGAGTTT
taaatttagtaaaacttaaa

SEQ ID NO: 38437 - DNA, 20 bp, Artificial Sequence
  Description of Artificial Sequence: Synthetic oligonucleotide
  Target: LAMA2; (-) strand; PAM type: NNNNGHTT; PAM sequence: GAAGGCTT
aattataacacctgggaaag

SEQ ID NO: 38438 - DNA, 20 bp, Artificial Sequence
  Description of Artificial Sequence: Synthetic oligonucleotide
  Target: LAMA2; (-) strand; PAM type: NNNNGHTT; PAM sequence: AGAAGATT
ttcagaaattaataggagtt

SEQ ID NO: 38439 - DNA, 20 bp, Artificial Sequence
  Description of Artificial Sequence: Synthetic oligonucleotide
  Target: LAMA2; (-) strand; PAM type: NNNNGHTT; PAM sequence: GAGGGATT
gtcaatataaagaaatacct

SEQ ID NO: 38440 - DNA, 20 bp, Artificial Sequence
  Description of Artificial Sequence: Synthetic oligonucleotide
  Target: LAMA2; (-) strand; PAM type: NNNNGHTT; PAM sequence: ACTGGATT
tacttttaaggtctcatgtg

SEQ ID NO: 38441 - DNA, 20 bp, Artificial Sequence
  Description of Artificial Sequence: Synthetic oligonucleotide
  Target: LAMA2; (-) strand; PAM type: NNNNGHTT; PAM sequence: CATTGTTT
acttctccttcctcttcttc

SEQ ID NO: 38442 - DNA, 20 bp, Artificial Sequence
  Description of Artificial Sequence: Synthetic oligonucleotide
  Target: LAMA2; (-) strand; PAM type: NNNNGHTT; PAM sequence: TCATGCTT
aatgatgaatgaaatatttt

SEQ ID NO: 38443 - DNA, 20 bp, Artificial Sequence
  Description of Artificial Sequence: Synthetic oligonucleotide
  Target: LAMA2; (-) strand; PAM type: NNNNGHTT; PAM sequence: TGCTGTTT
aactgaggttcccatttcct

SEQ ID NO: 38444 - DNA, 20 bp, Artificial Sequence
  Description of Artificial Sequence: Synthetic oligonucleotide
  Target: LAMA2; (-) strand; PAM type: NNNNGHTT; PAM sequence: ATTAGTTT
aagggtcaactgtacattgc

SEQ ID NO: 38445 - DNA, 20 bp, Artificial Sequence
  Description of Artificial Sequence: Synthetic oligonucleotide
  Target: LAMA2; (-) strand; PAM type: NNNNGHTT; PAM sequence: TTATGTTT
caacagtagactcttagtag

SEQ ID NO: 38446 - DNA, 20 bp, Artificial Sequence
  Description of Artificial Sequence: Synthetic oligonucleotide
  Target: LAMA2; (-) strand; PAM type: NNNNGHTT; PAM sequence: TAAGGCTT
taaattgcttatgttatcag

SEQ ID NO: 38447 - DNA, 20 bp, Artificial Sequence
  Description of Artificial Sequence: Synthetic oligonucleotide
  Target: LAMA2; (-) strand; PAM type: NNNNGHTT; PAM sequence: AATTGCTT
aaatacaaaatatgttaata

SEQ ID NO: 38448 - DNA, 20 bp, Artificial Sequence
  Description of Artificial Sequence: Synthetic oligonucleotide
  Target: LAMA2; (-) strand; PAM type: NNNNGHTT; PAM sequence: TTATGATT
acaaatatattttatcttcc

SEQ ID NO: 38449 - DNA, 20 bp, Artificial Sequence
  Description of Artificial Sequence: Synthetic oligonucleotide
  Target: LAMA2; (-) strand; PAM type: NNNNGHTT; PAM sequence: ACTTGATT
ctttaagatgatcaactttc

SEQ ID NO: 38450 - DNA, 20 bp, Artificial Sequence
  Description of Artificial Sequence: Synthetic oligonucleotide
  Target: LAMA2; (-) strand; PAM type: NNNNGHTT; PAM sequence: CGCGGATT
gcaagtccggtccatttata

SEQ ID NO: 38451 - DNA, 20 bp, Artificial Sequence
  Description of Artificial Sequence: Synthetic oligonucleotide
  Target: LAMA2; (-) strand; PAM type: NNNNGHTT; PAM sequence: ACAGGTTT
acagttgacacctgaacaac

SEQ ID NO: 38452 - DNA, 20 bp, Artificial Sequence
  Description of Artificial Sequence: Synthetic oligonucleotide
  Target: LAMA2; (-) strand; PAM type: NNNNGHTT; PAM sequence: TTCTGTTT
ttgggcacaaaatacttcct

SEQ ID NO: 38453 - DNA, 20 bp, Artificial Sequence
  Description of Artificial Sequence: Synthetic oligonucleotide
  Target: LAMA2; (-) strand; PAM type: NNNNGHTT; PAM sequence: CATTGCTT
tctctatgatatttttatcc

SEQ ID NO: 38454 - DNA, 20 bp, Artificial Sequence
  Description of Artificial Sequence: Synthetic oligonucleotide
  Target: LAMA2; (-) strand; PAM type: NNNNGHTT; PAM sequence: ACCAGTTT
ctactggagcggagtttcag

SEQ ID NO: 38455 - DNA, 20 bp, Artificial Sequence
  Description of Artificial Sequence: Synthetic oligonucleotide
  Target: LAMA2; (-) strand; PAM type: NNNNGHTT; PAM sequence: CGGAGTTT
ttctttttgctctactggag

SEQ ID NO: 38456 - DNA, 20 bp, Artificial Sequence
  Description of Artificial Sequence: Synthetic oligonucleotide
  Target: LAMA2; (-) strand; PAM type: NNNNGHTT; PAM sequence: CTTTGCTT
gcaacttcccatagtgagaa

SEQ ID NO: 38457 - DNA, 20 bp, Artificial Sequence
  Description of Artificial Sequence: Synthetic oligonucleotide
  Target: LAMA2; (-) strand; PAM type: NNNNGHTT; PAM sequence: GGAGGCTT
atatttggacattaattact

SEQ ID NO: 38458 - DNA, 20 bp, Artificial Sequence
  Description of Artificial Sequence: Synthetic oligonucleotide
  Target: LAMA2; (-) strand; PAM type: NNNNGHTT; PAM sequence: TTTGGATT
ttataatgaatgtttgactt

SEQ ID NO: 38459 - DNA, 20 bp, Artificial Sequence
  Description of Artificial Sequence: Synthetic oligonucleotide
  Target: LAMA2; (-) strand; PAM type: NNNNGHTT; PAM sequence: GAATGTTT
attggaagaattattataat

SEQ ID NO: 38460 - DNA, 20 bp, Artificial Sequence
  Description of Artificial Sequence: Synthetic oligonucleotide
  Target: LAMA2; (-) strand; PAM type: NNNNGHTT; PAM sequence: ACTAGATT
ggggcttctatataacaaca

SEQ ID NO: 38461 - DNA, 20 bp, Artificial Sequence
  Description of Artificial Sequence: Synthetic oligonucleotide
  Target: LAMA2; (-) strand; PAM type: NNNNGHTT; PAM sequence: AGGGGCTT
gcaaaatggggtgccctctg

SEQ ID NO: 38462 - DNA, 20 bp, Artificial Sequence
  Description of Artificial Sequence: Synthetic oligonucleotide
  Target: LAMA2; (-) strand; PAM type: NNNNGHTT; PAM sequence: TCCTGATT
tctttgttatactttgaaca

SEQ ID NO: 38463 - DNA, 20 bp, Artificial Sequence
  Description of Artificial Sequence: Synthetic oligonucleotide
  Target: LAMA2; (-) strand; PAM type: NNNNGHTT; PAM sequence: AATGGATT
atttaaactgtatttatgct

SEQ ID NO: 38464 - DNA, 20 bp, Artificial Sequence
  Description of Artificial Sequence: Synthetic oligonucleotide
  Target: LAMA2; (-) strand; PAM type: NNNNGHTT; PAM sequence: TTTTGTTT
aatgtacccccaaataaata

SEQ ID NO: 38465 - DNA, 20 bp, Artificial Sequence
  Description of Artificial Sequence: Synthetic oligonucleotide
  Target: LAMA2; (-) strand; PAM type: NNNNGHTT; PAM sequence: TTTTGATT
cttacatttcaaaaatgcag

SEQ ID NO: 38466 - DNA, 20 bp, Artificial Sequence
  Description of Artificial Sequence: Synthetic oligonucleotide
  Target: LAMA2; (-) strand; PAM type: NNNNGHTT; PAM sequence: TGCAGTTT
tatggcttacatttcaaaaa

SEQ ID NO: 38467 - DNA, 20 bp, Artificial Sequence
  Description of Artificial Sequence: Synthetic oligonucleotide
  Target: LAMA2; (-) strand; PAM type: NNNNGHTT; PAM sequence: TATGGCTT
tattgacttactagcatcaa

SEQ ID NO: 38468 - DNA, 20 bp, Artificial Sequence
  Description of Artificial Sequence: Synthetic oligonucleotide
  Target: LAMA2; (-) strand; PAM type: NNNNGHTT; PAM sequence: GGTGGTTT
tgccccctgttatattccta

SEQ ID NO: 38469 - DNA, 20 bp, Artificial Sequence
  Description of Artificial Sequence: Synthetic oligonucleotide
  Target: LAMA2; (-) strand; PAM type: NNNNGHTT; PAM sequence: ATATGTTT
ataaagacacagagtcgata

SEQ ID NO: 38470 - DNA, 20 bp, Artificial Sequence
  Description of Artificial Sequence: Synthetic oligonucleotide
  Target: LAMA2; (-) strand; PAM type: NNNNGHTT; PAM sequence: TCTAGTTT
acagatttttctttgcttta

SEQ ID NO: 38471 - DNA, 20 bp, Artificial Sequence
  Description of Artificial Sequence: Synthetic oligonucleotide
  Target: LAMA2; (-) strand; PAM type: NNNNGHTT; PAM sequence: CTTTGCTT
tgagtaattgacagattttt

SEQ ID NO: 38472 - DNA, 20 bp, Artificial Sequence
  Description of Artificial Sequence: Synthetic oligonucleotide
  Target: LAMA2; (-) strand; PAM type: NNNNGHTT; PAM sequence: GACAGATT
atgaaactggctgagtaatt

SEQ ID NO: 38473 - DNA, 20 bp, Artificial Sequence
  Description of Artificial Sequence: Synthetic oligonucleotide
  Target: LAMA2; (-) strand; PAM type: NNNNGHTT; PAM sequence: ACTAGATT
agacctggtgaacttaattt

SEQ ID NO: 38474 - DNA, 20 bp, Artificial Sequence
  Description of Artificial Sequence: Synthetic oligonucleotide
  Target: LAMA2; (-) strand; PAM type: NNNNGHTT; PAM sequence: GTAAGATT
ttaacatttcagaaatatgt

SEQ ID NO: 38475 - DNA, 20 bp, Artificial Sequence
  Description of Artificial Sequence: Synthetic oligonucleotide
  Target: LAMA2; (-) strand; PAM type: NNNNGHTT; PAM sequence: ACAGGTTT
taggcaaactaagttcttgt

SEQ ID NO: 38476 - DNA, 20 bp, Artificial Sequence
  Description of Artificial Sequence: Synthetic oligonucleotide
  Target: LAMA2; (-) strand; PAM type: NNNNGHTT; PAM sequence: TCCTGCTT
ccccttggcccctggaagtt

SEQ ID NO: 38477 - DNA, 20 bp, Artificial Sequence
  Description of Artificial Sequence: Synthetic oligonucleotide
  Target: LAMA2; (-) strand; PAM type: NNNNGHTT; PAM sequence: GGAAGTTT
ttctaagccccttggcccct

SEQ ID NO: 38478 - DNA, 20 bp, Artificial Sequence
  Description of Artificial Sequence: Synthetic oligonucleotide
  Target: LAMA2; (-) strand; PAM type: NNNNGHTT; PAM sequence: TAATGTTT
actctacgtactgaaatacc

SEQ ID NO: 38479 - DNA, 20 bp, Artificial Sequence
  Description of Artificial Sequence: Synthetic oligonucleotide
  Target: LAMA2; (-) strand; PAM type: NNNNGHTT; PAM sequence: TAAGGCTT
agaattcattcacttttcac

SEQ ID NO: 38480 - DNA, 20 bp, Artificial Sequence
  Description of Artificial Sequence: Synthetic oligonucleotide
  Target: LAMA2; (-) strand; PAM type: NNNNGHTT; PAM sequence: ATATGCTT
tttggacacttattttcttc

SEQ ID NO: 38481 - DNA, 20 bp, Artificial Sequence
  Description of Artificial Sequence: Synthetic oligonucleotide
  Target: LAMA2; (-) strand; PAM type: NNNNGHTT; PAM sequence: TGCAGCTT
caaaggggtgcaaatattta

SEQ ID NO: 38482 - DNA, 20 bp, Artificial Sequence
  Description of Artificial Sequence: Synthetic oligonucleotide
  Target: LAMA2; (-) strand; PAM type: NNNNGHTT; PAM sequence: TGGTGATT
tatgagaaacatgagagcgt

SEQ ID NO: 38483 - DNA, 20 bp, Artificial Sequence
  Description of Artificial Sequence: Synthetic oligonucleotide
  Target: LAMA2; (-) strand; PAM type: NNNNGHTT; PAM sequence: CAAAGTTT
aagaaaaagaaaacaatggc

SEQ ID NO: 38484 - DNA, 20 bp, Artificial Sequence
  Description of Artificial Sequence: Synthetic oligonucleotide
  Target: LAMA2; (-) strand; PAM type: NNNNGHTT; PAM sequence: TTCAGATT
gtaagtacattgcacagtat

SEQ ID NO: 38485 - DNA, 20 bp, Artificial Sequence
  Description of Artificial Sequence: Synthetic oligonucleotide
  Target: LAMA2; (-) strand; PAM type: NNNNGHTT; PAM sequence: TACTGCTT
aattttctaacatgagaact

SEQ ID NO: 38486 - DNA, 20 bp, Artificial Sequence
  Description of Artificial Sequence: Synthetic oligonucleotide
  Target: LAMA2; (-) strand; PAM type: NNNNGHTT; PAM sequence: TCTTGCTT
ttaatgaagtgttcaagatt

SEQ ID NO: 38487 - DNA, 20 bp, Artificial Sequence
  Description of Artificial Sequence: Synthetic oligonucleotide
  Target: LAMA2; (-) strand; PAM type: NNNNGHTT; PAM sequence: TCAAGATT
atatgactttaatgaagtgt

SEQ ID NO: 38488 - DNA, 20 bp, Artificial Sequence
  Description of Artificial Sequence: Synthetic oligonucleotide
  Target: LAMA2; (-) strand; PAM type: NNNNGHTT; PAM sequence: TACAGTTT
ttttggaggctatacatatg

SEQ ID NO: 38489 - DNA, 20 bp, Artificial Sequence
  Description of Artificial Sequence: Synthetic oligonucleotide
  Target: LAMA2; (-) strand; PAM type: NNNNGHTT; PAM sequence: TAATGTTT
attttgagattcatatgaac

SEQ ID NO: 38490 - DNA, 20 bp, Artificial Sequence
  Description of Artificial Sequence: Synthetic oligonucleotide
  Target: LAMA2; (-) strand; PAM type: NNNNGHTT; PAM sequence: TTGAGATT
ttttactgtgttacagtatt

SEQ ID NO: 38491 - DNA, 20 bp, Artificial Sequence
  Description of Artificial Sequence: Synthetic oligonucleotide
  Target: LAMA2; (-) strand; PAM type: NNNNGHTT; PAM sequence: CTGAGATT
gaatatgaaagtgaaaaaag

SEQ ID NO: 38492 - DNA, 20 bp, Artificial Sequence
  Description of Artificial Sequence: Synthetic oligonucleotide
  Target: LAMA2; (-) strand; PAM type: NNNNGHTT; PAM sequence: ACTTGTTT
agatgtttcattttaaaaat

SEQ ID NO: 38493 - DNA, 20 bp, Artificial Sequence
  Description of Artificial Sequence: Synthetic oligonucleotide
  Target: LAMA2; (-) strand; PAM type: NNNNGHTT; PAM sequence: AGATGTTT
tagccagcactgccgaaacc

SEQ ID NO: 38494 - DNA, 20 bp, Artificial Sequence
  Description of Artificial Sequence: Synthetic oligonucleotide
  Target: LAMA2; (-) strand; PAM type: NNNNGHTT; PAM sequence: AGAGGTTT
taaaacgtattcagatattc

SEQ ID NO: 38495 - DNA, 20 bp, Artificial Sequence
  Description of Artificial Sequence: Synthetic oligonucleotide
  Target: LAMA2; (-) strand; PAM type: NNNNGHTT; PAM sequence: AAGTGTTT
atgaaacataacaaagcaaa

SEQ ID NO: 38496 - DNA, 20 bp, Artificial Sequence
  Description of Artificial Sequence: Synthetic oligonucleotide
  Target: LAMA2; (-) strand; PAM type: NNNNGHTT; PAM sequence: GTATGTTT
gtgctcttataatgtgtata

SEQ ID NO: 38497 - DNA, 20 bp, Artificial Sequence
  Description of Artificial Sequence: Synthetic oligonucleotide
  Target: LAMA2; (-) strand; PAM type: NNNNGHTT; PAM sequence: ACACGTTT
acctctgtgctgattgctga

SEQ ID NO: 38498 - DNA, 20 bp, Artificial Sequence
  Description of Artificial Sequence: Synthetic oligonucleotide
  Target: LAMA2; (-) strand; PAM type: NNNNGHTT; PAM sequence: TGCTGATT
gagtcaatgtttaacctctg

SEQ ID NO: 38499 - DNA, 20 bp, Artificial Sequence
  Description of Artificial Sequence: Synthetic oligonucleotide
  Target: LAMA2; (-) strand; PAM type: NNNNGHTT; PAM sequence: CAATGTTT
tcacagtctagtactagagt

SEQ ID NO: 38500 - DNA, 20 bp, Artificial Sequence
  Description of Artificial Sequence: Synthetic oligonucleotide
  Target: LAMA2; (-) strand; PAM type: NNNNGHTT; PAM sequence: GCAGGATT
aaagatggcaggtggtgaaa

SEQ ID NO: 38501 - DNA, 20 bp, Artificial Sequence
  Description of Artificial Sequence: Synthetic oligonucleotide
  Target: LAMA2; (-) strand; PAM type: NNNNGHTT; PAM sequence: CATTGATT
taagaatcttataactgtta

SEQ ID NO: 38502 - DNA, 20 bp, Artificial Sequence
  Description of Artificial Sequence: Synthetic oligonucleotide
  Target: LAMA2; (-) strand; PAM type: NNNNGHTT; PAM sequence: TGTGGCTT
aagtgctaagcactctacaa

SEQ ID NO: 38503 - DNA, 20 bp, Artificial Sequence
  Description of Artificial Sequence: Synthetic oligonucleotide
  Target: LAMA2; (-) strand; PAM type: NNNNGHTT; PAM sequence: TTATGCTT
aatgacaactcacactgaca

SEQ ID NO: 38504 - DNA, 20 bp, Artificial Sequence
  Description of Artificial Sequence: Synthetic oligonucleotide
  Target: LAMA2; (-) strand; PAM type: NNNNGHTT; PAM sequence: CAACGTTT
aacagaaaaacaatgtataa

SEQ ID NO: 38505 - DNA, 20 bp, Artificial Sequence
  Description of Artificial Sequence: Synthetic oligonucleotide
  Target: LAMA2; (-) strand; PAM type: NNNNGHTT; PAM sequence: ACACGCTT
gcacatggctattcactgaa

SEQ ID NO: 38506 - DNA, 20 bp, Artificial Sequence
  Description of Artificial Sequence: Synthetic oligonucleotide
  Target: LAMA2; (-) strand; PAM type: NNNNGHTT; PAM sequence: CAGAGATT
tgacatagcagtttcacctt

SEQ ID NO: 38507 - DNA, 20 bp, Artificial Sequence
  Description of Artificial Sequence: Synthetic oligonucleotide
  Target: LAMA2; (-) strand; PAM type: NNNNGHTT; PAM sequence: AGCAGTTT
atgcatatatactttgacat

SEQ ID NO: 38508 - DNA, 20 bp, Artificial Sequence
  Description of Artificial Sequence: Synthetic oligonucleotide
  Target: LAMA2; (-) strand; PAM type: NNNNGHTT; PAM sequence: AGGGGTTT
gataatatactctattagag

SEQ ID NO: 38509 - DNA, 20 bp, Artificial Sequence
  Description of Artificial Sequence: Synthetic oligonucleotide
  Target: LAMA2; (-) strand; PAM type: NNNNGHTT; PAM sequence: AAAAGTTT
cattggattgccaaagaccc

SEQ ID NO: 38510 - DNA, 20 bp, Artificial Sequence
  Description of Artificial Sequence: Synthetic oligonucleotide
  Target: LAMA2; (-) strand; PAM type: NNNNGHTT; PAM sequence: ATTGGATT
caaaatgtcatttttcaccc

SEQ ID NO: 38511 - DNA, 20 bp, Artificial Sequence
  Description of Artificial Sequence: Synthetic oligonucleotide
  Target: LAMA2; (-) strand; PAM type: NNNNGHTT; PAM sequence: GTGAGATT
tgcctcagcctcccaaagtg

SEQ ID NO: 38512 - DNA, 20 bp, Artificial Sequence
  Description of Artificial Sequence: Synthetic oligonucleotide
  Target: LAMA2; (-) strand; PAM type: NNNNGHTT; PAM sequence: CAGGGATT
aggtctcgaactcatggcct

SEQ ID NO: 38513 - DNA, 20 bp, Artificial Sequence
  Description of Artificial Sequence: Synthetic oligonucleotide
  Target: LAMA2; (-) strand; PAM type: NNNNGHTT; PAM sequence: CAGGGTTT
ttttgtatttttagtaaaca

SEQ ID NO: 38514 - DNA, 20 bp, Artificial Sequence
  Description of Artificial Sequence: Synthetic oligonucleotide
  Target: LAMA2; (-) strand; PAM type: NNNNGHTT; PAM sequence: CCTGGCTT
tataggtgtgcaccaccatg

SEQ ID NO: 38515 - DNA, 20 bp, Artificial Sequence
  Description of Artificial Sequence: Synthetic oligonucleotide
  Target: LAMA2; (-) strand; PAM type: NNNNGHTT; PAM sequence: AAGTGATT
tctcccaggttcaagcaatt

SEQ ID NO: 38516 - DNA, 20 bp, Artificial Sequence
  Description of Artificial Sequence: Synthetic oligonucleotide
  Target: LAMA2; (-) strand; PAM type: NNNNGHTT; PAM sequence: AAATGCTT
agatttttgaattagatttt

SEQ ID NO: 38517 - DNA, 20 bp, Artificial Sequence
  Description of Artificial Sequence: Synthetic oligonucleotide
  Target: LAMA2; (-) strand; PAM type: NNNNGHTT; PAM sequence: ATTAGATT
agttcagaatagatttttga

SEQ ID NO: 38518 - DNA, 20 bp, Artificial Sequence
  Description of Artificial Sequence: Synthetic oligonucleotide
  Target: LAMA2; (-) strand; PAM type: NNNNGHTT; PAM sequence: AATAGATT
ttgggattcagtaagttcag

SEQ ID NO: 38519 - DNA, 20 bp, Artificial Sequence
  Description of Artificial Sequence: Synthetic oligonucleotide
  Target: LAMA2; (-) strand; PAM type: NNNNGHTT; PAM sequence: TTGGGATT
ttttcctctcctaattattc

SEQ ID NO: 38520 - DNA, 20 bp, Artificial Sequence
  Description of Artificial Sequence: Synthetic oligonucleotide
  Target: LAMA2; (-) strand; PAM type: NNNNGHTT; PAM sequence: AAGGGTTT
gcatgaaaatacctactttg

SEQ ID NO: 38521 - DNA, 20 bp, Artificial Sequence
  Description of Artificial Sequence: Synthetic oligonucleotide
  Target: LAMA2; (-) strand; PAM type: NNNNGHTT; PAM sequence: GTGTGATT
ttgtagtctatatatttgct

SEQ ID NO: 38522 - DNA, 20 bp, Artificial Sequence
  Description of Artificial Sequence: Synthetic oligonucleotide
  Target: LAMA2; (-) strand; PAM type: NNNNGHTT; PAM sequence: ATATGTTT
tgtgactataatgcaaaagt

SEQ ID NO: 38523 - DNA, 20 bp, Artificial Sequence
  Description of Artificial Sequence: Synthetic oligonucleotide
  Target: LAMA2; (-) strand; PAM type: NNNNGHTT; PAM sequence: AGTGGTTT
acacacacatgaacacgctc

SEQ ID NO: 38524 - DNA, 20 bp, Artificial Sequence
  Description of Artificial Sequence: Synthetic oligonucleotide
  Target: LAMA2; (-) strand; PAM type: NNNNGHTT; PAM sequence: TTGGGCTT
ctcaagacaaactctcactc

SEQ ID NO: 38525 - DNA, 20 bp, Artificial Sequence
  Description of Artificial Sequence: Synthetic oligonucleotide
  Target: LAMA2; (-) strand; PAM type: NNNNGHTT; PAM sequence: CCTTGATT
ttggtgatactatagtgcat

SEQ ID NO: 38526 - DNA, 20 bp, Artificial Sequence
  Description of Artificial Sequence: Synthetic oligonucleotide
  Target: LAMA2; (-) strand; PAM type: NNNNGHTT; PAM sequence: GTAGGTTT
atctccggaaattgtataat

SEQ ID NO: 38527 - DNA, 20 bp, Artificial Sequence
  Description of Artificial Sequence: Synthetic oligonucleotide
  Target: LAMA2; (-) strand; PAM type: NNNNGHTT; PAM sequence: TCTGGATT
atggcaacaaatcagtatga

SEQ ID NO: 38528 - DNA, 20 bp, Artificial Sequence
  Description of Artificial Sequence: Synthetic oligonucleotide
  Target: LAMA2; (-) strand; PAM type: NNNNGHTT; PAM sequence: GCAAGATT
aaatattgtaactgcccaga

SEQ ID NO: 38529 - DNA, 20 bp, Artificial Sequence
  Description of Artificial Sequence: Synthetic oligonucleotide
  Target: LAMA2; (-) strand; PAM type: NNNNGHTT; PAM sequence: TGATGATT
actacctcatagcgttgttg

SEQ ID NO: 38530 - DNA, 20 bp, Artificial Sequence
  Description of Artificial Sequence: Synthetic oligonucleotide
  Target: LAMA2; (-) strand; PAM type: NNNNGHTT; PAM sequence: TAAAGCTT
ctgctctgcaattttagagc

SEQ ID NO: 38531 - DNA, 20 bp, Artificial Sequence
  Description of Artificial Sequence: Synthetic oligonucleotide
  Target: LAMA2; (-) strand; PAM type: NNNNGHTT; PAM sequence: ACCTGCTT
aatagcaattagctttatcc

SEQ ID NO: 38532 - DNA, 20 bp, Artificial Sequence
  Description of Artificial Sequence: Synthetic oligonucleotide
  Target: LAMA2; (-) strand; PAM type: NNNNGHTT; PAM sequence: ATTAGCTT
tgtagggtaatagaatagca

SEQ ID NO: 38533 - DNA, 20 bp, Artificial Sequence
  Description of Artificial Sequence: Synthetic oligonucleotide
  Target: LAMA2; (-) strand; PAM type: NNNNGHTT; PAM sequence: GCCAGTTT
gaaacatgcaattgcaccat

SEQ ID NO: 38534 - DNA, 20 bp, Artificial Sequence
  Description of Artificial Sequence: Synthetic oligonucleotide
  Target: LAMA2; (-) strand; PAM type: NNNNGHTT; PAM sequence: TGCTGCTT
gagctgttgaaaatggaatg

SEQ ID NO: 38535 - DNA, 20 bp, Artificial Sequence
  Description of Artificial Sequence: Synthetic oligonucleotide
  Target: LAMA2; (-) strand; PAM type: NNNNGHTT; PAM sequence: ACCAGCTT
cttgagcccaggggtttgag

SEQ ID NO: 38536 - DNA, 20 bp, Artificial Sequence
  Description of Artificial Sequence: Synthetic oligonucleotide
  Target: LAMA2; (-) strand; PAM type: NNNNGHTT; PAM sequence: AGGGGTTT
caggaggattgcttgagccc

SEQ ID NO: 38537 - DNA, 20 bp, Artificial Sequence
  Description of Artificial Sequence: Synthetic oligonucleotide
  Target: LAMA2; (-) strand; PAM type: NNNNGHTT; PAM sequence: GATTGCTT
ttgggaggctgaggcaggag

SEQ ID NO: 38538 - DNA, 20 bp, Artificial Sequence
  Description of Artificial Sequence: Synthetic oligonucleotide
  Target: LAMA2; (-) strand; PAM type: NNNNGHTT; PAM sequence: GGAGGATT
ctacttgggaggctgaggca

SEQ ID NO: 38539 - DNA, 20 bp, Artificial Sequence
  Description of Artificial Sequence: Synthetic oligonucleotide
  Target: LAMA2; (-) strand; PAM type: NNNNGHTT; PAM sequence: CTCAGCTT
tcgaactggctttcttgcta

SEQ ID NO: 38540 - DNA, 20 bp, Artificial Sequence
  Description of Artificial Sequence: Synthetic oligonucleotide
  Target: LAMA2; (-) strand; PAM type: NNNNGHTT; PAM sequence: ACTGGCTT
tttgaggttctgggaatcga

SEQ ID NO: 38541 - DNA, 20 bp, Artificial Sequence
  Description of Artificial Sequence: Synthetic oligonucleotide
  Target: LAMA2; (-) strand; PAM type: NNNNGHTT; PAM sequence: GCTGGCTT
cacagactgaaggctgcacc

SEQ ID NO: 38542 - DNA, 20 bp, Artificial Sequence
  Description of Artificial Sequence: Synthetic oligonucleotide
  Target: LAMA2; (-) strand; PAM type: NNNNGHTT; PAM sequence: TTCAGCTT
gaacatcagattccaagttt

SEQ ID NO: 38543 - DNA, 20 bp, Artificial Sequence
  Description of Artificial Sequence: Synthetic oligonucleotide
  Target: LAMA2; (-) strand; PAM type: NNNNGHTT; PAM sequence: CCAAGTTT
ctgcccttgaacatcagatt

SEQ ID NO: 38544 - DNA, 20 bp, Artificial Sequence
  Description of Artificial Sequence: Synthetic oligonucleotide
  Target: LAMA2; (-) strand; PAM type: NNNNGHTT; PAM sequence: ATCAGATT
gatgcttcctgcccttgaac

SEQ ID NO: 38545 - DNA, 20 bp, Artificial Sequence
  Description of Artificial Sequence: Synthetic oligonucleotide
  Target: LAMA2; (-) strand; PAM type: NNNNGHTT; PAM sequence: GGATGCTT
cttcatctttctcctatgcc

SEQ ID NO: 38546 - DNA, 20 bp, Artificial Sequence
  Description of Artificial Sequence: Synthetic oligonucleotide
  Target: LAMA2; (-) strand; PAM type: NNNNGHTT; PAM sequence: AGGAGATT
gtctgtgagggtgttgccaa

SEQ ID NO: 38547 - DNA, 20 bp, Artificial Sequence
  Description of Artificial Sequence: Synthetic oligonucleotide
  Target: LAMA2; (-) strand; PAM type: NNNNGHTT; PAM sequence: TGGTGATT
tgagaaagcgttggagaatg

SEQ ID NO: 38548 - DNA, 20 bp, Artificial Sequence
  Description of Artificial Sequence: Synthetic oligonucleotide
  Target: LAMA2; (-) strand; PAM type: NNNNGHTT; PAM sequence: GATTGTTT
agaagacttaggaaaagcat

SEQ ID NO: 38549 - DNA, 20 bp, Artificial Sequence
  Description of Artificial Sequence: Synthetic oligonucleotide
  Target: LAMA2; (-) strand; PAM type: NNNNGHTT; PAM sequence: GCATGATT
aaagagaagacttaggaaaa

SEQ ID NO: 38550 - DNA, 20 bp, Artificial Sequence
  Description of Artificial Sequence: Synthetic oligonucleotide
  Target: LAMA2; (-) strand; PAM type: NNNNGHTT; PAM sequence: AAAGGTTT
atggtcccaacagctgaaca

SEQ ID NO: 38551 - DNA, 20 bp, Artificial Sequence
  Description of Artificial Sequence: Synthetic oligonucleotide
  Target: LAMA2; (-) strand; PAM type: NNNNGHTT; PAM sequence: TATAGATT
tattaggaagacacatagtg

SEQ ID NO: 38552 - DNA, 20 bp, Artificial Sequence
  Description of Artificial Sequence: Synthetic oligonucleotide
  Target: LAMA2; (-) strand; PAM type: NNNNGHTT; PAM sequence: CCCAGCTT
aactctatggcattactttt

SEQ ID NO: 38553 - DNA, 20 bp, Artificial Sequence
  Description of Artificial Sequence: Synthetic oligonucleotide
  Target: LAMA2; (-) strand; PAM type: NNNNGHTT; PAM sequence: GGAAGTTT
taaggaagctttagtgtttg

SEQ ID NO: 38554 - DNA, 20 bp, Artificial Sequence
  Description of Artificial Sequence: Synthetic oligonucleotide
  Target: LAMA2; (-) strand; PAM type: NNNNGHTT; PAM sequence: TAGTGTTT
gttttaaaataaggaagctt

SEQ ID NO: 38555 - DNA, 20 bp, Artificial Sequence
  Description of Artificial Sequence: Synthetic oligonucleotide
  Target: LAMA2; (-) strand; PAM type: NNNNGHTT; PAM sequence: GGAAGCTT
atgcatttgttttaaaataa

SEQ ID NO: 38556 - DNA, 20 bp, Artificial Sequence
  Description of Artificial Sequence: Synthetic oligonucleotide
  Target: LAMA2; (-) strand; PAM type: NNNNGHTT; PAM sequence: ATTTGTTT
gactggtgaaccacaaatgc

SEQ ID NO: 38557 - DNA, 20 bp, Artificial Sequence
  Description of Artificial Sequence: Synthetic oligonucleotide
  Target: LAMA2; (-) strand; PAM type: NNNNGHTT; PAM sequence: AAAAGCTT
gtgatttgagcttacctata

SEQ ID NO: 38558 - DNA, 20 bp, Artificial Sequence
  Description of Artificial Sequence: Synthetic oligonucleotide
  Target: LAMA2; (-) strand; PAM type: NNNNGHTT; PAM sequence: TTGAGCTT
tatttgagcttttctgtgat

SEQ ID NO: 38559 - DNA, 20 bp, Artificial Sequence
  Description of Artificial Sequence: Synthetic oligonucleotide
  Target: LAMA2; (-) strand; PAM type: NNNNGHTT; PAM sequence: CTGTGATT
atgtatctatttgagctttt

SEQ ID NO: 38560 - DNA, 20 bp, Artificial Sequence
  Description of Artificial Sequence: Synthetic oligonucleotide
  Target: LAMA2; (-) strand; PAM type: NNNNGHTT; PAM sequence: TTGAGCTT
gctaaaggagatgtatctat

SEQ ID NO: 38561 - DNA, 20 bp, Artificial Sequence
  Description of Artificial Sequence: Synthetic oligonucleotide
  Target: LAMA2; (-) strand; PAM type: NNNNGHTT; PAM sequence: CTTAGCTT
tctttattggtttctctgtt

SEQ ID NO: 38562 - DNA, 20 bp, Artificial Sequence
  Description of Artificial Sequence: Synthetic oligonucleotide
  Target: LAMA2; (-) strand; PAM type: NNNNGHTT; PAM sequence: ATTGGTTT
catcattaaaatatgtcttt

SEQ ID NO: 38563 - DNA, 20 bp, Artificial Sequence
  Description of Artificial Sequence: Synthetic oligonucleotide
  Target: LAMA2; (-) strand; PAM type: NNNNGHTT; PAM sequence: TAATGTTT
ttcagattttattcacgtct

SEQ ID NO: 38564 - DNA, 20 bp, Artificial Sequence
  Description of Artificial Sequence: Synthetic oligonucleotide
  Target: LAMA2; (-) strand; PAM type: NNNNGHTT; PAM sequence: TTCAGATT
agatcatagtgatggcccaa

SEQ ID NO: 38565 - DNA, 20 bp, Artificial Sequence
  Description of Artificial Sequence: Synthetic oligonucleotide
  Target: LAMA2; (-) strand; PAM type: NNNNGHTT; PAM sequence: CCACGTTT
tctaaatgcacttgaaaatc

SEQ ID NO: 38566 - DNA, 20 bp, Artificial Sequence
  Description of Artificial Sequence: Synthetic oligonucleotide
  Target: LAMA2; (-) strand; PAM type: NNNNGHTT; PAM sequence: AGTGGTTT
acatttcacactaaaaacct

SEQ ID NO: 38567 - DNA, 20 bp, Artificial Sequence
  Description of Artificial Sequence: Synthetic oligonucleotide
  Target: LAMA2; (-) strand; PAM type: NNNNGHTT; PAM sequence: TATAGTTT
tgtcatactgttttaataag

SEQ ID NO: 38568 - DNA, 20 bp, Artificial Sequence
  Description of Artificial Sequence: Synthetic oligonucleotide
  Target: LAMA2; (-) strand; PAM type: NNNNGHTT; PAM sequence: TACTGTTT
gtattcaataaatgttgtca

SEQ ID NO: 38569 - DNA, 20 bp, Artificial Sequence
  Description of Artificial Sequence: Synthetic oligonucleotide
  Target: LAMA2; (-) strand; PAM type: NNNNGHTT; PAM sequence: CGAAGTTT
agacgaatcacacctacctc

SEQ ID NO: 38570 - DNA, 20 bp, Artificial Sequence
  Description of Artificial Sequence: Synthetic oligonucleotide
  Target: LAMA2; (-) strand; PAM type: NNNNGHTT; PAM sequence: TTTTGCTT
aaggcccttgggaaagttaa

SEQ ID NO: 38571 - DNA, 20 bp, Artificial Sequence
  Description of Artificial Sequence: Synthetic oligonucleotide
  Target: LAMA2; (-) strand; PAM type: NNNNGHTT; PAM sequence: TTTTGATT
tttccagagctggttgtgga

SEQ ID NO: 38572 - DNA, 20 bp, Artificial Sequence
  Description of Artificial Sequence: Synthetic oligonucleotide
  Target: LAMA2; (-) strand; PAM type: NNNNGHTT; PAM sequence: TGTGGATT
ggagattttccagagctggt

SEQ ID NO: 38573 - DNA, 20 bp, Artificial Sequence
  Description of Artificial Sequence: Synthetic oligonucleotide
  Target: LAMA2; (-) strand; PAM type: NNNNGHTT; PAM sequence: TGGAGATT
caaaaaattaagctcatttc

SEQ ID NO: 38574 - DNA, 20 bp, Artificial Sequence
  Description of Artificial Sequence: Synthetic oligonucleotide
  Target: LAMA2; (-) strand; PAM type: NNNNGHTT; PAM sequence: AGTTGTTT
aacaggtaaagggttgtgtt

SEQ ID NO: 38575 - DNA, 20 bp, Artificial Sequence
  Description of Artificial Sequence: Synthetic oligonucleotide
  Target: LAMA2; (-) strand; PAM type: NNNNGHTT; PAM sequence: AGGTGATT
ccctcattcgtgaactctgc

SEQ ID NO: 38576 - DNA, 20 bp, Artificial Sequence
  Description of Artificial Sequence: Synthetic oligonucleotide
  Target: LAMA2; (-) strand; PAM type: NNNNGHTT; PAM sequence: CATTGCTT
cttgccttgtaggcaatcct

SEQ ID NO: 38577 - DNA, 20 bp, Artificial Sequence
  Description of Artificial Sequence: Synthetic oligonucleotide
  Target: LAMA2; (-) strand; PAM type: NNNNGHTT; PAM sequence: TAAAGATT
ttaacctttcacttactgct

SEQ ID NO: 38578 - DNA, 20 bp, Artificial Sequence
  Description of Artificial Sequence: Synthetic oligonucleotide
  Target: LAMA2; (-) strand; PAM type: NNNNGHTT; PAM sequence: TACTGCTT
attgtagttaacctttcact

SEQ ID NO: 38579 - DNA, 20 bp, Artificial Sequence
  Description of Artificial Sequence: Synthetic oligonucleotide
  Target: LAMA2; (-) strand; PAM type: NNNNGHTT; PAM sequence: ACAGGCTT
ttcctttaagctaaagagaa

SEQ ID NO: 38580 - DNA, 20 bp, Artificial Sequence
  Description of Artificial Sequence: Synthetic oligonucleotide
  Target: LAMA2; (-) strand; PAM type: NNNNGHTT; PAM sequence: TGCTGATT
ctcataatatacaacatcaa

SEQ ID NO: 38581 - DNA, 20 bp, Artificial Sequence
  Description of Artificial Sequence: Synthetic oligonucleotide
  Target: LAMA2; (-) strand; PAM type: NNNNGHTT; PAM sequence: CAGAGATT
gttatagttttatattaata

SEQ ID NO: 38582 - DNA, 20 bp, Artificial Sequence
  Description of Artificial Sequence: Synthetic oligonucleotide
  Target: LAMA2; (-) strand; PAM type: NNNNGHTT; PAM sequence: TATAGTTT
taatcaaataaaccataagt

SEQ ID NO: 38583 - DNA, 20 bp, Artificial Sequence
  Description of Artificial Sequence: Synthetic oligonucleotide
  Target: LAMA2; (-) strand; PAM type: NNNNGHTT; PAM sequence: GCTAGATT
cattagcacttttactatgg

SEQ ID NO: 38584 - DNA, 20 bp, Artificial Sequence
  Description of Artificial Sequence: Synthetic oligonucleotide
  Target: LAMA2; (-) strand; PAM type: NNNNGHTT; PAM sequence: TTATGTTT
tttgttttccatttactaac

SEQ ID NO: 38585 - DNA, 20 bp, Artificial Sequence
  Description of Artificial Sequence: Synthetic oligonucleotide
  Target: LAMA2; (-) strand; PAM type: NNNNGHTT; PAM sequence: GTTTGTTT
acagggtctttgcaacagct

SEQ ID NO: 38586 - DNA, 20 bp, Artificial Sequence
  Description of Artificial Sequence: Synthetic oligonucleotide
  Target: LAMA2; (-) strand; PAM type: NNNNGHTT; PAM sequence: AGCTGTTT
aaaaacagggtctttgcaac

SEQ ID NO: 38587 - DNA, 20 bp, Artificial Sequence
  Description of Artificial Sequence: Synthetic oligonucleotide
  Target: LAMA2; (-) strand; PAM type: NNNNGHTT; PAM sequence: AAGTGCTT
ggtagtggtgaaattctctg

SEQ ID NO: 38588 - DNA, 20 bp, Artificial Sequence
  Description of Artificial Sequence: Synthetic oligonucleotide
  Target: LAMA2; (-) strand; PAM type: NNNNGHTT; PAM sequence: TTAAGTTT
atgagtatttaatgtttcct

SEQ ID NO: 38589 - DNA, 20 bp, Artificial Sequence
  Description of Artificial Sequence: Synthetic oligonucleotide
  Target: LAMA2; (-) strand; PAM type: NNNNGHTT; PAM sequence: TAATGTTT
ccatataggaaatgagtatt

SEQ ID NO: 38590 - DNA, 20 bp, Artificial Sequence
  Description of Artificial Sequence: Synthetic oligonucleotide
  Target: LAMA2; (-) strand; PAM type: NNNNGHTT; PAM sequence: ATGTGCTT
acatcacatagaagaagatg

SEQ ID NO: 38591 - DNA, 20 bp, Artificial Sequence
  Description of Artificial Sequence: Synthetic oligonucleotide
  Target: LAMA2; (-) strand; PAM type: NNNNGHTT; PAM sequence: AATAGATT
gaaaatataaatctcctatg

SEQ ID NO: 38592 - DNA, 20 bp, Artificial Sequence
  Description of Artificial Sequence: Synthetic oligonucleotide
  Target: LAMA2; (-) strand; PAM type: NNNNGHTT; PAM sequence: ATTAGCTT
caaaattttaaaacaaatgg

SEQ ID NO: 38593 - DNA, 20 bp, Artificial Sequence
  Description of Artificial Sequence: Synthetic oligonucleotide
  Target: LAMA2; (-) strand; PAM type: NNNNGHTT; PAM sequence: AATGGATT
gcagacaaaattttaaaaca

SEQ ID NO: 38594 - DNA, 20 bp, Artificial Sequence
  Description of Artificial Sequence: Synthetic oligonucleotide
  Target: LAMA2; (-) strand; PAM type: NNNNGHTT; PAM sequence: GAATGCTT
tgaagagtttgatcaggtaa

SEQ ID NO: 38595 - DNA, 20 bp, Artificial Sequence
  Description of Artificial Sequence: Synthetic oligonucleotide
  Target: LAMA2; (-) strand; PAM type: NNNNGHTT; PAM sequence: AAGAGTTT
ttcaaagtaaatagaatttg

SEQ ID NO: 38596 - DNA, 20 bp, Artificial Sequence
  Description of Artificial Sequence: Synthetic oligonucleotide
  Target: LAMA2; (-) strand; PAM type: NNNNGHTT; PAM sequence: ATATGTTT
agcactgacctatcttgagc

SEQ ID NO: 38597 - DNA, 20 bp, Artificial Sequence
  Description of Artificial Sequence: Synthetic oligonucleotide
  Target: LAMA2; (-) strand; PAM type: NNNNGHTT; PAM sequence: AAATGTTT
tctcatacaaatttttgtta

SEQ ID NO: 38598 - DNA, 20 bp, Artificial Sequence
  Description of Artificial Sequence: Synthetic oligonucleotide
  Target: LAMA2; (-) strand; PAM type: NNNNGHTT; PAM sequence: TTTTGATT
aagagatattcattatagtg

SEQ ID NO: 38599 - DNA, 20 bp, Artificial Sequence
  Description of Artificial Sequence: Synthetic oligonucleotide
  Target: LAMA2; (-) strand; PAM type: NNNNGHTT; PAM sequence: TAGTGTTT
aggccaagagatattcatta

SEQ ID NO: 38600 - DNA, 20 bp, Artificial Sequence
  Description of Artificial Sequence: Synthetic oligonucleotide
  Target: LAMA2; (-) strand; PAM type: NNNNGHTT; PAM sequence: CAGTGTTT
gcctagacaatatttatata

SEQ ID NO: 38601 - DNA, 20 bp, Artificial Sequence
  Description of Artificial Sequence: Synthetic oligonucleotide
  Target: LAMA2; (-) strand; PAM type: NNNNGHTT; PAM sequence: ACAGGATT
gctcagcccgtccactgctc

SEQ ID NO: 38602 - DNA, 20 bp, Artificial Sequence
  Description of Artificial Sequence: Synthetic oligonucleotide
  Target: LAMA2; (-) strand; PAM type: NNNNGHTT; PAM sequence: GATTGCTT
cctcaagtgtaactaacact

SEQ ID NO: 38603 - DNA, 20 bp, Artificial Sequence
  Description of Artificial Sequence: Synthetic oligonucleotide
  Target: LAMA2; (-) strand; PAM type: NNNNGHTT; PAM sequence: CACTGATT
actgcctcaagtgtaactaa

SEQ ID NO: 38604 - DNA, 20 bp, Artificial Sequence
  Description of Artificial Sequence: Synthetic oligonucleotide
  Target: LAMA2; (-) strand; PAM type: NNNNGHTT; PAM sequence: ATCAGTTT
ttttcaatgtgaccactaca

SEQ ID NO: 38605 - DNA, 20 bp, Artificial Sequence
  Description of Artificial Sequence: Synthetic oligonucleotide
  Target: LAMA2; (-) strand; PAM type: NNNNGHTT; PAM sequence: TTGGGATT
ggttgggaaaagtcctgaat

SEQ ID NO: 38606 - DNA, 20 bp, Artificial Sequence
  Description of Artificial Sequence: Synthetic oligonucleotide
  Target: LAMA2; (-) strand; PAM type: NNNNGHTT; PAM sequence: GACTGTTT
ttttcttcttgtagccatta

SEQ ID NO: 38607 - DNA, 20 bp, Artificial Sequence
  Description of Artificial Sequence: Synthetic oligonucleotide
  Target: LAMA2; (-) strand; PAM type: NNNNGHTT; PAM sequence: CTTAGCTT
ttcctgttacccatcttctc

SEQ ID NO: 38608 - DNA, 20 bp, Artificial Sequence
  Description of Artificial Sequence: Synthetic oligonucleotide
  Target: LAMA2; (-) strand; PAM type: NNNNGHTT; PAM sequence: ATCTGCTT
ccaccttttttttccttcct

SEQ ID NO: 38609 - DNA, 20 bp, Artificial Sequence
  Description of Artificial Sequence: Synthetic oligonucleotide
  Target: LAMA2; (-) strand; PAM type: NNNNGHTT; PAM sequence: GTTGGTTT
agacaacacattctagaaaa

SEQ ID NO: 38610 - DNA, 20 bp, Artificial Sequence
  Description of Artificial Sequence: Synthetic oligonucleotide
  Target: LAMA2; (-) strand; PAM type: NNNNGHTT; PAM sequence: AGAGGTTT
aaacaggcagaatttacatg

SEQ ID NO: 38611 - DNA, 20 bp, Artificial Sequence
  Description of Artificial Sequence: Synthetic oligonucleotide
  Target: LAMA2; (-) strand; PAM type: NNNNGHTT; PAM sequence: AGAGGATT
attagaatagaacataaaca

SEQ ID NO: 38612 - DNA, 20 bp, Artificial Sequence
  Description of Artificial Sequence: Synthetic oligonucleotide
  Target: LAMA2; (-) strand; PAM type: NNNNGHTT; PAM sequence: AACAGATT
atgtataaatttgagttaag

SEQ ID NO: 38613 - DNA, 20 bp, Artificial Sequence
  Description of Artificial Sequence: Synthetic oligonucleotide
  Target: LAMA2; (-) strand; PAM type: NNNNGHTT; PAM sequence: CAAGGTTT
atagaaacagtgttttactt

SEQ ID NO: 38614 - DNA, 20 bp, Artificial Sequence
  Description of Artificial Sequence: Synthetic oligonucleotide
  Target: LAMA2; (-) strand; PAM type: NNNNGHTT; PAM sequence: CAGTGTTT
gctctcttttatcatagaaa

SEQ ID NO: 38615 - DNA, 20 bp, Artificial Sequence
  Description of Artificial Sequence: Synthetic oligonucleotide
  Target: LAMA2; (-) strand; PAM type: NNNNGHTT; PAM sequence: AAGTGTTT
aaaaggtatccctcccatag

SEQ ID NO: 38616 - DNA, 20 bp, Artificial Sequence
  Description of Artificial Sequence: Synthetic oligonucleotide
  Target: LAMA2; (-) strand; PAM type: NNNNGHTT; PAM sequence: AAGCGATT
tttaggatcacaaacagggc

SEQ ID NO: 38617 - DNA, 20 bp, Artificial Sequence
  Description of Artificial Sequence: Synthetic oligonucleotide
  Target: LAMA2; (-) strand; PAM type: NNNNGHTT; PAM sequence: AAAGGCTT
acacaaaaatcaaatgagaa

SEQ ID NO: 38618 - DNA, 20 bp, Artificial Sequence
  Description of Artificial Sequence: Synthetic oligonucleotide
  Target: LAMA2; (-) strand; PAM type: NNNNGHTT; PAM sequence: TTTTGCTT
gtgtaaaacctaatatttgc

SEQ ID NO: 38619 - DNA, 20 bp, Artificial Sequence
  Description of Artificial Sequence: Synthetic oligonucleotide
  Target: LAMA2; (-) strand; PAM type: NNNNGHTT; PAM sequence: ATTTGCTT
aatggagtgtaaaacctaat

SEQ ID NO: 38620 - DNA, 20 bp, Artificial Sequence
  Description of Artificial Sequence: Synthetic oligonucleotide
  Target: LAMA2; (-) strand; PAM type: NNNNGHTT; PAM sequence: GTCAGATT
ggaacatttggttctctgat

SEQ ID NO: 38621 - DNA, 20 bp, Artificial Sequence
  Description of Artificial Sequence: Synthetic oligonucleotide
  Target: LAMA2; (-) strand; PAM type: NNNNGHTT; PAM sequence: TAATGTTT
atgggataacctattgagga

SEQ ID NO: 38622 - DNA, 20 bp, Artificial Sequence
  Description of Artificial Sequence: Synthetic oligonucleotide
  Target: LAMA2; (-) strand; PAM type: NNNNGHTT; PAM sequence: CTAAGCTT
ctaaaaggtaattcataaaa

SEQ ID NO: 38623 - DNA, 20 bp, Artificial Sequence
  Description of Artificial Sequence: Synthetic oligonucleotide
  Target: LAMA2; (-) strand; PAM type: NNNNGHTT; PAM sequence: GAAAGTTT
ttaaagatttaatgaggcag

SEQ ID NO: 38624 - DNA, 20 bp, Artificial Sequence
  Description of Artificial Sequence: Synthetic oligonucleotide
  Target: LAMA2; (-) strand; PAM type: NNNNGHTT; PAM sequence: TAAAGATT
gtgcatggtgcacattgcat

SEQ ID NO: 38625 - DNA, 20 bp, Artificial Sequence
  Description of Artificial Sequence: Synthetic oligonucleotide
  Target: LAMA2; (-) strand; PAM type: NNNNGHTT; PAM sequence: GCTTGTTT
accttcagggggaaaaacca

SEQ ID NO: 38626 - DNA, 20 bp, Artificial Sequence
  Description of Artificial Sequence: Synthetic oligonucleotide
  Target: LAMA2; (-) strand; PAM type: NNNNGHTT; PAM sequence: ACCAGCTT
ttctaccttcagggggaaaa

SEQ ID NO: 38627 - DNA, 20 bp, Artificial Sequence
  Description of Artificial Sequence: Synthetic oligonucleotide
  Target: LAMA2; (-) strand; PAM type: NNNNGHTT; PAM sequence: ACCTGTTT
agtagctgtttcccatgagt

SEQ ID NO: 38628 - DNA, 20 bp, Artificial Sequence
  Description of Artificial Sequence: Synthetic oligonucleotide
  Target: LAMA2; (-) strand; PAM type: NNNNGHTT; PAM sequence: AGCTGTTT
aagaaaagaagaacacaagt

SEQ ID NO: 38629 - DNA, 20 bp, Artificial Sequence
  Description of Artificial Sequence: Synthetic oligonucleotide
  Target: LAMA2; (-) strand; PAM type: NNNNGHTT; PAM sequence: TTCAGCTT
agccattcactttcctgttc

SEQ ID NO: 38630 - DNA, 20 bp, Artificial Sequence
  Description of Artificial Sequence: Synthetic oligonucleotide
  Target: LAMA2; (-) strand; PAM type: NNNNGHTT; PAM sequence: GGGAGATT
actaaggcaaattctcttca

SEQ ID NO: 38631 - DNA, 20 bp, Artificial Sequence
  Description of Artificial Sequence: Synthetic oligonucleotide
  Target: LAMA2; (-) strand; PAM type: NNNNGHTT; PAM sequence: AAAGGCTT
tccatttcataagggtctcc

SEQ ID NO: 38632 - DNA, 20 bp, Artificial Sequence
  Description of Artificial Sequence: Synthetic oligonucleotide
  Target: LAMA2; (-) strand; PAM type: NNNNGHTT; PAM sequence: GATGGATT
aggcaattcttatattactg

SEQ ID NO: 38633 - DNA, 20 bp, Artificial Sequence
  Description of Artificial Sequence: Synthetic oligonucleotide
  Target: LAMA2; (-) strand; PAM type: NNNNGHTT; PAM sequence: TATGGTTT
tgttctcttggctagagaaa

SEQ ID NO: 38634 - DNA, 20 bp, Artificial Sequence
  Description of Artificial Sequence: Synthetic oligonucleotide
  Target: LAMA2; (-) strand; PAM type: NNNNGHTT; PAM sequence: CTCTGATT
tttggggacaatattgattt

SEQ ID NO: 38635 - DNA, 20 bp, Artificial Sequence
  Description of Artificial Sequence: Synthetic oligonucleotide
  Target: LAMA2; (-) strand; PAM type: NNNNGHTT; PAM sequence: TATTGATT
ttagttcattttggggacaa

SEQ ID NO: 38636 - DNA, 20 bp, Artificial Sequence
  Description of Artificial Sequence: Synthetic oligonucleotide
  Target: LAMA2; (-) strand; PAM type: NNNNGHTT; PAM sequence: AAAAGATT
ccacagtaaataagggaact

SEQ ID NO: 38637 - DNA, 20 bp, Artificial Sequence
  Description of Artificial Sequence: Synthetic oligonucleotide
  Target: LAMA2; (-) strand; PAM type: NNNNGHTT; PAM sequence: AACAGTTT
agtaagaagactaaagaaaa

SEQ ID NO: 38638 - DNA, 20 bp, Artificial Sequence
  Description of Artificial Sequence: Synthetic oligonucleotide
  Target: LAMA2; (-) strand; PAM type: NNNNGHTT; PAM sequence: GTTTGTTT
ttcaaacacttattttcttt

SEQ ID NO: 38639 - DNA, 20 bp, Artificial Sequence
  Description of Artificial Sequence: Synthetic oligonucleotide
  Target: LAMA2; (-) strand; PAM type: NNNNGHTT; PAM sequence: CTTTGTTT
accattcaaacacttatttt

SEQ ID NO: 38640 - DNA, 20 bp, Artificial Sequence
  Description of Artificial Sequence: Synthetic oligonucleotide
  Target: LAMA2; (-) strand; PAM type: NNNNGHTT; PAM sequence: CTTGGATT
tatatttatccattctgtta

SEQ ID NO: 38641 - DNA, 20 bp, Artificial Sequence
  Description of Artificial Sequence: Synthetic oligonucleotide
  Target: LAMA2; (-) strand; PAM type: NNNNGHTT; PAM sequence: TGTGGCTT
aactacttaagaaatagaac

SEQ ID NO: 38642 - DNA, 20 bp, Artificial Sequence
  Description of Artificial Sequence: Synthetic oligonucleotide
  Target: LAMA2; (-) strand; PAM type: NNNNGHTT; PAM sequence: AGTTGTTT
taaaacatgaatatttatta

SEQ ID NO: 38643 - DNA, 20 bp, Artificial Sequence
  Description of Artificial Sequence: Synthetic oligonucleotide
  Target: LAMA2; (-) strand; PAM type: NNNNGHTT; PAM sequence: AAGTGATT
aggtaccacatcccatcagt

SEQ ID NO: 38644 - DNA, 20 bp, Artificial Sequence
  Description of Artificial Sequence: Synthetic oligonucleotide
  Target: LAMA2; (-) strand; PAM type: NNNNGHTT; PAM sequence: TCAAGTTT
agcattatccaatctgatac

SEQ ID NO: 38645 - DNA, 20 bp, Artificial Sequence
  Description of Artificial Sequence: Synthetic oligonucleotide
  Target: LAMA2; (-) strand; PAM type: NNNNGHTT; PAM sequence: AAAGGTTT
cactttatatctttattaag

SEQ ID NO: 38646 - DNA, 20 bp, Artificial Sequence
  Description of Artificial Sequence: Synthetic oligonucleotide
  Target: LAMA2; (-) strand; PAM type: NNNNGHTT; PAM sequence: TTCTGCTT
ctcaacattttgagccatgt

SEQ ID NO: 38647 - DNA, 20 bp, Artificial Sequence
  Description of Artificial Sequence: Synthetic oligonucleotide
  Target: LAMA2; (-) strand; PAM type: NNNNGHTT; PAM sequence: CCATGTTT
aatgttctcaacattttgag

SEQ ID NO: 38648 - DNA, 20 bp, Artificial Sequence
  Description of Artificial Sequence: Synthetic oligonucleotide
  Target: LAMA2; (-) strand; PAM type: NNNNGHTT; PAM sequence: TGTAGTTT
taacgtcattcaagtttccg

SEQ ID NO: 38649 - DNA, 20 bp, Artificial Sequence
  Description of Artificial Sequence: Synthetic oligonucleotide
  Target: LAMA2; (-) strand; PAM type: NNNNGHTT; PAM sequence: TCAAGTTT
tctgggatccctaacgtcat

SEQ ID NO: 38650 - DNA, 20 bp, Artificial Sequence
  Description of Artificial Sequence: Synthetic oligonucleotide
  Target: LAMA2; (-) strand; PAM type: NNNNGHTT; PAM sequence: TGAAGATT
atgttgttgcacttccctaa

SEQ ID NO: 38651 - DNA, 20 bp, Artificial Sequence
  Description of Artificial Sequence: Synthetic oligonucleotide
  Target: LAMA2; (-) strand; PAM type: NNNNGHTT; PAM sequence: GAAAGTTT
acttcagtttttttgatagg

SEQ ID NO: 38652 - DNA, 20 bp, Artificial Sequence
  Description of Artificial Sequence: Synthetic oligonucleotide
  Target: LAMA2; (-) strand; PAM type: NNNNGHTT; PAM sequence: TTCAGTTT
tctgaattcatctctctgac

SEQ ID NO: 38653 - DNA, 20 bp, Artificial Sequence
  Description of Artificial Sequence: Synthetic oligonucleotide
  Target: LAMA2; (-) strand; PAM type: NNNNGHTT; PAM sequence: TAACGTTT
ttagaatcccttcagtatcc

SEQ ID NO: 38654 - DNA, 20 bp, Artificial Sequence
  Description of Artificial Sequence: Synthetic oligonucleotide
  Target: LAMA2; (-) strand; PAM type: NNNNGHTT; PAM sequence: CCTCGCTT
ttcgttttgtgcctccttgc

SEQ ID NO: 38655 - DNA, 20 bp, Artificial Sequence
  Description of Artificial Sequence: Synthetic oligonucleotide
  Target: LAMA2; (-) strand; PAM type: NNNNGHTT; PAM sequence: CTTCGTTT
ctccatgttccaggtgccgc

SEQ ID NO: 38656 - DNA, 20 bp, Artificial Sequence
  Description of Artificial Sequence: Synthetic oligonucleotide
  Target: LAMA2; (-) strand; PAM type: NNNNGHTT; PAM sequence: TCTTGCTT
gagtatacgttgccctttcc

SEQ ID NO: 38657 - DNA, 20 bp, Artificial Sequence
  Description of Artificial Sequence: Synthetic oligonucleotide
  Target: LAMA2; (-) strand; PAM type: NNNNGHTT; PAM sequence: AAAAGCTT
aggatgctattattcaggga

SEQ ID NO: 38658 - DNA, 20 bp, Artificial Sequence
  Description of Artificial Sequence: Synthetic oligonucleotide
  Target: LAMA2; (-) strand; PAM type: NNNNGHTT; PAM sequence: TGTTGTTT
taaaatcaagcttttcctgg

SEQ ID NO: 38659 - DNA, 20 bp, Artificial Sequence
  Description of Artificial Sequence: Synthetic oligonucleotide
  Target: LAMA2; (-) strand; PAM type: NNNNGHTT; PAM sequence: TCAAGCTT
tctttccataagctgtaaaa

SEQ ID NO: 38660 - DNA, 20 bp, Artificial Sequence
  Description of Artificial Sequence: Synthetic oligonucleotide
  Target: LAMA2; (-) strand; PAM type: NNNNGHTT; PAM sequence: GATTGCTT
tcttaagtaattcttaaaag

SEQ ID NO: 38661 - DNA, 20 bp, Artificial Sequence
  Description of Artificial Sequence: Synthetic oligonucleotide
  Target: LAMA2; (-) strand; PAM type: NNNNGHTT; PAM sequence: AAAGGATT
aggctcttaagtaattctta

SEQ ID NO: 38662 - DNA, 20 bp, Artificial Sequence
  Description of Artificial Sequence: Synthetic oligonucleotide
  Target: LAMA2; (-) strand; PAM type: NNNNGHTT; PAM sequence: CTGGGATT
cacctccgtctcccaaagtg

SEQ ID NO: 38663 - DNA, 20 bp, Artificial Sequence
  Description of Artificial Sequence: Synthetic oligonucleotide
  Target: LAMA2; (-) strand; PAM type: NNNNGHTT; PAM sequence: ATGGGATT
tttttgtattttttgtagag

SEQ ID NO: 38664 - DNA, 20 bp, Artificial Sequence
  Description of Artificial Sequence: Synthetic oligonucleotide
  Target: LAMA2; (-) strand; PAM type: NNNNGHTT; PAM sequence: CCAGGCTT
ctcactgcaacctcctcctc

SEQ ID NO: 38665 - DNA, 20 bp, Artificial Sequence
  Description of Artificial Sequence: Synthetic oligonucleotide
  Target: LAMA2; (-) strand; PAM type: NNNNGHTT; PAM sequence: ATGCGTTT
ttttcatttaccctaaaggt

SEQ ID NO: 38666 - DNA, 20 bp, Artificial Sequence
  Description of Artificial Sequence: Synthetic oligonucleotide
  Target: LAMA2; (-) strand; PAM type: NNNNGHTT; PAM sequence: AGATGTTT
attttcaggatactgttact

SEQ ID NO: 38667 - DNA, 20 bp, Artificial Sequence
  Description of Artificial Sequence: Synthetic oligonucleotide
  Target: LAMA2; (-) strand; PAM type: NNNNGHTT; PAM sequence: AGCTGTTT
ctgaaaattgtcatgagcga

SEQ ID NO: 38668 - DNA, 20 bp, Artificial Sequence
  Description of Artificial Sequence: Synthetic oligonucleotide
  Target: LAMA2; (-) strand; PAM type: NNNNGHTT; PAM sequence: TCATGTTT
cttttgtgtatctctgatac

SEQ ID NO: 38669 - DNA, 20 bp, Artificial Sequence
  Description of Artificial Sequence: Synthetic oligonucleotide
  Target: LAMA2; (-) strand; PAM type: NNNNGHTT; PAM sequence: AAATGATT
gttttagctcatatttcata

SEQ ID NO: 38670 - DNA, 20 bp, Artificial Sequence
  Description of Artificial Sequence: Synthetic oligonucleotide
  Target: LAMA2; (-) strand; PAM type: NNNNGHTT; PAM sequence: CATTGTTT
taatagcgataatagtaaaa

SEQ ID NO: 38671 - DNA, 20 bp, Artificial Sequence
  Description of Artificial Sequence: Synthetic oligonucleotide
  Target: LAMA2; (-) strand; PAM type: NNNNGHTT; PAM sequence: TGATGCTT
ggcagtgatgctcacttgcc

SEQ ID NO: 38672 - DNA, 20 bp, Artificial Sequence
  Description of Artificial Sequence: Synthetic oligonucleotide
  Target: LAMA2; (-) strand; PAM type: NNNNGHTT; PAM sequence: ATTAGATT
tccacatcagatcatcgggc

SEQ ID NO: 38673 - DNA, 20 bp, Artificial Sequence
  Description of Artificial Sequence: Synthetic oligonucleotide
  Target: LAMA2; (-) strand; PAM type: NNNNGHTT; PAM sequence: AGGGGTTT
tttttccatggacacagagg

SEQ ID NO: 38674 - DNA, 20 bp, Artificial Sequence
  Description of Artificial Sequence: Synthetic oligonucleotide
  Target: LAMA2; (-) strand; PAM type: NNNNGHTT; PAM sequence: ATGGGTTT
ccacctttttggcatcaggc

SEQ ID NO: 38675 - DNA, 20 bp, Artificial Sequence
  Description of Artificial Sequence: Synthetic oligonucleotide
  Target: LAMA2; (-) strand; PAM type: NNNNGHTT; PAM sequence: ATGTGTTT
ctatgatacttgatttgcta

SEQ ID NO: 38676 - DNA, 20 bp, Artificial Sequence
  Description of Artificial Sequence: Synthetic oligonucleotide
  Target: LAMA2; (-) strand; PAM type: NNNNGHTT; PAM sequence: ACTTGATT
agaaaaagatcacctatgat

SEQ ID NO: 38677 - DNA, 20 bp, Artificial Sequence
  Description of Artificial Sequence: Synthetic oligonucleotide
  Target: LAMA2; (-) strand; PAM type: NNNNGHTT; PAM sequence: TATGGCTT
tacatgctatttttcttgaa

SEQ ID NO: 38678 - DNA, 20 bp, Artificial Sequence
  Description of Artificial Sequence: Synthetic oligonucleotide
  Target: LAMA2; (-) strand; PAM type: NNNNGHTT; PAM sequence: TTTTGATT
attttgagctttcaaatcta

SEQ ID NO: 38679 - DNA, 20 bp, Artificial Sequence
  Description of Artificial Sequence: Synthetic oligonucleotide
  Target: LAMA2; (-) strand; PAM type: NNNNGHTT; PAM sequence: TTGAGCTT
gcctataatgttccaaaatt

SEQ ID NO: 38680 - DNA, 20 bp, Artificial Sequence
  Description of Artificial Sequence: Synthetic oligonucleotide
  Target: LAMA2; (-) strand; PAM type: NNNNGHTT; PAM sequence: GGAGGTTT
attaataaatacgtttgaaa

SEQ ID NO: 38681 - DNA, 20 bp, Artificial Sequence
  Description of Artificial Sequence: Synthetic oligonucleotide
  Target: LAMA2; (-) strand; PAM type: NNNNGHTT; PAM sequence: ATACGTTT
agaattttctaaattaataa

SEQ ID NO: 38682 - DNA, 20 bp, Artificial Sequence
  Description of Artificial Sequence: Synthetic oligonucleotide
  Target: LAMA2; (-) strand; PAM type: NNNNGHTT; PAM sequence: AAAAGTTT
tctagaaaggcaggagaaaa

SEQ ID NO: 38683 - DNA, 20 bp, Artificial Sequence
  Description of Artificial Sequence: Synthetic oligonucleotide
  Target: LAMA2; (-) strand; PAM type: NNNNGHTT; PAM sequence: AAAGGATT
agctacacattttctcaata

SEQ ID NO: 38684 - DNA, 20 bp, Artificial Sequence
  Description of Artificial Sequence: Synthetic oligonucleotide
  Target: LAMA2; (-) strand; PAM type: NNNNGHTT; PAM sequence: GCATGCTT
aacattcaaaatttcacaca

SEQ ID NO: 38685 - DNA, 20 bp, Artificial Sequence
  Description of Artificial Sequence: Synthetic oligonucleotide
  Target: LAMA2; (-) strand; PAM type: NNNNGHTT; PAM sequence: GGAAGATT
aatgaggggtgaacctatgt

SEQ ID NO: 38686 - DNA, 20 bp, Artificial Sequence
  Description of Artificial Sequence: Synthetic oligonucleotide
  Target: LAMA2; (-) strand; PAM type: NNNNGHTT; PAM sequence: CTCTGATT
aggaacttaaattcagaaaa

SEQ ID NO: 38687 - DNA, 20 bp, Artificial Sequence
  Description of Artificial Sequence: Synthetic oligonucleotide
  Target: LAMA2; (-) strand; PAM type: NNNNGHTT; PAM sequence: ACAGGATT
agctcgctacggctgattaa

SEQ ID NO: 38688 - DNA, 20 bp, Artificial Sequence
  Description of Artificial Sequence: Synthetic oligonucleotide
  Target: LAMA2; (-) strand; PAM type: NNNNGHTT; PAM sequence: GGCTGATT
aatggcacatagctcgctac

SEQ ID NO: 38689 - DNA, 20 bp, Artificial Sequence
  Description of Artificial Sequence: Synthetic oligonucleotide
  Target: LAMA2; (-) strand; PAM type: NNNNGHTT; PAM sequence: CCCTGATT
actggatggaggaggaagaa

SEQ ID NO: 38690 - DNA, 20 bp, Artificial Sequence
  Description of Artificial Sequence: Synthetic oligonucleotide
  Target: LAMA2; (-) strand; PAM type: NNNNGHTT; PAM sequence: CTTGGCTT
tctgtgctgacatgcagaga

SEQ ID NO: 38691 - DNA, 20 bp, Artificial Sequence
  Description of Artificial Sequence: Synthetic oligonucleotide
  Target: LAMA2; (-) strand; PAM type: NNNNGHTT; PAM sequence: TGCTGCTT
aaagctgatgatctgtattc

SEQ ID NO: 38692 - DNA, 20 bp, Artificial Sequence
  Description of Artificial Sequence: Synthetic oligonucleotide
  Target: LAMA2; (-) strand; PAM type: NNNNGHTT; PAM sequence: GACAGATT
tcaaaattgaagctgtgagt

SEQ ID NO: 38693 - DNA, 20 bp, Artificial Sequence
  Description of Artificial Sequence: Synthetic oligonucleotide
  Target: LAMA2; (-) strand; PAM type: NNNNGHTT; PAM sequence: TGAGGTTT
agccccatgcaatgtacact

SEQ ID NO: 38694 - DNA, 20 bp, Artificial Sequence
  Description of Artificial Sequence: Synthetic oligonucleotide
  Target: LAMA2; (-) strand; PAM type: NNNNGHTT; PAM sequence: CTTAGTTT
cctctgtgcaattaaatagg

SEQ ID NO: 38695 - DNA, 20 bp, Artificial Sequence
  Description of Artificial Sequence: Synthetic oligonucleotide
  Target: LAMA2; (-) strand; PAM type: NNNNGHTT; PAM sequence: ATAGGCTT
actttcctctgtgcaattaa

SEQ ID NO: 38696 - DNA, 20 bp, Artificial Sequence
  Description of Artificial Sequence: Synthetic oligonucleotide
  Target: LAMA2; (-) strand; PAM type: NNNNGHTT; PAM sequence: TCTGGATT
agtcactcactttctgtgag

SEQ ID NO: 38697 - DNA, 20 bp, Artificial Sequence
  Description of Artificial Sequence: Synthetic oligonucleotide
  Target: LAMA2; (-) strand; PAM type: NNNNGHTT; PAM sequence: TTGAGCTT
tcatcatcttagtctacagt

SEQ ID NO: 38698 - DNA, 20 bp, Artificial Sequence
  Description of Artificial Sequence: Synthetic oligonucleotide
  Target: LAMA2; (-) strand; PAM type: NNNNGHTT; PAM sequence: TACAGTTT
ctcctgtcatcatcttagtc

SEQ ID NO: 38699 - DNA, 20 bp, Artificial Sequence
  Description of Artificial Sequence: Synthetic oligonucleotide
  Target: LAMA2; (-) strand; PAM type: NNNNGHTT; PAM sequence: GCAGGCTT
gtattattttccccagtatt

SEQ ID NO: 38700 - DNA, 20 bp, Artificial Sequence
  Description of Artificial Sequence: Synthetic oligonucleotide
  Target: LAMA2; (-) strand; PAM type: NNNNGHTT; PAM sequence: TTATGTTT
aaattttggaaatatggtcc

SEQ ID NO: 38701 - DNA, 20 bp, Artificial Sequence
  Description of Artificial Sequence: Synthetic oligonucleotide
  Target: LAMA2; (-) strand; PAM type: NNNNGHTT; PAM sequence: TCCTGTTT
tatagctaaataaacaagtt

SEQ ID NO: 38702 - DNA, 20 bp, Artificial Sequence
  Description of Artificial Sequence: Synthetic oligonucleotide
  Target: LAMA2; (-) strand; PAM type: NNNNGHTT; PAM sequence: ACAAGTTT
atttaactatagctaaataa

SEQ ID NO: 38703 - DNA, 20 bp, Artificial Sequence
  Description of Artificial Sequence: Synthetic oligonucleotide
  Target: LAMA2; (-) strand; PAM type: NNNNGHTT; PAM sequence: TCAAGATT
cctaaaacaggattctgaag

SEQ ID NO: 38704 - DNA, 20 bp, Artificial Sequence
  Description of Artificial Sequence: Synthetic oligonucleotide
  Target: LAMA2; (-) strand; PAM type: NNNNGHTT; PAM sequence: ACAGGATT
ctgtacctttcttacctaaa

SEQ ID NO: 38705 - DNA, 20 bp, Artificial Sequence
  Description of Artificial Sequence: Synthetic oligonucleotide
  Target: LAMA2; (-) strand; PAM type: NNNNGHTT; PAM sequence: AGCAGTTT
atggcccttcaaatcttgaa

SEQ ID NO: 38706 - DNA, 20 bp, Artificial Sequence
  Description of Artificial Sequence: Synthetic oligonucleotide
  Target: LAMA2; (-) strand; PAM type: NNNNGHTT; PAM sequence: TCAGGCTT
agagagcctctaaggaaact

SEQ ID NO: 38707 - DNA, 20 bp, Artificial Sequence
  Description of Artificial Sequence: Synthetic oligonucleotide
  Target: LAMA2; (-) strand; PAM type: NNNNGHTT; PAM sequence: GAAAGTTT
tgtcatagattcacatgcat

SEQ ID NO: 38708 - DNA, 20 bp, Artificial Sequence
  Description of Artificial Sequence: Synthetic oligonucleotide
  Target: LAMA2; (-) strand; PAM type: NNNNGHTT; PAM sequence: CATAGATT
aaaagaatttttcattttgt

SEQ ID NO: 38709 - DNA, 20 bp, Artificial Sequence
  Description of Artificial Sequence: Synthetic oligonucleotide
  Target: LAMA2; (-) strand; PAM type: NNNNGHTT; PAM sequence: ATGTGATT
ctgacaactcataaacatat

SEQ ID NO: 38710 - DNA, 20 bp, Artificial Sequence
  Description of Artificial Sequence: Synthetic oligonucleotide
  Target: LAMA2; (-) strand; PAM type: NNNNGHTT; PAM sequence: CTTGGTTT
gcattatgaagcatatgctt

SEQ ID NO: 38711 - DNA, 20 bp, Artificial Sequence
  Description of Artificial Sequence: Synthetic oligonucleotide
  Target: LAMA2; (-) strand; PAM type: NNNNGHTT; PAM sequence: ATATGCTT
agccaaatgcattatgaagc

SEQ ID NO: 38712 - DNA, 20 bp, Artificial Sequence
  Description of Artificial Sequence: Synthetic oligonucleotide
  Target: LAMA2; (-) strand; PAM type: NNNNGHTT; PAM sequence: GTTGGCTT
tagtagacttttattttcag

SEQ ID NO: 38713 - DNA, 20 bp, Artificial Sequence
  Description of Artificial Sequence: Synthetic oligonucleotide
  Target: LAMA2; (-) strand; PAM type: NNNNGHTT; PAM sequence: CTAGGATT
tgcctcagcctcccaaagtg

SEQ ID NO: 38714 - DNA, 20 bp, Artificial Sequence
  Description of Artificial Sequence: Synthetic oligonucleotide
  Target: LAMA2; (-) strand; PAM type: NNNNGHTT; PAM sequence: GGGGGTTT
tttgcatttgtagaagaggc

SEQ ID NO: 38715 - DNA, 20 bp, Artificial Sequence
  Description of Artificial Sequence: Synthetic oligonucleotide
  Target: LAMA2; (-) strand; PAM type: NNNNGHTT; PAM sequence: CTGAGATT
tgcctcagcctccataatag

SEQ ID NO: 38716 - DNA, 20 bp, Artificial Sequence
  Description of Artificial Sequence: Synthetic oligonucleotide
  Target: LAMA2; (-) strand; PAM type: NNNNGHTT; PAM sequence: AAGCGATT
cacctgtgcctcccaggttc

SEQ ID NO: 38717 - DNA, 20 bp, Artificial Sequence
  Description of Artificial Sequence: Synthetic oligonucleotide
  Target: LAMA2; (-) strand; PAM type: NNNNGHTT; PAM sequence: TTATGTTT
agacttttaactttaaaaat

SEQ ID NO: 38718 - DNA, 20 bp, Artificial Sequence
  Description of Artificial Sequence: Synthetic oligonucleotide
  Target: LAMA2; (-) strand; PAM type: NNNNGHTT; PAM sequence: AAATGATT
aaatgtgtgccatgtatggt

SEQ ID NO: 38719 - DNA, 20 bp, Artificial Sequence
  Description of Artificial Sequence: Synthetic oligonucleotide
  Target: LAMA2; (-) strand; PAM type: NNNNGHTT; PAM sequence: ATGTGATT
ggcatccatcccaaagctgt

SEQ ID NO: 38720 - DNA, 20 bp, Artificial Sequence
  Description of Artificial Sequence: Synthetic oligonucleotide
  Target: LAMA2; (-) strand; PAM type: NNNNGHTT; PAM sequence: TCTTGATT
gtgaacgttggagctgcagt

SEQ ID NO: 38721 - DNA, 20 bp, Artificial Sequence
  Description of Artificial Sequence: Synthetic oligonucleotide
  Target: LAMA2; (-) strand; PAM type: NNNNGHTT; PAM sequence: AAAGGTTT
ttctgcatatttaaaactgt

SEQ ID NO: 38722 - DNA, 20 bp, Artificial Sequence
  Description of Artificial Sequence: Synthetic oligonucleotide
  Target: LAMA2; (-) strand; PAM type: NNNNGHTT; PAM sequence: TTTAGCTT
tgccctggaatttatatctt

SEQ ID NO: 38723 - DNA, 20 bp, Artificial Sequence
  Description of Artificial Sequence: Synthetic oligonucleotide
  Target: LAMA2; (-) strand; PAM type: NNNNGHTT; PAM sequence: AAGTGTTT
atatggctgttatagtctta

SEQ ID NO: 38724 - DNA, 20 bp, Artificial Sequence
  Description of Artificial Sequence: Synthetic oligonucleotide
  Target: LAMA2; (-) strand; PAM type: NNNNGHTT; PAM sequence: TTCAGTTT
taaagcttattgaatttcta

SEQ ID NO: 38725 - DNA, 20 bp, Artificial Sequence
  Description of Artificial Sequence: Synthetic oligonucleotide
  Target: LAMA2; (-) strand; PAM type: NNNNGHTT; PAM sequence: TAAAGCTT
gtcacacataaaataagcaa

SEQ ID NO: 38726 - DNA, 20 bp, Artificial Sequence
  Description of Artificial Sequence: Synthetic oligonucleotide
  Target: LAMA2; (-) strand; PAM type: NNNNGHTT; PAM sequence: CAAGGCTT
cactgaaaagaaacgttcct

SEQ ID NO: 38727 - DNA, 20 bp, Artificial Sequence
  Description of Artificial Sequence: Synthetic oligonucleotide
  Target: LAMA2; (-) strand; PAM type: NNNNGHTT; PAM sequence: CATTGTTT
attctgtcagataaaaatgt

SEQ ID NO: 38728 - DNA, 20 bp, Artificial Sequence
  Description of Artificial Sequence: Synthetic oligonucleotide
  Target: LAMA2; (-) strand; PAM type: NNNNGHTT; PAM sequence: ACCTGATT
acatttgaatgtctaactta

SEQ ID NO: 38729 - DNA, 20 bp, Artificial Sequence
  Description of Artificial Sequence: Synthetic oligonucleotide
  Target: LAMA2; (-) strand; PAM type: NNNNGHTT; PAM sequence: CATTGCTT
aaaaactccaatattggaga

SEQ ID NO: 38730 - DNA, 20 bp, Artificial Sequence
  Description of Artificial Sequence: Synthetic oligonucleotide
  Target: LAMA2; (-) strand; PAM type: NNNNGHTT; PAM sequence: TGATGATT
tctcctttgggaaatggtaa

SEQ ID NO: 38731 - DNA, 20 bp, Artificial Sequence
  Description of Artificial Sequence: Synthetic oligonucleotide
  Target: LAMA2; (-) strand; PAM type: NNNNGHTT; PAM sequence: TTATGATT
ttgtttggcaatggttctgt

SEQ ID NO: 38732 - DNA, 20 bp, Artificial Sequence
  Description of Artificial Sequence: Synthetic oligonucleotide
  Target: LAMA2; (-) strand; PAM type: NNNNGHTT; PAM sequence: TTCTGTTT
ggtacattgtttggcaatgg

SEQ ID NO: 38733 - DNA, 20 bp, Artificial Sequence
  Description of Artificial Sequence: Synthetic oligonucleotide
  Target: LAMA2; (-) strand; PAM type: NNNNGHTT; PAM sequence: CATTGTTT
ttgcctatgcaaaagaggta

SEQ ID NO: 38734 - DNA, 20 bp, Artificial Sequence
  Description of Artificial Sequence: Synthetic oligonucleotide
  Target: LAMA2; (-) strand; PAM type: NNNNGHTT; PAM sequence: CCCAGCTT
tcatctccatggcattttaa

SEQ ID NO: 38735 - DNA, 20 bp, Artificial Sequence
  Description of Artificial Sequence: Synthetic oligonucleotide
  Target: LAMA2; (-) strand; PAM type: NNNNGHTT; PAM sequence: TGCTGCTT
aaacataattaattcctaag

SEQ ID NO: 38736 - DNA, 20 bp, Artificial Sequence
  Description of Artificial Sequence: Synthetic oligonucleotide
  Target: LAMA2; (-) strand; PAM type: NNNNGHTT; PAM sequence: TACTGTTT
ctggaggactcatttctttg

SEQ ID NO: 38737 - DNA, 20 bp, Artificial Sequence
  Description of Artificial Sequence: Synthetic oligonucleotide
  Target: LAMA2; (-) strand; PAM type: NNNNGHTT; PAM sequence: CAGTGATT
cagaagactgcaaatgaaac

SEQ ID NO: 38738 - DNA, 20 bp, Artificial Sequence
  Description of Artificial Sequence: Synthetic oligonucleotide
  Target: LAMA2; (-) strand; PAM type: NNNNGHTT; PAM sequence: CTTGGATT
tgacagaaagtagccaccta

SEQ ID NO: 38739 - DNA, 20 bp, Artificial Sequence
  Description of Artificial Sequence: Synthetic oligonucleotide
  Target: LAMA2; (-) strand; PAM type: NNNNGHTT; PAM sequence: CAGTGCTT
ggcttttacttattgaacca

SEQ ID NO: 38740 - DNA, 20 bp, Artificial Sequence
  Description of Artificial Sequence: Synthetic oligonucleotide
  Target: LAMA2; (-) strand; PAM type: NNNNGHTT; PAM sequence: ATTGGCTT
gtaggagtttcaaatttgac

SEQ ID NO: 38741 - DNA, 20 bp, Artificial Sequence
  Description of Artificial Sequence: Synthetic oligonucleotide
  Target: LAMA2; (-) strand; PAM type: NNNNGHTT; PAM sequence: AGGAGTTT
ttcagctcacctgagtgggt

SEQ ID NO: 38742 - DNA, 20 bp, Artificial Sequence
  Description of Artificial Sequence: Synthetic oligonucleotide
  Target: LAMA2; (-) strand; PAM type: NNNNGHTT; PAM sequence: TCCAGATT
taacaagcttactgactgac

SEQ ID NO: 38743 - DNA, 20 bp, Artificial Sequence
  Description of Artificial Sequence: Synthetic oligonucleotide
  Target: LAMA2; (-) strand; PAM type: NNNNGHTT; PAM sequence: ACAAGCTT
tagatcaaagataaaatata

SEQ ID NO: 38744 - DNA, 20 bp, Artificial Sequence
  Description of Artificial Sequence: Synthetic oligonucleotide
  Target: LAMA2; (-) strand; PAM type: NNNNGHTT; PAM sequence: TGATGTTT
caagttgaaatcaattcaag

SEQ ID NO: 38745 - DNA, 20 bp, Artificial Sequence
  Description of Artificial Sequence: Synthetic oligonucleotide
  Target: LAMA2; (-) strand; PAM type: NNNNGHTT; PAM sequence: TTGTGCTT
tttgttgagcttcaatttac

SEQ ID NO: 38746 - DNA, 20 bp, Artificial Sequence
  Description of Artificial Sequence: Synthetic oligonucleotide
  Target: LAMA2; (-) strand; PAM type: NNNNGHTT; PAM sequence: TTGAGCTT
agtctgaatatgaatttttg

SEQ ID NO: 38747 - DNA, 20 bp, Artificial Sequence
  Description of Artificial Sequence: Synthetic oligonucleotide
  Target: LAMA2; (-) strand; PAM type: NNNNGHTT; PAM sequence: TTATGTTT
caaagaggtcaaagccatac

SEQ ID NO: 38748 - DNA, 20 bp, Artificial Sequence
  Description of Artificial Sequence: Synthetic oligonucleotide
  Target: LAMA2; (-) strand; PAM type: NNNNGHTT; PAM sequence: AAGTGATT
tcctccttattttacagatg

SEQ ID NO: 38749 - DNA, 20 bp, Artificial Sequence
  Description of Artificial Sequence: Synthetic oligonucleotide
  Target: LAMA2; (-) strand; PAM type: NNNNGHTT; PAM sequence: AAGTGCTT
gtgctgggttaccactagcc

SEQ ID NO: 38750 - DNA, 20 bp, Artificial Sequence
  Description of Artificial Sequence: Synthetic oligonucleotide
  Target: LAMA2; (-) strand; PAM type: NNNNGHTT; PAM sequence: AAATGCTT
ggatgaagtagataagatag

SEQ ID NO: 38751 - DNA, 20 bp, Artificial Sequence
  Description of Artificial Sequence: Synthetic oligonucleotide
  Target: LAMA2; (-) strand; PAM type: NNNNGHTT; PAM sequence: AAGAGTTT
atattcttaaaagaagaatg

SEQ ID NO: 38752 - DNA, 20 bp, Artificial Sequence
  Description of Artificial Sequence: Synthetic oligonucleotide
  Target: LAMA2; (-) strand; PAM type: NNNNGHTT; PAM sequence: GGTTGATT
aaagatgcacagttcagtta

SEQ ID NO: 38753 - DNA, 20 bp, Artificial Sequence
  Description of Artificial Sequence: Synthetic oligonucleotide
  Target: LAMA2; (-) strand; PAM type: NNNNGHTT; PAM sequence: TCTTGATT
aggtgcttcataaaagcctt

SEQ ID NO: 38754 - DNA, 20 bp, Artificial Sequence
  Description of Artificial Sequence: Synthetic oligonucleotide
  Target: LAMA2; (-) strand; PAM type: NNNNGHTT; PAM sequence: AGGTGCTT
cagagttctatatctaatat

SEQ ID NO: 38755 - DNA, 20 bp, Artificial Sequence
  Description of Artificial Sequence: Synthetic oligonucleotide
  Target: LAMA2; (-) strand; PAM type: NNNNGHTT; PAM sequence: ATGAGATT
aaatgcaatatcccctatag

SEQ ID NO: 38756 - DNA, 20 bp, Artificial Sequence
  Description of Artificial Sequence: Synthetic oligonucleotide
  Target: LAMA2; (-) strand; PAM type: NNNNGHTT; PAM sequence: CCAGGATT
tcatgtgacacatctaccct

SEQ ID NO: 38757 - DNA, 20 bp, Artificial Sequence
  Description of Artificial Sequence: Synthetic oligonucleotide
  Target: LAMA2; (-) strand; PAM type: NNNNGHTT; PAM sequence: CAATGTTT
agagtctcacattggaaatt

SEQ ID NO: 38758 - DNA, 20 bp, Artificial Sequence
  Description of Artificial Sequence: Synthetic oligonucleotide
  Target: LAMA2; (-) strand; PAM type: NNNNGHTT; PAM sequence: TTCTGATT
ccccaggctgttttttaatc

SEQ ID NO: 38759 - DNA, 20 bp, Artificial Sequence
  Description of Artificial Sequence: Synthetic oligonucleotide
  Target: LAMA2; (-) strand; PAM type: NNNNGHTT; PAM sequence: GGCTGTTT
agccaccgtgcccggcccca

SEQ ID NO: 38760 - DNA, 20 bp, Artificial Sequence
  Description of Artificial Sequence: Synthetic oligonucleotide
  Target: LAMA2; (-) strand; PAM type: NNNNGHTT; PAM sequence: CTGGGATT
tgcctcagcctcccaaattg

SEQ ID NO: 38761 - DNA, 20 bp, Artificial Sequence
  Description of Artificial Sequence: Synthetic oligonucleotide
  Target: LAMA2; (-) strand; PAM type: NNNNGHTT; PAM sequence: TGGGGTTT
tttggtatttttagtagaga

SEQ ID NO: 38762 - DNA, 20 bp, Artificial Sequence
  Description of Artificial Sequence: Synthetic oligonucleotide
  Target: LAMA2; (-) strand; PAM type: NNNNGHTT; PAM sequence: CTGGGATT
tgcctcagcctcctgagtag

SEQ ID NO: 38763 - DNA, 20 bp, Artificial Sequence
  Description of Artificial Sequence: Synthetic oligonucleotide
  Target: LAMA2; (-) strand; PAM type: NNNNGHTT; PAM sequence: AAGTGATT
aacctccacatcccgggttc

SEQ ID NO: 38764 - DNA, 20 bp, Artificial Sequence
  Description of Artificial Sequence: Synthetic oligonucleotide
  Target: LAMA2; (-) strand; PAM type: NNNNGHTT; PAM sequence: CCAGGCTT
ctgtgtgctaaatcagtatt

SEQ ID NO: 38765 - DNA, 20 bp, Artificial Sequence
  Description of Artificial Sequence: Synthetic oligonucleotide
  Target: LAMA2; (-) strand; PAM type: NNNNGHTT; PAM sequence: AAAGGCTT
tcaatggcttaacagaaaac

SEQ ID NO: 38766 - DNA, 20 bp, Artificial Sequence
  Description of Artificial Sequence: Synthetic oligonucleotide
  Target: LAMA2; (-) strand; PAM type: NNNNGHTT; PAM sequence: AATGGCTT
ggtaacaactccaaaatctc

SEQ ID NO: 38767 - DNA, 20 bp, Artificial Sequence
  Description of Artificial Sequence: Synthetic oligonucleotide
  Target: LAMA2; (-) strand; PAM type: NNNNGHTT; PAM sequence: AAAAGATT
tgtaaaaatatcttgccttg

SEQ ID NO: 38768 - DNA, 20 bp, Artificial Sequence
  Description of Artificial Sequence: Synthetic oligonucleotide
  Target: LAMA2; (-) strand; PAM type: NNNNGHTT; PAM sequence: TCTAGATT
tttgtttacaaaggaatttt

SEQ ID NO: 38769 - DNA, 20 bp, Artificial Sequence
  Description of Artificial Sequence: Synthetic oligonucleotide
  Target: LAMA2; (-) strand; PAM type: NNNNGHTT; PAM sequence: CTTTGTTT
tctatgattatcaaagactc

SEQ ID NO: 38770 - DNA, 20 bp, Artificial Sequence
  Description of Artificial Sequence: Synthetic oligonucleotide
  Target: LAMA2; (-) strand; PAM type: NNNNGHTT; PAM sequence: CTATGATT
tgtacctatcaatactattt

SEQ ID NO: 38771 - DNA, 20 bp, Artificial Sequence
  Description of Artificial Sequence: Synthetic oligonucleotide
  Target: LAMA2; (-) strand; PAM type: NNNNGHTT; PAM sequence: CTGAGATT
gccattgtatacaagaggaa

SEQ ID NO: 38772 - DNA, 20 bp, Artificial Sequence
  Description of Artificial Sequence: Synthetic oligonucleotide
  Target: LAMA2; (-) strand; PAM type: NNNNGHTT; PAM sequence: CATTGTTT
attgccaattgaaatttaga

SEQ ID NO: 38773 - DNA, 20 bp, Artificial Sequence
  Description of Artificial Sequence: Synthetic oligonucleotide
  Target: LAMA2; (-) strand; PAM type: NNNNGHTT; PAM sequence: TTATGTTT
tttcaggtgcttaacataca

SEQ ID NO: 38774 - DNA, 20 bp, Artificial Sequence
  Description of Artificial Sequence: Synthetic oligonucleotide
  Target: LAMA2; (-) strand; PAM type: NNNNGHTT; PAM sequence: AGGTGCTT
catatgttagatactatttc

SEQ ID NO: 38775 - DNA, 20 bp, Artificial Sequence
  Description of Artificial Sequence: Synthetic oligonucleotide
  Target: LAMA2; (-) strand; PAM type: NNNNGHTT; PAM sequence: CATAGATT
accattagcaaagggtgcag

SEQ ID NO: 38776 - DNA, 20 bp, Artificial Sequence
  Description of Artificial Sequence: Synthetic oligonucleotide
  Target: LAMA2; (-) strand; PAM type: NNNNGHTT; PAM sequence: GACTGCTT
cttatagcctagcctagaat

SEQ ID NO: 38777 - DNA, 20 bp, Artificial Sequence
  Description of Artificial Sequence: Synthetic oligonucleotide
  Target: LAMA2; (-) strand; PAM type: NNNNGHTT; PAM sequence: CATTGCTT
taaatgctaacacaagaatt

SEQ ID NO: 38778 - DNA, 20 bp, Artificial Sequence
  Description of Artificial Sequence: Synthetic oligonucleotide
  Target: LAMA2; (-) strand; PAM type: NNNNGHTT; PAM sequence: ATTTGTTT
atatatatatatgctatata

SEQ ID NO: 38779 - DNA, 20 bp, Artificial Sequence
  Description of Artificial Sequence: Synthetic oligonucleotide
  Target: LAMA2; (-) strand; PAM type: NNNNGHTT; PAM sequence: TTTTGTTT
ttaaagattgttctcaatat

SEQ ID NO: 38780 - DNA, 20 bp, Artificial Sequence
  Description of Artificial Sequence: Synthetic oligonucleotide
  Target: LAMA2; (-) strand; PAM type: NNNNGHTT; PAM sequence: TAAAGATT
acgttgtcttggtgctgcct

SEQ ID NO: 38781 - DNA, 20 bp, Artificial Sequence
  Description of Artificial Sequence: Synthetic oligonucleotide
  Target: LAMA2; (-) strand; PAM type: NNNNGHTT; PAM sequence: AAATGCTT
aaagaattgtcaactaagtc

SEQ ID NO: 38782 - DNA, 20 bp, Artificial Sequence
  Description of Artificial Sequence: Synthetic oligonucleotide
  Target: LAMA2; (-) strand; PAM type: NNNNGHTT; PAM sequence: TGCAGTTT
gtgttactcatgaagaaggc

SEQ ID NO: 38783 - DNA, 20 bp, Artificial Sequence
  Description of Artificial Sequence: Synthetic oligonucleotide
  Target: LAMA2; (-) strand; PAM type: NNNNGHTT; PAM sequence: AACAGTTT
aatgggattttaatgtgttt

SEQ ID NO: 38784 - DNA, 20 bp, Artificial Sequence
  Description of Artificial Sequence: Synthetic oligonucleotide
  Target: LAMA2; (-) strand; PAM type: NNNNGHTT; PAM sequence: ATGTGTTT
atttgttaaatgggatttta

SEQ ID NO: 38785 - DNA, 20 bp, Artificial Sequence
  Description of Artificial Sequence: Synthetic oligonucleotide
  Target: LAMA2; (-) strand; PAM type: NNNNGHTT; PAM sequence: ATGGGATT
taggttctgctatttgttaa

SEQ ID NO: 38786 - DNA, 20 bp, Artificial Sequence
  Description of Artificial Sequence: Synthetic oligonucleotide
  Target: LAMA2; (-) strand; PAM type: NNNNGHTT; PAM sequence: AACAGTTT
agcagttgactactttaaga

SEQ ID NO: 38787 - DNA, 20 bp, Artificial Sequence
  Description of Artificial Sequence: Synthetic oligonucleotide
  Target: LAMA2; (-) strand; PAM type: NNNNGHTT; PAM sequence: GATTGATT
ccacaatttactaaacagca

SEQ ID NO: 38788 - DNA, 20 bp, Artificial Sequence
  Description of Artificial Sequence: Synthetic oligonucleotide
  Target: LAMA2; (-) strand; PAM type: NNNNGHTT; PAM sequence: AGCAGATT
atcaccacaatttactaaac

SEQ ID NO: 38789 - DNA, 20 bp, Artificial Sequence
  Description of Artificial Sequence: Synthetic oligonucleotide
  Target: LAMA2; (-) strand; PAM type: NNNNGHTT; PAM sequence: AGTTGATT
gatttcatggttgatacact

SEQ ID NO: 38790 - DNA, 20 bp, Artificial Sequence
  Description of Artificial Sequence: Synthetic oligonucleotide
  Target: LAMA2; (-) strand; PAM type: NNNNGHTT; PAM sequence: AGATGATT
atccttttaatttcagaatt

SEQ ID NO: 38791 - DNA, 20 bp, Artificial Sequence
  Description of Artificial Sequence: Synthetic oligonucleotide
  Target: LAMA2; (-) strand; PAM type: NNNNGHTT; PAM sequence: GTTTGATT
aagtaaaagacaaattactt

SEQ ID NO: 38792 - DNA, 20 bp, Artificial Sequence
  Description of Artificial Sequence: Synthetic oligonucleotide
  Target: LAMA2; (-) strand; PAM type: NNNNGHTT; PAM sequence: ACTTGTTT
agaaaagtaaaagacaaatt

SEQ ID NO: 38793 - DNA, 20 bp, Artificial Sequence
  Description of Artificial Sequence: Synthetic oligonucleotide
  Target: LAMA2; (-) strand; PAM type: NNNNGHTT; PAM sequence: ATGAGCTT
aagccagtacttatgttggc

SEQ ID NO: 38794 - DNA, 20 bp, Artificial Sequence
  Description of Artificial Sequence: Synthetic oligonucleotide
  Target: LAMA2; (-) strand; PAM type: NNNNGHTT; PAM sequence: CGGGGTTT
gataagtctccttaacacaa

SEQ ID NO: 38795 - DNA, 20 bp, Artificial Sequence
  Description of Artificial Sequence: Synthetic oligonucleotide
  Target: LAMA2; (-) strand; PAM type: NNNNGHTT; PAM sequence: GATTGTTT
catcagttgatgaatatttg

SEQ ID NO: 38796 - DNA, 20 bp, Artificial Sequence
  Description of Artificial Sequence: Synthetic oligonucleotide
  Target: LAMA2; (-) strand; PAM type: NNNNGHTT; PAM sequence: TTTGGATT
cattcatcagttgatgaata

SEQ ID NO: 38797 - DNA, 20 bp, Artificial Sequence
  Description of Artificial Sequence: Synthetic oligonucleotide
  Target: LAMA2; (-) strand; PAM type: NNNNGHTT; PAM sequence: TTTTGTTT
cactgcatgtacatgccaca

SEQ ID NO: 38798 - DNA, 20 bp, Artificial Sequence
  Description of Artificial Sequence: Synthetic oligonucleotide
  Target: LAMA2; (-) strand; PAM type: NNNNGHTT; PAM sequence: ATCTGCTT
ctaacccctgtaaactaaca

SEQ ID NO: 38799 - DNA, 20 bp, Artificial Sequence
  Description of Artificial Sequence: Synthetic oligonucleotide
  Target: LAMA2; (-) strand; PAM type: NNNNGHTT; PAM sequence: CTGTGATT
aaaaaataaattgtacaatt

SEQ ID NO: 38800 - DNA, 20 bp, Artificial Sequence
  Description of Artificial Sequence: Synthetic oligonucleotide
  Target: LAMA2; (-) strand; PAM type: NNNNGHTT; PAM sequence: ATTAGTTT
aggcatttacttttcttgtc

SEQ ID NO: 38801 - DNA, 20 bp, Artificial Sequence
  Description of Artificial Sequence: Synthetic oligonucleotide
  Target: LAMA2; (-) strand; PAM type: NNNNGHTT; PAM sequence: AAATGCTT
tgtgtcatttgaaaatcatt

SEQ ID NO: 38802 - DNA, 20 bp, Artificial Sequence
  Description of Artificial Sequence: Synthetic oligonucleotide
  Target: LAMA2; (-) strand; PAM type: NNNNGHTT; PAM sequence: TAGTGTTT
aggcaaatatcactgtccta

SEQ ID NO: 38803 - DNA, 20 bp, Artificial Sequence
  Description of Artificial Sequence: Synthetic oligonucleotide
  Target: LAMA2; (-) strand; PAM type: NNNNGHTT; PAM sequence: TCTAGATT
tggacaacctggtagaaggt

SEQ ID NO: 38804 - DNA, 20 bp, Artificial Sequence
  Description of Artificial Sequence: Synthetic oligonucleotide
  Target: LAMA2; (-) strand; PAM type: NNNNGHTT; PAM sequence: CATTGCTT
caatagatttctaaaatttt

SEQ ID NO: 38805 - DNA, 20 bp, Artificial Sequence
  Description of Artificial Sequence: Synthetic oligonucleotide
  Target: LAMA2; (-) strand; PAM type: NNNNGHTT; PAM sequence: AATAGATT
caaattgtaagcttttcagc

SEQ ID NO: 38806 - DNA, 20 bp, Artificial Sequence
  Description of Artificial Sequence: Synthetic oligonucleotide
  Target: LAMA2; (-) strand; PAM type: NNNNGHTT; PAM sequence: GTAAGCTT
tgatgatctttatccaaatt

SEQ ID NO: 38807 - DNA, 20 bp, Artificial Sequence
  Description of Artificial Sequence: Synthetic oligonucleotide
  Target: LAMA2; (-) strand; PAM type: NNNNGHTT; PAM sequence: GTTAGATT
tcacaattaccaaataactt

SEQ ID NO: 38808 - DNA, 20 bp, Artificial Sequence
  Description of Artificial Sequence: Synthetic oligonucleotide
  Target: LAMA2; (-) strand; PAM type: NNNNGHTT; PAM sequence: CAGTGATT
gatggtagatttttgttgat

SEQ ID NO: 38809 - DNA, 20 bp, Artificial Sequence
  Description of Artificial Sequence: Synthetic oligonucleotide
  Target: LAMA2; (-) strand; PAM type: NNNNGHTT; PAM sequence: GGTAGATT
gttcctttctcaggagtgat

SEQ ID NO: 38810 - DNA, 20 bp, Artificial Sequence
  Description of Artificial Sequence: Synthetic oligonucleotide
  Target: LAMA2; (-) strand; PAM type: NNNNGHTT; PAM sequence: AACTGATT
tgtaaccataagaaagaagc

SEQ ID NO: 38811 - DNA, 20 bp, Artificial Sequence
  Description of Artificial Sequence: Synthetic oligonucleotide
  Target: LAMA2; (-) strand; PAM type: NNNNGHTT; PAM sequence: CACAGTTT
tactattgactcataataat

SEQ ID NO: 38812 - DNA, 20 bp, Artificial Sequence
  Description of Artificial Sequence: Synthetic oligonucleotide
  Target: LAMA2; (-) strand; PAM type: NNNNGHTT; PAM sequence: GCTTGATT
taatagtccatacaccatga

SEQ ID NO: 38813 - DNA, 20 bp, Artificial Sequence
  Description of Artificial Sequence: Synthetic oligonucleotide
  Target: LAMA2; (-) strand; PAM type: NNNNGHTT; PAM sequence: ATGAGCTT
aatataatagtccatacacc

SEQ ID NO: 38814 - DNA, 20 bp, Artificial Sequence
  Description of Artificial Sequence: Synthetic oligonucleotide
  Target: LAMA2; (-) strand; PAM type: NNNNGHTT; PAM sequence: CCAAGATT
agttttgtgagtcaaataga

SEQ ID NO: 38815 - DNA, 20 bp, Artificial Sequence
  Description of Artificial Sequence: Synthetic oligonucleotide
  Target: LAMA2; (-) strand; PAM type: NNNNGHTT; PAM sequence: TACAGTTT
aaaagcttaattattaagaa

SEQ ID NO: 38816 - DNA, 20 bp, Artificial Sequence
  Description of Artificial Sequence: Synthetic oligonucleotide
  Target: LAMA2; (-) strand; PAM type: NNNNGHTT; PAM sequence: AAAAGCTT
tttgtgtaaaaggacatctt

SEQ ID NO: 38817 - DNA, 20 bp, Artificial Sequence
  Description of Artificial Sequence: Synthetic oligonucleotide
  Target: LAMA2; (-) strand; PAM type: NNNNGHTT; PAM sequence: ACTTGCTT
ataaatgttattggtatctt

SEQ ID NO: 38818 - DNA, 20 bp, Artificial Sequence
  Description of Artificial Sequence: Synthetic oligonucleotide
  Target: LAMA2; (-) strand; PAM type: NNNNGHTT; PAM sequence: GCTGGTTT
actcattattttagagaaaa

SEQ ID NO: 38819 - DNA, 20 bp, Artificial Sequence
  Description of Artificial Sequence: Synthetic oligonucleotide
  Target: LAMA2; (-) strand; PAM type: NNNNGHTT; PAM sequence: GAGTGATT
acaatctggtgattttagca

SEQ ID NO: 38820 - DNA, 20 bp, Artificial Sequence
  Description of Artificial Sequence: Synthetic oligonucleotide
  Target: LAMA2; (-) strand; PAM type: NNNNGHTT; PAM sequence: TGGTGATT
attggtacttttgtacaatc

SEQ ID NO: 38821 - DNA, 20 bp, Artificial Sequence
  Description of Artificial Sequence: Synthetic oligonucleotide
  Target: LAMA2; (-) strand; PAM type: NNNNGHTT; PAM sequence: ATTTGTTT
gacttagaatgatctctgga

SEQ ID NO: 38822 - DNA, 20 bp, Artificial Sequence
  Description of Artificial Sequence: Synthetic oligonucleotide
  Target: LAMA2; (-) strand; PAM type: NNNNGHTT; PAM sequence: GCTTGTTT
tttttcttagagataaatct

SEQ ID NO: 38823 - DNA, 20 bp, Artificial Sequence
  Description of Artificial Sequence: Synthetic oligonucleotide
  Target: LAMA2; (-) strand; PAM type: NNNNGHTT; PAM sequence: ATCTGCTT
tttctttttcttagagataa

SEQ ID NO: 38824 - DNA, 20 bp, Artificial Sequence
  Description of Artificial Sequence: Synthetic oligonucleotide
  Target: LAMA2; (-) strand; PAM type: NNNNGHTT; PAM sequence: TTTTGTTT
gaaataaaagatggaaacaa

SEQ ID NO: 38825 - DNA, 20 bp, Artificial Sequence
  Description of Artificial Sequence: Synthetic oligonucleotide
  Target: LAMA2; (-) strand; PAM type: NNNNGHTT; PAM sequence: CTTAGCTT
aggcaatattaatattccat

SEQ ID NO: 38826 - DNA, 20 bp, Artificial Sequence
  Description of Artificial Sequence: Synthetic oligonucleotide
  Target: LAMA2; (-) strand; PAM type: NNNNGHTT; PAM sequence: TAGTGCTT
aatgactgcttgatttcttt

SEQ ID NO: 38827 - DNA, 20 bp, Artificial Sequence
  Description of Artificial Sequence: Synthetic oligonucleotide
  Target: LAMA2; (-) strand; PAM type: NNNNGHTT; PAM sequence: GCTTGATT
aagaaaacattccaatgact

SEQ ID NO: 38828 - DNA, 20 bp, Artificial Sequence
  Description of Artificial Sequence: Synthetic oligonucleotide
  Target: LAMA2; (-) strand; PAM type: NNNNGHTT; PAM sequence: GACTGCTT
aaaaaagaaaacattccaat

SEQ ID NO: 38829 - DNA, 20 bp, Artificial Sequence
  Description of Artificial Sequence: Synthetic oligonucleotide
  Target: LAMA2; (-) strand; PAM type: NNNNGHTT; PAM sequence: TTTTGATT
tcttggctcttggctatgtg

SEQ ID NO: 38830 - DNA, 20 bp, Artificial Sequence
  Description of Artificial Sequence: Synthetic oligonucleotide
  Target: LAMA2; (-) strand; PAM type: NNNNGHTT; PAM sequence: ATGTGTTT
tcgtctcttggctcttggct

SEQ ID NO: 38831 - DNA, 20 bp, Artificial Sequence
  Description of Artificial Sequence: Synthetic oligonucleotide
  Target: LAMA2; (-) strand; PAM type: NNNNGHTT; PAM sequence: AGCGGATT
ccatcagtaggataggagac

SEQ ID NO: 38832 - DNA, 20 bp, Artificial Sequence
  Description of Artificial Sequence: Synthetic oligonucleotide
  Target: LAMA2; (-) strand; PAM type: NNNNGHTT; PAM sequence: CAATGCTT
acacacttctacagctgctg

SEQ ID NO: 38833 - DNA, 20 bp, Artificial Sequence
  Description of Artificial Sequence: Synthetic oligonucleotide
  Target: LAMA2; (-) strand; PAM type: NNNNGHTT; PAM sequence: GCAAGCTT
agcactaaggatacattctt

SEQ ID NO: 38834 - DNA, 20 bp, Artificial Sequence
  Description of Artificial Sequence: Synthetic oligonucleotide
  Target: LAMA2; (-) strand; PAM type: NNNNGHTT; PAM sequence: TTTTGTTT
gcttttggtagatattcaag

SEQ ID NO: 38835 - DNA, 20 bp, Artificial Sequence
  Description of Artificial Sequence: Synthetic oligonucleotide
  Target: LAMA2; (-) strand; PAM type: NNNNGHTT; PAM sequence: TCAAGTTT
ccacagcttttggtagatat

SEQ ID NO: 38836 - DNA, 20 bp, Artificial Sequence
  Description of Artificial Sequence: Synthetic oligonucleotide
  Target: LAMA2; (-) strand; PAM type: NNNNGHTT; PAM sequence: CACAGCTT
ttaatactctaattgaaagc

SEQ ID NO: 38837 - DNA, 20 bp, Artificial Sequence
  Description of Artificial Sequence: Synthetic oligonucleotide
  Target: LAMA2; (-) strand; PAM type: NNNNGHTT; PAM sequence: ATCAGATT
tatgtagcaaagacagaaac

SEQ ID NO: 38838 - DNA, 20 bp, Artificial Sequence
  Description of Artificial Sequence: Synthetic oligonucleotide
  Target: LAMA2; (-) strand; PAM type: NNNNGHTT; PAM sequence: TTGTGATT
agattatatgcttcagatga

SEQ ID NO: 38839 - DNA, 20 bp, Artificial Sequence
  Description of Artificial Sequence: Synthetic oligonucleotide
  Target: LAMA2; (-) strand; PAM type: NNNNGHTT; PAM sequence: AGATGATT
ttctgaagattatatgcttc

SEQ ID NO: 38840 - DNA, 20 bp, Artificial Sequence
  Description of Artificial Sequence: Synthetic oligonucleotide
  Target: LAMA2; (-) strand; PAM type: NNNNGHTT; PAM sequence: ATATGCTT
ttcttgacattctgaagatt

SEQ ID NO: 38841 - DNA, 20 bp, Artificial Sequence
  Description of Artificial Sequence: Synthetic oligonucleotide
  Target: LAMA2; (-) strand; PAM type: NNNNGHTT; PAM sequence: TGAAGATT
atattatattcttgacattc

SEQ ID NO: 38842 - DNA, 20 bp, Artificial Sequence
  Description of Artificial Sequence: Synthetic oligonucleotide
  Target: LAMA2; (-) strand; PAM type: NNNNGHTT; PAM sequence: GGCAGTTT
aaacaaatcaaagacctgta

SEQ ID NO: 38843 - DNA, 20 bp, Artificial Sequence
  Description of Artificial Sequence: Synthetic oligonucleotide
  Target: LAMA2; (-) strand; PAM type: NNNNGHTT; PAM sequence: ACCAGTTT
tcaagtaaaaccagtttcac

SEQ ID NO: 38844 - DNA, 20 bp, Artificial Sequence
  Description of Artificial Sequence: Synthetic oligonucleotide
  Target: LAMA2; (-) strand; PAM type: NNNNGHTT; PAM sequence: ACCAGTTT
ttgaccaggtttcaagtaaa

SEQ ID NO: 38845 - DNA, 20 bp, Artificial Sequence
  Description of Artificial Sequence: Synthetic oligonucleotide
  Target: LAMA2; (-) strand; PAM type: NNNNGHTT; PAM sequence: CCAGGTTT
atagtgttcacattttttga

SEQ ID NO: 38846 - DNA, 20 bp, Artificial Sequence
  Description of Artificial Sequence: Synthetic oligonucleotide
  Target: LAMA2; (-) strand; PAM type: NNNNGHTT; PAM sequence: AAATGATT
tggaacatctcagtacactc

SEQ ID NO: 38847 - DNA, 20 bp, Artificial Sequence
  Description of Artificial Sequence: Synthetic oligonucleotide
  Target: LAMA2; (-) strand; PAM type: NNNNGHTT; PAM sequence: TCTAGTTT
aagtacttctataagttata

SEQ ID NO: 38848 - DNA, 20 bp, Artificial Sequence
  Description of Artificial Sequence: Synthetic oligonucleotide
  Target: LAMA2; (-) strand; PAM type: NNNNGHTT; PAM sequence: TCTTGTTT
tggaatcaagagcaaaaggc

SEQ ID NO: 38849 - DNA, 20 bp, Artificial Sequence
  Description of Artificial Sequence: Synthetic oligonucleotide
  Target: LAMA2; (-) strand; PAM type: NNNNGHTT; PAM sequence: AATAGTTT
gagaggatcttaaaagttca

SEQ ID NO: 38850 - DNA, 20 bp, Artificial Sequence
  Description of Artificial Sequence: Synthetic oligonucleotide
  Target: LAMA2; (-) strand; PAM type: NNNNGHTT; PAM sequence: CAGGGATT
gtctccctaaacagatagga

SEQ ID NO: 38851 - DNA, 20 bp, Artificial Sequence
  Description of Artificial Sequence: Synthetic oligonucleotide
  Target: LAMA2; (-) strand; PAM type: NNNNGHTT; PAM sequence: GAATGATT
ctgcagtagctcatcccttt

SEQ ID NO: 38852 - DNA, 20 bp, Artificial Sequence
  Description of Artificial Sequence: Synthetic oligonucleotide
  Target: LAMA2; (-) strand; PAM type: NNNNGHTT; PAM sequence: TTAAGATT
accattatttagcatccaat

SEQ ID NO: 38853 - DNA, 20 bp, Artificial Sequence
  Description of Artificial Sequence: Synthetic oligonucleotide
  Target: LAMA2; (-) strand; PAM type: NNNNGHTT; PAM sequence: AAATGCTT
ctcctttttttttcacactc

SEQ ID NO: 38854 - DNA, 20 bp, Artificial Sequence
  Description of Artificial Sequence: Synthetic oligonucleotide
  Target: LAMA2; (-) strand; PAM type: NNNNGHTT; PAM sequence: GGAAGCTT
attattgtgtgacagataca

SEQ ID NO: 38855 - DNA, 20 bp, Artificial Sequence
  Description of Artificial Sequence: Synthetic oligonucleotide
  Target: LAMA2; (-) strand; PAM type: NNNNGHTT; PAM sequence: TATGGATT
ttgattcaattaagttcttt

SEQ ID NO: 38856 - DNA, 20 bp, Artificial Sequence
  Description of Artificial Sequence: Synthetic oligonucleotide
  Target: LAMA2; (-) strand; PAM type: NNNNGHTT; PAM sequence: TCTTGATT
aagttccaaaattcattgtc

SEQ ID NO: 38857 - DNA, 20 bp, Artificial Sequence
  Description of Artificial Sequence: Synthetic oligonucleotide
  Target: LAMA2; (-) strand; PAM type: NNNNGHTT; PAM sequence: GAAAGTTT
taatagtgaatttagggaca

SEQ ID NO: 38858 - DNA, 20 bp, Artificial Sequence
  Description of Artificial Sequence: Synthetic oligonucleotide
  Target: LAMA2; (-) strand; PAM type: NNNNGHTT; PAM sequence: CTCAGCTT
ttaatggtctttggcgttta

SEQ ID NO: 38859 - DNA, 20 bp, Artificial Sequence
  Description of Artificial Sequence: Synthetic oligonucleotide
  Target: LAMA2; (-) strand; PAM type: NNNNGHTT; PAM sequence: TGGCGTTT
attaagacattaatggtctt

SEQ ID NO: 38860 - DNA, 20 bp, Artificial Sequence
  Description of Artificial Sequence: Synthetic oligonucleotide
  Target: LAMA2; (-) strand; PAM type: NNNNGHTT; PAM sequence: GAAAGATT
atgaaagtaagaaaattttt

SEQ ID NO: 38861 - DNA, 20 bp, Artificial Sequence
  Description of Artificial Sequence: Synthetic oligonucleotide
  Target: LAMA2; (-) strand; PAM type: NNNNGHTT; PAM sequence: CTGAGATT
tcatttcatggaagaagaaa

SEQ ID NO: 38862 - DNA, 20 bp, Artificial Sequence
  Description of Artificial Sequence: Synthetic oligonucleotide
  Target: LAMA2; (-) strand; PAM type: NNNNGHTT; PAM sequence: TCTTGTTT
actattttccctgtgtaggg

SEQ ID NO: 38863 - DNA, 20 bp, Artificial Sequence
  Description of Artificial Sequence: Synthetic oligonucleotide
  Target: LAMA2; (-) strand; PAM type: NNNNGHTT; PAM sequence: ATTTGCTT
aatttgtcacgtttatttct

SEQ ID NO: 38864 - DNA, 20 bp, Artificial Sequence
  Description of Artificial Sequence: Synthetic oligonucleotide
  Target: LAMA2; (-) strand; PAM type: NNNNGHTT; PAM sequence: TCACGTTT
tatttccttcatagaatttg

SEQ ID NO: 38865 - DNA, 20 bp, Artificial Sequence
  Description of Artificial Sequence: Synthetic oligonucleotide
  Target: LAMA2; (-) strand; PAM type: NNNNGHTT; PAM sequence: CCCTGTTT
atagaaccctgtttatttca

SEQ ID NO: 38866 - DNA, 20 bp, Artificial Sequence
  Description of Artificial Sequence: Synthetic oligonucleotide
  Target: LAMA2; (-) strand; PAM type: NNNNGHTT; PAM sequence: CCCTGTTT
gcagtaactttatcatagaa

SEQ ID NO: 38867 - DNA, 20 bp, Artificial Sequence
  Description of Artificial Sequence: Synthetic oligonucleotide
  Target: LAMA2; (-) strand; PAM type: NNNNGHTT; PAM sequence: ACTCGATT
tgtccctctcattcttcaac

SEQ ID NO: 38868 - DNA, 20 bp, Artificial Sequence
  Description of Artificial Sequence: Synthetic oligonucleotide
  Target: LAMA2; (-) strand; PAM type: NNNNGHTT; PAM sequence: GCTGGTTT
tctatgctgcttccttagca

SEQ ID NO: 38869 - DNA, 20 bp, Artificial Sequence
  Description of Artificial Sequence: Synthetic oligonucleotide
  Target: LAMA2; (-) strand; PAM type: NNNNGHTT; PAM sequence: TGCTGCTT
cttacagactccacgatcta

SEQ ID NO: 38870 - DNA, 20 bp, Artificial Sequence
  Description of Artificial Sequence: Synthetic oligonucleotide
  Target: LAMA2; (-) strand; PAM type: NNNNGHTT; PAM sequence: CCTTGCTT
acttcttgtcccacttttcc

SEQ ID NO: 38871 - DNA, 20 bp, Artificial Sequence
  Description of Artificial Sequence: Synthetic oligonucleotide
  Target: LAMA2; (-) strand; PAM type: NNNNGHTT; PAM sequence: CCTTGCTT
atgtgcaaatctcctcatgg

SEQ ID NO: 38872 - DNA, 20 bp, Artificial Sequence
  Description of Artificial Sequence: Synthetic oligonucleotide
  Target: LAMA2; (-) strand; PAM type: NNNNGHTT; PAM sequence: AAAGGCTT
actactccactactctgctg

SEQ ID NO: 38873 - DNA, 20 bp, Artificial Sequence
  Description of Artificial Sequence: Synthetic oligonucleotide
  Target: LAMA2; (-) strand; PAM type: NNNNGHTT; PAM sequence: ATCAGATT
cccaaaacccaaaaatgtaa

SEQ ID NO: 38874 - DNA, 20 bp, Artificial Sequence
  Description of Artificial Sequence: Synthetic oligonucleotide
  Target: LAMA2; (-) strand; PAM type: NNNNGHTT; PAM sequence: AGGAGTTT
caggaggatcacttgagctc

SEQ ID NO: 38875 - DNA, 20 bp, Artificial Sequence
  Description of Artificial Sequence: Synthetic oligonucleotide
  Target: LAMA2; (-) strand; PAM type: NNNNGHTT; PAM sequence: GATTGCTT
ttgggaggctgaggtgggag

SEQ ID NO: 38876 - DNA, 20 bp, Artificial Sequence
  Description of Artificial Sequence: Synthetic oligonucleotide
  Target: LAMA2; (-) strand; PAM type: NNNNGHTT; PAM sequence: GGAGGATT
aactttgggaggctgaggtg

SEQ ID NO: 38877 - DNA, 20 bp, Artificial Sequence
  Description of Artificial Sequence: Synthetic oligonucleotide
  Target: LAMA2; (-) strand; PAM type: NNNNGHTT; PAM sequence: TATGGATT
cgaaaatttctaaactggac

SEQ ID NO: 38878 - DNA, 20 bp, Artificial Sequence
  Description of Artificial Sequence: Synthetic oligonucleotide
  Target: LAMA2; (-) strand; PAM type: NNNNGHTT; PAM sequence: CAGCGTTT
acattgacatttacacttca

SEQ ID NO: 38879 - DNA, 20 bp, Artificial Sequence
  Description of Artificial Sequence: Synthetic oligonucleotide
  Target: LAMA2; (-) strand; PAM type: NNNNGHTT; PAM sequence: CATAGTTT
tgggtaattttattcagttc

SEQ ID NO: 38880 - DNA, 20 bp, Artificial Sequence
  Description of Artificial Sequence: Synthetic oligonucleotide
  Target: LAMA2; (-) strand; PAM type: NNNNGHTT; PAM sequence: CAGGGCTT
tcttaacgtcaggagctcct

SEQ ID NO: 38881 - DNA, 20 bp, Artificial Sequence
  Description of Artificial Sequence: Synthetic oligonucleotide
  Target: LAMA2; (-) strand; PAM type: NNNNGHTT; PAM sequence: CCCTGCTT
tgctgtctcctctgctttga

SEQ ID NO: 38882 - DNA, 20 bp, Artificial Sequence
  Description of Artificial Sequence: Synthetic oligonucleotide
  Target: LAMA2; (-) strand; PAM type: NNNNGHTT; PAM sequence: CTCTGCTT
gcatatttctttgctgtctc

SEQ ID NO: 38883 - DNA, 20 bp, Artificial Sequence
  Description of Artificial Sequence: Synthetic oligonucleotide
  Target: LAMA2; (-) strand; PAM type: NNNNGHTT; PAM sequence: ATCTGTTT
tcacacttcattccattcta

SEQ ID NO: 38884 - DNA, 20 bp, Artificial Sequence
  Description of Artificial Sequence: Synthetic oligonucleotide
  Target: LAMA2; (-) strand; PAM type: NNNNGHTT; PAM sequence: CTATGTTT
catataacttttctagtcat

SEQ ID NO: 38885 - DNA, 20 bp, Artificial Sequence
  Description of Artificial Sequence: Synthetic oligonucleotide
  Target: LAMA2; (-) strand; PAM type: NNNNGHTT; PAM sequence: GATGGATT
tctcaatattcactctctct

SEQ ID NO: 38886 - DNA, 20 bp, Artificial Sequence
  Description of Artificial Sequence: Synthetic oligonucleotide
  Target: LAMA2; (-) strand; PAM type: NNNNGHTT; PAM sequence: ATCTGATT
gaaatattactccacttgtc

SEQ ID NO: 38887 - DNA, 20 bp, Artificial Sequence
  Description of Artificial Sequence: Synthetic oligonucleotide
  Target: LAMA2; (-) strand; PAM type: NNNNGHTT; PAM sequence: CAGTGATT
ccttacacctctcttttagc

SEQ ID NO: 38888 - DNA, 20 bp, Artificial Sequence
  Description of Artificial Sequence: Synthetic oligonucleotide
  Target: LAMA2; (-) strand; PAM type: NNNNGHTT; PAM sequence: TTTTGTTT
ttccttaataagtttttttg

SEQ ID NO: 38889 - DNA, 20 bp, Artificial Sequence
  Description of Artificial Sequence: Synthetic oligonucleotide
  Target: LAMA2; (-) strand; PAM type: NNNNGHTT; PAM sequence: TTTTGTTT
aagttttccttaataagttt

SEQ ID NO: 38890 - DNA, 20 bp, Artificial Sequence
  Description of Artificial Sequence: Synthetic oligonucleotide
  Target: LAMA2; (-) strand; PAM type: NNNNGHTT; PAM sequence: ATAAGTTT
tattcatgaagttttcctta

SEQ ID NO: 38891 - DNA, 20 bp, Artificial Sequence
  Description of Artificial Sequence: Synthetic oligonucleotide
  Target: LAMA2; (-) strand; PAM type: NNNNGHTT; PAM sequence: TGAAGTTT
tgttttcagacagatattca

SEQ ID NO: 38892 - DNA, 20 bp, Artificial Sequence
  Description of Artificial Sequence: Synthetic oligonucleotide
  Target: LAMA2; (-) strand; PAM type: NNNNGHTT; PAM sequence: TACTGTTT
gaaaagggagagaactaatc

SEQ ID NO: 38893 - DNA, 20 bp, Artificial Sequence
  Description of Artificial Sequence: Synthetic oligonucleotide
  Target: LAMA2; (-) strand; PAM type: NNNNGHTT; PAM sequence: AAGTGATT
cctccctagattcattatag

SEQ ID NO: 38894 - DNA, 20 bp, Artificial Sequence
  Description of Artificial Sequence: Synthetic oligonucleotide
  Target: LAMA2; (-) strand; PAM type: NNNNGHTT; PAM sequence: CCTAGATT
cccattacattttttgcctc

SEQ ID NO: 38895 - DNA, 20 bp, Artificial Sequence
  Description of Artificial Sequence: Synthetic oligonucleotide
  Target: LAMA2; (-) strand; PAM type: NNNNGHTT; PAM sequence: TTCCGTTT
attgtcaaatttctatcctg

SEQ ID NO: 38896 - DNA, 20 bp, Artificial Sequence
  Description of Artificial Sequence: Synthetic oligonucleotide
  Target: LAMA2; (-) strand; PAM type: NNNNGHTT; PAM sequence: GGTGGTTT
cataggtatacacgtgccat

SEQ ID NO: 38897 - DNA, 20 bp, Artificial Sequence
  Description of Artificial Sequence: Synthetic oligonucleotide
  Target: LAMA2; (-) strand; PAM type: NNNNGHTT; PAM sequence: GCAGGTTT
gggatacatgtgcagaacgt

SEQ ID NO: 38898 - DNA, 20 bp, Artificial Sequence
  Description of Artificial Sequence: Synthetic oligonucleotide
  Target: LAMA2; (-) strand; PAM type: NNNNGHTT; PAM sequence: ATTTGTTT
agtaccaaaaaaagtgtcaa

SEQ ID NO: 38899 - DNA, 20 bp, Artificial Sequence
  Description of Artificial Sequence: Synthetic oligonucleotide
  Target: LAMA2; (-) strand; PAM type: NNNNGHTT; PAM sequence: AAGAGCTT
ggcaaatactgctgccctct

SEQ ID NO: 38900 - DNA, 20 bp, Artificial Sequence
  Description of Artificial Sequence: Synthetic oligonucleotide
  Target: LAMA2; (-) strand; PAM type: NNNNGHTT; PAM sequence: TGGGGATT
ttaattaagttttccatctg

SEQ ID NO: 38901 - DNA, 20 bp, Artificial Sequence
  Description of Artificial Sequence: Synthetic oligonucleotide
  Target: LAMA2; (-) strand; PAM type: NNNNGHTT; PAM sequence: TTAAGTTT
aagttccccatcatccttaa

SEQ ID NO: 38902 - DNA, 20 bp, Artificial Sequence
  Description of Artificial Sequence: Synthetic oligonucleotide
  Target: LAMA2; (-) strand; PAM type: NNNNGHTT; PAM sequence: CTTAGATT
ttaaaacagggtattttagt

SEQ ID NO: 38903 - DNA, 20 bp, Artificial Sequence
  Description of Artificial Sequence: Synthetic oligonucleotide
  Target: LAMA2; (-) strand; PAM type: NNNNGHTT; PAM sequence: TTCTGATT
tttattatataaaaactgaa

SEQ ID NO: 38904 - DNA, 20 bp, Artificial Sequence
  Description of Artificial Sequence: Synthetic oligonucleotide
  Target: LAMA2; (-) strand; PAM type: NNNNGHTT; PAM sequence: CCTTGTTT
ctttgcttgtatttttcatt

SEQ ID NO: 38905 - DNA, 20 bp, Artificial Sequence
  Description of Artificial Sequence: Synthetic oligonucleotide
  Target: LAMA2; (-) strand; PAM type: NNNNGHTT; PAM sequence: CTTTGCTT
tttatggcattcttctgtaa

SEQ ID NO: 38906 - DNA, 20 bp, Artificial Sequence
  Description of Artificial Sequence: Synthetic oligonucleotide
  Target: LAMA2; (-) strand; PAM type: NNNNGHTT; PAM sequence: GATAGCTT
gatttatttctcacattctt

SEQ ID NO: 38907 - DNA, 20 bp, Artificial Sequence
  Description of Artificial Sequence: Synthetic oligonucleotide
  Target: LAMA2; (-) strand; PAM type: NNNNGHTT; PAM sequence: TTATGATT
ctcaaatttacacaaaaagt

SEQ ID NO: 38908 - DNA, 20 bp, Artificial Sequence
  Description of Artificial Sequence: Synthetic oligonucleotide
  Target: LAMA2; (-) strand; PAM type: NNNNGHTT; PAM sequence: AAAAGTTT
tgctttctcaaatttacaca

SEQ ID NO: 38909 - DNA, 20 bp, Artificial Sequence
  Description of Artificial Sequence: Synthetic oligonucleotide
  Target: LAMA2; (-) strand; PAM type: NNNNGHTT; PAM sequence: TTATGCTT
gctaaatttcctccatccta

SEQ ID NO: 38910 - DNA, 20 bp, Artificial Sequence
  Description of Artificial Sequence: Synthetic oligonucleotide
  Target: LAMA2; (-) strand; PAM type: NNNNGHTT; PAM sequence: ACATGATT
tcatttccagaaaatctttg

SEQ ID NO: 38911 - DNA, 20 bp, Artificial Sequence
  Description of Artificial Sequence: Synthetic oligonucleotide
  Target: LAMA2; (-) strand; PAM type: NNNNGHTT; PAM sequence: TTTTGATT
cccgatgtcatcccaagcaa

SEQ ID NO: 38912 - DNA, 20 bp, Artificial Sequence
  Description of Artificial Sequence: Synthetic oligonucleotide
  Target: LAMA2; (-) strand; PAM type: NNNNGHTT; PAM sequence: TGGTGTTT
gattagaggaagcattagct

SEQ ID NO: 38913 - DNA, 20 bp, Artificial Sequence
  Description of Artificial Sequence: Synthetic oligonucleotide
  Target: LAMA2; (-) strand; PAM type: NNNNGHTT; PAM sequence: ATTAGCTT
ggtatgagattagaggaagc

SEQ ID NO: 38914 - DNA, 20 bp, Artificial Sequence
  Description of Artificial Sequence: Synthetic oligonucleotide
  Target: LAMA2; (-) strand; PAM type: NNNNGHTT; PAM sequence: ATGAGATT
ccttagtgttattggcaggt

SEQ ID NO: 38915 - DNA, 20 bp, Artificial Sequence
  Description of Artificial Sequence: Synthetic oligonucleotide
  Target: LAMA2; (-) strand; PAM type: NNNNGHTT; PAM sequence: TGGGGCTT
agagctattcctcctgacac

SEQ ID NO: 38916 - DNA, 20 bp, Artificial Sequence
  Description of Artificial Sequence: Synthetic oligonucleotide
  Target: LAMA2; (-) strand; PAM type: NNNNGHTT; PAM sequence: ATGTGCTT
acaggtaggaaactcatcaa

SEQ ID NO: 38917 - DNA, 20 bp, Artificial Sequence
  Description of Artificial Sequence: Synthetic oligonucleotide
  Target: LAMA2; (-) strand; PAM type: NNNNGHTT; PAM sequence: GTTTGTTT
aggtgtttttgtttgtttgt

SEQ ID NO: 38918 - DNA, 20 bp, Artificial Sequence
  Description of Artificial Sequence: Synthetic oligonucleotide
  Target: LAMA2; (-) strand; PAM type: NNNNGHTT; PAM sequence: TTGTGTTT
aaaaaggtgtttttgtttgt

SEQ ID NO: 38919 - DNA, 20 bp, Artificial Sequence
  Description of Artificial Sequence: Synthetic oligonucleotide
  Target: LAMA2; (-) strand; PAM type: NNNNGHTT; PAM sequence: GTTTGTTT
taaaacaaaaaggtgttttt

SEQ ID NO: 38920 - DNA, 20 bp, Artificial Sequence
  Description of Artificial Sequence: Synthetic oligonucleotide
  Target: LAMA2; (-) strand; PAM type: NNNNGHTT; PAM sequence: TTTTGTTT
agattaaaacaaaaaggtgt

SEQ ID NO: 38921 - DNA, 20 bp, Artificial Sequence
  Description of Artificial Sequence: Synthetic oligonucleotide
  Target: LAMA2; (-) strand; PAM type: NNNNGHTT; PAM sequence: AGGTGTTT
tcttggagattaaaacaaaa

SEQ ID NO: 38922 - DNA, 20 bp, Artificial Sequence
  Description of Artificial Sequence: Synthetic oligonucleotide
  Target: LAMA2; (-) strand; PAM type: NNNNGHTT; PAM sequence: TGGAGATT
gataaggctttagtcagtct

SEQ ID NO: 38923 - DNA, 20 bp, Artificial Sequence
  Description of Artificial Sequence: Synthetic oligonucleotide
  Target: LAMA2; (-) strand; PAM type: NNNNGHTT; PAM sequence: TAAGGCTT
caacaagactgagagaaaga

SEQ ID NO: 38924 - DNA, 20 bp, Artificial Sequence
  Description of Artificial Sequence: Synthetic oligonucleotide
  Target: LAMA2; (-) strand; PAM type: NNNNGHTT; PAM sequence: AGGTGATT
ctgaattgtagcatctgtcg

SEQ ID NO: 38925 - DNA, 20 bp, Artificial Sequence
  Description of Artificial Sequence: Synthetic oligonucleotide
  Target: LAMA2; (-) strand; PAM type: NNNNGHTT; PAM sequence: AAGTGTTT
gtcaaagcacttcttgactc

SEQ ID NO: 38926 - DNA, 20 bp, Artificial Sequence
  Description of Artificial Sequence: Synthetic oligonucleotide
  Target: LAMA2; (-) strand; PAM type: NNNNGHTT; PAM sequence: TCTTGATT
atatctgattctaatttaat

SEQ ID NO: 38927 - DNA, 20 bp, Artificial Sequence
  Description of Artificial Sequence: Synthetic oligonucleotide
  Target: LAMA2; (-) strand; PAM type: NNNNGHTT; PAM sequence: ATCTGATT
gttatgccttataaaaatat

SEQ ID NO: 38928 - DNA, 20 bp, Artificial Sequence
  Description of Artificial Sequence: Synthetic oligonucleotide
  Target: LAMA2; (-) strand; PAM type: NNNNGHTT; PAM sequence: CATAGATT
taaaagtacactgtactttt

SEQ ID NO: 38929 - DNA, 20 bp, Artificial Sequence
  Description of Artificial Sequence: Synthetic oligonucleotide
  Target: LAMA2; (-) strand; PAM type: NNNNGHTT; PAM sequence: TTATGTTT
tcaacatgaagaaaacttaa

SEQ ID NO: 38930 - DNA, 20 bp, Artificial Sequence
  Description of Artificial Sequence: Synthetic oligonucleotide
  Target: LAMA2; (-) strand; PAM type: NNNNGHTT; PAM sequence: GTATGTTT
attttaaataaaaatatgta

SEQ ID NO: 38931 - DNA, 20 bp, Artificial Sequence
  Description of Artificial Sequence: Synthetic oligonucleotide
  Target: LAMA2; (-) strand; PAM type: NNNNGHTT; PAM sequence: TATTGTTT
tctggtgaatatgtattaca

SEQ ID NO: 38932 - DNA, 20 bp, Artificial Sequence
  Description of Artificial Sequence: Synthetic oligonucleotide
  Target: LAMA2; (-) strand; PAM type: NNNNGHTT; PAM sequence: TAAAGCTT
tgtaaagcctattttctggt

SEQ ID NO: 38933 - DNA, 20 bp, Artificial Sequence
  Description of Artificial Sequence: Synthetic oligonucleotide
  Target: LAMA2; (-) strand; PAM type: NNNNGHTT; PAM sequence: AAGTGCTT
aggtttcttagcaggatgga

SEQ ID NO: 38934 - DNA, 20 bp, Artificial Sequence
  Description of Artificial Sequence: Synthetic oligonucleotide
  Target: LAMA2; (-) strand; PAM type: NNNNGHTT; PAM sequence: TAAGGTTT
tcagtgtaattctccaatcc

SEQ ID NO: 38935 - DNA, 20 bp, Artificial Sequence
  Description of Artificial Sequence: Synthetic oligonucleotide
  Target: LAMA2; (-) strand; PAM type: NNNNGHTT; PAM sequence: TCAAGCTT
atgaaaggagaagtgttgtt

SEQ ID NO: 38936 - DNA, 20 bp, Artificial Sequence
  Description of Artificial Sequence: Synthetic oligonucleotide
  Target: LAMA2; (-) strand; PAM type: NNNNGHTT; PAM sequence: TGTTGTTT
aagactaatgaaaggagaag

SEQ ID NO: 38937 - DNA, 20 bp, Artificial Sequence
  Description of Artificial Sequence: Synthetic oligonucleotide
  Target: LAMA2; (-) strand; PAM type: NNNNGHTT; PAM sequence: TTGTGTTT
ttaattggcaccattttaaa

SEQ ID NO: 38938 - DNA, 20 bp, Artificial Sequence
  Description of Artificial Sequence: Synthetic oligonucleotide
  Target: LAMA2; (-) strand; PAM type: NNNNGHTT; PAM sequence: AGAAGCTT
tttcattttggatttttccc

SEQ ID NO: 38939 - DNA, 20 bp, Artificial Sequence
  Description of Artificial Sequence: Synthetic oligonucleotide
  Target: LAMA2; (-) strand; PAM type: NNNNGHTT; PAM sequence: TTTGGATT
caaaagccctgaattttcat

SEQ ID NO: 38940 - DNA, 20 bp, Artificial Sequence
  Description of Artificial Sequence: Synthetic oligonucleotide
  Target: LAMA2; (-) strand; PAM type: NNNNGHTT; PAM sequence: TCATGCTT
tgatccacaaattaaggctc

SEQ ID NO: 38941 - DNA, 20 bp, Artificial Sequence
  Description of Artificial Sequence: Synthetic oligonucleotide
  Target: LAMA2; (-) strand; PAM type: NNNNGHTT; PAM sequence: AAGTGTTT
tttcctactgcatgttagtg

SEQ ID NO: 38942 - DNA, 20 bp, Artificial Sequence
  Description of Artificial Sequence: Synthetic oligonucleotide
  Target: LAMA2; (-) strand; PAM type: NNNNGHTT; PAM sequence: GTCAGTTT
ggtaagtaaaacaattccat

SEQ ID NO: 38943 - DNA, 20 bp, Artificial Sequence
  Description of Artificial Sequence: Synthetic oligonucleotide
  Target: LAMA2; (-) strand; PAM type: NNNNGHTT; PAM sequence: ATGAGTTT
atatgactatatggaacatc

SEQ ID NO: 38944 - DNA, 20 bp, Artificial Sequence
  Description of Artificial Sequence: Synthetic oligonucleotide
  Target: LAMA2; (-) strand; PAM type: NNNNGHTT; PAM sequence: ATTTGATT
gaattcagcatgaaaatttg

SEQ ID NO: 38945 - DNA, 20 bp, Artificial Sequence
  Description of Artificial Sequence: Synthetic oligonucleotide
  Target: LAMA2; (-) strand; PAM type: NNNNGHTT; PAM sequence: ATTTGATT
ctaatgaattcagcatgaaa

SEQ ID NO: 38946 - DNA, 20 bp, Artificial Sequence
  Description of Artificial Sequence: Synthetic oligonucleotide
  Target: LAMA2; (-) strand; PAM type: NNNNGHTT; PAM sequence: ATTTGCTT
tcacatcaacaaatggacta

SEQ ID NO: 38947 - DNA, 20 bp, Artificial Sequence
  Description of Artificial Sequence: Synthetic oligonucleotide
  Target: LAMA2; (-) strand; PAM type: NNNNGHTT; PAM sequence: TCTAGTTT
tttattagttaaaaaaggct

SEQ ID NO: 38948 - DNA, 20 bp, Artificial Sequence
  Description of Artificial Sequence: Synthetic oligonucleotide
  Target: LAMA2; (-) strand; PAM type: NNNNGHTT; PAM sequence: AAAGGCTT
acactgttttattagttaaa

SEQ ID NO: 38949 - DNA, 20 bp, Artificial Sequence
  Description of Artificial Sequence: Synthetic oligonucleotide
  Target: LAMA2; (-) strand; PAM type: NNNNGHTT; PAM sequence: CACTGTTT
ctcaaaattatgctgaatga

SEQ ID NO: 38950 - DNA, 20 bp, Artificial Sequence
  Description of Artificial Sequence: Synthetic oligonucleotide
  Target: LAMA2; (-) strand; PAM type: NNNNGHTT; PAM sequence: CACTGTTT
gtctttatcatcaagatgtc

SEQ ID NO: 38951 - DNA, 20 bp, Artificial Sequence
  Description of Artificial Sequence: Synthetic oligonucleotide
  Target: LAMA2; (-) strand; PAM type: NNNNGHTT; PAM sequence: ACCAGATT
tgatggaaaattcaggaaac

SEQ ID NO: 38952 - DNA, 20 bp, Artificial Sequence
  Description of Artificial Sequence: Synthetic oligonucleotide
  Target: LAMA2; (-) strand; PAM type: NNNNGHTT; PAM sequence: TTAAGCTT
taatcaaattttaaagcaag

SEQ ID NO: 38953 - DNA, 20 bp, Artificial Sequence
  Description of Artificial Sequence: Synthetic oligonucleotide
  Target: LAMA2; (-) strand; PAM type: NNNNGHTT; PAM sequence: TTTAGATT
gacctacactattgcagaag

SEQ ID NO: 38954 - DNA, 20 bp, Artificial Sequence
  Description of Artificial Sequence: Synthetic oligonucleotide
  Target: LAMA2; (-) strand; PAM type: NNNNGHTT; PAM sequence: AGAAGTTT
atatagacctacactattgc

SEQ ID NO: 38955 - DNA, 20 bp, Artificial Sequence
  Description of Artificial Sequence: Synthetic oligonucleotide
  Target: LAMA2; (-) strand; PAM type: NNNNGHTT; PAM sequence: CCTGGCTT
ccatgtgacattgaatactt

SEQ ID NO: 38956 - DNA, 20 bp, Artificial Sequence
  Description of Artificial Sequence: Synthetic oligonucleotide
  Target: LAMA2; (-) strand; PAM type: NNNNGHTT; PAM sequence: AAGTGCTT
ttacaggtgtcctgttacga

SEQ ID NO: 38957 - DNA, 20 bp, Artificial Sequence
  Description of Artificial Sequence: Synthetic oligonucleotide
  Target: LAMA2; (-) strand; PAM type: NNNNGHTT; PAM sequence: GATGGATT
aaagatggaagcttcactct

SEQ ID NO: 38958 - DNA, 20 bp, Artificial Sequence
  Description of Artificial Sequence: Synthetic oligonucleotide
  Target: LAMA2; (-) strand; PAM type: NNNNGHTT; PAM sequence: GGAAGCTT
aataaaaaaaaaaaaaagat

SEQ ID NO: 38959 - DNA, 20 bp, Artificial Sequence
  Description of Artificial Sequence: Synthetic oligonucleotide
  Target: LAMA2; (-) strand; PAM type: NNNNGHTT; PAM sequence: TCACGTTT
agttcttacattttctaatg

SEQ ID NO: 38960 - DNA, 20 bp, Artificial Sequence
  Description of Artificial Sequence: Synthetic oligonucleotide
  Target: LAMA2; (-) strand; PAM type: NNNNGHTT; PAM sequence: TATTGATT
gagggttttttatttccaat

SEQ ID NO: 38961 - DNA, 20 bp, Artificial Sequence
  Description of Artificial Sequence: Synthetic oligonucleotide
  Target: LAMA2; (-) strand; PAM type: NNNNGHTT; PAM sequence: GAGGGTTT
tgaaaatcttgcataattga

SEQ ID NO: 38962 - DNA, 20 bp, Artificial Sequence
  Description of Artificial Sequence: Synthetic oligonucleotide
  Target: LAMA2; (-) strand; PAM type: NNNNGHTT; PAM sequence: AAGGGTTT
aattatgtcttcaaatactt

SEQ ID NO: 38963 - DNA, 20 bp, Artificial Sequence
  Description of Artificial Sequence: Synthetic oligonucleotide
  Target: LAMA2; (-) strand; PAM type: NNNNGHTT; PAM sequence: GCTTGTTT
taagctattactgaagaatt

SEQ ID NO: 38964 - DNA, 20 bp, Artificial Sequence
  Description of Artificial Sequence: Synthetic oligonucleotide
  Target: LAMA2; (-) strand; PAM type: NNNNGHTT; PAM sequence: AATTGCTT
aaactaagctattactgaag

SEQ ID NO: 38965 - DNA, 20 bp, Artificial Sequence
  Description of Artificial Sequence: Synthetic oligonucleotide
  Target: LAMA2; (-) strand; PAM type: NNNNGHTT; PAM sequence: TTAAGTTT
gttttacttcctttcaattt

SEQ ID NO: 38966 - DNA, 20 bp, Artificial Sequence
  Description of Artificial Sequence: Synthetic oligonucleotide
  Target: LAMA2; (-) strand; PAM type: NNNNGHTT; PAM sequence: TTTTGTTT
gattttttccccgatttgat

SEQ ID NO: 38967 - DNA, 20 bp, Artificial Sequence
  Description of Artificial Sequence: Synthetic oligonucleotide
  Target: LAMA2; (-) strand; PAM type: NNNNGHTT; PAM sequence: ATTTGATT
gaagaaagattttttccccg

SEQ ID NO: 38968 - DNA, 20 bp, Artificial Sequence
  Description of Artificial Sequence: Synthetic oligonucleotide
  Target: LAMA2; (-) strand; PAM type: NNNNGHTT; PAM sequence: CCCCGATT
catttgaagaaagatttttt

SEQ ID NO: 38969 - DNA, 20 bp, Artificial Sequence
  Description of Artificial Sequence: Synthetic oligonucleotide
  Target: LAMA2; (-) strand; PAM type: NNNNGHTT; PAM sequence: GAAAGATT
aaaacatggatccatttgaa

SEQ ID NO: 38970 - DNA, 20 bp, Artificial Sequence
  Description of Artificial Sequence: Synthetic oligonucleotide
  Target: LAMA2; (-) strand; PAM type: NNNNGHTT; PAM sequence: TTGGGATT
tgccttaataatgcagtata

SEQ ID NO: 38971 - DNA, 20 bp, Artificial Sequence
  Description of Artificial Sequence: Synthetic oligonucleotide
  Target: LAMA2; (-) strand; PAM type: NNNNGHTT; PAM sequence: GTCAGCTT
ttttaaaagatagcattaag

SEQ ID NO: 38972 - DNA, 20 bp, Artificial Sequence
  Description of Artificial Sequence: Synthetic oligonucleotide
  Target: LAMA2; (-) strand; PAM type: NNNNGHTT; PAM sequence: ACAGGCTT
gtaactggtgatatttgaaa

SEQ ID NO: 38973 - DNA, 20 bp, Artificial Sequence
  Description of Artificial Sequence: Synthetic oligonucleotide
  Target: LAMA2; (-) strand; PAM type: NNNNGHTT; PAM sequence: GCTTGCTT
ctgtattacatctgtgagaa

SEQ ID NO: 38974 - DNA, 20 bp, Artificial Sequence
  Description of Artificial Sequence: Synthetic oligonucleotide
  Target: LAMA2; (-) strand; PAM type: NNNNGHTT; PAM sequence: AGAAGCTT
actactgtattacatctgtg

SEQ ID NO: 38975 - DNA, 20 bp, Artificial Sequence
  Description of Artificial Sequence: Synthetic oligonucleotide
  Target: LAMA2; (-) strand; PAM type: NNNNGHTT; PAM sequence: GATGGTTT
ttttggcctcagtggactct

SEQ ID NO: 38976 - DNA, 20 bp, Artificial Sequence
  Description of Artificial Sequence: Synthetic oligonucleotide
  Target: LAMA2; (-) strand; PAM type: NNNNGHTT; PAM sequence: TGCTGATT
tcaattgttcagcttgaaat

SEQ ID NO: 38977 - DNA, 20 bp, Artificial Sequence
  Description of Artificial Sequence: Synthetic oligonucleotide
  Target: LAMA2; (-) strand; PAM type: NNNNGHTT; PAM sequence: TTCAGCTT
ttctaggtaaaaatcaattg

SEQ ID NO: 38978 - DNA, 20 bp, Artificial Sequence
  Description of Artificial Sequence: Synthetic oligonucleotide
  Target: LAMA2; (-) strand; PAM type: NNNNGHTT; PAM sequence: AGCTGATT
atatgtttaatggaaattgt

SEQ ID NO: 38979 - DNA, 20 bp, Artificial Sequence
  Description of Artificial Sequence: Synthetic oligonucleotide
  Target: LAMA2; (-) strand; PAM type: NNNNGHTT; PAM sequence: ATATGTTT
agtcatagagcactaataac

SEQ ID NO: 38980 - DNA, 20 bp, Artificial Sequence
  Description of Artificial Sequence: Synthetic oligonucleotide
  Target: LAMA2; (-) strand; PAM type: NNNNGHTT; PAM sequence: TAATGTTT
aagatgattgaaattcattt

SEQ ID NO: 38981 - DNA, 20 bp, Artificial Sequence
  Description of Artificial Sequence: Synthetic oligonucleotide
  Target: LAMA2; (-) strand; PAM type: NNNNGHTT; PAM sequence: AGATGATT
gcatatgcatacttacaaaa

SEQ ID NO: 38982 - DNA, 20 bp, Artificial Sequence
  Description of Artificial Sequence: Synthetic oligonucleotide
  Target: LAMA2; (-) strand; PAM type: NNNNGHTT; PAM sequence: AGTAGTTT
atctagcttataaacaacac

SEQ ID NO: 38983 - DNA, 20 bp, Artificial Sequence
  Description of Artificial Sequence: Synthetic oligonucleotide
  Target: LAMA2; (-) strand; PAM type: NNNNGHTT; PAM sequence: TCTAGCTT
cattgaaagttaatttaata

SEQ ID NO: 38984 - DNA, 20 bp, Artificial Sequence
  Description of Artificial Sequence: Synthetic oligonucleotide
  Target: LAMA2; (-) strand; PAM type: NNNNGHTT; PAM sequence: CAGAGTTT
tctgagaaagaaatgagcat

SEQ ID NO: 38985 - DNA, 20 bp, Artificial Sequence
  Description of Artificial Sequence: Synthetic oligonucleotide
  Target: LAMA2; (-) strand; PAM type: NNNNGHTT; PAM sequence: GTAAGTTT
atgctgagcttattcatggg

SEQ ID NO: 38986 - DNA, 20 bp, Artificial Sequence
  Description of Artificial Sequence: Synthetic oligonucleotide
  Target: LAMA2; (-) strand; PAM type: NNNNGHTT; PAM sequence: CTGAGCTT
tgtacttgcagaaatggatg

SEQ ID NO: 38987 - DNA, 20 bp, Artificial Sequence
  Description of Artificial Sequence: Synthetic oligonucleotide
  Target: LAMA2; (-) strand; PAM type: NNNNGHTT; PAM sequence: CTGTGTTT
tttcctgaaaaaattcatgt

SEQ ID NO: 38988 - DNA, 20 bp, Artificial Sequence
  Description of Artificial Sequence: Synthetic oligonucleotide
  Target: LAMA2; (-) strand; PAM type: NNNNGHTT; PAM sequence: TTAGGTTT
tcctcatagttttaaatatc

SEQ ID NO: 38989 - DNA, 20 bp, Artificial Sequence
  Description of Artificial Sequence: Synthetic oligonucleotide
  Target: LAMA2; (-) strand; PAM type: NNNNGHTT; PAM sequence: CATAGTTT
tacaaattcttagaaatcct

SEQ ID NO: 38990 - DNA, 20 bp, Artificial Sequence
  Description of Artificial Sequence: Synthetic oligonucleotide
  Target: LAMA2; (-) strand; PAM type: NNNNGHTT; PAM sequence: ATGTGTTT
gtgtacatgcatgcacatgt

SEQ ID NO: 38991 - DNA, 20 bp, Artificial Sequence
  Description of Artificial Sequence: Synthetic oligonucleotide
  Target: LAMA2; (-) strand; PAM type: NNNNGHTT; PAM sequence: CCAAGATT
ttgagaggtttacgacttgc

SEQ ID NO: 38992 - DNA, 20 bp, Artificial Sequence
  Description of Artificial Sequence: Synthetic oligonucleotide
  Target: LAMA2; (-) strand; PAM type: NNNNGHTT; PAM sequence: AGAGGTTT
tcccttcattttactttttg

SEQ ID NO: 38993 - DNA, 20 bp, Artificial Sequence
  Description of Artificial Sequence: Synthetic oligonucleotide
  Target: LAMA2; (-) strand; PAM type: NNNNGHTT; PAM sequence: GTTTGTTT
aagtgttctttcttgttgtt

SEQ ID NO: 38994 - DNA, 20 bp, Artificial Sequence
  Description of Artificial Sequence: Synthetic oligonucleotide
  Target: LAMA2; (-) strand; PAM type: NNNNGHTT; PAM sequence: TGTTGTTT
agtcaagtgttctttcttgt

SEQ ID NO: 38995 - DNA, 20 bp, Artificial Sequence
  Description of Artificial Sequence: Synthetic oligonucleotide
  Target: LAMA2; (-) strand; PAM type: NNNNGHTT; PAM sequence: AGCTGTTT
tttttggttggggtgtgctt

SEQ ID NO: 38996 - DNA, 20 bp, Artificial Sequence
  Description of Artificial Sequence: Synthetic oligonucleotide
  Target: LAMA2; (-) strand; PAM type: NNNNGHTT; PAM sequence: GTGTGCTT
aaacaacatttttggttggg

SEQ ID NO: 38997 - DNA, 20 bp, Artificial Sequence
  Description of Artificial Sequence: Synthetic oligonucleotide
  Target: LAMA2; (-) strand; PAM type: NNNNGHTT; PAM sequence: CCAAGATT
gaggcagagcttgcagtgag

SEQ ID NO: 38998 - DNA, 20 bp, Artificial Sequence
  Description of Artificial Sequence: Synthetic oligonucleotide
  Target: LAMA2; (-) strand; PAM type: NNNNGHTT; PAM sequence: CAGAGCTT
aatggcttgaacccgggagg

SEQ ID NO: 38999 - DNA, 20 bp, Artificial Sequence
  Description of Artificial Sequence: Synthetic oligonucleotide
  Target: LAMA2; (-) strand; PAM type: NNNNGHTT; PAM sequence: AATGGCTT
tagtccagctgaggcaggag

SEQ ID NO: 39000 - DNA, 20 bp, Artificial Sequence
  Description of Artificial Sequence: Synthetic oligonucleotide
  Target: LAMA2; (-) strand; PAM type: NNNNGHTT; PAM sequence: TGTTGATT
aatcacttttgagtaaaaat

SEQ ID NO: 39001 - DNA, 20 bp, Artificial Sequence
  Description of Artificial Sequence: Synthetic oligonucleotide
  Target: LAMA2; (-) strand; PAM type: NNNNGHTT; PAM sequence: GACAGATT
cacattaaaagactatagct

SEQ ID NO: 39002 - DNA, 20 bp, Artificial Sequence
  Description of Artificial Sequence: Synthetic oligonucleotide
  Target: LAMA2; (-) strand; PAM type: NNNNGHTT; PAM sequence: AAGAGTTT
taattaggcgcattctgggt

SEQ ID NO: 39003 - DNA, 20 bp, Artificial Sequence
  Description of Artificial Sequence: Synthetic oligonucleotide
  Target: LAMA2; (-) strand; PAM type: NNNNGHTT; PAM sequence: TTTAGCTT
gttagaattatctcaaagtc

SEQ ID NO: 39004 - DNA, 20 bp, Artificial Sequence
  Description of Artificial Sequence: Synthetic oligonucleotide
  Target: LAMA2; (-) strand; PAM type: NNNNGHTT; PAM sequence: CACAGTTT
tgtggattaacagtaggaag

SEQ ID NO: 39005 - DNA, 20 bp, Artificial Sequence
  Description of Artificial Sequence: Synthetic oligonucleotide
  Target: LAMA2; (-) strand; PAM type: NNNNGHTT; PAM sequence: TGTGGATT
ttgggaggataagcatttca

SEQ ID NO: 39006 - DNA, 20 bp, Artificial Sequence
  Description of Artificial Sequence: Synthetic oligonucleotide
  Target: LAMA2; (-) strand; PAM type: NNNNGHTT; PAM sequence: TAGTGCTT
agtctgcttttattaaatag

SEQ ID NO: 39007 - DNA, 20 bp, Artificial Sequence
  Description of Artificial Sequence: Synthetic oligonucleotide
  Target: LAMA2; (-) strand; PAM type: NNNNGHTT; PAM sequence: GTCTGCTT
gtttggcctagaatatagta

SEQ ID NO: 39008 - DNA, 20 bp, Artificial Sequence
  Description of Artificial Sequence: Synthetic oligonucleotide
  Target: LAMA2; (-) strand; PAM type: NNNNGHTT; PAM sequence: CAGTGTTT
aggtgaaataataccaaata

SEQ ID NO: 39009 - DNA, 20 bp, Artificial Sequence
  Description of Artificial Sequence: Synthetic oligonucleotide
  Target: LAMA2; (-) strand; PAM type: NNNNGHTT; PAM sequence: GAGAGTTT
gatgacaaaattgaggcaca

SEQ ID NO: 39010 - DNA, 20 bp, Artificial Sequence
  Description of Artificial Sequence: Synthetic oligonucleotide
  Target: LAMA2; (-) strand; PAM type: NNNNGHTT; PAM sequence: GGTGGTTT
tcatatccagtcacagttta

SEQ ID NO: 39011 - DNA, 20 bp, Artificial Sequence
  Description of Artificial Sequence: Synthetic oligonucleotide
  Target: LAMA2; (-) strand; PAM type: NNNNGHTT; PAM sequence: CACAGTTT
ttgggttcatcatatccagt

SEQ ID NO: 39012 - DNA, 20 bp, Artificial Sequence
  Description of Artificial Sequence: Synthetic oligonucleotide
  Target: LAMA2; (-) strand; PAM type: NNNNGHTT; PAM sequence: CTTAGATT
caggttaataacaatcagct

SEQ ID NO: 39013 - DNA, 20 bp, Artificial Sequence
  Description of Artificial Sequence: Synthetic oligonucleotide
  Target: LAMA2; (-) strand; PAM type: NNNNGHTT; PAM sequence: CATGGATT
ccgtagagatttggaaagca

SEQ ID NO: 39014 - DNA, 20 bp, Artificial Sequence
  Description of Artificial Sequence: Synthetic oligonucleotide
  Target: LAMA2; (-) strand; PAM type: NNNNGHTT; PAM sequence: TAGAGATT
gaagtcttcattgtagaccg

SEQ ID NO: 39015 - DNA, 20 bp, Artificial Sequence
  Description of Artificial Sequence: Synthetic oligonucleotide
  Target: LAMA2; (-) strand; PAM type: NNNNGHTT; PAM sequence: TACTGCTT
gacttatccaatgaattaat

SEQ ID NO: 39016 - DNA, 20 bp, Artificial Sequence
  Description of Artificial Sequence: Synthetic oligonucleotide
  Target: LAMA2; (-) strand; PAM type: NNNNGHTT; PAM sequence: TTGAGCTT
ggtgcagttcgcaatagggt

SEQ ID NO: 39017 - DNA, 20 bp, Artificial Sequence
  Description of Artificial Sequence: Synthetic oligonucleotide
  Target: LAMA2; (-) strand; PAM type: NNNNGHTT; PAM sequence: TAGGGTTT
ctcgcaggtgcagttcgcaa

SEQ ID NO: 39018 - DNA, 20 bp, Artificial Sequence
  Description of Artificial Sequence: Synthetic oligonucleotide
  Target: LAMA2; (-) strand; PAM type: NNNNGHTT; PAM sequence: AGGAGTTT
tttttccacagatgcagggg

SEQ ID NO: 39019 - DNA, 20 bp, Artificial Sequence
  Description of Artificial Sequence: Synthetic oligonucleotide
  Target: LAMA2; (-) strand; PAM type: NNNNGHTT; PAM sequence: TTCAGTTT
tccttggttgttaaagaatc

SEQ ID NO: 39020 - DNA, 20 bp, Artificial Sequence
  Description of Artificial Sequence: Synthetic oligonucleotide
  Target: LAMA2; (-) strand; PAM type: NNNNGHTT; PAM sequence: ACAGGTTT
cctatagtaattattttcca

SEQ ID NO: 39021 - DNA, 20 bp, Artificial Sequence
  Description of Artificial Sequence: Synthetic oligonucleotide
  Target: LAMA2; (-) strand; PAM type: NNNNGHTT; PAM sequence: ATAGGCTT
tgtgtcatgttatgactatc

SEQ ID NO: 39022 - DNA, 20 bp, Artificial Sequence
  Description of Artificial Sequence: Synthetic oligonucleotide
  Target: LAMA2; (-) strand; PAM type: NNNNGHTT; PAM sequence: GCAGGTTT
cttcgcatatataccaaagt

SEQ ID NO: 39023 - DNA, 20 bp, Artificial Sequence
  Description of Artificial Sequence: Synthetic oligonucleotide
  Target: LAMA2; (-) strand; PAM type: NNNNGHTT; PAM sequence: ATGAGTTT
atgcaagttagtcgtgaaca

SEQ ID NO: 39024 - DNA, 20 bp, Artificial Sequence
  Description of Artificial Sequence: Synthetic oligonucleotide
  Target: LAMA2; (-) strand; PAM type: NNNNGHTT; PAM sequence: TTCTGCTT
cgagtggccagatgcaatac

SEQ ID NO: 39025 - DNA, 20 bp, Artificial Sequence
  Description of Artificial Sequence: Synthetic oligonucleotide
  Target: LAMA2; (-) strand; PAM type: NNNNGHTT; PAM sequence: GCTGGATT
tgcaatgggcagccagctct

SEQ ID NO: 39026 - DNA, 20 bp, Artificial Sequence
  Description of Artificial Sequence: Synthetic oligonucleotide
  Target: LAMA2; (-) strand; PAM type: NNNNGHTT; PAM sequence: TAGGGTTT
cagacttgagggtaaatcca

SEQ ID NO: 39027 - DNA, 20 bp, Artificial Sequence
  Description of Artificial Sequence: Synthetic oligonucleotide
  Target: LAMA2; (-) strand; PAM type: NNNNGHTT; PAM sequence: TAATGTTT
tccaagcaaaattatctccc

SEQ ID NO: 39028 - DNA, 20 bp, Artificial Sequence
  Description of Artificial Sequence: Synthetic oligonucleotide
  Target: LAMA2; (-) strand; PAM type: NNNNGHTT; PAM sequence: TAATGCTT
ggcactgatggattgtgttt

SEQ ID NO: 39029 - DNA, 20 bp, Artificial Sequence
  Description of Artificial Sequence: Synthetic oligonucleotide
  Target: LAMA2; (-) strand; PAM type: NNNNGHTT; PAM sequence: TTGTGTTT
atccctttggcactgatgga

SEQ ID NO: 39030 - DNA, 20 bp, Artificial Sequence
  Description of Artificial Sequence: Synthetic oligonucleotide
  Target: LAMA2; (-) strand; PAM type: NNNNGHTT; PAM sequence: GATGGATT
aacccaatccctttggcact

SEQ ID NO: 39031 - DNA, 20 bp, Artificial Sequence
  Description of Artificial Sequence: Synthetic oligonucleotide
  Target: LAMA2; (-) strand; PAM type: NNNNGHTT; PAM sequence: AATTGCTT
aatatttactaataattatt

SEQ ID NO: 39032 - DNA, 20 bp, Artificial Sequence
  Description of Artificial Sequence: Synthetic oligonucleotide
  Target: LAMA2; (-) strand; PAM type: NNNNGHTT; PAM sequence: CTAGGATT
ataaccctctcacaaaactt

SEQ ID NO: 39033 - DNA, 20 bp, Artificial Sequence
  Description of Artificial Sequence: Synthetic oligonucleotide
  Target: LAMA2; (-) strand; PAM type: NNNNGHTT; PAM sequence: AATTGTTT
taaaattgttttaaatgtaa

SEQ ID NO: 39034 - DNA, 20 bp, Artificial Sequence
  Description of Artificial Sequence: Synthetic oligonucleotide
  Target: LAMA2; (-) strand; PAM type: NNNNGHTT; PAM sequence: AATTGTTT
tctagttgttttaaatgtaa

SEQ ID NO: 39035 - DNA, 20 bp, Artificial Sequence
  Description of Artificial Sequence: Synthetic oligonucleotide
  Target: LAMA2; (-) strand; PAM type: NNNNGHTT; PAM sequence: AGTTGTTT
ctaaaccatgataattttct

SEQ ID NO: 39036 - DNA, 20 bp, Artificial Sequence
  Description of Artificial Sequence: Synthetic oligonucleotide
  Target: LAMA2; (-) strand; PAM type: NNNNGHTT; PAM sequence: AATGGATT
atttcaggttgttagatgaa

SEQ ID NO: 39037 - DNA, 20 bp, Artificial Sequence
  Description of Artificial Sequence: Synthetic oligonucleotide
  Target: LAMA2; (-) strand; PAM type: NNNNGHTT; PAM sequence: TAGTGATT
aggtcattaagtgtcttgtt

SEQ ID NO: 39038 - DNA, 20 bp, Artificial Sequence
  Description of Artificial Sequence: Synthetic oligonucleotide
  Target: LAMA2; (-) strand; PAM type: NNNNGHTT; PAM sequence: TCTTGTTT
tttccctaggtcattaagtg

SEQ ID NO: 39039 - DNA, 20 bp, Artificial Sequence
  Description of Artificial Sequence: Synthetic oligonucleotide
  Target: LAMA2; (-) strand; PAM type: NNNNGHTT; PAM sequence: GATAGTTT
tataaaatatttttaaaaag

SEQ ID NO: 39040 - DNA, 20 bp, Artificial Sequence
  Description of Artificial Sequence: Synthetic oligonucleotide
  Target: LAMA2; (-) strand; PAM type: NNNNGHTT; PAM sequence: TAATGTTT
tctagctcacattataacag

SEQ ID NO: 39041 - DNA, 20 bp, Artificial Sequence
  Description of Artificial Sequence: Synthetic oligonucleotide
  Target: LAMA2; (-) strand; PAM type: NNNNGHTT; PAM sequence: CAGAGTTT
caaatattcaattcatatct

SEQ ID NO: 39042 - DNA, 20 bp, Artificial Sequence
  Description of Artificial Sequence: Synthetic oligonucleotide
  Target: LAMA2; (-) strand; PAM type: NNNNGHTT; PAM sequence: TCAGGATT
tggaaattaaaatctcgtct

SEQ ID NO: 39043 - DNA, 20 bp, Artificial Sequence
  Description of Artificial Sequence: Synthetic oligonucleotide
  Target: LAMA2; (-) strand; PAM type: NNNNGHTT; PAM sequence: CTAAGCTT
tcaccaaggtaaaactatca

SEQ ID NO: 39044 - DNA, 20 bp, Artificial Sequence
  Description of Artificial Sequence: Synthetic oligonucleotide
  Target: LAMA2; (-) strand; PAM type: NNNNGHTT; PAM sequence: CAGGGATT
tgatctataagatttatgac

SEQ ID NO: 39045 - DNA, 20 bp, Artificial Sequence
  Description of Artificial Sequence: Synthetic oligonucleotide
  Target: LAMA2; (-) strand; PAM type: NNNNGHTT; PAM sequence: ATAAGATT
agccaaaatgcttgtgatct

SEQ ID NO: 39046 - DNA, 20 bp, Artificial Sequence
  Description of Artificial Sequence: Synthetic oligonucleotide
  Target: LAMA2; (-) strand; PAM type: NNNNGHTT; PAM sequence: AAATGCTT
atctaagaaatttggagcca

SEQ ID NO: 39047 - DNA, 20 bp, Artificial Sequence
  Description of Artificial Sequence: Synthetic oligonucleotide
  Target: LAMA2; (-) strand; PAM type: NNNNGHTT; PAM sequence: ATTTGATT
ctatctctatcttcttacat

SEQ ID NO: 39048 - DNA, 20 bp, Artificial Sequence
  Description of Artificial Sequence: Synthetic oligonucleotide
  Target: LAMA2; (-) strand; PAM type: NNNNGHTT; PAM sequence: ATATGCTT
atatgtataatttaaatatt

SEQ ID NO: 39049 - DNA, 20 bp, Artificial Sequence
  Description of Artificial Sequence: Synthetic oligonucleotide
  Target: LAMA2; (-) strand; PAM type: NNNNGHTT; PAM sequence: ATTTGCTT
ttcgaaatagttacattgtt

SEQ ID NO: 39050 - DNA, 20 bp, Artificial Sequence
  Description of Artificial Sequence: Synthetic oligonucleotide
  Target: LAMA2; (-) strand; PAM type: NNNNGHTT; PAM sequence: CAGAGATT
acatcctaagtattcaaagg

SEQ ID NO: 39051 - DNA, 20 bp, Artificial Sequence
  Description of Artificial Sequence: Synthetic oligonucleotide
  Target: LAMA2; (-) strand; PAM type: NNNNGHTT; PAM sequence: TTGAGTTT
gcccaaaggtcaactcaaat

SEQ ID NO: 39052 - DNA, 20 bp, Artificial Sequence
  Description of Artificial Sequence: Synthetic oligonucleotide
  Target: LAMA2; (-) strand; PAM type: NNNNGHTT; PAM sequence: GATTGTTT
ctagagaatatggctgaatt

SEQ ID NO: 39053 - DNA, 20 bp, Artificial Sequence
  Description of Artificial Sequence: Synthetic oligonucleotide
  Target: LAMA2; (-) strand; PAM type: NNNNGHTT; PAM sequence: AATTGATT
ttttctagagaatatggctg

SEQ ID NO: 39054 - DNA, 20 bp, Artificial Sequence
  Description of Artificial Sequence: Synthetic oligonucleotide
  Target: LAMA2; (-) strand; PAM type: NNNNGHTT; PAM sequence: TTTAGTTT
ggcacttaatttctctgaac

SEQ ID NO: 39055 - DNA, 20 bp, Artificial Sequence
  Description of Artificial Sequence: Synthetic oligonucleotide
  Target: LAMA2; (-) strand; PAM type: NNNNGHTT; PAM sequence: AATTGTTT
cttcttttcaatgtttctgt

SEQ ID NO: 39056 - DNA, 20 bp, Artificial Sequence
  Description of Artificial Sequence: Synthetic oligonucleotide
  Target: LAMA2; (-) strand; PAM type: NNNNGHTT; PAM sequence: CAATGTTT
gatttttttttgcttctttt

SEQ ID NO: 39057 - DNA, 20 bp, Artificial Sequence
  Description of Artificial Sequence: Synthetic oligonucleotide
  Target: LAMA2; (-) strand; PAM type: NNNNGHTT; PAM sequence: TTTTGCTT
attaaattctattgattttt

SEQ ID NO: 39058 - DNA, 20 bp, Artificial Sequence
  Description of Artificial Sequence: Synthetic oligonucleotide
  Target: LAMA2; (-) strand; PAM type: NNNNGHTT; PAM sequence: TATTGATT
gtttgtctgacattaaattc

SEQ ID NO: 39059 - DNA, 20 bp, Artificial Sequence
  Description of Artificial Sequence: Synthetic oligonucleotide
  Target: LAMA2; (-) strand; PAM type: NNNNGHTT; PAM sequence: TACAGTTT
tgatttttacagtgaacatt

SEQ ID NO: 39060 - DNA, 20 bp, Artificial Sequence
  Description of Artificial Sequence: Synthetic oligonucleotide
  Target: LAMA2; (-) strand; PAM type: NNNNGHTT; PAM sequence: TACTGATT
cttgccaaacagtgaagatt

SEQ ID NO: 39061 - DNA, 20 bp, Artificial Sequence
  Description of Artificial Sequence: Synthetic oligonucleotide
  Target: LAMA2; (-) strand; PAM type: NNNNGHTT; PAM sequence: TGAAGATT
acataactcttgccaaacag

SEQ ID NO: 39062 - DNA, 20 bp, Artificial Sequence
  Description of Artificial Sequence: Synthetic oligonucleotide
  Target: LAMA2; (-) strand; PAM type: NNNNGHTT; PAM sequence: TGCAGTTT
aatagttaaagaattaaatc

SEQ ID NO: 39063 - DNA, 20 bp, Artificial Sequence
  Description of Artificial Sequence: Synthetic oligonucleotide
  Target: LAMA2; (-) strand; PAM type: NNNNGHTT; PAM sequence: TGTTGATT
tttttaaacaaaataagata

SEQ ID NO: 39064 - DNA, 20 bp, Artificial Sequence
  Description of Artificial Sequence: Synthetic oligonucleotide
  Target: LAMA2; (-) strand; PAM type: NNNNGHTT; PAM sequence: GATTGATT
tctgcaaaatggaataatat

SEQ ID NO: 39065 - DNA, 20 bp, Artificial Sequence
  Description of Artificial Sequence: Synthetic oligonucleotide
  Target: LAMA2; (-) strand; PAM type: NNNNGHTT; PAM sequence: ATATGATT
ccattctgcaaaatggaata

SEQ ID NO: 39066 - DNA, 20 bp, Artificial Sequence
  Description of Artificial Sequence: Synthetic oligonucleotide
  Target: LAMA2; (-) strand; PAM type: NNNNGHTT; PAM sequence: ACCTGTTT
tgaacgatatatttctctaa

SEQ ID NO: 39067 - DNA, 20 bp, Artificial Sequence
  Description of Artificial Sequence: Synthetic oligonucleotide
  Target: LAMA2; (-) strand; PAM type: NNNNGHTT; PAM sequence: ACTTGATT
caattgcatttcttaattag

SEQ ID NO: 39068 - DNA, 20 bp, Artificial Sequence
  Description of Artificial Sequence: Synthetic oligonucleotide
  Target: LAMA2; (-) strand; PAM type: NNNNGHTT; PAM sequence: ATCTGATT
ttacctttaagtactatgaa

SEQ ID NO: 39069 - DNA, 20 bp, Artificial Sequence
  Description of Artificial Sequence: Synthetic oligonucleotide
  Target: LAMA2; (-) strand; PAM type: NNNNGHTT; PAM sequence: TGAAGTTT
gtgttagcgtcataaatttc

SEQ ID NO: 39070 - DNA, 20 bp, Artificial Sequence
  Description of Artificial Sequence: Synthetic oligonucleotide
  Target: LAMA2; (-) strand; PAM type: NNNNGHTT; PAM sequence: TCATGATT
aaagaaaaaattcatttact

SEQ ID NO: 39071 - DNA, 20 bp, Artificial Sequence
  Description of Artificial Sequence: Synthetic oligonucleotide
  Target: LAMA2; (-) strand; PAM type: NNNNGHTT; PAM sequence: TTGGGATT
aaaatataatgaattgcttc

SEQ ID NO: 39072 - DNA, 20 bp, Artificial Sequence
  Description of Artificial Sequence: Synthetic oligonucleotide
  Target: LAMA2; (-) strand; PAM type: NNNNGHTT; PAM sequence: AATTGCTT
atttgaaataaaatataatg

SEQ ID NO: 39073 - DNA, 20 bp, Artificial Sequence
  Description of Artificial Sequence: Synthetic oligonucleotide
  Target: LAMA2; (-) strand; PAM type: NNNNGHTT; PAM sequence: TCCTGATT
ctcaatagaagctcaacaat

SEQ ID NO: 39074 - DNA, 20 bp, Artificial Sequence
  Description of Artificial Sequence: Synthetic oligonucleotide
  Target: LAMA2; (-) strand; PAM type: NNNNGHTT; PAM sequence: AAATGATT
aaagggaacaatcaacaggt

SEQ ID NO: 39075 - DNA, 20 bp, Artificial Sequence
  Description of Artificial Sequence: Synthetic oligonucleotide
  Target: LAMA2; (-) strand; PAM type: NNNNGHTT; PAM sequence: TGAGGTTT
ggtggatcaacatttggctt

SEQ ID NO: 39076 - DNA, 20 bp, Artificial Sequence
  Description of Artificial Sequence: Synthetic oligonucleotide
  Target: LAMA2; (-) strand; PAM type: NNNNGHTT; PAM sequence: TTTGGCTT
ttgataagggtggatcaaca

SEQ ID NO: 39077 - DNA, 20 bp, Artificial Sequence
  Description of Artificial Sequence: Synthetic oligonucleotide
  Target: LAMA2; (-) strand; PAM type: NNNNGHTT; PAM sequence: ATATGTTT
tgactatgtcaacaatctat

SEQ ID NO: 39078 - DNA, 20 bp, Artificial Sequence
  Description of Artificial Sequence: Synthetic oligonucleotide
  Target: LAMA2; (-) strand; PAM type: NNNNGHTT; PAM sequence: CCCGGATT
cagcagaaaatgttcttcat

SEQ ID NO: 39079 - DNA, 20 bp, Artificial Sequence
  Description of Artificial Sequence: Synthetic oligonucleotide
  Target: LAMA2; (-) strand; PAM type: NNNNGHTT; PAM sequence: CCAAGATT
atcattgacctcaagtgatt

SEQ ID NO: 39080 - DNA, 20 bp, Artificial Sequence
  Description of Artificial Sequence: Synthetic oligonucleotide
  Target: LAMA2; (-) strand; PAM type: NNNNGHTT; PAM sequence: AAGTGATT
gtgagatcatcattgacctc

SEQ ID NO: 39081 - DNA, 20 bp, Artificial Sequence
  Description of Artificial Sequence: Synthetic oligonucleotide
  Target: LAMA2; (-) strand; PAM type: NNNNGHTT; PAM sequence: TGAAGATT
attctttcaacaacataaac

SEQ ID NO: 39082 - DNA, 20 bp, Artificial Sequence
  Description of Artificial Sequence: Synthetic oligonucleotide
  Target: LAMA2; (-) strand; PAM type: NNNNGHTT; PAM sequence: TTGTGCTT
ctcataaaatatatctgtat

SEQ ID NO: 39083 - DNA, 20 bp, Artificial Sequence
  Description of Artificial Sequence: Synthetic oligonucleotide
  Target: LAMA2; (-) strand; PAM type: NNNNGHTT; PAM sequence: TTAAGTTT
ctggtaagaattaagtaagt

SEQ ID NO: 39084 - DNA, 20 bp, Artificial Sequence
  Description of Artificial Sequence: Synthetic oligonucleotide
  Target: LAMA2; (-) strand; PAM type: NNNNGHTT; PAM sequence: GTAAGTTT
aacctactggtaagaattaa

SEQ ID NO: 39085 - DNA, 20 bp, Artificial Sequence
  Description of Artificial Sequence: Synthetic oligonucleotide
  Target: LAMA2; (-) strand; PAM type: NNNNGHTT; PAM sequence: TTTAGATT
tttagtatgggatctaggac

SEQ ID NO: 39086 - DNA, 20 bp, Artificial Sequence
  Description of Artificial Sequence: Synthetic oligonucleotide
  Target: LAMA2; (-) strand; PAM type: NNNNGHTT; PAM sequence: CACAGTTT
tatgagctggttagggcagg

SEQ ID NO: 39087 - DNA, 20 bp, Artificial Sequence
  Description of Artificial Sequence: Synthetic oligonucleotide
  Target: LAMA2; (-) strand; PAM type: NNNNGHTT; PAM sequence: TTCAGATT
aagctattcataaaatagat

SEQ ID NO: 39088 - DNA, 20 bp, Artificial Sequence
  Description of Artificial Sequence: Synthetic oligonucleotide
  Target: LAMA2; (-) strand; PAM type: NNNNGHTT; PAM sequence: AATAGATT
cactttaaagctattcataa

SEQ ID NO: 39089 - DNA, 20 bp, Artificial Sequence
  Description of Artificial Sequence: Synthetic oligonucleotide
  Target: LAMA2; (-) strand; PAM type: NNNNGHTT; PAM sequence: CTAGGATT
tgccttggcctcccaaagtg

SEQ ID NO: 39090 - DNA, 20 bp, Artificial Sequence
  Description of Artificial Sequence: Synthetic oligonucleotide
  Target: LAMA2; (-) strand; PAM type: NNNNGHTT; PAM sequence: CTGGGATT
tgtctcagcctcctgagtag

SEQ ID NO: 39091 - DNA, 20 bp, Artificial Sequence
  Description of Artificial Sequence: Synthetic oligonucleotide
  Target: LAMA2; (-) strand; PAM type: NNNNGHTT; PAM sequence: AAGCGATT
aacccctgcctactgggttc

SEQ ID NO: 39092 - DNA, 20 bp, Artificial Sequence
  Description of Artificial Sequence: Synthetic oligonucleotide
  Target: LAMA2; (-) strand; PAM type: NNNNGHTT; PAM sequence: CAAGGCTT
ctcttgtcaatggtggttga

SEQ ID NO: 39093 - DNA, 20 bp, Artificial Sequence
  Description of Artificial Sequence: Synthetic oligonucleotide
  Target: LAMA2; (-) strand; PAM type: NNNNGHTT; PAM sequence: ATCAGTTT
attgttttttataatcctaa

SEQ ID NO: 39094 - DNA, 20 bp, Artificial Sequence
  Description of Artificial Sequence: Synthetic oligonucleotide
  Target: LAMA2; (-) strand; PAM type: NNNNGHTT; PAM sequence: AATTGTTT
gattgaaagaaaaccatacc

SEQ ID NO: 39095 - DNA, 20 bp, Artificial Sequence
  Description of Artificial Sequence: Synthetic oligonucleotide
  Target: LAMA2; (-) strand; PAM type: NNNNGHTT; PAM sequence: CACTGATT
ttcccacctctgtgggacta

SEQ ID NO: 39096 - DNA, 20 bp, Artificial Sequence
  Description of Artificial Sequence: Synthetic oligonucleotide
  Target: LAMA2; (-) strand; PAM type: NNNNGHTT; PAM sequence: CTGGGTTT
actgactccaaccagaagca

SEQ ID NO: 39097 - DNA, 20 bp, Artificial Sequence
  Description of Artificial Sequence: Synthetic oligonucleotide
  Target: LAMA2; (-) strand; PAM type: NNNNGHTT; PAM sequence: TACTGTTT
cacatccggtgatttgctgt

SEQ ID NO: 39098 - DNA, 20 bp, Artificial Sequence
  Description of Artificial Sequence: Synthetic oligonucleotide
  Target: LAMA2; (-) strand; PAM type: NNNNGHTT; PAM sequence: CGGTGATT
gatttcctctcatccacatc

SEQ ID NO: 39099 - DNA, 20 bp, Artificial Sequence
  Description of Artificial Sequence: Synthetic oligonucleotide
  Target: LAMA2; (-) strand; PAM type: NNNNGHTT; PAM sequence: AAAGGATT
ggttaaaataaaataaaaaa

SEQ ID NO: 39100 - DNA, 20 bp, Artificial Sequence
  Description of Artificial Sequence: Synthetic oligonucleotide
  Target: LAMA2; (-) strand; PAM type: NNNNGHTT; PAM sequence: TTGTGATT
gggtgattttcttgacggga

SEQ ID NO: 39101 - DNA, 20 bp, Artificial Sequence
  Description of Artificial Sequence: Synthetic oligonucleotide
  Target: LAMA2; (-) strand; PAM type: NNNNGHTT; PAM sequence: ACGGGATT
cactatgggtgattttcttg

SEQ ID NO: 39102 - DNA, 20 bp, Artificial Sequence
  Description of Artificial Sequence: Synthetic oligonucleotide
  Target: LAMA2; (-) strand; PAM type: NNNNGHTT; PAM sequence: GGGTGATT
acccaaagacagttcactat

SEQ ID NO: 39103 - DNA, 20 bp, Artificial Sequence
  Description of Artificial Sequence: Synthetic oligonucleotide
  Target: LAMA2; (-) strand; PAM type: NNNNGHTT; PAM sequence: CAAAGATT
tttataaatattatctggat

SEQ ID NO: 39104 - DNA, 20 bp, Artificial Sequence
  Description of Artificial Sequence: Synthetic oligonucleotide
  Target: LAMA2; (-) strand; PAM type: NNNNGHTT; PAM sequence: GGATGCTT
aggagataaaggctggtctg

SEQ ID NO: 39105 - DNA, 20 bp, Artificial Sequence
  Description of Artificial Sequence: Synthetic oligonucleotide
  Target: LAMA2; (-) strand; PAM type: NNNNGHTT; PAM sequence: TAAAGATT
cttaactcagggtagttctg

SEQ ID NO: 39106 - DNA, 20 bp, Artificial Sequence
  Description of Artificial Sequence: Synthetic oligonucleotide
  Target: LAMA2; (-) strand; PAM type: NNNNGHTT; PAM sequence: TCTGGCTT
ctatttctgaatagtatttc

SEQ ID NO: 39107 - DNA, 20 bp, Artificial Sequence
  Description of Artificial Sequence: Synthetic oligonucleotide
  Target: LAMA2; (-) strand; PAM type: NNNNGHTT; PAM sequence: TCCTGATT
aacaaattaaacattccaag

SEQ ID NO: 39108 - DNA, 20 bp, Artificial Sequence
  Description of Artificial Sequence: Synthetic oligonucleotide
  Target: LAMA2; (-) strand; PAM type: NNNNGHTT; PAM sequence: ACTTGCTT
gacagggcaattcaatagag

SEQ ID NO: 39109 - DNA, 20 bp, Artificial Sequence
  Description of Artificial Sequence: Synthetic oligonucleotide
  Target: LAMA2; (-) strand; PAM type: NNNNGHTT; PAM sequence: ATTTGTTT
attatgttttccctaagtag

SEQ ID NO: 39110 - DNA, 20 bp, Artificial Sequence
  Description of Artificial Sequence: Synthetic oligonucleotide
  Target: LAMA2; (-) strand; PAM type: NNNNGHTT; PAM sequence: AGTAGATT
ctcttattatgttttcccta

SEQ ID NO: 39111 - DNA, 20 bp, Artificial Sequence
  Description of Artificial Sequence: Synthetic oligonucleotide
  Target: LAMA2; (-) strand; PAM type: NNNNGHTT; PAM sequence: TTATGTTT
ctcaattaatctttctctta

SEQ ID NO: 39112 - DNA, 20 bp, Artificial Sequence
  Description of Artificial Sequence: Synthetic oligonucleotide
  Target: LAMA2; (-) strand; PAM type: NNNNGHTT; PAM sequence: TACCGTTT
ttctgtaaggtctgttgcgc

SEQ ID NO: 39113 - DNA, 20 bp, Artificial Sequence
  Description of Artificial Sequence: Synthetic oligonucleotide
  Target: LAMA2; (-) strand; PAM type: NNNNGHTT; PAM sequence: CCAAGATT
ctcatacatgaacccctacc

SEQ ID NO: 39114 - DNA, 20 bp, Artificial Sequence
  Description of Artificial Sequence: Synthetic oligonucleotide
  Target: LAMA2; (-) strand; PAM type: NNNNGHTT; PAM sequence: CCATGCTT
agcaacatgtttcactccag

SEQ ID NO: 39115 - DNA, 20 bp, Artificial Sequence
  Description of Artificial Sequence: Synthetic oligonucleotide
  Target: LAMA2; (-) strand; PAM type: NNNNGHTT; PAM sequence: ACATGTTT
gctagctttagctttcagca

SEQ ID NO: 39116 - DNA, 20 bp, Artificial Sequence
  Description of Artificial Sequence: Synthetic oligonucleotide
  Target: LAMA2; (-) strand; PAM type: NNNNGHTT; PAM sequence: TTTAGCTT
cagagaactcaggtgctagc

SEQ ID NO: 39117 - DNA, 20 bp, Artificial Sequence
  Description of Artificial Sequence: Synthetic oligonucleotide
  Target: LAMA2; (-) strand; PAM type: NNNNGHTT; PAM sequence: GCTAGCTT
aaccaacagagaactcaggt

SEQ ID NO: 39118 - DNA, 20 bp, Artificial Sequence
  Description of Artificial Sequence: Synthetic oligonucleotide
  Target: LAMA2; (-) strand; PAM type: NNNNGHTT; PAM sequence: GCATGTTT
ttgccatctcataccctctg

SEQ ID NO: 39119 - DNA, 20 bp, Artificial Sequence
  Description of Artificial Sequence: Synthetic oligonucleotide
  Target: LAMA2; (-) strand; PAM type: NNNNGHTT; PAM sequence: GAAAGCTT
cacactgatggaatcctcag

SEQ ID NO: 39120 - DNA, 20 bp, Artificial Sequence
  Description of Artificial Sequence: Synthetic oligonucleotide
  Target: LAMA2; (-) strand; PAM type: NNNNGHTT; PAM sequence: ATGTGCTT
gcctgtgtgcaggctgcggc

SEQ ID NO: 39121 - DNA, 20 bp, Artificial Sequence
  Description of Artificial Sequence: Synthetic oligonucleotide
  Target: LAMA2; (-) strand; PAM type: NNNNGHTT; PAM sequence: CAGTGCTT
gtatgtggtagtggtggtgg

SEQ ID NO: 39122 - DNA, 20 bp, Artificial Sequence
  Description of Artificial Sequence: Synthetic oligonucleotide
  Target: LAMA2; (-) strand; PAM type: NNNNGHTT; PAM sequence: TAGTGATT
agcagcctggagaaatttgt

SEQ ID NO: 39123 - DNA, 20 bp, Artificial Sequence
  Description of Artificial Sequence: Synthetic oligonucleotide
  Target: LAMA2; (-) strand; PAM type: NNNNGHTT; PAM sequence: AGCTGCTT
agtaacaagtggaaatgtat

SEQ ID NO: 39124 - DNA, 20 bp, Artificial Sequence
  Description of Artificial Sequence: Synthetic oligonucleotide
  Target: LAMA2; (-) strand; PAM type: NNNNGHTT; PAM sequence: CAGAGATT
ggtcattctcaccccagaga

SEQ ID NO: 39125 - DNA, 20 bp, Artificial Sequence
  Description of Artificial Sequence: Synthetic oligonucleotide
  Target: LAMA2; (-) strand; PAM type: NNNNGHTT; PAM sequence: TGCGGTTT
atgcaaaggatgattgtatc

SEQ ID NO: 39126 - DNA, 20 bp, Artificial Sequence
  Description of Artificial Sequence: Synthetic oligonucleotide
  Target: LAMA2; (-) strand; PAM type: NNNNGHTT; PAM sequence: GGATGATT
tctccaaaggatgatgcaaa

SEQ ID NO: 39127 - DNA, 20 bp, Artificial Sequence
  Description of Artificial Sequence: Synthetic oligonucleotide
  Target: LAMA2; (-) strand; PAM type: NNNNGHTT; PAM sequence: ATTTGTTT
aaattacaaaaatataatgc

SEQ ID NO: 39128 - DNA, 20 bp, Artificial Sequence
  Description of Artificial Sequence: Synthetic oligonucleotide
  Target: LAMA2; (-) strand; PAM type: NNNNGHTT; PAM sequence: TGAAGATT
tcagatattctctgagtgaa

SEQ ID NO: 39129 - DNA, 20 bp, Artificial Sequence
  Description of Artificial Sequence: Synthetic oligonucleotide
  Target: LAMA2; (-) strand; PAM type: NNNNGHTT; PAM sequence: TTAAGATT
tgtaggttaatacttaacct

SEQ ID NO: 39130 - DNA, 20 bp, Artificial Sequence
  Description of Artificial Sequence: Synthetic oligonucleotide
  Target: LAMA2; (-) strand; PAM type: NNNNGHTT; PAM sequence: CAAAGATT
cacttgagcaatgctttcta

SEQ ID NO: 39131 - DNA, 20 bp, Artificial Sequence
  Description of Artificial Sequence: Synthetic oligonucleotide
  Target: LAMA2; (-) strand; PAM type: NNNNGHTT; PAM sequence: CAATGCTT
tgcatgactttccacttgag

SEQ ID NO: 39132 - DNA, 20 bp, Artificial Sequence
  Description of Artificial Sequence: Synthetic oligonucleotide
  Target: LAMA2; (-) strand; PAM type: NNNNGHTT; PAM sequence: TTTTGTTT
aatcatgataataaattaca

SEQ ID NO: 39133 - DNA, 20 bp, Artificial Sequence
  Description of Artificial Sequence: Synthetic oligonucleotide
  Target: LAMA2; (-) strand; PAM type: NNNNGHTT; PAM sequence: ACTGGTTT
aaatcaacaggaattaaaat

SEQ ID NO: 39134 - DNA, 20 bp, Artificial Sequence
  Description of Artificial Sequence: Synthetic oligonucleotide
  Target: LAMA2; (-) strand; PAM type: NNNNGHTT; PAM sequence: TCTTGTTT
caaattacataaaataatac

SEQ ID NO: 39135 - DNA, 20 bp, Artificial Sequence
  Description of Artificial Sequence: Synthetic oligonucleotide
  Target: LAMA2; (-) strand; PAM type: NNNNGHTT; PAM sequence: GGAAGTTT
tttggcaatgatgtcaaggg

SEQ ID NO: 39136 - DNA, 20 bp, Artificial Sequence
  Description of Artificial Sequence: Synthetic oligonucleotide
  Target: LAMA2; (-) strand; PAM type: NNNNGHTT; PAM sequence: TTTTGTTT
tgctgaaaccagagggaggt

SEQ ID NO: 39137 - DNA, 20 bp, Artificial Sequence
  Description of Artificial Sequence: Synthetic oligonucleotide
  Target: LAMA2; (-) strand; PAM type: NNNNGHTT; PAM sequence: GGAGGTTT
ttccagtgctgaaaccagag

SEQ ID NO: 39138 - DNA, 20 bp, Artificial Sequence
  Description of Artificial Sequence: Synthetic oligonucleotide
  Target: LAMA2; (-) strand; PAM type: NNNNGHTT; PAM sequence: TCCTGCTT
attctctctgggtgataggc

SEQ ID NO: 39139 - DNA, 20 bp, Artificial Sequence
  Description of Artificial Sequence: Synthetic oligonucleotide
  Target: LAMA2; (-) strand; PAM type: NNNNGHTT; PAM sequence: AGATGCTT
ttctttcattcctaatttac

SEQ ID NO: 39140 - DNA, 20 bp, Artificial Sequence
  Description of Artificial Sequence: Synthetic oligonucleotide
  Target: LAMA2; (-) strand; PAM type: NNNNGHTT; PAM sequence: GCTTGTTT
cttgattgcaaataaatgct

SEQ ID NO: 39141 - DNA, 20 bp, Artificial Sequence
  Description of Artificial Sequence: Synthetic oligonucleotide
  Target: LAMA2; (-) strand; PAM type: NNNNGHTT; PAM sequence: TGCTGCTT
gtttcttgattgcaaataaa

SEQ ID NO: 39142 - DNA, 20 bp, Artificial Sequence
  Description of Artificial Sequence: Synthetic oligonucleotide
  Target: LAMA2; (-) strand; PAM type: NNNNGHTT; PAM sequence: TCTTGATT
acaattaaagatatctagtt

SEQ ID NO: 39143 - DNA, 20 bp, Artificial Sequence
  Description of Artificial Sequence: Synthetic oligonucleotide
  Target: LAMA2; (-) strand; PAM type: NNNNGHTT; PAM sequence: TCTAGTTT
cacacacacaattaaagata

SEQ ID NO: 39144 - DNA, 20 bp, Artificial Sequence
  Description of Artificial Sequence: Synthetic oligonucleotide
  Target: LAMA2; (-) strand; PAM type: NNNNGHTT; PAM sequence: GGGGGTTT
aggttgcctgtagtgaactg

SEQ ID NO: 39145 - DNA, 20 bp, Artificial Sequence
  Description of Artificial Sequence: Synthetic oligonucleotide
  Target: LAMA2; (-) strand; PAM type: NNNNGHTT; PAM sequence: AGTGGATT
agattatgctcacctagata

SEQ ID NO: 39146 - DNA, 20 bp, Artificial Sequence
  Description of Artificial Sequence: Synthetic oligonucleotide
  Target: LAMA2; (-) strand; PAM type: NNNNGHTT; PAM sequence: CAGAGATT
gcaaagcaatataagtacat

SEQ ID NO: 39147 - DNA, 20 bp, Artificial Sequence
  Description of Artificial Sequence: Synthetic oligonucleotide
  Target: LAMA2; (-) strand; PAM type: NNNNGHTT; PAM sequence: TAGGGTTT
gatgtttgttaaataaaatg

SEQ ID NO: 39148 - DNA, 20 bp, Artificial Sequence
  Description of Artificial Sequence: Synthetic oligonucleotide
  Target: LAMA2; (-) strand; PAM type: NNNNGHTT; PAM sequence: AGATGTTT
gcacatggtagttgctaaac

SEQ ID NO: 39149 - DNA, 20 bp, Artificial Sequence
  Description of Artificial Sequence: Synthetic oligonucleotide
  Target: LAMA2; (-) strand; PAM type: NNNNGHTT; PAM sequence: TGGTGATT
ctgtcaggtatttctctcct

SEQ ID NO: 39150 - DNA, 20 bp, Artificial Sequence
  Description of Artificial Sequence: Synthetic oligonucleotide
  Target: LAMA2; (-) strand; PAM type: NNNNGHTT; PAM sequence: TACAGATT
catcttctgaatcagattaa

SEQ ID NO: 39151 - DNA, 20 bp, Artificial Sequence
  Description of Artificial Sequence: Synthetic oligonucleotide
  Target: LAMA2; (-) strand; PAM type: NNNNGHTT; PAM sequence: ATCAGATT
tgcatgttgccatcttctga

SEQ ID NO: 39152 - DNA, 20 bp, Artificial Sequence
  Description of Artificial Sequence: Synthetic oligonucleotide
  Target: LAMA2; (-) strand; PAM type: NNNNGHTT; PAM sequence: TTTGGCTT
agatctatctaaggtgttct

SEQ ID NO: 39153 - DNA, 20 bp, Artificial Sequence
  Description of Artificial Sequence: Synthetic oligonucleotide
  Target: LAMA2; (-) strand; PAM type: NNNNGHTT; PAM sequence: AAATGTTT
acaggcacatctcaaacaaa

SEQ ID NO: 39154 - DNA, 20 bp, Artificial Sequence
  Description of Artificial Sequence: Synthetic oligonucleotide
  Target: LAMA2; (-) strand; PAM type: NNNNGHTT; PAM sequence: ACAAGATT
cttacagaatggttttgatt

SEQ ID NO: 39155 - DNA, 20 bp, Artificial Sequence
  Description of Artificial Sequence: Synthetic oligonucleotide
  Target: LAMA2; (-) strand; PAM type: NNNNGHTT; PAM sequence: TTTTGATT
acaaatcacttacagaatgg

SEQ ID NO: 39156 - DNA, 20 bp, Artificial Sequence
  Description of Artificial Sequence: Synthetic oligonucleotide
  Target: LAMA2; (-) strand; PAM type: NNNNGHTT; PAM sequence: AATGGTTT
atcacacaaatcacttacag

SEQ ID NO: 39157 - DNA, 20 bp, Artificial Sequence
  Description of Artificial Sequence: Synthetic oligonucleotide
  Target: LAMA2; (-) strand; PAM type: NNNNGHTT; PAM sequence: TTTAGTTT
tacaatttgggaaatgttga

SEQ ID NO: 39158 - DNA, 20 bp, Artificial Sequence
  Description of Artificial Sequence: Synthetic oligonucleotide
  Target: LAMA2; (-) strand; PAM type: NNNNGHTT; PAM sequence: TGTTGATT
aacatctacaatttgggaaa

SEQ ID NO: 39159 - DNA, 20 bp, Artificial Sequence
  Description of Artificial Sequence: Synthetic oligonucleotide
  Target: LAMA2; (-) strand; PAM type: NNNNGHTT; PAM sequence: GGATGCTT
agaacttttaacatgcaaat

SEQ ID NO: 39160 - DNA, 20 bp, Artificial Sequence
  Description of Artificial Sequence: Synthetic oligonucleotide
  Target: LAMA2; (-) strand; PAM type: NNNNGHTT; PAM sequence: AACAGATT
atgctgagctaaacaaattg

SEQ ID NO: 39161 - DNA, 20 bp, Artificial Sequence
  Description of Artificial Sequence: Synthetic oligonucleotide
  Target: LAMA2; (-) strand; PAM type: NNNNGHTT; PAM sequence: ATAAGTTT
agcagagggtttatggccac

SEQ ID NO: 39162 - DNA, 20 bp, Artificial Sequence
  Description of Artificial Sequence: Synthetic oligonucleotide
  Target: LAMA2; (-) strand; PAM type: NNNNGHTT; PAM sequence: GAGGGTTT
cttgctatatagttaaagca

SEQ ID NO: 39163 - DNA, 20 bp, Artificial Sequence
  Description of Artificial Sequence: Synthetic oligonucleotide
  Target: LAMA2; (-) strand; PAM type: NNNNGHTT; PAM sequence: TTATGTTT
caacttgaaatgggctcaga

SEQ ID NO: 39164 - DNA, 20 bp, Artificial Sequence
  Description of Artificial Sequence: Synthetic oligonucleotide
  Target: LAMA2; (-) strand; PAM type: NNNNGHTT; PAM sequence: CTCAGATT
agaaaacaacttgaaatggg

SEQ ID NO: 39165 - DNA, 20 bp, Artificial Sequence
  Description of Artificial Sequence: Synthetic oligonucleotide
  Target: LAMA2; (-) strand; PAM type: NNNNGHTT; PAM sequence: CTTTGATT
actaggtaagcttaatagaa

SEQ ID NO: 39166 - DNA, 20 bp, Artificial Sequence
  Description of Artificial Sequence: Synthetic oligonucleotide
  Target: LAMA2; (-) strand; PAM type: NNNNGHTT; PAM sequence: GTAAGCTT
tataaggcctttggtactag

SEQ ID NO: 39167 - DNA, 20 bp, Artificial Sequence
  Description of Artificial Sequence: Synthetic oligonucleotide
  Target: LAMA2; (-) strand; PAM type: NNNNGHTT; PAM sequence: ACATGCTT
aaagggataggtcagcagaa

SEQ ID NO: 39168 - DNA, 20 bp, Artificial Sequence
  Description of Artificial Sequence: Synthetic oligonucleotide
  Target: LAMA2; (-) strand; PAM type: NNNNGHTT; PAM sequence: GAATGATT
agcatggaatgaaagaagct

SEQ ID NO: 39169 - DNA, 20 bp, Artificial Sequence
  Description of Artificial Sequence: Synthetic oligonucleotide
  Target: LAMA2; (-) strand; PAM type: NNNNGHTT; PAM sequence: GATGGATT
ctttttcaaatagaaaatgg

SEQ ID NO: 39170 - DNA, 20 bp, Artificial Sequence
  Description of Artificial Sequence: Synthetic oligonucleotide
  Target: LAMA2; (-) strand; PAM type: NNNNGHTT; PAM sequence: AAGGGATT
ttgtgctacatgtttgaatg

SEQ ID NO: 39171 - DNA, 20 bp, Artificial Sequence
  Description of Artificial Sequence: Synthetic oligonucleotide
  Target: LAMA2; (-) strand; PAM type: NNNNGHTT; PAM sequence: ACATGTTT
aagcaaggccatcttgtgct

SEQ ID NO: 39172 - DNA, 20 bp, Artificial Sequence
  Description of Artificial Sequence: Synthetic oligonucleotide
  Target: LAMA2; (-) strand; PAM type: NNNNGHTT; PAM sequence: CCTCGATT
ttcactgtttctcttcaccc

SEQ ID NO: 39173 - DNA, 20 bp, Artificial Sequence
  Description of Artificial Sequence: Synthetic oligonucleotide
  Target: LAMA2; (-) strand; PAM type: NNNNGHTT; PAM sequence: CACTGTTT
tgtttggccattcccctgtt

SEQ ID NO: 39174 - DNA, 20 bp, Artificial Sequence
  Description of Artificial Sequence: Synthetic oligonucleotide
  Target: LAMA2; (-) strand; PAM type: NNNNGHTT; PAM sequence: TCTTGTTT
ccaatccatgttttgttgta

SEQ ID NO: 39175 - DNA, 20 bp, Artificial Sequence
  Description of Artificial Sequence: Synthetic oligonucleotide
  Target: LAMA2; (-) strand; PAM type: NNNNGHTT; PAM sequence: CCATGTTT
acttgtgacagaataccaat

SEQ ID NO: 39176 - DNA, 20 bp, Artificial Sequence
  Description of Artificial Sequence: Synthetic oligonucleotide
  Target: LAMA2; (-) strand; PAM type: NNNNGHTT; PAM sequence: GAATGTTT
gtggtgttttggccctaagt

SEQ ID NO: 39177 - DNA, 20 bp, Artificial Sequence
  Description of Artificial Sequence: Synthetic oligonucleotide
  Target: LAMA2; (-) strand; PAM type: NNNNGHTT; PAM sequence: TGGTGTTT
cagtgatacctcaaaaatag

SEQ ID NO: 39178 - DNA, 20 bp, Artificial Sequence
  Description of Artificial Sequence: Synthetic oligonucleotide
  Target: LAMA2; (-) strand; PAM type: NNNNGHTT; PAM sequence: CTTTGTTT
ctctctgactcttttttttc

SEQ ID NO: 39179 - DNA, 20 bp, Artificial Sequence
  Description of Artificial Sequence: Synthetic oligonucleotide
  Target: LAMA2; (-) strand; PAM type: NNNNGHTT; PAM sequence: TCAAGATT
acttaatctcttttagccct

SEQ ID NO: 39180 - DNA, 20 bp, Artificial Sequence
  Description of Artificial Sequence: Synthetic oligonucleotide
  Target: LAMA2; (-) strand; PAM type: NNNNGHTT; PAM sequence: AATTGCTT
ttaattgctcttgatattcc

SEQ ID NO: 39181 - DNA, 20 bp, Artificial Sequence
  Description of Artificial Sequence: Synthetic oligonucleotide
  Target: LAMA2; (-) strand; PAM type: NNNNGHTT; PAM sequence: TTAAGTTT
taagaagtctatgtatccca

SEQ ID NO: 39182 - DNA, 20 bp, Artificial Sequence
  Description of Artificial Sequence: Synthetic oligonucleotide
  Target: LAMA2; (-) strand; PAM type: NNNNGHTT; PAM sequence: GAGGGCTT
tttgccagctggggagcggg

SEQ ID NO: 39183 - DNA, 20 bp, Artificial Sequence
  Description of Artificial Sequence: Synthetic oligonucleotide
  Target: LAMA2; (-) strand; PAM type: NNNNGHTT; PAM sequence: CCTGGCTT
gtggcaattgtgagattagt

SEQ ID NO: 39184 - DNA, 20 bp, Artificial Sequence
  Description of Artificial Sequence: Synthetic oligonucleotide
  Target: LAMA2; (-) strand; PAM type: NNNNGHTT; PAM sequence: GTGAGATT
ccacattttcagtggcaatt

SEQ ID NO: 39185 - DNA, 20 bp, Artificial Sequence
  Description of Artificial Sequence: Synthetic oligonucleotide
  Target: LAMA2; (-) strand; PAM type: NNNNGHTT; PAM sequence: ATTAGATT
aattttcaaaatattaagca

SEQ ID NO: 39186 - DNA, 20 bp, Artificial Sequence
  Description of Artificial Sequence: Synthetic oligonucleotide
  Target: LAMA2; (-) strand; PAM type: NNNNGHTT; PAM sequence: ATGGGATT
ctgaagcagacaaaatctaa

SEQ ID NO: 39187 - DNA, 20 bp, Artificial Sequence
  Description of Artificial Sequence: Synthetic oligonucleotide
  Target: LAMA2; (-) strand; PAM type: NNNNGHTT; PAM sequence: ACTTGATT
gtaagcagaggggtgattag

SEQ ID NO: 39188 - DNA, 20 bp, Artificial Sequence
  Description of Artificial Sequence: Synthetic oligonucleotide
  Target: LAMA2; (-) strand; PAM type: NNNNGHTT; PAM sequence: GGGTGATT
catgagcatagtaagcagag

SEQ ID NO: 39189 - DNA, 20 bp, Artificial Sequence
  Description of Artificial Sequence: Synthetic oligonucleotide
  Target: LAMA2; (-) strand; PAM type: NNNNGHTT; PAM sequence: ACTGGATT
catggaaaagaagagggtaa

SEQ ID NO: 39190 - DNA, 20 bp, Artificial Sequence
  Description of Artificial Sequence: Synthetic oligonucleotide
  Target: LAMA2; (-) strand; PAM type: NNNNGHTT; PAM sequence: GGGTGTTT
cataatcagcaaaagactga

SEQ ID NO: 39191 - DNA, 20 bp, Artificial Sequence
  Description of Artificial Sequence: Synthetic oligonucleotide
  Target: LAMA2; (-) strand; PAM type: NNNNGHTT; PAM sequence: CAGGGATT
gctgacttttgggagctgaa

SEQ ID NO: 39192 - DNA, 20 bp, Artificial Sequence
  Description of Artificial Sequence: Synthetic oligonucleotide
  Target: LAMA2; (-) strand; PAM type: NNNNGHTT; PAM sequence: CTCAGATT
gcacacaaaagggcaaccaa

SEQ ID NO: 39193 - DNA, 20 bp, Artificial Sequence
  Description of Artificial Sequence: Synthetic oligonucleotide
  Target: LAMA2; (-) strand; PAM type: NNNNGHTT; PAM sequence: TCTGGTTT
gccaagcaaattagaaaagc

SEQ ID NO: 39194 - DNA, 20 bp, Artificial Sequence
  Description of Artificial Sequence: Synthetic oligonucleotide
  Target: LAMA2; (-) strand; PAM type: NNNNGHTT; PAM sequence: GCTGGCTT
aaacaatgaaacaatataat

SEQ ID NO: 39195 - DNA, 20 bp, Artificial Sequence
  Description of Artificial Sequence: Synthetic oligonucleotide
  Target: LAMA2; (-) strand; PAM type: NNNNGHTT; PAM sequence: GGCCGTTT
attgcaatattttgaaaaag

SEQ ID NO: 39196 - DNA, 20 bp, Artificial Sequence
  Description of Artificial Sequence: Synthetic oligonucleotide
  Target: LAMA2; (-) strand; PAM type: NNNNGHTT; PAM sequence: AATAGTTT
agaatgagtgcatttttaaa

SEQ ID NO: 39197 - DNA, 20 bp, Artificial Sequence
  Description of Artificial Sequence: Synthetic oligonucleotide
  Target: LAMA2; (-) strand; PAM type: NNNNGHTT; PAM sequence: TTTGGTTT
attagtttaaatcacagtcc

SEQ ID NO: 39198 - DNA, 20 bp, Artificial Sequence
  Description of Artificial Sequence: Synthetic oligonucleotide
  Target: LAMA2; (-) strand; PAM type: NNNNGHTT; PAM sequence: ATTAGTTT
gttggattcacctaattaaa

SEQ ID NO: 39199 - DNA, 20 bp, Artificial Sequence
  Description of Artificial Sequence: Synthetic oligonucleotide
  Target: LAMA2; (-) strand; PAM type: NNNNGHTT; PAM sequence: GTTGGATT
gtgtgttagagtctgatcaa

SEQ ID NO: 39200 - DNA, 20 bp, Artificial Sequence
  Description of Artificial Sequence: Synthetic oligonucleotide
  Target: LAMA2; (-) strand; PAM type: NNNNGHTT; PAM sequence: TAGAGATT
ttctatacagagaacagtat

SEQ ID NO: 39201 - DNA, 20 bp, Artificial Sequence
  Description of Artificial Sequence: Synthetic oligonucleotide
  Target: LAMA2; (-) strand; PAM type: NNNNGHTT; PAM sequence: GTGTGTTT
cacattactggtgtatgggt

SEQ ID NO: 39202 - DNA, 20 bp, Artificial Sequence
  Description of Artificial Sequence: Synthetic oligonucleotide
  Target: LAMA2; (-) strand; PAM type: NNNNGHTT; PAM sequence: GATAGCTT
gagttactgccctttggaga

SEQ ID NO: 39203 - DNA, 20 bp, Artificial Sequence
  Description of Artificial Sequence: Synthetic oligonucleotide
  Target: LAMA2; (-) strand; PAM type: NNNNGHTT; PAM sequence: TTTTGTTT
ccacatatattcacatctca

SEQ ID NO: 39204 - DNA, 20 bp, Artificial Sequence
  Description of Artificial Sequence: Synthetic oligonucleotide
  Target: LAMA2; (-) strand; PAM type: NNNNGHTT; PAM sequence: CAGAGCTT
ttcttgtcttatttaatatt

SEQ ID NO: 39205 - DNA, 20 bp, Artificial Sequence
  Description of Artificial Sequence: Synthetic oligonucleotide
  Target: LAMA2; (-) strand; PAM type: NNNNGHTT; PAM sequence: ACCTGATT
ggagattcttttgaatttta

SEQ ID NO: 39206 - DNA, 20 bp, Artificial Sequence
  Description of Artificial Sequence: Synthetic oligonucleotide
  Target: LAMA2; (-) strand; PAM type: NNNNGHTT; PAM sequence: AGGAGATT
ggcatttgataaagataaga

SEQ ID NO: 39207 - DNA, 20 bp, Artificial Sequence
  Description of Artificial Sequence: Synthetic oligonucleotide
  Target: LAMA2; (-) strand; PAM type: NNNNGHTT; PAM sequence: AATTGTTT
atattgccaaccacagatat

SEQ ID NO: 39208 - DNA, 20 bp, Artificial Sequence
  Description of Artificial Sequence: Synthetic oligonucleotide
  Target: LAMA2; (-) strand; PAM type: NNNNGHTT; PAM sequence: TACTGCTT
acacttatgagttgtataaa

SEQ ID NO: 39209 - DNA, 20 bp, Artificial Sequence
  Description of Artificial Sequence: Synthetic oligonucleotide
  Target: LAMA2; (-) strand; PAM type: NNNNGHTT; PAM sequence: AAAAGATT
atgaaattacttatattcac

SEQ ID NO: 39210 - DNA, 20 bp, Artificial Sequence
  Description of Artificial Sequence: Synthetic oligonucleotide
  Target: LAMA2; (-) strand; PAM type: NNNNGHTT; PAM sequence: TGATGTTT
ggtactataattcatagatt

SEQ ID NO: 39211 - DNA, 20 bp, Artificial Sequence
  Description of Artificial Sequence: Synthetic oligonucleotide
  Target: LAMA2; (-) strand; PAM type: NNNNGHTT; PAM sequence: CATAGATT
ggtacttaggtactataatt

SEQ ID NO: 39212 - DNA, 20 bp, Artificial Sequence
  Description of Artificial Sequence: Synthetic oligonucleotide
  Target: LAMA2; (-) strand; PAM type: NNNNGHTT; PAM sequence: CTAAGTTT
gtgcagatacattgatgatt

SEQ ID NO: 39213 - DNA, 20 bp, Artificial Sequence
  Description of Artificial Sequence: Synthetic oligonucleotide
  Target: LAMA2; (-) strand; PAM type: NNNNGHTT; PAM sequence: TGATGATT
ttaatttggtgcagatacat

SEQ ID NO: 39214 - DNA, 20 bp, Artificial Sequence
  Description of Artificial Sequence: Synthetic oligonucleotide
  Target: LAMA2; (-) strand; PAM type: NNNNGHTT; PAM sequence: AATGGTTT
tctctaccatttgaaataaa

SEQ ID NO: 39215 - DNA, 20 bp, Artificial Sequence
  Description of Artificial Sequence: Synthetic oligonucleotide
  Target: LAMA2; (-) strand; PAM type: NNNNGHTT; PAM sequence: TTATGTTT
aattttctctgacctaaatg

SEQ ID NO: 39216 - DNA, 20 bp, Artificial Sequence
  Description of Artificial Sequence: Synthetic oligonucleotide
  Target: LAMA2; (-) strand; PAM type: NNNNGHTT; PAM sequence: AGAAGATT
ttgtttatagggcatggcaa

SEQ ID NO: 39217 - DNA, 20 bp, Artificial Sequence
  Description of Artificial Sequence: Synthetic oligonucleotide
  Target: LAMA2; (-) strand; PAM type: NNNNGHTT; PAM sequence: GTTTGTTT
atattattggaaaaacaaaa

SEQ ID NO: 39218 - DNA, 20 bp, Artificial Sequence
  Description of Artificial Sequence: Synthetic oligonucleotide
  Target: LAMA2; (-) strand; PAM type: NNNNGHTT; PAM sequence: AAAAGTTT
tattatattattggaaaaac

SEQ ID NO: 39219 - DNA, 20 bp, Artificial Sequence
  Description of Artificial Sequence: Synthetic oligonucleotide
  Target: LAMA2; (-) strand; PAM type: NNNNGHTT; PAM sequence: CTCTGTTT
cccttccttccttccttcct

SEQ ID NO: 39220 - DNA, 20 bp, Artificial Sequence
  Description of Artificial Sequence: Synthetic oligonucleotide
  Target: LAMA2; (-) strand; PAM type: NNNNGHTT; PAM sequence: CCTTGCTT
ctttcctcccttccttcctt

SEQ ID NO: 39221 - DNA, 20 bp, Artificial Sequence
  Description of Artificial Sequence: Synthetic oligonucleotide
  Target: LAMA2; (-) strand; PAM type: NNNNGHTT; PAM sequence: GAAGGCTT
ttcagaggcaaattttcatt

SEQ ID NO: 39222 - DNA, 20 bp, Artificial Sequence
  Description of Artificial Sequence: Synthetic oligonucleotide
  Target: LAMA2; (-) strand; PAM type: NNNNGHTT; PAM sequence: AGAAGATT
ttaactagaaactgtgactc

SEQ ID NO: 39223 - DNA, 20 bp, Artificial Sequence
  Description of Artificial Sequence: Synthetic oligonucleotide
  Target: LAMA2; (-) strand; PAM type: NNNNGHTT; PAM sequence: ATTAGATT
atcctgccagcccactagta

SEQ ID NO: 39224 - DNA, 20 bp, Artificial Sequence
  Description of Artificial Sequence: Synthetic oligonucleotide
  Target: LAMA2; (-) strand; PAM type: NNNNGHTT; PAM sequence: AAATGTTT
caaacgcaacgtgattaaaa

SEQ ID NO: 39225 - DNA, 20 bp, Artificial Sequence
  Description of Artificial Sequence: Synthetic oligonucleotide
  Target: LAMA2; (-) strand; PAM type: NNNNGHTT; PAM sequence: ACGTGATT
tgttccttttctcaaacgca

SEQ ID NO: 39226 - DNA, 20 bp, Artificial Sequence
  Description of Artificial Sequence: Synthetic oligonucleotide
  Target: LAMA2; (-) strand; PAM type: NNNNGHTT; PAM sequence: GATGGATT
ttctccccttctcccaggat

SEQ ID NO: 39227 - DNA, 20 bp, Artificial Sequence
  Description of Artificial Sequence: Synthetic oligonucleotide
  Target: LAMA2; (-) strand; PAM type: NNNNGHTT; PAM sequence: CAATGTTT
tggggggacctcagttgggg

SEQ ID NO: 39228 - DNA, 20 bp, Artificial Sequence
  Description of Artificial Sequence: Synthetic oligonucleotide
  Target: LAMA2; (-) strand; PAM type: NNNNGHTT; PAM sequence: CCTGGTTT
cacagtaccggcctgttgta

SEQ ID NO: 39229 - DNA, 20 bp, Artificial Sequence
  Description of Artificial Sequence: Synthetic oligonucleotide
  Target: LAMA2; (-) strand; PAM type: NNNNGHTT; PAM sequence: TGATGCTT
gtttatcatttggaaaacag

SEQ ID NO: 39230 - DNA, 20 bp, Artificial Sequence
  Description of Artificial Sequence: Synthetic oligonucleotide
  Target: LAMA2; (-) strand; PAM type: NNNNGHTT; PAM sequence: ACATGTTT
ccttccgcatgtaaataaaa

SEQ ID NO: 39231 - DNA, 20 bp, Artificial Sequence
  Description of Artificial Sequence: Synthetic oligonucleotide
  Target: LAMA2; (-) strand; PAM type: NNNNGHTT; PAM sequence: AAGTGATT
cagaaaaaattatttaaagc

SEQ ID NO: 39232 - DNA, 20 bp, Artificial Sequence
  Description of Artificial Sequence: Synthetic oligonucleotide
  Target: LAMA2; (-) strand; PAM type: NNNNGHTT; PAM sequence: AACTGATT
aagttaacatatgaaagcat

SEQ ID NO: 39233 - DNA, 20 bp, Artificial Sequence
  Description of Artificial Sequence: Synthetic oligonucleotide
  Target: LAMA2; (-) strand; PAM type: NNNNGHTT; PAM sequence: TAAGGATT
tattctaatcccactgacat

SEQ ID NO: 39234 - DNA, 20 bp, Artificial Sequence
  Description of Artificial Sequence: Synthetic oligonucleotide
  Target: LAMA2; (-) strand; PAM type: NNNNGHTT; PAM sequence: ATTGGATT
gatgatggccaaatgctaac

SEQ ID NO: 39235 - DNA, 20 bp, Artificial Sequence
  Description of Artificial Sequence: Synthetic oligonucleotide
  Target: LAMA2; (-) strand; PAM type: NNNNGHTT; PAM sequence: CTCTGCTT
taggctggtctcataaccta

SEQ ID NO: 39236 - DNA, 20 bp, Artificial Sequence
  Description of Artificial Sequence: Synthetic oligonucleotide
  Target: LAMA2; (-) strand; PAM type: NNNNGHTT; PAM sequence: AGTGGTTT
tgataataggctacatttac

SEQ ID NO: 39237 - DNA, 20 bp, Artificial Sequence
  Description of Artificial Sequence: Synthetic oligonucleotide
  Target: LAMA2; (-) strand; PAM type: NNNNGHTT; PAM sequence: TGGTGCTT
agggtaccctactgggtctt

SEQ ID NO: 39238 - DNA, 20 bp, Artificial Sequence
  Description of Artificial Sequence: Synthetic oligonucleotide
  Target: LAMA2; (-) strand; PAM type: NNNNGHTT; PAM sequence: TTTTGATT
tggtccagaaagtgatttgg

SEQ ID NO: 39239 - DNA, 20 bp, Artificial Sequence
  Description of Artificial Sequence: Synthetic oligonucleotide
  Target: LAMA2; (-) strand; PAM type: NNNNGHTT; PAM sequence: TTTGGTTT
ccagttggtccagaaagtga

SEQ ID NO: 39240 - DNA, 20 bp, Artificial Sequence
  Description of Artificial Sequence: Synthetic oligonucleotide
  Target: LAMA2; (-) strand; PAM type: NNNNGHTT; PAM sequence: AAGTGATT
cagctgccagttggtccaga

SEQ ID NO: 39241 - DNA, 20 bp, Artificial Sequence
  Description of Artificial Sequence: Synthetic oligonucleotide
  Target: LAMA2; (-) strand; PAM type: NNNNGHTT; PAM sequence: TTTTGCTT
aggcactgagctgttggaaa

SEQ ID NO: 39242 - DNA, 20 bp, Artificial Sequence
  Description of Artificial Sequence: Synthetic oligonucleotide
  Target: LAMA2; (-) strand; PAM type: NNNNGHTT; PAM sequence: CAGTGTTT
ttatacatttgtcaggaatc

SEQ ID NO: 39243 - DNA, 20 bp, Artificial Sequence
  Description of Artificial Sequence: Synthetic oligonucleotide
  Target: LAMA2; (-) strand; PAM type: NNNNGHTT; PAM sequence: CTATGATT
ggaagaatttcttaggcttt

SEQ ID NO: 39244 - DNA, 20 bp, Artificial Sequence
  Description of Artificial Sequence: Synthetic oligonucleotide
  Target: LAMA2; (-) strand; PAM type: NNNNGHTT; PAM sequence: TTAGGCTT
tgtgggaaaggaagaatttc

SEQ ID NO: 39245 - DNA, 20 bp, Artificial Sequence
  Description of Artificial Sequence: Synthetic oligonucleotide
  Target: LAMA2; (-) strand; PAM type: NNNNGHTT; PAM sequence: AAATGTTT
atgaaaactggtaatggtca

SEQ ID NO: 39246 - DNA, 20 bp, Artificial Sequence
  Description of Artificial Sequence: Synthetic oligonucleotide
  Target: LAMA2; (-) strand; PAM type: NNNNGHTT; PAM sequence: TTGTGATT
tgtgcttcttatacttttaa

SEQ ID NO: 39247 - DNA, 20 bp, Artificial Sequence
  Description of Artificial Sequence: Synthetic oligonucleotide
  Target: LAMA2; (-) strand; PAM type: NNNNGHTT; PAM sequence: ATGTGCTT
attataaaaataagtaataa

SEQ ID NO: 39248 - DNA, 20 bp, Artificial Sequence
  Description of Artificial Sequence: Synthetic oligonucleotide
  Target: LAMA2; (-) strand; PAM type: NNNNGHTT; PAM sequence: TGAGGTTT
ttccaggaactttctttcct

SEQ ID NO: 39249 - DNA, 20 bp, Artificial Sequence
  Description of Artificial Sequence: Synthetic oligonucleotide
  Target: LAMA2; (-) strand; PAM type: NNNNGHTT; PAM sequence: TAAAGTTT
gtaaaaacaacaaagcagta

SEQ ID NO: 39250 - DNA, 20 bp, Artificial Sequence
  Description of Artificial Sequence: Synthetic oligonucleotide
  Target: LAMA2; (-) strand; PAM type: NNNNGHTT; PAM sequence: GAAAGTTT
atatacttttattattttat

SEQ ID NO: 39251 - DNA, 20 bp, Artificial Sequence
  Description of Artificial Sequence: Synthetic oligonucleotide
  Target: LAMA2; (-) strand; PAM type: NNNNGHTT; PAM sequence: ATCTGATT
tcctttaaatatccattttc

SEQ ID NO: 39252 - DNA, 20 bp, Artificial Sequence
  Description of Artificial Sequence: Synthetic oligonucleotide
  Target: LAMA2; (-) strand; PAM type: NNNNGHTT; PAM sequence: CAAAGTTT
ctgcttaatttatcttccag

SEQ ID NO: 39253 - DNA, 20 bp, Artificial Sequence
  Description of Artificial Sequence: Synthetic oligonucleotide
  Target: LAMA2; (-) strand; PAM type: NNNNGHTT; PAM sequence: AACTGCTT
aaaagaactgcttttctaaa

SEQ ID NO: 39254 - DNA, 20 bp, Artificial Sequence
  Description of Artificial Sequence: Synthetic oligonucleotide
  Target: LAMA2; (-) strand; PAM type: NNNNGHTT; PAM sequence: AACTGCTT
aacaaataaacaaacaaaag

SEQ ID NO: 39255 - DNA, 20 bp, Artificial Sequence
  Description of Artificial Sequence: Synthetic oligonucleotide
  Target: LAMA2; (-) strand; PAM type: NNNNGHTT; PAM sequence: TTTTGATT
ttttgttaaatttctgaata

SEQ ID NO: 39256 - DNA, 20 bp, Artificial Sequence
  Description of Artificial Sequence: Synthetic oligonucleotide
  Target: LAMA2; (-) strand; PAM type: NNNNGHTT; PAM sequence: AGATGATT
tgggaatttaggctactcat

SEQ ID NO: 39257 - DNA, 20 bp, Artificial Sequence
  Description of Artificial Sequence: Synthetic oligonucleotide
  Target: LAMA2; (-) strand; PAM type: NNNNGHTT; PAM sequence: AATTGTTT
tcacaaatagaatagtaatt

SEQ ID NO: 39258 - DNA, 20 bp, Artificial Sequence
  Description of Artificial Sequence: Synthetic oligonucleotide
  Target: LAMA2; (-) strand; PAM type: NNNNGHTT; PAM sequence: TAAAGCTT
aaacgtagagtaaatcagtc

SEQ ID NO: 39259 - DNA, 20 bp, Artificial Sequence
  Description of Artificial Sequence: Synthetic oligonucleotide
  Target: LAMA2; (-) strand; PAM type: NNNNGHTT; PAM sequence: TTTTGCTT
tttaagtaatcttttgtctt

SEQ ID NO: 39260 - DNA, 20 bp, Artificial Sequence
  Description of Artificial Sequence: Synthetic oligonucleotide
  Target: LAMA2; (-) strand; PAM type: NNNNGHTT; PAM sequence: TACAGTTT
tttaagaatcacttttattt

SEQ ID NO: 39261 - DNA, 20 bp, Artificial Sequence
  Description of Artificial Sequence: Synthetic oligonucleotide
  Target: LAMA2; (-) strand; PAM type: NNNNGHTT; PAM sequence: AGAAGTTT
ttatgccttttttaagattc

SEQ ID NO: 39262 - DNA, 20 bp, Artificial Sequence
  Description of Artificial Sequence: Synthetic oligonucleotide
  Target: LAMA2; (-) strand; PAM type: NNNNGHTT; PAM sequence: TTAAGATT
gtgaaatatttatgcctttt

SEQ ID NO: 39263 - DNA, 20 bp, Artificial Sequence
  Description of Artificial Sequence: Synthetic oligonucleotide
  Target: LAMA2; (-) strand; PAM type: NNNNGHTT; PAM sequence: AATGGTTT
gttttgtgttaagtttaaaa

SEQ ID NO: 39264 - DNA, 20 bp, Artificial Sequence
  Description of Artificial Sequence: Synthetic oligonucleotide
  Target: LAMA2; (-) strand; PAM type: NNNNGHTT; PAM sequence: TTAAGTTT
tactgtgtgccggttttgtg

SEQ ID NO: 39265 - DNA, 20 bp, Artificial Sequence
  Description of Artificial Sequence: Synthetic oligonucleotide
  Target: LAMA2; (-) strand; PAM type: NNNNGHTT; PAM sequence: GCCGGTTT
gatttaatgatttactgtgt

SEQ ID NO: 39266 - DNA, 20 bp, Artificial Sequence
  Description of Artificial Sequence: Synthetic oligonucleotide
  Target: LAMA2; (-) strand; PAM type: NNNNGHTT; PAM sequence: TAATGATT
tttagttagtttttttgatt

SEQ ID NO: 39267 - DNA, 20 bp, Artificial Sequence
  Description of Artificial Sequence: Synthetic oligonucleotide
  Target: LAMA2; (-) strand; PAM type: NNNNGHTT; PAM sequence: TTTTGATT
tagaaaaatttagttagttt

SEQ ID NO: 39268 - DNA, 20 bp, Artificial Sequence
  Description of Artificial Sequence: Synthetic oligonucleotide
  Target: LAMA2; (-) strand; PAM type: NNNNGHTT; PAM sequence: GTTAGTTT
tattaatctagaaaaattta

SEQ ID NO: 39269 - DNA, 20 bp, Artificial Sequence
  Description of Artificial Sequence: Synthetic oligonucleotide
  Target: LAMA2; (-) strand; PAM type: NNNNGHTT; PAM sequence: CGCTGTTT
gttcttgactcaaggtgtaa

SEQ ID NO: 39270 - DNA, 20 bp, Artificial Sequence
  Description of Artificial Sequence: Synthetic oligonucleotide
  Target: LAMA2; (-) strand; PAM type: NNNNGHTT; PAM sequence: CATAGCTT
acactgaaattcaaagaagc

SEQ ID NO: 39271 - DNA, 20 bp, Artificial Sequence
  Description of Artificial Sequence: Synthetic oligonucleotide
  Target: LAMA2; (-) strand; PAM type: NNNNGHTT; PAM sequence: AAAGGCTT
gctgtagggataattcacat

SEQ ID NO: 39272 - DNA, 20 bp, Artificial Sequence
  Description of Artificial Sequence: Synthetic oligonucleotide
  Target: LAMA2; (-) strand; PAM type: NNNNGHTT; PAM sequence: TTCTGATT
aagttcagtaacagaatgtt

SEQ ID NO: 39273 - DNA, 20 bp, Artificial Sequence
  Description of Artificial Sequence: Synthetic oligonucleotide
  Target: LAMA2; (-) strand; PAM type: NNNNGHTT; PAM sequence: GAATGTTT
gacgcctaagttcagtaaca

SEQ ID NO: 39274 - DNA, 20 bp, Artificial Sequence
  Description of Artificial Sequence: Synthetic oligonucleotide
  Target: LAMA2; (-) strand; PAM type: NNNNGHTT; PAM sequence: ATAGGCTT
aaaactttctaatagtctta

SEQ ID NO: 39275 - DNA, 20 bp, Artificial Sequence
  Description of Artificial Sequence: Synthetic oligonucleotide
  Target: LAMA2; (-) strand; PAM type: NNNNGHTT; PAM sequence: TCCAGTTT
ttggctctgcactcacactg

SEQ ID NO: 39276 - DNA, 20 bp, Artificial Sequence
  Description of Artificial Sequence: Synthetic oligonucleotide
  Target: LAMA2; (-) strand; PAM type: NNNNGHTT; PAM sequence: TCTAGTTT
taatgtacaatgaattttgt

SEQ ID NO: 39277 - DNA, 20 bp, Artificial Sequence
  Description of Artificial Sequence: Synthetic oligonucleotide
  Target: LAMA2; (-) strand; PAM type: NNNNGHTT; PAM sequence: AAATGTTT
acacattcactgccaaaaaa

SEQ ID NO: 39278 - DNA, 20 bp, Artificial Sequence
  Description of Artificial Sequence: Synthetic oligonucleotide
  Target: LAMA2; (-) strand; PAM type: NNNNGHTT; PAM sequence: ATTTGTTT
taagattaaattcgcctgct

SEQ ID NO: 39279 - DNA, 20 bp, Artificial Sequence
  Description of Artificial Sequence: Synthetic oligonucleotide
  Target: LAMA2; (-) strand; PAM type: NNNNGHTT; PAM sequence: TTAAGATT
ggaaagagtatctccacaga

SEQ ID NO: 39280 - DNA, 20 bp, Artificial Sequence
  Description of Artificial Sequence: Synthetic oligonucleotide
  Target: LAMA2; (-) strand; PAM type: NNNNGHTT; PAM sequence: CACAGATT
ggcaaaggaaagagtatctc

SEQ ID NO: 39281 - DNA, 20 bp, Artificial Sequence
  Description of Artificial Sequence: Synthetic oligonucleotide
  Target: LAMA2; (-) strand; PAM type: NNNNGHTT; PAM sequence: CTGGGATT
tgccttggcctcccaaagtg

SEQ ID NO: 39282 - DNA, 20 bp, Artificial Sequence
  Description of Artificial Sequence: Synthetic oligonucleotide
  Target: LAMA2; (-) strand; PAM type: NNNNGHTT; PAM sequence: TGGTGTTT
tttgtagtttttagcagaga

SEQ ID NO: 39283 - DNA, 20 bp, Artificial Sequence
  Description of Artificial Sequence: Synthetic oligonucleotide
  Target: LAMA2; (-) strand; PAM type: NNNNGHTT; PAM sequence: TGTAGTTT
caccgtgcctggctgatttt

SEQ ID NO: 39284 - DNA, 20 bp, Artificial Sequence
  Description of Artificial Sequence: Synthetic oligonucleotide
  Target: LAMA2; (-) strand; PAM type: NNNNGHTT; PAM sequence: GGCTGATT
aggcacctgccaccgtgcct

SEQ ID NO: 39285 - DNA, 20 bp, Artificial Sequence
  Description of Artificial Sequence: Synthetic oligonucleotide
  Target: LAMA2; (-) strand; PAM type: NNNNGHTT; PAM sequence: CTGGGATT
cgcctcagcctcctgagtag

SEQ ID NO: 39286 - DNA, 20 bp, Artificial Sequence
  Description of Artificial Sequence: Synthetic oligonucleotide
  Target: LAMA2; (-) strand; PAM type: NNNNGHTT; PAM sequence: AAGCGATT
aacctctgccacccaggttc

SEQ ID NO: 39287 - DNA, 20 bp, Artificial Sequence
  Description of Artificial Sequence: Synthetic oligonucleotide
  Target: LAMA2; (-) strand; PAM type: NNNNGHTT; PAM sequence: TTTTGTTT
gggagtaacattttggtttg

SEQ ID NO: 39288 - DNA, 20 bp, Artificial Sequence
  Description of Artificial Sequence: Synthetic oligonucleotide
  Target: LAMA2; (-) strand; PAM type: NNNNGHTT; PAM sequence: GTTTGTTT
gcaaagggagtaacattttg

SEQ ID NO: 39289 - DNA, 20 bp, Artificial Sequence
  Description of Artificial Sequence: Synthetic oligonucleotide
  Target: LAMA2; (-) strand; PAM type: NNNNGHTT; PAM sequence: TTTGGTTT
aaaagcaaagggagtaacat

SEQ ID NO: 39290 - DNA, 20 bp, Artificial Sequence
  Description of Artificial Sequence: Synthetic oligonucleotide
  Target: LAMA2; (-) strand; PAM type: NNNNGHTT; PAM sequence: AGGTGTTT
taaatgatggaactagaaga

SEQ ID NO: 39291 - DNA, 20 bp, Artificial Sequence
  Description of Artificial Sequence: Synthetic oligonucleotide
  Target: LAMA2; (-) strand; PAM type: NNNNGHTT; PAM sequence: AGTAGCTT
taggtagactgctcacagga

SEQ ID NO: 39292 - DNA, 20 bp, Artificial Sequence
  Description of Artificial Sequence: Synthetic oligonucleotide
  Target: LAMA2; (-) strand; PAM type: NNNNGHTT; PAM sequence: TCTTGATT
ataatgcatctttaaaaata

SEQ ID NO: 39293 - DNA, 20 bp, Artificial Sequence
  Description of Artificial Sequence: Synthetic oligonucleotide
  Target: LAMA2; (-) strand; PAM type: NNNNGHTT; PAM sequence: TTTTGTTT
tgctgtattttaattgaata

SEQ ID NO: 39294 - DNA, 20 bp, Artificial Sequence
  Description of Artificial Sequence: Synthetic oligonucleotide
  Target: LAMA2; (-) strand; PAM type: NNNNGHTT; PAM sequence: AGTTGCTT
accctcatggaggaatctga

SEQ ID NO: 39295 - DNA, 20 bp, Artificial Sequence
  Description of Artificial Sequence: Synthetic oligonucleotide
  Target: LAMA2; (-) strand; PAM type: NNNNGHTT; PAM sequence: TTCTGCTT
gacatcggagaaatgcttgc

SEQ ID NO: 39296 - DNA, 20 bp, Artificial Sequence
  Description of Artificial Sequence: Synthetic oligonucleotide
  Target: LAMA2; (-) strand; PAM type: NNNNGHTT; PAM sequence: GCTTGCTT
cagtttgacatcggagaaat

SEQ ID NO: 39297 - DNA, 20 bp, Artificial Sequence
  Description of Artificial Sequence: Synthetic oligonucleotide
  Target: LAMA2; (-) strand; PAM type: NNNNGHTT; PAM sequence: AAATGCTT
aggccagtttgacatcggag

SEQ ID NO: 39298 - DNA, 20 bp, Artificial Sequence
  Description of Artificial Sequence: Synthetic oligonucleotide
  Target: LAMA2; (-) strand; PAM type: NNNNGHTT; PAM sequence: GCCAGTTT
ttcaaacttcctacagtaag

SEQ ID NO: 39299 - DNA, 20 bp, Artificial Sequence
  Description of Artificial Sequence: Synthetic oligonucleotide
  Target: LAMA2; (-) strand; PAM type: NNNNGHTT; PAM sequence: TTGGGCTT
tctctggatcccgccacata

SEQ ID NO: 39300 - DNA, 20 bp, Artificial Sequence
  Description of Artificial Sequence: Synthetic oligonucleotide
  Target: LAMA2; (-) strand; PAM type: NNNNGHTT; PAM sequence: AATCGCTT
cgcagtcacatagcacacag

SEQ ID NO: 39301 - DNA, 20 bp, Artificial Sequence
  Description of Artificial Sequence: Synthetic oligonucleotide
  Target: LAMA2; (-) strand; PAM type: NNNNGHTT; PAM sequence: GCCTGATT
ttgcactgtttccctacgaa

SEQ ID NO: 39302 - DNA, 20 bp, Artificial Sequence
  Description of Artificial Sequence: Synthetic oligonucleotide
  Target: LAMA2; (-) strand; PAM type: NNNNGHTT; PAM sequence: CACTGTTT
gcacctgcctgccgaggttg

SEQ ID NO: 39303 - DNA, 20 bp, Artificial Sequence
  Description of Artificial Sequence: Synthetic oligonucleotide
  Target: LAMA2; (-) strand; PAM type: NNNNGHTT; PAM sequence: CTGGGATT
gcatgagccatgcagcgcct

SEQ ID NO: 39304 - DNA, 20 bp, Artificial Sequence
  Description of Artificial Sequence: Synthetic oligonucleotide
  Target: LAMA2; (-) strand; PAM type: NNNNGHTT; PAM sequence: ATATGCTT
ttatgaccctatgaacttga

SEQ ID NO: 39305 - DNA, 20 bp, Artificial Sequence
  Description of Artificial Sequence: Synthetic oligonucleotide
  Target: LAMA2; (-) strand; PAM type: NNNNGHTT; PAM sequence: GAAAGTTT
aattgaaagtttggttaatt

SEQ ID NO: 39306 - DNA, 20 bp, Artificial Sequence
  Description of Artificial Sequence: Synthetic oligonucleotide
  Target: LAMA2; (-) strand; PAM type: NNNNGHTT; PAM sequence: GAAAGTTT
ccacatattcatggttaatt

SEQ ID NO: 39307 - DNA, 20 bp, Artificial Sequence
  Description of Artificial Sequence: Synthetic oligonucleotide
  Target: LAMA2; (-) strand; PAM type: NNNNGHTT; PAM sequence: ATTTGATT
gttctctcaagtagattttt

SEQ ID NO: 39308 - DNA, 20 bp, Artificial Sequence
  Description of Artificial Sequence: Synthetic oligonucleotide
  Target: LAMA2; (-) strand; PAM type: NNNNGHTT; PAM sequence: AGTAGATT
taagattataggttctctca

SEQ ID NO: 39309 - DNA, 20 bp, Artificial Sequence
  Description of Artificial Sequence: Synthetic oligonucleotide
  Target: LAMA2; (-) strand; PAM type: NNNNGHTT; PAM sequence: CTAAGATT
gcctgaagtctcttccattt

SEQ ID NO: 39310 - DNA, 20 bp, Artificial Sequence
  Description of Artificial Sequence: Synthetic oligonucleotide
  Target: LAMA2; (-) strand; PAM type: NNNNGHTT; PAM sequence: GTTAGCTT
tcatttgttcatttattaaa

SEQ ID NO: 39311 - DNA, 20 bp, Artificial Sequence
  Description of Artificial Sequence: Synthetic oligonucleotide
  Target: LAMA2; (-) strand; PAM type: NNNNGHTT; PAM sequence: GCTAGATT
ttggacaaatcaatttctct

SEQ ID NO: 39312 - DNA, 20 bp, Artificial Sequence
  Description of Artificial Sequence: Synthetic oligonucleotide
  Target: LAMA2; (-) strand; PAM type: NNNNGHTT; PAM sequence: CTGAGTTT
tgaaatgcctgataaatggg

SEQ ID NO: 39313 - DNA, 20 bp, Artificial Sequence
  Description of Artificial Sequence: Synthetic oligonucleotide
  Target: LAMA2; (-) strand; PAM type: NNNNGHTT; PAM sequence: ATGTGTTT
tccatttatagtgtgtgaaa

SEQ ID NO: 39314 - DNA, 20 bp, Artificial Sequence
  Description of Artificial Sequence: Synthetic oligonucleotide
  Target: LAMA2; (-) strand; PAM type: NNNNGHTT; PAM sequence: CCCCGTTT
ttgtaattagaaacaacttt

SEQ ID NO: 39315 - DNA, 20 bp, Artificial Sequence
  Description of Artificial Sequence: Synthetic oligonucleotide
  Target: LAMA2; (-) strand; PAM type: NNNNGHTT; PAM sequence: TTTTGTTT
tccttcttccccagcatttg

SEQ ID NO: 39316 - DNA, 20 bp, Artificial Sequence
  Description of Artificial Sequence: Synthetic oligonucleotide
  Target: LAMA2; (-) strand; PAM type: NNNNGHTT; PAM sequence: ATTTGTTT
tctcttccttcttccccagc

SEQ ID NO: 39317 - DNA, 20 bp, Artificial Sequence
  Description of Artificial Sequence: Synthetic oligonucleotide
  Target: LAMA2; (-) strand; PAM type: NNNNGHTT; PAM sequence: AATTGTTT
agccaagaaataaaaccatg

SEQ ID NO: 39318 - DNA, 20 bp, Artificial Sequence
  Description of Artificial Sequence: Synthetic oligonucleotide
  Target: LAMA2; (-) strand; PAM type: NNNNGHTT; PAM sequence: ATTTGTTT
taaggcagtctgacatcaaa

SEQ ID NO: 39319 - DNA, 20 bp, Artificial Sequence
  Description of Artificial Sequence: Synthetic oligonucleotide
  Target: LAMA2; (-) strand; PAM type: NNNNGHTT; PAM sequence: CCAGGATT
atagctaggaagtaatgagg

SEQ ID NO: 39320 - DNA, 20 bp, Artificial Sequence
  Description of Artificial Sequence: Synthetic oligonucleotide
  Target: LAMA2; (-) strand; PAM type: NNNNGHTT; PAM sequence: GAAAGATT
gatgaagaagctgaattaca

SEQ ID NO: 39321 - DNA, 20 bp, Artificial Sequence
  Description of Artificial Sequence: Synthetic oligonucleotide
  Target: LAMA2; (-) strand; PAM type: NNNNGHTT; PAM sequence: ATTTGCTT
cccccaggaaacctcttggc

SEQ ID NO: 39322 - DNA, 20 bp, Artificial Sequence
  Description of Artificial Sequence: Synthetic oligonucleotide
  Target: LAMA2; (-) strand; PAM type: NNNNGHTT; PAM sequence: TCATGCTT
aggctatgctgtctcccact

SEQ ID NO: 39323 - DNA, 20 bp, Artificial Sequence
  Description of Artificial Sequence: Synthetic oligonucleotide
  Target: LAMA2; (-) strand; PAM type: NNNNGHTT; PAM sequence: CTGTGTTT
ttcctacccagtctttcttt

SEQ ID NO: 39324 - DNA, 20 bp, Artificial Sequence
  Description of Artificial Sequence: Synthetic oligonucleotide
  Target: LAMA2; (-) strand; PAM type: NNNNGHTT; PAM sequence: CAAGGCTT
atttgacaaaatgcaccaaa

SEQ ID NO: 39325 - DNA, 20 bp, Artificial Sequence
  Description of Artificial Sequence: Synthetic oligonucleotide
  Target: LAMA2; (-) strand; PAM type: NNNNGHTT; PAM sequence: TTAAGATT
ccattggcttggccaagaat

SEQ ID NO: 39326 - DNA, 20 bp, Artificial Sequence
  Description of Artificial Sequence: Synthetic oligonucleotide
  Target: LAMA2; (-) strand; PAM type: NNNNGHTT; PAM sequence: ATTGGCTT
aatttgcttgggtatatccc

SEQ ID NO: 39327 - DNA, 20 bp, Artificial Sequence
  Description of Artificial Sequence: Synthetic oligonucleotide
  Target: LAMA2; (-) strand; PAM type: NNNNGHTT; PAM sequence: ATTTGCTT
ggattcctttagtgggtaaa

SEQ ID NO: 39328 - DNA, 20 bp, Artificial Sequence
  Description of Artificial Sequence: Synthetic oligonucleotide
  Target: LAMA2; (-) strand; PAM type: NNNNGHTT; PAM sequence: TCAGGATT
ctagaacctccctgaccaat

SEQ ID NO: 39329 - DNA, 20 bp, Artificial Sequence
  Description of Artificial Sequence: Synthetic oligonucleotide
  Target: LAMA2; (-) strand; PAM type: NNNNGHTT; PAM sequence: GGCTGATT
acaagagtatccttctctca

SEQ ID NO: 39330 - DNA, 20 bp, Artificial Sequence
  Description of Artificial Sequence: Synthetic oligonucleotide
  Target: LAMA2; (-) strand; PAM type: NNNNGHTT; PAM sequence: ATGAGCTT
agcactctgaatgaattaag

SEQ ID NO: 39331 - DNA, 20 bp, Artificial Sequence
  Description of Artificial Sequence: Synthetic oligonucleotide
  Target: LAMA2; (-) strand; PAM type: NNNNGHTT; PAM sequence: CATTGTTT
aatcgtgagaaatgaatttc

SEQ ID NO: 39332 - DNA, 20 bp, Artificial Sequence
  Description of Artificial Sequence: Synthetic oligonucleotide
  Target: LAMA2; (-) strand; PAM type: NNNNGHTT; PAM sequence: GAGAGTTT
cacttataaaagaggcctca

SEQ ID NO: 39333 - DNA, 20 bp, Artificial Sequence
  Description of Artificial Sequence: Synthetic oligonucleotide
  Target: LAMA2; (-) strand; PAM type: NNNNGHTT; PAM sequence: AGGTGATT
caggaggtggggcctttggg

SEQ ID NO: 39334 - DNA, 20 bp, Artificial Sequence
  Description of Artificial Sequence: Synthetic oligonucleotide
  Target: LAMA2; (-) strand; PAM type: NNNNGHTT; PAM sequence: GAATGTTT
gaggtgctctgtaatggact

SEQ ID NO: 39335 - DNA, 20 bp, Artificial Sequence
  Description of Artificial Sequence: Synthetic oligonucleotide
  Target: LAMA2; (-) strand; PAM type: NNNNGHTT; PAM sequence: TCCAGTTT
aattttactgactgaaagcc

SEQ ID NO: 39336 - DNA, 20 bp, Artificial Sequence
  Description of Artificial Sequence: Synthetic oligonucleotide
  Target: LAMA2; (-) strand; PAM type: NNNNGHTT; PAM sequence: ATTTGTTT
cttttattgtaaatgtatgc

SEQ ID NO: 39337 - DNA, 20 bp, Artificial Sequence
  Description of Artificial Sequence: Synthetic oligonucleotide
  Target: LAMA2; (-) strand; PAM type: NNNNGHTT; PAM sequence: TAGGGCTT
caatagtactgtaagatatg

SEQ ID NO: 39338 - DNA, 20 bp, Artificial Sequence
  Description of Artificial Sequence: Synthetic oligonucleotide
  Target: LAMA2; (-) strand; PAM type: NNNNGHTT; PAM sequence: CCCTGCTT
aaaatagtctcgggacaaaa

SEQ ID NO: 39339 - DNA, 20 bp, Artificial Sequence
  Description of Artificial Sequence: Synthetic oligonucleotide
  Target: LAMA2; (-) strand; PAM type: NNNNGHTT; PAM sequence: TCAAGATT
tgagctaaccaattgtggag

SEQ ID NO: 39340 - DNA, 20 bp, Artificial Sequence
  Description of Artificial Sequence: Synthetic oligonucleotide
  Target: LAMA2; (-) strand; PAM type: NNNNGHTT; PAM sequence: TTGTGCTT
taagaactagcattcatata

SEQ ID NO: 39341 - DNA, 20 bp, Artificial Sequence
  Description of Artificial Sequence: Synthetic oligonucleotide
  Target: LAMA2; (-) strand; PAM type: NNNNGHTT; PAM sequence: TTGAGATT
cagacattcatggtcagtaa

SEQ ID NO: 39342 - DNA, 20 bp, Artificial Sequence
  Description of Artificial Sequence: Synthetic oligonucleotide
  Target: LAMA2; (-) strand; PAM type: NNNNGHTT; PAM sequence: ATTTGTTT
gtttacaaatttgttcaaaa

SEQ ID NO: 39343 - DNA, 20 bp, Artificial Sequence
  Description of Artificial Sequence: Synthetic oligonucleotide
  Target: LAMA2; (-) strand; PAM type: NNNNGHTT; PAM sequence: AAATGTTT
actaccaaatttcagtaata

SEQ ID NO: 39344 - DNA, 20 bp, Artificial Sequence
  Description of Artificial Sequence: Synthetic oligonucleotide
  Target: LAMA2; (-) strand; PAM type: NNNNGHTT; PAM sequence: TGTAGCTT
cttttcaaatatttaaataa

SEQ ID NO: 39345 - DNA, 20 bp, Artificial Sequence
  Description of Artificial Sequence: Synthetic oligonucleotide
  Target: LAMA2; (-) strand; PAM type: NNNNGHTT; PAM sequence: AGTCGATT
tatcattttaaaaattccaa

SEQ ID NO: 39346 - DNA, 20 bp, Artificial Sequence
  Description of Artificial Sequence: Synthetic oligonucleotide
  Target: LAMA2; (-) strand; PAM type: NNNNGHTT; PAM sequence: ATGAGATT
ttaaatcaatcaaatatcaa

SEQ ID NO: 39347 - DNA, 20 bp, Artificial Sequence
  Description of Artificial Sequence: Synthetic oligonucleotide
  Target: LAMA2; (-) strand; PAM type: NNNNGHTT; PAM sequence: TATTGATT
tctatatatccacactctca

SEQ ID NO: 39348 - DNA, 20 bp, Artificial Sequence
  Description of Artificial Sequence: Synthetic oligonucleotide
  Target: LAMA2; (-) strand; PAM type: NNNNGHTT; PAM sequence: ATATGCTT
aagcagttttaatgatataa

SEQ ID NO: 39349 - DNA, 20 bp, Artificial Sequence
  Description of Artificial Sequence: Synthetic oligonucleotide
  Target: LAMA2; (-) strand; PAM type: NNNNGHTT; PAM sequence: AGCAGTTT
gaattaaaatcctgttttga

SEQ ID NO: 39350 - DNA, 20 bp, Artificial Sequence
  Description of Artificial Sequence: Synthetic oligonucleotide
  Target: LAMA2; (-) strand; PAM type: NNNNGHTT; PAM sequence: TCCTGTTT
ataatatgcaagaattaaaa

SEQ ID NO: 39351 - DNA, 20 bp, Artificial Sequence
  Description of Artificial Sequence: Synthetic oligonucleotide
  Target: LAMA2; (-) strand; PAM type: NNNNGHTT; PAM sequence: CCTGGCTT
ttcatgtaaaattttagata

SEQ ID NO: 39352 - DNA, 20 bp, Artificial Sequence
  Description of Artificial Sequence: Synthetic oligonucleotide
  Target: LAMA2; (-) strand; PAM type: NNNNGHTT; PAM sequence: ATATGATT
gttctaattcagattgtggt

SEQ ID NO: 39353 - DNA, 20 bp, Artificial Sequence
  Description of Artificial Sequence: Synthetic oligonucleotide
  Target: LAMA2; (-) strand; PAM type: NNNNGHTT; PAM sequence: TTCAGATT
atttttatttctagttctaa

SEQ ID NO: 39354 - DNA, 20 bp, Artificial Sequence
  Description of Artificial Sequence: Synthetic oligonucleotide
  Target: LAMA2; (-) strand; PAM type: NNNNGHTT; PAM sequence: GTTGGTTT
ttctcatctttacatttact

SEQ ID NO: 39355 - DNA, 20 bp, Artificial Sequence
  Description of Artificial Sequence: Synthetic oligonucleotide
  Target: LAMA2; (-) strand; PAM type: NNNNGHTT; PAM sequence: CTGAGTTT
taaaatgtaaaatgggttga

SEQ ID NO: 39356 - DNA, 20 bp, Artificial Sequence
  Description of Artificial Sequence: Synthetic oligonucleotide
  Target: LAMA2; (-) strand; PAM type: NNNNGHTT; PAM sequence: AATAGTTT
ttaaaatgaccgtagctaag

SEQ ID NO: 39357 - DNA, 20 bp, Artificial Sequence
  Description of Artificial Sequence: Synthetic oligonucleotide
  Target: LAMA2; (-) strand; PAM type: NNNNGHTT; PAM sequence: ATTAGATT
aaagtgaaatcacactgaaa

SEQ ID NO: 39358 - DNA, 20 bp, Artificial Sequence
  Description of Artificial Sequence: Synthetic oligonucleotide
  Target: LAMA2; (-) strand; PAM type: NNNNGHTT; PAM sequence: AGTAGTTT
atattttagatattattgtt

SEQ ID NO: 39359 - DNA, 20 bp, Artificial Sequence
  Description of Artificial Sequence: Synthetic oligonucleotide
  Target: LAMA2; (-) strand; PAM type: NNNNGHTT; PAM sequence: AATTGCTT
tttggaaaattagacttaat

SEQ ID NO: 39360 - DNA, 20 bp, Artificial Sequence
  Description of Artificial Sequence: Synthetic oligonucleotide
  Target: LAMA2; (-) strand; PAM type: NNNNGHTT; PAM sequence: TCCTGCTT
agaaaaatgaaaatcatcta

SEQ ID NO: 39361 - DNA, 20 bp, Artificial Sequence
  Description of Artificial Sequence: Synthetic oligonucleotide
  Target: LAMA2; (-) strand; PAM type: NNNNGHTT; PAM sequence: GATGGATT
atgaaacgttagaaaatgct

SEQ ID NO: 39362 - DNA, 20 bp, Artificial Sequence
  Description of Artificial Sequence: Synthetic oligonucleotide
  Target: LAMA2; (-) strand; PAM type: NNNNGHTT; PAM sequence: TCAGGCTT
ctttcttgaaatgcatgtta

SEQ ID NO: 39363 - DNA, 20 bp, Artificial Sequence
  Description of Artificial Sequence: Synthetic oligonucleotide
  Target: LAMA2; (-) strand; PAM type: NNNNGHTT; PAM sequence: ACCAGCTT
tttacggtcaagtttgcatt

SEQ ID NO: 39364 - DNA, 20 bp, Artificial Sequence
  Description of Artificial Sequence: Synthetic oligonucleotide
  Target: LAMA2; (-) strand; PAM type: NNNNGHTT; PAM sequence: TCAAGTTT
taacaaatcatcttttacgg

SEQ ID NO: 39365 - DNA, 20 bp, Artificial Sequence
  Description of Artificial Sequence: Synthetic oligonucleotide
  Target: LAMA2; (-) strand; PAM type: NNNNGHTT; PAM sequence: AATTGATT
ggtttcattctaacaattga

SEQ ID NO: 39366 - DNA, 20 bp, Artificial Sequence
  Description of Artificial Sequence: Synthetic oligonucleotide
  Target: LAMA2; (-) strand; PAM type: NNNNGHTT; PAM sequence: TTAGGTTT
ttcaacaaacatttgatttc

SEQ ID NO: 39367 - DNA, 20 bp, Artificial Sequence
  Description of Artificial Sequence: Synthetic oligonucleotide
  Target: LAMA2; (-) strand; PAM type: NNNNGHTT; PAM sequence: ATTTGATT
aaataattggttcaacaaac

SEQ ID NO: 39368 - DNA, 20 bp, Artificial Sequence
  Description of Artificial Sequence: Synthetic oligonucleotide
  Target: LAMA2; (-) strand; PAM type: NNNNGHTT; PAM sequence: TTATGCTT
ttataaatataattttcagg

SEQ ID NO: 39369 - DNA, 20 bp, Artificial Sequence
  Description of Artificial Sequence: Synthetic oligonucleotide
  Target: LAMA2; (-) strand; PAM type: NNNNGHTT; PAM sequence: AATTGATT
tcttcatttttagtaatctg

SEQ ID NO: 39370 - DNA, 20 bp, Artificial Sequence
  Description of Artificial Sequence: Synthetic oligonucleotide
  Target: LAMA2; (-) strand; PAM type: NNNNGHTT; PAM sequence: TCAAGATT
ccagcctgtcccagtacttc

SEQ ID NO: 39371 - DNA, 20 bp, Artificial Sequence
  Description of Artificial Sequence: Synthetic oligonucleotide
  Target: LAMA2; (-) strand; PAM type: NNNNGHTT; PAM sequence: AGGCGCTT
tcaaaattaactgcagaatt

SEQ ID NO: 39372 - DNA, 20 bp, Artificial Sequence
  Description of Artificial Sequence: Synthetic oligonucleotide
  Target: LAMA2; (-) strand; PAM type: NNNNGHTT; PAM sequence: TTGGGTTT
cctcactgatgttatgacaa

SEQ ID NO: 39373 - DNA, 20 bp, Artificial Sequence
  Description of Artificial Sequence: Synthetic oligonucleotide
  Target: LAMA2; (-) strand; PAM type: NNNNGHTT; PAM sequence: TCAGGATT
acagaggaacttaggagtta

SEQ ID NO: 39374 - DNA, 20 bp, Artificial Sequence
  Description of Artificial Sequence: Synthetic oligonucleotide
  Target: LAMA2; (-) strand; PAM type: NNNNGHTT; PAM sequence: TGCTGATT
ttgcagggaacacagcccct

SEQ ID NO: 39375 - DNA, 20 bp, Artificial Sequence
  Description of Artificial Sequence: Synthetic oligonucleotide
  Target: LAMA2; (-) strand; PAM type: NNNNGHTT; PAM sequence: CTGTGCTT
gttaaatacgttgtatcaat

SEQ ID NO: 39376 - DNA, 20 bp, Artificial Sequence
  Description of Artificial Sequence: Synthetic oligonucleotide
  Target: LAMA2; (-) strand; PAM type: NNNNGHTT; PAM sequence: CAGTGTTT
cttgcacacagttattaagg

SEQ ID NO: 39377 - DNA, 20 bp, Artificial Sequence
  Description of Artificial Sequence: Synthetic oligonucleotide
  Target: LAMA2; (-) strand; PAM type: NNNNGHTT; PAM sequence: TGCTGATT
gacacaaccaaacgagcatc

SEQ ID NO: 39378 - DNA, 20 bp, Artificial Sequence
  Description of Artificial Sequence: Synthetic oligonucleotide
  Target: LAMA2; (-) strand; PAM type: NNNNGHTT; PAM sequence: CAGTGTTT
atttaactttcaagccgtag

SEQ ID NO: 39379 - DNA, 20 bp, Artificial Sequence
  Description of Artificial Sequence: Synthetic oligonucleotide
  Target: LAMA2; (-) strand; PAM type: NNNNGHTT; PAM sequence: TTGAGCTT
gaaatgcattggcgtggggt

SEQ ID NO: 39380 - DNA, 20 bp, Artificial Sequence
  Description of Artificial Sequence: Synthetic oligonucleotide
  Target: LAMA2; (-) strand; PAM type: NNNNGHTT; PAM sequence: TGGGGTTT
aaagttgaaatgcattggcg

SEQ ID NO: 39381 - DNA, 20 bp, Artificial Sequence
  Description of Artificial Sequence: Synthetic oligonucleotide
  Target: LAMA2; (-) strand; PAM type: NNNNGHTT; PAM sequence: AGATGTTT
gcagccaaaagtagatgaaa

SEQ ID NO: 39382 - DNA, 20 bp, Artificial Sequence
  Description of Artificial Sequence: Synthetic oligonucleotide
  Target: LAMA2; (-) strand; PAM type: NNNNGHTT; PAM sequence: CATAGTTT
ctatttctctcttagaacat

SEQ ID NO: 39383 - DNA, 20 bp, Artificial Sequence
  Description of Artificial Sequence: Synthetic oligonucleotide
  Target: LAMA2; (-) strand; PAM type: NNNNGHTT; PAM sequence: TACTGCTT
tgtggctggatgtataagaa

SEQ ID NO: 39384 - DNA, 20 bp, Artificial Sequence
  Description of Artificial Sequence: Synthetic oligonucleotide
  Target: LAMA2; (-) strand; PAM type: NNNNGHTT; PAM sequence: TCATGATT
ctaagtgatattttcttagc

SEQ ID NO: 39385 - DNA, 20 bp, Artificial Sequence
  Description of Artificial Sequence: Synthetic oligonucleotide
  Target: LAMA2; (-) strand; PAM type: NNNNGHTT; PAM sequence: TAGTGATT
aacaaaggtaatattcaaac

SEQ ID NO: 39386 - DNA, 20 bp, Artificial Sequence
  Description of Artificial Sequence: Synthetic oligonucleotide
  Target: LAMA2; (-) strand; PAM type: NNNNGHTT; PAM sequence: CAATGTTT
tttgccacaacagtgaataa

SEQ ID NO: 39387 - DNA, 20 bp, Artificial Sequence
  Description of Artificial Sequence: Synthetic oligonucleotide
  Target: LAMA2; (-) strand; PAM type: NNNNGHTT; PAM sequence: TACTGCTT
atagttttaaatattattcc

SEQ ID NO: 39388 - DNA, 20 bp, Artificial Sequence
  Description of Artificial Sequence: Synthetic oligonucleotide
  Target: LAMA2; (-) strand; PAM type: NNNNGHTT; PAM sequence: AATAGTTT
tgaaagatattggttcttta

SEQ ID NO: 39389 - DNA, 20 bp, Artificial Sequence
  Description of Artificial Sequence: Synthetic oligonucleotide
  Target: LAMA2; (-) strand; PAM type: NNNNGHTT; PAM sequence: CATGGCTT
tatcaattagaataacttat

SEQ ID NO: 39390 - DNA, 20 bp, Artificial Sequence
  Description of Artificial Sequence: Synthetic oligonucleotide
  Target: LAMA2; (-) strand; PAM type: NNNNGHTT; PAM sequence: TACAGATT
cagatattggcttagagata

SEQ ID NO: 39391 - DNA, 20 bp, Artificial Sequence
  Description of Artificial Sequence: Synthetic oligonucleotide
  Target: LAMA2; (-) strand; PAM type: NNNNGHTT; PAM sequence: ATTGGCTT
aatttttaagttatacagat

SEQ ID NO: 39392 - DNA, 20 bp, Artificial Sequence
  Description of Artificial Sequence: Synthetic oligonucleotide
  Target: LAMA2; (-) strand; PAM type: NNNNGHTT; PAM sequence: TACAGCTT
gaacagagtatattttaaaa

SEQ ID NO: 39393 - DNA, 20 bp, Artificial Sequence
  Description of Artificial Sequence: Synthetic oligonucleotide
  Target: LAMA2; (-) strand; PAM type: NNNNGHTT; PAM sequence: TTTGGATT
aagtaaaaatgtcagtgagc

SEQ ID NO: 39394 - DNA, 20 bp, Artificial Sequence
  Description of Artificial Sequence: Synthetic oligonucleotide
  Target: LAMA2; (-) strand; PAM type: NNNNGHTT; PAM sequence: GTGAGCTT
catattaagtaaaaatgtca

SEQ ID NO: 39395 - DNA, 20 bp, Artificial Sequence
  Description of Artificial Sequence: Synthetic oligonucleotide
  Target: LAMA2; (-) strand; PAM type: NNNNGHTT; PAM sequence: TGGTGTTT
tttgtgcttttttttttcta

SEQ ID NO: 39396 - DNA, 20 bp, Artificial Sequence
  Description of Artificial Sequence: Synthetic oligonucleotide
  Target: LAMA2; (-) strand; PAM type: NNNNGHTT; PAM sequence: TTGTGCTT
atattactattcttcctgtt

SEQ ID NO: 39397 - DNA, 20 bp, Artificial Sequence
  Description of Artificial Sequence: Synthetic oligonucleotide
  Target: LAMA2; (-) strand; PAM type: NNNNGHTT; PAM sequence: TCCTGTTT
ctcagtcatattactattct

SEQ ID NO: 39398 - DNA, 20 bp, Artificial Sequence
  Description of Artificial Sequence: Synthetic oligonucleotide
  Target: LAMA2; (-) strand; PAM type: NNNNGHTT; PAM sequence: AAATGCTT
aagataataataataatgat

SEQ ID NO: 39399 - DNA, 20 bp, Artificial Sequence
  Description of Artificial Sequence: Synthetic oligonucleotide
  Target: LAMA2; (-) strand; PAM type: NNNNGHTT; PAM sequence: GCTAGTTT
aaagaaaacctgagtaatta

SEQ ID NO: 39400 - DNA, 20 bp, Artificial Sequence
  Description of Artificial Sequence: Synthetic oligonucleotide
  Target: LAMA2; (-) strand; PAM type: NNNNGHTT; PAM sequence: TTATGTTT
aagaagaaaaatagttacca

SEQ ID NO: 39401 - DNA, 20 bp, Artificial Sequence
  Description of Artificial Sequence: Synthetic oligonucleotide
  Target: LAMA2; (-) strand; PAM type: NNNNGHTT; PAM sequence: AAATGATT
gttgttgctaattttaagcc

SEQ ID NO: 39402 - DNA, 20 bp, Artificial Sequence
  Description of Artificial Sequence: Synthetic oligonucleotide
  Target: LAMA2; (-) strand; PAM type: NNNNGHTT; PAM sequence: TGCTGTTT
actaaataaatgttagtcat

SEQ ID NO: 39403 - DNA, 20 bp, Artificial Sequence
  Description of Artificial Sequence: Synthetic oligonucleotide
  Target: LAMA2; (-) strand; PAM type: NNNNGHTT; PAM sequence: AGGTGTTT
cattacacaccagctgtgga

SEQ ID NO: 39404 - DNA, 20 bp, Artificial Sequence
  Description of Artificial Sequence: Synthetic oligonucleotide
  Target: LAMA2; (-) strand; PAM type: NNNNGHTT; PAM sequence: CAGCGTTT
tactaagaatatttctagtg

SEQ ID NO: 39405 - DNA, 20 bp, Artificial Sequence
  Description of Artificial Sequence: Synthetic oligonucleotide
  Target: LAMA2; (-) strand; PAM type: NNNNGHTT; PAM sequence: TAATGTTT
tttttcaaagattgcaaaaa

SEQ ID NO: 39406 - DNA, 20 bp, Artificial Sequence
  Description of Artificial Sequence: Synthetic oligonucleotide
  Target: LAMA2; (-) strand; PAM type: NNNNGHTT; PAM sequence: CAAAGATT
atctaccttttgtacttttt

SEQ ID NO: 39407 - DNA, 20 bp, Artificial Sequence
  Description of Artificial Sequence: Synthetic oligonucleotide
  Target: LAMA2; (-) strand; PAM type: NNNNGHTT; PAM sequence: TATAGATT
tttaccacctgacttttttc

SEQ ID NO: 39408 - DNA, 20 bp, Artificial Sequence
  Description of Artificial Sequence: Synthetic oligonucleotide
  Target: LAMA2; (-) strand; PAM type: NNNNGHTT; PAM sequence: TTTCGATT
ctgtttatatataaagatac

SEQ ID NO: 39409 - DNA, 20 bp, Artificial Sequence
  Description of Artificial Sequence: Synthetic oligonucleotide
  Target: LAMA2; (-) strand; PAM type: NNNNGHTT; PAM sequence: CACTGTTT
taaaatggttgaattatgga

SEQ ID NO: 39410 - DNA, 20 bp, Artificial Sequence
  Description of Artificial Sequence: Synthetic oligonucleotide
  Target: LAMA2; (-) strand; PAM type: NNNNGHTT; PAM sequence: ATAAGCTT
agtaaaaaccaataagctta

SEQ ID NO: 39411 - DNA, 20 bp, Artificial Sequence
  Description of Artificial Sequence: Synthetic oligonucleotide
  Target: LAMA2; (-) strand; PAM type: NNNNGHTT; PAM sequence: ATAAGCTT
ccgatctgcagtaaaaacca

SEQ ID NO: 39412 - DNA, 20 bp, Artificial Sequence
  Description of Artificial Sequence: Synthetic oligonucleotide
  Target: LAMA2; (-) strand; PAM type: NNNNGHTT; PAM sequence: ATTAGTTT
aatttgtttatgctgtacgg

SEQ ID NO: 39413 - DNA, 20 bp, Artificial Sequence
  Description of Artificial Sequence: Synthetic oligonucleotide
  Target: LAMA2; (-) strand; PAM type: NNNNGHTT; PAM sequence: TACGGATT
tttctaatttgtttatgctg

SEQ ID NO: 39414 - DNA, 20 bp, Artificial Sequence
  Description of Artificial Sequence: Synthetic oligonucleotide
  Target: LAMA2; (-) strand; PAM type: NNNNGHTT; PAM sequence: ATTTGTTT
ttattttaagttcatttcta

SEQ ID NO: 39415 - DNA, 20 bp, Artificial Sequence
  Description of Artificial Sequence: Synthetic oligonucleotide
  Target: LAMA2; (-) strand; PAM type: NNNNGHTT; PAM sequence: TTTTGTTT
gggtactacaaagtttacta

SEQ ID NO: 39416 - DNA, 20 bp, Artificial Sequence
  Description of Artificial Sequence: Synthetic oligonucleotide
  Target: LAMA2; (-) strand; PAM type: NNNNGHTT; PAM sequence: CAAAGTTT
caccttatattcgggtacta

SEQ ID NO: 39417 - DNA, 20 bp, Artificial Sequence
  Description of Artificial Sequence: Synthetic oligonucleotide
  Target: LAMA2; (-) strand; PAM type: NNNNGHTT; PAM sequence: ATCAGATT
gaaaggaaagaattggtgtt

SEQ ID NO: 39418 - DNA, 20 bp, Artificial Sequence
  Description of Artificial Sequence: Synthetic oligonucleotide
  Target: LAMA2; (-) strand; PAM type: NNNNGHTT; PAM sequence: TGAAGTTT
aagtatttttagctttccta

SEQ ID NO: 39419 - DNA, 20 bp, Artificial Sequence
  Description of Artificial Sequence: Synthetic oligonucleotide
  Target: LAMA2; (-) strand; PAM type: NNNNGHTT; PAM sequence: TTTAGCTT
atttcaaaagttaaagtatt

SEQ ID NO: 39420 - DNA, 20 bp, Artificial Sequence
  Description of Artificial Sequence: Synthetic oligonucleotide
  Target: LAMA2; (-) strand; PAM type: NNNNGHTT; PAM sequence: GTTGGTTT
agtgttgagttttatattgt

SEQ ID NO: 39421 - DNA, 20 bp, Artificial Sequence
  Description of Artificial Sequence: Synthetic oligonucleotide
  Target: LAMA2; (-) strand; PAM type: NNNNGHTT; PAM sequence: TTGAGTTT
taaaaatttgacacaaagtg

SEQ ID NO: 39422 - DNA, 20 bp, Artificial Sequence
  Description of Artificial Sequence: Synthetic oligonucleotide
  Target: LAMA2; (-) strand; PAM type: NNNNGHTT; PAM sequence: ACAAGCTT
ttacccagatgagaacattc

SEQ ID NO: 39423 - DNA, 20 bp, Artificial Sequence
  Description of Artificial Sequence: Synthetic oligonucleotide
  Target: LAMA2; (-) strand; PAM type: NNNNGHTT; PAM sequence: TATTGATT
cctacaagtaaactgtaaga

SEQ ID NO: 39424 - DNA, 20 bp, Artificial Sequence
  Description of Artificial Sequence: Synthetic oligonucleotide
  Target: LAMA2; (-) strand; PAM type: NNNNGHTT; PAM sequence: TGTAGATT
tttgttctttttacccctct

SEQ ID NO: 39425 - DNA, 20 bp, Artificial Sequence
  Description of Artificial Sequence: Synthetic oligonucleotide
  Target: LAMA2; (-) strand; PAM type: NNNNGHTT; PAM sequence: TATAGATT
cataattcaggggcaatttc

SEQ ID NO: 39426 - DNA, 20 bp, Artificial Sequence
  Description of Artificial Sequence: Synthetic oligonucleotide
  Target: LAMA2; (-) strand; PAM type: NNNNGHTT; PAM sequence: AAATGATT
tatggtctaccaatgggaaa

SEQ ID NO: 39427 - DNA, 20 bp, Artificial Sequence
  Description of Artificial Sequence: Synthetic oligonucleotide
  Target: LAMA2; (-) strand; PAM type: NNNNGHTT; PAM sequence: CCAGGCTT
ctgacgctcattgactgggt

SEQ ID NO: 39428 - DNA, 20 bp, Artificial Sequence
  Description of Artificial Sequence: Synthetic oligonucleotide
  Target: LAMA2; (-) strand; PAM type: NNNNGHTT; PAM sequence: AAGTGATT
aaaaagctgataaaaatgca

SEQ ID NO: 39429 - DNA, 20 bp, Artificial Sequence
  Description of Artificial Sequence: Synthetic oligonucleotide
  Target: LAMA2; (-) strand; PAM type: NNNNGHTT; PAM sequence: GGATGATT
tcactgcaatggggcacaag

SEQ ID NO: 39430 - DNA, 20 bp, Artificial Sequence
  Description of Artificial Sequence: Synthetic oligonucleotide
  Target: LAMA2; (-) strand; PAM type: NNNNGHTT; PAM sequence: CTACGATT
ccccccctcaaaaaaacaga

SEQ ID NO: 39431 - DNA, 20 bp, Artificial Sequence
  Description of Artificial Sequence: Synthetic oligonucleotide
  Target: LAMA2; (-) strand; PAM type: NNNNGHTT; PAM sequence: ATATGCTT
gagaaaacatttgtccataa

SEQ ID NO: 39432 - DNA, 20 bp, Artificial Sequence
  Description of Artificial Sequence: Synthetic oligonucleotide
  Target: LAMA2; (-) strand; PAM type: NNNNGHTT; PAM sequence: AAAGGATT
aaatgacaaataaataaatg

SEQ ID NO: 39433 - DNA, 20 bp, Artificial Sequence
  Description of Artificial Sequence: Synthetic oligonucleotide
  Target: LAMA2; (-) strand; PAM type: NNNNGHTT; PAM sequence: ATAAGCTT
aactcaaaatagaaatgggc

SEQ ID NO: 39434 - DNA, 20 bp, Artificial Sequence
  Description of Artificial Sequence: Synthetic oligonucleotide
  Target: LAMA2; (-) strand; PAM type: NNNNGHTT; PAM sequence: GCAAGCTT
aaaagcaatctatatgaaaa

SEQ ID NO: 39435 - DNA, 20 bp, Artificial Sequence
  Description of Artificial Sequence: Synthetic oligonucleotide
  Target: LAMA2; (-) strand; PAM type: NNNNGHTT; PAM sequence: TAAAGATT
agataataagctagtgttta

SEQ ID NO: 39436 - DNA, 20 bp, Artificial Sequence
  Description of Artificial Sequence: Synthetic oligonucleotide
  Target: LAMA2; (-) strand; PAM type: NNNNGHTT; PAM sequence: TAGTGTTT
agaagaaaaagataataagc

SEQ ID NO: 39437 - DNA, 20 bp, Artificial Sequence
  Description of Artificial Sequence: Synthetic oligonucleotide
  Target: LAMA2; (-) strand; PAM type: NNNNGHTT; PAM sequence: TAATGTTT
aggatagtcttttcaacaaa

SEQ ID NO: 39438 - DNA, 20 bp, Artificial Sequence
  Description of Artificial Sequence: Synthetic oligonucleotide
  Target: LAMA2; (-) strand; PAM type: NNNNGHTT; PAM sequence: GATAGATT
gcataaacatatatatagtt

SEQ ID NO: 39439 - DNA, 20 bp, Artificial Sequence
  Description of Artificial Sequence: Synthetic oligonucleotide
  Target: LAMA2; (-) strand; PAM type: NNNNGHTT; PAM sequence: ACCTGATT
gaggttgaggaatttacaat

SEQ ID NO: 39440 - DNA, 20 bp, Artificial Sequence
  Description of Artificial Sequence: Synthetic oligonucleotide
  Target: LAMA2; (-) strand; PAM type: NNNNGHTT; PAM sequence: GCAGGCTT
ataatttcagccaaatccta

SEQ ID NO: 39441 - DNA, 20 bp, Artificial Sequence
  Description of Artificial Sequence: Synthetic oligonucleotide
  Target: LAMA2; (-) strand; PAM type: NNNNGHTT; PAM sequence: CAAAGCTT
tacatttaacaatatatatg

SEQ ID NO: 39442 - DNA, 20 bp, Artificial Sequence
  Description of Artificial Sequence: Synthetic oligonucleotide
  Target: LAMA2; (-) strand; PAM type: NNNNGHTT; PAM sequence: ATTTGCTT
aaactgaaatggaacacagc

SEQ ID NO: 39443 - DNA, 20 bp, Artificial Sequence
  Description of Artificial Sequence: Synthetic oligonucleotide
  Target: LAMA2; (-) strand; PAM type: NNNNGHTT; PAM sequence: GCAAGATT
aactagaactaataagttta

SEQ ID NO: 39444 - DNA, 20 bp, Artificial Sequence
  Description of Artificial Sequence: Synthetic oligonucleotide
  Target: LAMA2; (-) strand; PAM type: NNNNGHTT; PAM sequence: ATAAGTTT
ccaaaaagaaactagaacta

SEQ ID NO: 39445 - DNA, 20 bp, Artificial Sequence
  Description of Artificial Sequence: Synthetic oligonucleotide
  Target: LAMA2; (-) strand; PAM type: NNNNGHTT; PAM sequence: ACATGATT
taaatctctctttgcagatg

SEQ ID NO: 39446 - DNA, 20 bp, Artificial Sequence
  Description of Artificial Sequence: Synthetic oligonucleotide
  Target: LAMA2; (-) strand; PAM type: NNNNGHTT; PAM sequence: CACAGATT
agaaaatgccacagaagtta

SEQ ID NO: 39447 - DNA, 20 bp, Artificial Sequence
  Description of Artificial Sequence: Synthetic oligonucleotide
  Target: LAMA2; (-) strand; PAM type: NNNNGHTT; PAM sequence: AATAGTTT
tgcttccaccacttctagtc

SEQ ID NO: 39448 - DNA, 20 bp, Artificial Sequence
  Description of Artificial Sequence: Synthetic oligonucleotide
  Target: LAMA2; (-) strand; PAM type: NNNNGHTT; PAM sequence: ATTTGCTT
ctaaggaacaaggcaaggat

SEQ ID NO: 39449 - DNA, 20 bp, Artificial Sequence
  Description of Artificial Sequence: Synthetic oligonucleotide
  Target: LAMA2; (-) strand; PAM type: NNNNGHTT; PAM sequence: CAATGCTT
tcattttcaattataaaaga

SEQ ID NO: 39450 - DNA, 20 bp, Artificial Sequence
  Description of Artificial Sequence: Synthetic oligonucleotide
  Target: LAMA2; (-) strand; PAM type: NNNNGHTT; PAM sequence: AACAGCTT
tcagtataatctgtcatatt

SEQ ID NO: 39451 - DNA, 20 bp, Artificial Sequence
  Description of Artificial Sequence: Synthetic oligonucleotide
  Target: LAMA2; (-) strand; PAM type: NNNNGHTT; PAM sequence: ACTGGATT
attaatctgaggattgtaag

SEQ ID NO: 39452 - DNA, 20 bp, Artificial Sequence
  Description of Artificial Sequence: Synthetic oligonucleotide
  Target: LAMA2; (-) strand; PAM type: NNNNGHTT; PAM sequence: TGAGGATT
atggccaagcaggattaatc

SEQ ID NO: 39453 - DNA, 20 bp, Artificial Sequence
  Description of Artificial Sequence: Synthetic oligonucleotide
  Target: LAMA2; (-) strand; PAM type: NNNNGHTT; PAM sequence: GCAGGATT
aggataatccccatggccaa

SEQ ID NO: 39454 - DNA, 20 bp, Artificial Sequence
  Description of Artificial Sequence: Synthetic oligonucleotide
  Target: LAMA2; (-) strand; PAM type: NNNNGHTT; PAM sequence: ACAGGATT
cattaagaaaatgctagcaa

SEQ ID NO: 39455 - DNA, 20 bp, Artificial Sequence
  Description of Artificial Sequence: Synthetic oligonucleotide
  Target: LAMA2; (-) strand; PAM type: NNNNGHTT; PAM sequence: TGAAGCTT
atacttctgaatccatttca

SEQ ID NO: 39456 - DNA, 20 bp, Artificial Sequence
  Description of Artificial Sequence: Synthetic oligonucleotide
  Target: LAMA2; (-) strand; PAM type: NNNNGHTT; PAM sequence: AAACGCTT
ttctacctcattgattgtga

SEQ ID NO: 39457 - DNA, 20 bp, Artificial Sequence
  Description of Artificial Sequence: Synthetic oligonucleotide
  Target: LAMA2; (-) strand; PAM type: NNNNGHTT; PAM sequence: CATTGATT
agtatttctgttttctacct

SEQ ID NO: 39458 - DNA, 20 bp, Artificial Sequence
  Description of Artificial Sequence: Synthetic oligonucleotide
  Target: LAMA2; (-) strand; PAM type: NNNNGHTT; PAM sequence: TTCTGTTT
tttgggttcctctaaagtat

SEQ ID NO: 39459 - DNA, 20 bp, Artificial Sequence
  Description of Artificial Sequence: Synthetic oligonucleotide
  Target: LAMA2; (-) strand; PAM type: NNNNGHTT; PAM sequence: GTGAGCTT
tttactgatcttttcaaata

SEQ ID NO: 39460 - DNA, 20 bp, Artificial Sequence
  Description of Artificial Sequence: Synthetic oligonucleotide
  Target: LAMA2; (-) strand; PAM type: NNNNGHTT; PAM sequence: TCTTGATT
cttgtttcttctctcttttt

SEQ ID NO: 39461 - DNA, 20 bp, Artificial Sequence
  Description of Artificial Sequence: Synthetic oligonucleotide
  Target: LAMA2; (-) strand; PAM type: NNNNGHTT; PAM sequence: GCTTGTTT
ttttatttgtgattttgatt

SEQ ID NO: 39462 - DNA, 20 bp, Artificial Sequence
  Description of Artificial Sequence: Synthetic oligonucleotide
  Target: LAMA2; (-) strand; PAM type: NNNNGHTT; PAM sequence: GATTGCTT
ccccttttatttgtgatttt

SEQ ID NO: 39463 - DNA, 20 bp, Artificial Sequence
  Description of Artificial Sequence: Synthetic oligonucleotide
  Target: LAMA2; (-) strand; PAM type: NNNNGHTT; PAM sequence: TTTTGATT
tgtcccccttttatttgtga

SEQ ID NO: 39464 - DNA, 20 bp, Artificial Sequence
  Description of Artificial Sequence: Synthetic oligonucleotide
  Target: LAMA2; (-) strand; PAM type: NNNNGHTT; PAM sequence: TTGTGATT
tagtgatgtcccccttttat

SEQ ID NO: 39465 - DNA, 20 bp, Artificial Sequence
  Description of Artificial Sequence: Synthetic oligonucleotide
  Target: LAMA2; (-) strand; PAM type: NNNNGHTT; PAM sequence: TAAGGTTT
aggattacaaatcaatgatc

SEQ ID NO: 39466 - DNA, 20 bp, Artificial Sequence
  Description of Artificial Sequence: Synthetic oligonucleotide
  Target: LAMA2; (-) strand; PAM type: NNNNGHTT; PAM sequence: AAAGGATT
caaatgcccatattagagaa

SEQ ID NO: 39467 - DNA, 20 bp, Artificial Sequence
  Description of Artificial Sequence: Synthetic oligonucleotide
  Target: LAMA2; (-) strand; PAM type: NNNNGHTT; PAM sequence: AGTAGTTT
aatatgtggagtgcaaacaa

SEQ ID NO: 39468 - DNA, 20 bp, Artificial Sequence
  Description of Artificial Sequence: Synthetic oligonucleotide
  Target: LAMA2; (-) strand; PAM type: NNNNGHTT; PAM sequence: TAAAGATT
acattatccccaaaataaat

SEQ ID NO: 39469 - DNA, 20 bp, Artificial Sequence
  Description of Artificial Sequence: Synthetic oligonucleotide
  Target: LAMA2; (-) strand; PAM type: NNNNGHTT; PAM sequence: TGCAGATT
tttcaaaaggtctgaaataa

SEQ ID NO: 39470 - DNA, 20 bp, Artificial Sequence
  Description of Artificial Sequence: Synthetic oligonucleotide
  Target: LAMA2; (-) strand; PAM type: NNNNGHTT; PAM sequence: AGAAGTTT
taaggataattgacctatat

SEQ ID NO: 39471 - DNA, 20 bp, Artificial Sequence
  Description of Artificial Sequence: Synthetic oligonucleotide
  Target: LAMA2; (-) strand; PAM type: NNNNGHTT; PAM sequence: AGAGGATT
ctactctggaggctgaggtg

SEQ ID NO: 39472 - DNA, 20 bp, Artificial Sequence
  Description of Artificial Sequence: Synthetic oligonucleotide
  Target: LAMA2; (-) strand; PAM type: NNNNGHTT; PAM sequence: TTAAGATT
caaattaaaaggccaaatta

SEQ ID NO: 39473 - DNA, 20 bp, Artificial Sequence
  Description of Artificial Sequence: Synthetic oligonucleotide
  Target: LAMA2; (-) strand; PAM type: NNNNGHTT; PAM sequence: AAATGATT
ccaatatttacattaagtgg

SEQ ID NO: 39474 - DNA, 20 bp, Artificial Sequence
  Description of Artificial Sequence: Synthetic oligonucleotide
  Target: LAMA2; (-) strand; PAM type: NNNNGHTT; PAM sequence: GCAGGCTT
gcaaaagcaaatagcaaagt

SEQ ID NO: 39475 - DNA, 20 bp, Artificial Sequence
  Description of Artificial Sequence: Synthetic oligonucleotide
  Target: LAMA2; (-) strand; PAM type: NNNNGHTT; PAM sequence: GGAGGTTT
aaaggataggaaaggggact

SEQ ID NO: 39476 - DNA, 20 bp, Artificial Sequence
  Description of Artificial Sequence: Synthetic oligonucleotide
  Target: LAMA2; (-) strand; PAM type: NNNNGHTT; PAM sequence: GTAAGCTT
tgactattgaaatcaaaatc

SEQ ID NO: 39477 - DNA, 20 bp, Artificial Sequence
  Description of Artificial Sequence: Synthetic oligonucleotide
  Target: LAMA2; (-) strand; PAM type: NNNNGHTT; PAM sequence: TCTTGTTT
aagagttataggagaaattt

SEQ ID NO: 39478 - DNA, 20 bp, Artificial Sequence
  Description of Artificial Sequence: Synthetic oligonucleotide
  Target: LAMA2; (-) strand; PAM type: NNNNGHTT; PAM sequence: TAAAGATT
aaacaacaggaataaaatga

SEQ ID NO: 39479 - DNA, 20 bp, Artificial Sequence
  Description of Artificial Sequence: Synthetic oligonucleotide
  Target: LAMA2; (-) strand; PAM type: NNNNGHTT; PAM sequence: TTAGGATT
aaattgctgcaaaccagtat

SEQ ID NO: 39480 - DNA, 20 bp, Artificial Sequence
  Description of Artificial Sequence: Synthetic oligonucleotide
  Target: LAMA2; (-) strand; PAM type: NNNNGHTT; PAM sequence: AAATGATT
caattggcccaacatacaaa

SEQ ID NO: 39481 - DNA, 20 bp, Artificial Sequence
  Description of Artificial Sequence: Synthetic oligonucleotide
  Target: LAMA2; (-) strand; PAM type: NNNNGHTT; PAM sequence: ATTGGATT
taaaataaaaaatagactca

SEQ ID NO: 39482 - DNA, 20 bp, Artificial Sequence
  Description of Artificial Sequence: Synthetic oligonucleotide
  Target: LAMA2; (-) strand; PAM type: NNNNGHTT; PAM sequence: CAATGTTT
atttaaaagataaaaaaata

SEQ ID NO: 39483 - DNA, 20 bp, Artificial Sequence
  Description of Artificial Sequence: Synthetic oligonucleotide
  Target: LAMA2; (-) strand; PAM type: NNNNGHTT; PAM sequence: TAATGTTT
gatgaccattttaaaaatgc

SEQ ID NO: 39484 - DNA, 20 bp, Artificial Sequence
  Description of Artificial Sequence: Synthetic oligonucleotide
  Target: LAMA2; (-) strand; PAM type: NNNNGHTT; PAM sequence: AACTGTTT
aagtgacccgtgactaccta

SEQ ID NO: 39485 - DNA, 20 bp, Artificial Sequence
  Description of Artificial Sequence: Synthetic oligonucleotide
  Target: LAMA2; (-) strand; PAM type: NNNNGHTT; PAM sequence: GCAAGCTT
ttccctaacaaaactcaaaa

SEQ ID NO: 39486 - DNA, 20 bp, Artificial Sequence
  Description of Artificial Sequence: Synthetic oligonucleotide
  Target: LAMA2; (-) strand; PAM type: NNNNGHTT; PAM sequence: AAGGGCTT
gaagtttcacagcttagtag

SEQ ID NO: 39487 - DNA, 20 bp, Artificial Sequence
  Description of Artificial Sequence: Synthetic oligonucleotide
  Target: LAMA2; (-) strand; PAM type: NNNNGHTT; PAM sequence: CACAGCTT
ggtagtattctcagaagttt

SEQ ID NO: 39488 - DNA, 20 bp, Artificial Sequence
  Description of Artificial Sequence: Synthetic oligonucleotide
  Target: LAMA2; (-) strand; PAM type: NNNNGHTT; PAM sequence: AGAAGTTT
accaactaggtagtattctc

SEQ ID NO: 39489 - DNA, 20 bp, Artificial Sequence
  Description of Artificial Sequence: Synthetic oligonucleotide
  Target: LAMA2; (-) strand; PAM type: NNNNGHTT; PAM sequence: GAAAGCTT
aaaaattcttacagcccaga

SEQ ID NO: 39490 - DNA, 20 bp, Artificial Sequence
  Description of Artificial Sequence: Synthetic oligonucleotide
  Target: LAMA2; (-) strand; PAM type: NNNNGHTT; PAM sequence: TGGAGTTT
ctgagttgagagacaaagag

SEQ ID NO: 39491 - DNA, 20 bp, Artificial Sequence
  Description of Artificial Sequence: Synthetic oligonucleotide
  Target: LAMA2; (-) strand; PAM type: NNNNGHTT; PAM sequence: CTGTGATT
gaattataggaagcacagga

SEQ ID NO: 39492 - DNA, 20 bp, Artificial Sequence
  Description of Artificial Sequence: Synthetic oligonucleotide
  Target: LAMA2; (-) strand; PAM type: NNNNGHTT; PAM sequence: AATTGTTT
aaaaatacaaaccaagaaac

SEQ ID NO: 39493 - DNA, 20 bp, Artificial Sequence
  Description of Artificial Sequence: Synthetic oligonucleotide
  Target: LAMA2; (-) strand; PAM type: NNNNGHTT; PAM sequence: CTTAGTTT
cttcttttgaacagcctctt

SEQ ID NO: 39494 - DNA, 20 bp, Artificial Sequence
  Description of Artificial Sequence: Synthetic oligonucleotide
  Target: LAMA2; (-) strand; PAM type: NNNNGHTT; PAM sequence: AAAAGTTT
tgtgctaactcagcaggaaa

SEQ ID NO: 39495 - DNA, 20 bp, Artificial Sequence
  Description of Artificial Sequence: Synthetic oligonucleotide
  Target: LAMA2; (-) strand; PAM type: NNNNGHTT; PAM sequence: AAATGTTT
gcatattctagaccaggttc

SEQ ID NO: 39496 - DNA, 20 bp, Artificial Sequence
  Description of Artificial Sequence: Synthetic oligonucleotide
  Target: LAMA2; (-) strand; PAM type: NNNNGHTT; PAM sequence: GCTTGTTT
ccttgaagaatcatcaatat

SEQ ID NO: 39497 - DNA, 20 bp, Artificial Sequence
  Description of Artificial Sequence: Synthetic oligonucleotide
  Target: LAMA2; (-) strand; PAM type: NNNNGHTT; PAM sequence: ATATGCTT
acttccttgaagaatcatca

SEQ ID NO: 39498 - DNA, 20 bp, Artificial Sequence
  Description of Artificial Sequence: Synthetic oligonucleotide
  Target: LAMA2; (-) strand; PAM type: NNNNGHTT; PAM sequence: TCCAGTTT
atagaaaaatgaatgtcctg

SEQ ID NO: 39499 - DNA, 20 bp, Artificial Sequence
  Description of Artificial Sequence: Synthetic oligonucleotide
  Target: LAMA2; (-) strand; PAM type: NNNNGHTT; PAM sequence: TTTTGATT
actttgaaattctgaggagt

SEQ ID NO: 39500 - DNA, 20 bp, Artificial Sequence
  Description of Artificial Sequence: Synthetic oligonucleotide
  Target: LAMA2; (-) strand; PAM type: NNNNGHTT; PAM sequence: AGGAGTTT
aagaacactttgaaattctg

SEQ ID NO: 39501 - DNA, 20 bp, Artificial Sequence
  Description of Artificial Sequence: Synthetic oligonucleotide
  Target: LAMA2; (-) strand; PAM type: NNNNGHTT; PAM sequence: CTTGGATT
tccaagtgatatggtggatg

SEQ ID NO: 39502 - DNA, 20 bp, Artificial Sequence
  Description of Artificial Sequence: Synthetic oligonucleotide
  Target: LAMA2; (-) strand; PAM type: NNNNGHTT; PAM sequence: GGATGCTT
ctgagtccaagtgatatggt

SEQ ID NO: 39503 - DNA, 20 bp, Artificial Sequence
  Description of Artificial Sequence: Synthetic oligonucleotide
  Target: LAMA2; (-) strand; PAM type: NNNNGHTT; PAM sequence: TAGGGCTT
ggaactcttgtaagtttccc

SEQ ID NO: 39504 - DNA, 20 bp, Artificial Sequence
  Description of Artificial Sequence: Synthetic oligonucleotide
  Target: LAMA2; (-) strand; PAM type: NNNNGHTT; PAM sequence: GTAAGTTT
gtggataaaacggaactctt

SEQ ID NO: 39505 - DNA, 20 bp, Artificial Sequence
  Description of Artificial Sequence: Synthetic oligonucleotide
  Target: LAMA2; (-) strand; PAM type: NNNNGHTT; PAM sequence: TAGAGTTT
ttcaatttcaagagtttaat

SEQ ID NO: 39506 - DNA, 20 bp, Artificial Sequence
  Description of Artificial Sequence: Synthetic oligonucleotide
  Target: LAMA2; (-) strand; PAM type: NNNNGHTT; PAM sequence: AAGAGTTT
gaggtatcaacttcaatttc

SEQ ID NO: 39507 - DNA, 20 bp, Artificial Sequence
  Description of Artificial Sequence: Synthetic oligonucleotide
  Target: LAMA2; (-) strand; PAM type: NNNNGHTT; PAM sequence: TCCTGATT
gaaacttggaatgtatttta

SEQ ID NO: 39508 - DNA, 20 bp, Artificial Sequence
  Description of Artificial Sequence: Synthetic oligonucleotide
  Target: LAMA2; (-) strand; PAM type: NNNNGHTT; PAM sequence: CTACGTTT
tgatagtactaaacatataa

SEQ ID NO: 39509 - DNA, 20 bp, Artificial Sequence
  Description of Artificial Sequence: Synthetic oligonucleotide
  Target: LAMA2; (-) strand; PAM type: NNNNGHTT; PAM sequence: TGGTGATT
tcagaagtctagacttttga

SEQ ID NO: 39510 - DNA, 20 bp, Artificial Sequence
  Description of Artificial Sequence: Synthetic oligonucleotide
  Target: LAMA2; (-) strand; PAM type: NNNNGHTT; PAM sequence: TCTCGATT
cttcataatggtgaagtatt

SEQ ID NO: 39511 - DNA, 20 bp, Artificial Sequence
  Description of Artificial Sequence: Synthetic oligonucleotide
  Target: LAMA2; (-) strand; PAM type: NNNNGHTT; PAM sequence: TTTTGTTT
tctgatacaggctctatgag

SEQ ID NO: 39512 - DNA, 20 bp, Artificial Sequence
  Description of Artificial Sequence: Synthetic oligonucleotide
  Target: LAMA2; (-) strand; PAM type: NNNNGHTT; PAM sequence: ATGAGTTT
aattgtctgatacaggctct

SEQ ID NO: 39513 - DNA, 20 bp, Artificial Sequence
  Description of Artificial Sequence: Synthetic oligonucleotide
  Target: LAMA2; (-) strand; PAM type: NNNNGHTT; PAM sequence: ACCAGTTT
cagaactgtgagcccattaa

SEQ ID NO: 39514 - DNA, 20 bp, Artificial Sequence
  Description of Artificial Sequence: Synthetic oligonucleotide
  Target: LAMA2; (-) strand; PAM type: NNNNGHTT; PAM sequence: CTATGCTT
ttcaccagaaacagatgccg

SEQ ID NO: 39515 - DNA, 20 bp, Artificial Sequence
  Description of Artificial Sequence: Synthetic oligonucleotide
  Target: LAMA2; (-) strand; PAM type: NNNNGHTT; PAM sequence: GGAAGCTT
cttggccttccatcatgact

SEQ ID NO: 39516 - DNA, 20 bp, Artificial Sequence
  Description of Artificial Sequence: Synthetic oligonucleotide
  Target: LAMA2; (-) strand; PAM type: NNNNGHTT; PAM sequence: CCTTGCTT
cctgccatgtggaagtctgt

SEQ ID NO: 39517 - DNA, 20 bp, Artificial Sequence
  Description of Artificial Sequence: Synthetic oligonucleotide
  Target: LAMA2; (-) strand; PAM type: NNNNGHTT; PAM sequence: CCCTGCTT
gttgtttaaatgcatggcat

SEQ ID NO: 39518 - DNA, 20 bp, Artificial Sequence
  Description of Artificial Sequence: Synthetic oligonucleotide
  Target: LAMA2; (-) strand; PAM type: NNNNGHTT; PAM sequence: GGTTGTTT
agttcctaccggcaagatct

SEQ ID NO: 39519 - DNA, 20 bp, Artificial Sequence
  Description of Artificial Sequence: Synthetic oligonucleotide
  Target: LAMA2; (-) strand; PAM type: NNNNGHTT; PAM sequence: CAGGGCTT
gatcatgggggctgatccct

SEQ ID NO: 39520 - DNA, 20 bp, Artificial Sequence
  Description of Artificial Sequence: Synthetic oligonucleotide
  Target: LAMA2; (-) strand; PAM type: NNNNGHTT; PAM sequence: AGGTGTTT
tggaggtggagcctggtggg

SEQ ID NO: 39521 - DNA, 20 bp, Artificial Sequence
  Description of Artificial Sequence: Synthetic oligonucleotide
  Target: LAMA2; (-) strand; PAM type: NNNNGHTT; PAM sequence: CCCAGTTT
ttcatttaaattaaagtcat

SEQ ID NO: 39522 - DNA, 20 bp, Artificial Sequence
  Description of Artificial Sequence: Synthetic oligonucleotide
  Target: LAMA2; (-) strand; PAM type: NNNNGHTT; PAM sequence: GCAGGCTT
tcccctgctagtgaaagaag

SEQ ID NO: 39523 - DNA, 20 bp, Artificial Sequence
  Description of Artificial Sequence: Synthetic oligonucleotide
  Target: LAMA2; (-) strand; PAM type: NNNNGHTT; PAM sequence: ATTTGTTT
aaatcataaatagaggtaat

SEQ ID NO: 39524 - DNA, 20 bp, Artificial Sequence
  Description of Artificial Sequence: Synthetic oligonucleotide
  Target: LAMA2; (-) strand; PAM type: NNNNGHTT; PAM sequence: ATGTGTTT
aataaaccagaccattaacc

SEQ ID NO: 39525 - DNA, 20 bp, Artificial Sequence
  Description of Artificial Sequence: Synthetic oligonucleotide
  Target: LAMA2; (-) strand; PAM type: NNNNGHTT; PAM sequence: GGAAGTTT
attgggacctttccaaatca

SEQ ID NO: 39526 - DNA, 20 bp, Artificial Sequence
  Description of Artificial Sequence: Synthetic oligonucleotide
  Target: LAMA2; (-) strand; PAM type: NNNNGHTT; PAM sequence: AACTGCTT
ttacatagtttttctttgcc

SEQ ID NO: 39527 - DNA, 20 bp, Artificial Sequence
  Description of Artificial Sequence: Synthetic oligonucleotide
  Target: LAMA2; (-) strand; PAM type: NNNNGHTT; PAM sequence: CATAGTTT
atgtcttacatattcactta

SEQ ID NO: 39528 - DNA, 20 bp, Artificial Sequence
  Description of Artificial Sequence: Synthetic oligonucleotide
  Target: LAMA2; (-) strand; PAM type: NNNNGHTT; PAM sequence: CAAAGCTT
ttgtatattataaatatgga

SEQ ID NO: 39529 - DNA, 20 bp, Artificial Sequence
  Description of Artificial Sequence: Synthetic oligonucleotide
  Target: LAMA2; (-) strand; PAM type: NNNNGHTT; PAM sequence: ATGTGATT
tttaaacccaaagatctaaa

SEQ ID NO: 39530 - DNA, 20 bp, Artificial Sequence
  Description of Artificial Sequence: Synthetic oligonucleotide
  Target: LAMA2; (-) strand; PAM type: NNNNGHTT; PAM sequence: GGCGGCTT
agtagaaaggctgcaataag

SEQ ID NO: 39531 - DNA, 20 bp, Artificial Sequence
  Description of Artificial Sequence: Synthetic oligonucleotide
  Target: LAMA2; (-) strand; PAM type: NNNNGHTT; PAM sequence: ATTAGCTT
aaaaaaaaatgattatcagg

SEQ ID NO: 39532 - DNA, 20 bp, Artificial Sequence
  Description of Artificial Sequence: Synthetic oligonucleotide
  Target: LAMA2; (-) strand; PAM type: NNNNGHTT; PAM sequence: TCAGGATT
aaaaaaaaaaaaaatgatta

SEQ ID NO: 39533 - DNA, 20 bp, Artificial Sequence
  Description of Artificial Sequence: Synthetic oligonucleotide
  Target: LAMA2; (-) strand; PAM type: NNNNGHTT; PAM sequence: AAATGATT
tccgtctcaaaaaaaaaaaa

SEQ ID NO: 39534 - DNA, 20 bp, Artificial Sequence
  Description of Artificial Sequence: Synthetic oligonucleotide
  Target: LAMA2; (-) strand; PAM type: NNNNGHTT; PAM sequence: CGGAGCTT
aatggcgtgaacccgggagg

SEQ ID NO: 39535 - DNA, 20 bp, Artificial Sequence
  Description of Artificial Sequence: Synthetic oligonucleotide
  Target: LAMA2; (-) strand; PAM type: NNNNGHTT; PAM sequence: AAATGATT
cttcccagattctgttatta

SEQ ID NO: 39536 - DNA, 20 bp, Artificial Sequence
  Description of Artificial Sequence: Synthetic oligonucleotide
  Target: LAMA2; (-) strand; PAM type: NNNNGHTT; PAM sequence: CCCAGATT
aatatttggttaaaaatctt

SEQ ID NO: 39537 - DNA, 20 bp, Artificial Sequence
  Description of Artificial Sequence: Synthetic oligonucleotide
  Target: LAMA2; (-) strand; PAM type: NNNNGHTT; PAM sequence: ATGAGATT
ctgctaacagtagtttgctt

SEQ ID NO: 39538 - DNA, 20 bp, Artificial Sequence
  Description of Artificial Sequence: Synthetic oligonucleotide
  Target: LAMA2; (-) strand; PAM type: NNNNGHTT; PAM sequence: GTTTGCTT
ttctgttcctgctaacagta

SEQ ID NO: 39539 - DNA, 20 bp, Artificial Sequence
  Description of Artificial Sequence: Synthetic oligonucleotide
  Target: LAMA2; (-) strand; PAM type: NNNNGHTT; PAM sequence: AGTAGTTT
atgtttctgttcctgctaac

SEQ ID NO: 39540 - DNA, 20 bp, Artificial Sequence
  Description of Artificial Sequence: Synthetic oligonucleotide
  Target: LAMA2; (-) strand; PAM type: NNNNGHTT; PAM sequence: TTATGTTT
atccaccattaccaggagta

SEQ ID NO: 39541 - DNA, 20 bp, Artificial Sequence
  Description of Artificial Sequence: Synthetic oligonucleotide
  Target: LAMA2; (-) strand; PAM type: NNNNGHTT; PAM sequence: CTCAGCTT
tgtatctcacactttccctc

SEQ ID NO: 39542 - DNA, 20 bp, Artificial Sequence
  Description of Artificial Sequence: Synthetic oligonucleotide
  Target: LAMA2; (-) strand; PAM type: NNNNGHTT; PAM sequence: CTGAGTTT
agggtatcacctctctctgt

SEQ ID NO: 39543 - DNA, 20 bp, Artificial Sequence
  Description of Artificial Sequence: Synthetic oligonucleotide
  Target: LAMA2; (-) strand; PAM type: NNNNGHTT; PAM sequence: TGTAGTTT
ttcactgtttaaaaaaccag

SEQ ID NO: 39544 - DNA, 20 bp, Artificial Sequence
  Description of Artificial Sequence: Synthetic oligonucleotide
  Target: LAMA2; (-) strand; PAM type: NNNNGHTT; PAM sequence: CACTGTTT
accagttaacaattccattt

SEQ ID NO: 39545 - DNA, 20 bp, Artificial Sequence
  Description of Artificial Sequence: Synthetic oligonucleotide
  Target: LAMA2; (-) strand; PAM type: NNNNGHTT; PAM sequence: TATAGCTT
tacctgtactcgggacacct

SEQ ID NO: 39546 - DNA, 20 bp, Artificial Sequence
  Description of Artificial Sequence: Synthetic oligonucleotide
  Target: LAMA2; (-) strand; PAM type: NNNNGHTT; PAM sequence: CTCAGCTT
ctcttgaaagatttctgaac

SEQ ID NO: 39547 - DNA, 20 bp, Artificial Sequence
  Description of Artificial Sequence: Synthetic oligonucleotide
  Target: LAMA2; (-) strand; PAM type: NNNNGHTT; PAM sequence: GAAAGATT
tatgacagcaacgccctctt

SEQ ID NO: 39548 - DNA, 20 bp, Artificial Sequence
  Description of Artificial Sequence: Synthetic oligonucleotide
  Target: LAMA2; (-) strand; PAM type: NNNNGHTT; PAM sequence: TTTTGTTT
tccgacgtgtttgtttttgg

SEQ ID NO: 39549 - DNA, 20 bp, Artificial Sequence
  Description of Artificial Sequence: Synthetic oligonucleotide
  Target: LAMA2; (-) strand; PAM type: NNNNGHTT; PAM sequence: TTTGGTTT
caaactccgacgtgtttgtt

SEQ ID NO: 39550 - DNA, 20 bp, Artificial Sequence
  Description of Artificial Sequence: Synthetic oligonucleotide
  Target: LAMA2; (-) strand; PAM type: NNNNGHTT; PAM sequence: GTTTGTTT
ttgcctacaaactccgacgt

SEQ ID NO: 39551 - DNA, 20 bp, Artificial Sequence
  Description of Artificial Sequence: Synthetic oligonucleotide
  Target: LAMA2; (-) strand; PAM type: NNNNGHTT; PAM sequence: ACGTGTTT
gcatttgcctacaaactccg

SEQ ID NO: 39552 - DNA, 20 bp, Artificial Sequence
  Description of Artificial Sequence: Synthetic oligonucleotide
  Target: LAMA2; (-) strand; PAM type: NNNNGHTT; PAM sequence: GGCAGCTT
cctatcctccaagaacggtg

SEQ ID NO: 39553 - DNA, 20 bp, Artificial Sequence
  Description of Artificial Sequence: Synthetic oligonucleotide
  Target: LAMA2; (-) strand; PAM type: NNNNGHTT; PAM sequence: GTCGGCTT
acacacgctctgaccttgaa

SEQ ID NO: 39554 - DNA, 20 bp, Artificial Sequence
  Description of Artificial Sequence: Synthetic oligonucleotide
  Target: LAMA2; (-) strand; PAM type: NNNNGHTT; PAM sequence: ACTAGCTT
tctccataggcacccttctg

SEQ ID NO: 39555 - DNA, 20 bp, Artificial Sequence
  Description of Artificial Sequence: Synthetic oligonucleotide
  Target: LAMA2; (-) strand; PAM type: NNNNGHTT; PAM sequence: TGCAGCTT
aatggcgtgaacccaggagg

SEQ ID NO: 39556 - DNA, 20 bp, Artificial Sequence
  Description of Artificial Sequence: Synthetic oligonucleotide
  Target: LAMA2; (-) strand; PAM type: NNNNGHTT; PAM sequence: AGGAGATT
ggagggcggatcacaaggtc

SEQ ID NO: 39557 - DNA, 20 bp, Artificial Sequence
  Description of Artificial Sequence: Synthetic oligonucleotide
  Target: LAMA2; (-) strand; PAM type: NNNNGHTT; PAM sequence: ATAGGCTT
ccgtatccggtggcagaatg

SEQ ID NO: 39558 - DNA, 20 bp, Artificial Sequence
  Description of Artificial Sequence: Synthetic oligonucleotide
  Target: LAMA2; (-) strand; PAM type: NNNNGHTT; PAM sequence: CCCTGCTT
gtttctgagctccaaattca

SEQ ID NO: 39559 - DNA, 20 bp, Artificial Sequence
  Description of Artificial Sequence: Synthetic oligonucleotide
  Target: LAMA2; (-) strand; PAM type: NNNNGHTT; PAM sequence: TACTGTTT
agctgtgccaattatacatc

SEQ ID NO: 39560 - DNA, 20 bp, Artificial Sequence
  Description of Artificial Sequence: Synthetic oligonucleotide
  Target: LAMA2; (-) strand; PAM type: NNNNGHTT; PAM sequence: TCTTGATT
atccttttaaaggtttctgc

SEQ ID NO: 39561 - DNA, 20 bp, Artificial Sequence
  Description of Artificial Sequence: Synthetic oligonucleotide
  Target: LAMA2; (-) strand; PAM type: NNNNGHTT; PAM sequence: AAAGGTTT
ttgtcttacattatcctttt

SEQ ID NO: 39562 - DNA, 20 bp, Artificial Sequence
  Description of Artificial Sequence: Synthetic oligonucleotide
  Target: LAMA2; (-) strand; PAM type: NNNNGHTT; PAM sequence: TTCTGCTT
ttatttctctcatctttaat

SEQ ID NO: 39563 - DNA, 20 bp, Artificial Sequence
  Description of Artificial Sequence: Synthetic oligonucleotide
  Target: LAMA2; (-) strand; PAM type: NNNNGHTT; PAM sequence: CAATGCTT
ttattgtatacacataccac

SEQ ID NO: 39564 - DNA, 20 bp, Artificial Sequence
  Description of Artificial Sequence: Synthetic oligonucleotide
  Target: LAMA2; (-) strand; PAM type: NNNNGHTT; PAM sequence: AAAAGTTT
cacagctcctgttttacagg

SEQ ID NO: 39565 - DNA, 20 bp, Artificial Sequence
  Description of Artificial Sequence: Synthetic oligonucleotide
  Target: LAMA2; (-) strand; PAM type: NNNNGHTT; PAM sequence: TCCTGTTT
tggtatcctactttcacagc

SEQ ID NO: 39566 - DNA, 20 bp, Artificial Sequence
  Description of Artificial Sequence: Synthetic oligonucleotide
  Target: LAMA2; (-) strand; PAM type: NNNNGHTT; PAM sequence: CTTTGTTT
tgtcttctgcaatcattttc

SEQ ID NO: 39567 - DNA, 20 bp, Artificial Sequence
  Description of Artificial Sequence: Synthetic oligonucleotide
  Target: LAMA2; (-) strand; PAM type: NNNNGHTT; PAM sequence: TTTTGATT
tgtttcttcttcagatttgt

SEQ ID NO: 39568 - DNA, 20 bp, Artificial Sequence
  Description of Artificial Sequence: Synthetic oligonucleotide
  Target: LAMA2; (-) strand; PAM type: NNNNGHTT; PAM sequence: ATTTGTTT
cagtactgtttcttcttcag

SEQ ID NO: 39569 - DNA, 20 bp, Artificial Sequence
  Description of Artificial Sequence: Synthetic oligonucleotide
  Target: LAMA2; (-) strand; PAM type: NNNNGHTT; PAM sequence: TTCAGATT
tgattcagtactgtttcttc

SEQ ID NO: 39570 - DNA, 20 bp, Artificial Sequence
  Description of Artificial Sequence: Synthetic oligonucleotide
  Target: LAMA2; (-) strand; PAM type: NNNNGHTT; PAM sequence: TACTGTTT
ataattgtgttttgattcag

SEQ ID NO: 39571 - DNA, 20 bp, Artificial Sequence
  Description of Artificial Sequence: Synthetic oligonucleotide
  Target: LAMA2; (-) strand; PAM type: NNNNGHTT; PAM sequence: TTTTGATT
agtttgggaacataattgtg

SEQ ID NO: 39572 - DNA, 20 bp, Artificial Sequence
  Description of Artificial Sequence: Synthetic oligonucleotide
  Target: LAMA2; (-) strand; PAM type: NNNNGHTT; PAM sequence: TTGTGTTT
ctttcagtttgggaacataa

SEQ ID NO: 39573 - DNA, 20 bp, Artificial Sequence
  Description of Artificial Sequence: Synthetic oligonucleotide
  Target: LAMA2; (-) strand; PAM type: NNNNGHTT; PAM sequence: TTCAGTTT
acttactggaacatagttct

SEQ ID NO: 39574 - DNA, 20 bp, Artificial Sequence
  Description of Artificial Sequence: Synthetic oligonucleotide
  Target: LAMA2; (-) strand; PAM type: NNNNGHTT; PAM sequence: GTTTGTTT
tagaattttctgaagcttgg

SEQ ID NO: 39575 - DNA, 20 bp, Artificial Sequence
  Description of Artificial Sequence: Synthetic oligonucleotide
  Target: LAMA2; (-) strand; PAM type: NNNNGHTT; PAM sequence: TTGGGTTT
ttgctagaattttctgaagc

SEQ ID NO: 39576 - DNA, 20 bp, Artificial Sequence
  Description of Artificial Sequence: Synthetic oligonucleotide
  Target: LAMA2; (-) strand; PAM type: NNNNGHTT; PAM sequence: TGAAGCTT
atatttttgctagaattttc

SEQ ID NO: 39577 - DNA, 20 bp, Artificial Sequence
  Description of Artificial Sequence: Synthetic oligonucleotide
  Target: LAMA2; (-) strand; PAM type: NNNNGHTT; PAM sequence: ACACGATT
tttcttcgcccaagatgtat

SEQ ID NO: 39578 - DNA, 20 bp, Artificial Sequence
  Description of Artificial Sequence: Synthetic oligonucleotide
  Target: LAMA2; (-) strand; PAM type: NNNNGHTT; PAM sequence: TAACGTTT
tgatttgaggtctctgttag

SEQ ID NO: 39579 - DNA, 20 bp, Artificial Sequence
  Description of Artificial Sequence: Synthetic oligonucleotide
  Target: LAMA2; (-) strand; PAM type: NNNNGHTT; PAM sequence: TTCTGATT
gcatttattcttgcatacaa

SEQ ID NO: 39580 - DNA, 20 bp, Artificial Sequence
  Description of Artificial Sequence: Synthetic oligonucleotide
  Target: LAMA2; (-) strand; PAM type: NNNNGHTT; PAM sequence: TATTGTTT
aagagaagtaacatctagta

SEQ ID NO: 39581 - DNA, 20 bp, Artificial Sequence
  Description of Artificial Sequence: Synthetic oligonucleotide
  Target: LAMA2; (-) strand; PAM type: NNNNGHTT; PAM sequence: GAGAGCTT
ctagacttggggaatccaag

SEQ ID NO: 39582 - DNA, 20 bp, Artificial Sequence
  Description of Artificial Sequence: Synthetic oligonucleotide
  Target: LAMA2; (-) strand; PAM type: NNNNGHTT; PAM sequence: CAAAGATT
tttttccaactgctttgtct

SEQ ID NO: 39583 - DNA, 20 bp, Artificial Sequence
  Description of Artificial Sequence: Synthetic oligonucleotide
  Target: LAMA2; (-) strand; PAM type: NNNNGHTT; PAM sequence: AACTGCTT
gctgggtatgggttttttcc

SEQ ID NO: 39584 - DNA, 20 bp, Artificial Sequence
  Description of Artificial Sequence: Synthetic oligonucleotide
  Target: LAMA2; (-) strand; PAM type: NNNNGHTT; PAM sequence: ATGGGTTT
gaggtagagaggggctgggt

SEQ ID NO: 39585 - DNA, 20 bp, Artificial Sequence
  Description of Artificial Sequence: Synthetic oligonucleotide
  Target: LAMA2; (-) strand; PAM type: NNNNGHTT; PAM sequence: AATTGCTT
tcagtgaacataaacattaa

SEQ ID NO: 39586 - DNA, 20 bp, Artificial Sequence
  Description of Artificial Sequence: Synthetic oligonucleotide
  Target: LAMA2; (-) strand; PAM type: NNNNGHTT; PAM sequence: TCTAGTTT
tgttataggctttgtactat

SEQ ID NO: 39587 - DNA, 20 bp, Artificial Sequence
  Description of Artificial Sequence: Synthetic oligonucleotide
  Target: LAMA2; (-) strand; PAM type: NNNNGHTT; PAM sequence: ATAGGCTT
atattaatcatgtatctgtt

SEQ ID NO: 39588 - DNA, 20 bp, Artificial Sequence
  Description of Artificial Sequence: Synthetic oligonucleotide
  Target: LAMA2; (-) strand; PAM type: NNNNGHTT; PAM sequence: CTATGCTT
aaattttaattctaatgttt

SEQ ID NO: 39589 - DNA, 20 bp, Artificial Sequence
  Description of Artificial Sequence: Synthetic oligonucleotide
  Target: LAMA2; (-) strand; PAM type: NNNNGHTT; PAM sequence: TAATGTTT
atatcttaaaattttaattc

SEQ ID NO: 39590 - DNA, 20 bp, Artificial Sequence
  Description of Artificial Sequence: Synthetic oligonucleotide
  Target: LAMA2; (-) strand; PAM type: NNNNGHTT; PAM sequence: CAGAGATT
tcccagggaggaagcagtca

SEQ ID NO: 39591 - DNA, 20 bp, Artificial Sequence
  Description of Artificial Sequence: Synthetic oligonucleotide
  Target: LAMA2; (-) strand; PAM type: NNNNGHTT; PAM sequence: CCCAGTTT
cataccttacaagtgcactg

SEQ ID NO: 39592 - DNA, 20 bp, Artificial Sequence
  Description of Artificial Sequence: Synthetic oligonucleotide
  Target: LAMA2; (-) strand; PAM type: NNNNGHTT; PAM sequence: GGAGGTTT
gcaatggaaacagaattgag

SEQ ID NO: 39593 - DNA, 20 bp, Artificial Sequence
  Description of Artificial Sequence: Synthetic oligonucleotide
  Target: LAMA2; (-) strand; PAM type: NNNNGHTT; PAM sequence: TTTAGCTT
agattttgtccatctgtttg

SEQ ID NO: 39594 - DNA, 20 bp, Artificial Sequence
  Description of Artificial Sequence: Synthetic oligonucleotide
  Target: LAMA2; (-) strand; PAM type: NNNNGHTT; PAM sequence: GTTTGTTT
caatgagattttgtccatct

SEQ ID NO: 39595 - DNA, 20 bp, Artificial Sequence
  Description of Artificial Sequence: Synthetic oligonucleotide
  Target: LAMA2; (-) strand; PAM type: NNNNGHTT; PAM sequence: ATCTGTTT
ctggcaatgagattttgtcc

SEQ ID NO: 39596 - DNA, 20 bp, Artificial Sequence
  Description of Artificial Sequence: Synthetic oligonucleotide
  Target: LAMA2; (-) strand; PAM type: NNNNGHTT; PAM sequence: ATGAGATT
tgaaaactccatgtctggca

SEQ ID NO: 39597 - DNA, 20 bp, Artificial Sequence
  Description of Artificial Sequence: Synthetic oligonucleotide
  Target: LAMA2; (-) strand; PAM type: NNNNGHTT; PAM sequence: CAGTGTTT
gaaaataagctctagaaaag

SEQ ID NO: 39598 - DNA, 20 bp, Artificial Sequence
  Description of Artificial Sequence: Synthetic oligonucleotide
  Target: LAMA2; (-) strand; PAM type: NNNNGHTT; PAM sequence: GTGGGTTT
tccaccaactagaaaaaaag

SEQ ID NO: 39599 - DNA, 20 bp, Artificial Sequence
  Description of Artificial Sequence: Synthetic oligonucleotide
  Target: LAMA2; (-) strand; PAM type: NNNNGHTT; PAM sequence: CCCAGATT
ctgtcttccctgccacccct

SEQ ID NO: 39600 - DNA, 20 bp, Artificial Sequence
  Description of Artificial Sequence: Synthetic oligonucleotide
  Target: LAMA2; (-) strand; PAM type: NNNNGHTT; PAM sequence: TGATGCTT
ttagctgtgattttctctga

SEQ ID NO: 39601 - DNA, 20 bp, Artificial Sequence
  Description of Artificial Sequence: Synthetic oligonucleotide
  Target: LAMA2; (-) strand; PAM type: NNNNGHTT; PAM sequence: CTGTGATT
ttataagccttattatttag

SEQ ID NO: 39602 - DNA, 20 bp, Artificial Sequence
  Description of Artificial Sequence: Synthetic oligonucleotide
  Target: LAMA2; (-) strand; PAM type: NNNNGHTT; PAM sequence: AATGGTTT
tgcagattaatttttggaga

SEQ ID NO: 39603 - DNA, 20 bp, Artificial Sequence
  Description of Artificial Sequence: Synthetic oligonucleotide
  Target: LAMA2; (-) strand; PAM type: NNNNGHTT; PAM sequence: TGCAGATT
attttctagtatacagcgat

SEQ ID NO: 39604 - DNA, 20 bp, Artificial Sequence
  Description of Artificial Sequence: Synthetic oligonucleotide
  Target: LAMA2; (-) strand; PAM type: NNNNGHTT; PAM sequence: CAGCGATT
taaatatattttctagtata

SEQ ID NO: 39605 - DNA, 20 bp, Artificial Sequence
  Description of Artificial Sequence: Synthetic oligonucleotide
  Target: LAMA2; (-) strand; PAM type: NNNNGHTT; PAM sequence: CAGCGTTT
atagtcactgtttgtaatga

SEQ ID NO: 39606 - DNA, 20 bp, Artificial Sequence
  Description of Artificial Sequence: Synthetic oligonucleotide
  Target: LAMA2; (-) strand; PAM type: NNNNGHTT; PAM sequence: CACTGTTT
ggctgaaatttgcacatagt

SEQ ID NO: 39607 - DNA, 20 bp, Artificial Sequence
  Description of Artificial Sequence: Synthetic oligonucleotide
  Target: LAMA2; (-) strand; PAM type: NNNNGHTT; PAM sequence: AATTGATT
ttaaactgcatttatcctgg

SEQ ID NO: 39608 - DNA, 20 bp, Artificial Sequence
  Description of Artificial Sequence: Synthetic oligonucleotide
  Target: LAMA2; (-) strand; PAM type: NNNNGHTT; PAM sequence: CACAGTTT
tcttgaaaagatacctctga

SEQ ID NO: 39609 - DNA, 20 bp, Artificial Sequence
  Description of Artificial Sequence: Synthetic oligonucleotide
  Target: LAMA2; (-) strand; PAM type: NNNNGHTT; PAM sequence: CATAGATT
gtttcctctgtccctttttg

SEQ ID NO: 39610 - DNA, 20 bp, Artificial Sequence
  Description of Artificial Sequence: Synthetic oligonucleotide
  Target: LAMA2; (-) strand; PAM type: NNNNGHTT; PAM sequence: TCCTGTTT
ccactacccagattttatct

SEQ ID NO: 39611 - DNA, 20 bp, Artificial Sequence
  Description of Artificial Sequence: Synthetic oligonucleotide
  Target: LAMA2; (-) strand; PAM type: NNNNGHTT; PAM sequence: CCCAGATT
ggccattttaacaaccacta

SEQ ID NO: 39612 - DNA, 20 bp, Artificial Sequence
  Description of Artificial Sequence: Synthetic oligonucleotide
  Target: LAMA2; (-) strand; PAM type: NNNNGHTT; PAM sequence: CATTGTTT
gccaccacgcccggcctgta

SEQ ID NO: 39613 - DNA, 20 bp, Artificial Sequence
  Description of Artificial Sequence: Synthetic oligonucleotide
  Target: LAMA2; (-) strand; PAM type: NNNNGHTT; PAM sequence: GTGGGATT
cgcctcggcctcccaaagtg

SEQ ID NO: 39614 - DNA, 20 bp, Artificial Sequence
  Description of Artificial Sequence: Synthetic oligonucleotide
  Target: LAMA2; (-) strand; PAM type: NNNNGHTT; PAM sequence: CCAGGATT
acggggtttcaccgtgttag

SEQ ID NO: 39615 - DNA, 20 bp, Artificial Sequence
  Description of Artificial Sequence: Synthetic oligonucleotide
  Target: LAMA2; (-) strand; PAM type: NNNNGHTT; PAM sequence: CGGGGTTT
ttttgtatttttagtagaga

SEQ ID NO: 39616 - DNA, 20 bp, Artificial Sequence
  Description of Artificial Sequence: Synthetic oligonucleotide
  Target: LAMA2; (-) strand; PAM type: NNNNGHTT; PAM sequence: AAATGCTT
ggagttcatggatcttttaa

SEQ ID NO: 39617 - DNA, 20 bp, Artificial Sequence
  Description of Artificial Sequence: Synthetic oligonucleotide
  Target: LAMA2; (-) strand; PAM type: NNNNGHTT; PAM sequence: CAGAGTTT
gaggaaagacaagagaccct

SEQ ID NO: 39618 - DNA, 20 bp, Artificial Sequence
  Description of Artificial Sequence: Synthetic oligonucleotide
  Target: LAMA2; (-) strand; PAM type: NNNNGHTT; PAM sequence: AGTGGATT
aatagcagctgctgcagcca

SEQ ID NO: 39619 - DNA, 20 bp, Artificial Sequence
  Description of Artificial Sequence: Synthetic oligonucleotide
  Target: LAMA2; (-) strand; PAM type: NNNNGHTT; PAM sequence: TTTTGCTT
acccacgtccggatcagtcc

SEQ ID NO: 39620 - DNA, 20 bp, Artificial Sequence
  Description of Artificial Sequence: Synthetic oligonucleotide
  Target: LAMA2; (-) strand; PAM type: NNNNGHTT; PAM sequence: AAATGTTT
cacagaggaaaaggttactt

SEQ ID NO: 39621 - DNA, 20 bp, Artificial Sequence
  Description of Artificial Sequence: Synthetic oligonucleotide
  Target: LAMA2; (-) strand; PAM type: NNNNGHTT; PAM sequence: TAATGCTT
actcttcccatctcaaaaca

SEQ ID NO: 39622 - DNA, 20 bp, Artificial Sequence
  Description of Artificial Sequence: Synthetic oligonucleotide
  Target: LAMA2; (-) strand; PAM type: NNNNGHTT; PAM sequence: TCATGATT
acatgttttcactccaaaaa

SEQ ID NO: 39623 - DNA, 20 bp, Artificial Sequence
  Description of Artificial Sequence: Synthetic oligonucleotide
  Target: LAMA2; (-) strand; PAM type: NNNNGHTT; PAM sequence: ACATGTTT
taaaggaaaatgaaaaatga

SEQ ID NO: 39624 - DNA, 20 bp, Artificial Sequence
  Description of Artificial Sequence: Synthetic oligonucleotide
  Target: LAMA2; (-) strand; PAM type: NNNNGHTT; PAM sequence: TTACGCTT
aatacagcagaaggctgaat

SEQ ID NO: 39625 - DNA, 20 bp, Artificial Sequence
  Description of Artificial Sequence: Synthetic oligonucleotide
  Target: LAMA2; (-) strand; PAM type: NNNNGHTT; PAM sequence: GGAAGTTT
tctttccttcaaattgttct

SEQ ID NO: 39626 - DNA, 20 bp, Artificial Sequence
  Description of Artificial Sequence: Synthetic oligonucleotide
  Target: LAMA2; (-) strand; PAM type: NNNNGHTT; PAM sequence: TTGTGCTT
ctcacttgacattaaagttc

SEQ ID NO: 39627 - DNA, 20 bp, Artificial Sequence
  Description of Artificial Sequence: Synthetic oligonucleotide
  Target: LAMA2; (-) strand; PAM type: NNNNGHTT; PAM sequence: AAAAGATT
ctccaaatggtgtgattcta

SEQ ID NO: 39628 - DNA, 20 bp, Artificial Sequence
  Description of Artificial Sequence: Synthetic oligonucleotide
  Target: LAMA2; (-) strand; PAM type: NNNNGHTT; PAM sequence: GTGTGATT
attggataaatctccaaatg

SEQ ID NO: 39629 - DNA, 20 bp, Artificial Sequence
  Description of Artificial Sequence: Synthetic oligonucleotide
  Target: LAMA2; (-) strand; PAM type: NNNNGHTT; PAM sequence: TTGAGTTT
cctcgaaatagattgcatac

SEQ ID NO: 39630 - DNA, 20 bp, Artificial Sequence
  Description of Artificial Sequence: Synthetic oligonucleotide
  Target: LAMA2; (-) strand; PAM type: NNNNGHTT; PAM sequence: AATAGATT
tgtttcttcccgagcctcga

SEQ ID NO: 39631 - DNA, 20 bp, Artificial Sequence
  Description of Artificial Sequence: Synthetic oligonucleotide
  Target: LAMA2; (-) strand; PAM type: NNNNGHTT; PAM sequence: ACCTGTTT
tgaggattatatgtagagaa

SEQ ID NO: 39632 - DNA, 20 bp, Artificial Sequence
  Description of Artificial Sequence: Synthetic oligonucleotide
  Target: LAMA2; (-) strand; PAM type: NNNNGHTT; PAM sequence: TGAGGATT
tcccacctcgaatgatcact

SEQ ID NO: 39633 - DNA, 20 bp, Artificial Sequence
  Description of Artificial Sequence: Synthetic oligonucleotide
  Target: LAMA2; (-) strand; PAM type: NNNNGHTT; PAM sequence: CATTGATT
gacaaaactgaatgcaaaac

SEQ ID NO: 39634 - DNA, 20 bp, Artificial Sequence
  Description of Artificial Sequence: Synthetic oligonucleotide
  Target: LAMA2; (-) strand; PAM type: NNNNGHTT; PAM sequence: AGTAGCTT
tgtcgcatgaaatttccata

SEQ ID NO: 39635 - DNA, 20 bp, Artificial Sequence
  Description of Artificial Sequence: Synthetic oligonucleotide
  Target: LAMA2; (-) strand; PAM type: NNNNGHTT; PAM sequence: ACCTGCTT
aatattttctattagagttt

SEQ ID NO: 39636 - DNA, 20 bp, Artificial Sequence
  Description of Artificial Sequence: Synthetic oligonucleotide
  Target: LAMA2; (-) strand; PAM type: NNNNGHTT; PAM sequence: TAGAGTTT
agagcttgaatattttctat

SEQ ID NO: 39637 - DNA, 20 bp, Artificial Sequence
  Description of Artificial Sequence: Synthetic oligonucleotide
  Target: LAMA2; (-) strand; PAM type: NNNNGHTT; PAM sequence: AAGAGCTT
ttccttacagactctaaaat

SEQ ID NO: 39638 - DNA, 20 bp, Artificial Sequence
  Description of Artificial Sequence: Synthetic oligonucleotide
  Target: LAMA2; (-) strand; PAM type: NNNNGHTT; PAM sequence: CATGGTTT
ccaggtcacagggaagcctc

SEQ ID NO: 39639 - DNA, 20 bp, Artificial Sequence
  Description of Artificial Sequence: Synthetic oligonucleotide
  Target: LAMA2; (-) strand; PAM type: NNNNGHTT; PAM sequence: AGTAGCTT
tttcttttctgatgaatggt

SEQ ID NO: 39640 - DNA, 20 bp, Artificial Sequence
  Description of Artificial Sequence: Synthetic oligonucleotide
  Target: LAMA2; (-) strand; PAM type: NNNNGHTT; PAM sequence: ACGTGTTT
catatttttttttcccttta

SEQ ID NO: 39641 - DNA, 20 bp, Artificial Sequence
  Description of Artificial Sequence: Synthetic oligonucleotide
  Target: LAMA2; (-) strand; PAM type: NNNNGHTT; PAM sequence: AACAGATT
ttgtatggcacactggggtg

SEQ ID NO: 39642 - DNA, 20 bp, Artificial Sequence
  Description of Artificial Sequence: Synthetic oligonucleotide
  Target: LAMA2; (-) strand; PAM type: NNNNGHTT; PAM sequence: AAGTGATT
gttctgtgtgatttttttca

SEQ ID NO: 39643 - DNA, 20 bp, Artificial Sequence
  Description of Artificial Sequence: Synthetic oligonucleotide
  Target: LAMA2; (-) strand; PAM type: NNNNGHTT; PAM sequence: GTGTGATT
gcattcattcttgctgttct

SEQ ID NO: 39644 - DNA, 20 bp, Artificial Sequence
  Description of Artificial Sequence: Synthetic oligonucleotide
  Target: LAMA2; (-) strand; PAM type: NNNNGHTT; PAM sequence: TTGAGATT
cacattctttctttaaaagc

SEQ ID NO: 39645 - DNA, 20 bp, Artificial Sequence
  Description of Artificial Sequence: Synthetic oligonucleotide
  Target: LAMA2; (-) strand; PAM type: NNNNGHTT; PAM sequence: AAAAGCTT
atgtgtcacattctttcttt

SEQ ID NO: 39646 - DNA, 20 bp, Artificial Sequence
  Description of Artificial Sequence: Synthetic oligonucleotide
  Target: LAMA2; (-) strand; PAM type: NNNNGHTT; PAM sequence: AATAGTTT
caattatattcatggaaaat

SEQ ID NO: 39647 - DNA, 20 bp, Artificial Sequence
  Description of Artificial Sequence: Synthetic oligonucleotide
  Target: LAMA2; (-) strand; PAM type: NNNNGHTT; PAM sequence: GTATGATT
tatgaaacttacctaaatct

SEQ ID NO: 39648 - DNA, 20 bp, Artificial Sequence
  Description of Artificial Sequence: Synthetic oligonucleotide
  Target: LAMA2; (-) strand; PAM type: NNNNGHTT; PAM sequence: TATCGATT
taagactatttacaaacata

SEQ ID NO: 39649 - DNA, 20 bp, Artificial Sequence
  Description of Artificial Sequence: Synthetic oligonucleotide
  Target: LAMA2; (-) strand; PAM type: NNNNGHTT; PAM sequence: TTTTGCTT
gagacttcataatttttctg

SEQ ID NO: 39650 - DNA, 20 bp, Artificial Sequence
  Description of Artificial Sequence: Synthetic oligonucleotide
  Target: LAMA2; (-) strand; PAM type: NNNNGHTT; PAM sequence: TTCTGTTT
attgagagacttcataattt

SEQ ID NO: 39651 - DNA, 20 bp, Artificial Sequence
  Description of Artificial Sequence: Synthetic oligonucleotide
  Target: LAMA2; (-) strand; PAM type: NNNNGHTT; PAM sequence: GTGTGCTT
aaaaggttttctgctgtctt

SEQ ID NO: 39652 - DNA, 20 bp, Artificial Sequence
  Description of Artificial Sequence: Synthetic oligonucleotide
  Target: LAMA2; (-) strand; PAM type: NNNNGHTT; PAM sequence: AAAGGTTT
tggatcttctgcatgaaata

SEQ ID NO: 39653 - DNA, 20 bp, Artificial Sequence
  Description of Artificial Sequence: Synthetic oligonucleotide
  Target: LAMA2; (-) strand; PAM type: NNNNGHTT; PAM sequence: CAGCGTTT
ataattaacagtatagataa

SEQ ID NO: 39654 - DNA, 20 bp, Artificial Sequence
  Description of Artificial Sequence: Synthetic oligonucleotide
  Target: LAMA2; (-) strand; PAM type: NNNNGHTT; PAM sequence: TATGGCTT
tctaagacatgcaaatctgc

SEQ ID NO: 39655 - DNA, 20 bp, Artificial Sequence
  Description of Artificial Sequence: Synthetic oligonucleotide
  Target: LAMA2; (-) strand; PAM type: NNNNGHTT; PAM sequence: TTCTGTTT
tcagttccactaacaagatg

SEQ ID NO: 39656 - DNA, 20 bp, Artificial Sequence
  Description of Artificial Sequence: Synthetic oligonucleotide
  Target: LAMA2; (-) strand; PAM type: NNNNGHTT; PAM sequence: TATTGTTT
taattaaagatgaatgacaa

SEQ ID NO: 39657 - DNA, 20 bp, Artificial Sequence
  Description of Artificial Sequence: Synthetic oligonucleotide
  Target: LAMA2; (-) strand; PAM type: NNNNGHTT; PAM sequence: TAAAGTTT
agattaggaaaaatgtattc

SEQ ID NO: 39658 - DNA, 20 bp, Artificial Sequence
  Description of Artificial Sequence: Synthetic oligonucleotide
  Target: LAMA2; (-) strand; PAM type: NNNNGHTT; PAM sequence: CTGAGATT
gactatgaccccagttttta

SEQ ID NO: 39659 - DNA, 20 bp, Artificial Sequence
  Description of Artificial Sequence: Synthetic oligonucleotide
  Target: LAMA2; (-) strand; PAM type: NNNNGHTT; PAM sequence: CCCAGTTT
tagcattgtgagactatgac

SEQ ID NO: 39660 - DNA, 20 bp, Artificial Sequence
  Description of Artificial Sequence: Synthetic oligonucleotide
  Target: LAMA2; (-) strand; PAM type: NNNNGHTT; PAM sequence: GACAGCTT
ttacaaaatcaaatgctgat

SEQ ID NO: 39661 - DNA, 20 bp, Artificial Sequence
  Description of Artificial Sequence: Synthetic oligonucleotide
  Target: LAMA2; (-) strand; PAM type: NNNNGHTT; PAM sequence: TTGAGATT
aactcttaaactctctgctt

SEQ ID NO: 39662 - DNA, 20 bp, Artificial Sequence
  Description of Artificial Sequence: Synthetic oligonucleotide
  Target: LAMA2; (-) strand; PAM type: NNNNGHTT; PAM sequence: CTCTGCTT
agaatataaactcttaaact

SEQ ID NO: 39663 - DNA, 20 bp, Artificial Sequence
  Description of Artificial Sequence: Synthetic oligonucleotide
  Target: LAMA2; (-) strand; PAM type: NNNNGHTT; PAM sequence: TCCAGCTT
catcagggatttggccaaac

SEQ ID NO: 39664 - DNA, 20 bp, Artificial Sequence
  Description of Artificial Sequence: Synthetic oligonucleotide
  Target: LAMA2; (-) strand; PAM type: NNNNGHTT; PAM sequence: CAGGGATT
agcaatggctttgattgcat

SEQ ID NO: 39665 - DNA, 20 bp, Artificial Sequence
  Description of Artificial Sequence: Synthetic oligonucleotide
  Target: LAMA2; (-) strand; PAM type: NNNNGHTT; PAM sequence: CTTTGATT
aggggattagagagcaatgg

SEQ ID NO: 39666 - DNA, 20 bp, Artificial Sequence
  Description of Artificial Sequence: Synthetic oligonucleotide
  Target: LAMA2; (-) strand; PAM type: NNNNGHTT; PAM sequence: AATGGCTT
ttttcaggggattagagagc

SEQ ID NO: 39667 - DNA, 20 bp, Artificial Sequence
  Description of Artificial Sequence: Synthetic oligonucleotide
  Target: LAMA2; (-) strand; PAM type: NNNNGHTT; PAM sequence: AGGGGATT
aatacaccattttttttttc

SEQ ID NO: 39668 - DNA, 20 bp, Artificial Sequence
  Description of Artificial Sequence: Synthetic oligonucleotide
  Target: LAMA2; (-) strand; PAM type: NNNNGHTT; PAM sequence: TGAAGCTT
gcaagtgtttacaaatcaag

SEQ ID NO: 39669 - DNA, 20 bp, Artificial Sequence
  Description of Artificial Sequence: Synthetic oligonucleotide
  Target: LAMA2; (-) strand; PAM type: NNNNGHTT; PAM sequence: AAGTGTTT
aatgcacataacagacccgc

SEQ ID NO: 39670 - DNA, 20 bp, Artificial Sequence
  Description of Artificial Sequence: Synthetic oligonucleotide
  Target: LAMA2; (-) strand; PAM type: NNNNGHTT; PAM sequence: ACTGGCTT
attttatagcccgaggagct

SEQ ID NO: 39671 - DNA, 20 bp, Artificial Sequence
  Description of Artificial Sequence: Synthetic oligonucleotide
  Target: LAMA2; (-) strand; PAM type: NNNNGHTT; PAM sequence: TCAGGTTT
aacacacattcaattaaaat

SEQ ID NO: 39672 - DNA, 20 bp, Artificial Sequence
  Description of Artificial Sequence: Synthetic oligonucleotide
  Target: LAMA2; (-) strand; PAM type: NNNNGHTT; PAM sequence: TGAAGATT
tagcattgtaatctgcactc

SEQ ID NO: 39673 - DNA, 20 bp, Artificial Sequence
  Description of Artificial Sequence: Synthetic oligonucleotide
  Target: LAMA2; (-) strand; PAM type: NNNNGHTT; PAM sequence: GTAGGTTT
aaactttataacaagcatag

SEQ ID NO: 39674 - DNA, 20 bp, Artificial Sequence
  Description of Artificial Sequence: Synthetic oligonucleotide
  Target: LAMA2; (-) strand; PAM type: NNNNGHTT; PAM sequence: AGGAGTTT
aagttacctccaggagttta

SEQ ID NO: 39675 - DNA, 20 bp, Artificial Sequence
  Description of Artificial Sequence: Synthetic oligonucleotide
  Target: LAMA2; (-) strand; PAM type: NNNNGHTT; PAM sequence: AGGAGTTT
ttcaaataaaagttacctcc

SEQ ID NO: 39676 - DNA, 20 bp, Artificial Sequence
  Description of Artificial Sequence: Synthetic oligonucleotide
  Target: LAMA2; (-) strand; PAM type: NNNNGHTT; PAM sequence: TTTTGCTT
taaaatgtgacaatgaatag

SEQ ID NO: 39677 - DNA, 20 bp, Artificial Sequence
  Description of Artificial Sequence: Synthetic oligonucleotide
  Target: LAMA2; (-) strand; PAM type: NNNNGHTT; PAM sequence: AATAGTTT
aactttaaaatgtgacaatg

SEQ ID NO: 39678 - DNA, 20 bp, Artificial Sequence
  Description of Artificial Sequence: Synthetic oligonucleotide
  Target: LAMA2; (-) strand; PAM type: NNNNGHTT; PAM sequence: ACATGTTT
tggactaactggtaacacaa

SEQ ID NO: 39679 - DNA, 20 bp, Artificial Sequence
  Description of Artificial Sequence: Synthetic oligonucleotide
  Target: LAMA2; (-) strand; PAM type: NNNNGHTT; PAM sequence: TAATGTTT
tattgatttctttctgagga

SEQ ID NO: 39680 - DNA, 20 bp, Artificial Sequence
  Description of Artificial Sequence: Synthetic oligonucleotide
  Target: LAMA2; (-) strand; PAM type: NNNNGHTT; PAM sequence: TATTGATT
gatcacgcataatctaataa

SEQ ID NO: 39681 - DNA, 20 bp, Artificial Sequence
  Description of Artificial Sequence: Synthetic oligonucleotide
  Target: LAMA2; (-) strand; PAM type: NNNNGHTT; PAM sequence: AATTGCTT
tttcgtacaggcactggtga

SEQ ID NO: 39682 - DNA, 20 bp, Artificial Sequence
  Description of Artificial Sequence: Synthetic oligonucleotide
  Target: LAMA2; (-) strand; PAM type: NNNNGHTT; PAM sequence: AGTGGCTT
cccccactttttaaaatgtg

SEQ ID NO: 39683 - DNA, 20 bp, Artificial Sequence
  Description of Artificial Sequence: Synthetic oligonucleotide
  Target: LAMA2; (-) strand; PAM type: NNNNGHTT; PAM sequence: AGAAGTTT
aaatattcacataaatcata

SEQ ID NO: 39684 - DNA, 20 bp, Artificial Sequence
  Description of Artificial Sequence: Synthetic oligonucleotide
  Target: LAMA2; (-) strand; PAM type: NNNNGHTT; PAM sequence: TTTTGCTT
accaaatcctaatattgcat

SEQ ID NO: 39685 - DNA, 20 bp, Artificial Sequence
  Description of Artificial Sequence: Synthetic oligonucleotide
  Target: LAMA2; (-) strand; PAM type: NNNNGHTT; PAM sequence: AGCTGTTT
gataattaacattgttttga

SEQ ID NO: 39686 - DNA, 20 bp, Artificial Sequence
  Description of Artificial Sequence: Synthetic oligonucleotide
  Target: LAMA2; (-) strand; PAM type: NNNNGHTT; PAM sequence: CATTGTTT
gattaaatcaagataattaa

SEQ ID NO: 39687 - DNA, 20 bp, Artificial Sequence
  Description of Artificial Sequence: Synthetic oligonucleotide
  Target: LAMA2; (-) strand; PAM type: NNNNGHTT; PAM sequence: GGATGATT
tgatacatagataagttgtg

SEQ ID NO: 39688 - DNA, 20 bp, Artificial Sequence
  Description of Artificial Sequence: Synthetic oligonucleotide
  Target: LAMA2; (-) strand; PAM type: NNNNGHTT; PAM sequence: TGTGGATT
tgaaggtatcaaaagttata

SEQ ID NO: 39689 - DNA, 20 bp, Artificial Sequence
  Description of Artificial Sequence: Synthetic oligonucleotide
  Target: LAMA2; (-) strand; PAM type: NNNNGHTT; PAM sequence: TTAAGTTT
caacaggaggctattagtag

SEQ ID NO: 39690 - DNA, 20 bp, Artificial Sequence
  Description of Artificial Sequence: Synthetic oligonucleotide
  Target: LAMA2; (-) strand; PAM type: NNNNGHTT; PAM sequence: TATGGCTT
ttaatctactatgttatcag

SEQ ID NO: 39691 - DNA, 20 bp, Artificial Sequence
  Description of Artificial Sequence: Synthetic oligonucleotide
  Target: LAMA2; (-) strand; PAM type: NNNNGHTT; PAM sequence: CTGGGATT
tgctttggcctcccgaagtg

SEQ ID NO: 39692 - DNA, 20 bp, Artificial Sequence
  Description of Artificial Sequence: Synthetic oligonucleotide
  Target: LAMA2; (-) strand; PAM type: NNNNGHTT; PAM sequence: GCCTGCTT
ctgttgacctcaagtgatct

SEQ ID NO: 39693 - DNA, 20 bp, Artificial Sequence
  Description of Artificial Sequence: Synthetic oligonucleotide
  Target: LAMA2; (-) strand; PAM type: NNNNGHTT; PAM sequence: CTGGGTTT
tattgtatttttagtagaaa

SEQ ID NO: 39694 - DNA, 20 bp, Artificial Sequence
  Description of Artificial Sequence: Synthetic oligonucleotide
  Target: LAMA2; (-) strand; PAM type: NNNNGHTT; PAM sequence: CTGGGATT
tgcctcagcctcctgagtag

SEQ ID NO: 39695 - DNA, 20 bp, Artificial Sequence
  Description of Artificial Sequence: Synthetic oligonucleotide
  Target: LAMA2; (-) strand; PAM type: NNNNGHTT; PAM sequence: AAGTGATT
aacctccgcctaccaggttc

SEQ ID NO: 39696 - DNA, 20 bp, Artificial Sequence
  Description of Artificial Sequence: Synthetic oligonucleotide
  Target: LAMA2; (-) strand; PAM type: NNNNGHTT; PAM sequence: CGGGGATT
actgcatgggttcacttgta

SEQ ID NO: 39697 - DNA, 20 bp, Artificial Sequence
  Description of Artificial Sequence: Synthetic oligonucleotide
  Target: LAMA2; (-) strand; PAM type: NNNNGHTT; PAM sequence: ATGGGCTT
taagttgacccttgaacaat

SEQ ID NO: 39698 - DNA, 20 bp, Artificial Sequence
  Description of Artificial Sequence: Synthetic oligonucleotide
  Target: LAMA2; (-) strand; PAM type: NNNNGHTT; PAM sequence: TTTTGTTT
tcaagtatgttctattgtct

SEQ ID NO: 39699 - DNA, 20 bp, Artificial Sequence
  Description of Artificial Sequence: Synthetic oligonucleotide
  Target: LAMA2; (-) strand; PAM type: NNNNGHTT; PAM sequence: TCACGTTT
atcctacagcaatatccttc

SEQ ID NO: 39700 - DNA, 20 bp, Artificial Sequence
  Description of Artificial Sequence: Synthetic oligonucleotide
  Target: LAMA2; (-) strand; PAM type: NNNNGHTT; PAM sequence: CTTAGATT
ctagaaacagcgagaatgta

SEQ ID NO: 39701 - DNA, 20 bp, Artificial Sequence
  Description of Artificial Sequence: Synthetic oligonucleotide
  Target: LAMA2; (-) strand; PAM type: NNNNGHTT; PAM sequence: TTGAGATT
tccttgttcagctacctcca

SEQ ID NO: 39702 - DNA, 20 bp, Artificial Sequence
  Description of Artificial Sequence: Synthetic oligonucleotide
  Target: LAMA2; (-) strand; PAM type: NNNNGHTT; PAM sequence: GGTAGCTT
gattaagcaggttagtagga

SEQ ID NO: 39703 - DNA, 20 bp, Artificial Sequence
  Description of Artificial Sequence: Synthetic oligonucleotide
  Target: LAMA2; (-) strand; PAM type: NNNNGHTT; PAM sequence: TTGAGATT
catttagctcctgaagtgac

SEQ ID NO: 39704 - DNA, 20 bp, Artificial Sequence
  Description of Artificial Sequence: Synthetic oligonucleotide
  Target: LAMA2; (-) strand; PAM type: NNNNGHTT; PAM sequence: AATAGATT
gtgagtggaagattaaataa

SEQ ID NO: 39705 - DNA, 20 bp, Artificial Sequence
  Description of Artificial Sequence: Synthetic oligonucleotide
  Target: LAMA2; (-) strand; PAM type: NNNNGHTT; PAM sequence: GGAAGATT
ctgtgtctcacactgtgagt

SEQ ID NO: 39706 - DNA, 20 bp, Artificial Sequence
  Description of Artificial Sequence: Synthetic oligonucleotide
  Target: LAMA2; (-) strand; PAM type: NNNNGHTT; PAM sequence: GTATGATT
gatcaactatttcccttcag

SEQ ID NO: 39707 - DNA, 20 bp, Artificial Sequence
  Description of Artificial Sequence: Synthetic oligonucleotide
  Target: LAMA2; (-) strand; PAM type: NNNNGHTT; PAM sequence: TCCTGATT
cttattaaaacattcttaat

SEQ ID NO: 39708 - DNA, 20 bp, Artificial Sequence
  Description of Artificial Sequence: Synthetic oligonucleotide
  Target: LAMA2; (-) strand; PAM type: NNNNGHTT; PAM sequence: ATAGGCTT
aaatagatcagctataataa

SEQ ID NO: 39709 - DNA, 20 bp, Artificial Sequence
  Description of Artificial Sequence: Synthetic oligonucleotide
  Target: LAMA2; (-) strand; PAM type: NNNNGHTT; PAM sequence: TGCAGTTT
taatcctatctcctaatcat

SEQ ID NO: 39710 - DNA, 20 bp, Artificial Sequence
  Description of Artificial Sequence: Synthetic oligonucleotide
  Target: LAMA2; (-) strand; PAM type: NNNNGHTT; PAM sequence: ACAAGTTT
aacagcctgctatttagtgt

SEQ ID NO: 39711 - DNA, 20 bp, Artificial Sequence
  Description of Artificial Sequence: Synthetic oligonucleotide
  Target: LAMA2; (-) strand; PAM type: NNNNGHTT; PAM sequence: AGAAGCTT
aacaaagatatgtttccctg

SEQ ID NO: 39712 - DNA, 20 bp, Artificial Sequence
  Description of Artificial Sequence: Synthetic oligonucleotide
  Target: LAMA2; (-) strand; PAM type: NNNNGHTT; PAM sequence: ATATGTTT
gcagcactgttggaacaaag

SEQ ID NO: 39713 - DNA, 20 bp, Artificial Sequence
  Description of Artificial Sequence: Synthetic oligonucleotide
  Target: LAMA2; (-) strand; PAM type: NNNNGHTT; PAM sequence: GATAGTTT
tttaaaatgtaaaaaaaaaa

SEQ ID NO: 39714 - DNA, 20 bp, Artificial Sequence
  Description of Artificial Sequence: Synthetic oligonucleotide
  Target: LAMA2; (-) strand; PAM type: NNNNGHTT; PAM sequence: AGCAGTTT
tctcagcaagtttattgaaa

SEQ ID NO: 39715 - DNA, 20 bp, Artificial Sequence
  Description of Artificial Sequence: Synthetic oligonucleotide
  Target: LAMA2; (-) strand; PAM type: NNNNGHTT; PAM sequence: GCAAGTTT
gcagacaagagaatatctca

SEQ ID NO: 39716 - DNA, 20 bp, Artificial Sequence
  Description of Artificial Sequence: Synthetic oligonucleotide
  Target: LAMA2; (-) strand; PAM type: NNNNGHTT; PAM sequence: GCCAGTTT
aagtcgagattcaaacccag

SEQ ID NO: 39717 - DNA, 20 bp, Artificial Sequence
  Description of Artificial Sequence: Synthetic oligonucleotide
  Target: LAMA2; (-) strand; PAM type: NNNNGHTT; PAM sequence: TCGAGATT
aggcttactgtatggtgaag

SEQ ID NO: 39718 - DNA, 20 bp, Artificial Sequence
  Description of Artificial Sequence: Synthetic oligonucleotide
  Target: LAMA2; (-) strand; PAM type: NNNNGHTT; PAM sequence: TCAGGCTT
gtagcacccagtgcagggtc

SEQ ID NO: 39719 - DNA, 20 bp, Artificial Sequence
  Description of Artificial Sequence: Synthetic oligonucleotide
  Target: LAMA2; (-) strand; PAM type: NNNNGHTT; PAM sequence: TGGTGTTT
gtggtagttactcagggact

SEQ ID NO: 39720 - DNA, 20 bp, Artificial Sequence
  Description of Artificial Sequence: Synthetic oligonucleotide
  Target: LAMA2; (-) strand; PAM type: NNNNGHTT; PAM sequence: CCAGGCTT
tcctggaggccccatgcatg

SEQ ID NO: 39721 - DNA, 20 bp, Artificial Sequence
  Description of Artificial Sequence: Synthetic oligonucleotide
  Target: LAMA2; (-) strand; PAM type: NNNNGHTT; PAM sequence: GGGAGATT
aagactcaggctgtaggtga

SEQ ID NO: 39722 - DNA, 20 bp, Artificial Sequence
  Description of Artificial Sequence: Synthetic oligonucleotide
  Target: LAMA2; (-) strand; PAM type: NNNNGHTT; PAM sequence: TAGTGATT
tcaatacatgggtatataac

SEQ ID NO: 39723 - DNA, 20 bp, Artificial Sequence
  Description of Artificial Sequence: Synthetic oligonucleotide
  Target: LAMA2; (-) strand; PAM type: NNNNGHTT; PAM sequence: TTCAGTTT
tcattatttttaagttgcac

SEQ ID NO: 39724 - DNA, 20 bp, Artificial Sequence
  Description of Artificial Sequence: Synthetic oligonucleotide
  Target: LAMA2; (-) strand; PAM type: NNNNGHTT; PAM sequence: GTAGGATT
tgtccaagtagtgcagctag

SEQ ID NO: 39725 - DNA, 20 bp, Artificial Sequence
  Description of Artificial Sequence: Synthetic oligonucleotide
  Target: LAMA2; (-) strand; PAM type: NNNNGHTT; PAM sequence: CCAAGATT
taggatgtataggtaaaaac

SEQ ID NO: 39726 - DNA, 20 bp, Artificial Sequence
  Description of Artificial Sequence: Synthetic oligonucleotide
  Target: LAMA2; (-) strand; PAM type: NNNNGHTT; PAM sequence: ATACGTTT
ttgtaaagggattttcacac

SEQ ID NO: 39727 - DNA, 20 bp, Artificial Sequence
  Description of Artificial Sequence: Synthetic oligonucleotide
  Target: LAMA2; (-) strand; PAM type: NNNNGHTT; PAM sequence: AAGGGATT
gaatggcatgtcagtttgta

SEQ ID NO: 39728 - DNA, 20 bp, Artificial Sequence
  Description of Artificial Sequence: Synthetic oligonucleotide
  Target: LAMA2; (-) strand; PAM type: NNNNGHTT; PAM sequence: GTCAGTTT
gtaactaagctgaatggcat

SEQ ID NO: 39729 - DNA, 20 bp, Artificial Sequence
  Description of Artificial Sequence: Synthetic oligonucleotide
  Target: LAMA2; (-) strand; PAM type: NNNNGHTT; PAM sequence: ACTTGATT
atttaataaggagatggatt

SEQ ID NO: 39730 - DNA, 20 bp, Artificial Sequence
  Description of Artificial Sequence: Synthetic oligonucleotide
  Target: LAMA2; (-) strand; PAM type: NNNNGHTT; PAM sequence: GATGGATT
gaaatacaatttaataagga

SEQ ID NO: 39731 - DNA, 20 bp, Artificial Sequence
  Description of Artificial Sequence: Synthetic oligonucleotide
  Target: LAMA2; (-) strand; PAM type: NNNNGHTT; PAM sequence: ATAAGTTT
tataagcagtgcttaccagt

SEQ ID NO: 39732 - DNA, 20 bp, Artificial Sequence
  Description of Artificial Sequence: Synthetic oligonucleotide
  Target: LAMA2; (-) strand; PAM type: NNNNGHTT; PAM sequence: CAGTGCTT
agcagtgcttactgtataag

SEQ ID NO: 39733 - DNA, 20 bp, Artificial Sequence
  Description of Artificial Sequence: Synthetic oligonucleotide
  Target: LAMA2; (-) strand; PAM type: NNNNGHTT; PAM sequence: CAGTGCTT
catatgtatattggaaagag

SEQ ID NO: 39734 - DNA, 20 bp, Artificial Sequence
  Description of Artificial Sequence: Synthetic oligonucleotide
  Target: LAMA2; (-) strand; PAM type: NNNNGHTT; PAM sequence: CTCAGTTT
tttcatatgtgccacacagt

SEQ ID NO: 39735 - DNA, 20 bp, Artificial Sequence
  Description of Artificial Sequence: Synthetic oligonucleotide
  Target: LAMA2; (-) strand; PAM type: NNNNGHTT; PAM sequence: TATAGATT
ttcaactcaatctgtcattt

SEQ ID NO: 39736 - DNA, 20 bp, Artificial Sequence
  Description of Artificial Sequence: Synthetic oligonucleotide
  Target: LAMA2; (-) strand; PAM type: NNNNGHTT; PAM sequence: AAAGGTTT
agtctatcaatcatatgaag

SEQ ID NO: 39737 - DNA, 20 bp, Artificial Sequence
  Description of Artificial Sequence: Synthetic oligonucleotide
  Target: LAMA2; (-) strand; PAM type: NNNNGHTT; PAM sequence: ATTTGTTT
tttcttgattttcatttatc

SEQ ID NO: 39738 - DNA, 20 bp, Artificial Sequence
  Description of Artificial Sequence: Synthetic oligonucleotide
  Target: LAMA2; (-) strand; PAM type: NNNNGHTT; PAM sequence: TCTTGATT
ttgtacatattcttagtttt

SEQ ID NO: 39739 - DNA, 20 bp, Artificial Sequence
  Description of Artificial Sequence: Synthetic oligonucleotide
  Target: LAMA2; (-) strand; PAM type: NNNNGHTT; PAM sequence: CTTAGTTT
gatgacaatttgtacatatt

SEQ ID NO: 39740 - DNA, 20 bp, Artificial Sequence
  Description of Artificial Sequence: Synthetic oligonucleotide
  Target: LAMA2; (-) strand; PAM type: NNNNGHTT; PAM sequence: AGATGCTT
tgcaattactgtctgtaaat

SEQ ID NO: 39741 - DNA, 20 bp, Artificial Sequence
  Description of Artificial Sequence: Synthetic oligonucleotide
  Target: LAMA2; (-) strand; PAM type: NNNNGHTT; PAM sequence: AATGGATT
gaattataaataagaggtat

SEQ ID NO: 39742 - DNA, 20 bp, Artificial Sequence
  Description of Artificial Sequence: Synthetic oligonucleotide
  Target: LAMA2; (-) strand; PAM type: NNNNGHTT; PAM sequence: ATAAGATT
ccttagctcttgctttgatg

SEQ ID NO: 39743 - DNA, 20 bp, Artificial Sequence
  Description of Artificial Sequence: Synthetic oligonucleotide
  Target: LAMA2; (-) strand; PAM type: NNNNGHTT; PAM sequence: TCTTGCTT
atttcaaaactgcccttagc

SEQ ID NO: 39744 - DNA, 20 bp, Artificial Sequence
  Description of Artificial Sequence: Synthetic oligonucleotide
  Target: LAMA2; (-) strand; PAM type: NNNNGHTT; PAM sequence: AACTGCTT
ttgtaaaaatattgtagagg

SEQ ID NO: 39745 - DNA, 20 bp, Artificial Sequence
  Description of Artificial Sequence: Synthetic oligonucleotide
  Target: LAMA2; (-) strand; PAM type: NNNNGHTT; PAM sequence: TTTTGTTT
tagcagtaactgatacttaa

SEQ ID NO: 39746 - DNA, 20 bp, Artificial Sequence
  Description of Artificial Sequence: Synthetic oligonucleotide
  Target: LAMA2; (-) strand; PAM type: NNNNGHTT; PAM sequence: CTTTGTTT
tctggtgaggaaatggtgtc

SEQ ID NO: 39747 - DNA, 20 bp, Artificial Sequence
  Description of Artificial Sequence: Synthetic oligonucleotide
  Target: LAMA2; (-) strand; PAM type: NNNNGHTT; PAM sequence: GTCAGTTT
ctgcataaagctcagtttag

SEQ ID NO: 39748 - DNA, 20 bp, Artificial Sequence
  Description of Artificial Sequence: Synthetic oligonucleotide
  Target: LAMA2; (-) strand; PAM type: NNNNGHTT; PAM sequence: CTCAGTTT
aacctttcaactgcataaag

SEQ ID NO: 39749 - DNA, 20 bp, Artificial Sequence
  Description of Artificial Sequence: Synthetic oligonucleotide
  Target: LAMA2; (-) strand; PAM type: NNNNGHTT; PAM sequence: TTCTGATT
cctagagatcattgacaaat

SEQ ID NO: 39750 - DNA, 20 bp, Artificial Sequence
  Description of Artificial Sequence: Synthetic oligonucleotide
  Target: LAMA2; (-) strand; PAM type: NNNNGHTT; PAM sequence: GACAGCTT
cagttttaatagccacaagg

SEQ ID NO: 39751 - DNA, 20 bp, Artificial Sequence
  Description of Artificial Sequence: Synthetic oligonucleotide
  Target: LAMA2; (-) strand; PAM type: NNNNGHTT; PAM sequence: ATCAGTTT
ttatttggagatttaaaaaa

SEQ ID NO: 39752 - DNA, 20 bp, Artificial Sequence
  Description of Artificial Sequence: Synthetic oligonucleotide
  Target: LAMA2; (-) strand; PAM type: NNNNGHTT; PAM sequence: TGGAGATT
gacgataggtataaattatt

SEQ ID NO: 39753 - DNA, 20 bp, Artificial Sequence
  Description of Artificial Sequence: Synthetic oligonucleotide
  Target: LAMA2; (-) strand; PAM type: NNNNGHTT; PAM sequence: TTGGGCTT
ctattttcacattttgcctt

SEQ ID NO: 39754 - DNA, 20 bp, Artificial Sequence
  Description of Artificial Sequence: Synthetic oligonucleotide
  Target: LAMA2; (-) strand; PAM type: NNNNGHTT; PAM sequence: GATTGTTT
actaaaaataaagataccat

SEQ ID NO: 39755 - DNA, 20 bp, Artificial Sequence
  Description of Artificial Sequence: Synthetic oligonucleotide
  Target: LAMA2; (-) strand; PAM type: NNNNGHTT; PAM sequence: CCATGATT
ataaactaaaaataaagata

SEQ ID NO: 39756 - DNA, 20 bp, Artificial Sequence
  Description of Artificial Sequence: Synthetic oligonucleotide
  Target: LAMA2; (-) strand; PAM type: NNNNGHTT; PAM sequence: CTATGTTT
tctatctcaaatagtttttt

SEQ ID NO: 39757 - DNA, 20 bp, Artificial Sequence
  Description of Artificial Sequence: Synthetic oligonucleotide
  Target: LAMA2; (-) strand; PAM type: NNNNGHTT; PAM sequence: AATAGTTT
caataggtttctctatctca

SEQ ID NO: 39758 - DNA, 20 bp, Artificial Sequence
  Description of Artificial Sequence: Synthetic oligonucleotide
  Target: LAMA2; (-) strand; PAM type: NNNNGHTT; PAM sequence: ATAGGTTT
taattgtcatacataaatca

SEQ ID NO: 39759 - DNA, 20 bp, Artificial Sequence
  Description of Artificial Sequence: Synthetic oligonucleotide
  Target: LAMA2; (-) strand; PAM type: NNNNGHTT; PAM sequence: GCATGTTT
tgaggattacttgagataaa

SEQ ID NO: 39760 - DNA, 20 bp, Artificial Sequence
  Description of Artificial Sequence: Synthetic oligonucleotide
  Target: LAMA2; (-) strand; PAM type: NNNNGHTT; PAM sequence: TGAGGATT
tgcttttcatagggtggatc

SEQ ID NO: 39761 - DNA, 20 bp, Artificial Sequence
  Description of Artificial Sequence: Synthetic oligonucleotide
  Target: LAMA2; (-) strand; PAM type: NNNNGHTT; PAM sequence: TTCTGCTT
agcactcaatcaatggtagg

SEQ ID NO: 39762 - DNA, 20 bp, Artificial Sequence
  Description of Artificial Sequence: Synthetic oligonucleotide
  Target: LAMA2; (-) strand; PAM type: NNNNGHTT; PAM sequence: TGAGGTTT
ggttttggaaacagattcat

SEQ ID NO: 39763 - DNA, 20 bp, Artificial Sequence
  Description of Artificial Sequence: Synthetic oligonucleotide
  Target: LAMA2; (-) strand; PAM type: NNNNGHTT; PAM sequence: AACAGATT
aagtttacctaggttttgga

SEQ ID NO: 39764 - DNA, 20 bp, Artificial Sequence
  Description of Artificial Sequence: Synthetic oligonucleotide
  Target: LAMA2; (-) strand; PAM type: NNNNGHTT; PAM sequence: CTAGGTTT
atagttgagtacaagtttac

SEQ ID NO: 39765 - DNA, 20 bp, Artificial Sequence
  Description of Artificial Sequence: Synthetic oligonucleotide
  Target: LAMA2; (-) strand; PAM type: NNNNGHTT; PAM sequence: ACAAGTTT
gcataatataatagttgagt

SEQ ID NO: 39766 - DNA, 20 bp, Artificial Sequence
  Description of Artificial Sequence: Synthetic oligonucleotide
  Target: LAMA2; (-) strand; PAM type: NNNNGHTT; PAM sequence: TGATGTTT
gtttgtgtatgtacactcta

SEQ ID NO: 39767 - DNA, 20 bp, Artificial Sequence
  Description of Artificial Sequence: Synthetic oligonucleotide
  Target: LAMA2; (-) strand; PAM type: NNNNGHTT; PAM sequence: TTAGGTTT
tgtgtagtaggctacaccat

SEQ ID NO: 39768 - DNA, 20 bp, Artificial Sequence
  Description of Artificial Sequence: Synthetic oligonucleotide
  Target: LAMA2; (-) strand; PAM type: NNNNGHTT; PAM sequence: ATATGTTT
tgtacctttgctatgtttaa

SEQ ID NO: 39769 - DNA, 20 bp, Artificial Sequence
  Description of Artificial Sequence: Synthetic oligonucleotide
  Target: LAMA2; (-) strand; PAM type: NNNNGHTT; PAM sequence: CTATGTTT
atatttttaatgtacctttg

SEQ ID NO: 39770 - DNA, 20 bp, Artificial Sequence
  Description of Artificial Sequence: Synthetic oligonucleotide
  Target: LAMA2; (-) strand; PAM type: NNNNGHTT; PAM sequence: ATAAGATT
atgtgtacgacagtggtccc

SEQ ID NO: 39771 - DNA, 20 bp, Artificial Sequence
  Description of Artificial Sequence: Synthetic oligonucleotide
  Target: LAMA2; (-) strand; PAM type: NNNNGHTT; PAM sequence: CTTGGTTT
aggttctgaatactgtgtgc

SEQ ID NO: 39772 - DNA, 20 bp, Artificial Sequence
  Description of Artificial Sequence: Synthetic oligonucleotide
  Target: LAMA2; (-) strand; PAM type: NNNNGHTT; PAM sequence: TCCTGTTT
caggcagacccgagtttaat

SEQ ID NO: 39773 - DNA, 20 bp, Artificial Sequence
  Description of Artificial Sequence: Synthetic oligonucleotide
  Target: LAMA2; (-) strand; PAM type: NNNNGHTT; PAM sequence: CCGAGTTT
gattttgcaatcaggcagac

SEQ ID NO: 39774 - DNA, 20 bp, Artificial Sequence
  Description of Artificial Sequence: Synthetic oligonucleotide
  Target: LAMA2; (-) strand; PAM type: NNNNGHTT; PAM sequence: CATGGATT
cactctatcttgtatctttg

SEQ ID NO: 39775 - DNA, 20 bp, Artificial Sequence
  Description of Artificial Sequence: Synthetic oligonucleotide
  Target: LAMA2; (-) strand; PAM type: NNNNGHTT; PAM sequence: AGATGCTT
cagagtttagtaataaaaat

SEQ ID NO: 39776 - DNA, 20 bp, Artificial Sequence
  Description of Artificial Sequence: Synthetic oligonucleotide
  Target: LAMA2; (-) strand; PAM type: NNNNGHTT; PAM sequence: CAGAGTTT
actgcgctcctttctttctt

SEQ ID NO: 39777 - DNA, 20 bp, Artificial Sequence
  Description of Artificial Sequence: Synthetic oligonucleotide
  Target: LAMA2; (-) strand; PAM type: NNNNGHTT; PAM sequence: ATTAGATT
atatattgtttcatcaaaaa

SEQ ID NO: 39778 - DNA, 20 bp, Artificial Sequence
  Description of Artificial Sequence: Synthetic oligonucleotide
  Target: LAMA2; (-) strand; PAM type: NNNNGHTT; PAM sequence: TATTGTTT
tttaatttattttcataata

SEQ ID NO: 39779 - DNA, 20 bp, Artificial Sequence
  Description of Artificial Sequence: Synthetic oligonucleotide
  Target: LAMA2; (-) strand; PAM type: NNNNGHTT; PAM sequence: GAATGATT
actgagacaaaagtttgtga

SEQ ID NO: 39780 - DNA, 20 bp, Artificial Sequence
  Description of Artificial Sequence: Synthetic oligonucleotide
  Target: LAMA2; (-) strand; PAM type: NNNNGHTT; PAM sequence: AAAAGTTT
tcctcttggtgaactgagac

SEQ ID NO: 39781 - DNA, 20 bp, Artificial Sequence
  Description of Artificial Sequence: Synthetic oligonucleotide
  Target: LAMA2; (-) strand; PAM type: NNNNGHTT; PAM sequence: GAATGTTT
ttagggtgtttgtcaatatt

SEQ ID NO: 39782 - DNA, 20 bp, Artificial Sequence
  Description of Artificial Sequence: Synthetic oligonucleotide
  Target: LAMA2; (-) strand; PAM type: NNNNGHTT; PAM sequence: GGGTGTTT
ttcaatttaaataattttta

SEQ ID NO: 39783 - DNA, 20 bp, Artificial Sequence
  Description of Artificial Sequence: Synthetic oligonucleotide
  Target: LAMA2; (-) strand; PAM type: NNNNGHTT; PAM sequence: CCTTGATT
aaacagaaattctctctttt

SEQ ID NO: 39784 - DNA, 20 bp, Artificial Sequence
  Description of Artificial Sequence: Synthetic oligonucleotide
  Target: LAMA2; (-) strand; PAM type: NNNNGHTT; PAM sequence: TGCTGTTT
aagattagaaacttaaaacg

SEQ ID NO: 39785 - DNA, 20 bp, Artificial Sequence
  Description of Artificial Sequence: Synthetic oligonucleotide
  Target: LAMA2; (-) strand; PAM type: NNNNGHTT; PAM sequence: CAAAGATT
agagagagtatttgacaacg

SEQ ID NO: 39786 - DNA, 20 bp, Artificial Sequence
  Description of Artificial Sequence: Synthetic oligonucleotide
  Target: LAMA2; (-) strand; PAM type: NNNNGHTT; PAM sequence: GATGGATT
tttgatttatttcgtatcct

SEQ ID NO: 39787 - DNA, 20 bp, Artificial Sequence
  Description of Artificial Sequence: Synthetic oligonucleotide
  Target: LAMA2; (-) strand; PAM type: NNNNGHTT; PAM sequence: TTTTGATT
gttttaacattttagattag

SEQ ID NO: 39788 - DNA, 20 bp, Artificial Sequence
  Description of Artificial Sequence: Synthetic oligonucleotide
  Target: LAMA2; (-) strand; PAM type: NNNNGHTT; PAM sequence: ATTAGTTT
tttcagttttaacattttag

SEQ ID NO: 39789 - DNA, 20 bp, Artificial Sequence
  Description of Artificial Sequence: Synthetic oligonucleotide
  Target: LAMA2; (-) strand; PAM type: NNNNGHTT; PAM sequence: TTTAGATT
gtgtctttcagttttaacat

SEQ ID NO: 39790 - DNA, 20 bp, Artificial Sequence
  Description of Artificial Sequence: Synthetic oligonucleotide
  Target: LAMA2; (-) strand; PAM type: NNNNGHTT; PAM sequence: TTCAGTTT
agatgacttctaaagtgtct

SEQ ID NO: 39791 - DNA, 20 bp, Artificial Sequence
  Description of Artificial Sequence: Synthetic oligonucleotide
  Target: LAMA2; (-) strand; PAM type: NNNNGHTT; PAM sequence: CCCAGTTT
atgggcaagttactttgaga

SEQ ID NO: 39792 - DNA, 20 bp, Artificial Sequence
  Description of Artificial Sequence: Synthetic oligonucleotide
  Target: LAMA2; (-) strand; PAM type: NNNNGHTT; PAM sequence: GTTAGTTT
tagggaagccttgattttat

SEQ ID NO: 39793 - DNA, 20 bp, Artificial Sequence
  Description of Artificial Sequence: Synthetic oligonucleotide
  Target: LAMA2; (-) strand; PAM type: NNNNGHTT; PAM sequence: CCTTGATT
aaaaggaatgaatagggaag

SEQ ID NO: 39794 - DNA, 20 bp, Artificial Sequence
  Description of Artificial Sequence: Synthetic oligonucleotide
  Target: LAMA2; (-) strand; PAM type: NNNNGHTT; PAM sequence: CATCGCTT
tctggaggctgaggcacgag

SEQ ID NO: 39795 - DNA, 20 bp, Artificial Sequence
  Description of Artificial Sequence: Synthetic oligonucleotide
  Target: LAMA2; (-) strand; PAM type: NNNNGHTT; PAM sequence: GCTGGATT
cattttgggaggctgaggtg

SEQ ID NO: 39796 - DNA, 20 bp, Artificial Sequence
  Description of Artificial Sequence: Synthetic oligonucleotide
  Target: LAMA2; (-) strand; PAM type: NNNNGHTT; PAM sequence: GTTTGTTT
gggggagagttgaggcccga

SEQ ID NO: 39797 - DNA, 20 bp, Artificial Sequence
  Description of Artificial Sequence: Synthetic oligonucleotide
  Target: LAMA2; (-) strand; PAM type: NNNNGHTT; PAM sequence: CCGAGTTT
ctctgggggagagttgaggc

SEQ ID NO: 39798 - DNA, 20 bp, Artificial Sequence
  Description of Artificial Sequence: Synthetic oligonucleotide
  Target: LAMA2; (-) strand; PAM type: NNNNGHTT; PAM sequence: TGTGGTTT
caacacatttttcctattac

SEQ ID NO: 39799 - DNA, 20 bp, Artificial Sequence
  Description of Artificial Sequence: Synthetic oligonucleotide
  Target: LAMA2; (-) strand; PAM type: NNNNGHTT; PAM sequence: TACAGTTT
tactcctcatcgaggaattg

SEQ ID NO: 39800 - DNA, 20 bp, Artificial Sequence
  Description of Artificial Sequence: Synthetic oligonucleotide
  Target: LAMA2; (-) strand; PAM type: NNNNGHTT; PAM sequence: AAAAGTTT
agtttccttgaagctcaaac

SEQ ID NO: 39801 - DNA, 20 bp, Artificial Sequence
  Description of Artificial Sequence: Synthetic oligonucleotide
  Target: LAMA2; (-) strand; PAM type: NNNNGHTT; PAM sequence: GGAAGTTT
aaaaatcacacaaattgaga

SEQ ID NO: 39802 - DNA, 20 bp, Artificial Sequence
  Description of Artificial Sequence: Synthetic oligonucleotide
  Target: LAMA2; (-) strand; PAM type: NNNNGHTT; PAM sequence: CATGGATT
ataaaactggattttctgtg

SEQ ID NO: 39803 - DNA, 20 bp, Artificial Sequence
  Description of Artificial Sequence: Synthetic oligonucleotide
  Target: LAMA2; (-) strand; PAM type: NNNNGHTT; PAM sequence: ACTGGATT
caagctgaccactgaataaa

SEQ ID NO: 39804 - DNA, 20 bp, Artificial Sequence
  Description of Artificial Sequence: Synthetic oligonucleotide
  Target: LAMA2; (-) strand; PAM type: NNNNGHTT; PAM sequence: ATTAGTTT
ctggaaatgatggttgaaga

SEQ ID NO: 39805 - DNA, 20 bp, Artificial Sequence
  Description of Artificial Sequence: Synthetic oligonucleotide
  Target: LAMA2; (-) strand; PAM type: NNNNGHTT; PAM sequence: TAAAGTTT
gacataatcatataatttaa

SEQ ID NO: 39806 - DNA, 20 bp, Artificial Sequence
  Description of Artificial Sequence: Synthetic oligonucleotide
  Target: LAMA2; (-) strand; PAM type: NNNNGHTT; PAM sequence: ATGAGATT
acagcctaaaataaattcta

SEQ ID NO: 39807 - DNA, 20 bp, Artificial Sequence
  Description of Artificial Sequence: Synthetic oligonucleotide
  Target: LAMA2; (-) strand; PAM type: NNNNGHTT; PAM sequence: CTCTGCTT
aagcacttaatcaagagact

SEQ ID NO: 39808 - DNA, 20 bp, Artificial Sequence
  Description of Artificial Sequence: Synthetic oligonucleotide
  Target: LAMA2; (-) strand; PAM type: NNNNGHTT; PAM sequence: TTTTGATT
gctagcaccctccttgttta

SEQ ID NO: 39809 - DNA, 20 bp, Artificial Sequence
  Description of Artificial Sequence: Synthetic oligonucleotide
  Target: LAMA2; (-) strand; PAM type: NNNNGHTT; PAM sequence: CCTTGTTT
agcttaatagctagcaccct

SEQ ID NO: 39810 - DNA, 20 bp, Artificial Sequence
  Description of Artificial Sequence: Synthetic oligonucleotide
  Target: LAMA2; (-) strand; PAM type: NNNNGHTT; PAM sequence: TCTAGCTT
aaagaagctccttaaaaaga

SEQ ID NO: 39811 - DNA, 20 bp, Artificial Sequence
  Description of Artificial Sequence: Synthetic oligonucleotide
  Target: LAMA2; (-) strand; PAM type: NNNNGHTT; PAM sequence: ATCAGATT
ctgactaagccagaaaaaat

SEQ ID NO: 39812 - DNA, 20 bp, Artificial Sequence
  Description of Artificial Sequence: Synthetic oligonucleotide
  Target: LAMA2; (-) strand; PAM type: NNNNGHTT; PAM sequence: AAGTGATT
tatgcccattgatgaaagaa

SEQ ID NO: 39813 - DNA, 20 bp, Artificial Sequence
  Description of Artificial Sequence: Synthetic oligonucleotide
  Target: LAMA2; (-) strand; PAM type: NNNNGHTT; PAM sequence: GTCAGTTT
tttatgaataaaaggtagga

SEQ ID NO: 39814 - DNA, 20 bp, Artificial Sequence
  Description of Artificial Sequence: Synthetic oligonucleotide
  Target: LAMA2; (-) strand; PAM type: NNNNGHTT; PAM sequence: GCTTGATT
catgcatagctgcagacatt

SEQ ID NO: 39815 - DNA, 20 bp, Artificial Sequence
  Description of Artificial Sequence: Synthetic oligonucleotide
  Target: LAMA2; (-) strand; PAM type: NNNNGHTT; PAM sequence: CATTGCTT
tcctcatgcatagctgcaga

SEQ ID NO: 39816 - DNA, 20 bp, Artificial Sequence
  Description of Artificial Sequence: Synthetic oligonucleotide
  Target: LAMA2; (-) strand; PAM type: NNNNGHTT; PAM sequence: TTGTGTTT
gcacgaagatgaaaaccgtc

SEQ ID NO: 39817 - DNA, 20 bp, Artificial Sequence
  Description of Artificial Sequence: Synthetic oligonucleotide
  Target: LAMA2; (-) strand; PAM type: NNNNGHTT; PAM sequence: TCTGGCTT
aaaatgtatcaacaaacatc

SEQ ID NO: 39818 - DNA, 20 bp, Artificial Sequence
  Description of Artificial Sequence: Synthetic oligonucleotide
  Target: LAMA2; (-) strand; PAM type: NNNNGHTT; PAM sequence: TTGGGTTT
atcaagacttccatcttcat

SEQ ID NO: 39819 - DNA, 20 bp, Artificial Sequence
  Description of Artificial Sequence: Synthetic oligonucleotide
  Target: LAMA2; (-) strand; PAM type: NNNNGHTT; PAM sequence: CTGTGCTT
acacctaaaatctgctttta

SEQ ID NO: 39820 - DNA, 20 bp, Artificial Sequence
  Description of Artificial Sequence: Synthetic oligonucleotide
  Target: LAMA2; (-) strand; PAM type: NNNNGHTT; PAM sequence: ATCTGCTT
caatgtctttaacacctaaa

SEQ ID NO: 39821 - DNA, 20 bp, Artificial Sequence
  Description of Artificial Sequence: Synthetic oligonucleotide
  Target: LAMA2; (-) strand; PAM type: NNNNGHTT; PAM sequence: GTTTGTTT
gtatttttcttgaaaaagat

SEQ ID NO: 39822 - DNA, 20 bp, Artificial Sequence
  Description of Artificial Sequence: Synthetic oligonucleotide
  Target: LAMA2; (-) strand; PAM type: NNNNGHTT; PAM sequence: AGATGTTT
aagagtatttttcttgaaaa

SEQ ID NO: 39823 - DNA, 20 bp, Artificial Sequence
  Description of Artificial Sequence: Synthetic oligonucleotide
  Target: LAMA2; (-) strand; PAM type: NNNNGHTT; PAM sequence: GAAAGCTT
gtaatcagattttaaccaag

SEQ ID NO: 39824 - DNA, 20 bp, Artificial Sequence
  Description of Artificial Sequence: Synthetic oligonucleotide
  Target: LAMA2; (-) strand; PAM type: NNNNGHTT; PAM sequence: ATCAGATT
tcgggcggcatccatgtgta

SEQ ID NO: 39825 - DNA, 20 bp, Artificial Sequence
  Description of Artificial Sequence: Synthetic oligonucleotide
  Target: LAMA2; (-) strand; PAM type: NNNNGHTT; PAM sequence: TGCCGATT
acatcacttacaaacgcaag

SEQ ID NO: 39826 - DNA, 20 bp, Artificial Sequence
  Description of Artificial Sequence: Synthetic oligonucleotide
  Target: LAMA2; (-) strand; PAM type: NNNNGHTT; PAM sequence: CAACGCTT
agttagaaatactgcattag

SEQ ID NO: 39827 - DNA, 20 bp, Artificial Sequence
  Description of Artificial Sequence: Synthetic oligonucleotide
  Target: LAMA2; (-) strand; PAM type: NNNNGHTT; PAM sequence: CGATGTTT
cagaggactacctggcatat

SEQ ID NO: 39828 - DNA, 20 bp, Artificial Sequence
  Description of Artificial Sequence: Synthetic oligonucleotide
  Target: LAMA2; (-) strand; PAM type: NNNNGHTT; PAM sequence: TACAGTTT
cacacacagttgcattccct

SEQ ID NO: 39829 - DNA, 20 bp, Artificial Sequence
  Description of Artificial Sequence: Synthetic oligonucleotide
  Target: LAMA2; (-) strand; PAM type: NNNNGHTT; PAM sequence: GAAAGTTT
tgtaatttccaaattttata

SEQ ID NO: 39830 - DNA, 20 bp, Artificial Sequence
  Description of Artificial Sequence: Synthetic oligonucleotide
  Target: LAMA2; (-) strand; PAM type: NNNNGHTT; PAM sequence: TAAAGATT
ggacatccaaacaaagatcg

SEQ ID NO: 39831 - DNA, 20 bp, Artificial Sequence
  Description of Artificial Sequence: Synthetic oligonucleotide
  Target: LAMA2; (-) strand; PAM type: NNNNGHTT; PAM sequence: TTCTGATT
aagggtggaacacatgattg

SEQ ID NO: 39832 - DNA, 20 bp, Artificial Sequence
  Description of Artificial Sequence: Synthetic oligonucleotide
  Target: LAMA2; (-) strand; PAM type: NNNNGHTT; PAM sequence: ACATGATT
tacgataaaaagggtggaac

SEQ ID NO: 39833 - DNA, 20 bp, Artificial Sequence
  Description of Artificial Sequence: Synthetic oligonucleotide
  Target: LAMA2; (-) strand; PAM type: NNNNGHTT; PAM sequence: TACAGCTT
aagatgagctgtgggcagat

SEQ ID NO: 39834 - DNA, 20 bp, Artificial Sequence
  Description of Artificial Sequence: Synthetic oligonucleotide
  Target: LAMA2; (-) strand; PAM type: NNNNGHTT; PAM sequence: GGCAGATT
cttaacaaagatgagctgtg

SEQ ID NO: 39835 - DNA, 20 bp, Artificial Sequence
  Description of Artificial Sequence: Synthetic oligonucleotide
  Target: LAMA2; (-) strand; PAM type: NNNNGHTT; PAM sequence: ATGGGCTT
aaggtgagcagaggtgggag

SEQ ID NO: 39836 - DNA, 20 bp, Artificial Sequence
  Description of Artificial Sequence: Synthetic oligonucleotide
  Target: LAMA2; (-) strand; PAM type: NNNNGHTT; PAM sequence: AATGGTTT
agttccacaaggctcagtag

SEQ ID NO: 39837 - DNA, 20 bp, Artificial Sequence
  Description of Artificial Sequence: Synthetic oligonucleotide
  Target: LAMA2; (-) strand; PAM type: NNNNGHTT; PAM sequence: GCCTGTTT
aggattctgcggggtatttt

SEQ ID NO: 39838 - DNA, 20 bp, Artificial Sequence
  Description of Artificial Sequence: Synthetic oligonucleotide
  Target: LAMA2; (-) strand; PAM type: NNNNGHTT; PAM sequence: GGAGGATT
aagagaacactgagggaaga

SEQ ID NO: 39839 - DNA, 20 bp, Artificial Sequence
  Description of Artificial Sequence: Synthetic oligonucleotide
  Target: LAMA2; (-) strand; PAM type: NNNNGHTT; PAM sequence: TTGGGTTT
agcagcatgcaaagtgagag

SEQ ID NO: 39840 - DNA, 20 bp, Artificial Sequence
  Description of Artificial Sequence: Synthetic oligonucleotide
  Target: LAMA2; (-) strand; PAM type: NNNNGHTT; PAM sequence: GGTGGATT
cactttgggaggccaaggtg

SEQ ID NO: 39841 - DNA, 20 bp, Artificial Sequence
  Description of Artificial Sequence: Synthetic oligonucleotide
  Target: LAMA2; (-) strand; PAM type: NNNNGHTT; PAM sequence: TCTGGTTT
gcttgcctcctgctgtgtgg

SEQ ID NO: 39842 - DNA, 20 bp, Artificial Sequence
  Description of Artificial Sequence: Synthetic oligonucleotide
  Target: LAMA2; (-) strand; PAM type: NNNNGHTT; PAM sequence: TGCTGCTT
gctgcgcttgctcctttgcc

SEQ ID NO: 39843 - DNA, 20 bp, Artificial Sequence
  Description of Artificial Sequence: Synthetic oligonucleotide
  Target: LAMA2; (-) strand; PAM type: NNNNGHTT; PAM sequence: CTGCGCTT
agctgtaaatgctaatgaag

SEQ ID NO: 39844 - DNA, 20 bp, Artificial Sequence
  Description of Artificial Sequence: Synthetic oligonucleotide
  Target: LAMA2; (-) strand; PAM type: NNNNGHTT; PAM sequence: TAGGGTTT
ctcacatgtgcagttcacaa

SEQ ID NO: 39845 - DNA, 20 bp, Artificial Sequence
  Description of Artificial Sequence: Synthetic oligonucleotide
  Target: LAMA2; (-) strand; PAM type: NNNNGHTT; PAM sequence: ATTAGATT
cagatcattgatcatcaggc

SEQ ID NO: 39846 - DNA, 20 bp, Artificial Sequence
  Description of Artificial Sequence: Synthetic oligonucleotide
  Target: LAMA2; (-) strand; PAM type: NNNNGHTT; PAM sequence: GCTTGTTT
agaatcagtggaagccctaa

SEQ ID NO: 39847 - DNA, 20 bp, Artificial Sequence
  Description of Artificial Sequence: Synthetic oligonucleotide
  Target: LAMA2; (-) strand; PAM type: NNNNGHTT; PAM sequence: CTAAGCTT
acatagaatcagtggaagcc

SEQ ID NO: 39848 - DNA, 20 bp, Artificial Sequence
  Description of Artificial Sequence: Synthetic oligonucleotide
  Target: LAMA2; (-) strand; PAM type: NNNNGHTT; PAM sequence: GATGGTTT
tccatggactaggattgggg

SEQ ID NO: 39849 - DNA, 20 bp, Artificial Sequence
  Description of Artificial Sequence: Synthetic oligonucleotide
  Target: LAMA2; (-) strand; PAM type: NNNNGHTT; PAM sequence: CTAGGATT
gaaggcaatttttccatgga

SEQ ID NO: 39850 - DNA, 20 bp, Artificial Sequence
  Description of Artificial Sequence: Synthetic oligonucleotide
  Target: LAMA2; (-) strand; PAM type: NNNNGHTT; PAM sequence: ACTGGTTT
caatgtttttggcaccaggg

SEQ ID NO: 39851 - DNA, 20 bp, Artificial Sequence
  Description of Artificial Sequence: Synthetic oligonucleotide
  Target: LAMA2; (-) strand; PAM type: NNNNGHTT; PAM sequence: CAATGTTT
gtgctgtagagcagcgtctc

SEQ ID NO: 39852 - DNA, 20 bp, Artificial Sequence
  Description of Artificial Sequence: Synthetic oligonucleotide
  Target: LAMA2; (-) strand; PAM type: NNNNGHTT; PAM sequence: AAACGCTT
aaaaccaaacaacaacaaaa

SEQ ID NO: 39853 - DNA, 20 bp, Artificial Sequence
  Description of Artificial Sequence: Synthetic oligonucleotide
  Target: LAMA2; (-) strand; PAM type: NNNNGHTT; PAM sequence: GTGAGATT
aaaaagtgtgtgcatcaatt

SEQ ID NO: 39854 - DNA, 20 bp, Artificial Sequence
  Description of Artificial Sequence: Synthetic oligonucleotide
  Target: LAMA2; (-) strand; PAM type: NNNNGHTT; PAM sequence: GTAGGATT
gtgcaggtatggaggagatg

SEQ ID NO: 39855 - DNA, 20 bp, Artificial Sequence
  Description of Artificial Sequence: Synthetic oligonucleotide
  Target: LAMA2; (-) strand; PAM type: NNNNGHTT; PAM sequence: CGGAGCTT
aatggcttgaacctgagagg

SEQ ID NO: 39856 - DNA, 20 bp, Artificial Sequence
  Description of Artificial Sequence: Synthetic oligonucleotide
  Target: LAMA2; (-) strand; PAM type: NNNNGHTT; PAM sequence: AATGGCTT
tcaggaggctgaggcaggag

SEQ ID NO: 39857 - DNA, 20 bp, Artificial Sequence
  Description of Artificial Sequence: Synthetic oligonucleotide
  Target: LAMA2; (-) strand; PAM type: NNNNGHTT; PAM sequence: AGTGGCTT
aggtgcaggtggccgggcgc

SEQ ID NO: 39858 - DNA, 20 bp, Artificial Sequence
  Description of Artificial Sequence: Synthetic oligonucleotide
  Target: LAMA2; (-) strand; PAM type: NNNNGHTT; PAM sequence: TTCAGCTT
tgtctttttctacagccacg

SEQ ID NO: 39859 - DNA, 20 bp, Artificial Sequence
  Description of Artificial Sequence: Synthetic oligonucleotide
  Target: LAMA2; (-) strand; PAM type: NNNNGHTT; PAM sequence: GTGAGATT
agagggatcatgaatttaag

SEQ ID NO: 39860 - DNA, 20 bp, Artificial Sequence
  Description of Artificial Sequence: Synthetic oligonucleotide
  Target: LAMA2; (-) strand; PAM type: NNNNGHTT; PAM sequence: GCATGATT
aaaaggatgagagaaaagtg

SEQ ID NO: 39861 - DNA, 20 bp, Artificial Sequence
  Description of Artificial Sequence: Synthetic oligonucleotide
  Target: LAMA2; (-) strand; PAM type: NNNNGHTT; PAM sequence: TTAGGCTT
gagggggtgagaggagaggt

SEQ ID NO: 39862 - DNA, 20 bp, Artificial Sequence
  Description of Artificial Sequence: Synthetic oligonucleotide
  Target: LAMA2; (-) strand; PAM type: NNNNGHTT; PAM sequence: AGAGGTTT
ggatgggagggggtgagagg

SEQ ID NO: 39863 - DNA, 20 bp, Artificial Sequence
  Description of Artificial Sequence: Synthetic oligonucleotide
  Target: LAMA2; (-) strand; PAM type: NNNNGHTT; PAM sequence: GACAGCTT
gagcttgttacctctcttct

SEQ ID NO: 39864 - DNA, 20 bp, Artificial Sequence
  Description of Artificial Sequence: Synthetic oligonucleotide
  Target: LAMA2; (-) strand; PAM type: NNNNGHTT; PAM sequence: GGGAGCTT
aagtgggtgcatgcagtagt

SEQ ID NO: 39865 - DNA, 20 bp, Artificial Sequence
  Description of Artificial Sequence: Synthetic oligonucleotide
  Target: LAMA2; (-) strand; PAM type: NNNNGHTT; PAM sequence: GAGAGATT
agtgacaatataagaaggag

SEQ ID NO: 39866 - DNA, 20 bp, Artificial Sequence
  Description of Artificial Sequence: Synthetic oligonucleotide
  Target: LAMA2; (-) strand; PAM type: NNNNGHTT; PAM sequence: TTTTGCTT
aatgagtcaggagagtttgt

SEQ ID NO: 39867 - DNA, 20 bp, Artificial Sequence
  Description of Artificial Sequence: Synthetic oligonucleotide
  Target: LAMA2; (-) strand; PAM type: NNNNGHTT; PAM sequence: GTTTGTTT
aaaggaaatgagtcaggaga

SEQ ID NO: 39868 - DNA, 20 bp, Artificial Sequence
  Description of Artificial Sequence: Synthetic oligonucleotide
  Target: LAMA2; (-) strand; PAM type: NNNNGHTT; PAM sequence: GAGAGTTT
ttagaaaggaaatgagtcag

SEQ ID NO: 39869 - DNA, 20 bp, Artificial Sequence
  Description of Artificial Sequence: Synthetic oligonucleotide
  Target: LAMA2; (-) strand; PAM type: NNNNGHTT; PAM sequence: GCCTGTTT
gtatagaagaggaggtgata

SEQ ID NO: 39870 - DNA, 20 bp, Artificial Sequence
  Description of Artificial Sequence: Synthetic oligonucleotide
  Target: LAMA2; (-) strand; PAM type: NNNNGHTT; PAM sequence: TGTAGATT
gtaaggtgaacactggtggc

SEQ ID NO: 39871 - DNA, 20 bp, Artificial Sequence
  Description of Artificial Sequence: Synthetic oligonucleotide
  Target: LAMA2; (-) strand; PAM type: NNNNGHTT; PAM sequence: GGGTGATT
aaagggtttcaagaagaatg

SEQ ID NO: 39872 - DNA, 20 bp, Artificial Sequence
  Description of Artificial Sequence: Synthetic oligonucleotide
  Target: LAMA2; (-) strand; PAM type: NNNNGHTT; PAM sequence: AAGGGTTT
gctggaaagcaaattgagca

SEQ ID NO: 39873 - DNA, 20 bp, Artificial Sequence
  Description of Artificial Sequence: Synthetic oligonucleotide
  Target: LAMA2; (-) strand; PAM type: NNNNGHTT; PAM sequence: TGTAGATT
gagtcccaggaataccacta

SEQ ID NO: 39874 - DNA, 20 bp, Artificial Sequence
  Description of Artificial Sequence: Synthetic oligonucleotide
  Target: LAMA2; (-) strand; PAM type: NNNNGHTT; PAM sequence: CAAGGATT
gttagagaaacaaattgctc

SEQ ID NO: 39875 - DNA, 20 bp, Artificial Sequence
  Description of Artificial Sequence: Synthetic oligonucleotide
  Target: LAMA2; (-) strand; PAM type: NNNNGHTT; PAM sequence: AAATGTTT
aaaaggaaatattaatcagt

SEQ ID NO: 39876 - DNA, 20 bp, Artificial Sequence
  Description of Artificial Sequence: Synthetic oligonucleotide
  Target: LAMA2; (-) strand; PAM type: NNNNGHTT; PAM sequence: AATGGATT
ctaaaaggtaagtaaaacaa

SEQ ID NO: 39877 - DNA, 20 bp, Artificial Sequence
  Description of Artificial Sequence: Synthetic oligonucleotide
  Target: LAMA2; (-) strand; PAM type: NNNNGHTT; PAM sequence: CCTTGCTT
aagagaagagaaataaagga

SEQ ID NO: 39878 - DNA, 20 bp, Artificial Sequence
  Description of Artificial Sequence: Synthetic oligonucleotide
  Target: LAMA2; (-) strand; PAM type: NNNNGHTT; PAM sequence: AAGAGATT
attgtaattaaaatttgtgg

SEQ ID NO: 39879 - DNA, 20 bp, Artificial Sequence
  Description of Artificial Sequence: Synthetic oligonucleotide
  Target: LAMA2; (-) strand; PAM type: NNNNGHTT; PAM sequence: TTTTGATT
tacaatcaaaattccagtaa

SEQ ID NO: 39880 - DNA, 20 bp, Artificial Sequence
  Description of Artificial Sequence: Synthetic oligonucleotide
  Target: LAMA2; (-) strand; PAM type: NNNNGHTT; PAM sequence: AACAGTTT
cttgatatagacaaccttaa

SEQ ID NO: 39881 - DNA, 20 bp, Artificial Sequence
  Description of Artificial Sequence: Synthetic oligonucleotide
  Target: LAMA2; (-) strand; PAM type: NNNNGHTT; PAM sequence: GCGTGCTT
agaatttttatatgagaaat

SEQ ID NO: 39882 - DNA, 20 bp, Artificial Sequence
  Description of Artificial Sequence: Synthetic oligonucleotide
  Target: LAMA2; (-) strand; PAM type: NNNNGHTT; PAM sequence: TAATGTTT
ctatgttgaaacaaaacagg

SEQ ID NO: 39883 - DNA, 20 bp, Artificial Sequence
  Description of Artificial Sequence: Synthetic oligonucleotide
  Target: LAMA2; (-) strand; PAM type: NNNNGHTT; PAM sequence: TAAGGTTT
aaaacacctattctaatagt

SEQ ID NO: 39884 - DNA, 20 bp, Artificial Sequence
  Description of Artificial Sequence: Synthetic oligonucleotide
  Target: LAMA2; (-) strand; PAM type: NNNNGHTT; PAM sequence: AATCGCTT
tcaggaggctgaggcaggaa

SEQ ID NO: 39885 - DNA, 20 bp, Artificial Sequence
  Description of Artificial Sequence: Synthetic oligonucleotide
  Target: LAMA2; (-) strand; PAM type: NNNNGHTT; PAM sequence: AGGAGTTT
caggcagatcacttgaggtc

SEQ ID NO: 39886 - DNA, 20 bp, Artificial Sequence
  Description of Artificial Sequence: Synthetic oligonucleotide
  Target: LAMA2; (-) strand; PAM type: NNNNGHTT; PAM sequence: CCAGGTTT
gcaaataatagtattatagg

SEQ ID NO: 39887 - DNA, 20 bp, Artificial Sequence
  Description of Artificial Sequence: Synthetic oligonucleotide
  Target: LAMA2; (-) strand; PAM type: NNNNGHTT; PAM sequence: TATAGCTT
gaaattattattataacaga

SEQ ID NO: 39888 - DNA, 20 bp, Artificial Sequence
  Description of Artificial Sequence: Synthetic oligonucleotide
  Target: LAMA2; (-) strand; PAM type: NNNNGHTT; PAM sequence: GAAAGCTT
ttaaaatcagtaataaaata

SEQ ID NO: 39889 - DNA, 20 bp, Artificial Sequence
  Description of Artificial Sequence: Synthetic oligonucleotide
  Target: LAMA2; (-) strand; PAM type: NNNNGHTT; PAM sequence: AAATGTTT
agttttcgtaacatgacaag

SEQ ID NO: 39890 - DNA, 20 bp, Artificial Sequence
  Description of Artificial Sequence: Synthetic oligonucleotide
  Target: LAMA2; (-) strand; PAM type: NNNNGHTT; PAM sequence: AGCAGTTT
ttaagaagctaggaatagaa

SEQ ID NO: 39891 - DNA, 20 bp, Artificial Sequence
  Description of Artificial Sequence: Synthetic oligonucleotide
  Target: LAMA2; (-) strand; PAM type: NNNNGHTT; PAM sequence: TCCTGATT
tgagtaatttaaatatctta

SEQ ID NO: 39892 - DNA, 20 bp, Artificial Sequence
  Description of Artificial Sequence: Synthetic oligonucleotide
  Target: LAMA2; (-) strand; PAM type: NNNNGHTT; PAM sequence: TTCTGTTT
gtcaataatatcatttatgg

SEQ ID NO: 39893 - DNA, 20 bp, Artificial Sequence
  Description of Artificial Sequence: Synthetic oligonucleotide
  Target: LAMA2; (-) strand; PAM type: NNNNGHTT; PAM sequence: TATAGATT
aattcttgcttaagaatgtg

SEQ ID NO: 39894 - DNA, 20 bp, Artificial Sequence
  Description of Artificial Sequence: Synthetic oligonucleotide
  Target: LAMA2; (-) strand; PAM type: NNNNGHTT; PAM sequence: TCTTGCTT
ataagacatatacatttaat

SEQ ID NO: 39895 - DNA, 20 bp, Artificial Sequence
  Description of Artificial Sequence: Synthetic oligonucleotide
  Target: LAMA2; (-) strand; PAM type: NNNNGHTT; PAM sequence: TGAAGATT
aactgtgctaaaaatgccag

SEQ ID NO: 39896 - DNA, 20 bp, Artificial Sequence
  Description of Artificial Sequence: Synthetic oligonucleotide
  Target: LAMA2; (-) strand; PAM type: NNNNGHTT; PAM sequence: AAATGCTT
aattaaactgcattatttat

SEQ ID NO: 39897 - DNA, 20 bp, Artificial Sequence
  Description of Artificial Sequence: Synthetic oligonucleotide
  Target: LAMA2; (-) strand; PAM type: NNNNGHTT; PAM sequence: ACATGCTT
agggattcctcagaaaatag

SEQ ID NO: 39898 - DNA, 20 bp, Artificial Sequence
  Description of Artificial Sequence: Synthetic oligonucleotide
  Target: LAMA2; (-) strand; PAM type: NNNNGHTT; PAM sequence: TAGGGATT
tatttattttttacttcatc

SEQ ID NO: 39899 - DNA, 20 bp, Artificial Sequence
  Description of Artificial Sequence: Synthetic oligonucleotide
  Target: LAMA2; (-) strand; PAM type: NNNNGHTT; PAM sequence: GTTTGTTT
taacggtttataccagctgt

SEQ ID NO: 39900 - DNA, 20 bp, Artificial Sequence
  Description of Artificial Sequence: Synthetic oligonucleotide
  Target: LAMA2; (-) strand; PAM type: NNNNGHTT; PAM sequence: CTGTGTTT
agcataacggtttataccag

SEQ ID NO: 39901 - DNA, 20 bp, Artificial Sequence
  Description of Artificial Sequence: Synthetic oligonucleotide
  Target: LAMA2; (-) strand; PAM type: NNNNGHTT; PAM sequence: AACGGTTT
aatataaaaatttggagcat

SEQ ID NO: 39902 - DNA, 20 bp, Artificial Sequence
  Description of Artificial Sequence: Synthetic oligonucleotide
  Target: LAMA2; (-) strand; PAM type: NNNNGHTT; PAM sequence: TTCAGTTT
taaaagagaaatcagtatgc

SEQ ID NO: 39903 - DNA, 20 bp, Artificial Sequence
  Description of Artificial Sequence: Synthetic oligonucleotide
  Target: LAMA2; (-) strand; PAM type: NNNNGHTT; PAM sequence: GTATGCTT
tgcacataaaagagaaatca

SEQ ID NO: 39904 - DNA, 20 bp, Artificial Sequence
  Description of Artificial Sequence: Synthetic oligonucleotide
  Target: LAMA2; (-) strand; PAM type: NNNNGHTT; PAM sequence: TCATGCTT
aggcactctgactgcagagt

SEQ ID NO: 39905 - DNA, 20 bp, Artificial Sequence
  Description of Artificial Sequence: Synthetic oligonucleotide
  Target: LAMA2; (-) strand; PAM type: NNNNGHTT; PAM sequence: CCAGGATT
actaccagtaaggggtgaag

SEQ ID NO: 39906 - DNA, 20 bp, Artificial Sequence
  Description of Artificial Sequence: Synthetic oligonucleotide
  Target: LAMA2; (-) strand; PAM type: NNNNGHTT; PAM sequence: TATTGTTT
actctgtgagtagccactat

SEQ ID NO: 39907 - DNA, 20 bp, Artificial Sequence
  Description of Artificial Sequence: Synthetic oligonucleotide
  Target: LAMA2; (-) strand; PAM type: NNNNGHTT; PAM sequence: AATTGCTT
tttatgatcatcattatcat

SEQ ID NO: 39908 - DNA, 20 bp, Artificial Sequence
  Description of Artificial Sequence: Synthetic oligonucleotide
  Target: LAMA2; (-) strand; PAM type: NNNNGHTT; PAM sequence: AACTGATT
ttattttttgattaattatc

SEQ ID NO: 39909 - DNA, 20 bp, Artificial Sequence
  Description of Artificial Sequence: Synthetic oligonucleotide
  Target: LAMA2; (-) strand; PAM type: NNNNGHTT; PAM sequence: TTTTGATT
atgaattttttttacttatt

SEQ ID NO: 39910 - DNA, 20 bp, Artificial Sequence
  Description of Artificial Sequence: Synthetic oligonucleotide
  Target: LAMA2; (-) strand; PAM type: NNNNGHTT; PAM sequence: CCCAGTTT
tttctgttatttataagcta

SEQ ID NO: 39911 - DNA, 20 bp, Artificial Sequence
  Description of Artificial Sequence: Synthetic oligonucleotide
  Target: LAMA2; (-) strand; PAM type: NNNNGHTT; PAM sequence: ATAAGTTT
agccttcagaactgtgggaa

SEQ ID NO: 39912 - DNA, 20 bp, Artificial Sequence
  Description of Artificial Sequence: Synthetic oligonucleotide
  Target: LAMA2; (-) strand; PAM type: NNNNGHTT; PAM sequence: GTGGGATT
atgaggctggagcctcatga

SEQ ID NO: 39913 - DNA, 20 bp, Artificial Sequence
  Description of Artificial Sequence: Synthetic oligonucleotide
  Target: LAMA2; (-) strand; PAM type: NNNNGHTT; PAM sequence: AGGTGATT
taggagatggggcctttggg

SEQ ID NO: 39914 - DNA, 20 bp, Artificial Sequence
  Description of Artificial Sequence: Synthetic oligonucleotide
  Target: LAMA2; (-) strand; PAM type: NNNNGHTT; PAM sequence: TAAGGCTT
aatatcatcatgttgggggt

SEQ ID NO: 39915 - DNA, 20 bp, Artificial Sequence
  Description of Artificial Sequence: Synthetic oligonucleotide
  Target: LAMA2; (-) strand; PAM type: NNNNGHTT; PAM sequence: TACAGTTT
atttagtctataaagctttc

SEQ ID NO: 39916 - DNA, 20 bp, Artificial Sequence
  Description of Artificial Sequence: Synthetic oligonucleotide
  Target: LAMA2; (-) strand; PAM type: NNNNGHTT; PAM sequence: TAAAGCTT
tctttaaaatatttagtcta

SEQ ID NO: 39917 - DNA, 20 bp, Artificial Sequence
  Description of Artificial Sequence: Synthetic oligonucleotide
  Target: LAMA2; (-) strand; PAM type: NNNNGHTT; PAM sequence: CTGGGTTT
gagcatagttacaaggtgat

SEQ ID NO: 39918 - DNA, 20 bp, Artificial Sequence
  Description of Artificial Sequence: Synthetic oligonucleotide
  Target: LAMA2; (-) strand; PAM type: NNNNGHTT; PAM sequence: ACAGGATT
tcataataacatgcctatgt

SEQ ID NO: 39919 - DNA, 20 bp, Artificial Sequence
  Description of Artificial Sequence: Synthetic oligonucleotide
  Target: LAMA2; (-) strand; PAM type: NNNNGHTT; PAM sequence: ATAGGTTT
ccccttggactcagtattac

SEQ ID NO: 39920 - DNA, 20 bp, Artificial Sequence
  Description of Artificial Sequence: Synthetic oligonucleotide
  Target: LAMA2; (-) strand; PAM type: NNNNGHTT; PAM sequence: CAATGATT
aatctgactacagggtgtag

SEQ ID NO: 39921 - DNA, 20 bp, Artificial Sequence
  Description of Artificial Sequence: Synthetic oligonucleotide
  Target: LAMA2; (-) strand; PAM type: NNNNGHTT; PAM sequence: AGTTGTTT
aaattattttatctttaaaa

SEQ ID NO: 39922 - DNA, 20 bp, Artificial Sequence
  Description of Artificial Sequence: Synthetic oligonucleotide
  Target: LAMA2; (-) strand; PAM type: NNNNGHTT; PAM sequence: TAGAGATT
gcaacagcaatgatcagtta

SEQ ID NO: 39923 - DNA, 20 bp, Artificial Sequence
  Description of Artificial Sequence: Synthetic oligonucleotide
  Target: LAMA2; (-) strand; PAM type: NNNNGHTT; PAM sequence: AAATGTTT
gaagatagaggtaattggtt

SEQ ID NO: 39924 - DNA, 20 bp, Artificial Sequence
  Description of Artificial Sequence: Synthetic oligonucleotide
  Target: LAMA2; (-) strand; PAM type: NNNNGHTT; PAM sequence: TAAGGTTT
aggttgttaggtagattaaa

SEQ ID NO: 39925 - DNA, 20 bp, Artificial Sequence
  Description of Artificial Sequence: Synthetic oligonucleotide
  Target: LAMA2; (-) strand; PAM type: NNNNGHTT; PAM sequence: GGTAGATT
ctattctggcaaggttgtta

SEQ ID NO: 39926 - DNA, 20 bp, Artificial Sequence
  Description of Artificial Sequence: Synthetic oligonucleotide
  Target: LAMA2; (-) strand; PAM type: NNNNGHTT; PAM sequence: GGTTGCTT
tttttgttcaaggctttata

SEQ ID NO: 39927 - DNA, 20 bp, Artificial Sequence
  Description of Artificial Sequence: Synthetic oligonucleotide
  Target: LAMA2; (-) strand; PAM type: NNNNGHTT; PAM sequence: CAAGGCTT
tgcttctaatactttttgtt

SEQ ID NO: 39928 - DNA, 20 bp, Artificial Sequence
  Description of Artificial Sequence: Synthetic oligonucleotide
  Target: LAMA2; (-) strand; PAM type: NNNNGHTT; PAM sequence: ACCTGCTT
cagtttgtggtggatttgaa

SEQ ID NO: 39929 - DNA, 20 bp, Artificial Sequence
  Description of Artificial Sequence: Synthetic oligonucleotide
  Target: LAMA2; (-) strand; PAM type: NNNNGHTT; PAM sequence: GGTGGATT
gtctggagaacgcagtttgt

SEQ ID NO: 39930 - DNA, 20 bp, Artificial Sequence
  Description of Artificial Sequence: Synthetic oligonucleotide
  Target: LAMA2; (-) strand; PAM type: NNNNGHTT; PAM sequence: CGCAGTTT
ctctcttgccgtctggagaa

SEQ ID NO: 39931 - DNA, 20 bp, Artificial Sequence
  Description of Artificial Sequence: Synthetic oligonucleotide
  Target: LAMA2; (-) strand; PAM type: NNNNGHTT; PAM sequence: GAGTGTTT
aaactcatttaatcagcaga

SEQ ID NO: 39932 - DNA, 20 bp, Artificial Sequence
  Description of Artificial Sequence: Synthetic oligonucleotide
  Target: LAMA2; (-) strand; PAM type: NNNNGHTT; PAM sequence: TTGAGCTT
gactctaagatataattcac

SEQ ID NO: 39933 - DNA, 20 bp, Artificial Sequence
  Description of Artificial Sequence: Synthetic oligonucleotide
  Target: LAMA2; (-) strand; PAM type: NNNNGHTT; PAM sequence: TGCAGATT
acatgacccctagtcacttt

SEQ ID NO: 39934 - DNA, 20 bp, Artificial Sequence
  Description of Artificial Sequence: Synthetic oligonucleotide
  Target: LAMA2; (-) strand; PAM type: NNNNGHTT; PAM sequence: AAGTGTTT
ttatgttctcacaatttctc

SEQ ID NO: 39935 - DNA, 20 bp, Artificial Sequence
  Description of Artificial Sequence: Synthetic oligonucleotide
  Target: LAMA2; (-) strand; PAM type: NNNNGHTT; PAM sequence: TATTGCTT
taaaacctggaaagatgttt

SEQ ID NO: 39936 - DNA, 20 bp, Artificial Sequence
  Description of Artificial Sequence: Synthetic oligonucleotide
  Target: LAMA2; (-) strand; PAM type: NNNNGHTT; PAM sequence: AGATGTTT
ttcctttataaaacctggaa

SEQ ID NO: 39937 - DNA, 20 bp, Artificial Sequence
  Description of Artificial Sequence: Synthetic oligonucleotide
  Target: LAMA2; (-) strand; PAM type: NNNNGHTT; PAM sequence: ATCAGTTT
aagtttcactggagatgaca

SEQ ID NO: 39938 - DNA, 20 bp, Artificial Sequence
  Description of Artificial Sequence: Synthetic oligonucleotide
  Target: LAMA2; (-) strand; PAM type: NNNNGHTT; PAM sequence: TTAAGTTT
atttgttaagtaagcaatac

SEQ ID NO: 39939 - DNA, 20 bp, Artificial Sequence
  Description of Artificial Sequence: Synthetic oligonucleotide
  Target: LAMA2; (-) strand; PAM type: NNNNGHTT; PAM sequence: CACTGTTT
ctattctgattcctaatgag

SEQ ID NO: 39940 - DNA, 20 bp, Artificial Sequence
  Description of Artificial Sequence: Synthetic oligonucleotide
  Target: LAMA2; (-) strand; PAM type: NNNNGHTT; PAM sequence: TTCTGATT
cctctgacaaagtgaaccta

SEQ ID NO: 39941 - DNA, 20 bp, Artificial Sequence
  Description of Artificial Sequence: Synthetic oligonucleotide
  Target: LAMA2; (-) strand; PAM type: NNNNGHTT; PAM sequence: CTAGGATT
gctcttggcctccaaaagtg

SEQ ID NO: 39942 - DNA, 20 bp, Artificial Sequence
  Description of Artificial Sequence: Synthetic oligonucleotide
  Target: LAMA2; (-) strand; PAM type: NNNNGHTT; PAM sequence: CTTAGTTT
tatatacagtaaacctagca

SEQ ID NO: 39943 - DNA, 20 bp, Artificial Sequence
  Description of Artificial Sequence: Synthetic oligonucleotide
  Target: LAMA2; (-) strand; PAM type: NNNNGHTT; PAM sequence: CTAGGTTT
ttttactgggatttagaaaa

SEQ ID NO: 39944 - DNA, 20 bp, Artificial Sequence
  Description of Artificial Sequence: Synthetic oligonucleotide
  Target: LAMA2; (-) strand; PAM type: NNNNGHTT; PAM sequence: CTGGGATT
ctgataaacttgatatttta

SEQ ID NO: 39945 - DNA, 20 bp, Artificial Sequence
  Description of Artificial Sequence: Synthetic oligonucleotide
  Target: LAMA2; (-) strand; PAM type: NNNNGHTT; PAM sequence: CACAGTTT
tgttttggtcctggtacata

SEQ ID NO: 39946 - DNA, 20 bp, Artificial Sequence
  Description of Artificial Sequence: Synthetic oligonucleotide
  Target: LAMA2; (-) strand; PAM type: NNNNGHTT; PAM sequence: ACCTGTTT
gagaaaatctctgtacagtg

SEQ ID NO: 39947 - DNA, 20 bp, Artificial Sequence
  Description of Artificial Sequence: Synthetic oligonucleotide
  Target: LAMA2; (-) strand; PAM type: NNNNGHTT; PAM sequence: ATAAGTTT
gaaataatcttgtctatctc

SEQ ID NO: 39948 - DNA, 20 bp, Artificial Sequence
  Description of Artificial Sequence: Synthetic oligonucleotide
  Target: LAMA2; (-) strand; PAM type: NNNNGHTT; PAM sequence: TGCTGTTT
tgaaacatggatatggcctc

SEQ ID NO: 39949 - DNA, 20 bp, Artificial Sequence
  Description of Artificial Sequence: Synthetic oligonucleotide
  Target: LAMA2; (-) strand; PAM type: NNNNGHTT; PAM sequence: CAAAGCTT
gaacacaacaaggtcaaata

SEQ ID NO: 39950 - DNA, 20 bp, Artificial Sequence
  Description of Artificial Sequence: Synthetic oligonucleotide
  Target: LAMA2; (-) strand; PAM type: NNNNGHTT; PAM sequence: TTCAGCTT
ccaacacattagataatact

SEQ ID NO: 39951 - DNA, 20 bp, Artificial Sequence
  Description of Artificial Sequence: Synthetic oligonucleotide
  Target: LAMA2; (-) strand; PAM type: NNNNGHTT; PAM sequence: GTGAGCTT
ccacaggaatgaacaaacaa

SEQ ID NO: 39952 - DNA, 20 bp, Artificial Sequence
  Description of Artificial Sequence: Synthetic oligonucleotide
  Target: LAMA2; (-) strand; PAM type: NNNNGHTT; PAM sequence: CCTTGATT
tatattaaatgtacttcctc

SEQ ID NO: 39953 - DNA, 20 bp, Artificial Sequence
  Description of Artificial Sequence: Synthetic oligonucleotide
  Target: LAMA2; (-) strand; PAM type: NNNNGHTT; PAM sequence: AGTAGATT
cagggtttctttcaaaatat

SEQ ID NO: 39954 - DNA, 20 bp, Artificial Sequence
  Description of Artificial Sequence: Synthetic oligonucleotide
  Target: LAMA2; (-) strand; PAM type: NNNNGHTT; PAM sequence: CAGGGTTT
aaacatttagcaatcttact

SEQ ID NO: 39955 - DNA, 20 bp, Artificial Sequence
  Description of Artificial Sequence: Synthetic oligonucleotide
  Target: LAMA2; (-) strand; PAM type: NNNNGHTT; PAM sequence: CTTTGTTT
aatactattacttcctaaat

SEQ ID NO: 39956 - DNA, 20 bp, Artificial Sequence
  Description of Artificial Sequence: Synthetic oligonucleotide
  Target: LAMA2; (-) strand; PAM type: NNNNGHTT; PAM sequence: TGAAGTTT
ttttcgtcttgcataagctg

SEQ ID NO: 39957 - DNA, 20 bp, Artificial Sequence
  Description of Artificial Sequence: Synthetic oligonucleotide
  Target: LAMA2; (-) strand; PAM type: NNNNGHTT; PAM sequence: GACAGCTT
aaatgcatgaattcttataa

SEQ ID NO: 39958 - DNA, 20 bp, Artificial Sequence
  Description of Artificial Sequence: Synthetic oligonucleotide
  Target: LAMA2; (-) strand; PAM type: NNNNGHTT; PAM sequence: TTAAGTTT
atcagaatatattagatttg

SEQ ID NO: 39959 - DNA, 20 bp, Artificial Sequence
  Description of Artificial Sequence: Synthetic oligonucleotide
  Target: LAMA2; (-) strand; PAM type: NNNNGHTT; PAM sequence: ATTAGATT
tcaataatacatcagaatat

SEQ ID NO: 39960 - DNA, 20 bp, Artificial Sequence
  Description of Artificial Sequence: Synthetic oligonucleotide
  Target: LAMA2; (-) strand; PAM type: NNNNGHTT; PAM sequence: AGAAGTTT
tatattttggatgcctaatg

SEQ ID NO: 39961 - DNA, 20 bp, Artificial Sequence
  Description of Artificial Sequence: Synthetic oligonucleotide
  Target: LAMA2; (-) strand; PAM type: NNNNGHTT; PAM sequence: GTCTGCTT
ccttttcatatgacttttct

SEQ ID NO: 39962 - DNA, 20 bp, Artificial Sequence
  Description of Artificial Sequence: Synthetic oligonucleotide
  Target: LAMA2; (-) strand; PAM type: NNNNGHTT; PAM sequence: TTTTGTTT
taagagattcaaaaatatga

SEQ ID NO: 39963 - DNA, 20 bp, Artificial Sequence
  Description of Artificial Sequence: Synthetic oligonucleotide
  Target: LAMA2; (-) strand; PAM type: NNNNGHTT; PAM sequence: ATATGATT
taaaaataagagattcaaaa

SEQ ID NO: 39964 - DNA, 20 bp, Artificial Sequence
  Description of Artificial Sequence: Synthetic oligonucleotide
  Target: LAMA2; (-) strand; PAM type: NNNNGHTT; PAM sequence: AAGAGATT
caataatcattactaaaaat

SEQ ID NO: 39965 - DNA, 20 bp, Artificial Sequence
  Description of Artificial Sequence: Synthetic oligonucleotide
  Target: LAMA2; (-) strand; PAM type: NNNNGHTT; PAM sequence: TTTTGCTT
ttcaacaataattttcagcc

SEQ ID NO: 39966 - DNA, 20 bp, Artificial Sequence
  Description of Artificial Sequence: Synthetic oligonucleotide
  Target: LAMA2; (-) strand; PAM type: NNNNGHTT; PAM sequence: GAGTGTTT
atgaataagtgttaactggg

SEQ ID NO: 39967 - DNA, 20 bp, Artificial Sequence
  Description of Artificial Sequence: Synthetic oligonucleotide
  Target: LAMA2; (-) strand; PAM type: NNNNGHTT; PAM sequence: CATTGATT
aatgatttgtcatattttgc

SEQ ID NO: 39968 - DNA, 20 bp, Artificial Sequence
  Description of Artificial Sequence: Synthetic oligonucleotide
  Target: LAMA2; (-) strand; PAM type: NNNNGHTT; PAM sequence: AAATGATT
gaaaagtggttagcagggca

SEQ ID NO: 39969 - DNA, 20 bp, Artificial Sequence
  Description of Artificial Sequence: Synthetic oligonucleotide
  Target: LAMA2; (-) strand; PAM type: NNNNGHTT; PAM sequence: TCAGGCTT
ggaagtatagatgaaactgg

SEQ ID NO: 39970 - DNA, 20 bp, Artificial Sequence
  Description of Artificial Sequence: Synthetic oligonucleotide
  Target: LAMA2; (-) strand; PAM type: NNNNGHTT; PAM sequence: ACTGGCTT
acattccccgatgacctaaa

SEQ ID NO: 39971 - DNA, 20 bp, Artificial Sequence
  Description of Artificial Sequence: Synthetic oligonucleotide
  Target: LAMA2; (-) strand; PAM type: NNNNGHTT; PAM sequence: CACTGCTT
cctccatatgtagctgtagc

SEQ ID NO: 39972 - DNA, 20 bp, Artificial Sequence
  Description of Artificial Sequence: Synthetic oligonucleotide
  Target: LAMA2; (-) strand; PAM type: NNNNGHTT; PAM sequence: CTGTGCTT
cacccccgccttcaccacca

SEQ ID NO: 39973 - DNA, 20 bp, Artificial Sequence
  Description of Artificial Sequence: Synthetic oligonucleotide
  Target: LAMA2; (-) strand; PAM type: NNNNGHTT; PAM sequence: AAGAGCTT
aaatcattagcatggcaagg

SEQ ID NO: 39974 - DNA, 20 bp, Artificial Sequence
  Description of Artificial Sequence: Synthetic oligonucleotide
  Target: LAMA2; (-) strand; PAM type: NNNNGHTT; PAM sequence: TCTTGCTT
catatcaaaccatgaccttc

SEQ ID NO: 39975 - DNA, 20 bp, Artificial Sequence
  Description of Artificial Sequence: Synthetic oligonucleotide
  Target: LAMA2; (-) strand; PAM type: NNNNGHTT; PAM sequence: TGGTGATT
tgtctccatattttcttatc

SEQ ID NO: 39976 - DNA, 20 bp, Artificial Sequence
  Description of Artificial Sequence: Synthetic oligonucleotide
  Target: LAMA2; (-) strand; PAM type: NNNNGHTT; PAM sequence: TTTGGATT
ctggccactgtcatatttta

SEQ ID NO: 39977 - DNA, 20 bp, Artificial Sequence
  Description of Artificial Sequence: Synthetic oligonucleotide
  Target: LAMA2; (-) strand; PAM type: NNNNGHTT; PAM sequence: CTCTGTTT
agttccatgagtctattact

SEQ ID NO: 39978 - DNA, 20 bp, Artificial Sequence
  Description of Artificial Sequence: Synthetic oligonucleotide
  Target: LAMA2; (-) strand; PAM type: NNNNGHTT; PAM sequence: TCTCGTTT
ccttgtaatactcctgtatt

SEQ ID NO: 39979 - DNA, 20 bp, Artificial Sequence
  Description of Artificial Sequence: Synthetic oligonucleotide
  Target: LAMA2; (-) strand; PAM type: NNNNGHTT; PAM sequence: AATTGCTT
ggttccagacttctgcttct

SEQ ID NO: 39980 - DNA, 20 bp, Artificial Sequence
  Description of Artificial Sequence: Synthetic oligonucleotide
  Target: LAMA2; (-) strand; PAM type: NNNNGHTT; PAM sequence: TTCTGCTT
atctctaatgggttccagac

SEQ ID NO: 39981 - DNA, 20 bp, Artificial Sequence
  Description of Artificial Sequence: Synthetic oligonucleotide
  Target: LAMA2; (-) strand; PAM type: NNNNGHTT; PAM sequence: TGGTGATT
tttctcctccacatttacct

SEQ ID NO: 39982 - DNA, 20 bp, Artificial Sequence
  Description of Artificial Sequence: Synthetic oligonucleotide
  Target: LAMA2; (-) strand; PAM type: NNNNGHTT; PAM sequence: TGATGTTT
ttctttaagagtaagccagt

SEQ ID NO: 39983 - DNA, 20 bp, Artificial Sequence
  Description of Artificial Sequence: Synthetic oligonucleotide
  Target: LAMA2; (-) strand; PAM type: NNNNGHTT; PAM sequence: CATGGCTT
gagctgccgtgcccagcccc

SEQ ID NO: 39984 - DNA, 20 bp, Artificial Sequence
  Description of Artificial Sequence: Synthetic oligonucleotide
  Target: LAMA2; (-) strand; PAM type: NNNNGHTT; PAM sequence: TTGGGATT
tgccctggcctcccaaagtg

SEQ ID NO: 39985 - DNA, 20 bp, Artificial Sequence
  Description of Artificial Sequence: Synthetic oligonucleotide
  Target: LAMA2; (-) strand; PAM type: NNNNGHTT; PAM sequence: CGGGGTTT
tttcgtattttcagtaaaga

SEQ ID NO: 39986 - DNA, 20 bp, Artificial Sequence
  Description of Artificial Sequence: Synthetic oligonucleotide
  Target: LAMA2; (-) strand; PAM type: NNNNGHTT; PAM sequence: CTGAGATT
tgcctcagcctcctgagtag

SEQ ID NO: 39987 - DNA, 20 bp, Artificial Sequence
  Description of Artificial Sequence: Synthetic oligonucleotide
  Target: LAMA2; (-) strand; PAM type: NNNNGHTT; PAM sequence: AAGCGATT
aacctctgcctcccaggttc

SEQ ID NO: 39988 - DNA, 20 bp, Artificial Sequence
  Description of Artificial Sequence: Synthetic oligonucleotide
  Target: LAMA2; (-) strand; PAM type: NNNNGHTT; PAM sequence: CATGGTTT
atttctggatactctcttcc

SEQ ID NO: 39989 - DNA, 20 bp, Artificial Sequence
  Description of Artificial Sequence: Synthetic oligonucleotide
  Target: LAMA2; (-) strand; PAM type: NNNNGHTT; PAM sequence: GTAGGTTT
acaatcatcaggcctcatat

SEQ ID NO: 39990 - DNA, 20 bp, Artificial Sequence
  Description of Artificial Sequence: Synthetic oligonucleotide
  Target: LAMA2; (-) strand; PAM type: NNNNGHTT; PAM sequence: TCTGGTTT
attctccctttaaacaggct

SEQ ID NO: 39991 - DNA, 20 bp, Artificial Sequence
  Description of Artificial Sequence: Synthetic oligonucleotide
  Target: LAMA2; (-) strand; PAM type: NNNNGHTT; PAM sequence: ACAGGCTT
atctcccattctccctttaa

SEQ ID NO: 39992 - DNA, 20 bp, Artificial Sequence
  Description of Artificial Sequence: Synthetic oligonucleotide
  Target: LAMA2; (-) strand; PAM type: NNNNGHTT; PAM sequence: CATTGTTT
tcgataagcttttaaaaaga

SEQ ID NO: 39993 - DNA, 20 bp, Artificial Sequence
  Description of Artificial Sequence: Synthetic oligonucleotide
  Target: LAMA2; (-) strand; PAM type: NNNNGHTT; PAM sequence: ATAAGCTT
caatttctatcctattttcg

SEQ ID NO: 39994 - DNA, 20 bp, Artificial Sequence
  Description of Artificial Sequence: Synthetic oligonucleotide
  Target: LAMA2; (-) strand; PAM type: NNNNGHTT; PAM sequence: AATTGCTT
aaaaaatctgtgaggtctca

SEQ ID NO: 39995 - DNA, 20 bp, Artificial Sequence
  Description of Artificial Sequence: Synthetic oligonucleotide
  Target: LAMA2; (-) strand; PAM type: NNNNGHTT; PAM sequence: ATTGGTTT
tgaagctactccactcctaa

SEQ ID NO: 39996 - DNA, 20 bp, Artificial Sequence
  Description of Artificial Sequence: Synthetic oligonucleotide
  Target: LAMA2; (-) strand; PAM type: NNNNGHTT; PAM sequence: ATTTGTTT
ttattttccatccctttgac

SEQ ID NO: 39997 - DNA, 20 bp, Artificial Sequence
  Description of Artificial Sequence: Synthetic oligonucleotide
  Target: LAMA2; (-) strand; PAM type: NNNNGHTT; PAM sequence: CTTGGTTT
agctctaatttggatgctcc

SEQ ID NO: 39998 - DNA, 20 bp, Artificial Sequence
  Description of Artificial Sequence: Synthetic oligonucleotide
  Target: LAMA2; (-) strand; PAM type: NNNNGHTT; PAM sequence: TGGGGTTT
ttttgtatttttagtagaga

SEQ ID NO: 39999 - DNA, 20 bp, Artificial Sequence
  Description of Artificial Sequence: Synthetic oligonucleotide
  Target: LAMA2; (-) strand; PAM type: NNNNGHTT; PAM sequence: AAGGGATT
caacctctgcctcctgaata

SEQ ID NO: 40000 - DNA, 20 bp, Artificial Sequence
  Description of Artificial Sequence: Synthetic oligonucleotide
  Target: LAMA2; (-) strand; PAM type: NNNNGHTT; PAM sequence: TCTGGTTT
ttataacaatgtgaaatgaa

SEQ ID NO: 40001 - DNA, 20 bp, Artificial Sequence
  Description of Artificial Sequence: Synthetic oligonucleotide
  Target: LAMA2; (-) strand; PAM type: NNNNGHTT; PAM sequence: TACAGATT
tgaaattatattgtgacatt

SEQ ID NO: 40002 - DNA, 20 bp, Artificial Sequence
  Description of Artificial Sequence: Synthetic oligonucleotide
  Target: LAMA2; (-) strand; PAM type: NNNNGHTT; PAM sequence: GAGAGTTT
aacttctattaactcttttt

SEQ ID NO: 40003 - DNA, 20 bp, Artificial Sequence
  Description of Artificial Sequence: Synthetic oligonucleotide
  Target: LAMA2; (-) strand; PAM type: NNNNGHTT; PAM sequence: GTTTGTTT
gatattgccatggaattaat

SEQ ID NO: 40004 - DNA, 20 bp, Artificial Sequence
  Description of Artificial Sequence: Synthetic oligonucleotide
  Target: LAMA2; (-) strand; PAM type: NNNNGHTT; PAM sequence: TAATGTTT
cacagatattgccatggaat

SEQ ID NO: 40005 - DNA, 20 bp, Artificial Sequence
  Description of Artificial Sequence: Synthetic oligonucleotide
  Target: LAMA2; (-) strand; PAM type: NNNNGHTT; PAM sequence: TTATGTTT
gtcaatcaagaagaatgtat

SEQ ID NO: 40006 - DNA, 20 bp, Artificial Sequence
  Description of Artificial Sequence: Synthetic oligonucleotide
  Target: LAMA2; (-) strand; PAM type: NNNNGHTT; PAM sequence: CTCTGCTT
atgatatcccatagactggg

SEQ ID NO: 40007 - DNA, 20 bp, Artificial Sequence
  Description of Artificial Sequence: Synthetic oligonucleotide
  Target: LAMA2; (-) strand; PAM type: NNNNGHTT; PAM sequence: GCCAGCTT
tcagctggagccacgaagcc

SEQ ID NO: 40008 - DNA, 20 bp, Artificial Sequence
  Description of Artificial Sequence: Synthetic oligonucleotide
  Target: LAMA2; (-) strand; PAM type: NNNNGHTT; PAM sequence: ACAGGATT
ttttagctggattttataag

SEQ ID NO: 40009 - DNA, 20 bp, Artificial Sequence
  Description of Artificial Sequence: Synthetic oligonucleotide
  Target: LAMA2; (-) strand; PAM type: NNNNGHTT; PAM sequence: GCTGGATT
gaatttggaattgaatttta

SEQ ID NO: 40010 - DNA, 20 bp, Artificial Sequence
  Description of Artificial Sequence: Synthetic oligonucleotide
  Target: LAMA2; (-) strand; PAM type: NNNNGHTT; PAM sequence: AATAGCTT
tagcttcagaatagtgtgca

SEQ ID NO: 40011 - DNA, 20 bp, Artificial Sequence
  Description of Artificial Sequence: Synthetic oligonucleotide
  Target: LAMA2; (-) strand; PAM type: NNNNGHTT; PAM sequence: AATAGCTT
cctttccacaaagaaatgag

SEQ ID NO: 40012 - DNA, 20 bp, Artificial Sequence
  Description of Artificial Sequence: Synthetic oligonucleotide
  Target: LAMA2; (-) strand; PAM type: NNNNGHTT; PAM sequence: TTATGCTT
tcagatcgatatcttctttc

SEQ ID NO: 40013 - DNA, 20 bp, Artificial Sequence
  Description of Artificial Sequence: Synthetic oligonucleotide
  Target: LAMA2; (-) strand; PAM type: NNNNGHTT; PAM sequence: GTGGGCTT
gccttggcacatgcccacta

SEQ ID NO: 40014 - DNA, 20 bp, Artificial Sequence
  Description of Artificial Sequence: Synthetic oligonucleotide
  Target: LAMA2; (-) strand; PAM type: NNNNGHTT; PAM sequence: CCAGGTTT
catttatgtttcttcatatc

SEQ ID NO: 40015 - DNA, 20 bp, Artificial Sequence
  Description of Artificial Sequence: Synthetic oligonucleotide
  Target: LAMA2; (-) strand; PAM type: NNNNGHTT; PAM sequence: TTATGTTT
ttattatttcttctaggcat

SEQ ID NO: 40016 - DNA, 20 bp, Artificial Sequence
  Description of Artificial Sequence: Synthetic oligonucleotide
  Target: LAMA2; (-) strand; PAM type: NNNNGHTT; PAM sequence: CTTTGATT
taaatatttttaaaggaact

SEQ ID NO: 40017 - DNA, 20 bp, Artificial Sequence
  Description of Artificial Sequence: Synthetic oligonucleotide
  Target: LAMA2; (-) strand; PAM type: NNNNGHTT; PAM sequence: GTTTGTTT
taaaggaaaagggagaagaa

SEQ ID NO: 40018 - DNA, 20 bp, Artificial Sequence
  Description of Artificial Sequence: Synthetic oligonucleotide
  Target: LAMA2; (-) strand; PAM type: NNNNGHTT; PAM sequence: AGAAGTTT
tctgtaaaggaaaagggaga

SEQ ID NO: 40019 - DNA, 20 bp, Artificial Sequence
  Description of Artificial Sequence: Synthetic oligonucleotide
  Target: LAMA2; (-) strand; PAM type: NNNNGHTT; PAM sequence: TTCTGATT
atgtgctagacagatggcgt

SEQ ID NO: 40020 - DNA, 20 bp, Artificial Sequence
  Description of Artificial Sequence: Synthetic oligonucleotide
  Target: LAMA2; (-) strand; PAM type: NNNNGHTT; PAM sequence: TGGCGTTT
cagcccatgtgctagacaga

SEQ ID NO: 40021 - DNA, 20 bp, Artificial Sequence
  Description of Artificial Sequence: Synthetic oligonucleotide
  Target: LAMA2; (-) strand; PAM type: NNNNGHTT; PAM sequence: TTGAGATT
aaaaatatctctatcttaaa

SEQ ID NO: 40022 - DNA, 20 bp, Artificial Sequence
  Description of Artificial Sequence: Synthetic oligonucleotide
  Target: LAMA2; (-) strand; PAM type: NNNNGHTT; PAM sequence: TCATGTTT
gcattatatactcacttttg

SEQ ID NO: 40023 - DNA, 20 bp, Artificial Sequence
  Description of Artificial Sequence: Synthetic oligonucleotide
  Target: LAMA2; (-) strand; PAM type: NNNNGHTT; PAM sequence: CAGAGTTT
taagtattatttacttggga

SEQ ID NO: 40024 - DNA, 20 bp, Artificial Sequence
  Description of Artificial Sequence: Synthetic oligonucleotide
  Target: LAMA2; (-) strand; PAM type: NNNNGHTT; PAM sequence: ATTTGTTT
catatttgtatatatatatc

SEQ ID NO: 40025 - DNA, 20 bp, Artificial Sequence
  Description of Artificial Sequence: Synthetic oligonucleotide
  Target: LAMA2; (-) strand; PAM type: NNNNGHTT; PAM sequence: CAATGTTT
gctttaattgtacaattttt

SEQ ID NO: 40026 - DNA, 20 bp, Artificial Sequence
  Description of Artificial Sequence: Synthetic oligonucleotide
  Target: LAMA2; (-) strand; PAM type: NNNNGHTT; PAM sequence: ACCTGCTT
ttggagcataacaataagtc

SEQ ID NO: 40027 - DNA, 20 bp, Artificial Sequence
  Description of Artificial Sequence: Synthetic oligonucleotide
  Target: LAMA2; (-) strand; PAM type: NNNNGHTT; PAM sequence: CTGTGATT
ccatcttaagaaaaaggagg

SEQ ID NO: 40028 - DNA, 20 bp, Artificial Sequence
  Description of Artificial Sequence: Synthetic oligonucleotide
  Target: LAMA2; (-) strand; PAM type: NNNNGHTT; PAM sequence: CTGTGTTT
gcttttgtttcttcttaggg

SEQ ID NO: 40029 - DNA, 20 bp, Artificial Sequence
  Description of Artificial Sequence: Synthetic oligonucleotide
  Target: LAMA2; (-) strand; PAM type: NNNNGHTT; PAM sequence: TTTTGTTT
ctgaaataagatattccagc

SEQ ID NO: 40030 - DNA, 20 bp, Artificial Sequence
  Description of Artificial Sequence: Synthetic oligonucleotide
  Target: LAMA2; (-) strand; PAM type: NNNNGHTT; PAM sequence: TCCAGCTT
acagcactgaaataagatat

SEQ ID NO: 40031 - DNA, 20 bp, Artificial Sequence
  Description of Artificial Sequence: Synthetic oligonucleotide
  Target: LAMA2; (-) strand; PAM type: NNNNGHTT; PAM sequence: TAGGGTTT
aaaaggtaaatgaaaacacc

SEQ ID NO: 40032 - DNA, 20 bp, Artificial Sequence
  Description of Artificial Sequence: Synthetic oligonucleotide
  Target: LAMA2; (-) strand; PAM type: NNNNGHTT; PAM sequence: GGCTGTTT
cattgtccaaattgctctgt

SEQ ID NO: 40033 - DNA, 20 bp, Artificial Sequence
  Description of Artificial Sequence: Synthetic oligonucleotide
  Target: LAMA2; (-) strand; PAM type: NNNNGHTT; PAM sequence: CGAAGATT
tttcagaatgcacacaaagc

SEQ ID NO: 40034 - DNA, 20 bp, Artificial Sequence
  Description of Artificial Sequence: Synthetic oligonucleotide
  Target: LAMA2; (-) strand; PAM type: NNNNGHTT; PAM sequence: AAATGTTT
aaaaggagatgatttacagg

SEQ ID NO: 40035 - DNA, 20 bp, Artificial Sequence
  Description of Artificial Sequence: Synthetic oligonucleotide
  Target: LAMA2; (-) strand; PAM type: NNNNGHTT; PAM sequence: AGATGATT
ggagctttcagaggaaaagg

SEQ ID NO: 40036 - DNA, 20 bp, Artificial Sequence
  Description of Artificial Sequence: Synthetic oligonucleotide
  Target: LAMA2; (-) strand; PAM type: NNNNGHTT; PAM sequence: AGGAGCTT
gattccagccaacaaaaaag

SEQ ID NO: 40037 - DNA, 20 bp, Artificial Sequence
  Description of Artificial Sequence: Synthetic oligonucleotide
  Target: LAMA2; (-) strand; PAM type: NNNNGHTT; PAM sequence: TTGTGATT
tttgacaccctgtaaaaggc

SEQ ID NO: 40038 - DNA, 20 bp, Artificial Sequence
  Description of Artificial Sequence: Synthetic oligonucleotide
  Target: LAMA2; (-) strand; PAM type: NNNNGHTT; PAM sequence: AAAGGCTT
ttgacatttgacaccctgta

SEQ ID NO: 40039 - DNA, 20 bp, Artificial Sequence
  Description of Artificial Sequence: Synthetic oligonucleotide
  Target: LAMA2; (-) strand; PAM type: NNNNGHTT; PAM sequence: TCCAGCTT
gtatattatcctcttcaata

SEQ ID NO: 40040 - DNA, 20 bp, Artificial Sequence
  Description of Artificial Sequence: Synthetic oligonucleotide
  Target: LAMA2; (-) strand; PAM type: NNNNGHTT; PAM sequence: AATGGCTT
tattaaatttttctaatcca

SEQ ID NO: 40041 - DNA, 20 bp, Artificial Sequence
  Description of Artificial Sequence: Synthetic oligonucleotide
  Target: LAMA2; (-) strand; PAM type: NNNNGHTT; PAM sequence: TGTAGCTT
tgcttctcttgtatatctcc

SEQ ID NO: 40042 - DNA, 20 bp, Artificial Sequence
  Description of Artificial Sequence: Synthetic oligonucleotide
  Target: LAMA2; (-) strand; PAM type: NNNNGHTT; PAM sequence: GCATGCTT
gtgagctcctccaaaaaatg

SEQ ID NO: 40043 - DNA, 20 bp, Artificial Sequence
  Description of Artificial Sequence: Synthetic oligonucleotide
  Target: LAMA2; (-) strand; PAM type: NNNNGHTT; PAM sequence: ACAGGTTT
aagttgataccccttaacac

SEQ ID NO: 40044 - DNA, 20 bp, Artificial Sequence
  Description of Artificial Sequence: Synthetic oligonucleotide
  Target: LAMA2; (-) strand; PAM type: NNNNGHTT; PAM sequence: TGGTGTTT
gaagcttccagtattaagtg

SEQ ID NO: 40045 - DNA, 20 bp, Artificial Sequence
  Description of Artificial Sequence: Synthetic oligonucleotide
  Target: LAMA2; (-) strand; PAM type: NNNNGHTT; PAM sequence: TGAAGCTT
tatttcttttcatatgttct

SEQ ID NO: 40046 - DNA, 20 bp, Artificial Sequence
  Description of Artificial Sequence: Synthetic oligonucleotide
  Target: LAMA2; (-) strand; PAM type: NNNNGHTT; PAM sequence: AATTGTTT
ccagtgaaaatcctgaaatt

SEQ ID NO: 40047 - DNA, 20 bp, Artificial Sequence
  Description of Artificial Sequence: Synthetic oligonucleotide
  Target: LAMA2; (-) strand; PAM type: NNNNGHTT; PAM sequence: TTAGGTTT
gttccaaattctgttactta

SEQ ID NO: 40048 - DNA, 20 bp, Artificial Sequence
  Description of Artificial Sequence: Synthetic oligonucleotide
  Target: LAMA2; (-) strand; PAM type: NNNNGHTT; PAM sequence: TAAGGATT
ctatttcttagactggtatt

SEQ ID NO: 40049 - DNA, 20 bp, Artificial Sequence
  Description of Artificial Sequence: Synthetic oligonucleotide
  Target: LAMA2; (-) strand; PAM type: NNNNGHTT; PAM sequence: TAGTGTTT
tttttcaaaataaaaacttg

SEQ ID NO: 40050 - DNA, 20 bp, Artificial Sequence
  Description of Artificial Sequence: Synthetic oligonucleotide
  Target: LAMA2; (-) strand; PAM type: NNNNGHTT; PAM sequence: AATAGTTT
attatactcaattctatgat

SEQ ID NO: 40051 - DNA, 20 bp, Artificial Sequence
  Description of Artificial Sequence: Synthetic oligonucleotide
  Target: LAMA2; (-) strand; PAM type: NNNNGHTT; PAM sequence: GCCTGTTT
tctctatgcttttctcattt

SEQ ID NO: 40052 - DNA, 20 bp, Artificial Sequence
  Description of Artificial Sequence: Synthetic oligonucleotide
  Target: LAMA2; (-) strand; PAM type: NNNNGHTT; PAM sequence: CTATGCTT
actagccttttaattggtct

SEQ ID NO: 40053 - DNA, 20 bp, Artificial Sequence
  Description of Artificial Sequence: Synthetic oligonucleotide
  Target: LAMA2; (-) strand; PAM type: NNNNGHTT; PAM sequence: ATTAGTTT
accctcacccctcacatcta

SEQ ID NO: 40054 - DNA, 20 bp, Artificial Sequence
  Description of Artificial Sequence: Synthetic oligonucleotide
  Target: LAMA2; (-) strand; PAM type: NNNNGHTT; PAM sequence: CCTGGTTT
ttcttctctaacggctctct

SEQ ID NO: 40055 - DNA, 20 bp, Artificial Sequence
  Description of Artificial Sequence: Synthetic oligonucleotide
  Target: LAMA2; (-) strand; PAM type: NNNNGHTT; PAM sequence: TTCAGATT
cttcatctgctcctgcaatt

SEQ ID NO: 40056 - DNA, 20 bp, Artificial Sequence
  Description of Artificial Sequence: Synthetic oligonucleotide
  Target: LAMA2; (-) strand; PAM type: NNNNGHTT; PAM sequence: ATGTGCTT
tgccaacgttattggcttct

SEQ ID NO: 40057 - DNA, 20 bp, Artificial Sequence
  Description of Artificial Sequence: Synthetic oligonucleotide
  Target: LAMA2; (-) strand; PAM type: NNNNGHTT; PAM sequence: ATTGGCTT
ccgaagccagtgccaacgtt

SEQ ID NO: 40058 - DNA, 20 bp, Artificial Sequence
  Description of Artificial Sequence: Synthetic oligonucleotide
  Target: LAMA2; (-) strand; PAM type: NNNNGHTT; PAM sequence: GACAGATT
cccatatcccaaattaggga

SEQ ID NO: 40059 - DNA, 20 bp, Artificial Sequence
  Description of Artificial Sequence: Synthetic oligonucleotide
  Target: LAMA2; (-) strand; PAM type: NNNNGHTT; PAM sequence: TTCTGCTT
cttaaaactgtaaattcaaa

SEQ ID NO: 40060 - DNA, 20 bp, Artificial Sequence
  Description of Artificial Sequence: Synthetic oligonucleotide
  Target: LAMA2; (-) strand; PAM type: NNNNGHTT; PAM sequence: TTTTGATT
cttgccattttaatttgata

SEQ ID NO: 40061 - DNA, 20 bp, Artificial Sequence
  Description of Artificial Sequence: Synthetic oligonucleotide
  Target: LAMA2; (-) strand; PAM type: NNNNGHTT; PAM sequence: TAAAGTTT
cttacagtggatgcaatcaa

SEQ ID NO: 40062 - DNA, 20 bp, Artificial Sequence
  Description of Artificial Sequence: Synthetic oligonucleotide
  Target: LAMA2; (-) strand; PAM type: NNNNGHTT; PAM sequence: TCTGGCTT
cacacaagtttttgtgtgtt

SEQ ID NO: 40063 - DNA, 20 bp, Artificial Sequence
  Description of Artificial Sequence: Synthetic oligonucleotide
  Target: LAMA2; (-) strand; PAM type: NNNNGHTT; PAM sequence: GTGTGTTT
atctacacacacaagttttt

SEQ ID NO: 40064 - DNA, 20 bp, Artificial Sequence
  Description of Artificial Sequence: Synthetic oligonucleotide
  Target: LAMA2; (-) strand; PAM type: NNNNGHTT; PAM sequence: ACAAGTTT
atatttagatatctacacac

SEQ ID NO: 40065 - DNA, 20 bp, Artificial Sequence
  Description of Artificial Sequence: Synthetic oligonucleotide
  Target: LAMA2; (-) strand; PAM type: NNNNGHTT; PAM sequence: GTAGGTTT
tgactcatgaaatccattga

SEQ ID NO: 40066 - DNA, 20 bp, Artificial Sequence
  Description of Artificial Sequence: Synthetic oligonucleotide
  Target: LAMA2; (-) strand; PAM type: NNNNGHTT; PAM sequence: CCAAGCTT
gttaattagcctaatacgtc

SEQ ID NO: 40067 - DNA, 20 bp, Artificial Sequence
  Description of Artificial Sequence: Synthetic oligonucleotide
  Target: LAMA2; (-) strand; PAM type: NNNNGHTT; PAM sequence: CTTTGCTT
ttctttgccctggctggttt

SEQ ID NO: 40068 - DNA, 20 bp, Artificial Sequence
  Description of Artificial Sequence: Synthetic oligonucleotide
  Target: LAMA2; (-) strand; PAM type: NNNNGHTT; PAM sequence: GCTGGTTT
tgcctcttttctttgccctg

SEQ ID NO: 40069 - DNA, 20 bp, Artificial Sequence
  Description of Artificial Sequence: Synthetic oligonucleotide
  Target: LAMA2; (-) strand; PAM type: NNNNGHTT; PAM sequence: ATCTGTTT
tcctccatctattcctcaga

SEQ ID NO: 40070 - DNA, 20 bp, Artificial Sequence
  Description of Artificial Sequence: Synthetic oligonucleotide
  Target: LAMA2; (-) strand; PAM type: NNNNGHTT; PAM sequence: CACAGATT
tccatatttctcactgactg

SEQ ID NO: 40071 - DNA, 20 bp, Artificial Sequence
  Description of Artificial Sequence: Synthetic oligonucleotide
  Target: LAMA2; (-) strand; PAM type: NNNNGHTT; PAM sequence: ATTTGTTT
aagagttaaatttctaccat

SEQ ID NO: 40072 - DNA, 20 bp, Artificial Sequence
  Description of Artificial Sequence: Synthetic oligonucleotide
  Target: LAMA2; (-) strand; PAM type: NNNNGHTT; PAM sequence: GAGGGTTT
ggaaaggtagtcagattaca

SEQ ID NO: 40073 - DNA, 20 bp, Artificial Sequence
  Description of Artificial Sequence: Synthetic oligonucleotide
  Target: LAMA2; (-) strand; PAM type: NNNNGHTT; PAM sequence: GTCAGATT
gcttggagcctggaaaggta

SEQ ID NO: 40074 - DNA, 20 bp, Artificial Sequence
  Description of Artificial Sequence: Synthetic oligonucleotide
  Target: LAMA2; (-) strand; PAM type: NNNNGHTT; PAM sequence: GAGGGCTT
gcattatatagaatggagtt

SEQ ID NO: 40075 - DNA, 20 bp, Artificial Sequence
  Description of Artificial Sequence: Synthetic oligonucleotide
  Target: LAMA2; (-) strand; PAM type: NNNNGHTT; PAM sequence: CAGGGATT
taaaaataaattagatttca

SEQ ID NO: 40076 - DNA, 20 bp, Artificial Sequence
  Description of Artificial Sequence: Synthetic oligonucleotide
  Target: LAMA2; (-) strand; PAM type: NNNNGHTT; PAM sequence: ATTAGATT
aaaaatgcctttaaaaataa

SEQ ID NO: 40077 - DNA, 20 bp, Artificial Sequence
  Description of Artificial Sequence: Synthetic oligonucleotide
  Target: LAMA2; (-) strand; PAM type: NNNNGHTT; PAM sequence: TAGGGTTT
gataggttttgtggcagagg

SEQ ID NO: 40078 - DNA, 20 bp, Artificial Sequence
  Description of Artificial Sequence: Synthetic oligonucleotide
  Target: LAMA2; (-) strand; PAM type: NNNNGHTT; PAM sequence: ATAGGTTT
aaatacattctgtgctatgg

SEQ ID NO: 40079 - DNA, 20 bp, Artificial Sequence
  Description of Artificial Sequence: Synthetic oligonucleotide
  Target: LAMA2; (-) strand; PAM type: NNNNGHTT; PAM sequence: GAATGATT
taaatgttcatctcctgaaa

SEQ ID NO: 40080 - DNA, 20 bp, Artificial Sequence
  Description of Artificial Sequence: Synthetic oligonucleotide
  Target: LAMA2; (-) strand; PAM type: NNNNGHTT; PAM sequence: ATATGCTT
tcatagtgttgggatgaagt

SEQ ID NO: 40081 - DNA, 20 bp, Artificial Sequence
  Description of Artificial Sequence: Synthetic oligonucleotide
  Target: LAMA2; (-) strand; PAM type: NNNNGHTT; PAM sequence: TTATGTTT
ataaagaaagaaataagaca

SEQ ID NO: 40082 - DNA, 20 bp, Artificial Sequence
  Description of Artificial Sequence: Synthetic oligonucleotide
  Target: LAMA2; (-) strand; PAM type: NNNNGHTT; PAM sequence: GGCCGTTT
ccagaaggctaggaaacaca

SEQ ID NO: 40083 - DNA, 20 bp, Artificial Sequence
  Description of Artificial Sequence: Synthetic oligonucleotide
  Target: LAMA2; (-) strand; PAM type: NNNNGHTT; PAM sequence: ATCTGTTT
cacatttctgcacaagtctc

SEQ ID NO: 40084 - DNA, 20 bp, Artificial Sequence
  Description of Artificial Sequence: Synthetic oligonucleotide
  Target: LAMA2; (-) strand; PAM type: NNNNGHTT; PAM sequence: TAGAGCTT
caggagagttagatattcat

SEQ ID NO: 40085 - DNA, 20 bp, Artificial Sequence
  Description of Artificial Sequence: Synthetic oligonucleotide
  Target: LAMA2; (-) strand; PAM type: NNNNGHTT; PAM sequence: GGAAGATT
ccaagccacctcttgccact

SEQ ID NO: 40086 - DNA, 20 bp, Artificial Sequence
  Description of Artificial Sequence: Synthetic oligonucleotide
  Target: LAMA2; (-) strand; PAM type: NNNNGHTT; PAM sequence: ACTGGATT
gtgcttccatcaataacacc

SEQ ID NO: 40087 - DNA, 20 bp, Artificial Sequence
  Description of Artificial Sequence: Synthetic oligonucleotide
  Target: LAMA2; (-) strand; PAM type: NNNNGHTT; PAM sequence: TGGTGCTT
ctcctatctgcaaatgctgc

SEQ ID NO: 40088 - DNA, 20 bp, Artificial Sequence
  Description of Artificial Sequence: Synthetic oligonucleotide
  Target: LAMA2; (-) strand; PAM type: NNNNGHTT; PAM sequence: CCATGTTT
catcccagtcaacagccact

SEQ ID NO: 40089 - DNA, 20 bp, Artificial Sequence
  Description of Artificial Sequence: Synthetic oligonucleotide
  Target: LAMA2; (-) strand; PAM type: NNNNGHTT; PAM sequence: GTAAGTTT
ctaccttcgcagatctaaaa

SEQ ID NO: 40090 - DNA, 20 bp, Artificial Sequence
  Description of Artificial Sequence: Synthetic oligonucleotide
  Target: LAMA2; (-) strand; PAM type: NNNNGHTT; PAM sequence: AAGGGATT
gaatgatctcacttagtcct

SEQ ID NO: 40091 - DNA, 20 bp, Artificial Sequence
  Description of Artificial Sequence: Synthetic oligonucleotide
  Target: LAMA2; (-) strand; PAM type: NNNNGHTT; PAM sequence: TTCTGATT
acgtgcttcacaattcagtt

SEQ ID NO: 40092 - DNA, 20 bp, Artificial Sequence
  Description of Artificial Sequence: Synthetic oligonucleotide
  Target: LAMA2; (-) strand; PAM type: NNNNGHTT; PAM sequence: TTCAGTTT
tctcttaacgtgcttcacaa

SEQ ID NO: 40093 - DNA, 20 bp, Artificial Sequence
  Description of Artificial Sequence: Synthetic oligonucleotide
  Target: LAMA2; (-) strand; PAM type: NNNNGHTT; PAM sequence: ACGTGCTT
ggcatgtccttgatctctta

SEQ ID NO: 40094 - DNA, 20 bp, Artificial Sequence
  Description of Artificial Sequence: Synthetic oligonucleotide
  Target: LAMA2; (-) strand; PAM type: NNNNGHTT; PAM sequence: TTCAGTTT
cagttcattggttgttcctt

SEQ ID NO: 40095 - DNA, 20 bp, Artificial Sequence
  Description of Artificial Sequence: Synthetic oligonucleotide
  Target: LAMA2; (-) strand; PAM type: NNNNGHTT; PAM sequence: TCTGGTTT
cttcctggaaaccatttcct

SEQ ID NO: 40096 - DNA, 20 bp, Artificial Sequence
  Description of Artificial Sequence: Synthetic oligonucleotide
  Target: LAMA2; (-) strand; PAM type: NNNNGHTT; PAM sequence: ATGGGCTT
tatggacactgcagagataa

SEQ ID NO: 40097 - DNA, 20 bp, Artificial Sequence
  Description of Artificial Sequence: Synthetic oligonucleotide
  Target: LAMA2; (-) strand; PAM type: NNNNGHTT; PAM sequence: CAGAGCTT
aacagaatttttaaaattta

SEQ ID NO: 40098 - DNA, 20 bp, Artificial Sequence
  Description of Artificial Sequence: Synthetic oligonucleotide
  Target: LAMA2; (-) strand; PAM type: NNNNGHTT; PAM sequence: TTGTGCTT
gcagggctactcagaaatcc

SEQ ID NO: 40099 - DNA, 20 bp, Artificial Sequence
  Description of Artificial Sequence: Synthetic oligonucleotide
  Target: LAMA2; (-) strand; PAM type: NNNNGHTT; PAM sequence: TTGAGTTT
gattccatctcacttgaagc

SEQ ID NO: 40100 - DNA, 20 bp, Artificial Sequence
  Description of Artificial Sequence: Synthetic oligonucleotide
  Target: LAMA2; (-) strand; PAM type: NNNNGHTT; PAM sequence: TGAAGCTT
agtagggattccatctcact

SEQ ID NO: 40101 - DNA, 20 bp, Artificial Sequence
  Description of Artificial Sequence: Synthetic oligonucleotide
  Target: LAMA2; (-) strand; PAM type: NNNNGHTT; PAM sequence: TAGGGATT
aaaaggtcttctggagggag

SEQ ID NO: 40102 - DNA, 20 bp, Artificial Sequence
  Description of Artificial Sequence: Synthetic oligonucleotide
  Target: LAMA2; (-) strand; PAM type: NNNNGHTT; PAM sequence: CACTGTTT
tatgatattatggtggattg

SEQ ID NO: 40103 - DNA, 20 bp, Artificial Sequence
  Description of Artificial Sequence: Synthetic oligonucleotide
  Target: LAMA2; (-) strand; PAM type: NNNNGHTT; PAM sequence: GGTGGATT
ttttcaaattatgatattat

SEQ ID NO: 40104 - DNA, 20 bp, Artificial Sequence
  Description of Artificial Sequence: Synthetic oligonucleotide
  Target: LAMA2; (-) strand; PAM type: NNNNGHTT; PAM sequence: AAGTGTTT
atgtcaataaaaaaataata

SEQ ID NO: 40105 - DNA, 20 bp, Artificial Sequence
  Description of Artificial Sequence: Synthetic oligonucleotide
  Target: LAMA2; (-) strand; PAM type: NNNNGHTT; PAM sequence: GTATGATT
agagaaactctaaagagcca

SEQ ID NO: 40106 - DNA, 20 bp, Artificial Sequence
  Description of Artificial Sequence: Synthetic oligonucleotide
  Target: LAMA2; (-) strand; PAM type: NNNNGHTT; PAM sequence: AACAGATT
tacatatatgggctctaaga

SEQ ID NO: 40107 - DNA, 20 bp, Artificial Sequence
  Description of Artificial Sequence: Synthetic oligonucleotide
  Target: LAMA2; (-) strand; PAM type: NNNNGHTT; PAM sequence: TGCTGCTT
gcacacaccatttttctttt

SEQ ID NO: 40108 - DNA, 20 bp, Artificial Sequence
  Description of Artificial Sequence: Synthetic oligonucleotide
  Target: LAMA2; (-) strand; PAM type: NNNNGHTT; PAM sequence: TGTAGTTT
aaaactaaactatattagca

SEQ ID NO: 40109 - DNA, 20 bp, Artificial Sequence
  Description of Artificial Sequence: Synthetic oligonucleotide
  Target: LAMA2; (-) strand; PAM type: NNNNGHTT; PAM sequence: CCTGGATT
cacagccagtctgtcttgct

SEQ ID NO: 40110 - DNA, 20 bp, Artificial Sequence
  Description of Artificial Sequence: Synthetic oligonucleotide
  Target: LAMA2; (-) strand; PAM type: NNNNGHTT; PAM sequence: CAATGTTT
taggtcttataaaacttccc

SEQ ID NO: 40111 - DNA, 20 bp, Artificial Sequence
  Description of Artificial Sequence: Synthetic oligonucleotide
  Target: LAMA2; (-) strand; PAM type: NNNNGHTT; PAM sequence: GAAAGCTT
tgattcagtgtgaggaaagg

SEQ ID NO: 40112 - DNA, 20 bp, Artificial Sequence
  Description of Artificial Sequence: Synthetic oligonucleotide
  Target: LAMA2; (-) strand; PAM type: NNNNGHTT; PAM sequence: ATGTGATT
tttaccttgaacacaaagta

SEQ ID NO: 40113 - DNA, 20 bp, Artificial Sequence
  Description of Artificial Sequence: Synthetic oligonucleotide
  Target: LAMA2; (-) strand; PAM type: NNNNGHTT; PAM sequence: TCCAGATT
aatatcttttctaatttaca

SEQ ID NO: 40114 - DNA, 20 bp, Artificial Sequence
  Description of Artificial Sequence: Synthetic oligonucleotide
  Target: LAMA2; (-) strand; PAM type: NNNNGHTT; PAM sequence: ACATGTTT
tcaagacgtgaagtgtgaat

SEQ ID NO: 40115 - DNA, 20 bp, Artificial Sequence
  Description of Artificial Sequence: Synthetic oligonucleotide
  Target: LAMA2; (-) strand; PAM type: NNNNGHTT; PAM sequence: TGGTGCTT
aactcagcccaaatggccac

SEQ ID NO: 40116 - DNA, 20 bp, Artificial Sequence
  Description of Artificial Sequence: Synthetic oligonucleotide
  Target: LAMA2; (-) strand; PAM type: NNNNGHTT; PAM sequence: GATGGATT
atatatattgtttggtttat

SEQ ID NO: 40117 - DNA, 20 bp, Artificial Sequence
  Description of Artificial Sequence: Synthetic oligonucleotide
  Target: LAMA2; (-) strand; PAM type: NNNNGHTT; PAM sequence: TTTGGTTT
cagtaaacaaatatatattg

SEQ ID NO: 40118 - DNA, 20 bp, Artificial Sequence
  Description of Artificial Sequence: Synthetic oligonucleotide
  Target: LAMA2; (-) strand; PAM type: NNNNGHTT; PAM sequence: TATTGTTT
aataacagtaaacaaatata

SEQ ID NO: 40119 - DNA, 20 bp, Artificial Sequence
  Description of Artificial Sequence: Synthetic oligonucleotide
  Target: LAMA2; (-) strand; PAM type: NNNNGHTT; PAM sequence: AAAAGTTT
agaaagaaaaggattgcaaa

SEQ ID NO: 40120 - DNA, 20 bp, Artificial Sequence
  Description of Artificial Sequence: Synthetic oligonucleotide
  Target: LAMA2; (-) strand; PAM type: NNNNGHTT; PAM sequence: AAAGGATT
ctgaaactgaatcagaaaga

SEQ ID NO: 40121 - DNA, 20 bp, Artificial Sequence
  Description of Artificial Sequence: Synthetic oligonucleotide
  Target: LAMA2; (-) strand; PAM type: NNNNGHTT; PAM sequence: GTACGTTT
tccctacatatcattactct

SEQ ID NO: 40122 - DNA, 20 bp, Artificial Sequence
  Description of Artificial Sequence: Synthetic oligonucleotide
  Target: LAMA2; (-) strand; PAM type: NNNNGHTT; PAM sequence: GAATGTTT
attgaagttcttcaaataat

SEQ ID NO: 40123 - DNA, 20 bp, Artificial Sequence
  Description of Artificial Sequence: Synthetic oligonucleotide
  Target: LAMA2; (-) strand; PAM type: NNNNGHTT; PAM sequence: AGTGGTTT
gacaaattctaagatacaca

SEQ ID NO: 40124 - DNA, 20 bp, Artificial Sequence
  Description of Artificial Sequence: Synthetic oligonucleotide
  Target: LAMA2; (-) strand; PAM type: NNNNGHTT; PAM sequence: AATAGTTT
gcataagttagataattgta

SEQ ID NO: 40125 - DNA, 20 bp, Artificial Sequence
  Description of Artificial Sequence: Synthetic oligonucleotide
  Target: LAMA2; (-) strand; PAM type: NNNNGHTT; PAM sequence: AATTGATT
actactgctaagcttttgaa

SEQ ID NO: 40126 - DNA, 20 bp, Artificial Sequence
  Description of Artificial Sequence: Synthetic oligonucleotide
  Target: LAMA2; (-) strand; PAM type: NNNNGHTT; PAM sequence: CTAAGCTT
cttattagtagtaactactg

SEQ ID NO: 40127 - DNA, 20 bp, Artificial Sequence
  Description of Artificial Sequence: Synthetic oligonucleotide
  Target: LAMA2; (-) strand; PAM type: NNNNGHTT; PAM sequence: GCCAGTTT
attaaaataagaaaagtgta

SEQ ID NO: 40128 - DNA, 20 bp, Artificial Sequence
  Description of Artificial Sequence: Synthetic oligonucleotide
  Target: LAMA2; (-) strand; PAM type: NNNNGHTT; PAM sequence: TATTGTTT
aagagaaaacatttaaataa

SEQ ID NO: 40129 - DNA, 20 bp, Artificial Sequence
  Description of Artificial Sequence: Synthetic oligonucleotide
  Target: LAMA2; (-) strand; PAM type: NNNNGHTT; PAM sequence: ATGAGATT
aacagctgtatacatgcatt

SEQ ID NO: 40130 - DNA, 20 bp, Artificial Sequence
  Description of Artificial Sequence: Synthetic oligonucleotide
  Target: LAMA2; (-) strand; PAM type: NNNNGHTT; PAM sequence: TTTGGATT
ctgtactccttaatttacca

SEQ ID NO: 40131 - DNA, 20 bp, Artificial Sequence
  Description of Artificial Sequence: Synthetic oligonucleotide
  Target: LAMA2; (-) strand; PAM type: NNNNGHTT; PAM sequence: ATCAGTTT
aattgcaacttttctagaca

SEQ ID NO: 40132 - DNA, 20 bp, Artificial Sequence
  Description of Artificial Sequence: Synthetic oligonucleotide
  Target: LAMA2; (-) strand; PAM type: NNNNGHTT; PAM sequence: ACAAGTTT
atataccaaaagtggtggtg

SEQ ID NO: 40133 - DNA, 20 bp, Artificial Sequence
  Description of Artificial Sequence: Synthetic oligonucleotide
  Target: LAMA2; (-) strand; PAM type: NNNNGHTT; PAM sequence: CTGAGATT
aggtggcctatcaatgattc

SEQ ID NO: 40134 - DNA, 20 bp, Artificial Sequence
  Description of Artificial Sequence: Synthetic oligonucleotide
  Target: LAMA2; (-) strand; PAM type: NNNNGHTT; PAM sequence: CAATGATT
gtgtaaagtaggtggcctat

SEQ ID NO: 40135 - DNA, 20 bp, Artificial Sequence
  Description of Artificial Sequence: Synthetic oligonucleotide
  Target: LAMA2; (-) strand; PAM type: NNNNGHTT; PAM sequence: GAAGGCTT
tctgcctcttctgttggaga

SEQ ID NO: 40136 - DNA, 20 bp, Artificial Sequence
  Description of Artificial Sequence: Synthetic oligonucleotide
  Target: LAMA2; (-) strand; PAM type: NNNNGHTT; PAM sequence: GCCTGATT
caggtgatgtcccagtctta

SEQ ID NO: 40137 - DNA, 20 bp, Artificial Sequence
  Description of Artificial Sequence: Synthetic oligonucleotide
  Target: LAMA2; (-) strand; PAM type: NNNNGHTT; PAM sequence: GTATGATT
aagaaaagctctaatcaagg

SEQ ID NO: 40138 - DNA, 20 bp, Artificial Sequence
  Description of Artificial Sequence: Synthetic oligonucleotide
  Target: LAMA2; (-) strand; PAM type: NNNNGHTT; PAM sequence: AGAAGCTT
gtattagtttatatttacaa

SEQ ID NO: 40139 - DNA, 20 bp, Artificial Sequence
  Description of Artificial Sequence: Synthetic oligonucleotide
  Target: LAMA2; (-) strand; PAM type: NNNNGHTT; PAM sequence: ATTAGTTT
agtggatgctgataattagt

SEQ ID NO: 40140 - DNA, 20 bp, Artificial Sequence
  Description of Artificial Sequence: Synthetic oligonucleotide
  Target: LAMA2; (-) strand; PAM type: NNNNGHTT; PAM sequence: CCATGATT
aattatttagttacttattg

SEQ ID NO: 40141 - DNA, 20 bp, Artificial Sequence
  Description of Artificial Sequence: Synthetic oligonucleotide
  Target: LAMA2; (-) strand; PAM type: NNNNGHTT; PAM sequence: TAAAGCTT
aaaaattgcattgggattta

SEQ ID NO: 40142 - DNA, 20 bp, Artificial Sequence
  Description of Artificial Sequence: Synthetic oligonucleotide
  Target: LAMA2; (-) strand; PAM type: NNNNGHTT; PAM sequence: TTGGGATT
acaaatgtataaaaattgca

SEQ ID NO: 40143 - DNA, 20 bp, Artificial Sequence
  Description of Artificial Sequence: Synthetic oligonucleotide
  Target: LAMA2; (-) strand; PAM type: NNNNGHTT; PAM sequence: TACGGATT
ctgtgtttagagttaccaca

SEQ ID NO: 40144 - DNA, 20 bp, Artificial Sequence
  Description of Artificial Sequence: Synthetic oligonucleotide
  Target: LAMA2; (-) strand; PAM type: NNNNGHTT; PAM sequence: CTGTGTTT
atatatgcaaatattggata

SEQ ID NO: 40145 - DNA, 20 bp, Artificial Sequence
  Description of Artificial Sequence: Synthetic oligonucleotide
  Target: LAMA2; (-) strand; PAM type: NNNNGHTT; PAM sequence: CACTGTTT
tggtatggaaattgtgaatc

SEQ ID NO: 40146 - DNA, 20 bp, Artificial Sequence
  Description of Artificial Sequence: Synthetic oligonucleotide
  Target: LAMA2; (-) strand; PAM type: NNNNGHTT; PAM sequence: TTTAGATT
tcagaacaaatggaaatatt

SEQ ID NO: 40147 - DNA, 20 bp, Artificial Sequence
  Description of Artificial Sequence: Synthetic oligonucleotide
  Target: LAMA2; (-) strand; PAM type: NNNNGHTT; PAM sequence: TGGTGTTT
gcttttagtcaccatcctac

SEQ ID NO: 40148 - DNA, 20 bp, Artificial Sequence
  Description of Artificial Sequence: Synthetic oligonucleotide
  Target: LAMA2; (-) strand; PAM type: NNNNGHTT; PAM sequence: CGATGCTT
ataatctttttggtgtccag

SEQ ID NO: 40149 - DNA, 20 bp, Artificial Sequence
  Description of Artificial Sequence: Synthetic oligonucleotide
  Target: LAMA2; (-) strand; PAM type: NNNNGHTT; PAM sequence: ACATGCTT
ccttctagcctattctatac

SEQ ID NO: 40150 - DNA, 20 bp, Artificial Sequence
  Description of Artificial Sequence: Synthetic oligonucleotide
  Target: LAMA2; (-) strand; PAM type: NNNNGHTT; PAM sequence: TTCTGCTT
aaataaattttctgtaatca

SEQ ID NO: 40151 - DNA, 20 bp, Artificial Sequence
  Description of Artificial Sequence: Synthetic oligonucleotide
  Target: LAMA2; (-) strand; PAM type: NNNNGHTT; PAM sequence: TATCGATT
ctacacaaactgacagcttt

SEQ ID NO: 40152 - DNA, 20 bp, Artificial Sequence
  Description of Artificial Sequence: Synthetic oligonucleotide
  Target: LAMA2; (-) strand; PAM type: NNNNGHTT; PAM sequence: GACAGCTT
atctctatgctacacaaact

SEQ ID NO: 40153 - DNA, 20 bp, Artificial Sequence
  Description of Artificial Sequence: Synthetic oligonucleotide
  Target: LAMA2; (-) strand; PAM type: NNNNGHTT; PAM sequence: CAATGTTT
tgatgaatgcaaagctataa

SEQ ID NO: 40154 - DNA, 20 bp, Artificial Sequence
  Description of Artificial Sequence: Synthetic oligonucleotide
  Target: LAMA2; (-) strand; PAM type: NNNNGHTT; PAM sequence: TTTGGTTT
ataaaaatttaaccaagaac

SEQ ID NO: 40155 - DNA, 20 bp, Artificial Sequence
  Description of Artificial Sequence: Synthetic oligonucleotide
  Target: LAMA2; (-) strand; PAM type: NNNNGHTT; PAM sequence: AAATGATT
agcaggtcgaaagatgattt

SEQ ID NO: 40156 - DNA, 20 bp, Artificial Sequence
  Description of Artificial Sequence: Synthetic oligonucleotide
  Target: LAMA2; (-) strand; PAM type: NNNNGHTT; PAM sequence: AGATGATT
atcagtctgagcaggtcgaa

SEQ ID NO: 40157 - DNA, 20 bp, Artificial Sequence
  Description of Artificial Sequence: Synthetic oligonucleotide
  Target: LAMA2; (-) strand; PAM type: NNNNGHTT; PAM sequence: AGCAGTTT
agggatactcaagaaattta

SEQ ID NO: 40158 - DNA, 20 bp, Artificial Sequence
  Description of Artificial Sequence: Synthetic oligonucleotide
  Target: LAMA2; (-) strand; PAM type: NNNNGHTT; PAM sequence: AGAGGTTT
attgaaaataaagtatgagg

SEQ ID NO: 40159 - DNA, 20 bp, Artificial Sequence
  Description of Artificial Sequence: Synthetic oligonucleotide
  Target: LAMA2; (-) strand; PAM type: NNNNGHTT; PAM sequence: AAGAGTTT
tcagattgattaaatgttca

SEQ ID NO: 40160 - DNA, 20 bp, Artificial Sequence
  Description of Artificial Sequence: Synthetic oligonucleotide
  Target: LAMA2; (-) strand; PAM type: NNNNGHTT; PAM sequence: GATTGATT
ttgtattctaagcagattca

SEQ ID NO: 40161 - DNA, 20 bp, Artificial Sequence
  Description of Artificial Sequence: Synthetic oligonucleotide
  Target: LAMA2; (-) strand; PAM type: NNNNGHTT; PAM sequence: TTCAGATT
ataattgtattctaagcaga

SEQ ID NO: 40162 - DNA, 20 bp, Artificial Sequence
  Description of Artificial Sequence: Synthetic oligonucleotide
  Target: LAMA2; (-) strand; PAM type: NNNNGHTT; PAM sequence: AGCAGATT
ggtaaaataattgtattcta

SEQ ID NO: 40163 - DNA, 20 bp, Artificial Sequence
  Description of Artificial Sequence: Synthetic oligonucleotide
  Target: LAMA2; (-) strand; PAM type: NNNNGHTT; PAM sequence: AATGGCTT
catttaagtaagtccactta

SEQ ID NO: 40164 - DNA, 20 bp, Artificial Sequence
  Description of Artificial Sequence: Synthetic oligonucleotide
  Target: LAMA2; (-) strand; PAM type: NNNNGHTT; PAM sequence: TTTTGATT
aggcttttatacattcatgt

SEQ ID NO: 40165 - DNA, 20 bp, Artificial Sequence
  Description of Artificial Sequence: Synthetic oligonucleotide
  Target: LAMA2; (-) strand; PAM type: NNNNGHTT; PAM sequence: TCATGTTT
gacattaggcttttatacat

SEQ ID NO: 40166 - DNA, 20 bp, Artificial Sequence
  Description of Artificial Sequence: Synthetic oligonucleotide
  Target: LAMA2; (-) strand; PAM type: NNNNGHTT; PAM sequence: TTAGGCTT
gaagaaaacgatttgtgaca

SEQ ID NO: 40167 - DNA, 20 bp, Artificial Sequence
  Description of Artificial Sequence: Synthetic oligonucleotide
  Target: LAMA2; (-) strand; PAM type: NNNNGHTT; PAM sequence: AAACGATT
gaaaaggcaaaacatgaaga

SEQ ID NO: 40168 - DNA, 20 bp, Artificial Sequence
  Description of Artificial Sequence: Synthetic oligonucleotide
  Target: LAMA2; (-) strand; PAM type: NNNNGHTT; PAM sequence: AGGGGATT
tgaggaagttgagagacagt

SEQ ID NO: 40169 - DNA, 20 bp, Artificial Sequence
  Description of Artificial Sequence: Synthetic oligonucleotide
  Target: LAMA2; (-) strand; PAM type: NNNNGHTT; PAM sequence: ACAAGTTT
atagtgtcccagattggaca

SEQ ID NO: 40170 - DNA, 20 bp, Artificial Sequence
  Description of Artificial Sequence: Synthetic oligonucleotide
  Target: LAMA2; (-) strand; PAM type: NNNNGHTT; PAM sequence: CCCAGATT
gcctgtttttaatatagtgt

SEQ ID NO: 40171 - DNA, 20 bp, Artificial Sequence
  Description of Artificial Sequence: Synthetic oligonucleotide
  Target: LAMA2; (-) strand; PAM type: NNNNGHTT; PAM sequence: GCCTGTTT
gcttaattgctaaaaacact

SEQ ID NO: 40172 - DNA, 20 bp, Artificial Sequence
  Description of Artificial Sequence: Synthetic oligonucleotide
  Target: LAMA2; (-) strand; PAM type: NNNNGHTT; PAM sequence: TTTGGCTT
aatttcctattacctgttgt

SEQ ID NO: 40173 - DNA, 20 bp, Artificial Sequence
  Description of Artificial Sequence: Synthetic oligonucleotide
  Target: LAMA2; (-) strand; PAM type: NNNNGHTT; PAM sequence: TGTTGTTT
caggacaatttcctattacc

SEQ ID NO: 40174 - DNA, 20 bp, Artificial Sequence
  Description of Artificial Sequence: Synthetic oligonucleotide
  Target: LAMA2; (-) strand; PAM type: NNNNGHTT; PAM sequence: TCTGGTTT
atgctagcagggccatacat

SEQ ID NO: 40175 - DNA, 20 bp, Artificial Sequence
  Description of Artificial Sequence: Synthetic oligonucleotide
  Target: LAMA2; (-) strand; PAM type: NNNNGHTT; PAM sequence: GGAAGTTT
tcactccgtgttatgacact

SEQ ID NO: 40176 - DNA, 20 bp, Artificial Sequence
  Description of Artificial Sequence: Synthetic oligonucleotide
  Target: LAMA2; (-) strand; PAM type: NNNNGHTT; PAM sequence: CACTGATT
tatgcaaacaaaatatataa

SEQ ID NO: 40177 - DNA, 20 bp, Artificial Sequence
  Description of Artificial Sequence: Synthetic oligonucleotide
  Target: LAMA2; (-) strand; PAM type: NNNNGHTT; PAM sequence: GATGGATT
ttttgccatatcttcctcaa

SEQ ID NO: 40178 - DNA, 20 bp, Artificial Sequence
  Description of Artificial Sequence: Synthetic oligonucleotide
  Target: LAMA2; (-) strand; PAM type: NNNNGHTT; PAM sequence: TTCTGTTT
ggcaataggctactcagatt

SEQ ID NO: 40179 - DNA, 20 bp, Artificial Sequence
  Description of Artificial Sequence: Synthetic oligonucleotide
  Target: LAMA2; (-) strand; PAM type: NNNNGHTT; PAM sequence: CTCAGATT
agttaagtggcaataggcta

SEQ ID NO: 40180 - DNA, 20 bp, Artificial Sequence
  Description of Artificial Sequence: Synthetic oligonucleotide
  Target: LAMA2; (-) strand; PAM type: NNNNGHTT; PAM sequence: CTGGGCTT
gtgcaattctatattgactt

SEQ ID NO: 40181 - DNA, 20 bp, Artificial Sequence
  Description of Artificial Sequence: Synthetic oligonucleotide
  Target: LAMA2; (-) strand; PAM type: NNNNGHTT; PAM sequence: CATAGTTT
gccaaatttggcctgtgggt

SEQ ID NO: 40182 - DNA, 20 bp, Artificial Sequence
  Description of Artificial Sequence: Synthetic oligonucleotide
  Target: LAMA2; (-) strand; PAM type: NNNNGHTT; PAM sequence: AATTGATT
cttagtgcctcctgtcatca

SEQ ID NO: 40183 - DNA, 20 bp, Artificial Sequence
  Description of Artificial Sequence: Synthetic oligonucleotide
  Target: LAMA2; (-) strand; PAM type: NNNNGHTT; PAM sequence: TGAGGTTT
gagaagaattggattcttcc

SEQ ID NO: 40184 - DNA, 20 bp, Artificial Sequence
  Description of Artificial Sequence: Synthetic oligonucleotide
  Target: LAMA2; (-) strand; PAM type: NNNNGHTT; PAM sequence: ATTGGATT
tcaggctactaatgagaaga

SEQ ID NO: 40185 - DNA, 20 bp, Artificial Sequence
  Description of Artificial Sequence: Synthetic oligonucleotide
  Target: LAMA2; (-) strand; PAM type: NNNNGHTT; PAM sequence: TCAAGATT
tttgcaggacataggaaaaa

SEQ ID NO: 40186 - DNA, 20 bp, Artificial Sequence
  Description of Artificial Sequence: Synthetic oligonucleotide
  Target: LAMA2; (-) strand; PAM type: NNNNGHTT; PAM sequence: GTAGGCTT
aaagggtcagatagtaaaca

SEQ ID NO: 40187 - DNA, 20 bp, Artificial Sequence
  Description of Artificial Sequence: Synthetic oligonucleotide
  Target: LAMA2; (-) strand; PAM type: NNNNGHTT; PAM sequence: TTTTGTTT
ccacattgttgtgtgtggtc

SEQ ID NO: 40188 - DNA, 20 bp, Artificial Sequence
  Description of Artificial Sequence: Synthetic oligonucleotide
  Target: LAMA2; (-) strand; PAM type: NNNNGHTT; PAM sequence: CAGTGCTT
cccagccctcgcgtgcatgc

SEQ ID NO: 40189 - DNA, 20 bp, Artificial Sequence
  Description of Artificial Sequence: Synthetic oligonucleotide
  Target: LAMA2; (-) strand; PAM type: NNNNGHTT; PAM sequence: TGAGGATT
atgaactgactaaagcacac

SEQ ID NO: 40190 - DNA, 20 bp, Artificial Sequence
  Description of Artificial Sequence: Synthetic oligonucleotide
  Target: LAMA2; (-) strand; PAM type: NNNNGHTT; PAM sequence: AGGAGCTT
aaatcaaataaaatgcctcc

SEQ ID NO: 40191 - DNA, 20 bp, Artificial Sequence
  Description of Artificial Sequence: Synthetic oligonucleotide
  Target: LAMA2; (-) strand; PAM type: NNNNGHTT; PAM sequence: GGAGGATT
tccagtcgattacaaattca

SEQ ID NO: 40192 - DNA, 20 bp, Artificial Sequence
  Description of Artificial Sequence: Synthetic oligonucleotide
  Target: LAMA2; (-) strand; PAM type: NNNNGHTT; PAM sequence: AGTCGATT
aaggcttaaagtatctgtcc

SEQ ID NO: 40193 - DNA, 20 bp, Artificial Sequence
  Description of Artificial Sequence: Synthetic oligonucleotide
  Target: LAMA2; (-) strand; PAM type: NNNNGHTT; PAM sequence: CAAGGCTT
aagaaacatcagttgtcatt

SEQ ID NO: 40194 - DNA, 20 bp, Artificial Sequence
  Description of Artificial Sequence: Synthetic oligonucleotide
  Target: LAMA2; (-) strand; PAM type: NNNNGHTT; PAM sequence: CATGGATT
aaattatgaagcagtatgcc

SEQ ID NO: 40195 - DNA, 20 bp, Artificial Sequence
  Description of Artificial Sequence: Synthetic oligonucleotide
  Target: LAMA2; (-) strand; PAM type: NNNNGHTT; PAM sequence: ACGGGTTT
tgacttcattgttactgctt

SEQ ID NO: 40196 - DNA, 20 bp, Artificial Sequence
  Description of Artificial Sequence: Synthetic oligonucleotide
  Target: LAMA2; (-) strand; PAM type: NNNNGHTT; PAM sequence: TACTGCTT
aaaatacttgacttcattgt

SEQ ID NO: 40197 - DNA, 20 bp, Artificial Sequence
  Description of Artificial Sequence: Synthetic oligonucleotide
  Target: LAMA2; (-) strand; PAM type: NNNNGHTT; PAM sequence: TACTGATT
atccaagaattatatttagc

SEQ ID NO: 40198 - DNA, 20 bp, Artificial Sequence
  Description of Artificial Sequence: Synthetic oligonucleotide
  Target: LAMA2; (-) strand; PAM type: NNNNGHTT; PAM sequence: TTTGGATT
taaatttataaataacctat

SEQ ID NO: 40199 - DNA, 20 bp, Artificial Sequence
  Description of Artificial Sequence: Synthetic oligonucleotide
  Target: LAMA2; (-) strand; PAM type: NNNNGHTT; PAM sequence: TTAAGATT
ttcttctatttaagatacta

SEQ ID NO: 40200 - DNA, 20 bp, Artificial Sequence
  Description of Artificial Sequence: Synthetic oligonucleotide
  Target: LAMA2; (-) strand; PAM type: NNNNGHTT; PAM sequence: TTTAGCTT
ggtgtattttttaatccagc

SEQ ID NO: 40201 - DNA, 20 bp, Artificial Sequence
  Description of Artificial Sequence: Synthetic oligonucleotide
  Target: LAMA2; (-) strand; PAM type: NNNNGHTT; PAM sequence: TCCAGCTT
ctttttggtgtattttttaa

SEQ ID NO: 40202 - DNA, 20 bp, Artificial Sequence
  Description of Artificial Sequence: Synthetic oligonucleotide
  Target: LAMA2; (-) strand; PAM type: NNNNGHTT; PAM sequence: AAATGATT
atggttaaaatacaaagaaa

SEQ ID NO: 40203 - DNA, 20 bp, Artificial Sequence
  Description of Artificial Sequence: Synthetic oligonucleotide
  Target: LAMA2; (-) strand; PAM type: NNNNGHTT; PAM sequence: GACTGTTT
gtgatgattaataattcaag

SEQ ID NO: 40204 - DNA, 20 bp, Artificial Sequence
  Description of Artificial Sequence: Synthetic oligonucleotide
  Target: LAMA2; (-) strand; PAM type: NNNNGHTT; PAM sequence: TGATGATT
ttctggatagttaataaaag

SEQ ID NO: 40205 - DNA, 20 bp, Artificial Sequence
  Description of Artificial Sequence: Synthetic oligonucleotide
  Target: LAMA2; (-) strand; PAM type: NNNNGHTT; PAM sequence: GTTTGCTT
atatgatctttttatttcaa

SEQ ID NO: 40206 - DNA, 20 bp, Artificial Sequence
  Description of Artificial Sequence: Synthetic oligonucleotide
  Target: LAMA2; (-) strand; PAM type: NNNNGHTT; PAM sequence: TCAAGTTT
attaatatgatctttttatt

SEQ ID NO: 40207 - DNA, 20 bp, Artificial Sequence
  Description of Artificial Sequence: Synthetic oligonucleotide
  Target: LAMA2; (-) strand; PAM type: NNNNGHTT; PAM sequence: TTGTGCTT
aatgtactattgtttaattt

SEQ ID NO: 40208 - DNA, 20 bp, Artificial Sequence
  Description of Artificial Sequence: Synthetic oligonucleotide
  Target: LAMA2; (-) strand; PAM type: NNNNGHTT; PAM sequence: TATTGTTT
taccccagattttaatgtac

SEQ ID NO: 40209 - DNA, 20 bp, Artificial Sequence
  Description of Artificial Sequence: Synthetic oligonucleotide
  Target: LAMA2; (-) strand; PAM type: NNNNGHTT; PAM sequence: CCCAGATT
aatcccattatattatctac

SEQ ID NO: 40210 - DNA, 20 bp, Artificial Sequence
  Description of Artificial Sequence: Synthetic oligonucleotide
  Target: LAMA2; (-) strand; PAM type: NNNNGHTT; PAM sequence: TTACGATT
tgtgatagggaaaagatgaa

SEQ ID NO: 40211 - DNA, 20 bp, Artificial Sequence
  Description of Artificial Sequence: Synthetic oligonucleotide
  Target: LAMA2; (-) strand; PAM type: NNNNGHTT; PAM sequence: TGGAGATT
ttaatatcacatgggacaag

SEQ ID NO: 40212 - DNA, 20 bp, Artificial Sequence
  Description of Artificial Sequence: Synthetic oligonucleotide
  Target: LAMA2; (-) strand; PAM type: NNNNGHTT; PAM sequence: GGAGGATT
actggtgtagctttgtaact

SEQ ID NO: 40213 - DNA, 20 bp, Artificial Sequence
  Description of Artificial Sequence: Synthetic oligonucleotide
  Target: LAMA2; (-) strand; PAM type: NNNNGHTT; PAM sequence: TGTAGCTT
aataagaattataaaactgg

SEQ ID NO: 40214 - DNA, 20 bp, Artificial Sequence
  Description of Artificial Sequence: Synthetic oligonucleotide
  Target: LAMA2; (-) strand; PAM type: NNNNGHTT; PAM sequence: CTGTGCTT
cataattataagataattaa

SEQ ID NO: 40215 - DNA, 20 bp, Artificial Sequence
  Description of Artificial Sequence: Synthetic oligonucleotide
  Target: LAMA2; (-) strand; PAM type: NNNNGHTT; PAM sequence: TAATGCTT
tagaagtaagtggaaatcac

SEQ ID NO: 40216 - DNA, 20 bp, Artificial Sequence
  Description of Artificial Sequence: Synthetic oligonucleotide
  Target: LAMA2; (-) strand; PAM type: NNNNGHTT; PAM sequence: GTTAGTTT
tctgtgtaacaattcttaga

SEQ ID NO: 40217 - DNA, 20 bp, Artificial Sequence
  Description of Artificial Sequence: Synthetic oligonucleotide
  Target: LAMA2; (-) strand; PAM type: NNNNGHTT; PAM sequence: ATCTGATT
cctcacttgtgtcttatttt

SEQ ID NO: 40218 - DNA, 20 bp, Artificial Sequence
  Description of Artificial Sequence: Synthetic oligonucleotide
  Target: LAMA2; (-) strand; PAM type: NNNNGHTT; PAM sequence: TTTAGCTT
tttttggtctcttgcactaa

SEQ ID NO: 40219 - DNA, 20 bp, Artificial Sequence
  Description of Artificial Sequence: Synthetic oligonucleotide
  Target: LAMA2; (-) strand; PAM type: NNNNGHTT; PAM sequence: CCATGATT
ccaggccttatgcaattcca

SEQ ID NO: 40220 - DNA, 20 bp, Artificial Sequence
  Description of Artificial Sequence: Synthetic oligonucleotide
  Target: LAMA2; (-) strand; PAM type: NNNNGHTT; PAM sequence: GAAAGTTT
acttattctaagcaatagga

SEQ ID NO: 40221 - DNA, 20 bp, Artificial Sequence
  Description of Artificial Sequence: Synthetic oligonucleotide
  Target: LAMA2; (-) strand; PAM type: NNNNGHTT; PAM sequence: GAGTGTTT
acaatacatgctactaaact

SEQ ID NO: 40222 - DNA, 20 bp, Artificial Sequence
  Description of Artificial Sequence: Synthetic oligonucleotide
  Target: LAMA2; (-) strand; PAM type: NNNNGHTT; PAM sequence: TTCTGTTT
ctgtctctctttcttttctt

SEQ ID NO: 40223 - DNA, 20 bp, Artificial Sequence
  Description of Artificial Sequence: Synthetic oligonucleotide
  Target: LAMA2; (-) strand; PAM type: NNNNGHTT; PAM sequence: TCAGGCTT
tacctgagatcacacaatga

SEQ ID NO: 40224 - DNA, 20 bp, Artificial Sequence
  Description of Artificial Sequence: Synthetic oligonucleotide
  Target: LAMA2; (-) strand; PAM type: NNNNGHTT; PAM sequence: TATAGATT
aactaaatttacagtgagtg

SEQ ID NO: 40225 - DNA, 20 bp, Artificial Sequence
  Description of Artificial Sequence: Synthetic oligonucleotide
  Target: LAMA2; (-) strand; PAM type: NNNNGHTT; PAM sequence: CTTTGTTT
tttcacagttcctgcattgg

SEQ ID NO: 40226 - DNA, 20 bp, Artificial Sequence
  Description of Artificial Sequence: Synthetic oligonucleotide
  Target: LAMA2; (-) strand; PAM type: NNNNGHTT; PAM sequence: ATTGGCTT
agtcctttcacagttcctgc

SEQ ID NO: 40227 - DNA, 20 bp, Artificial Sequence
  Description of Artificial Sequence: Synthetic oligonucleotide
  Target: LAMA2; (-) strand; PAM type: NNNNGHTT; PAM sequence: CACAGATT
aaataggttcctaacgtgga

SEQ ID NO: 40228 - DNA, 20 bp, Artificial Sequence
  Description of Artificial Sequence: Synthetic oligonucleotide
  Target: LAMA2; (-) strand; PAM type: NNNNGHTT; PAM sequence: AATTGCTT
ctggaatttgaaggtgaata

SEQ ID NO: 40229 - DNA, 20 bp, Artificial Sequence
  Description of Artificial Sequence: Synthetic oligonucleotide
  Target: LAMA2; (-) strand; PAM type: NNNNGHTT; PAM sequence: AAATGCTT
gaatgaaagaaccacgtgta

SEQ ID NO: 40230 - DNA, 20 bp, Artificial Sequence
  Description of Artificial Sequence: Synthetic oligonucleotide
  Target: LAMA2; (-) strand; PAM type: NNNNGHTT; PAM sequence: ATAAGATT
ccagcatagaggttaagaaa

SEQ ID NO: 40231 - DNA, 20 bp, Artificial Sequence
  Description of Artificial Sequence: Synthetic oligonucleotide
  Target: LAMA2; (-) strand; PAM type: NNNNGHTT; PAM sequence: CTCTGTTT
ggctaaaccacgtttgcttt

SEQ ID NO: 40232 - DNA, 20 bp, Artificial Sequence
  Description of Artificial Sequence: Synthetic oligonucleotide
  Target: LAMA2; (-) strand; PAM type: NNNNGHTT; PAM sequence: GTTTGCTT
gaatatactggctaaaccac

SEQ ID NO: 40233 - DNA, 20 bp, Artificial Sequence
  Description of Artificial Sequence: Synthetic oligonucleotide
  Target: LAMA2; (-) strand; PAM type: NNNNGHTT; PAM sequence: CCACGTTT
tgttgaatatactggctaaa

SEQ ID NO: 40234 - DNA, 20 bp, Artificial Sequence
  Description of Artificial Sequence: Synthetic oligonucleotide
  Target: LAMA2; (-) strand; PAM type: NNNNGHTT; PAM sequence: GCTCGTTT
tttctcattttgtaatttta

SEQ ID NO: 40235 - DNA, 20 bp, Artificial Sequence
  Description of Artificial Sequence: Synthetic oligonucleotide
  Target: LAMA2; (-) strand; PAM type: NNNNGHTT; PAM sequence: CTGAGATT
gcagaaaataaatgtcatta

SEQ ID NO: 40236 - DNA, 20 bp, Artificial Sequence
  Description of Artificial Sequence: Synthetic oligonucleotide
  Target: LAMA2; (-) strand; PAM type: NNNNGHTT; PAM sequence: CAATGATT
tttaaatcttagaggagtct

SEQ ID NO: 40237 - DNA, 20 bp, Artificial Sequence
  Description of Artificial Sequence: Synthetic oligonucleotide
  Target: LAMA2; (-) strand; PAM type: NNNNGHTT; PAM sequence: TAATGTTT
ggaatctaccataaatgcca

SEQ ID NO: 40238 - DNA, 20 bp, Artificial Sequence
  Description of Artificial Sequence: Synthetic oligonucleotide
  Target: LAMA2; (-) strand; PAM type: NNNNGHTT; PAM sequence: GATGGATT
aatgacagttgaaagaggag

SEQ ID NO: 40239 - DNA, 20 bp, Artificial Sequence
  Description of Artificial Sequence: Synthetic oligonucleotide
  Target: LAMA2; (-) strand; PAM type: NNNNGHTT; PAM sequence: TTAAGTTT
aatggcttctttgttcattt

SEQ ID NO: 40240 - DNA, 20 bp, Artificial Sequence
  Description of Artificial Sequence: Synthetic oligonucleotide
  Target: LAMA2; (-) strand; PAM type: NNNNGHTT; PAM sequence: AATGGCTT
aactttactgttaagcaaat

SEQ ID NO: 40241 - DNA, 20 bp, Artificial Sequence
  Description of Artificial Sequence: Synthetic oligonucleotide
  Target: LAMA2; (-) strand; PAM type: NNNNGHTT; PAM sequence: TTGTGTTT
gatatgaacaaatccaagtt

SEQ ID NO: 40242 - DNA, 20 bp, Artificial Sequence
  Description of Artificial Sequence: Synthetic oligonucleotide
  Target: LAMA2; (-) strand; PAM type: NNNNGHTT; PAM sequence: CCAAGTTT
aaaataggatatgaacaaat

SEQ ID NO: 40243 - DNA, 20 bp, Artificial Sequence
  Description of Artificial Sequence: Synthetic oligonucleotide
  Target: LAMA2; (-) strand; PAM type: NNNNGHTT; PAM sequence: ATGAGTTT
ggttattctgtgttaatgat

SEQ ID NO: 40244 - DNA, 20 bp, Artificial Sequence
  Description of Artificial Sequence: Synthetic oligonucleotide
  Target: LAMA2; (-) strand; PAM type: NNNNGHTT; PAM sequence: CAGTGATT
atcccaaaaaccccactatg

SEQ ID NO: 40245 - DNA, 20 bp, Artificial Sequence
  Description of Artificial Sequence: Synthetic oligonucleotide
  Target: LAMA2; (-) strand; PAM type: NNNNGHTT; PAM sequence: GTATGTTT
tgcaaattggcaagcaaagt

SEQ ID NO: 40246 - DNA, 20 bp, Artificial Sequence
  Description of Artificial Sequence: Synthetic oligonucleotide
  Target: LAMA2; (-) strand; PAM type: NNNNGHTT; PAM sequence: CTAGGCTT
aggaaaattaccacatttag

SEQ ID NO: 40247 - DNA, 20 bp, Artificial Sequence
  Description of Artificial Sequence: Synthetic oligonucleotide
  Target: LAMA2; (-) strand; PAM type: NNNNGHTT; PAM sequence: TCCGGTTT
ataggataaaacttcagact

SEQ ID NO: 40248 - DNA, 20 bp, Artificial Sequence
  Description of Artificial Sequence: Synthetic oligonucleotide
  Target: LAMA2; (-) strand; PAM type: NNNNGHTT; PAM sequence: TGTTGATT
ctggctattaaaaacgacaa

SEQ ID NO: 40249 - DNA, 20 bp, Artificial Sequence
  Description of Artificial Sequence: Synthetic oligonucleotide
  Target: LAMA2; (-) strand; PAM type: NNNNGHTT; PAM sequence: TTTTGATT
tcactgccattattaatcat

SEQ ID NO: 40250 - DNA, 20 bp, Artificial Sequence
  Description of Artificial Sequence: Synthetic oligonucleotide
  Target: LAMA2; (-) strand; PAM type: NNNNGHTT; PAM sequence: TTTTGTTT
acagtgataaccacattcta

SEQ ID NO: 40251 - DNA, 20 bp, Artificial Sequence
  Description of Artificial Sequence: Synthetic oligonucleotide
  Target: LAMA2; (-) strand; PAM type: NNNNGHTT; PAM sequence: TCCTGTTT
tcatttttcagaatagtaag

SEQ ID NO: 40252 - DNA, 20 bp, Artificial Sequence
  Description of Artificial Sequence: Synthetic oligonucleotide
  Target: LAMA2; (-) strand; PAM type: NNNNGHTT; PAM sequence: TGATGTTT
atcagcatctggagatcaac

SEQ ID NO: 40253 - DNA, 20 bp, Artificial Sequence
  Description of Artificial Sequence: Synthetic oligonucleotide
  Target: LAMA2; (-) strand; PAM type: NNNNGHTT; PAM sequence: CACAGCTT
cctggatgtgaacaacatga

SEQ ID NO: 40254 - DNA, 20 bp, Artificial Sequence
  Description of Artificial Sequence: Synthetic oligonucleotide
  Target: LAMA2; (-) strand; PAM type: NNNNGHTT; PAM sequence: TATAGATT
aaggtgaacagaagatgttt

SEQ ID NO: 40255 - DNA, 20 bp, Artificial Sequence
  Description of Artificial Sequence: Synthetic oligonucleotide
  Target: LAMA2; (-) strand; PAM type: NNNNGHTT; PAM sequence: AGATGTTT
gtgcaaacaaggtgaacaga

SEQ ID NO: 40256 - DNA, 20 bp, Artificial Sequence
  Description of Artificial Sequence: Synthetic oligonucleotide
  Target: LAMA2; (-) strand; PAM type: NNNNGHTT; PAM sequence: AACAGCTT
actccttaatcagctagcag

SEQ ID NO: 40257 - DNA, 20 bp, Artificial Sequence
  Description of Artificial Sequence: Synthetic oligonucleotide
  Target: LAMA2; (-) strand; PAM type: NNNNGHTT; PAM sequence: TTTAGTTT
aaattgcaatcaaagtagag

SEQ ID NO: 40258 - DNA, 20 bp, Artificial Sequence
  Description of Artificial Sequence: Synthetic oligonucleotide
  Target: LAMA2; (-) strand; PAM type: NNNNGHTT; PAM sequence: TAGAGTTT
agtagaaattgcaatcaaag

SEQ ID NO: 40259 - DNA, 20 bp, Artificial Sequence
  Description of Artificial Sequence: Synthetic oligonucleotide
  Target: LAMA2; (-) strand; PAM type: NNNNGHTT; PAM sequence: TTTAGTTT
caactttaagattatgtgat

SEQ ID NO: 40260 - DNA, 20 bp, Artificial Sequence
  Description of Artificial Sequence: Synthetic oligonucleotide
  Target: LAMA2; (-) strand; PAM type: NNNNGHTT; PAM sequence: ATGTGATT
tttcttccaactttaagatt

SEQ ID NO: 40261 - DNA, 20 bp, Artificial Sequence
  Description of Artificial Sequence: Synthetic oligonucleotide
  Target: LAMA2; (-) strand; PAM type: NNNNGHTT; PAM sequence: TTAAGATT
tttacttatttcttccaact

SEQ ID NO: 40262 - DNA, 20 bp, Artificial Sequence
  Description of Artificial Sequence: Synthetic oligonucleotide
  Target: LAMA2; (-) strand; PAM type: NNNNGHTT; PAM sequence: GCTAGTTT
acagaaaaagagaaggctag

SEQ ID NO: 40263 - DNA, 20 bp, Artificial Sequence
  Description of Artificial Sequence: Synthetic oligonucleotide
  Target: LAMA2; (-) strand; PAM type: NNNNGHTT; PAM sequence: GTCTGTTT
cttccttgcattaggatgct

SEQ ID NO: 40264 - DNA, 20 bp, Artificial Sequence
  Description of Artificial Sequence: Synthetic oligonucleotide
  Target: LAMA2; (-) strand; PAM type: NNNNGHTT; PAM sequence: CCATGCTT
tctgtagccacttcataaca

SEQ ID NO: 40265 - DNA, 20 bp, Artificial Sequence
  Description of Artificial Sequence: Synthetic oligonucleotide
  Target: LAMA2; (-) strand; PAM type: NNNNGHTT; PAM sequence: CTAGGTTT
aatgtcacacaaattgcaag

SEQ ID NO: 40266 - DNA, 20 bp, Artificial Sequence
  Description of Artificial Sequence: Synthetic oligonucleotide
  Target: LAMA2; (-) strand; PAM type: NNNNGHTT; PAM sequence: TGAGGTTT
cattttacagaggatgaaaa

SEQ ID NO: 40267 - DNA, 20 bp, Artificial Sequence
  Description of Artificial Sequence: Synthetic oligonucleotide
  Target: LAMA2; (-) strand; PAM type: NNNNGHTT; PAM sequence: TTATGCTT
tagaatttattgagcaccta

SEQ ID NO: 40268 - DNA, 20 bp, Artificial Sequence
  Description of Artificial Sequence: Synthetic oligonucleotide
  Target: LAMA2; (-) strand; PAM type: NNNNGHTT; PAM sequence: AGTGGTTT
aaatgtaaggtggccataaa

SEQ ID NO: 40269 - DNA, 20 bp, Artificial Sequence
  Description of Artificial Sequence: Synthetic oligonucleotide
  Target: LAMA2; (-) strand; PAM type: NNNNGHTT; PAM sequence: AAGGGCTT
atctataaataatgcatgtg

SEQ ID NO: 40270 - DNA, 20 bp, Artificial Sequence
  Description of Artificial Sequence: Synthetic oligonucleotide
  Target: LAMA2; (-) strand; PAM type: NNNNGHTT; PAM sequence: GAGTGTTT
gagaaaaatagtcacaacca

SEQ ID NO: 40271 - DNA, 20 bp, Artificial Sequence
  Description of Artificial Sequence: Synthetic oligonucleotide
  Target: LAMA2; (-) strand; PAM type: NNNNGHTT; PAM sequence: AATAGTTT
actataaataataatgggat

SEQ ID NO: 40272 - DNA, 20 bp, Artificial Sequence
  Description of Artificial Sequence: Synthetic oligonucleotide
  Target: LAMA2; (-) strand; PAM type: NNNNGHTT; PAM sequence: ATGTGTTT
tatatattaaatattgatat

SEQ ID NO: 40273 - DNA, 20 bp, Artificial Sequence
  Description of Artificial Sequence: Synthetic oligonucleotide
  Target: LAMA2; (-) strand; PAM type: NNNNGHTT; PAM sequence: ATGTGTTT
ttatatatatgttttatgat

SEQ ID NO: 40274 - DNA, 20 bp, Artificial Sequence
  Description of Artificial Sequence: Synthetic oligonucleotide
  Target: LAMA2; (-) strand; PAM type: NNNNGHTT; PAM sequence: ATATGTTT
acgatatttatgttttatat

SEQ ID NO: 40275 - DNA, 20 bp, Artificial Sequence
  Description of Artificial Sequence: Synthetic oligonucleotide
  Target: LAMA2; (-) strand; PAM type: NNNNGHTT; PAM sequence: TTATGTTT
gacataccaagtaacgatat

SEQ ID NO: 40276 - DNA, 20 bp, Artificial Sequence
  Description of Artificial Sequence: Synthetic oligonucleotide
  Target: LAMA2; (-) strand; PAM type: NNNNGHTT; PAM sequence: ATTTGATT
aaatatcttctcaaataaaa

SEQ ID NO: 40277 - DNA, 20 bp, Artificial Sequence
  Description of Artificial Sequence: Synthetic oligonucleotide
  Target: LAMA2; (-) strand; PAM type: NNNNGHTT; PAM sequence: TAGGGCTT
cttttacattagcatatatt

SEQ ID NO: 40278 - DNA, 20 bp, Artificial Sequence
  Description of Artificial Sequence: Synthetic oligonucleotide
  Target: LAMA2; (-) strand; PAM type: NNNNGHTT; PAM sequence: ACTGGCTT
attccccatgcataataact

SEQ ID NO: 40279 - DNA, 20 bp, Artificial Sequence
  Description of Artificial Sequence: Synthetic oligonucleotide
  Target: LAMA2; (-) strand; PAM type: NNNNGHTT; PAM sequence: CCAGGATT
cacaaaatactgcatttcta

SEQ ID NO: 40280 - DNA, 20 bp, Artificial Sequence
  Description of Artificial Sequence: Synthetic oligonucleotide
  Target: LAMA2; (-) strand; PAM type: NNNNGHTT; PAM sequence: TTCAGATT
ttaacaaacacagtactaaa

SEQ ID NO: 40281 - DNA, 20 bp, Artificial Sequence
  Description of Artificial Sequence: Synthetic oligonucleotide
  Target: LAMA2; (-) strand; PAM type: NNNNGHTT; PAM sequence: CGAGGCTT
tttacatgactaaatgtttc

SEQ ID NO: 40282 - DNA, 20 bp, Artificial Sequence
  Description of Artificial Sequence: Synthetic oligonucleotide
  Target: LAMA2; (-) strand; PAM type: NNNNGHTT; PAM sequence: AAATGTTT
tgattatattttacatgact

SEQ ID NO: 40283 - DNA, 20 bp, Artificial Sequence
  Description of Artificial Sequence: Synthetic oligonucleotide
  Target: LAMA2; (-) strand; PAM type: NNNNGHTT; PAM sequence: CCATGATT
caaaagcaaatatttcaaga

SEQ ID NO: 40284 - DNA, 20 bp, Artificial Sequence
  Description of Artificial Sequence: Synthetic oligonucleotide
  Target: LAMA2; (-) strand; PAM type: NNNNGHTT; PAM sequence: AATGGTTT
ggggaaagtgccctttacat

SEQ ID NO: 40285 - DNA, 20 bp, Artificial Sequence
  Description of Artificial Sequence: Synthetic oligonucleotide
  Target: LAMA2; (-) strand; PAM type: NNNNGHTT; PAM sequence: CAAAGCTT
gacagccatggggatttttt

SEQ ID NO: 40286 - DNA, 20 bp, Artificial Sequence
  Description of Artificial Sequence: Synthetic oligonucleotide
  Target: LAMA2; (-) strand; PAM type: NNNNGHTT; PAM sequence: TGGGGATT
acttatgaatatgacagcca

SEQ ID NO: 40287 - DNA, 20 bp, Artificial Sequence
  Description of Artificial Sequence: Synthetic oligonucleotide
  Target: LAMA2; (-) strand; PAM type: NNNNGHTT; PAM sequence: GTAAGTTT
cacatttccataagtgaaag

SEQ ID NO: 40288 - DNA, 20 bp, Artificial Sequence
  Description of Artificial Sequence: Synthetic oligonucleotide
  Target: LAMA2; (-) strand; PAM type: NNNNGHTT; PAM sequence: ATTTGCTT
ccatgtcttatggtatctgt

SEQ ID NO: 40289 - DNA, 20 bp, Artificial Sequence
  Description of Artificial Sequence: Synthetic oligonucleotide
  Target: LAMA2; (-) strand; PAM type: NNNNGHTT; PAM sequence: AAAGGTTT
cattttatgtttctgtgtcc

SEQ ID NO: 40290 - DNA, 20 bp, Artificial Sequence
  Description of Artificial Sequence: Synthetic oligonucleotide
  Target: LAMA2; (-) strand; PAM type: NNNNGHTT; PAM sequence: TTATGTTT
aagggctcatacattccatt

SEQ ID NO: 40291 - DNA, 20 bp, Artificial Sequence
  Description of Artificial Sequence: Synthetic oligonucleotide
  Target: LAMA2; (-) strand; PAM type: NNNNGHTT; PAM sequence: ATCTGTTT
atttattctatcccctgccc

SEQ ID NO: 40292 - DNA, 20 bp, Artificial Sequence
  Description of Artificial Sequence: Synthetic oligonucleotide
  Target: LAMA2; (-) strand; PAM type: NNNNGHTT; PAM sequence: TACTGATT
atgccaagaggcatgatgaa

SEQ ID NO: 40293 - DNA, 20 bp, Artificial Sequence
  Description of Artificial Sequence: Synthetic oligonucleotide
  Target: LAMA2; (-) strand; PAM type: NNNNGHTT; PAM sequence: CTCAGTTT
aggaaagtacctatcgtttt

SEQ ID NO: 40294 - DNA, 20 bp, Artificial Sequence
  Description of Artificial Sequence: Synthetic oligonucleotide
  Target: LAMA2; (-) strand; PAM type: NNNNGHTT; PAM sequence: TATCGTTT
aaatttccaaggaaagtacc

SEQ ID NO: 40295 - DNA, 20 bp, Artificial Sequence
  Description of Artificial Sequence: Synthetic oligonucleotide
  Target: LAMA2; (-) strand; PAM type: NNNNGHTT; PAM sequence: ATCAGTTT
tatttccaagaaggaattga

SEQ ID NO: 40296 - DNA, 20 bp, Artificial Sequence
  Description of Artificial Sequence: Synthetic oligonucleotide
  Target: LAMA2; (-) strand; PAM type: NNNNGHTT; PAM sequence: CCATGCTT
aatgataataggatgtttca

SEQ ID NO: 40297 - DNA, 20 bp, Artificial Sequence
  Description of Artificial Sequence: Synthetic oligonucleotide
  Target: LAMA2; (-) strand; PAM type: NNNNGHTT; PAM sequence: GGATGTTT
gatacttggtaatgataata

SEQ ID NO: 40298 - DNA, 20 bp, Artificial Sequence
  Description of Artificial Sequence: Synthetic oligonucleotide
  Target: LAMA2; (-) strand; PAM type: NNNNGHTT; PAM sequence: CATTGTTT
ctcactgagcccaagttcat

SEQ ID NO: 40299 - DNA, 20 bp, Artificial Sequence
  Description of Artificial Sequence: Synthetic oligonucleotide
  Target: LAMA2; (-) strand; PAM type: NNNNGHTT; PAM sequence: ATGTGATT
cactttttcaagttttgcac

SEQ ID NO: 40300 - DNA, 20 bp, Artificial Sequence
  Description of Artificial Sequence: Synthetic oligonucleotide
  Target: LAMA2; (-) strand; PAM type: NNNNGHTT; PAM sequence: TCAAGTTT
tcgataactgacacactttt

SEQ ID NO: 40301 - DNA, 20 bp, Artificial Sequence
  Description of Artificial Sequence: Synthetic oligonucleotide
  Target: LAMA2; (-) strand; PAM type: NNNNGHTT; PAM sequence: TGTTGTTT
atcatgagagtgtatgcact

SEQ ID NO: 40302 - DNA, 20 bp, Artificial Sequence
  Description of Artificial Sequence: Synthetic oligonucleotide
  Target: LAMA2; (-) strand; PAM type: NNNNGHTT; PAM sequence: TTGGGCTT
agggcagttgaggccccaat

SEQ ID NO: 40303 - DNA, 20 bp, Artificial Sequence
  Description of Artificial Sequence: Synthetic oligonucleotide
  Target: LAMA2; (-) strand; PAM type: NNNNGHTT; PAM sequence: TTCTGCTT
aacatattgaaatttgcact

SEQ ID NO: 40304 - DNA, 20 bp, Artificial Sequence
  Description of Artificial Sequence: Synthetic oligonucleotide
  Target: LAMA2; (-) strand; PAM type: NNNNGHTT; PAM sequence: GTTAGCTT
tcccttccccttgaatctgg

SEQ ID NO: 40305 - DNA, 20 bp, Artificial Sequence
  Description of Artificial Sequence: Synthetic oligonucleotide
  Target: LAMA2; (-) strand; PAM type: NNNNGHTT; PAM sequence: AGAAGTTT
tgggcagatcacttgaggtg

SEQ ID NO: 40306 - DNA, 20 bp, Artificial Sequence
  Description of Artificial Sequence: Synthetic oligonucleotide
  Target: LAMA2; (-) strand; PAM type: NNNNGHTT; PAM sequence: GGAGGCTT
cctgtaatccaagcagtatg

SEQ ID NO: 40307 - DNA, 20 bp, Artificial Sequence
  Description of Artificial Sequence: Synthetic oligonucleotide
  Target: LAMA2; (-) strand; PAM type: NNNNGHTT; PAM sequence: TTCAGTTT
cagatacctgcctgaaggat

SEQ ID NO: 40308 - DNA, 20 bp, Artificial Sequence
  Description of Artificial Sequence: Synthetic oligonucleotide
  Target: LAMA2; (-) strand; PAM type: NNNNGHTT; PAM sequence: GAAGGATT
gactattcagatacctgcct

SEQ ID NO: 40309 - DNA, 20 bp, Artificial Sequence
  Description of Artificial Sequence: Synthetic oligonucleotide
  Target: LAMA2; (-) strand; PAM type: NNNNGHTT; PAM sequence: TTGTGATT
gagacagaaagagaactatc

SEQ ID NO: 40310 - DNA, 20 bp, Artificial Sequence
  Description of Artificial Sequence: Synthetic oligonucleotide
  Target: LAMA2; (-) strand; PAM type: NNNNGHTT; PAM sequence: AATGGTTT
caggagaatacattaaaaac

SEQ ID NO: 40311 - DNA, 20 bp, Artificial Sequence
  Description of Artificial Sequence: Synthetic oligonucleotide
  Target: LAMA2; (-) strand; PAM type: NNNNGHTT; PAM sequence: TAATGTTT
acaaagagaatggcaagggt

SEQ ID NO: 40312 - DNA, 20 bp, Artificial Sequence
  Description of Artificial Sequence: Synthetic oligonucleotide
  Target: LAMA2; (-) strand; PAM type: NNNNGHTT; PAM sequence: GCCTGTTT
tttgctttcttaacacttat

SEQ ID NO: 40313 - DNA, 20 bp, Artificial Sequence
  Description of Artificial Sequence: Synthetic oligonucleotide
  Target: LAMA2; (-) strand; PAM type: NNNNGHTT; PAM sequence: CTTTGCTT
gccagtcactactgcatttc

SEQ ID NO: 40314 - DNA, 20 bp, Artificial Sequence
  Description of Artificial Sequence: Synthetic oligonucleotide
  Target: LAMA2; (-) strand; PAM type: NNNNGHTT; PAM sequence: TGATGATT
tttttcagagagcaagtccc

SEQ ID NO: 40315 - DNA, 20 bp, Artificial Sequence
  Description of Artificial Sequence: Synthetic oligonucleotide
  Target: LAMA2; (-) strand; PAM type: NNNNGHTT; PAM sequence: TTTTGCTT
caaggatttggaagaggtcc

SEQ ID NO: 40316 - DNA, 20 bp, Artificial Sequence
  Description of Artificial Sequence: Synthetic oligonucleotide
  Target: LAMA2; (-) strand; PAM type: NNNNGHTT; PAM sequence: CAAGGATT
atgctcaatcttcaagggag

SEQ ID NO: 40317 - DNA, 20 bp, Artificial Sequence
  Description of Artificial Sequence: Synthetic oligonucleotide
  Target: LAMA2; (-) strand; PAM type: NNNNGHTT; PAM sequence: CTCAGCTT
gcctcaagtgatcctcccac

SEQ ID NO: 40318 - DNA, 20 bp, Artificial Sequence
  Description of Artificial Sequence: Synthetic oligonucleotide
  Target: LAMA2; (-) strand; PAM type: NNNNGHTT; PAM sequence: GCTAGTTT
ggcacatgccaccacatcca

SEQ ID NO: 40319 - DNA, 20 bp, Artificial Sequence
  Description of Artificial Sequence: Synthetic oligonucleotide
  Target: LAMA2; (-) strand; PAM type: NNNNGHTT; PAM sequence: ATATGATT
tccctcctcaccaccacaga

SEQ ID NO: 40320 - DNA, 20 bp, Artificial Sequence
  Description of Artificial Sequence: Synthetic oligonucleotide
  Target: LAMA2; (-) strand; PAM type: NNNNGHTT; PAM sequence: GGAAGCTT
caacagttttggcaccacct

SEQ ID NO: 40321 - DNA, 20 bp, Artificial Sequence
  Description of Artificial Sequence: Synthetic oligonucleotide
  Target: LAMA2; (-) strand; PAM type: NNNNGHTT; PAM sequence: AACAGTTT
ctttgagtagcaatcagacc

SEQ ID NO: 40322 - DNA, 20 bp, Artificial Sequence
  Description of Artificial Sequence: Synthetic oligonucleotide
  Target: LAMA2; (-) strand; PAM type: NNNNGHTT; PAM sequence: ATGTGCTT
ctcttagtctctgactgaga

SEQ ID NO: 40323 - DNA, 20 bp, Artificial Sequence
  Description of Artificial Sequence: Synthetic oligonucleotide
  Target: LAMA2; (-) strand; PAM type: NNNNGHTT; PAM sequence: CCTGGTTT
atcaggaggtgatttgatca

SEQ ID NO: 40324 - DNA, 20 bp, Artificial Sequence
  Description of Artificial Sequence: Synthetic oligonucleotide
  Target: LAMA2; (-) strand; PAM type: NNNNGHTT; PAM sequence: AGGTGATT
cctagtatttctgaatcagg

SEQ ID NO: 40325 - DNA, 20 bp, Artificial Sequence
  Description of Artificial Sequence: Synthetic oligonucleotide
  Target: LAMA2; (-) strand; PAM type: NNNNGHTT; PAM sequence: TCAAGCTT
caagatccacagtctggttc

SEQ ID NO: 40326 - DNA, 20 bp, Artificial Sequence
  Description of Artificial Sequence: Synthetic oligonucleotide
  Target: LAMA2; (-) strand; PAM type: NNNNGHTT; PAM sequence: TTTGGCTT
gaaaccaagtaaaagattat

SEQ ID NO: 40327 - DNA, 20 bp, Artificial Sequence
  Description of Artificial Sequence: Synthetic oligonucleotide
  Target: LAMA2; (-) strand; PAM type: NNNNGHTT; PAM sequence: AAAAGATT
gcactgcatggaaaccaagt

SEQ ID NO: 40328 - DNA, 20 bp, Artificial Sequence
  Description of Artificial Sequence: Synthetic oligonucleotide
  Target: LAMA2; (-) strand; PAM type: NNNNGHTT; PAM sequence: AGAGGCTT
ttcacaagctgaatgaacaa

SEQ ID NO: 40329 - DNA, 20 bp, Artificial Sequence
  Description of Artificial Sequence: Synthetic oligonucleotide
  Target: LAMA2; (-) strand; PAM type: NNNNGHTT; PAM sequence: TGATGCTT
gcaggggctttgcaagctcc

SEQ ID NO: 40330 - DNA, 20 bp, Artificial Sequence
  Description of Artificial Sequence: Synthetic oligonucleotide
  Target: LAMA2; (-) strand; PAM type: NNNNGHTT; PAM sequence: AGGGGCTT
aactgtagagcgtcacctgc

SEQ ID NO: 40331 - DNA, 20 bp, Artificial Sequence
  Description of Artificial Sequence: Synthetic oligonucleotide
  Target: LAMA2; (-) strand; PAM type: NNNNGHTT; PAM sequence: TGCAGCTT
agcttcttgcaggtgacacc

SEQ ID NO: 40332 - DNA, 20 bp, Artificial Sequence
  Description of Artificial Sequence: Synthetic oligonucleotide
  Target: LAMA2; (-) strand; PAM type: NNNNGHTT; PAM sequence: ATCAGCTT
cctggcagggcttttaataa

SEQ ID NO: 40333 - DNA, 20 bp, Artificial Sequence
  Description of Artificial Sequence: Synthetic oligonucleotide
  Target: LAMA2; (-) strand; PAM type: NNNNGHTT; PAM sequence: CAGGGCTT
cagggattaaactgccctgg

SEQ ID NO: 40334 - DNA, 20 bp, Artificial Sequence
  Description of Artificial Sequence: Synthetic oligonucleotide
  Target: LAMA2; (-) strand; PAM type: NNNNGHTT; PAM sequence: CAGGGATT
tgagttacaatatcacttca

SEQ ID NO: 40335 - DNA, 20 bp, Artificial Sequence
  Description of Artificial Sequence: Synthetic oligonucleotide
  Target: LAMA2; (-) strand; PAM type: NNNNGHTT; PAM sequence: GAGTGATT
acaaagagaaggaggacgga

SEQ ID NO: 40336 - DNA, 20 bp, Artificial Sequence
  Description of Artificial Sequence: Synthetic oligonucleotide
  Target: LAMA2; (-) strand; PAM type: NNNNGHTT; PAM sequence: TGGTGCTT
atggagagaaaaccattaac

SEQ ID NO: 40337 - DNA, 20 bp, Artificial Sequence
  Description of Artificial Sequence: Synthetic oligonucleotide
  Target: LAMA2; (-) strand; PAM type: NNNNGHTT; PAM sequence: AGCTGCTT
ctctaaacagcagtcccctg

SEQ ID NO: 40338 - DNA, 20 bp, Artificial Sequence
  Description of Artificial Sequence: Synthetic oligonucleotide
  Target: LAMA2; (-) strand; PAM type: NNNNGHTT; PAM sequence: TTTAGTTT
atttaaaaaacatgtatatt

SEQ ID NO: 40339 - DNA, 20 bp, Artificial Sequence
  Description of Artificial Sequence: Synthetic oligonucleotide
  Target: LAMA2; (-) strand; PAM type: NNNNGHTT; PAM sequence: AGCAGATT
taacatatattgaatctttt

SEQ ID NO: 40340 - DNA, 20 bp, Artificial Sequence
  Description of Artificial Sequence: Synthetic oligonucleotide
  Target: LAMA2; (-) strand; PAM type: NNNNGHTT; PAM sequence: AATGGATT
gtagaattggtagagagaca

SEQ ID NO: 40341 - DNA, 20 bp, Artificial Sequence
  Description of Artificial Sequence: Synthetic oligonucleotide
  Target: LAMA2; (-) strand; PAM type: NNNNGHTT; PAM sequence: CCGAGCTT
cctcttttctttacaaattg

SEQ ID NO: 40342 - DNA, 20 bp, Artificial Sequence
  Description of Artificial Sequence: Synthetic oligonucleotide
  Target: LAMA2; (-) strand; PAM type: NNNNGHTT; PAM sequence: CCATGCTT
gttccctgaggccaccccag

SEQ ID NO: 40343 - DNA, 20 bp, Artificial Sequence
  Description of Artificial Sequence: Synthetic oligonucleotide
  Target: LAMA2; (-) strand; PAM type: NNNNGHTT; PAM sequence: TCCAGCTT
gcctgtgtgaagatgcctgc

SEQ ID NO: 40344 - DNA, 20 bp, Artificial Sequence
  Description of Artificial Sequence: Synthetic oligonucleotide
  Target: LAMA2; (-) strand; PAM type: NNNNGHTT; PAM sequence: AATGGCTT
tgaatcactggagtggtttt

SEQ ID NO: 40345 - DNA, 20 bp, Artificial Sequence
  Description of Artificial Sequence: Synthetic oligonucleotide
  Target: LAMA2; (-) strand; PAM type: NNNNGHTT; PAM sequence: AGTGGTTT
gggaggtattgaatcactgg

SEQ ID NO: 40346 - DNA, 20 bp, Artificial Sequence
  Description of Artificial Sequence: Synthetic oligonucleotide
  Target: LAMA2; (-) strand; PAM type: NNNNGHTT; PAM sequence: TATGGTTT
aatgctaatattctaccaga

SEQ ID NO: 40347 - DNA, 20 bp, Artificial Sequence
  Description of Artificial Sequence: Synthetic oligonucleotide
  Target: LAMA2; (-) strand; PAM type: NNNNGHTT; PAM sequence: TGATGATT
agtctcacaaatccctactt

SEQ ID NO: 40348 - DNA, 20 bp, Artificial Sequence
  Description of Artificial Sequence: Synthetic oligonucleotide
  Target: LAMA2; (-) strand; PAM type: NNNNGHTT; PAM sequence: CCATGATT
tcccttcagtctattaccac

SEQ ID NO: 40349 - DNA, 20 bp, Artificial Sequence
  Description of Artificial Sequence: Synthetic oligonucleotide
  Target: LAMA2; (-) strand; PAM type: NNNNGHTT; PAM sequence: TAGTGTTT
aaaaataacttttctttcta

SEQ ID NO: 40350 - DNA, 20 bp, Artificial Sequence
  Description of Artificial Sequence: Synthetic oligonucleotide
  Target: LAMA2; (-) strand; PAM type: NNNNGHTT; PAM sequence: CCAAGATT
gaggcggaggttgcagtgag

SEQ ID NO: 40351 - DNA, 20 bp, Artificial Sequence
  Description of Artificial Sequence: Synthetic oligonucleotide
  Target: LAMA2; (-) strand; PAM type: NNNNGHTT; PAM sequence: TTTAGCTT
attcaaaaagtatataaatt

SEQ ID NO: 40352 - DNA, 20 bp, Artificial Sequence
  Description of Artificial Sequence: Synthetic oligonucleotide
  Target: LAMA2; (-) strand; PAM type: NNNNGHTT; PAM sequence: ACATGCTT
gtcatagtaatttgacctcc

SEQ ID NO: 40353 - DNA, 20 bp, Artificial Sequence
  Description of Artificial Sequence: Synthetic oligonucleotide
  Target: LAMA2; (-) strand; PAM type: NNNNGHTT; PAM sequence: ATTAGATT
gtctaaatgtgtggtgctcc

SEQ ID NO: 40354 - DNA, 20 bp, Artificial Sequence
  Description of Artificial Sequence: Synthetic oligonucleotide
  Target: LAMA2; (-) strand; PAM type: NNNNGHTT; PAM sequence: TGAAGATT
aaagtgtattgcacaagtat

SEQ ID NO: 40355 - DNA, 20 bp, Artificial Sequence
  Description of Artificial Sequence: Synthetic oligonucleotide
  Target: LAMA2; (-) strand; PAM type: NNNNGHTT; PAM sequence: AATAGATT
gggaccaaagaggaggagca

SEQ ID NO: 40356 - DNA, 20 bp, Artificial Sequence
  Description of Artificial Sequence: Synthetic oligonucleotide
  Target: LAMA2; (-) strand; PAM type: NNNNGHTT; PAM sequence: CCTTGCTT
tctgtcaccttgtccctggc

SEQ ID NO: 40357 - DNA, 20 bp, Artificial Sequence
  Description of Artificial Sequence: Synthetic oligonucleotide
  Target: LAMA2; (-) strand; PAM type: NNNNGHTT; PAM sequence: TGAAGCTT
attacagccaataccgcttg

SEQ ID NO: 40358 - DNA, 20 bp, Artificial Sequence
  Description of Artificial Sequence: Synthetic oligonucleotide
  Target: LAMA2; (-) strand; PAM type: NNNNGHTT; PAM sequence: TACCGCTT
catttaccaattacagccaa

SEQ ID NO: 40359 - DNA, 20 bp, Artificial Sequence
  Description of Artificial Sequence: Synthetic oligonucleotide
  Target: LAMA2; (-) strand; PAM type: NNNNGHTT; PAM sequence: CCTTGATT
atttccctaacagttgtgtc

SEQ ID NO: 40360 - DNA, 20 bp, Artificial Sequence
  Description of Artificial Sequence: Synthetic oligonucleotide
  Target: LAMA2; (-) strand; PAM type: NNNNGHTT; PAM sequence: TTGAGTTT
aaatctgtatattatagttc

SEQ ID NO: 40361 - DNA, 20 bp, Artificial Sequence
  Description of Artificial Sequence: Synthetic oligonucleotide
  Target: LAMA2; (-) strand; PAM type: NNNNGHTT; PAM sequence: AACTGATT
atatttaagtgacataataa

SEQ ID NO: 40362 - DNA, 20 bp, Artificial Sequence
  Description of Artificial Sequence: Synthetic oligonucleotide
  Target: LAMA2; (-) strand; PAM type: NNNNGHTT; PAM sequence: TTATGTTT
taaagagtttatacctgatt

SEQ ID NO: 40363 - DNA, 20 bp, Artificial Sequence
  Description of Artificial Sequence: Synthetic oligonucleotide
  Target: LAMA2; (-) strand; PAM type: NNNNGHTT; PAM sequence: ACCTGATT
tataagtataaagagtttat

SEQ ID NO: 40364 - DNA, 20 bp, Artificial Sequence
  Description of Artificial Sequence: Synthetic oligonucleotide
  Target: LAMA2; (-) strand; PAM type: NNNNGHTT; PAM sequence: AAGAGTTT
tttatagagctataagtata

SEQ ID NO: 40365 - DNA, 20 bp, Artificial Sequence
  Description of Artificial Sequence: Synthetic oligonucleotide
  Target: LAMA2; (-) strand; PAM type: NNNNGHTT; PAM sequence: ATTTGTTT
tattggttttgtaaggatta

SEQ ID NO: 40366 - DNA, 20 bp, Artificial Sequence
  Description of Artificial Sequence: Synthetic oligonucleotide
  Target: LAMA2; (-) strand; PAM type: NNNNGHTT; PAM sequence: TAAGGATT
tttgaattttattggttttg

SEQ ID NO: 40367 - DNA, 20 bp, Artificial Sequence
  Description of Artificial Sequence: Synthetic oligonucleotide
  Target: LAMA2; (-) strand; PAM type: NNNNGHTT; PAM sequence: ATTGGTTT
atgtttttaatttgaatttt

SEQ ID NO: 40368 - DNA, 20 bp, Artificial Sequence
  Description of Artificial Sequence: Synthetic oligonucleotide
  Target: LAMA2; (-) strand; PAM type: NNNNGHTT; PAM sequence: TAATGTTT
aaaatcatgttactttatat

SEQ ID NO: 40369 - DNA, 20 bp, Artificial Sequence
  Description of Artificial Sequence: Synthetic oligonucleotide
  Target: LAMA2; (-) strand; PAM type: NNNNGHTT; PAM sequence: GTGTGTTT
ctcagtgcctacatttgcct

SEQ ID NO: 40370 - DNA, 20 bp, Artificial Sequence
  Description of Artificial Sequence: Synthetic oligonucleotide
  Target: LAMA2; (-) strand; PAM type: NNNNGHTT; PAM sequence: ATGTGTTT
tttagtacaagattctaatc

SEQ ID NO: 40371 - DNA, 20 bp, Artificial Sequence
  Description of Artificial Sequence: Synthetic oligonucleotide
  Target: LAMA2; (-) strand; PAM type: NNNNGHTT; PAM sequence: ACAAGATT
actagttctagctctttagt

SEQ ID NO: 40372 - DNA, 20 bp, Artificial Sequence
  Description of Artificial Sequence: Synthetic oligonucleotide
  Target: LAMA2; (-) strand; PAM type: NNNNGHTT; PAM sequence: TGGTGCTT
tagaacagtgtttatcaaac

SEQ ID NO: 40373 - DNA, 20 bp, Artificial Sequence
  Description of Artificial Sequence: Synthetic oligonucleotide
  Target: LAMA2; (-) strand; PAM type: NNNNGHTT; PAM sequence: CAGTGTTT
gctttaaccacaatttagaa

SEQ ID NO: 40374 - DNA, 20 bp, Artificial Sequence
  Description of Artificial Sequence: Synthetic oligonucleotide
  Target: LAMA2; (-) strand; PAM type: NNNNGHTT; PAM sequence: AAAAGCTT
ctcctacctcgttaactacc

SEQ ID NO: 40375 - DNA, 20 bp, Artificial Sequence
  Description of Artificial Sequence: Synthetic oligonucleotide
  Target: LAMA2; (-) strand; PAM type: NNNNGHTT; PAM sequence: TAATGTTT
tgaaacaaccccaatttctt

SEQ ID NO: 40376 - DNA, 20 bp, Artificial Sequence
  Description of Artificial Sequence: Synthetic oligonucleotide
  Target: LAMA2; (-) strand; PAM type: NNNNGHTT; PAM sequence: TAATGATT
ctaattgcttgattattgtt

SEQ ID NO: 40377 - DNA, 20 bp, Artificial Sequence
  Description of Artificial Sequence: Synthetic oligonucleotide
  Target: LAMA2; (-) strand; PAM type: NNNNGHTT; PAM sequence: TATTGTTT
attcttgctaattgcttgat

SEQ ID NO: 40378 - DNA, 20 bp, Artificial Sequence
  Description of Artificial Sequence: Synthetic oligonucleotide
  Target: LAMA2; (-) strand; PAM type: NNNNGHTT; PAM sequence: GCTTGATT
attatgtattcttgctaatt

SEQ ID NO: 40379 - DNA, 20 bp, Artificial Sequence
  Description of Artificial Sequence: Synthetic oligonucleotide
  Target: LAMA2; (-) strand; PAM type: NNNNGHTT; PAM sequence: AATTGCTT
ggtcattatgtattcttgct

SEQ ID NO: 40380 - DNA, 20 bp, Artificial Sequence
  Description of Artificial Sequence: Synthetic oligonucleotide
  Target: LAMA2; (-) strand; PAM type: NNNNGHTT; PAM sequence: GAATGTTT
tctgtgcgctaatgtacttt

SEQ ID NO: 40381 - DNA, 20 bp, Artificial Sequence
  Description of Artificial Sequence: Synthetic oligonucleotide
  Target: LAMA2; (-) strand; PAM type: NNNNGHTT; PAM sequence: TACTGATT
tctctggttaccctgaatct

SEQ ID NO: 40382 - DNA, 20 bp, Artificial Sequence
  Description of Artificial Sequence: Synthetic oligonucleotide
  Target: LAMA2; (-) strand; PAM type: NNNNGHTT; PAM sequence: ATTGGTTT
ttattcttgttatcatcatt

SEQ ID NO: 40383 - DNA, 20 bp, Artificial Sequence
  Description of Artificial Sequence: Synthetic oligonucleotide
  Target: LAMA2; (-) strand; PAM type: NNNNGHTT; PAM sequence: CCTAGCTT
tttaagacttcagtcaattg

SEQ ID NO: 40384 - DNA, 20 bp, Artificial Sequence
  Description of Artificial Sequence: Synthetic oligonucleotide
  Target: LAMA2; (-) strand; PAM type: NNNNGHTT; PAM sequence: TGGAGTTT
acaacttctttcctatttct

SEQ ID NO: 40385 - DNA, 20 bp, Artificial Sequence
  Description of Artificial Sequence: Synthetic oligonucleotide
  Target: LAMA2; (-) strand; PAM type: NNNNGHTT; PAM sequence: ATCAGTTT
tttctattgtttataagcta

SEQ ID NO: 40386 - DNA, 20 bp, Artificial Sequence
  Description of Artificial Sequence: Synthetic oligonucleotide
  Target: LAMA2; (-) strand; PAM type: NNNNGHTT; PAM sequence: TATTGTTT
aactgtgagagatatatttc

SEQ ID NO: 40387 - DNA, 20 bp, Artificial Sequence
  Description of Artificial Sequence: Synthetic oligonucleotide
  Target: LAMA2; (-) strand; PAM type: NNNNGHTT; PAM sequence: TTGGGCTT
acattgctggtaccttgatc

SEQ ID NO: 40388 - DNA, 20 bp, Artificial Sequence
  Description of Artificial Sequence: Synthetic oligonucleotide
  Target: LAMA2; (-) strand; PAM type: NNNNGHTT; PAM sequence: TTGGGATT
tgagaatgtagccttcatga

SEQ ID NO: 40389 - DNA, 20 bp, Artificial Sequence
  Description of Artificial Sequence: Synthetic oligonucleotide
  Target: LAMA2; (-) strand; PAM type: NNNNGHTT; PAM sequence: TCATGATT
gagtcatgagaatgtagcct

SEQ ID NO: 40390 - DNA, 20 bp, Artificial Sequence
  Description of Artificial Sequence: Synthetic oligonucleotide
  Target: LAMA2; (-) strand; PAM type: NNNNGHTT; PAM sequence: AAGTGATT
taggaggtggagcctttggg

SEQ ID NO: 40391 - DNA, 20 bp, Artificial Sequence
  Description of Artificial Sequence: Synthetic oligonucleotide
  Target: LAMA2; (-) strand; PAM type: NNNNGHTT; PAM sequence: GAATGTTT
tcctcacacggcagaaggca

SEQ ID NO: 40392 - DNA, 20 bp, Artificial Sequence
  Description of Artificial Sequence: Synthetic oligonucleotide
  Target: LAMA2; (-) strand; PAM type: NNNNGHTT; PAM sequence: CCTGGCTT
ggtaaactcaggttcctctg

SEQ ID NO: 40393 - DNA, 20 bp, Artificial Sequence
  Description of Artificial Sequence: Synthetic oligonucleotide
  Target: LAMA2; (-) strand; PAM type: NNNNGHTT; PAM sequence: TCTAGTTT
tcaactaaaatgtttgcttt

SEQ ID NO: 40394 - DNA, 20 bp, Artificial Sequence
  Description of Artificial Sequence: Synthetic oligonucleotide
  Target: LAMA2; (-) strand; PAM type: NNNNGHTT; PAM sequence: GTTTGCTT
gtttcatgttcaactaaaat

SEQ ID NO: 40395 - DNA, 20 bp, Artificial Sequence
  Description of Artificial Sequence: Synthetic oligonucleotide
  Target: LAMA2; (-) strand; PAM type: NNNNGHTT; PAM sequence: AAATGTTT
aaatgtttcatgttcaacta

SEQ ID NO: 40396 - DNA, 20 bp, Artificial Sequence
  Description of Artificial Sequence: Synthetic oligonucleotide
  Target: LAMA2; (-) strand; PAM type: NNNNGHTT; PAM sequence: AAATGTTT
ttgcttaagtattagtttta

SEQ ID NO: 40397 - DNA, 20 bp, Artificial Sequence
  Description of Artificial Sequence: Synthetic oligonucleotide
  Target: LAMA2; (-) strand; PAM type: NNNNGHTT; PAM sequence: ATTAGTTT
tcatcatccattgcttaagt

SEQ ID NO: 40398 - DNA, 20 bp, Artificial Sequence
  Description of Artificial Sequence: Synthetic oligonucleotide
  Target: LAMA2; (-) strand; PAM type: NNNNGHTT; PAM sequence: CATTGCTT
atcctctttacttcatcatc

SEQ ID NO: 40399 - DNA, 20 bp, Artificial Sequence
  Description of Artificial Sequence: Synthetic oligonucleotide
  Target: LAMA2; (-) strand; PAM type: NNNNGHTT; PAM sequence: CTTGGCTT
gtggatgggtcactgaatcc

SEQ ID NO: 40400 - DNA, 20 bp, Artificial Sequence
  Description of Artificial Sequence: Synthetic oligonucleotide
  Target: LAMA2; (-) strand; PAM type: NNNNGHTT; PAM sequence: TTAAGTTT
gagcaaagaggtgaaataac

SEQ ID NO: 40401 - DNA, 20 bp, Artificial Sequence
  Description of Artificial Sequence: Synthetic oligonucleotide
  Target: LAMA2; (-) strand; PAM type: NNNNGHTT; PAM sequence: TGAAGCTT
tgtccttgatggtctttggc

SEQ ID NO: 40402 - DNA, 20 bp, Artificial Sequence
  Description of Artificial Sequence: Synthetic oligonucleotide
  Target: LAMA2; (-) strand; PAM type: NNNNGHTT; PAM sequence: ATAGGATT
ctgttcttccttccctctag

SEQ ID NO: 40403 - DNA, 20 bp, Artificial Sequence
  Description of Artificial Sequence: Synthetic oligonucleotide
  Target: LAMA2; (-) strand; PAM type: NNNNGHTT; PAM sequence: CATAGCTT
aacactgcctccttattaat

SEQ ID NO: 40404 - DNA, 20 bp, Artificial Sequence
  Description of Artificial Sequence: Synthetic oligonucleotide
  Target: LAMA2; (-) strand; PAM type: NNNNGHTT; PAM sequence: GCGGGTTT
taagcgcagacaaaaccata

SEQ ID NO: 40405 - DNA, 20 bp, Artificial Sequence
  Description of Artificial Sequence: Synthetic oligonucleotide
  Target: LAMA2; (-) strand; PAM type: NNNNGHTT; PAM sequence: TTTTGTTT
tatgtgccaggctttttatg

SEQ ID NO: 40406 - DNA, 20 bp, Artificial Sequence
  Description of Artificial Sequence: Synthetic oligonucleotide
  Target: LAMA2; (-) strand; PAM type: NNNNGHTT; PAM sequence: TTATGTTT
attactatgtgccaggcttt

SEQ ID NO: 40407 - DNA, 20 bp, Artificial Sequence
  Description of Artificial Sequence: Synthetic oligonucleotide
  Target: LAMA2; (-) strand; PAM type: NNNNGHTT; PAM sequence: CCAGGCTT
tattgagaaattactatgtg

SEQ ID NO: 40408 - DNA, 20 bp, Artificial Sequence
  Description of Artificial Sequence: Synthetic oligonucleotide
  Target: LAMA2; (-) strand; PAM type: NNNNGHTT; PAM sequence: AAAAGATT
gaggtgacagcaagtgctga

SEQ ID NO: 40409 - DNA, 20 bp, Artificial Sequence
  Description of Artificial Sequence: Synthetic oligonucleotide
  Target: LAMA2; (-) strand; PAM type: NNNNGHTT; PAM sequence: TTCAGATT
tcatttcggtcacgagtgta

SEQ ID NO: 40410 - DNA, 20 bp, Artificial Sequence
  Description of Artificial Sequence: Synthetic oligonucleotide
  Target: LAMA2; (-) strand; PAM type: NNNNGHTT; PAM sequence: AGAAGATT
gacataatctatctgctttc

SEQ ID NO: 40411 - DNA, 20 bp, Artificial Sequence
  Description of Artificial Sequence: Synthetic oligonucleotide
  Target: LAMA2; (-) strand; PAM type: NNNNGHTT; PAM sequence: ATCTGCTT
ttccttcattgacataatct

SEQ ID NO: 40412 - DNA, 20 bp, Artificial Sequence
  Description of Artificial Sequence: Synthetic oligonucleotide
  Target: LAMA2; (-) strand; PAM type: NNNNGHTT; PAM sequence: AGGTGATT
caaattgggaattaggaaga

SEQ ID NO: 40413 - DNA, 20 bp, Artificial Sequence
  Description of Artificial Sequence: Synthetic oligonucleotide
  Target: LAMA2; (-) strand; PAM type: NNNNGHTT; PAM sequence: ATTTGATT
gcgtgctactgatttctatg

SEQ ID NO: 40414 - DNA, 20 bp, Artificial Sequence
  Description of Artificial Sequence: Synthetic oligonucleotide
  Target: LAMA2; (-) strand; PAM type: NNNNGHTT; PAM sequence: CTATGATT
tttctgcgtgctactgattt

SEQ ID NO: 40415 - DNA, 20 bp, Artificial Sequence
  Description of Artificial Sequence: Synthetic oligonucleotide
  Target: LAMA2; (-) strand; PAM type: NNNNGHTT; PAM sequence: TACTGATT
tccccaatttttctgcgtgc

SEQ ID NO: 40416 - DNA, 20 bp, Artificial Sequence
  Description of Artificial Sequence: Synthetic oligonucleotide
  Target: LAMA2; (-) strand; PAM type: NNNNGHTT; PAM sequence: TAGTGCTT
tctctttacacaatcaaaga

SEQ ID NO: 40417 - DNA, 20 bp, Artificial Sequence
  Description of Artificial Sequence: Synthetic oligonucleotide
  Target: LAMA2; (-) strand; PAM type: NNNNGHTT; PAM sequence: ATTTGTTT
aagagaccacaagcattttc

SEQ ID NO: 40418 - DNA, 20 bp, Artificial Sequence
  Description of Artificial Sequence: Synthetic oligonucleotide
  Target: LAMA2; (-) strand; PAM type: NNNNGHTT; PAM sequence: GACTGATT
tttcctcttttgtgtggaaa

SEQ ID NO: 40419 - DNA, 20 bp, Artificial Sequence
  Description of Artificial Sequence: Synthetic oligonucleotide
  Target: LAMA2; (-) strand; PAM type: NNNNGHTT; PAM sequence: AGAAGATT
actttggagtctcacaatag

SEQ ID NO: 40420 - DNA, 20 bp, Artificial Sequence
  Description of Artificial Sequence: Synthetic oligonucleotide
  Target: LAMA2; (-) strand; PAM type: NNNNGHTT; PAM sequence: CGCAGTTT
caaaaagtttttaataccat

SEQ ID NO: 40421 - DNA, 20 bp, Artificial Sequence
  Description of Artificial Sequence: Synthetic oligonucleotide
  Target: LAMA2; (-) strand; PAM type: NNNNGHTT; PAM sequence: AAAAGTTT
ttcttcattctctaactgca

SEQ ID NO: 40422 - DNA, 20 bp, Artificial Sequence
  Description of Artificial Sequence: Synthetic oligonucleotide
  Target: LAMA2; (-) strand; PAM type: NNNNGHTT; PAM sequence: TGTTGTTT
ccacaagatggcgggcttta

SEQ ID NO: 40423 - DNA, 20 bp, Artificial Sequence
  Description of Artificial Sequence: Synthetic oligonucleotide
  Target: LAMA2; (-) strand; PAM type: NNNNGHTT; PAM sequence: GCGGGCTT
atatttctggccacaagatg

SEQ ID NO: 40424 - DNA, 20 bp, Artificial Sequence
  Description of Artificial Sequence: Synthetic oligonucleotide
  Target: LAMA2; (-) strand; PAM type: NNNNGHTT; PAM sequence: TCTAGCTT
ccgtactttgcagccccgtt

SEQ ID NO: 40425 - DNA, 20 bp, Artificial Sequence
  Description of Artificial Sequence: Synthetic oligonucleotide
  Target: LAMA2; (-) strand; PAM type: NNNNGHTT; PAM sequence: CCCCGTTT
attaaatccgtactttgcag

SEQ ID NO: 40426 - DNA, 20 bp, Artificial Sequence
  Description of Artificial Sequence: Synthetic oligonucleotide
  Target: LAMA2; (-) strand; PAM type: NNNNGHTT; PAM sequence: ATTCGTTT
aaattgtatggccattgtta

SEQ ID NO: 40427 - DNA, 20 bp, Artificial Sequence
  Description of Artificial Sequence: Synthetic oligonucleotide
  Target: LAMA2; (-) strand; PAM type: NNNNGHTT; PAM sequence: CTGAGTTT
actgggtccagcttaagtcc

SEQ ID NO: 40428 - DNA, 20 bp, Artificial Sequence
  Description of Artificial Sequence: Synthetic oligonucleotide
  Target: LAMA2; (-) strand; PAM type: NNNNGHTT; PAM sequence: TCCAGCTT
gtgggaatcttgagactggg

SEQ ID NO: 40429 - DNA, 20 bp, Artificial Sequence
  Description of Artificial Sequence: Synthetic oligonucleotide
  Target: LAMA2; (-) strand; PAM type: NNNNGHTT; PAM sequence: ATTTGATT
cattatgtgctcagaagcct

SEQ ID NO: 40430 - DNA, 20 bp, Artificial Sequence
  Description of Artificial Sequence: Synthetic oligonucleotide
  Target: LAMA2; (-) strand; PAM type: NNNNGHTT; PAM sequence: CGTTGTTT
tgctattgtaacatcagggc

SEQ ID NO: 40431 - DNA, 20 bp, Artificial Sequence
  Description of Artificial Sequence: Synthetic oligonucleotide
  Target: LAMA2; (-) strand; PAM type: NNNNGHTT; PAM sequence: AAGTGTTT
gttgctatgagattctgaaa

SEQ ID NO: 40432 - DNA, 20 bp, Artificial Sequence
  Description of Artificial Sequence: Synthetic oligonucleotide
  Target: LAMA2; (-) strand; PAM type: NNNNGHTT; PAM sequence: ATGAGATT
gtacattctatattgttgct

SEQ ID NO: 40433 - DNA, 20 bp, Artificial Sequence
  Description of Artificial Sequence: Synthetic oligonucleotide
  Target: LAMA2; (-) strand; PAM type: NNNNGHTT; PAM sequence: AATTGATT
acatttatgtgtgcttgtta

SEQ ID NO: 40434 - DNA, 20 bp, Artificial Sequence
  Description of Artificial Sequence: Synthetic oligonucleotide
  Target: LAMA2; (-) strand; PAM type: NNNNGHTT; PAM sequence: GTGTGCTT
tgtatgttatgaacatttat

SEQ ID NO: 40435 - DNA, 20 bp, Artificial Sequence
  Description of Artificial Sequence: Synthetic oligonucleotide
  Target: LAMA2; (-) strand; PAM type: NNNNGHTT; PAM sequence: TTAGGCTT
ttcatctgccaacacgtaac

SEQ ID NO: 40436 - DNA, 20 bp, Artificial Sequence
  Description of Artificial Sequence: Synthetic oligonucleotide
  Target: LAMA2; (-) strand; PAM type: NNNNGHTT; PAM sequence: GACAGATT
acatctcaaagttctttgaa

SEQ ID NO: 40437 - DNA, 20 bp, Artificial Sequence
  Description of Artificial Sequence: Synthetic oligonucleotide
  Target: LAMA2; (-) strand; PAM type: NNNNGHTT; PAM sequence: TCATGTTT
tcttccgactttattttatt

SEQ ID NO: 40438 - DNA, 20 bp, Artificial Sequence
  Description of Artificial Sequence: Synthetic oligonucleotide
  Target: LAMA2; (-) strand; PAM type: NNNNGHTT; PAM sequence: CGCAGTTT
gccaatgagggcaaggactg

SEQ ID NO: 40439 - DNA, 20 bp, Artificial Sequence
  Description of Artificial Sequence: Synthetic oligonucleotide
  Target: LAMA2; (-) strand; PAM type: NNNNGHTT; PAM sequence: GTCTGTTT
aagctgttctaaaaaataaa

SEQ ID NO: 40440 - DNA, 20 bp, Artificial Sequence
  Description of Artificial Sequence: Synthetic oligonucleotide
  Target: LAMA2; (-) strand; PAM type: NNNNGHTT; PAM sequence: TTAGGTTT
ggtgatgaggaggtgtcaac

SEQ ID NO: 40441 - DNA, 20 bp, Artificial Sequence
  Description of Artificial Sequence: Synthetic oligonucleotide
  Target: LAMA2; (-) strand; PAM type: NNNNGHTT; PAM sequence: AGGAGTTT
tatgaataggtgaagcatag

SEQ ID NO: 40442 - DNA, 20 bp, Artificial Sequence
  Description of Artificial Sequence: Synthetic oligonucleotide
  Target: LAMA2; (-) strand; PAM type: NNNNGHTT; PAM sequence: GTATGATT
atatgaaaaagtaccacact

SEQ ID NO: 40443 - DNA, 20 bp, Artificial Sequence
  Description of Artificial Sequence: Synthetic oligonucleotide
  Target: LAMA2; (-) strand; PAM type: NNNNGHTT; PAM sequence: ACTTGATT
gcacaaagatgtttacagca

SEQ ID NO: 40444 - DNA, 20 bp, Artificial Sequence
  Description of Artificial Sequence: Synthetic oligonucleotide
  Target: LAMA2; (-) strand; PAM type: NNNNGHTT; PAM sequence: AGATGTTT
ccacacaaaagtctgcacaa

SEQ ID NO: 40445 - DNA, 20 bp, Artificial Sequence
  Description of Artificial Sequence: Synthetic oligonucleotide
  Target: LAMA2; (-) strand; PAM type: NNNNGHTT; PAM sequence: CTGGGCTT
ggagaaacctaattgataag

SEQ ID NO: 40446 - DNA, 20 bp, Artificial Sequence
  Description of Artificial Sequence: Synthetic oligonucleotide
  Target: LAMA2; (-) strand; PAM type: NNNNGHTT; PAM sequence: AATGGATT
tagtattggaattaactaaa

SEQ ID NO: 40447 - DNA, 20 bp, Artificial Sequence
  Description of Artificial Sequence: Synthetic oligonucleotide
  Target: LAMA2; (-) strand; PAM type: NNNNGHTT; PAM sequence: AAAAGTTT
tctaaaactactgtaaagta

SEQ ID NO: 40448 - DNA, 20 bp, Artificial Sequence
  Description of Artificial Sequence: Synthetic oligonucleotide
  Target: LAMA2; (-) strand; PAM type: NNNNGHTT; PAM sequence: GCAAGTTT
aggctcttggtactctcttt

SEQ ID NO: 40449 - DNA, 20 bp, Artificial Sequence
  Description of Artificial Sequence: Synthetic oligonucleotide
  Target: LAMA2; (-) strand; PAM type: NNNNGHTT; PAM sequence: GACAGCTT
gaggcaaaccccaattgagg

SEQ ID NO: 40450 - DNA, 20 bp, Artificial Sequence
  Description of Artificial Sequence: Synthetic oligonucleotide
  Target: LAMA2; (-) strand; PAM type: NNNNGHTT; PAM sequence: TGAAGTTT
tgaaaatggtactttacctc

SEQ ID NO: 40451 - DNA, 20 bp, Artificial Sequence
  Description of Artificial Sequence: Synthetic oligonucleotide
  Target: LAMA2; (-) strand; PAM type: NNNNGHTT; PAM sequence: CTTTGCTT
tctcaacccatcaaagtgat

SEQ ID NO: 40452 - DNA, 20 bp, Artificial Sequence
  Description of Artificial Sequence: Synthetic oligonucleotide
  Target: LAMA2; (-) strand; PAM type: NNNNGHTT; PAM sequence: TGCAGCTT
aattcaccttttgattgtca

SEQ ID NO: 40453 - DNA, 20 bp, Artificial Sequence
  Description of Artificial Sequence: Synthetic oligonucleotide
  Target: LAMA2; (-) strand; PAM type: NNNNGHTT; PAM sequence: TTTTGATT
tccatctgtattaattcacc

SEQ ID NO: 40454 - DNA, 20 bp, Artificial Sequence
  Description of Artificial Sequence: Synthetic oligonucleotide
  Target: LAMA2; (-) strand; PAM type: NNNNGHTT; PAM sequence: GCCTGATT
tagaggcattagcgtgctta

SEQ ID NO: 40455 - DNA, 20 bp, Artificial Sequence
  Description of Artificial Sequence: Synthetic oligonucleotide
  Target: LAMA2; (-) strand; PAM type: NNNNGHTT; PAM sequence: GCGTGCTT
actctgagatagaggcatta

SEQ ID NO: 40456 - DNA, 20 bp, Artificial Sequence
  Description of Artificial Sequence: Synthetic oligonucleotide
  Target: LAMA2; (-) strand; PAM type: NNNNGHTT; PAM sequence: AAAAGATT
ctctgtttaaaaaaaaaaaa

SEQ ID NO: 40457 - DNA, 20 bp, Artificial Sequence
  Description of Artificial Sequence: Synthetic oligonucleotide
  Target: LAMA2; (-) strand; PAM type: NNNNGHTT; PAM sequence: CTCTGTTT
cctggacaacaagggtgaaa

SEQ ID NO: 40458 - DNA, 20 bp, Artificial Sequence
  Description of Artificial Sequence: Synthetic oligonucleotide
  Target: LAMA2; (-) strand; PAM type: NNNNGHTT; PAM sequence: AATTGCTT
ttgggaggctgaagcaggag

SEQ ID NO: 40459 - DNA, 20 bp, Artificial Sequence
  Description of Artificial Sequence: Synthetic oligonucleotide
  Target: LAMA2; (-) strand; PAM type: NNNNGHTT; PAM sequence: CAAAGATT
gcagagaaaaaggagcataa

SEQ ID NO: 40460 - DNA, 20 bp, Artificial Sequence
  Description of Artificial Sequence: Synthetic oligonucleotide
  Target: LAMA2; (-) strand; PAM type: NNNNGHTT; PAM sequence: ATTAGATT
ttacccagggatattaggga

SEQ ID NO: 40461 - DNA, 20 bp, Artificial Sequence
  Description of Artificial Sequence: Synthetic oligonucleotide
  Target: LAMA2; (-) strand; PAM type: NNNNGHTT; PAM sequence: ATATGATT
caaaatgcattgaaagagat

SEQ ID NO: 40462 - DNA, 20 bp, Artificial Sequence
  Description of Artificial Sequence: Synthetic oligonucleotide
  Target: LAMA2; (-) strand; PAM type: NNNNGHTT; PAM sequence: ACATGATT
gggcagtttgaatatgttaa

SEQ ID NO: 40463 - DNA, 20 bp, Artificial Sequence
  Description of Artificial Sequence: Synthetic oligonucleotide
  Target: LAMA2; (-) strand; PAM type: NNNNGHTT; PAM sequence: GGCAGTTT
atatttcacacatactgtag

SEQ ID NO: 40464 - DNA, 20 bp, Artificial Sequence
  Description of Artificial Sequence: Synthetic oligonucleotide
  Target: LAMA2; (-) strand; PAM type: NNNNGHTT; PAM sequence: AACAGTTT
gtcattggttatcttataaa

SEQ ID NO: 40465 - DNA, 20 bp, Artificial Sequence
  Description of Artificial Sequence: Synthetic oligonucleotide
  Target: LAMA2; (-) strand; PAM type: NNNNGHTT; PAM sequence: ACCAGATT
agtatccagtggatttagtt

SEQ ID NO: 40466 - DNA, 20 bp, Artificial Sequence
  Description of Artificial Sequence: Synthetic oligonucleotide
  Target: LAMA2; (-) strand; PAM type: NNNNGHTT; PAM sequence: AGTGGATT
agtaaaattaataagtatcc

SEQ ID NO: 40467 - DNA, 20 bp, Artificial Sequence
  Description of Artificial Sequence: Synthetic oligonucleotide
  Target: LAMA2; (-) strand; PAM type: NNNNGHTT; PAM sequence: CAGAGATT
ggaaggaaagatcaaagctg

SEQ ID NO: 40468 - DNA, 20 bp, Artificial Sequence
  Description of Artificial Sequence: Synthetic oligonucleotide
  Target: LAMA2; (-) strand; PAM type: NNNNGHTT; PAM sequence: AACAGCTT
aaaatatagatttatgaatt

SEQ ID NO: 40469 - DNA, 20 bp, Artificial Sequence
  Description of Artificial Sequence: Synthetic oligonucleotide
  Target: LAMA2; (-) strand; PAM type: NNNNGHTT; PAM sequence: TATAGATT
aatgaagtcagccttgaaaa

SEQ ID NO: 40470 - DNA, 20 bp, Artificial Sequence
  Description of Artificial Sequence: Synthetic oligonucleotide
  Target: LAMA2; (-) strand; PAM type: NNNNGHTT; PAM sequence: TTTAGTTT
ctttaagaggaaatgatgag

SEQ ID NO: 40471 - DNA, 20 bp, Artificial Sequence
  Description of Artificial Sequence: Synthetic oligonucleotide
  Target: LAMA2; (-) strand; PAM type: NNNNGHTT; PAM sequence: ATGAGTTT
atgggctttaagaggaaatg

SEQ ID NO: 40472 - DNA, 20 bp, Artificial Sequence
  Description of Artificial Sequence: Synthetic oligonucleotide
  Target: LAMA2; (-) strand; PAM type: NNNNGHTT; PAM sequence: ATGGGCTT
tgttctacacaggagaaata

SEQ ID NO: 40473 - DNA, 20 bp, Artificial Sequence
  Description of Artificial Sequence: Synthetic oligonucleotide
  Target: LAMA2; (-) strand; PAM type: NNNNGHTT; PAM sequence: TAAGGCTT
aacaacaggttagagttgga

SEQ ID NO: 40474 - DNA, 20 bp, Artificial Sequence
  Description of Artificial Sequence: Synthetic oligonucleotide
  Target: LAMA2; (-) strand; PAM type: NNNNGHTT; PAM sequence: CAGAGATT
ggggagagatgagagagaag

SEQ ID NO: 40475 - DNA, 20 bp, Artificial Sequence
  Description of Artificial Sequence: Synthetic oligonucleotide
  Target: LAMA2; (-) strand; PAM type: NNNNGHTT; PAM sequence: TCTGGCTT
ccaaagaaaatttgtaggtt

SEQ ID NO: 40476 - DNA, 20 bp, Artificial Sequence
  Description of Artificial Sequence: Synthetic oligonucleotide
  Target: LAMA2; (-) strand; PAM type: NNNNGHTT; PAM sequence: GTAGGTTT
agaggcaccaaagaaaattt

SEQ ID NO: 40477 - DNA, 20 bp, Artificial Sequence
  Description of Artificial Sequence: Synthetic oligonucleotide
  Target: LAMA2; (-) strand; PAM type: NNNNGHTT; PAM sequence: ATGAGATT
gtaatcccaaactacacaat

SEQ ID NO: 40478 - DNA, 20 bp, Artificial Sequence
  Description of Artificial Sequence: Synthetic oligonucleotide
  Target: LAMA2; (-) strand; PAM type: NNNNGHTT; PAM sequence: AACAGATT
attctggctacgttacggag

SEQ ID NO: 40479 - DNA, 20 bp, Artificial Sequence
  Description of Artificial Sequence: Synthetic oligonucleotide
  Target: LAMA2; (-) strand; PAM type: NNNNGHTT; PAM sequence: AAGAGTTT
agcctaagggaagtcagggg

SEQ ID NO: 40480 - DNA, 20 bp, Artificial Sequence
  Description of Artificial Sequence: Synthetic oligonucleotide
  Target: LAMA2; (-) strand; PAM type: NNNNGHTT; PAM sequence: CAATGCTT
caaaataaagaaatgtgtgg

SEQ ID NO: 40481 - DNA, 20 bp, Artificial Sequence
  Description of Artificial Sequence: Synthetic oligonucleotide
  Target: LAMA2; (-) strand; PAM type: NNNNGHTT; PAM sequence: GGTAGATT
attaacaaaatgtagggaga

SEQ ID NO: 40482 - DNA, 20 bp, Artificial Sequence
  Description of Artificial Sequence: Synthetic oligonucleotide
  Target: LAMA2; (-) strand; PAM type: NNNNGHTT; PAM sequence: CTGAGATT
gcacagagggctttcacgag

SEQ ID NO: 40483 - DNA, 20 bp, Artificial Sequence
  Description of Artificial Sequence: Synthetic oligonucleotide
  Target: LAMA2; (-) strand; PAM type: NNNNGHTT; PAM sequence: GAGGGCTT
ggaacccctgcgatggcaca

SEQ ID NO: 40484 - DNA, 20 bp, Artificial Sequence
  Description of Artificial Sequence: Synthetic oligonucleotide
  Target: LAMA2; (-) strand; PAM type: NNNNGHTT; PAM sequence: AAAGGTTT
gatactgtggtaagaaacaa

SEQ ID NO: 40485 - DNA, 20 bp, Artificial Sequence
  Description of Artificial Sequence: Synthetic oligonucleotide
  Target: LAMA2; (-) strand; PAM type: NNNNGHTT; PAM sequence: AAATGCTT
acatttccatcttgttgttc

SEQ ID NO: 40486 - DNA, 20 bp, Artificial Sequence
  Description of Artificial Sequence: Synthetic oligonucleotide
  Target: LAMA2; (-) strand; PAM type: NNNNGHTT; PAM sequence: TTGGGTTT
gtgcaaaataaatgtttatt

SEQ ID NO: 40487 - DNA, 20 bp, Artificial Sequence
  Description of Artificial Sequence: Synthetic oligonucleotide
  Target: LAMA2; (-) strand; PAM type: NNNNGHTT; PAM sequence: AAATGTTT
cattttaaagagtgcaaaat

SEQ ID NO: 40488 - DNA, 20 bp, Artificial Sequence
  Description of Artificial Sequence: Synthetic oligonucleotide
  Target: LAMA2; (-) strand; PAM type: NNNNGHTT; PAM sequence: GCCTGATT
caatataattataaatatat

SEQ ID NO: 40489 - DNA, 20 bp, Artificial Sequence
  Description of Artificial Sequence: Synthetic oligonucleotide
  Target: LAMA2; (-) strand; PAM type: NNNNGHTT; PAM sequence: AGGTGTTT
acagaatataaatagttaag

SEQ ID NO: 40490 - DNA, 20 bp, Artificial Sequence
  Description of Artificial Sequence: Synthetic oligonucleotide
  Target: LAMA2; (-) strand; PAM type: NNNNGHTT; PAM sequence: AAATGTTT
aactagtttcatccttttgg

SEQ ID NO: 40491 - DNA, 20 bp, Artificial Sequence
  Description of Artificial Sequence: Synthetic oligonucleotide
  Target: LAMA2; (-) strand; PAM type: NNNNGHTT; PAM sequence: ACTAGTTT
ggcacttaaatcgtttaaaa

SEQ ID NO: 40492 - DNA, 20 bp, Artificial Sequence
  Description of Artificial Sequence: Synthetic oligonucleotide
  Target: LAMA2; (-) strand; PAM type: NNNNGHTT; PAM sequence: AATCGTTT
acttataatattggcactta

SEQ ID NO: 40493 - DNA, 20 bp, Artificial Sequence
  Description of Artificial Sequence: Synthetic oligonucleotide
  Target: LAMA2; (-) strand; PAM type: NNNNGHTT; PAM sequence: ACTTGTTT
ttccaaaccaaaaagatatg

SEQ ID NO: 40494 - DNA, 20 bp, Artificial Sequence
  Description of Artificial Sequence: Synthetic oligonucleotide
  Target: LAMA2; (-) strand; PAM type: NNNNGHTT; PAM sequence: ATTAGATT
tcatatggtttcctgctaaa

SEQ ID NO: 40495 - DNA, 20 bp, Artificial Sequence
  Description of Artificial Sequence: Synthetic oligonucleotide
  Target: LAMA2; (-) strand; PAM type: NNNNGHTT; PAM sequence: TATGGTTT
cctttgcatttgtggactca

SEQ ID NO: 40496 - DNA, 20 bp, Artificial Sequence
  Description of Artificial Sequence: Synthetic oligonucleotide
  Target: LAMA2; (-) strand; PAM type: NNNNGHTT; PAM sequence: CATTGCTT
cctaactactgaatagataa

SEQ ID NO: 40497 - DNA, 20 bp, Artificial Sequence
  Description of Artificial Sequence: Synthetic oligonucleotide
  Target: LAMA2; (-) strand; PAM type: NNNNGHTT; PAM sequence: GTGTGTTT
ttcttggttggatatgacca

SEQ ID NO: 40498 - DNA, 20 bp, Artificial Sequence
  Description of Artificial Sequence: Synthetic oligonucleotide
  Target: LAMA2; (-) strand; PAM type: NNNNGHTT; PAM sequence: TCCTGCTT
gaacaatgtagctgttactt

SEQ ID NO: 40499 - DNA, 20 bp, Artificial Sequence
  Description of Artificial Sequence: Synthetic oligonucleotide
  Target: LAMA2; (-) strand; PAM type: NNNNGHTT; PAM sequence: TTTTGTTT
tctttttctattttttcttg

SEQ ID NO: 40500 - DNA, 20 bp, Artificial Sequence
  Description of Artificial Sequence: Synthetic oligonucleotide
  Target: LAMA2; (-) strand; PAM type: NNNNGHTT; PAM sequence: TCTTGTTT
ccatttctttttctattttt

SEQ ID NO: 40501 - DNA, 20 bp, Artificial Sequence
  Description of Artificial Sequence: Synthetic oligonucleotide
  Target: LAMA2; (-) strand; PAM type: NNNNGHTT; PAM sequence: CTAGGTTT
ttatgttgacattcactcaa

SEQ ID NO: 40502 - DNA, 20 bp, Artificial Sequence
  Description of Artificial Sequence: Synthetic oligonucleotide
  Target: LAMA2; (-) strand; PAM type: NNNNGHTT; PAM sequence: CTTTGATT
gtatcttgtatctctcttgc

SEQ ID NO: 40503 - DNA, 20 bp, Artificial Sequence
  Description of Artificial Sequence: Synthetic oligonucleotide
  Target: LAMA2; (-) strand; PAM type: NNNNGHTT; PAM sequence: CTTGGATT
atcttcctttcattctctat

SEQ ID NO: 40504 - DNA, 20 bp, Artificial Sequence
  Description of Artificial Sequence: Synthetic oligonucleotide
  Target: LAMA2; (-) strand; PAM type: NNNNGHTT; PAM sequence: CTGTGTTT
ctgattcagtttggctcttt

SEQ ID NO: 40505 - DNA, 20 bp, Artificial Sequence
  Description of Artificial Sequence: Synthetic oligonucleotide
  Target: LAMA2; (-) strand; PAM type: NNNNGHTT; PAM sequence: TTCAGTTT
gataggaactatctgtctga

SEQ ID NO: 40506 - DNA, 20 bp, Artificial Sequence
  Description of Artificial Sequence: Synthetic oligonucleotide
  Target: LAMA2; (-) strand; PAM type: NNNNGHTT; PAM sequence: GTCTGATT
ctacatgataggaactatct

SEQ ID NO: 40507 - DNA, 20 bp, Artificial Sequence
  Description of Artificial Sequence: Synthetic oligonucleotide
  Target: LAMA2; (-) strand; PAM type: NNNNGHTT; PAM sequence: TGAAGATT
tcattacacagtaattaagt

SEQ ID NO: 40508 - DNA, 20 bp, Artificial Sequence
  Description of Artificial Sequence: Synthetic oligonucleotide
  Target: LAMA2; (-) strand; PAM type: NNNNGHTT; PAM sequence: ATAAGTTT
ttaatgtatactttaagtat

SEQ ID NO: 40509 - DNA, 20 bp, Artificial Sequence
  Description of Artificial Sequence: Synthetic oligonucleotide
  Target: LAMA2; (-) strand; PAM type: NNNNGHTT; PAM sequence: TTGTGTTT
tgtttgtacccaacactatt

SEQ ID NO: 40510 - DNA, 20 bp, Artificial Sequence
  Description of Artificial Sequence: Synthetic oligonucleotide
  Target: LAMA2; (-) strand; PAM type: NNNNGHTT; PAM sequence: TTTTGTTT
ttttgtctcacagacttata

SEQ ID NO: 40511 - DNA, 20 bp, Artificial Sequence
  Description of Artificial Sequence: Synthetic oligonucleotide
  Target: LAMA2; (-) strand; PAM type: NNNNGHTT; PAM sequence: AAAGGCTT
aaatttatatacatgtttgc

SEQ ID NO: 40512 - DNA, 20 bp, Artificial Sequence
  Description of Artificial Sequence: Synthetic oligonucleotide
  Target: LAMA2; (-) strand; PAM type: NNNNGHTT; PAM sequence: ACATGTTT
tagttatgccaaatttatat

SEQ ID NO: 40513 - DNA, 20 bp, Artificial Sequence
  Description of Artificial Sequence: Synthetic oligonucleotide
  Target: LAMA2; (-) strand; PAM type: NNNNGHTT; PAM sequence: GGTTGATT
ctattattgatgggcactta

SEQ ID NO: 40514 - DNA, 20 bp, Artificial Sequence
  Description of Artificial Sequence: Synthetic oligonucleotide
  Target: LAMA2; (-) strand; PAM type: NNNNGHTT; PAM sequence: GTTAGTTT
atttgattttctgttcctgt

SEQ ID NO: 40515 - DNA, 20 bp, Artificial Sequence
  Description of Artificial Sequence: Synthetic oligonucleotide
  Target: LAMA2; (-) strand; PAM type: NNNNGHTT; PAM sequence: ATTTGATT
ttataagtgggacatacagt

SEQ ID NO: 40516 - DNA, 20 bp, Artificial Sequence
  Description of Artificial Sequence: Synthetic oligonucleotide
  Target: LAMA2; (-) strand; PAM type: NNNNGHTT; PAM sequence: CACAGATT
atgcataatggggtttgttg

SEQ ID NO: 40517 - DNA, 20 bp, Artificial Sequence
  Description of Artificial Sequence: Synthetic oligonucleotide
  Target: LAMA2; (-) strand; PAM type: NNNNGHTT; PAM sequence: TGGGGTTT
aaaaaaaaacccatgcataa

SEQ ID NO: 40518 - DNA, 20 bp, Artificial Sequence
  Description of Artificial Sequence: Synthetic oligonucleotide
  Target: LAMA2; (-) strand; PAM type: NNNNGHTT; PAM sequence: TGCAGATT
agggatacatgtgcaggatg

SEQ ID NO: 40519 - DNA, 20 bp, Artificial Sequence
  Description of Artificial Sequence: Synthetic oligonucleotide
  Target: LAMA2; (-) strand; PAM type: NNNNGHTT; PAM sequence: AAGAGCTT
cttccctctaaacacagaag

SEQ ID NO: 40520 - DNA, 20 bp, Artificial Sequence
  Description of Artificial Sequence: Synthetic oligonucleotide
  Target: LAMA2; (-) strand; PAM type: NNNNGHTT; PAM sequence: CAGTGCTT
aagactcttcagggccagca

SEQ ID NO: 40521 - DNA, 20 bp, Artificial Sequence
  Description of Artificial Sequence: Synthetic oligonucleotide
  Target: LAMA2; (-) strand; PAM type: NNNNGHTT; PAM sequence: CACTGCTT
tgaatctccagtcccaacta

SEQ ID NO: 40522 - DNA, 20 bp, Artificial Sequence
  Description of Artificial Sequence: Synthetic oligonucleotide
  Target: LAMA2; (-) strand; PAM type: NNNNGHTT; PAM sequence: TGAAGCTT
tgctgctcaagagctacagt

SEQ ID NO: 40523 - DNA, 20 bp, Artificial Sequence
  Description of Artificial Sequence: Synthetic oligonucleotide
  Target: LAMA2; (-) strand; PAM type: NNNNGHTT; PAM sequence: CTATGCTT
aactgaccatatgcctggtg

SEQ ID NO: 40524 - DNA, 20 bp, Artificial Sequence
  Description of Artificial Sequence: Synthetic oligonucleotide
  Target: LAMA2; (-) strand; PAM type: NNNNGHTT; PAM sequence: GGGTGATT
tgtcgtgggtcatagatgtt

SEQ ID NO: 40525 - DNA, 20 bp, Artificial Sequence
  Description of Artificial Sequence: Synthetic oligonucleotide
  Target: LAMA2; (-) strand; PAM type: NNNNGHTT; PAM sequence: GATAGATT
tgccatatctccattagata

SEQ ID NO: 40526 - DNA, 20 bp, Artificial Sequence
  Description of Artificial Sequence: Synthetic oligonucleotide
  Target: LAMA2; (-) strand; PAM type: NNNNGHTT; PAM sequence: AGGTGCTT
taatgggtagtgactttgtt

SEQ ID NO: 40527 - DNA, 20 bp, Artificial Sequence
  Description of Artificial Sequence: Synthetic oligonucleotide
  Target: LAMA2; (-) strand; PAM type: NNNNGHTT; PAM sequence: CTTAGATT
tctagcacatgctctctttt

SEQ ID NO: 40528 - DNA, 20 bp, Artificial Sequence
  Description of Artificial Sequence: Synthetic oligonucleotide
  Target: LAMA2; (-) strand; PAM type: NNNNGHTT; PAM sequence: TCGAGATT
atccaaaacaaatccagctt

SEQ ID NO: 40529 - DNA, 20 bp, Artificial Sequence
  Description of Artificial Sequence: Synthetic oligonucleotide
  Target: LAMA2; (-) strand; PAM type: NNNNGHTT; PAM sequence: TCCAGCTT
ctctacttatccaaaacaaa

SEQ ID NO: 40530 - DNA, 20 bp, Artificial Sequence
  Description of Artificial Sequence: Synthetic oligonucleotide
  Target: LAMA2; (-) strand; PAM type: NNNNGHTT; PAM sequence: TTTTGCTT
aaaaaagattttgttcatac

SEQ ID NO: 40531 - DNA, 20 bp, Artificial Sequence
  Description of Artificial Sequence: Synthetic oligonucleotide
  Target: LAMA2; (-) strand; PAM type: NNNNGHTT; PAM sequence: AAAAGATT
ccttttggaacattctcaaa

SEQ ID NO: 40532 - DNA, 20 bp, Artificial Sequence
  Description of Artificial Sequence: Synthetic oligonucleotide
  Target: LAMA2; (-) strand; PAM type: NNNNGHTT; PAM sequence: TTTTGTTT
gggggtgagaacttggtctg

SEQ ID NO: 40533 - DNA, 20 bp, Artificial Sequence
  Description of Artificial Sequence: Synthetic oligonucleotide
  Target: LAMA2; (-) strand; PAM type: NNNNGHTT; PAM sequence: GTCTGTTT
tctaagggggtgagaacttg

SEQ ID NO: 40534 - DNA, 20 bp, Artificial Sequence
  Description of Artificial Sequence: Synthetic oligonucleotide
  Target: LAMA2; (-) strand; PAM type: NNNNGHTT; PAM sequence: CATGGATT
ggacgtttccttcatagcac

SEQ ID NO: 40535 - DNA, 20 bp, Artificial Sequence
  Description of Artificial Sequence: Synthetic oligonucleotide
  Target: LAMA2; (-) strand; PAM type: NNNNGHTT; PAM sequence: GGACGTTT
tttccacacttcctgcagca

SEQ ID NO: 40536 - DNA, 20 bp, Artificial Sequence
  Description of Artificial Sequence: Synthetic oligonucleotide
  Target: LAMA2; (-) strand; PAM type: NNNNGHTT; PAM sequence: CTAGGTTT
ggccattcccagggtgctac

SEQ ID NO: 40537 - DNA, 20 bp, Artificial Sequence
  Description of Artificial Sequence: Synthetic oligonucleotide
  Target: LAMA2; (-) strand; PAM type: NNNNGHTT; PAM sequence: AAGTGCTT
tacccatcagctttcagttt

SEQ ID NO: 40538 - DNA, 20 bp, Artificial Sequence
  Description of Artificial Sequence: Synthetic oligonucleotide
  Target: LAMA2; (-) strand; PAM type: NNNNGHTT; PAM sequence: TTCAGTTT
gtccttgttacccatcagct

SEQ ID NO: 40539 - DNA, 20 bp, Artificial Sequence
  Description of Artificial Sequence: Synthetic oligonucleotide
  Target: LAMA2; (-) strand; PAM type: NNNNGHTT; PAM sequence: ATCAGCTT
agactgggtccttgttaccc

SEQ ID NO: 40540 - DNA, 20 bp, Artificial Sequence
  Description of Artificial Sequence: Synthetic oligonucleotide
  Target: LAMA2; (-) strand; PAM type: NNNNGHTT; PAM sequence: ATGAGCTT
tcccattgtctttacctaga

SEQ ID NO: 40541 - DNA, 20 bp, Artificial Sequence
  Description of Artificial Sequence: Synthetic oligonucleotide
  Target: LAMA2; (-) strand; PAM type: NNNNGHTT; PAM sequence: CATAGTTT
tatgcaatcaacctccctgg

SEQ ID NO: 40542 - DNA, 20 bp, Artificial Sequence
  Description of Artificial Sequence: Synthetic oligonucleotide
  Target: LAMA2; (-) strand; PAM type: NNNNGHTT; PAM sequence: ATATGATT
ttttattcttagtattgatt

SEQ ID NO: 40543 - DNA, 20 bp, Artificial Sequence
  Description of Artificial Sequence: Synthetic oligonucleotide
  Target: LAMA2; (-) strand; PAM type: NNNNGHTT; PAM sequence: TATTGATT
cacatgcattttattcttag

SEQ ID NO: 40544 - DNA, 20 bp, Artificial Sequence
  Description of Artificial Sequence: Synthetic oligonucleotide
  Target: LAMA2; (-) strand; PAM type: NNNNGHTT; PAM sequence: TCTGGCTT
tattcattgtcttaacttcc

SEQ ID NO: 40545 - DNA, 20 bp, Artificial Sequence
  Description of Artificial Sequence: Synthetic oligonucleotide
  Target: LAMA2; (-) strand; PAM type: NNNNGHTT; PAM sequence: TACGGATT
catcttccaatatcttacct

SEQ ID NO: 40546 - DNA, 20 bp, Artificial Sequence
  Description of Artificial Sequence: Synthetic oligonucleotide
  Target: LAMA2; (-) strand; PAM type: NNNNGHTT; PAM sequence: AACTGCTT
aaaaagatgttcgtagtcta

SEQ ID NO: 40547 - DNA, 20 bp, Artificial Sequence
  Description of Artificial Sequence: Synthetic oligonucleotide
  Target: LAMA2; (-) strand; PAM type: NNNNGHTT; PAM sequence: AACAGCTT
ctgaatcactaactaaggtc

SEQ ID NO: 40548 - DNA, 20 bp, Artificial Sequence
  Description of Artificial Sequence: Synthetic oligonucleotide
  Target: LAMA2; (-) strand; PAM type: NNNNGHTT; PAM sequence: ACGTGTTT
ccttaaacttggcttcctgc

SEQ ID NO: 40549 - DNA, 20 bp, Artificial Sequence
  Description of Artificial Sequence: Synthetic oligonucleotide
  Target: LAMA2; (-) strand; PAM type: NNNNGHTT; PAM sequence: CTTGGCTT
gttccattaatttccttaaa

SEQ ID NO: 40550 - DNA, 20 bp, Artificial Sequence
  Description of Artificial Sequence: Synthetic oligonucleotide
  Target: LAMA2; (-) strand; PAM type: NNNNGHTT; PAM sequence: CCTTGCTT
agtccctaggttactcaaat

SEQ ID NO: 40551 - DNA, 20 bp, Artificial Sequence
  Description of Artificial Sequence: Synthetic oligonucleotide
  Target: LAMA2; (-) strand; PAM type: NNNNGHTT; PAM sequence: TTTGGATT
ataatggaattattttcact

SEQ ID NO: 40552 - DNA, 20 bp, Artificial Sequence
  Description of Artificial Sequence: Synthetic oligonucleotide
  Target: LAMA2; (-) strand; PAM type: NNNNGHTT; PAM sequence: TCTGGATT
taaccaaagtattataatgc

SEQ ID NO: 40553 - DNA, 20 bp, Artificial Sequence
  Description of Artificial Sequence: Synthetic oligonucleotide
  Target: LAMA2; (-) strand; PAM type: NNNNGHTT; PAM sequence: CAAGGTTT
gtttaatttatgaaagtttt

SEQ ID NO: 40554 - DNA, 20 bp, Artificial Sequence
  Description of Artificial Sequence: Synthetic oligonucleotide
  Target: LAMA2; (-) strand; PAM type: NNNNGHTT; PAM sequence: GAAAGTTT
cagcaagaggtttaatttat

SEQ ID NO: 40555 - DNA, 20 bp, Artificial Sequence
  Description of Artificial Sequence: Synthetic oligonucleotide
  Target: LAMA2; (-) strand; PAM type: NNNNGHTT; PAM sequence: AGAGGTTT
gtgattttccaagggcagca

SEQ ID NO: 40556 - DNA, 20 bp, Artificial Sequence
  Description of Artificial Sequence: Synthetic oligonucleotide
  Target: LAMA2; (-) strand; PAM type: NNNNGHTT; PAM sequence: TTGTGATT
tagaggaattgtactgcatt

SEQ ID NO: 40557 - DNA, 20 bp, Artificial Sequence
  Description of Artificial Sequence: Synthetic oligonucleotide
  Target: LAMA2; (-) strand; PAM type: NNNNGHTT; PAM sequence: AGTGGATT
taatatttaaaatatacgta

SEQ ID NO: 40558 - DNA, 20 bp, Artificial Sequence
  Description of Artificial Sequence: Synthetic oligonucleotide
  Target: LAMA2; (-) strand; PAM type: NNNNGHTT; PAM sequence: GAGTGCTT
cactctagaatcttgtacca

SEQ ID NO: 40559 - DNA, 20 bp, Artificial Sequence
  Description of Artificial Sequence: Synthetic oligonucleotide
  Target: LAMA2; (-) strand; PAM type: NNNNGHTT; PAM sequence: TATAGTTT
agaatcacaaactgtctcaa

SEQ ID NO: 40560 - DNA, 20 bp, Artificial Sequence
  Description of Artificial Sequence: Synthetic oligonucleotide
  Target: LAMA2; (-) strand; PAM type: NNNNGHTT; PAM sequence: AAAGGTTT
acaaggtttagagtaccctg

SEQ ID NO: 40561 - DNA, 20 bp, Artificial Sequence
  Description of Artificial Sequence: Synthetic oligonucleotide
  Target: LAMA2; (-) strand; PAM type: NNNNGHTT; PAM sequence: CAAGGTTT
cattgtttctttaaaaatta

SEQ ID NO: 40562 - DNA, 20 bp, Artificial Sequence
  Description of Artificial Sequence: Synthetic oligonucleotide
  Target: LAMA2; (-) strand; PAM type: NNNNGHTT; PAM sequence: CATTGTTT
caaaaatggtgtgtgtataa

SEQ ID NO: 40563 - DNA, 20 bp, Artificial Sequence
  Description of Artificial Sequence: Synthetic oligonucleotide
  Target: LAMA2; (-) strand; PAM type: NNNNGHTT; PAM sequence: ATATGCTT
tccatatgatagcaccagaa

SEQ ID NO: 40564 - DNA, 20 bp, Artificial Sequence
  Description of Artificial Sequence: Synthetic oligonucleotide
  Target: LAMA2; (-) strand; PAM type: NNNNGHTT; PAM sequence: GCCTGTTT
ttagctactcagtagtaaat

SEQ ID NO: 40565 - DNA, 20 bp, Artificial Sequence
  Description of Artificial Sequence: Synthetic oligonucleotide
  Target: LAMA2; (-) strand; PAM type: NNNNGHTT; PAM sequence: AAATGCTT
ttaaagaaacaaagagggag

SEQ ID NO: 40566 - DNA, 20 bp, Artificial Sequence
  Description of Artificial Sequence: Synthetic oligonucleotide
  Target: LAMA2; (-) strand; PAM type: NNNNGHTT; PAM sequence: ATTTGTTT
caataagcttgatcctatag

SEQ ID NO: 40567 - DNA, 20 bp, Artificial Sequence
  Description of Artificial Sequence: Synthetic oligonucleotide
  Target: LAMA2; (-) strand; PAM type: NNNNGHTT; PAM sequence: TATAGATT
tgcctcaataagcttgatcc

SEQ ID NO: 40568 - DNA, 20 bp, Artificial Sequence
  Description of Artificial Sequence: Synthetic oligonucleotide
  Target: LAMA2; (-) strand; PAM type: NNNNGHTT; PAM sequence: ATAAGCTT
caaacaggctgtctgcctca

SEQ ID NO: 40569 - DNA, 20 bp, Artificial Sequence
  Description of Artificial Sequence: Synthetic oligonucleotide
  Target: LAMA2; (-) strand; PAM type: NNNNGHTT; PAM sequence: TGCAGTTT
aatcttcagcctccacatgt

SEQ ID NO: 40570 - DNA, 20 bp, Artificial Sequence
  Description of Artificial Sequence: Synthetic oligonucleotide
  Target: LAMA2; (-) strand; PAM type: NNNNGHTT; PAM sequence: AAACGCTT
gctgtatttggtcttttaaa

SEQ ID NO: 40571 - DNA, 20 bp, Artificial Sequence
  Description of Artificial Sequence: Synthetic oligonucleotide
  Target: LAMA2; (-) strand; PAM type: NNNNGHTT; PAM sequence: ATGTGATT
tgggagaaatgatgattaaa

SEQ ID NO: 40572 - DNA, 20 bp, Artificial Sequence
  Description of Artificial Sequence: Synthetic oligonucleotide
  Target: LAMA2; (-) strand; PAM type: NNNNGHTT; PAM sequence: TGATGATT
tgtttttctgttgggagaaa

SEQ ID NO: 40573 - DNA, 20 bp, Artificial Sequence
  Description of Artificial Sequence: Synthetic oligonucleotide
  Target: LAMA2; (-) strand; PAM type: NNNNGHTT; PAM sequence: CTGTGTTT
cagtcctgtgtcatcccttt

SEQ ID NO: 40574 - DNA, 20 bp, Artificial Sequence
  Description of Artificial Sequence: Synthetic oligonucleotide
  Target: LAMA2; (-) strand; PAM type: NNNNGHTT; PAM sequence: CTTTGATT
actactttttgaaactctac

SEQ ID NO: 40575 - DNA, 20 bp, Artificial Sequence
  Description of Artificial Sequence: Synthetic oligonucleotide
  Target: LAMA2; (-) strand; PAM type: NNNNGHTT; PAM sequence: GCTTGCTT
caagtggaatgatgacatta

SEQ ID NO: 40576 - DNA, 20 bp, Artificial Sequence
  Description of Artificial Sequence: Synthetic oligonucleotide
  Target: LAMA2; (-) strand; PAM type: NNNNGHTT; PAM sequence: ATTAGCTT
gtatcaagtggaatgatgac

SEQ ID NO: 40577 - DNA, 20 bp, Artificial Sequence
  Description of Artificial Sequence: Synthetic oligonucleotide
  Target: LAMA2; (-) strand; PAM type: NNNNGHTT; PAM sequence: TGCTGCTT
gccatttggagaaactaaag

SEQ ID NO: 40578 - DNA, 20 bp, Artificial Sequence
  Description of Artificial Sequence: Synthetic oligonucleotide
  Target: LAMA2; (-) strand; PAM type: NNNNGHTT; PAM sequence: CAGAGCTT
gaattgtgagctaaatgcac

SEQ ID NO: 40579 - DNA, 20 bp, Artificial Sequence
  Description of Artificial Sequence: Synthetic oligonucleotide
  Target: LAMA2; (-) strand; PAM type: NNNNGHTT; PAM sequence: AATGGCTT
aatttgggcttttgccaaaa

SEQ ID NO: 40580 - DNA, 20 bp, Artificial Sequence
  Description of Artificial Sequence: Synthetic oligonucleotide
  Target: LAMA2; (-) strand; PAM type: NNNNGHTT; PAM sequence: TTGGGCTT
tattctttaagtttcttaat

SEQ ID NO: 40581 - DNA, 20 bp, Artificial Sequence
  Description of Artificial Sequence: Synthetic oligonucleotide
  Target: LAMA2; (-) strand; PAM type: NNNNGHTT; PAM sequence: TTAAGTTT
tggggcattatctgtattct

SEQ ID NO: 40582 - DNA, 20 bp, Artificial Sequence
  Description of Artificial Sequence: Synthetic oligonucleotide
  Target: LAMA2; (-) strand; PAM type: NNNNGHTT; PAM sequence: CTAGGTTT
ttttaacagatatttaagga

SEQ ID NO: 40583 - DNA, 20 bp, Artificial Sequence
  Description of Artificial Sequence: Synthetic oligonucleotide
  Target: LAMA2; (-) strand; PAM type: NNNNGHTT; PAM sequence: GCACGTTT
cccaatttctaaacatgcat

SEQ ID NO: 40584 - DNA, 20 bp, Artificial Sequence
  Description of Artificial Sequence: Synthetic oligonucleotide
  Target: LAMA2; (-) strand; PAM type: NNNNGHTT; PAM sequence: TACTGCTT
gcagagcaagaaaaatgttt

SEQ ID NO: 40585 - DNA, 20 bp, Artificial Sequence
  Description of Artificial Sequence: Synthetic oligonucleotide
  Target: LAMA2; (-) strand; PAM type: NNNNGHTT; PAM sequence: AAATGTTT
ataatattgcagagcaagaa

SEQ ID NO: 40586 - DNA, 20 bp, Artificial Sequence
  Description of Artificial Sequence: Synthetic oligonucleotide
  Target: LAMA2; (-) strand; PAM type: NNNNGHTT; PAM sequence: GGGAGTTT
tcttgcagtggtgaacattt

SEQ ID NO: 40587 - DNA, 20 bp, Artificial Sequence
  Description of Artificial Sequence: Synthetic oligonucleotide
  Target: LAMA2; (-) strand; PAM type: NNNNGHTT; PAM sequence: TGTTGCTT
tagctctcaaattaaaaccc

SEQ ID NO: 40588 - DNA, 20 bp, Artificial Sequence
  Description of Artificial Sequence: Synthetic oligonucleotide
  Target: LAMA2; (-) strand; PAM type: NNNNGHTT; PAM sequence: TTCTGTTT
atttttctggcagaaataat

SEQ ID NO: 40589 - DNA, 20 bp, Artificial Sequence
  Description of Artificial Sequence: Synthetic oligonucleotide
  Target: LAMA2; (-) strand; PAM type: NNNNGHTT; PAM sequence: CTGAGATT
gataaaccacaatgaattaa

SEQ ID NO: 40590 - DNA, 20 bp, Artificial Sequence
  Description of Artificial Sequence: Synthetic oligonucleotide
  Target: LAMA2; (-) strand; PAM type: NNNNGHTT; PAM sequence: AACAGCTT
aataatactagggaaagtac

SEQ ID NO: 40591 - DNA, 20 bp, Artificial Sequence
  Description of Artificial Sequence: Synthetic oligonucleotide
  Target: LAMA2; (-) strand; PAM type: NNNNGHTT; PAM sequence: TGTTGTTT
gcagtgggatttgttgttgt

SEQ ID NO: 40592 - DNA, 20 bp, Artificial Sequence
  Description of Artificial Sequence: Synthetic oligonucleotide
  Target: LAMA2; (-) strand; PAM type: NNNNGHTT; PAM sequence: GTGGGATT
gtgaaggtgctctacctgca

SEQ ID NO: 40593 - DNA, 20 bp, Artificial Sequence
  Description of Artificial Sequence: Synthetic oligonucleotide
  Target: LAMA2; (-) strand; PAM type: NNNNGHTT; PAM sequence: GGGTGTTT
aggatgggctgctaggtgtt

SEQ ID NO: 40594 - DNA, 20 bp, Artificial Sequence
  Description of Artificial Sequence: Synthetic oligonucleotide
  Target: LAMA2; (-) strand; PAM type: NNNNGHTT; PAM sequence: GTTTGATT
gcatttattctcataccagt

SEQ ID NO: 40595 - DNA, 20 bp, Artificial Sequence
  Description of Artificial Sequence: Synthetic oligonucleotide
  Target: LAMA2; (-) strand; PAM type: NNNNGHTT; PAM sequence: CAGTGTTT
gctagcatttattctcatac

SEQ ID NO: 40596 - DNA, 20 bp, Artificial Sequence
  Description of Artificial Sequence: Synthetic oligonucleotide
  Target: LAMA2; (-) strand; PAM type: NNNNGHTT; PAM sequence: GTGGGATT
cctttctctggtgtatagac

SEQ ID NO: 40597 - DNA, 20 bp, Artificial Sequence
  Description of Artificial Sequence: Synthetic oligonucleotide
  Target: LAMA2; (-) strand; PAM type: NNNNGHTT; PAM sequence: GTTGGATT
cctttcattcaattttaaca

SEQ ID NO: 40598 - DNA, 20 bp, Artificial Sequence
  Description of Artificial Sequence: Synthetic oligonucleotide
  Target: LAMA2; (-) strand; PAM type: NNNNGHTT; PAM sequence: CCAAGCTT
tttttttctccattaaactg

SEQ ID NO: 40599 - DNA, 20 bp, Artificial Sequence
  Description of Artificial Sequence: Synthetic oligonucleotide
  Target: LAMA2; (-) strand; PAM type: NNNNGHTT; PAM sequence: TATAGTTT
tgatggttatccctcattat

SEQ ID NO: 40600 - DNA, 20 bp, Artificial Sequence
  Description of Artificial Sequence: Synthetic oligonucleotide
  Target: LAMA2; (-) strand; PAM type: NNNNGHTT; PAM sequence: AGGTGATT
gaatgccttagatgaataga

SEQ ID NO: 40601 - DNA, 20 bp, Artificial Sequence
  Description of Artificial Sequence: Synthetic oligonucleotide
  Target: LAMA2; (-) strand; PAM type: NNNNGHTT; PAM sequence: AACAGTTT
tctaataatgcgtggaataa

SEQ ID NO: 40602 - DNA, 20 bp, Artificial Sequence
  Description of Artificial Sequence: Synthetic oligonucleotide
  Target: LAMA2; (-) strand; PAM type: NNNNGHTT; PAM sequence: ATGGGTTT
atgtcaggaaataaacacta

SEQ ID NO: 40603 - DNA, 20 bp, Artificial Sequence
  Description of Artificial Sequence: Synthetic oligonucleotide
  Target: LAMA2; (-) strand; PAM type: NNNNGHTT; PAM sequence: CATTGATT
caggaaggaaaggtgtctat

SEQ ID NO: 40604 - DNA, 20 bp, Artificial Sequence
  Description of Artificial Sequence: Synthetic oligonucleotide
  Target: LAMA2; (-) strand; PAM type: NNNNGHTT; PAM sequence: AACTGTTT
aaattcctcaggagaagcaa

SEQ ID NO: 40605 - DNA, 20 bp, Artificial Sequence
  Description of Artificial Sequence: Synthetic oligonucleotide
  Target: LAMA2; (-) strand; PAM type: NNNNGHTT; PAM sequence: ATAGGATT
acgcgtagcagggaatacaa

SEQ ID NO: 40606 - DNA, 20 bp, Artificial Sequence
  Description of Artificial Sequence: Synthetic oligonucleotide
  Target: LAMA2; (-) strand; PAM type: NNNNGHTT; PAM sequence: GGAGGATT
tatttccaacttaattcaaa

SEQ ID NO: 40607 - DNA, 20 bp, Artificial Sequence
  Description of Artificial Sequence: Synthetic oligonucleotide
  Target: LAMA2; (-) strand; PAM type: NNNNGHTT; PAM sequence: AAATGATT
tttctttcccacagtattga

SEQ ID NO: 40608 - DNA, 20 bp, Artificial Sequence
  Description of Artificial Sequence: Synthetic oligonucleotide
  Target: LAMA2; (-) strand; PAM type: NNNNGHTT; PAM sequence: ATGTGTTT
ctgagcattcttaaagatga

SEQ ID NO: 40609 - DNA, 20 bp, Artificial Sequence
  Description of Artificial Sequence: Synthetic oligonucleotide
  Target: LAMA2; (-) strand; PAM type: NNNNGHTT; PAM sequence: TTATGTTT
acatatataaacatacagtt

SEQ ID NO: 40610 - DNA, 20 bp, Artificial Sequence
  Description of Artificial Sequence: Synthetic oligonucleotide
  Target: LAMA2; (-) strand; PAM type: NNNNGHTT; PAM sequence: TACAGTTT
tttatagacatatataaaca

SEQ ID NO: 40611 - DNA, 20 bp, Artificial Sequence
  Description of Artificial Sequence: Synthetic oligonucleotide
  Target: LAMA2; (-) strand; PAM type: NNNNGHTT; PAM sequence: GTCTGTTT
gaagcatcattttaatagaa

SEQ ID NO: 40612 - DNA, 20 bp, Artificial Sequence
  Description of Artificial Sequence: Synthetic oligonucleotide
  Target: LAMA2; (-) strand; PAM type: NNNNGHTT; PAM sequence: ATATGATT
catctatcacttgctaggca

SEQ ID NO: 40613 - DNA, 20 bp, Artificial Sequence
  Description of Artificial Sequence: Synthetic oligonucleotide
  Target: LAMA2; (-) strand; PAM type: NNNNGHTT; PAM sequence: TCTAGTTT
tatttttgtatggtgaactg

SEQ ID NO: 40614 - DNA, 20 bp, Artificial Sequence
  Description of Artificial Sequence: Synthetic oligonucleotide
  Target: LAMA2; (-) strand; PAM type: NNNNGHTT; PAM sequence: CTGCGCTT
ttattttccagattatttca

SEQ ID NO: 40615 - DNA, 20 bp, Artificial Sequence
  Description of Artificial Sequence: Synthetic oligonucleotide
  Target: LAMA2; (-) strand; PAM type: NNNNGHTT; PAM sequence: TCCAGATT
ttaaagttttatagttattt

SEQ ID NO: 40616 - DNA, 20 bp, Artificial Sequence
  Description of Artificial Sequence: Synthetic oligonucleotide
  Target: LAMA2; (-) strand; PAM type: NNNNGHTT; PAM sequence: TAAAGTTT
tttatttattattagtgttt

SEQ ID NO: 40617 - DNA, 20 bp, Artificial Sequence
  Description of Artificial Sequence: Synthetic oligonucleotide
  Target: LAMA2; (-) strand; PAM type: NNNNGHTT; PAM sequence: TAGTGTTT
ggataacatttatttattat

SEQ ID NO: 40618 - DNA, 20 bp, Artificial Sequence
  Description of Artificial Sequence: Synthetic oligonucleotide
  Target: LAMA2; (-) strand; PAM type: NNNNGHTT; PAM sequence: GCCAGTTT
cacatggcccattaaaactt

SEQ ID NO: 40619 - DNA, 20 bp, Artificial Sequence
  Description of Artificial Sequence: Synthetic oligonucleotide
  Target: LAMA2; (-) strand; PAM type: NNNNGHTT; PAM sequence: ATGGGTTT
atgaaaaacaaattttagat

SEQ ID NO: 40620 - DNA, 20 bp, Artificial Sequence
  Description of Artificial Sequence: Synthetic oligonucleotide
  Target: LAMA2; (-) strand; PAM type: NNNNGHTT; PAM sequence: ATGGGTTT
taaatgagagcatctttcaa

SEQ ID NO: 40621 - DNA, 20 bp, Artificial Sequence
  Description of Artificial Sequence: Synthetic oligonucleotide
  Target: LAMA2; (-) strand; PAM type: NNNNGHTT; PAM sequence: TTTGGATT
acatgggccttcagtatctt

SEQ ID NO: 40622 - DNA, 20 bp, Artificial Sequence
  Description of Artificial Sequence: Synthetic oligonucleotide
  Target: LAMA2; (-) strand; PAM type: NNNNGHTT; PAM sequence: GCCAGCTT
gaataaactgctattccatg

SEQ ID NO: 40623 - DNA, 20 bp, Artificial Sequence
  Description of Artificial Sequence: Synthetic oligonucleotide
  Target: LAMA2; (-) strand; PAM type: NNNNGHTT; PAM sequence: GGCTGCTT
aacattttagcaaatatatt

SEQ ID NO: 40624 - DNA, 20 bp, Artificial Sequence
  Description of Artificial Sequence: Synthetic oligonucleotide
  Target: LAMA2; (-) strand; PAM type: NNNNGHTT; PAM sequence: AGAAGATT
actgttattgaaatagtccc

SEQ ID NO: 40625 - DNA, 20 bp, Artificial Sequence
  Description of Artificial Sequence: Synthetic oligonucleotide
  Target: LAMA2; (-) strand; PAM type: NNNNGHTT; PAM sequence: GGTTGTTT
actgtgcagctcagtcatga

SEQ ID NO: 40626 - DNA, 20 bp, Artificial Sequence
  Description of Artificial Sequence: Synthetic oligonucleotide
  Target: LAMA2; (-) strand; PAM type: NNNNGHTT; PAM sequence: TAAAGTTT
aacatataacacatacccca

SEQ ID NO: 40627 - DNA, 20 bp, Artificial Sequence
  Description of Artificial Sequence: Synthetic oligonucleotide
  Target: LAMA2; (-) strand; PAM type: NNNNGHTT; PAM sequence: ATATGTTT
agtggtgatgagcttttttc

SEQ ID NO: 40628 - DNA, 20 bp, Artificial Sequence
  Description of Artificial Sequence: Synthetic oligonucleotide
  Target: LAMA2; (-) strand; PAM type: NNNNGHTT; PAM sequence: ATGAGCTT
ttctctaatgatcagtggtg

SEQ ID NO: 40629 - DNA, 20 bp, Artificial Sequence
  Description of Artificial Sequence: Synthetic oligonucleotide
  Target: LAMA2; (-) strand; PAM type: NNNNGHTT; PAM sequence: TGTGGTTT
ggtgtcatatgttatctcat

SEQ ID NO: 40630 - DNA, 20 bp, Artificial Sequence
  Description of Artificial Sequence: Synthetic oligonucleotide
  Target: LAMA2; (-) strand; PAM type: NNNNGHTT; PAM sequence: TATTGTTT
tccacagccttgccagcatc

SEQ ID NO: 40631 - DNA, 20 bp, Artificial Sequence
  Description of Artificial Sequence: Synthetic oligonucleotide
  Target: LAMA2; (-) strand; PAM type: NNNNGHTT; PAM sequence: AAGTGTTT
cattcccaccaacagtgtaa

SEQ ID NO: 40632 - DNA, 20 bp, Artificial Sequence
  Description of Artificial Sequence: Synthetic oligonucleotide
  Target: LAMA2; (-) strand; PAM type: NNNNGHTT; PAM sequence: GAATGATT
gtatatgtgtctttagagta

SEQ ID NO: 40633 - DNA, 20 bp, Artificial Sequence
  Description of Artificial Sequence: Synthetic oligonucleotide
  Target: LAMA2; (-) strand; PAM type: NNNNGHTT; PAM sequence: TTCAGCTT
ttgctgaggatgctgaagct

SEQ ID NO: 40634 - DNA, 20 bp, Artificial Sequence
  Description of Artificial Sequence: Synthetic oligonucleotide
  Target: LAMA2; (-) strand; PAM type: NNNNGHTT; PAM sequence: TGAAGCTT
gattagtttgctgaggatgc

SEQ ID NO: 40635 - DNA, 20 bp, Artificial Sequence
  Description of Artificial Sequence: Synthetic oligonucleotide
  Target: LAMA2; (-) strand; PAM type: NNNNGHTT; PAM sequence: ATTAGTTT
gtttggttttccattcctgg

SEQ ID NO: 40636 - DNA, 20 bp, Artificial Sequence
  Description of Artificial Sequence: Synthetic oligonucleotide
  Target: LAMA2; (-) strand; PAM type: NNNNGHTT; PAM sequence: CCTGGATT
gtggtgtttggttttccatt

SEQ ID NO: 40637 - DNA, 20 bp, Artificial Sequence
  Description of Artificial Sequence: Synthetic oligonucleotide
  Target: LAMA2; (-) strand; PAM type: NNNNGHTT; PAM sequence: TTTGGTTT
atgagcgagaacatgtggtg

SEQ ID NO: 40638 - DNA, 20 bp, Artificial Sequence
  Description of Artificial Sequence: Synthetic oligonucleotide
  Target: LAMA2; (-) strand; PAM type: NNNNGHTT; PAM sequence: TGGTGTTT
cacttatgagcgagaacatg

SEQ ID NO: 40639 - DNA, 20 bp, Artificial Sequence
  Description of Artificial Sequence: Synthetic oligonucleotide
  Target: LAMA2; (-) strand; PAM type: NNNNGHTT; PAM sequence: TAATGCTT
catgcattaactatttgtcc

SEQ ID NO: 40640 - DNA, 20 bp, Artificial Sequence
  Description of Artificial Sequence: Synthetic oligonucleotide
  Target: LAMA2; (-) strand; PAM type: NNNNGHTT; PAM sequence: CTAGGTTT
caccacgcccagcccatcat

SEQ ID NO: 40641 - DNA, 20 bp, Artificial Sequence
  Description of Artificial Sequence: Synthetic oligonucleotide
  Target: LAMA2; (-) strand; PAM type: NNNNGHTT; PAM sequence: CTGGGATT
tgccttggcctctcaaagta

SEQ ID NO: 40642 - DNA, 20 bp, Artificial Sequence
  Description of Artificial Sequence: Synthetic oligonucleotide
  Target: LAMA2; (-) strand; PAM type: NNNNGHTT; PAM sequence: TGGGGTTT
ttttgtatttttagtagaga

SEQ ID NO: 40643 - DNA, 20 bp, Artificial Sequence
  Description of Artificial Sequence: Synthetic oligonucleotide
  Target: LAMA2; (-) strand; PAM type: NNNNGHTT; PAM sequence: AGCTGATT
tagcgcatgccaccgtgccc

SEQ ID NO: 40644 - DNA, 20 bp, Artificial Sequence
  Description of Artificial Sequence: Synthetic oligonucleotide
  Target: LAMA2; (-) strand; PAM type: NNNNGHTT; PAM sequence: AAGCGATT
cgaccgcacctcctgggttc

SEQ ID NO: 40645 - DNA, 20 bp, Artificial Sequence
  Description of Artificial Sequence: Synthetic oligonucleotide
  Target: LAMA2; (-) strand; PAM type: NNNNGHTT; PAM sequence: TTTTGTTT
ccagttttttgtttgtttgt

SEQ ID NO: 40646 - DNA, 20 bp, Artificial Sequence
  Description of Artificial Sequence: Synthetic oligonucleotide
  Target: LAMA2; (-) strand; PAM type: NNNNGHTT; PAM sequence: GTTTGTTT
cgtcaaccagttttttgttt

SEQ ID NO: 40647 - DNA, 20 bp, Artificial Sequence
  Description of Artificial Sequence: Synthetic oligonucleotide
  Target: LAMA2; (-) strand; PAM type: NNNNGHTT; PAM sequence: GTTTGTTT
aacccgtcaaccagtttttt

SEQ ID NO: 40648 - DNA, 20 bp, Artificial Sequence
  Description of Artificial Sequence: Synthetic oligonucleotide
  Target: LAMA2; (-) strand; PAM type: NNNNGHTT; PAM sequence: TTTTGTTT
tatcaacccgtcaaccagtt

SEQ ID NO: 40649 - DNA, 20 bp, Artificial Sequence
  Description of Artificial Sequence: Synthetic oligonucleotide
  Target: LAMA2; (-) strand; PAM type: NNNNGHTT; PAM sequence: ACCAGTTT
ctgcacctatcaacccgtca

SEQ ID NO: 40650 - DNA, 20 bp, Artificial Sequence
  Description of Artificial Sequence: Synthetic oligonucleotide
  Target: LAMA2; (-) strand; PAM type: NNNNGHTT; PAM sequence: GGTGGTTT
cataggaatacatatgccat

SEQ ID NO: 40651 - DNA, 20 bp, Artificial Sequence
  Description of Artificial Sequence: Synthetic oligonucleotide
  Target: LAMA2; (-) strand; PAM type: NNNNGHTT; PAM sequence: GCAAGCTT
aatgatcatgtattaagaaa

SEQ ID NO: 40652 - DNA, 20 bp, Artificial Sequence
  Description of Artificial Sequence: Synthetic oligonucleotide
  Target: LAMA2; (-) strand; PAM type: NNNNGHTT; PAM sequence: TTTAGATT
tcttttgaaatttgatctaa

SEQ ID NO: 40653 - DNA, 20 bp, Artificial Sequence
  Description of Artificial Sequence: Synthetic oligonucleotide
  Target: LAMA2; (-) strand; PAM type: NNNNGHTT; PAM sequence: ATCAGCTT
gtgtgtgtgtgcgtgtataa

SEQ ID NO: 40654 - DNA, 20 bp, Artificial Sequence
  Description of Artificial Sequence: Synthetic oligonucleotide
  Target: LAMA2; (-) strand; PAM type: NNNNGHTT; PAM sequence: GTATGTTT
cttcccaacctgctaaagct

SEQ ID NO: 40655 - DNA, 20 bp, Artificial Sequence
  Description of Artificial Sequence: Synthetic oligonucleotide
  Target: LAMA2; (-) strand; PAM type: NNNNGHTT; PAM sequence: AGCAGATT
ttagatttcaagaaagcagt

SEQ ID NO: 40656 - DNA, 20 bp, Artificial Sequence
  Description of Artificial Sequence: Synthetic oligonucleotide
  Target: LAMA2; (-) strand; PAM type: NNNNGHTT; PAM sequence: CTTAGATT
atgtaagaagctttctgctt

SEQ ID NO: 40657 - DNA, 20 bp, Artificial Sequence
  Description of Artificial Sequence: Synthetic oligonucleotide
  Target: LAMA2; (-) strand; PAM type: NNNNGHTT; PAM sequence: TTCTGCTT
atgattaaatgtaagaagct

SEQ ID NO: 40658 - DNA, 20 bp, Artificial Sequence
  Description of Artificial Sequence: Synthetic oligonucleotide
  Target: LAMA2; (-) strand; PAM type: NNNNGHTT; PAM sequence: AGAAGCTT
agtaccaatgattaaatgta

SEQ ID NO: 40659 - DNA, 20 bp, Artificial Sequence
  Description of Artificial Sequence: Synthetic oligonucleotide
  Target: LAMA2; (-) strand; PAM type: NNNNGHTT; PAM sequence: CAATGATT
tgggaagccttccagagtac

SEQ ID NO: 40660 - DNA, 20 bp, Artificial Sequence
  Description of Artificial Sequence: Synthetic oligonucleotide
  Target: LAMA2; (-) strand; PAM type: NNNNGHTT; PAM sequence: ATTAGTTT
atcacagtaaccataggctg

SEQ ID NO: 40661 - DNA, 20 bp, Artificial Sequence
  Description of Artificial Sequence: Synthetic oligonucleotide
  Target: LAMA2; (-) strand; PAM type: NNNNGHTT; PAM sequence: GGCTGATT
acagaatcacagtaaccata

SEQ ID NO: 40662 - DNA, 20 bp, Artificial Sequence
  Description of Artificial Sequence: Synthetic oligonucleotide
  Target: LAMA2; (-) strand; PAM type: NNNNGHTT; PAM sequence: CATGGTTT
cccaaatgggctaagacagc

SEQ ID NO: 40663 - DNA, 20 bp, Artificial Sequence
  Description of Artificial Sequence: Synthetic oligonucleotide
  Target: LAMA2; (-) strand; PAM type: NNNNGHTT; PAM sequence: AGGAGATT
attaatacagagcctttgag

SEQ ID NO: 40664 - DNA, 20 bp, Artificial Sequence
  Description of Artificial Sequence: Synthetic oligonucleotide
  Target: LAMA2; (-) strand; PAM type: NNNNGHTT; PAM sequence: AAGAGATT
gttctttatagcagcgtgag

SEQ ID NO: 40665 - DNA, 20 bp, Artificial Sequence
  Description of Artificial Sequence: Synthetic oligonucleotide
  Target: LAMA2; (-) strand; PAM type: NNNNGHTT; PAM sequence: TCATGCTT
aatttcctgaggcctcctag

SEQ ID NO: 40666 - DNA, 20 bp, Artificial Sequence
  Description of Artificial Sequence: Synthetic oligonucleotide
  Target: LAMA2; (-) strand; PAM type: NNNNGHTT; PAM sequence: CCTTGCTT
tgccactatgtgaagaaggt

SEQ ID NO: 40667 - DNA, 20 bp, Artificial Sequence
  Description of Artificial Sequence: Synthetic oligonucleotide
  Target: LAMA2; (-) strand; PAM type: NNNNGHTT; PAM sequence: TATGGTTT
tatttggaggcagagcctga

SEQ ID NO: 40668 - DNA, 20 bp, Artificial Sequence
  Description of Artificial Sequence: Synthetic oligonucleotide
  Target: LAMA2; (-) strand; PAM type: NNNNGHTT; PAM sequence: GAATGTTT
gatagccaatgctgtagatt

SEQ ID NO: 40669 - DNA, 20 bp, Artificial Sequence
  Description of Artificial Sequence: Synthetic oligonucleotide
  Target: LAMA2; (-) strand; PAM type: NNNNGHTT; PAM sequence: TGTAGATT
ttaaccctgatagccaatgc

SEQ ID NO: 40670 - DNA, 20 bp, Artificial Sequence
  Description of Artificial Sequence: Synthetic oligonucleotide
  Target: LAMA2; (-) strand; PAM type: NNNNGHTT; PAM sequence: TTTGGTTT
cttttttcgttatatatgtc

SEQ ID NO: 40671 - DNA, 20 bp, Artificial Sequence
  Description of Artificial Sequence: Synthetic oligonucleotide
  Target: LAMA2; (-) strand; PAM type: NNNNGHTT; PAM sequence: TTGAGTTT
cactgggatagtagaaagaa

SEQ ID NO: 40672 - DNA, 20 bp, Artificial Sequence
  Description of Artificial Sequence: Synthetic oligonucleotide
  Target: LAMA2; (-) strand; PAM type: NNNNGHTT; PAM sequence: TAGAGCTT
tcagagcttctgatgtaccc

SEQ ID NO: 40673 - DNA, 20 bp, Artificial Sequence
  Description of Artificial Sequence: Synthetic oligonucleotide
  Target: LAMA2; (-) strand; PAM type: NNNNGHTT; PAM sequence: CAGAGCTT
tgggctttaacaagccttct

SEQ ID NO: 40674 - DNA, 20 bp, Artificial Sequence
  Description of Artificial Sequence: Synthetic oligonucleotide
  Target: LAMA2; (-) strand; PAM type: NNNNGHTT; PAM sequence: CTGGGCTT
tgggggtgaggaccagcaat

SEQ ID NO: 40675 - DNA, 20 bp, Artificial Sequence
  Description of Artificial Sequence: Synthetic oligonucleotide
  Target: LAMA2; (-) strand; PAM type: NNNNGHTT; PAM sequence: TGCAGATT
accttggagcccattagaaa

SEQ ID NO: 40676 - DNA, 20 bp, Artificial Sequence
  Description of Artificial Sequence: Synthetic oligonucleotide
  Target: LAMA2; (-) strand; PAM type: NNNNGHTT; PAM sequence: GAGAGTTT
aattaatttctattcttgga

SEQ ID NO: 40677 - DNA, 20 bp, Artificial Sequence
  Description of Artificial Sequence: Synthetic oligonucleotide
  Target: LAMA2; (-) strand; PAM type: NNNNGHTT; PAM sequence: TAGAGATT
ccgaagatctccttatgaca

SEQ ID NO: 40678 - DNA, 20 bp, Artificial Sequence
  Description of Artificial Sequence: Synthetic oligonucleotide
  Target: LAMA2; (-) strand; PAM type: NNNNGHTT; PAM sequence: AGATGTTT
ttttttggtgaatttaagag

SEQ ID NO: 40679 - DNA, 20 bp, Artificial Sequence
  Description of Artificial Sequence: Synthetic oligonucleotide
  Target: LAMA2; (-) strand; PAM type: NNNNGHTT; PAM sequence: TAAAGTTT
ttatattattagttttagac

SEQ ID NO: 40680 - DNA, 20 bp, Artificial Sequence
  Description of Artificial Sequence: Synthetic oligonucleotide
  Target: LAMA2; (-) strand; PAM type: NNNNGHTT; PAM sequence: ATTAGTTT
aacatttacacagttatatt

SEQ ID NO: 40681 - DNA, 20 bp, Artificial Sequence
  Description of Artificial Sequence: Synthetic oligonucleotide
  Target: LAMA2; (-) strand; PAM type: NNNNGHTT; PAM sequence: AAAAGTTT
aaaagaattctacgtcaaat

SEQ ID NO: 40682 - DNA, 20 bp, Artificial Sequence
  Description of Artificial Sequence: Synthetic oligonucleotide
  Target: LAMA2; (-) strand; PAM type: NNNNGHTT; PAM sequence: GCAGGATT
tttataggctgatgttctgg

SEQ ID NO: 40683 - DNA, 20 bp, Artificial Sequence
  Description of Artificial Sequence: Synthetic oligonucleotide
  Target: LAMA2; (-) strand; PAM type: NNNNGHTT; PAM sequence: GTCTGCTT
tgatgtctattctgccaaga

SEQ ID NO: 40684 - DNA, 20 bp, Artificial Sequence
  Description of Artificial Sequence: Synthetic oligonucleotide
  Target: LAMA2; (-) strand; PAM type: NNNNGHTT; PAM sequence: TCAGGTTT
cgtaggattctccaggtgct

SEQ ID NO: 40685 - DNA, 20 bp, Artificial Sequence
  Description of Artificial Sequence: Synthetic oligonucleotide
  Target: LAMA2; (-) strand; PAM type: NNNNGHTT; PAM sequence: AGGTGCTT
ttggaatcgtaggattctcc

SEQ ID NO: 40686 - DNA, 20 bp, Artificial Sequence
  Description of Artificial Sequence: Synthetic oligonucleotide
  Target: LAMA2; (-) strand; PAM type: NNNNGHTT; PAM sequence: GTAGGATT
aaactgtactccttggaatc

SEQ ID NO: 40687 - DNA, 20 bp, Artificial Sequence
  Description of Artificial Sequence: Synthetic oligonucleotide
  Target: LAMA2; (-) strand; PAM type: NNNNGHTT; PAM sequence: TGGGGTTT
tgtgtttattatgcattaaa

SEQ ID NO: 40688 - DNA, 20 bp, Artificial Sequence
  Description of Artificial Sequence: Synthetic oligonucleotide
  Target: LAMA2; (-) strand; PAM type: NNNNGHTT; PAM sequence: CTGTGTTT
atagcatccttcacaagggt

SEQ ID NO: 40689 - DNA, 20 bp, Artificial Sequence
  Description of Artificial Sequence: Synthetic oligonucleotide
  Target: LAMA2; (-) strand; PAM type: NNNNGHTT; PAM sequence: TTAGGCTT
tctaggagaagggttataaa

SEQ ID NO: 40690 - DNA, 20 bp, Artificial Sequence
  Description of Artificial Sequence: Synthetic oligonucleotide
  Target: LAMA2; (-) strand; PAM type: NNNNGHTT; PAM sequence: GTCAGTTT
agtcatagcagtggctatca

SEQ ID NO: 40691 - DNA, 20 bp, Artificial Sequence
  Description of Artificial Sequence: Synthetic oligonucleotide
  Target: LAMA2; (-) strand; PAM type: NNNNGHTT; PAM sequence: AAGAGTTT
aggtcgaagcatactcaggt

SEQ ID NO: 40692 - DNA, 20 bp, Artificial Sequence
  Description of Artificial Sequence: Synthetic oligonucleotide
  Target: LAMA2; (-) strand; PAM type: NNNNGHTT; PAM sequence: TGGTGTTT
gggttacagcaattaaagca

SEQ ID NO: 40693 - DNA, 20 bp, Artificial Sequence
  Description of Artificial Sequence: Synthetic oligonucleotide
  Target: LAMA2; (-) strand; PAM type: NNNNGHTT; PAM sequence: ATATGTTT
gtaacaaacagggaaatgta

SEQ ID NO: 40694 - DNA, 20 bp, Artificial Sequence
  Description of Artificial Sequence: Synthetic oligonucleotide
  Target: LAMA2; (-) strand; PAM type: NNNNGHTT; PAM sequence: TATAGCTT
cctagagtttcatttagttt

SEQ ID NO: 40695 - DNA, 20 bp, Artificial Sequence
  Description of Artificial Sequence: Synthetic oligonucleotide
  Target: LAMA2; (-) strand; PAM type: NNNNGHTT; PAM sequence: TTTAGTTT
ctcgagttcctagagtttca

SEQ ID NO: 40696 - DNA, 20 bp, Artificial Sequence
  Description of Artificial Sequence: Synthetic oligonucleotide
  Target: LAMA2; (-) strand; PAM type: NNNNGHTT; PAM sequence: TAGAGTTT
aaggcctcgtctcgagttcc

SEQ ID NO: 40697 - DNA, 20 bp, Artificial Sequence
  Description of Artificial Sequence: Synthetic oligonucleotide
  Target: LAMA2; (-) strand; PAM type: NNNNGHTT; PAM sequence: TCTAGATT
cagcaatttccttttgtgtc

SEQ ID NO: 40698 - DNA, 20 bp, Artificial Sequence
  Description of Artificial Sequence: Synthetic oligonucleotide
  Target: LAMA2; (-) strand; PAM type: NNNNGHTT; PAM sequence: CTCAGTTT
actgtaaattatctggaaat

SEQ ID NO: 40699 - DNA, 20 bp, Artificial Sequence
  Description of Artificial Sequence: Synthetic oligonucleotide
  Target: LAMA2; (-) strand; PAM type: NNNNGHTT; PAM sequence: TTTTGATT
atatgtaggcaagaacatgc

SEQ ID NO: 40700 - DNA, 20 bp, Artificial Sequence
  Description of Artificial Sequence: Synthetic oligonucleotide
  Target: LAMA2; (-) strand; PAM type: NNNNGHTT; PAM sequence: ACATGCTT
ttgattatatgtaggcaaga

SEQ ID NO: 40701 - DNA, 20 bp, Artificial Sequence
  Description of Artificial Sequence: Synthetic oligonucleotide
  Target: LAMA2; (-) strand; PAM type: NNNNGHTT; PAM sequence: ACTTGATT
agcaccagaaaagatcattt

SEQ ID NO: 40702 - DNA, 20 bp, Artificial Sequence
  Description of Artificial Sequence: Synthetic oligonucleotide
  Target: LAMA2; (-) strand; PAM type: NNNNGHTT; PAM sequence: AGATGATT
agtccaaaagtccctaatgc

SEQ ID NO: 40703 - DNA, 20 bp, Artificial Sequence
  Description of Artificial Sequence: Synthetic oligonucleotide
  Target: LAMA2; (-) strand; PAM type: NNNNGHTT; PAM sequence: CTTTGTTT
tatgaatggtaaagtcataa

SEQ ID NO: 40704 - DNA, 20 bp, Artificial Sequence
  Description of Artificial Sequence: Synthetic oligonucleotide
  Target: LAMA2; (-) strand; PAM type: NNNNGHTT; PAM sequence: AGGTGTTT
aactcttatttgaaagtatt

SEQ ID NO: 40705 - DNA, 20 bp, Artificial Sequence
  Description of Artificial Sequence: Synthetic oligonucleotide
  Target: LAMA2; (-) strand; PAM type: NNNNGHTT; PAM sequence: GCTGGTTT
ttctctggtgtgctgatatt

SEQ ID NO: 40706 - DNA, 20 bp, Artificial Sequence
  Description of Artificial Sequence: Synthetic oligonucleotide
  Target: LAMA2; (-) strand; PAM type: NNNNGHTT; PAM sequence: TTCTGATT
ctgggtcccatccccaaagt

SEQ ID NO: 40707 - DNA, 20 bp, Artificial Sequence
  Description of Artificial Sequence: Synthetic oligonucleotide
  Target: LAMA2; (-) strand; PAM type: NNNNGHTT; PAM sequence: CAAAGTTT
ggtttgctgggtcccatccc

SEQ ID NO: 40708 - DNA, 20 bp, Artificial Sequence
  Description of Artificial Sequence: Synthetic oligonucleotide
  Target: LAMA2; (-) strand; PAM type: NNNNGHTT; PAM sequence: CATGGTTT
ccctgaagggcttgttaata

SEQ ID NO: 40709 - DNA, 20 bp, Artificial Sequence
  Description of Artificial Sequence: Synthetic oligonucleotide
  Target: LAMA2; (-) strand; PAM type: NNNNGHTT; PAM sequence: AAGGGCTT
acatgcctcataatcccctg

SEQ ID NO: 40710 - DNA, 20 bp, Artificial Sequence
  Description of Artificial Sequence: Synthetic oligonucleotide
  Target: LAMA2; (-) strand; PAM type: NNNNGHTT; PAM sequence: CCTAGTTT
aagtttttggatttaactta

SEQ ID NO: 40711 - DNA, 20 bp, Artificial Sequence
  Description of Artificial Sequence: Synthetic oligonucleotide
  Target: LAMA2; (-) strand; PAM type: NNNNGHTT; PAM sequence: TTTGGATT
aactgattgatctggaagtt

SEQ ID NO: 40712 - DNA, 20 bp, Artificial Sequence
  Description of Artificial Sequence: Synthetic oligonucleotide
  Target: LAMA2; (-) strand; PAM type: NNNNGHTT; PAM sequence: GGAAGTTT
ttcttccaactgattgatct

SEQ ID NO: 40713 - DNA, 20 bp, Artificial Sequence
  Description of Artificial Sequence: Synthetic oligonucleotide
  Target: LAMA2; (-) strand; PAM type: NNNNGHTT; PAM sequence: AACTGATT
tctatgtttctttttcttcc

SEQ ID NO: 40714 - DNA, 20 bp, Artificial Sequence
  Description of Artificial Sequence: Synthetic oligonucleotide
  Target: LAMA2; (-) strand; PAM type: NNNNGHTT; PAM sequence: CTATGTTT
tagactagcataattttaat

SEQ ID NO: 40715 - DNA, 20 bp, Artificial Sequence
  Description of Artificial Sequence: Synthetic oligonucleotide
  Target: LAMA2; (-) strand; PAM type: NNNNGHTT; PAM sequence: TTATGTTT
gaatgtaatgatgaatattg

SEQ ID NO: 40716 - DNA, 20 bp, Artificial Sequence
  Description of Artificial Sequence: Synthetic oligonucleotide
  Target: LAMA2; (-) strand; PAM type: NNNNGHTT; PAM sequence: ACTTGTTT
ataccaaaatcaaacaatcc

SEQ ID NO: 40717 - DNA, 20 bp, Artificial Sequence
  Description of Artificial Sequence: Synthetic oligonucleotide
  Target: LAMA2; (-) strand; PAM type: NNNNGHTT; PAM sequence: TTAAGATT
tctgattgatgaaatgagtt

SEQ ID NO: 40718 - DNA, 20 bp, Artificial Sequence
  Description of Artificial Sequence: Synthetic oligonucleotide
  Target: LAMA2; (-) strand; PAM type: NNNNGHTT; PAM sequence: ATGAGTTT
ctaggaatctgattgatgaa

SEQ ID NO: 40719 - DNA, 20 bp, Artificial Sequence
  Description of Artificial Sequence: Synthetic oligonucleotide
  Target: LAMA2; (-) strand; PAM type: NNNNGHTT; PAM sequence: ATCTGATT
tgaatcatgtcattctagga

SEQ ID NO: 40720 - DNA, 20 bp, Artificial Sequence
  Description of Artificial Sequence: Synthetic oligonucleotide
  Target: LAMA2; (-) strand; PAM type: NNNNGHTT; PAM sequence: AACAGATT
attaattaaaataaaagcga

SEQ ID NO: 40721 - DNA, 20 bp, Artificial Sequence
  Description of Artificial Sequence: Synthetic oligonucleotide
  Target: LAMA2; (-) strand; PAM type: NNNNGHTT; PAM sequence: AATAGATT
gaaaataagaaaacatgtaa

SEQ ID NO: 40722 - DNA, 20 bp, Artificial Sequence
  Description of Artificial Sequence: Synthetic oligonucleotide
  Target: LAMA2; (-) strand; PAM type: NNNNGHTT; PAM sequence: TAGGGTTT
atgagctcatgtcactgcct

SEQ ID NO: 40723 - DNA, 20 bp, Artificial Sequence
  Description of Artificial Sequence: Synthetic oligonucleotide
  Target: LAMA2; (-) strand; PAM type: NNNNGHTT; PAM sequence: AAGGGCTT
agcttcttcacttttttcag

SEQ ID NO: 40724 - DNA, 20 bp, Artificial Sequence
  Description of Artificial Sequence: Synthetic oligonucleotide
  Target: LAMA2; (-) strand; PAM type: NNNNGHTT; PAM sequence: AACAGCTT
tttccccccgggactctcca

SEQ ID NO: 40725 - DNA, 20 bp, Artificial Sequence
  Description of Artificial Sequence: Synthetic oligonucleotide
  Target: LAMA2; (-) strand; PAM type: NNNNGHTT; PAM sequence: GCCAGTTT
caactttgtttttgtagtca

SEQ ID NO: 40726 - DNA, 20 bp, Artificial Sequence
  Description of Artificial Sequence: Synthetic oligonucleotide
  Target: LAMA2; (-) strand; PAM type: NNNNGHTT; PAM sequence: CTTTGTTT
aaggtcccaagcatcatcaa

SEQ ID NO: 40727 - DNA, 20 bp, Artificial Sequence
  Description of Artificial Sequence: Synthetic oligonucleotide
  Target: LAMA2; (-) strand; PAM type: NNNNGHTT; PAM sequence: TGTGGCTT
ttagcttctctgattttatc

SEQ ID NO: 40728 - DNA, 20 bp, Artificial Sequence
  Description of Artificial Sequence: Synthetic oligonucleotide
  Target: LAMA2; (-) strand; PAM type: NNNNGHTT; PAM sequence: CTCTGATT
tgcaaataggcgattagctt

SEQ ID NO: 40729 - DNA, 20 bp, Artificial Sequence
  Description of Artificial Sequence: Synthetic oligonucleotide
  Target: LAMA2; (-) strand; PAM type: NNNNGHTT; PAM sequence: ATTAGCTT
tgatttactgcaaataggcg

SEQ ID NO: 40730 - DNA, 20 bp, Artificial Sequence
  Description of Artificial Sequence: Synthetic oligonucleotide
  Target: LAMA2; (-) strand; PAM type: NNNNGHTT; PAM sequence: AGGCGATT
ttttctgatttactgcaaat

SEQ ID NO: 40731 - DNA, 20 bp, Artificial Sequence
  Description of Artificial Sequence: Synthetic oligonucleotide
  Target: LAMA2; (-) strand; PAM type: NNNNGHTT; PAM sequence: TTCTGATT
cctccaatgcagtcatgttt

SEQ ID NO: 40732 - DNA, 20 bp, Artificial Sequence
  Description of Artificial Sequence: Synthetic oligonucleotide
  Target: LAMA2; (-) strand; PAM type: NNNNGHTT; PAM sequence: TCATGTTT
aagactcacctccaatgcag

SEQ ID NO: 40733 - DNA, 20 bp, Artificial Sequence
  Description of Artificial Sequence: Synthetic oligonucleotide
  Target: LAMA2; (-) strand; PAM type: NNNNGHTT; PAM sequence: CTGAGATT
cccccgcagtccccaacctt

SEQ ID NO: 40734 - DNA, 20 bp, Artificial Sequence
  Description of Artificial Sequence: Synthetic oligonucleotide
  Target: LAMA2; (-) strand; PAM type: NNNNGHTT; PAM sequence: TTCTGTTT
caaaaaaaagtcatttcttg

SEQ ID NO: 40735 - DNA, 20 bp, Artificial Sequence
  Description of Artificial Sequence: Synthetic oligonucleotide
  Target: LAMA2; (-) strand; PAM type: NNNNGHTT; PAM sequence: ATTTGATT
gtttaatttatcaaaatttt

SEQ ID NO: 40736 - DNA, 20 bp, Artificial Sequence
  Description of Artificial Sequence: Synthetic oligonucleotide
  Target: LAMA2; (-) strand; PAM type: NNNNGHTT; PAM sequence: AACAGTTT
cagtgttcttaaatatcttc

SEQ ID NO: 40737 - DNA, 20 bp, Artificial Sequence
  Description of Artificial Sequence: Synthetic oligonucleotide
  Target: LAMA2; (-) strand; PAM type: NNNNGHTT; PAM sequence: TACAGATT
agatttggggaactgatgct

SEQ ID NO: 40738 - DNA, 20 bp, Artificial Sequence
  Description of Artificial Sequence: Synthetic oligonucleotide
  Target: LAMA2; (-) strand; PAM type: NNNNGHTT; PAM sequence: TGATGCTT
ttattgtagatttggggaac

SEQ ID NO: 40739 - DNA, 20 bp, Artificial Sequence
  Description of Artificial Sequence: Synthetic oligonucleotide
  Target: LAMA2; (-) strand; PAM type: NNNNGHTT; PAM sequence: TGTAGATT
ctatagtataatgcacttat

SEQ ID NO: 40740 - DNA, 20 bp, Artificial Sequence
  Description of Artificial Sequence: Synthetic oligonucleotide
  Target: LAMA2; (-) strand; PAM type: NNNNGHTT; PAM sequence: ATTAGTTT
tctctgaacaagatttgtga

SEQ ID NO: 40741 - DNA, 20 bp, Artificial Sequence
  Description of Artificial Sequence: Synthetic oligonucleotide
  Target: LAMA2; (-) strand; PAM type: NNNNGHTT; PAM sequence: ACAAGATT
tttggcagcaagatctctga

SEQ ID NO: 40742 - DNA, 20 bp, Artificial Sequence
  Description of Artificial Sequence: Synthetic oligonucleotide
  Target: LAMA2; (-) strand; PAM type: NNNNGHTT; PAM sequence: CTATGATT
tttgaaagtgtagggaactt

SEQ ID NO: 40743 - DNA, 20 bp, Artificial Sequence
  Description of Artificial Sequence: Synthetic oligonucleotide
  Target: LAMA2; (-) strand; PAM type: NNNNGHTT; PAM sequence: CTCAGATT
attgagctatttgtcatgtg

SEQ ID NO: 40744 - DNA, 20 bp, Artificial Sequence
  Description of Artificial Sequence: Synthetic oligonucleotide
  Target: LAMA2; (-) strand; PAM type: NNNNGHTT; PAM sequence: ATCTGTTT
gaagaaaaaataatggagga

SEQ ID NO: 40745 - DNA, 20 bp, Artificial Sequence
  Description of Artificial Sequence: Synthetic oligonucleotide
  Target: LAMA2; (-) strand; PAM type: NNNNGHTT; PAM sequence: TTAAGATT
aaaagtgataatttactatg

SEQ ID NO: 40746 - DNA, 20 bp, Artificial Sequence
  Description of Artificial Sequence: Synthetic oligonucleotide
  Target: LAMA2; (-) strand; PAM type: NNNNGHTT; PAM sequence: CTGAGTTT
gggtgctgctgttatatgtg

SEQ ID NO: 40747 - DNA, 20 bp, Artificial Sequence
  Description of Artificial Sequence: Synthetic oligonucleotide
  Target: LAMA2; (-) strand; PAM type: NNNNGHTT; PAM sequence: TGTTGTTT
gtctctggggagaaagttgt

SEQ ID NO: 40748 - DNA, 20 bp, Artificial Sequence
  Description of Artificial Sequence: Synthetic oligonucleotide
  Target: LAMA2; (-) strand; PAM type: NNNNGHTT; PAM sequence: TGCTGTTT
tagaagatgtataggtctgc

SEQ ID NO: 40749 - DNA, 20 bp, Artificial Sequence
  Description of Artificial Sequence: Synthetic oligonucleotide
  Target: LAMA2; (-) strand; PAM type: NNNNGHTT; PAM sequence: GGTTGATT
gaatagatttaaaaaatcct

SEQ ID NO: 40750 - DNA, 20 bp, Artificial Sequence
  Description of Artificial Sequence: Synthetic oligonucleotide
  Target: LAMA2; (-) strand; PAM type: NNNNGHTT; PAM sequence: AATAGATT
tctaaaggaaaatagaaatg

SEQ ID NO: 40751 - DNA, 20 bp, Artificial Sequence
  Description of Artificial Sequence: Synthetic oligonucleotide
  Target: LAMA2; (-) strand; PAM type: NNNNGHTT; PAM sequence: CTATGCTT
aaatatttctcaaatactta

SEQ ID NO: 40752 - DNA, 20 bp, Artificial Sequence
  Description of Artificial Sequence: Synthetic oligonucleotide
  Target: LAMA2; (-) strand; PAM type: NNNNGHTT; PAM sequence: TCTGGTTT
ggtgcccaagaatgatgact

SEQ ID NO: 40753 - DNA, 20 bp, Artificial Sequence
  Description of Artificial Sequence: Synthetic oligonucleotide
  Target: LAMA2; (-) strand; PAM type: NNNNGHTT; PAM sequence: GTTAGTTT
gccttattcatattgattca

SEQ ID NO: 40754 - DNA, 20 bp, Artificial Sequence
  Description of Artificial Sequence: Synthetic oligonucleotide
  Target: LAMA2; (-) strand; PAM type: NNNNGHTT; PAM sequence: TATTGATT
aataatctatgccttattca

SEQ ID NO: 40755 - DNA, 20 bp, Artificial Sequence
  Description of Artificial Sequence: Synthetic oligonucleotide
  Target: LAMA2; (-) strand; PAM type: NNNNGHTT; PAM sequence: TTTGGTTT
ggcagcaaccaaattattta

SEQ ID NO: 40756 - DNA, 20 bp, Artificial Sequence
  Description of Artificial Sequence: Synthetic oligonucleotide
  Target: LAMA2; (-) strand; PAM type: NNNNGHTT; PAM sequence: ATGTGATT
gttggcttaacaaacacccc

SEQ ID NO: 40757 - DNA, 20 bp, Artificial Sequence
  Description of Artificial Sequence: Synthetic oligonucleotide
  Target: LAMA2; (-) strand; PAM type: NNNNGHTT; PAM sequence: GTTGGCTT
ggtgggagcccatgaaacct

SEQ ID NO: 40758 - DNA, 20 bp, Artificial Sequence
  Description of Artificial Sequence: Synthetic oligonucleotide
  Target: LAMA2; (-) strand; PAM type: NNNNGHTT; PAM sequence: ATCAGATT
ttcctcgaacctgtataggc

SEQ ID NO: 40759 - DNA, 20 bp, Artificial Sequence
  Description of Artificial Sequence: Synthetic oligonucleotide
  Target: LAMA2; (-) strand; PAM type: NNNNGHTT; PAM sequence: GTCAGTTT
caatcaaatagatgcaatgt

SEQ ID NO: 40760 - DNA, 20 bp, Artificial Sequence
  Description of Artificial Sequence: Synthetic oligonucleotide
  Target: LAMA2; (-) strand; PAM type: NNNNGHTT; PAM sequence: TGCAGCTT
agggagttatttatttaaaa

SEQ ID NO: 40761 - DNA, 20 bp, Artificial Sequence
  Description of Artificial Sequence: Synthetic oligonucleotide
  Target: LAMA2; (-) strand; PAM type: NNNNGHTT; PAM sequence: AAAAGTTT
atgccaccttaaaataaata

SEQ ID NO: 40762 - DNA, 20 bp, Artificial Sequence
  Description of Artificial Sequence: Synthetic oligonucleotide
  Target: LAMA2; (-) strand; PAM type: NNNNGHTT; PAM sequence: AGAGGCTT
gcacgtttcctgaatgaatt

SEQ ID NO: 40763 - DNA, 20 bp, Artificial Sequence
  Description of Artificial Sequence: Synthetic oligonucleotide
  Target: LAMA2; (-) strand; PAM type: NNNNGHTT; PAM sequence: GCACGTTT
acaatcaattttggtgtcta

SEQ ID NO: 40764 - DNA, 20 bp, Artificial Sequence
  Description of Artificial Sequence: Synthetic oligonucleotide
  Target: LAMA2; (-) strand; PAM type: NNNNGHTT; PAM sequence: CAGAGTTT
ggatttctgggccccattct

SEQ ID NO: 40765 - DNA, 20 bp, Artificial Sequence
  Description of Artificial Sequence: Synthetic oligonucleotide
  Target: LAMA2; (-) strand; PAM type: NNNNGHTT; PAM sequence: CACGGATT
cactggaggaatttttaaaa

SEQ ID NO: 40766 - DNA, 20 bp, Artificial Sequence
  Description of Artificial Sequence: Synthetic oligonucleotide
  Target: LAMA2; (-) strand; PAM type: NNNNGHTT; PAM sequence: TAGTGTTT
agtaatcagagatggtgttt

SEQ ID NO: 40767 - DNA, 20 bp, Artificial Sequence
  Description of Artificial Sequence: Synthetic oligonucleotide
  Target: LAMA2; (-) strand; PAM type: NNNNGHTT; PAM sequence: TGGTGTTT
ttacttgaagtaatcagaga

SEQ ID NO: 40768 - DNA, 20 bp, Artificial Sequence
  Description of Artificial Sequence: Synthetic oligonucleotide
  Target: LAMA2; (-) strand; PAM type: NNNNGHTT; PAM sequence: GTTTGCTT
ttatggtagcgtatggagtg

SEQ ID NO: 40769 - DNA, 20 bp, Artificial Sequence
  Description of Artificial Sequence: Synthetic oligonucleotide
  Target: LAMA2; (-) strand; PAM type: NNNNGHTT; PAM sequence: AGTGGTTT
ataattatggtagcgtatgg

SEQ ID NO: 40770 - DNA, 20 bp, Artificial Sequence
  Description of Artificial Sequence: Synthetic oligonucleotide
  Target: LAMA2; (-) strand; PAM type: NNNNGHTT; PAM sequence: CTTTGCTT
ggggtgacttagactccctc

SEQ ID NO: 40771 - DNA, 20 bp, Artificial Sequence
  Description of Artificial Sequence: Synthetic oligonucleotide
  Target: LAMA2; (-) strand; PAM type: NNNNGHTT; PAM sequence: CAGTGCTT
ctctttattcttctgtgacc

SEQ ID NO: 40772 - DNA, 20 bp, Artificial Sequence
  Description of Artificial Sequence: Synthetic oligonucleotide
  Target: LAMA2; (-) strand; PAM type: NNNNGHTT; PAM sequence: CCCAGTTT
atgcctttgtatatgttttt

SEQ ID NO: 40773 - DNA, 20 bp, Artificial Sequence
  Description of Artificial Sequence: Synthetic oligonucleotide
  Target: LAMA2; (-) strand; PAM type: NNNNGHTT; PAM sequence: ATATGTTT
tctttcctccatgcctttgt

SEQ ID NO: 40774 - DNA, 20 bp, Artificial Sequence
  Description of Artificial Sequence: Synthetic oligonucleotide
  Target: LAMA2; (-) strand; PAM type: NNNNGHTT; PAM sequence: ATGCGATT
ttccttagcttagtctcaca

SEQ ID NO: 40775 - DNA, 20 bp, Artificial Sequence
  Description of Artificial Sequence: Synthetic oligonucleotide
  Target: LAMA2; (-) strand; PAM type: NNNNGHTT; PAM sequence: CTTAGCTT
ctcaggataaaaaccaattc

SEQ ID NO: 40776 - DNA, 20 bp, Artificial Sequence
  Description of Artificial Sequence: Synthetic oligonucleotide
  Target: LAMA2; (-) strand; PAM type: NNNNGHTT; PAM sequence: AATTGCTT
acccatgactgcaatatttc

SEQ ID NO: 40777 - DNA, 20 bp, Artificial Sequence
  Description of Artificial Sequence: Synthetic oligonucleotide
  Target: LAMA2; (-) strand; PAM type: NNNNGHTT; PAM sequence: TTCAGTTT
ttccgataaaaaaccattta

SEQ ID NO: 40778 - DNA, 20 bp, Artificial Sequence
  Description of Artificial Sequence: Synthetic oligonucleotide
  Target: LAMA2; (-) strand; PAM type: NNNNGHTT; PAM sequence: GAAAGTTT
cagatttttacgtagctttt

SEQ ID NO: 40779 - DNA, 20 bp, Artificial Sequence
  Description of Artificial Sequence: Synthetic oligonucleotide
  Target: LAMA2; (-) strand; PAM type: NNNNGHTT; PAM sequence: CGTAGCTT
ttctctgctacagattttta

SEQ ID NO: 40780 - DNA, 20 bp, Artificial Sequence
  Description of Artificial Sequence: Synthetic oligonucleotide
  Target: LAMA2; (-) strand; PAM type: NNNNGHTT; PAM sequence: TACAGATT
aattccagagccttctctgc

SEQ ID NO: 40781 - DNA, 20 bp, Artificial Sequence
  Description of Artificial Sequence: Synthetic oligonucleotide
  Target: LAMA2; (-) strand; PAM type: NNNNGHTT; PAM sequence: TTTTGCTT
agactgctcaatacatatta

SEQ ID NO: 40782 - DNA, 20 bp, Artificial Sequence
  Description of Artificial Sequence: Synthetic oligonucleotide
  Target: LAMA2; (-) strand; PAM type: NNNNGHTT; PAM sequence: GGTAGATT
ttctttggcaaggatataat

SEQ ID NO: 40783 - DNA, 20 bp, Artificial Sequence
  Description of Artificial Sequence: Synthetic oligonucleotide
  Target: LAMA2; (-) strand; PAM type: NNNNGHTT; PAM sequence: TATTGTTT
aaagctatcttcctgtctat

SEQ ID NO: 40784 - DNA, 20 bp, Artificial Sequence
  Description of Artificial Sequence: Synthetic oligonucleotide
  Target: LAMA2; (-) strand; PAM type: NNNNGHTT; PAM sequence: GGTAGATT
tttttttggtgtgttggtgt

SEQ ID NO: 40785 - DNA, 20 bp, Artificial Sequence
  Description of Artificial Sequence: Synthetic oligonucleotide
  Target: LAMA2; (-) strand; PAM type: NNNNGHTT; PAM sequence: CAGAGCTT
aattagatctttatttattc

SEQ ID NO: 40786 - DNA, 20 bp, Artificial Sequence
  Description of Artificial Sequence: Synthetic oligonucleotide
  Target: LAMA2; (-) strand; PAM type: NNNNGHTT; PAM sequence: GGTTGATT
aattattgtttggatatgaa

SEQ ID NO: 40787 - DNA, 20 bp, Artificial Sequence
  Description of Artificial Sequence: Synthetic oligonucleotide
  Target: LAMA2; (-) strand; PAM type: NNNNGHTT; PAM sequence: TATTGTTT
cataagtataattgctcaat

SEQ ID NO: 40788 - DNA, 20 bp, Artificial Sequence
  Description of Artificial Sequence: Synthetic oligonucleotide
  Target: LAMA2; (-) strand; PAM type: NNNNGHTT; PAM sequence: GAAAGATT
atgtataatatattcttaaa

SEQ ID NO: 40789 - DNA, 20 bp, Artificial Sequence
  Description of Artificial Sequence: Synthetic oligonucleotide
  Target: LAMA2; (-) strand; PAM type: NNNNGHTT; PAM sequence: CATGGCTT
gaggaagaacacatgttcct

SEQ ID NO: 40790 - DNA, 20 bp, Artificial Sequence
  Description of Artificial Sequence: Synthetic oligonucleotide
  Target: LAMA2; (-) strand; PAM type: NNNNGHTT; PAM sequence: CTAGGATT
tgcctttgctagatactgtt

SEQ ID NO: 40791 - DNA, 20 bp, Artificial Sequence
  Description of Artificial Sequence: Synthetic oligonucleotide
  Target: LAMA2; (-) strand; PAM type: NNNNGHTT; PAM sequence: ATCTGTTT
ttatttattcacggaaaaca

SEQ ID NO: 40792 - DNA, 20 bp, Artificial Sequence
  Description of Artificial Sequence: Synthetic oligonucleotide
  Target: LAMA2; (-) strand; PAM type: NNNNGHTT; PAM sequence: CTGGGTTT
ttgacaaaagtatagagtat

SEQ ID NO: 40793 - DNA, 20 bp, Artificial Sequence
  Description of Artificial Sequence: Synthetic oligonucleotide
  Target: LAMA2; (-) strand; PAM type: NNNNGHTT; PAM sequence: TCTAGCTT
cagattagatactgatgggt

SEQ ID NO: 40794 - DNA, 20 bp, Artificial Sequence
  Description of Artificial Sequence: Synthetic oligonucleotide
  Target: LAMA2; (-) strand; PAM type: NNNNGHTT; PAM sequence: TTCAGATT
aattttagaggtgtcttgtt

SEQ ID NO: 40795 - DNA, 20 bp, Artificial Sequence
  Description of Artificial Sequence: Synthetic oligonucleotide
  Target: LAMA2; (-) strand; PAM type: NNNNGHTT; PAM sequence: TCTTGTTT
ttaaataaattttagaggtg

SEQ ID NO: 40796 - DNA, 20 bp, Artificial Sequence
  Description of Artificial Sequence: Synthetic oligonucleotide
  Target: LAMA2; (-) strand; PAM type: NNNNGHTT; PAM sequence: TGGGGTTT
attttcattttcagtagaga

SEQ ID NO: 40797 - DNA, 20 bp, Artificial Sequence
  Description of Artificial Sequence: Synthetic oligonucleotide
  Target: LAMA2; (-) strand; PAM type: NNNNGHTT; PAM sequence: ATGTGCTT
ttgtaaaagcaaagatcaaa

SEQ ID NO: 40798 - DNA, 20 bp, Artificial Sequence
  Description of Artificial Sequence: Synthetic oligonucleotide
  Target: LAMA2; (-) strand; PAM type: NNNNGHTT; PAM sequence: TTTTGATT
taattgaagagctatatata

SEQ ID NO: 40799 - DNA, 20 bp, Artificial Sequence
  Description of Artificial Sequence: Synthetic oligonucleotide
  Target: LAMA2; (-) strand; PAM type: NNNNGHTT; PAM sequence: GCTTGTTT
caagaatcttttacaacatg

SEQ ID NO: 40800 - DNA, 20 bp, Artificial Sequence
  Description of Artificial Sequence: Synthetic oligonucleotide
  Target: LAMA2; (-) strand; PAM type: NNNNGHTT; PAM sequence: CATGGCTT
aacacaagaatcttttacaa

SEQ ID NO: 40801 - DNA, 20 bp, Artificial Sequence
  Description of Artificial Sequence: Synthetic oligonucleotide
  Target: LAMA2; (-) strand; PAM type: NNNNGHTT; PAM sequence: CTTAGCTT
cacaactgccaattttagcc

SEQ ID NO: 40802 - DNA, 20 bp, Artificial Sequence
  Description of Artificial Sequence: Synthetic oligonucleotide
  Target: LAMA2; (-) strand; PAM type: NNNNGHTT; PAM sequence: CCCTGATT
aatgtccctgattacaatct

SEQ ID NO: 40803 - DNA, 20 bp, Artificial Sequence
  Description of Artificial Sequence: Synthetic oligonucleotide
  Target: LAMA2; (-) strand; PAM type: NNNNGHTT; PAM sequence: CCCTGATT
tgtgggaagagtcccaatgt

SEQ ID NO: 40804 - DNA, 20 bp, Artificial Sequence
  Description of Artificial Sequence: Synthetic oligonucleotide
  Target: LAMA2; (-) strand; PAM type: NNNNGHTT; PAM sequence: GGAAGTTT
actcccatcactaattcagg

SEQ ID NO: 40805 - DNA, 20 bp, Artificial Sequence
  Description of Artificial Sequence: Synthetic oligonucleotide
  Target: LAMA2; (-) strand; PAM type: NNNNGHTT; PAM sequence: CCAAGATT
gaggtggaggttaaagtgag

SEQ ID NO: 40806 - DNA, 20 bp, Artificial Sequence
  Description of Artificial Sequence: Synthetic oligonucleotide
  Target: LAMA2; (-) strand; PAM type: NNNNGHTT; PAM sequence: ATGAGTTT
tcactatctctagtatgtag

SEQ ID NO: 40807 - DNA, 20 bp, Artificial Sequence
  Description of Artificial Sequence: Synthetic oligonucleotide
  Target: LAMA2; (-) strand; PAM type: NNNNGHTT; PAM sequence: GACAGTTT
tgtaacacaaattccataaa

SEQ ID NO: 40808 - DNA, 20 bp, Artificial Sequence
  Description of Artificial Sequence: Synthetic oligonucleotide
  Target: LAMA2; (-) strand; PAM type: NNNNGHTT; PAM sequence: TTATGCTT
ccagactttatggtcgtagc

SEQ ID NO: 40809 - DNA, 20 bp, Artificial Sequence
  Description of Artificial Sequence: Synthetic oligonucleotide
  Target: LAMA2; (-) strand; PAM type: NNNNGHTT; PAM sequence: CGTAGCTT
gtgcatccagactttatggt

SEQ ID NO: 40810 - DNA, 20 bp, Artificial Sequence
  Description of Artificial Sequence: Synthetic oligonucleotide
  Target: LAMA2; (-) strand; PAM type: NNNNGHTT; PAM sequence: TTATGTTT
attacatatcagtaaacaac

SEQ ID NO: 40811 - DNA, 20 bp, Artificial Sequence
  Description of Artificial Sequence: Synthetic oligonucleotide
  Target: LAMA2; (-) strand; PAM type: NNNNGHTT; PAM sequence: CAAAGATT
ttgccgggagttgctaaaaa

SEQ ID NO: 40812 - DNA, 20 bp, Artificial Sequence
  Description of Artificial Sequence: Synthetic oligonucleotide
  Target: LAMA2; (-) strand; PAM type: NNNNGHTT; PAM sequence: TCTTGATT
tttttatatagattgattcg

SEQ ID NO: 40813 - DNA, 20 bp, Artificial Sequence
  Description of Artificial Sequence: Synthetic oligonucleotide
  Target: LAMA2; (-) strand; PAM type: NNNNGHTT; PAM sequence: GATTGATT
attattttcttttttatata

SEQ ID NO: 40814 - DNA, 20 bp, Artificial Sequence
  Description of Artificial Sequence: Synthetic oligonucleotide
  Target: LAMA2; (-) strand; PAM type: NNNNGHTT; PAM sequence: TATAGATT
caatattattttctttttta

SEQ ID NO: 40815 - DNA, 20 bp, Artificial Sequence
  Description of Artificial Sequence: Synthetic oligonucleotide
  Target: LAMA2; (-) strand; PAM type: NNNNGHTT; PAM sequence: ATTAGCTT
cattgtaaaattggagaaga

SEQ ID NO: 40816 - DNA, 20 bp, Artificial Sequence
  Description of Artificial Sequence: Synthetic oligonucleotide
  Target: LAMA2; (-) strand; PAM type: NNNNGHTT; PAM sequence: ACATGATT
tgcactttaacaagaacccc

SEQ ID NO: 40817 - DNA, 20 bp, Artificial Sequence
  Description of Artificial Sequence: Synthetic oligonucleotide
  Target: LAMA2; (-) strand; PAM type: NNNNGHTT; PAM sequence: AAATGTTT
aagtaatttaccttcataca

SEQ ID NO: 40818 - DNA, 20 bp, Artificial Sequence
  Description of Artificial Sequence: Synthetic oligonucleotide
  Target: LAMA2; (-) strand; PAM type: NNNNGHTT; PAM sequence: TCTGGTTT
tacatccaagtgacagccct

SEQ ID NO: 40819 - DNA, 20 bp, Artificial Sequence
  Description of Artificial Sequence: Synthetic oligonucleotide
  Target: LAMA2; (-) strand; PAM type: NNNNGHTT; PAM sequence: CAGTGATT
attctctatgtactagggca

SEQ ID NO: 40820 - DNA, 20 bp, Artificial Sequence
  Description of Artificial Sequence: Synthetic oligonucleotide
  Target: LAMA2; (-) strand; PAM type: NNNNGHTT; PAM sequence: CTCTGATT
cattctggtaatagccactc

SEQ ID NO: 40821 - DNA, 20 bp, Artificial Sequence
  Description of Artificial Sequence: Synthetic oligonucleotide
  Target: LAMA2; (-) strand; PAM type: NNNNGHTT; PAM sequence: TTTGGCTT
actatgtgctcttcctactc

SEQ ID NO: 40822 - DNA, 20 bp, Artificial Sequence
  Description of Artificial Sequence: Synthetic oligonucleotide
  Target: LAMA2; (-) strand; PAM type: NNNNGHTT; PAM sequence: CACAGTTT
atctcttctattatagaaat

SEQ ID NO: 40823 - DNA, 20 bp, Artificial Sequence
  Description of Artificial Sequence: Synthetic oligonucleotide
  Target: LAMA2; (-) strand; PAM type: NNNNGHTT; PAM sequence: TTAAGATT
ggtcacatagtacagtgtga

SEQ ID NO: 40824 - DNA, 20 bp, Artificial Sequence
  Description of Artificial Sequence: Synthetic oligonucleotide
  Target: LAMA2; (-) strand; PAM type: NNNNGHTT; PAM sequence: GTGTGATT
ctttaaggtcacatagtaca

SEQ ID NO: 40825 - DNA, 20 bp, Artificial Sequence
  Description of Artificial Sequence: Synthetic oligonucleotide
  Target: LAMA2; (-) strand; PAM type: NNNNGHTT; PAM sequence: AAATGATT
ctcagatgaactaagatatt

SEQ ID NO: 40826 - DNA, 20 bp, Artificial Sequence
  Description of Artificial Sequence: Synthetic oligonucleotide
  Target: LAMA2; (-) strand; PAM type: NNNNGHTT; PAM sequence: CTCAGTTT
ttttgattgcatataagcca

SEQ ID NO: 40827 - DNA, 20 bp, Artificial Sequence
  Description of Artificial Sequence: Synthetic oligonucleotide
  Target: LAMA2; (-) strand; PAM type: NNNNGHTT; PAM sequence: TTTTGATT
ccagaaccataagaaataag

SEQ ID NO: 40828 - DNA, 20 bp, Artificial Sequence
  Description of Artificial Sequence: Synthetic oligonucleotide
  Target: LAMA2; (-) strand; PAM type: NNNNGHTT; PAM sequence: ATAAGTTT
agcctccagaaccataagaa

SEQ ID NO: 40829 - DNA, 20 bp, Artificial Sequence
  Description of Artificial Sequence: Synthetic oligonucleotide
  Target: LAMA2; (-) strand; PAM type: NNNNGHTT; PAM sequence: CATGGATT
aaatctgccaatactttgat

SEQ ID NO: 40830 - DNA, 20 bp, Artificial Sequence
  Description of Artificial Sequence: Synthetic oligonucleotide
  Target: LAMA2; (-) strand; PAM type: NNNNGHTT; PAM sequence: AGGAGCTT
cccttataaaaaagacctga

SEQ ID NO: 40831 - DNA, 20 bp, Artificial Sequence
  Description of Artificial Sequence: Synthetic oligonucleotide
  Target: LAMA2; (-) strand; PAM type: NNNNGHTT; PAM sequence: ACGGGATT
atgaagcagagacttcataa

SEQ ID NO: 40832 - DNA, 20 bp, Artificial Sequence
  Description of Artificial Sequence: Synthetic oligonucleotide
  Target: LAMA2; (-) strand; PAM type: NNNNGHTT; PAM sequence: ATAGGATT
aaatcctaatcctcaaggtg

SEQ ID NO: 40833 - DNA, 20 bp, Artificial Sequence
  Description of Artificial Sequence: Synthetic oligonucleotide
  Target: LAMA2; (-) strand; PAM type: NNNNGHTT; PAM sequence: GACAGTTT
ttagatctcaatatgtgcca

SEQ ID NO: 40834 - DNA, 20 bp, Artificial Sequence
  Description of Artificial Sequence: Synthetic oligonucleotide
  Target: LAMA2; (-) strand; PAM type: NNNNGHTT; PAM sequence: TATAGTTT
aattttaagctttgaccact

SEQ ID NO: 40835 - DNA, 20 bp, Artificial Sequence
  Description of Artificial Sequence: Synthetic oligonucleotide
  Target: LAMA2; (-) strand; PAM type: NNNNGHTT; PAM sequence: TTAAGCTT
taactgcatcaattataatt

SEQ ID NO: 40836 - DNA, 20 bp, Artificial Sequence
  Description of Artificial Sequence: Synthetic oligonucleotide
  Target: LAMA2; (-) strand; PAM type: NNNNGHTT; PAM sequence: TACAGATT
cctgaaatcaccattctacc

SEQ ID NO: 40837 - DNA, 20 bp, Artificial Sequence
  Description of Artificial Sequence: Synthetic oligonucleotide
  Target: LAMA2; (-) strand; PAM type: NNNNGHTT; PAM sequence: TTCTGATT
acttattttattctttatac

SEQ ID NO: 40838 - DNA, 20 bp, Artificial Sequence
  Description of Artificial Sequence: Synthetic oligonucleotide
  Target: LAMA2; (-) strand; PAM type: NNNNGHTT; PAM sequence: TATAGCTT
tataatttttctttggaaca

SEQ ID NO: 40839 - DNA, 20 bp, Artificial Sequence
  Description of Artificial Sequence: Synthetic oligonucleotide
  Target: LAMA2; (-) strand; PAM type: NNNNGHTT; PAM sequence: AATAGATT
aatggactgtttcatgagag

SEQ ID NO: 40840 - DNA, 20 bp, Artificial Sequence
  Description of Artificial Sequence: Synthetic oligonucleotide
  Target: LAMA2; (-) strand; PAM type: NNNNGHTT; PAM sequence: GACTGTTT
atggaagaatcaacctaatg

SEQ ID NO: 40841 - DNA, 20 bp, Artificial Sequence
  Description of Artificial Sequence: Synthetic oligonucleotide
  Target: LAMA2; (-) strand; PAM type: NNNNGHTT; PAM sequence: GTGAGATT
ggagttctgtgaaatttgaa

SEQ ID NO: 40842 - DNA, 20 bp, Artificial Sequence
  Description of Artificial Sequence: Synthetic oligonucleotide
  Target: LAMA2; (-) strand; PAM type: NNNNGHTT; PAM sequence: AGAGGCTT
cttgaagagttcttctatgt

SEQ ID NO: 40843 - DNA, 20 bp, Artificial Sequence
  Description of Artificial Sequence: Synthetic oligonucleotide
  Target: LAMA2; (-) strand; PAM type: NNNNGHTT; PAM sequence: AAAAGCTT
ctttcctgagctgtttgaat

SEQ ID NO: 40844 - DNA, 20 bp, Artificial Sequence
  Description of Artificial Sequence: Synthetic oligonucleotide
  Target: LAMA2; (-) strand; PAM type: NNNNGHTT; PAM sequence: AGCTGTTT
ttgtattcctgactttcctg

SEQ ID NO: 40845 - DNA, 20 bp, Artificial Sequence
  Description of Artificial Sequence: Synthetic oligonucleotide
  Target: LAMA2; (-) strand; PAM type: NNNNGHTT; PAM sequence: TGCCGCTT
agtgttctcaatttgtcgtt

SEQ ID NO: 40846 - DNA, 20 bp, Artificial Sequence
  Description of Artificial Sequence: Synthetic oligonucleotide
  Target: LAMA2; (-) strand; PAM type: NNNNGHTT; PAM sequence: TGTCGTTT
cttttaaagtgttctcaatt

SEQ ID NO: 40847 - DNA, 20 bp, Artificial Sequence
  Description of Artificial Sequence: Synthetic oligonucleotide
  Target: LAMA2; (-) strand; PAM type: NNNNGHTT; PAM sequence: GTTGGCTT
ttgatttcatctgcaagacg

SEQ ID NO: 40848 - DNA, 20 bp, Artificial Sequence
  Description of Artificial Sequence: Synthetic oligonucleotide
  Target: LAMA2; (-) strand; PAM type: NNNNGHTT; PAM sequence: AGTTGATT
aatactcacgtctatgatgg

SEQ ID NO: 40849 - DNA, 20 bp, Artificial Sequence
  Description of Artificial Sequence: Synthetic oligonucleotide
  Target: LAMA2; (-) strand; PAM type: NNNNGHTT; PAM sequence: TTGAGTTT
tattcattatcatctctctt

SEQ ID NO: 40850 - DNA, 20 bp, Artificial Sequence
  Description of Artificial Sequence: Synthetic oligonucleotide
  Target: LAMA2; (-) strand; PAM type: NNNNGHTT; PAM sequence: CTGAGCTT
actagtatttgcttctatta

SEQ ID NO: 40851 - DNA, 20 bp, Artificial Sequence
  Description of Artificial Sequence: Synthetic oligonucleotide
  Target: LAMA2; (-) strand; PAM type: NNNNGHTT; PAM sequence: ATTTGCTT
acaagaaaacaagtactagt

SEQ ID NO: 40852 - DNA, 20 bp, Artificial Sequence
  Description of Artificial Sequence: Synthetic oligonucleotide
  Target: LAMA2; (-) strand; PAM type: NNNNGHTT; PAM sequence: AGCAGATT
taatgttatataaatattga

SEQ ID NO: 40853 - DNA, 20 bp, Artificial Sequence
  Description of Artificial Sequence: Synthetic oligonucleotide
  Target: LAMA2; (-) strand; PAM type: NNNNGHTT; PAM sequence: GCCTGTTT
ttagacattacatgttaaaa

SEQ ID NO: 40854 - DNA, 20 bp, Artificial Sequence
  Description of Artificial Sequence: Synthetic oligonucleotide
  Target: LAMA2; (-) strand; PAM type: NNNNGHTT; PAM sequence: TTTAGTTT
caccgtgcctggcccacatg

SEQ ID NO: 40855 - DNA, 20 bp, Artificial Sequence
  Description of Artificial Sequence: Synthetic oligonucleotide
  Target: LAMA2; (-) strand; PAM type: NNNNGHTT; PAM sequence: ACATGTTT
tgagccaccgtgcctggccc

SEQ ID NO: 40856 - DNA, 20 bp, Artificial Sequence
  Description of Artificial Sequence: Synthetic oligonucleotide
  Target: LAMA2; (-) strand; PAM type: NNNNGHTT; PAM sequence: CTGGGATT
cacctcggcctcccaaagtg

SEQ ID NO: 40857 - DNA, 20 bp, Artificial Sequence
  Description of Artificial Sequence: Synthetic oligonucleotide
  Target: LAMA2; (-) strand; PAM type: NNNNGHTT; PAM sequence: GCTGGTTT
ggtttcgccatgttgcccag

SEQ ID NO: 40858 - DNA, 20 bp, Artificial Sequence
  Description of Artificial Sequence: Synthetic oligonucleotide
  Target: LAMA2; (-) strand; PAM type: NNNNGHTT; PAM sequence: CGGGGTTT
ttttgaatatttaatagaga

SEQ ID NO: 40859 - DNA, 20 bp, Artificial Sequence
  Description of Artificial Sequence: Synthetic oligonucleotide
  Target: LAMA2; (-) strand; PAM type: NNNNGHTT; PAM sequence: CTGGGATT
tgcctcagcctcctgagtag

SEQ ID NO: 40860 - DNA, 20 bp, Artificial Sequence
  Description of Artificial Sequence: Synthetic oligonucleotide
  Target: LAMA2; (-) strand; PAM type: NNNNGHTT; PAM sequence: TTTAGTTT
agacataactacacgtttag

SEQ ID NO: 40861 - DNA, 20 bp, Artificial Sequence
  Description of Artificial Sequence: Synthetic oligonucleotide
  Target: LAMA2; (-) strand; PAM type: NNNNGHTT; PAM sequence: TTTAGTTT
ctatgagacataactacacg

SEQ ID NO: 40862 - DNA, 20 bp, Artificial Sequence
  Description of Artificial Sequence: Synthetic oligonucleotide
  Target: LAMA2; (-) strand; PAM type: NNNNGHTT; PAM sequence: ACACGTTT
tttctctatgagacataact

SEQ ID NO: 40863 - DNA, 20 bp, Artificial Sequence
  Description of Artificial Sequence: Synthetic oligonucleotide
  Target: LAMA2; (-) strand; PAM type: NNNNGHTT; PAM sequence: TTTAGTTT
tcctcagacataggtggcaa

SEQ ID NO: 40864 - DNA, 20 bp, Artificial Sequence
  Description of Artificial Sequence: Synthetic oligonucleotide
  Target: LAMA2; (-) strand; PAM type: NNNNGHTT; PAM sequence: GCAAGCTT
cagcctgggacaccttctca

SEQ ID NO: 40865 - DNA, 20 bp, Artificial Sequence
  Description of Artificial Sequence: Synthetic oligonucleotide
  Target: LAMA2; (-) strand; PAM type: NNNNGHTT; PAM sequence: AAATGATT
taacagaaatcaggatttga

SEQ ID NO: 40866 - DNA, 20 bp, Artificial Sequence
  Description of Artificial Sequence: Synthetic oligonucleotide
  Target: LAMA2; (-) strand; PAM type: NNNNGHTT; PAM sequence: TCAGGATT
gtgttcataattaacagaaa

SEQ ID NO: 40867 - DNA, 20 bp, Artificial Sequence
  Description of Artificial Sequence: Synthetic oligonucleotide
  Target: LAMA2; (-) strand; PAM type: NNNNGHTT; PAM sequence: CAAAGCTT
gacttttgatgctgctgtag

SEQ ID NO: 40868 - DNA, 20 bp, Artificial Sequence
  Description of Artificial Sequence: Synthetic oligonucleotide
  Target: LAMA2; (-) strand; PAM type: NNNNGHTT; PAM sequence: CTGTGCTT
aaatgctaataaggcaacca

SEQ ID NO: 40869 - DNA, 20 bp, Artificial Sequence
  Description of Artificial Sequence: Synthetic oligonucleotide
  Target: LAMA2; (-) strand; PAM type: NNNNGHTT; PAM sequence: TTTTGATT
atccttttaacaataaattg

SEQ ID NO: 40870 - DNA, 20 bp, Artificial Sequence
  Description of Artificial Sequence: Synthetic oligonucleotide
  Target: LAMA2; (-) strand; PAM type: NNNNGHTT; PAM sequence: AATTGTTT
aagccatccttttaacaata

SEQ ID NO: 40871 - DNA, 20 bp, Artificial Sequence
  Description of Artificial Sequence: Synthetic oligonucleotide
  Target: LAMA2; (-) strand; PAM type: NNNNGHTT; PAM sequence: TGGAGCTT
gagaaaatgtaatgtctccc

SEQ ID NO: 40872 - DNA, 20 bp, Artificial Sequence
  Description of Artificial Sequence: Synthetic oligonucleotide
  Target: LAMA2; (-) strand; PAM type: NNNNGHTT; PAM sequence: GGCTGTTT
catatcagttatacacagaa

SEQ ID NO: 40873 - DNA, 20 bp, Artificial Sequence
  Description of Artificial Sequence: Synthetic oligonucleotide
  Target: LAMA2; (-) strand; PAM type: NNNNGHTT; PAM sequence: TGTAGATT
gaacaaagctttgcatgtga

SEQ ID NO: 40874 - DNA, 20 bp, Artificial Sequence
  Description of Artificial Sequence: Synthetic oligonucleotide
  Target: LAMA2; (-) strand; PAM type: NNNNGHTT; PAM sequence: CAAAGCTT
gtaagtattaagtatgagaa

SEQ ID NO: 40875 - DNA, 20 bp, Artificial Sequence
  Description of Artificial Sequence: Synthetic oligonucleotide
  Target: LAMA2; (-) strand; PAM type: NNNNGHTT; PAM sequence: AAAAGTTT
acccttcattataaagtggc

SEQ ID NO: 40876 - DNA, 20 bp, Artificial Sequence
  Description of Artificial Sequence: Synthetic oligonucleotide
  Target: LAMA2; (-) strand; PAM type: NNNNGHTT; PAM sequence: TTGTGTTT
ggatctgatgatacctagct

SEQ ID NO: 40877 - DNA, 20 bp, Artificial Sequence
  Description of Artificial Sequence: Synthetic oligonucleotide
  Target: LAMA2; (-) strand; PAM type: NNNNGHTT; PAM sequence: CCTAGCTT
agagcctggatctgatgata

SEQ ID NO: 40878 - DNA, 20 bp, Artificial Sequence
  Description of Artificial Sequence: Synthetic oligonucleotide
  Target: LAMA2; (-) strand; PAM type: NNNNGHTT; PAM sequence: GCCTGTTT
gaatttcagaaggttaaatg

SEQ ID NO: 40879 - DNA, 20 bp, Artificial Sequence
  Description of Artificial Sequence: Synthetic oligonucleotide
  Target: LAMA2; (-) strand; PAM type: NNNNGHTT; PAM sequence: GTGAGATT
ccttatttgtgaagcatgct

SEQ ID NO: 40880 - DNA, 20 bp, Artificial Sequence
  Description of Artificial Sequence: Synthetic oligonucleotide
  Target: LAMA2; (-) strand; PAM type: NNNNGHTT; PAM sequence: TATAGTTT
atctacttattatattgtcc

SEQ ID NO: 40881 - DNA, 20 bp, Artificial Sequence
  Description of Artificial Sequence: Synthetic oligonucleotide
  Target: LAMA2; (-) strand; PAM type: NNNNGHTT; PAM sequence: TCTGGCTT
aacgtcctaattatatgaaa

SEQ ID NO: 40882 - DNA, 20 bp, Artificial Sequence
  Description of Artificial Sequence: Synthetic oligonucleotide
  Target: LAMA2; (-) strand; PAM type: NNNNGHTT; PAM sequence: GGATGATT
cctcatcaaggattctggtg

SEQ ID NO: 40883 - DNA, 20 bp, Artificial Sequence
  Description of Artificial Sequence: Synthetic oligonucleotide
  Target: LAMA2; (-) strand; PAM type: NNNNGHTT; PAM sequence: CAAGGATT
ggagatgtttttagcctcat

SEQ ID NO: 40884 - DNA, 20 bp, Artificial Sequence
  Description of Artificial Sequence: Synthetic oligonucleotide
  Target: LAMA2; (-) strand; PAM type: NNNNGHTT; PAM sequence: AGATGTTT
ggctgcagtggcattgaagg

SEQ ID NO: 40885 - DNA, 20 bp, Artificial Sequence
  Description of Artificial Sequence: Synthetic oligonucleotide
  Target: LAMA2; (-) strand; PAM type: NNNNGHTT; PAM sequence: GTAAGCTT
atatagtccttaatattgct

SEQ ID NO: 40886 - DNA, 20 bp, Artificial Sequence
  Description of Artificial Sequence: Synthetic oligonucleotide
  Target: LAMA2; (-) strand; PAM type: NNNNGHTT; PAM sequence: CTCAGCTT
ttggcttctttggcaacttt

SEQ ID NO: 40887 - DNA, 20 bp, Artificial Sequence
  Description of Artificial Sequence: Synthetic oligonucleotide
  Target: LAMA2; (-) strand; PAM type: NNNNGHTT; PAM sequence: TTTGGCTT
gtagcttcatgtgcaagatc

SEQ ID NO: 40888 - DNA, 20 bp, Artificial Sequence
  Description of Artificial Sequence: Synthetic oligonucleotide
  Target: LAMA2; (-) strand; PAM type: NNNNGHTT; PAM sequence: TGTAGCTT
catttgtttcttaccagttt

SEQ ID NO: 40889 - DNA, 20 bp, Artificial Sequence
  Description of Artificial Sequence: Synthetic oligonucleotide
  Target: LAMA2; (-) strand; PAM type: NNNNGHTT; PAM sequence: ACCAGTTT
acatgtgccatttgtttctt

SEQ ID NO: 40890 - DNA, 20 bp, Artificial Sequence
  Description of Artificial Sequence: Synthetic oligonucleotide
  Target: LAMA2; (-) strand; PAM type: NNNNGHTT; PAM sequence: ATTTGTTT
ccattcccagcacatgtgcc

SEQ ID NO: 40891 - DNA, 20 bp, Artificial Sequence
  Description of Artificial Sequence: Synthetic oligonucleotide
  Target: LAMA2; (-) strand; PAM type: NNNNGHTT; PAM sequence: CTGGGATT
aaaacaaatataccaattta

SEQ ID NO: 40892 - DNA, 20 bp, Artificial Sequence
  Description of Artificial Sequence: Synthetic oligonucleotide
  Target: LAMA2; (-) strand; PAM type: NNNNGHTT; PAM sequence: CTTGGTTT
gagttggtagcacaaacttg

SEQ ID NO: 40893 - DNA, 20 bp, Artificial Sequence
  Description of Artificial Sequence: Synthetic oligonucleotide
  Target: LAMA2; (-) strand; PAM type: NNNNGHTT; PAM sequence: ACTTGCTT
tttgtgagttggtagcacaa

SEQ ID NO: 40894 - DNA, 20 bp, Artificial Sequence
  Description of Artificial Sequence: Synthetic oligonucleotide
  Target: LAMA2; (-) strand; PAM type: NNNNGHTT; PAM sequence: GCCTGTTT
ctatccagagtgttgtcttt

SEQ ID NO: 40895 - DNA, 20 bp, Artificial Sequence
  Description of Artificial Sequence: Synthetic oligonucleotide
  Target: LAMA2; (-) strand; PAM type: NNNNGHTT; PAM sequence: GTGTGATT
ttcatatgtaaccaatttgt

SEQ ID NO: 40896 - DNA, 20 bp, Artificial Sequence
  Description of Artificial Sequence: Synthetic oligonucleotide
  Target: LAMA2; (-) strand; PAM type: NNNNGHTT; PAM sequence: GTATGTTT
gtttagaagcatatgatcca

SEQ ID NO: 40897 - DNA, 20 bp, Artificial Sequence
  Description of Artificial Sequence: Synthetic oligonucleotide
  Target: LAMA2; (-) strand; PAM type: NNNNGHTT; PAM sequence: AATTGTTT
taattcataaacatggtata

SEQ ID NO: 40898 - DNA, 20 bp, Artificial Sequence
  Description of Artificial Sequence: Synthetic oligonucleotide
  Target: LAMA2; (-) strand; PAM type: NNNNGHTT; PAM sequence: AAGAGCTT
aatgattgtagccaaaggtt

SEQ ID NO: 40899 - DNA, 20 bp, Artificial Sequence
  Description of Artificial Sequence: Synthetic oligonucleotide
  Target: LAMA2; (-) strand; PAM type: NNNNGHTT; PAM sequence: CAATGATT
tgttccaaatgtattacgaa

SEQ ID NO: 40900 - DNA, 20 bp, Artificial Sequence
  Description of Artificial Sequence: Synthetic oligonucleotide
  Target: LAMA2; (-) strand; PAM type: NNNNGHTT; PAM sequence: TAAAGATT
gttgctttacatctaaagca

SEQ ID NO: 40901 - DNA, 20 bp, Artificial Sequence
  Description of Artificial Sequence: Synthetic oligonucleotide
  Target: LAMA2; (-) strand; PAM type: NNNNGHTT; PAM sequence: TGTTGCTT
cacacaactcatgtacaaaa

SEQ ID NO: 40902 - DNA, 20 bp, Artificial Sequence
  Description of Artificial Sequence: Synthetic oligonucleotide
  Target: LAMA2; (-) strand; PAM type: NNNNGHTT; PAM sequence: ATGAGATT
ttttattcaggatgattcct

SEQ ID NO: 40903 - DNA, 20 bp, Artificial Sequence
  Description of Artificial Sequence: Synthetic oligonucleotide
  Target: LAMA2; (-) strand; PAM type: NNNNGHTT; PAM sequence: GGATGATT
ggttctgaacattttattca

SEQ ID NO: 40904 - DNA, 20 bp, Artificial Sequence
  Description of Artificial Sequence: Synthetic oligonucleotide
  Target: LAMA2; (-) strand; PAM type: NNNNGHTT; PAM sequence: ATGTGTTT
ttctcccccaaaaaattctc

SEQ ID NO: 40905 - DNA, 20 bp, Artificial Sequence
  Description of Artificial Sequence: Synthetic oligonucleotide
  Target: LAMA2; (-) strand; PAM type: NNNNGHTT; PAM sequence: ATCAGATT
cactcacagtcaaatgtcca

SEQ ID NO: 40906 - DNA, 20 bp, Artificial Sequence
  Description of Artificial Sequence: Synthetic oligonucleotide
  Target: LAMA2; (-) strand; PAM type: NNNNGHTT; PAM sequence: CACTGCTT
ttgatcagtttctttaacac

SEQ ID NO: 40907 - DNA, 20 bp, Artificial Sequence
  Description of Artificial Sequence: Synthetic oligonucleotide
  Target: LAMA2; (-) strand; PAM type: NNNNGHTT; PAM sequence: ATCAGTTT
ctgaagcaaagaaaatattg

SEQ ID NO: 40908 - DNA, 20 bp, Artificial Sequence
  Description of Artificial Sequence: Synthetic oligonucleotide
  Target: LAMA2; (-) strand; PAM type: NNNNGHTT; PAM sequence: TGATGTTT
tacaaattgctcatagaata

SEQ ID NO: 40909 - DNA, 20 bp, Artificial Sequence
  Description of Artificial Sequence: Synthetic oligonucleotide
  Target: LAMA2; (-) strand; PAM type: NNNNGHTT; PAM sequence: AAATGCTT
gaaaggataactgaacatag

SEQ ID NO: 40910 - DNA, 20 bp, Artificial Sequence
  Description of Artificial Sequence: Synthetic oligonucleotide
  Target: LAMA2; (-) strand; PAM type: NNNNGHTT; PAM sequence: AGTAGATT
aatttagtttagatttgaaa

SEQ ID NO: 40911 - DNA, 20 bp, Artificial Sequence
  Description of Artificial Sequence: Synthetic oligonucleotide
  Target: LAMA2; (-) strand; PAM type: NNNNGHTT; PAM sequence: TTTAGATT
gaagatggattaaaatttag

SEQ ID NO: 40912 - DNA, 20 bp, Artificial Sequence
  Description of Artificial Sequence: Synthetic oligonucleotide
  Target: LAMA2; (-) strand; PAM type: NNNNGHTT; PAM sequence: TTTAGTTT
taacagaagatggattaaaa

SEQ ID NO: 40913 - DNA, 20 bp, Artificial Sequence
  Description of Artificial Sequence: Synthetic oligonucleotide
  Target: LAMA2; (-) strand; PAM type: NNNNGHTT; PAM sequence: GATGGATT
tagaaaattatctaacagaa

SEQ ID NO: 40914 - DNA, 20 bp, Artificial Sequence
  Description of Artificial Sequence: Synthetic oligonucleotide
  Target: LAMA2; (-) strand; PAM type: NNNNGHTT; PAM sequence: AAAAGATT
cagcaaatttttattggtat

SEQ ID NO: 40915 - DNA, 20 bp, Artificial Sequence
  Description of Artificial Sequence: Synthetic oligonucleotide
  Target: LAMA2; (-) strand; PAM type: NNNNGHTT; PAM sequence: AAATGATT
gcacacttcatgttggcaaa

SEQ ID NO: 40916 - DNA, 20 bp, Artificial Sequence
  Description of Artificial Sequence: Synthetic oligonucleotide
  Target: LAMA2; (-) strand; PAM type: NNNNGHTT; PAM sequence: CTCTGTTT
cattacaactcaccatcact

SEQ ID NO: 40917 - DNA, 20 bp, Artificial Sequence
  Description of Artificial Sequence: Synthetic oligonucleotide
  Target: LAMA2; (-) strand; PAM type: NNNNGHTT; PAM sequence: AAATGATT
tcagacatttaattattttt

SEQ ID NO: 40918 - DNA, 20 bp, Artificial Sequence
  Description of Artificial Sequence: Synthetic oligonucleotide
  Target: LAMA2; (-) strand; PAM type: NNNNGHTT; PAM sequence: CACTGATT
ccaatagtcatttaataaat

SEQ ID NO: 40919 - DNA, 20 bp, Artificial Sequence
  Description of Artificial Sequence: Synthetic oligonucleotide
  Target: LAMA2; (-) strand; PAM type: NNNNGHTT; PAM sequence: GACAGATT
cattccaacaaaatttctgg

SEQ ID NO: 40920 - DNA, 20 bp, Artificial Sequence
  Description of Artificial Sequence: Synthetic oligonucleotide
  Target: LAMA2; (-) strand; PAM type: NNNNGHTT; PAM sequence: TAATGCTT
atctagataattactcaacg

SEQ ID NO: 40921 - DNA, 20 bp, Artificial Sequence
  Description of Artificial Sequence: Synthetic oligonucleotide
  Target: LAMA2; (-) strand; PAM type: NNNNGHTT; PAM sequence: TATAGCTT
ctcattcttctctgttgagc

SEQ ID NO: 40922 - DNA, 20 bp, Artificial Sequence
  Description of Artificial Sequence: Synthetic oligonucleotide
  Target: LAMA2; (-) strand; PAM type: NNNNGHTT; PAM sequence: TTAAGCTT
tagaggactcttctgtattg

SEQ ID NO: 40923 - DNA, 20 bp, Artificial Sequence
  Description of Artificial Sequence: Synthetic oligonucleotide
  Target: LAMA2; (-) strand; PAM type: NNNNGHTT; PAM sequence: CTTTGTTT
tgcaaatgtataaattgttt

SEQ ID NO: 40924 - DNA, 20 bp, Artificial Sequence
  Description of Artificial Sequence: Synthetic oligonucleotide
  Target: LAMA2; (-) strand; PAM type: NNNNGHTT; PAM sequence: AATTGTTT
ttttctcctgcaaatgtata

SEQ ID NO: 40925 - DNA, 20 bp, Artificial Sequence
  Description of Artificial Sequence: Synthetic oligonucleotide
  Target: LAMA2; (-) strand; PAM type: NNNNGHTT; PAM sequence: CAATGCTT
ttcttttcttatggtatttt

SEQ ID NO: 40926 - DNA, 20 bp, Artificial Sequence
  Description of Artificial Sequence: Synthetic oligonucleotide
  Target: LAMA2; (-) strand; PAM type: NNNNGHTT; PAM sequence: CTTTGTTT
ggaggttatttctatcattt

SEQ ID NO: 40927 - DNA, 20 bp, Artificial Sequence
  Description of Artificial Sequence: Synthetic oligonucleotide
  Target: LAMA2; (-) strand; PAM type: NNNNGHTT; PAM sequence: TTATGCTT
gattttaaacattgtcttaa

SEQ ID NO: 40928 - DNA, 20 bp, Artificial Sequence
  Description of Artificial Sequence: Synthetic oligonucleotide
  Target: LAMA2; (-) strand; PAM type: NNNNGHTT; PAM sequence: AGTTGATT
gtaaatttttaaaaaatcaa

SEQ ID NO: 40929 - DNA, 20 bp, Artificial Sequence
  Description of Artificial Sequence: Synthetic oligonucleotide
  Target: LAMA2; (-) strand; PAM type: NNNNGHTT; PAM sequence: GTGTGTTT
tgtgattcttgattgtctat

SEQ ID NO: 40930 - DNA, 20 bp, Artificial Sequence
  Description of Artificial Sequence: Synthetic oligonucleotide
  Target: LAMA2; (-) strand; PAM type: NNNNGHTT; PAM sequence: TCTTGATT
tattttcctttcagtgtgat

SEQ ID NO: 40931 - DNA, 20 bp, Artificial Sequence
  Description of Artificial Sequence: Synthetic oligonucleotide
  Target: LAMA2; (-) strand; PAM type: NNNNGHTT; PAM sequence: GTGTGATT
tcactcatattttcctttca

SEQ ID NO: 40932 - DNA, 20 bp, Artificial Sequence
  Description of Artificial Sequence: Synthetic oligonucleotide
  Target: LAMA2; (-) strand; PAM type: NNNNGHTT; PAM sequence: TCCTGCTT
aacaaatcgtattagctttc

SEQ ID NO: 40933 - DNA, 20 bp, Artificial Sequence
  Description of Artificial Sequence: Synthetic oligonucleotide
  Target: LAMA2; (-) strand; PAM type: NNNNGHTT; PAM sequence: ATTAGCTT
ctgcagtacaaacaaatcgt

SEQ ID NO: 40934 - DNA, 20 bp, Artificial Sequence
  Description of Artificial Sequence: Synthetic oligonucleotide
  Target: LAMA2; (-) strand; PAM type: NNNNGHTT; PAM sequence: AAATGCTT
gtgattatatgtaggaaaac

SEQ ID NO: 40935 - DNA, 20 bp, Artificial Sequence
  Description of Artificial Sequence: Synthetic oligonucleotide
  Target: LAMA2; (-) strand; PAM type: NNNNGHTT; PAM sequence: TGGTGATT
tactaaatgagatattttct

SEQ ID NO: 40936 - DNA, 20 bp, Artificial Sequence
  Description of Artificial Sequence: Synthetic oligonucleotide
  Target: LAMA2; (-) strand; PAM type: NNNNGHTT; PAM sequence: TTCTGTTT
ttatgagtgacatatctcct

SEQ ID NO: 40937 - DNA, 20 bp, Artificial Sequence
  Description of Artificial Sequence: Synthetic oligonucleotide
  Target: LAMA2; (-) strand; PAM type: NNNNGHTT; PAM sequence: AAATGTTT
ttgagtttactatgacctgg

SEQ ID NO: 40938 - DNA, 20 bp, Artificial Sequence
  Description of Artificial Sequence: Synthetic oligonucleotide
  Target: LAMA2; (-) strand; PAM type: NNNNGHTT; PAM sequence: TTGAGTTT
tctgatagataatgtaggct

SEQ ID NO: 40939 - DNA, 20 bp, Artificial Sequence
  Description of Artificial Sequence: Synthetic oligonucleotide
  Target: LAMA2; (-) strand; PAM type: NNNNGHTT; PAM sequence: GTAGGCTT
aatctgatctgatagataat

SEQ ID NO: 40940 - DNA, 20 bp, Artificial Sequence
  Description of Artificial Sequence: Synthetic oligonucleotide
  Target: LAMA2; (-) strand; PAM type: NNNNGHTT; PAM sequence: CTCAGCTT
tcgggctggcttccctgctc

SEQ ID NO: 40941 - DNA, 20 bp, Artificial Sequence
  Description of Artificial Sequence: Synthetic oligonucleotide
  Target: LAMA2; (-) strand; PAM type: NNNNGHTT; PAM sequence: GCTGGCTT
tttgaggttttgggactcgg

SEQ ID NO: 40942 - DNA, 20 bp, Artificial Sequence
  Description of Artificial Sequence: Synthetic oligonucleotide
  Target: LAMA2; (-) strand; PAM type: NNNNGHTT; PAM sequence: TGAGGTTT
actgtcagcttccctacttt

SEQ ID NO: 40943 - DNA, 20 bp, Artificial Sequence
  Description of Artificial Sequence: Synthetic oligonucleotide
  Target: LAMA2; (-) strand; PAM type: NNNNGHTT; PAM sequence: GTCAGCTT
cacagactgaaggctgcact

SEQ ID NO: 40944 - DNA, 20 bp, Artificial Sequence
  Description of Artificial Sequence: Synthetic oligonucleotide
  Target: LAMA2; (-) strand; PAM type: NNNNGHTT; PAM sequence: AGGGGTTT
tggattcctggacttacacc

SEQ ID NO: 40945 - DNA, 20 bp, Artificial Sequence
  Description of Artificial Sequence: Synthetic oligonucleotide
  Target: LAMA2; (-) strand; PAM type: NNNNGHTT; PAM sequence: TTTGGATT
acactccaagttcttcagct

SEQ ID NO: 40946 - DNA, 20 bp, Artificial Sequence
  Description of Artificial Sequence: Synthetic oligonucleotide
  Target: LAMA2; (-) strand; PAM type: NNNNGHTT; PAM sequence: TTCAGCTT
gaacatcacactccaagttc

SEQ ID NO: 40947 - DNA, 20 bp, Artificial Sequence
  Description of Artificial Sequence: Synthetic oligonucleotide
  Target: LAMA2; (-) strand; PAM type: NNNNGHTT; PAM sequence: AGGAGATT
ctctgtgagggtgttgccaa

SEQ ID NO: 40948 - DNA, 20 bp, Artificial Sequence
  Description of Artificial Sequence: Synthetic oligonucleotide
  Target: LAMA2; (-) strand; PAM type: NNNNGHTT; PAM sequence: ATTGGATT
taatattgagtatcagcttg

SEQ ID NO: 40949 - DNA, 20 bp, Artificial Sequence
  Description of Artificial Sequence: Synthetic oligonucleotide
  Target: LAMA2; (-) strand; PAM type: NNNNGHTT; PAM sequence: GCTTGATT
atgactaatattgagtatca

SEQ ID NO: 40950 - DNA, 20 bp, Artificial Sequence
  Description of Artificial Sequence: Synthetic oligonucleotide
  Target: LAMA2; (-) strand; PAM type: NNNNGHTT; PAM sequence: ATCAGCTT
tgtgatgactaatattgagt

SEQ ID NO: 40951 - DNA, 20 bp, Artificial Sequence
  Description of Artificial Sequence: Synthetic oligonucleotide
  Target: LAMA2; (-) strand; PAM type: NNNNGHTT; PAM sequence: GTATGATT
tgtctttatttggagattat

SEQ ID NO: 40952 - DNA, 20 bp, Artificial Sequence
  Description of Artificial Sequence: Synthetic oligonucleotide
  Target: LAMA2; (-) strand; PAM type: NNNNGHTT; PAM sequence: TGGAGATT
atgttattattgtctttatt

SEQ ID NO: 40953 - DNA, 20 bp, Artificial Sequence
  Description of Artificial Sequence: Synthetic oligonucleotide
  Target: LAMA2; (-) strand; PAM type: NNNNGHTT; PAM sequence: TTCTGATT
taggttaaggattagtgtgc

SEQ ID NO: 40954 - DNA, 20 bp, Artificial Sequence
  Description of Artificial Sequence: Synthetic oligonucleotide
  Target: LAMA2; (-) strand; PAM type: NNNNGHTT; PAM sequence: GTGTGCTT
agcatttaggttaaggatta

SEQ ID NO: 40955 - DNA, 20 bp, Artificial Sequence
  Description of Artificial Sequence: Synthetic oligonucleotide
  Target: LAMA2; (-) strand; PAM type: NNNNGHTT; PAM sequence: TAAGGATT
ttatgtaatagcatttaggt

SEQ ID NO: 40956 - DNA, 20 bp, Artificial Sequence
  Description of Artificial Sequence: Synthetic oligonucleotide
  Target: LAMA2; (-) strand; PAM type: NNNNGHTT; PAM sequence: ATTTGCTT
tgtactaggaaaatatcttc

SEQ ID NO: 40957 - DNA, 20 bp, Artificial Sequence
  Description of Artificial Sequence: Synthetic oligonucleotide
  Target: LAMA2; (-) strand; PAM type: NNNNGHTT; PAM sequence: ATATGTTT
tcctccttattctgttaaga

SEQ ID NO: 40958 - DNA, 20 bp, Artificial Sequence
  Description of Artificial Sequence: Synthetic oligonucleotide
  Target: LAMA2; (-) strand; PAM type: NNNNGHTT; PAM sequence: AGGTGCTT
taaaaagccatgacccgctg

SEQ ID NO: 40959 - DNA, 20 bp, Artificial Sequence
  Description of Artificial Sequence: Synthetic oligonucleotide
  Target: LAMA2; (-) strand; PAM type: NNNNGHTT; PAM sequence: AAAGGTTT
ggcacaggtccttccagaat

SEQ ID NO: 40960 - DNA, 20 bp, Artificial Sequence
  Description of Artificial Sequence: Synthetic oligonucleotide
  Target: LAMA2; (-) strand; PAM type: NNNNGHTT; PAM sequence: CTGTGTTT
tctcttaatattaccatcct

SEQ ID NO: 40961 - DNA, 20 bp, Artificial Sequence
  Description of Artificial Sequence: Synthetic oligonucleotide
  Target: LAMA2; (-) strand; PAM type: NNNNGHTT; PAM sequence: GGGGGTTT
ccaagtcaacaggctaagaa

SEQ ID NO: 40962 - DNA, 20 bp, Artificial Sequence
  Description of Artificial Sequence: Synthetic oligonucleotide
  Target: LAMA2; (-) strand; PAM type: NNNNGHTT; PAM sequence: TTAAGATT
tgattccattaaactggaag

SEQ ID NO: 40963 - DNA, 20 bp, Artificial Sequence
  Description of Artificial Sequence: Synthetic oligonucleotide
  Target: LAMA2; (-) strand; PAM type: NNNNGHTT; PAM sequence: CAATGATT
gctgtcaccaagggatacaa

SEQ ID NO: 40964 - DNA, 20 bp, Artificial Sequence
  Description of Artificial Sequence: Synthetic oligonucleotide
  Target: LAMA2; (-) strand; PAM type: NNNNGHTT; PAM sequence: TTTTGCTT
ctagtgacccactagcaaaa

SEQ ID NO: 40965 - DNA, 20 bp, Artificial Sequence
  Description of Artificial Sequence: Synthetic oligonucleotide
  Target: LAMA2; (-) strand; PAM type: NNNNGHTT; PAM sequence: TACTGTTT
aatcagtgtccaaaatatgg

SEQ ID NO: 40966 - DNA, 20 bp, Artificial Sequence
  Description of Artificial Sequence: Synthetic oligonucleotide
  Target: LAMA2; (-) strand; PAM type: NNNNGHTT; PAM sequence: GGTGGATT
tttcccatcatcctgaagca

SEQ ID NO: 40967 - DNA, 20 bp, Artificial Sequence
  Description of Artificial Sequence: Synthetic oligonucleotide
  Target: LAMA2; (-) strand; PAM type: NNNNGHTT; PAM sequence: TCATGTTT
catggaattcactggtctta

SEQ ID NO: 40968 - DNA, 20 bp, Artificial Sequence
  Description of Artificial Sequence: Synthetic oligonucleotide
  Target: LAMA2; (-) strand; PAM type: NNNNGHTT; PAM sequence: CAATGTTT
ggatttgcccatcctacgcc

SEQ ID NO: 40969 - DNA, 20 bp, Artificial Sequence
  Description of Artificial Sequence: Synthetic oligonucleotide
  Target: LAMA2; (-) strand; PAM type: NNNNGHTT; PAM sequence: TATGGATT
gaataggcacttattctgga

SEQ ID NO: 40970 - DNA, 20 bp, Artificial Sequence
  Description of Artificial Sequence: Synthetic oligonucleotide
  Target: LAMA2; (-) strand; PAM type: NNNNGHTT; PAM sequence: AGAGGTTT
ctcttccatcatgcaaaggc

SEQ ID NO: 40971 - DNA, 20 bp, Artificial Sequence
  Description of Artificial Sequence: Synthetic oligonucleotide
  Target: LAMA2; (-) strand; PAM type: NNNNGHTT; PAM sequence: GGTTGATT
cagccagcttcttggtggca

SEQ ID NO: 40972 - DNA, 20 bp, Artificial Sequence
  Description of Artificial Sequence: Synthetic oligonucleotide
  Target: LAMA2; (-) strand; PAM type: NNNNGHTT; PAM sequence: GCCAGCTT
atccttcctcagggtgatca

SEQ ID NO: 40973 - DNA, 20 bp, Artificial Sequence
  Description of Artificial Sequence: Synthetic oligonucleotide
  Target: LAMA2; (-) strand; PAM type: NNNNGHTT; PAM sequence: GGAGGATT
caacgggtgacctcagctga

SEQ ID NO: 40974 - DNA, 20 bp, Artificial Sequence
  Description of Artificial Sequence: Synthetic oligonucleotide
  Target: LAMA2; (-) strand; PAM type: NNNNGHTT; PAM sequence: GCATGATT
tggtcagggacttggaagaa

SEQ ID NO: 40975 - DNA, 20 bp, Artificial Sequence
  Description of Artificial Sequence: Synthetic oligonucleotide
  Target: LAMA2; (-) strand; PAM type: NNNNGHTT; PAM sequence: AATGGTTT
ctaattaatgtgctgtagcc

SEQ ID NO: 40976 - DNA, 20 bp, Artificial Sequence
  Description of Artificial Sequence: Synthetic oligonucleotide
  Target: LAMA2; (-) strand; PAM type: NNNNGHTT; PAM sequence: ACTTGCTT
agcagggcacctggttgtgc

SEQ ID NO: 40977 - DNA, 20 bp, Artificial Sequence
  Description of Artificial Sequence: Synthetic oligonucleotide
  Target: LAMA2; (-) strand; PAM type: NNNNGHTT; PAM sequence: AGATGATT
aagactagggcctggttcac

SEQ ID NO: 40978 - DNA, 20 bp, Artificial Sequence
  Description of Artificial Sequence: Synthetic oligonucleotide
  Target: LAMA2; (-) strand; PAM type: NNNNGHTT; PAM sequence: GGATGCTT
taaactgcctttcatgaact

SEQ ID NO: 40979 - DNA, 20 bp, Artificial Sequence
  Description of Artificial Sequence: Synthetic oligonucleotide
  Target: LAMA2; (-) strand; PAM type: NNNNGHTT; PAM sequence: GAATGTTT
actgggctttggtagaaact

SEQ ID NO: 40980 - DNA, 20 bp, Artificial Sequence
  Description of Artificial Sequence: Synthetic oligonucleotide
  Target: LAMA2; (-) strand; PAM type: NNNNGHTT; PAM sequence: CTGGGCTT
agacaactcttggcctgtta

SEQ ID NO: 40981 - DNA, 20 bp, Artificial Sequence
  Description of Artificial Sequence: Synthetic oligonucleotide
  Target: LAMA2; (-) strand; PAM type: NNNNGHTT; PAM sequence: CTAGGATT
actcctagaggtggaagcct

SEQ ID NO: 40982 - DNA, 20 bp, Artificial Sequence
  Description of Artificial Sequence: Synthetic oligonucleotide
  Target: LAMA2; (-) strand; PAM type: NNNNGHTT; PAM sequence: TCCTGTTT
gtgtcaatggcagacaggga

SEQ ID NO: 40983 - DNA, 20 bp, Artificial Sequence
  Description of Artificial Sequence: Synthetic oligonucleotide
  Target: LAMA2; (-) strand; PAM type: NNNNGHTT; PAM sequence: TGCCGATT
gactgctgtgcaaactgctc

SEQ ID NO: 40984 - DNA, 20 bp, Artificial Sequence
  Description of Artificial Sequence: Synthetic oligonucleotide
  Target: LAMA2; (-) strand; PAM type: NNNNGHTT; PAM sequence: ACTTGATT
atggttaatactgagtgcca

SEQ ID NO: 40985 - DNA, 20 bp, Artificial Sequence
  Description of Artificial Sequence: Synthetic oligonucleotide
  Target: LAMA2; (-) strand; PAM type: NNNNGHTT; PAM sequence: GTGTGCTT
atatcctcgtgtcactgaga

SEQ ID NO: 40986 - DNA, 20 bp, Artificial Sequence
  Description of Artificial Sequence: Synthetic oligonucleotide
  Target: LAMA2; (-) strand; PAM type: NNNNGHTT; PAM sequence: ACCTGATT
tttgtttgttgtttggatat

SEQ ID NO: 40987 - DNA, 20 bp, Artificial Sequence
  Description of Artificial Sequence: Synthetic oligonucleotide
  Target: LAMA2; (-) strand; PAM type: NNNNGHTT; PAM sequence: TGTTGTTT
tcttattttatttgtttgtt

SEQ ID NO: 40988 - DNA, 20 bp, Artificial Sequence
  Description of Artificial Sequence: Synthetic oligonucleotide
  Target: LAMA2; (-) strand; PAM type: NNNNGHTT; PAM sequence: GTTTGTTT
gcattagtcttattttattt

SEQ ID NO: 40989 - DNA, 20 bp, Artificial Sequence
  Description of Artificial Sequence: Synthetic oligonucleotide
  Target: LAMA2; (-) strand; PAM type: NNNNGHTT; PAM sequence: ATTTGTTT
ttctgcattagtcttatttt

SEQ ID NO: 40990 - DNA, 20 bp, Artificial Sequence
  Description of Artificial Sequence: Synthetic oligonucleotide
  Target: LAMA2; (-) strand; PAM type: NNNNGHTT; PAM sequence: TGGAGATT
agataatgtttcaaaacagg

SEQ ID NO: 40991 - DNA, 20 bp, Artificial Sequence
  Description of Artificial Sequence: Synthetic oligonucleotide
  Target: LAMA2; (-) strand; PAM type: NNNNGHTT; PAM sequence: TAATGTTT
aggaaaggaaggaaagaaga

SEQ ID NO: 40992 - DNA, 20 bp, Artificial Sequence
  Description of Artificial Sequence: Synthetic oligonucleotide
  Target: LAMA2; (-) strand; PAM type: NNNNGHTT; PAM sequence: GAAAGTTT
aagagagacagagacagaga

SEQ ID NO: 40993 - DNA, 20 bp, Artificial Sequence
  Description of Artificial Sequence: Synthetic oligonucleotide
  Target: LAMA2; (-) strand; PAM type: NNNNGHTT; PAM sequence: TCAGGATT
aacaaattgagaaaggaaat

SEQ ID NO: 40994 - DNA, 20 bp, Artificial Sequence
  Description of Artificial Sequence: Synthetic oligonucleotide
  Target: LAMA2; (-) strand; PAM type: NNNNGHTT; PAM sequence: TTCTGTTT
atctatccatctcctaatag

SEQ ID NO: 40995 - DNA, 20 bp, Artificial Sequence
  Description of Artificial Sequence: Synthetic oligonucleotide
  Target: LAMA2; (-) strand; PAM type: NNNNGHTT; PAM sequence: CCGTGATT
gtggtttgtaccatcagctc

SEQ ID NO: 40996 - DNA, 20 bp, Artificial Sequence
  Description of Artificial Sequence: Synthetic oligonucleotide
  Target: LAMA2; (-) strand; PAM type: NNNNGHTT; PAM sequence: TGTGGTTT
tttctctctagttcttgaac

SEQ ID NO: 40997 - DNA, 20 bp, Artificial Sequence
  Description of Artificial Sequence: Synthetic oligonucleotide
  Target: LAMA2; (-) strand; PAM type: NNNNGHTT; PAM sequence: TACAGATT
ccttcccttcttttctgcct

SEQ ID NO: 40998 - DNA, 20 bp, Artificial Sequence
  Description of Artificial Sequence: Synthetic oligonucleotide
  Target: LAMA2; (-) strand; PAM type: NNNNGHTT; PAM sequence: AAGAGATT
gtgtttctggatgacagtaa

SEQ ID NO: 40999 - DNA, 20 bp, Artificial Sequence
  Description of Artificial Sequence: Synthetic oligonucleotide
  Target: LAMA2; (-) strand; PAM type: NNNNGHTT; PAM sequence: GGGTGTTT
atttccgggtgtgtctgtga

SEQ ID NO: 41000 - DNA, 20 bp, Artificial Sequence
  Description of Artificial Sequence: Synthetic oligonucleotide
  Target: LAMA2; (-) strand; PAM type: NNNNGHTT; PAM sequence: TCTTGCTT
cactttgtttaaagcttaca

SEQ ID NO: 41001 - DNA, 20 bp, Artificial Sequence
  Description of Artificial Sequence: Synthetic oligonucleotide
  Target: LAMA2; (-) strand; PAM type: NNNNGHTT; PAM sequence: TAAAGCTT
ccccttttcttcactttgtt

SEQ ID NO: 41002 - DNA, 20 bp, Artificial Sequence
  Description of Artificial Sequence: Synthetic oligonucleotide
  Target: LAMA2; (-) strand; PAM type: NNNNGHTT; PAM sequence: CTTTGTTT
ggcttctccccttttcttca

SEQ ID NO: 41003 - DNA, 20 bp, Artificial Sequence
  Description of Artificial Sequence: Synthetic oligonucleotide
  Target: LAMA2; (-) strand; PAM type: NNNNGHTT; PAM sequence: CTAGGCTT
tctgtataatgttatttttt

SEQ ID NO: 41004 - DNA, 20 bp, Artificial Sequence
  Description of Artificial Sequence: Synthetic oligonucleotide
  Target: LAMA2; (-) strand; PAM type: NNNNGHTT; PAM sequence: TGGAGTTT
agctctttttgaggtttcta

SEQ ID NO: 41005 - DNA, 20 bp, Artificial Sequence
  Description of Artificial Sequence: Synthetic oligonucleotide
  Target: LAMA2; (-) strand; PAM type: NNNNGHTT; PAM sequence: TGAGGTTT
ttgcaagaaaaagctctttt

SEQ ID NO: 41006 - DNA, 20 bp, Artificial Sequence
  Description of Artificial Sequence: Synthetic oligonucleotide
  Target: LAMA2; (-) strand; PAM type: NNNNGHTT; PAM sequence: TCCTGTTT
taagagtaaagtttcaaaag

SEQ ID NO: 41007 - DNA, 20 bp, Artificial Sequence
  Description of Artificial Sequence: Synthetic oligonucleotide
  Target: LAMA2; (-) strand; PAM type: NNNNGHTT; PAM sequence: TAAAGTTT
actgatctgtcacataagag

SEQ ID NO: 41008 - DNA, 20 bp, Artificial Sequence
  Description of Artificial Sequence: Synthetic oligonucleotide
  Target: LAMA2; (-) strand; PAM type: NNNNGHTT; PAM sequence: GCGTGTTT
tagttcagtgcttcttatca

SEQ ID NO: 41009 - DNA, 20 bp, Artificial Sequence
  Description of Artificial Sequence: Synthetic oligonucleotide
  Target: LAMA2; (-) strand; PAM type: NNNNGHTT; PAM sequence: CAGTGCTT
gaagcgtatttgtagtagtt

SEQ ID NO: 41010 - DNA, 20 bp, Artificial Sequence
  Description of Artificial Sequence: Synthetic oligonucleotide
  Target: LAMA2; (-) strand; PAM type: NNNNGHTT; PAM sequence: CTTAGATT
tatgctttccataatgctta

SEQ ID NO: 41011 - DNA, 20 bp, Artificial Sequence
  Description of Artificial Sequence: Synthetic oligonucleotide
  Target: LAMA2; (-) strand; PAM type: NNNNGHTT; PAM sequence: TAATGCTT
tattatcattatgctttcca

SEQ ID NO: 41012 - DNA, 20 bp, Artificial Sequence
  Description of Artificial Sequence: Synthetic oligonucleotide
  Target: LAMA2; (-) strand; PAM type: NNNNGHTT; PAM sequence: TTATGCTT
atatttaataattattatca

SEQ ID NO: 41013 - DNA, 20 bp, Artificial Sequence
  Description of Artificial Sequence: Synthetic oligonucleotide
  Target: LAMA2; (-) strand; PAM type: NNNNGHTT; PAM sequence: CTTTGTTT
tctcttgtgttttagttcca

SEQ ID NO: 41014 - DNA, 20 bp, Artificial Sequence
  Description of Artificial Sequence: Synthetic oligonucleotide
  Target: LAMA2; (-) strand; PAM type: NNNNGHTT; PAM sequence: TTGTGTTT
ttttccattttattagtctc

SEQ ID NO: 41015 - DNA, 20 bp, Artificial Sequence
  Description of Artificial Sequence: Synthetic oligonucleotide
  Target: LAMA2; (-) strand; PAM type: NNNNGHTT; PAM sequence: TTTTGCTT
aaaactaaagttaattagct

SEQ ID NO: 41016 - DNA, 20 bp, Artificial Sequence
  Description of Artificial Sequence: Synthetic oligonucleotide
  Target: LAMA2; (-) strand; PAM type: NNNNGHTT; PAM sequence: ATTAGCTT
cttagtgaaaactaaagtta

SEQ ID NO: 41017 - DNA, 20 bp, Artificial Sequence
  Description of Artificial Sequence: Synthetic oligonucleotide
  Target: LAMA2; (-) strand; PAM type: NNNNGHTT; PAM sequence: CAATGTTT
tatttttccagatttttttt

SEQ ID NO: 41018 - DNA, 20 bp, Artificial Sequence
  Description of Artificial Sequence: Synthetic oligonucleotide
  Target: LAMA2; (-) strand; PAM type: NNNNGHTT; PAM sequence: TCCAGATT
aatattgtcaattttatttt

SEQ ID NO: 41019 - DNA, 20 bp, Artificial Sequence
  Description of Artificial Sequence: Synthetic oligonucleotide
  Target: LAMA2; (-) strand; PAM type: NNNNGHTT; PAM sequence: TTCTGTTT
atatatacacttccaatttg

SEQ ID NO: 41020 - DNA, 20 bp, Artificial Sequence
  Description of Artificial Sequence: Synthetic oligonucleotide
  Target: LAMA2; (-) strand; PAM type: NNNNGHTT; PAM sequence: TTTGGATT
aattctgcctccaaactgcc

SEQ ID NO: 41021 - DNA, 20 bp, Artificial Sequence
  Description of Artificial Sequence: Synthetic oligonucleotide
  Target: LAMA2; (-) strand; PAM type: NNNNGHTT; PAM sequence: TAACGTTT
atgtattttttagatgtgat

SEQ ID NO: 41022 - DNA, 20 bp, Artificial Sequence
  Description of Artificial Sequence: Synthetic oligonucleotide
  Target: LAMA2; (-) strand; PAM type: NNNNGHTT; PAM sequence: ATGTGATT
gctgtgaatgtattttttag

SEQ ID NO: 41023 - DNA, 20 bp, Artificial Sequence
  Description of Artificial Sequence: Synthetic oligonucleotide
  Target: LAMA2; (-) strand; PAM type: NNNNGHTT; PAM sequence: CTTGGTTT
cacttggctaggctatggta

SEQ ID NO: 41024 - DNA, 20 bp, Artificial Sequence
  Description of Artificial Sequence: Synthetic oligonucleotide
  Target: LAMA2; (-) strand; PAM type: NNNNGHTT; PAM sequence: AGCTGTTT
tctgcttgtttggaatgttt

SEQ ID NO: 41025 - DNA, 20 bp, Artificial Sequence
  Description of Artificial Sequence: Synthetic oligonucleotide
  Target: LAMA2; (-) strand; PAM type: NNNNGHTT; PAM sequence: GAATGTTT
tctctctgtctgcttgtttg

SEQ ID NO: 41026 - DNA, 20 bp, Artificial Sequence
  Description of Artificial Sequence: Synthetic oligonucleotide
  Target: LAMA2; (-) strand; PAM type: NNNNGHTT; PAM sequence: GCTTGTTT
atttttttctctctctgtct

SEQ ID NO: 41027 - DNA, 20 bp, Artificial Sequence
  Description of Artificial Sequence: Synthetic oligonucleotide
  Target: LAMA2; (-) strand; PAM type: NNNNGHTT; PAM sequence: GTCTGCTT
ctttatttttttctctctct

SEQ ID NO: 41028 - DNA, 20 bp, Artificial Sequence
  Description of Artificial Sequence: Synthetic oligonucleotide
  Target: LAMA2; (-) strand; PAM type: NNNNGHTT; PAM sequence: AATTGATT
tctttttttgtcttttccag

SEQ ID NO: 41029 - DNA, 20 bp, Artificial Sequence
  Description of Artificial Sequence: Synthetic oligonucleotide
  Target: LAMA2; (-) strand; PAM type: NNNNGHTT; PAM sequence: ATTTGTTT
cattatattttatatttatg

SEQ ID NO: 41030 - DNA, 20 bp, Artificial Sequence
  Description of Artificial Sequence: Synthetic oligonucleotide
  Target: LAMA2; (-) strand; PAM type: NNNNGHTT; PAM sequence: TTATGATT
aattccattatattttatat

SEQ ID NO: 41031 - DNA, 20 bp, Artificial Sequence
  Description of Artificial Sequence: Synthetic oligonucleotide
  Target: LAMA2; (-) strand; PAM type: NNNNGHTT; PAM sequence: TATGGATT
taattaccctgattgttgta

SEQ ID NO: 41032 - DNA, 20 bp, Artificial Sequence
  Description of Artificial Sequence: Synthetic oligonucleotide
  Target: LAMA2; (-) strand; PAM type: NNNNGHTT; PAM sequence: CCCTGATT
gaggcagctggtgataatta

SEQ ID NO: 41033 - DNA, 20 bp, Artificial Sequence
  Description of Artificial Sequence: Synthetic oligonucleotide
  Target: LAMA2; (-) strand; PAM type: NNNNGHTT; PAM sequence: GTGAGATT
acttgaattatgtccatcat

SEQ ID NO: 41034 - DNA, 20 bp, Artificial Sequence
  Description of Artificial Sequence: Synthetic oligonucleotide
  Target: LAMA2; (-) strand; PAM type: NNNNGHTT; PAM sequence: CCAGGCTT
tgactcagaccagacgtggt

SEQ ID NO: 41035 - DNA, 20 bp, Artificial Sequence
  Description of Artificial Sequence: Synthetic oligonucleotide
  Target: LAMA2; (-) strand; PAM type: NNNNGHTT; PAM sequence: GTTAGCTT
ttttccagacctcccttaca

SEQ ID NO: 41036 - DNA, 20 bp, Artificial Sequence
  Description of Artificial Sequence: Synthetic oligonucleotide
  Target: LAMA2; (-) strand; PAM type: NNNNGHTT; PAM sequence: TAATGTTT
tcatagtaacctgtcaattt

SEQ ID NO: 41037 - DNA, 20 bp, Artificial Sequence
  Description of Artificial Sequence: Synthetic oligonucleotide
  Target: LAMA2; (-) strand; PAM type: NNNNGHTT; PAM sequence: CTTTGTTT
agtcatacatagacgaatcc

SEQ ID NO: 41038 - DNA, 20 bp, Artificial Sequence
  Description of Artificial Sequence: Synthetic oligonucleotide
  Target: LAMA2; (-) strand; PAM type: NNNNGHTT; PAM sequence: CTAAGATT
ttttcagtctttctgttccc

SEQ ID NO: 41039 - DNA, 20 bp, Artificial Sequence
  Description of Artificial Sequence: Synthetic oligonucleotide
  Target: LAMA2; (-) strand; PAM type: NNNNGHTT; PAM sequence: TAGAGTTT
cataccagctttcttctggt

SEQ ID NO: 41040 - DNA, 20 bp, Artificial Sequence
  Description of Artificial Sequence: Synthetic oligonucleotide
  Target: LAMA2; (-) strand; PAM type: NNNNGHTT; PAM sequence: ACCAGCTT
attgctattaatggtagcat

SEQ ID NO: 41041 - DNA, 20 bp, Artificial Sequence
  Description of Artificial Sequence: Synthetic oligonucleotide
  Target: LAMA2; (-) strand; PAM type: NNNNGHTT; PAM sequence: TTTTGATT
ttttaaaaaaattaaagtct

SEQ ID NO: 41042 - DNA, 20 bp, Artificial Sequence
  Description of Artificial Sequence: Synthetic oligonucleotide
  Target: LAMA2; (-) strand; PAM type: NNNNGHTT; PAM sequence: TTTAGTTT
accttgcaggctcataattt

SEQ ID NO: 41043 - DNA, 20 bp, Artificial Sequence
  Description of Artificial Sequence: Synthetic oligonucleotide
  Target: LAMA2; (-) strand; PAM type: NNNNGHTT; PAM sequence: ATAGGCTT
atatttatctttatttatcc

SEQ ID NO: 41044 - DNA, 20 bp, Artificial Sequence
  Description of Artificial Sequence: Synthetic oligonucleotide
  Target: LAMA2; (-) strand; PAM type: NNNNGHTT; PAM sequence: CTTTGCTT
tacttttaaaatctgtgtct

SEQ ID NO: 41045 - DNA, 20 bp, Artificial Sequence
  Description of Artificial Sequence: Synthetic oligonucleotide
  Target: LAMA2; (-) strand; PAM type: NNNNGHTT; PAM sequence: GTTTGTTT
gatctaggttgtggtccttt

SEQ ID NO: 41046 - DNA, 20 bp, Artificial Sequence
  Description of Artificial Sequence: Synthetic oligonucleotide
  Target: LAMA2; (-) strand; PAM type: NNNNGHTT; PAM sequence: CTTTGTTT
ttatgatctaggttgtggtc

SEQ ID NO: 41047 - DNA, 20 bp, Artificial Sequence
  Description of Artificial Sequence: Synthetic oligonucleotide
  Target: LAMA2; (-) strand; PAM type: NNNNGHTT; PAM sequence: ACTTGCTT
gatcattaggatttgctgat

SEQ ID NO: 41048 - DNA, 20 bp, Artificial Sequence
  Description of Artificial Sequence: Synthetic oligonucleotide
  Target: LAMA2; (-) strand; PAM type: NNNNGHTT; PAM sequence: TTAGGATT
gtctagatgctattggatca

SEQ ID NO: 41049 - DNA, 20 bp, Artificial Sequence
  Description of Artificial Sequence: Synthetic oligonucleotide
  Target: LAMA2; (-) strand; PAM type: NNNNGHTT; PAM sequence: AATTGTTT
ttattttaaaactttttgtc

SEQ ID NO: 41050 - DNA, 20 bp, Artificial Sequence
  Description of Artificial Sequence: Synthetic oligonucleotide
  Target: LAMA2; (-) strand; PAM type: NNNNGHTT; PAM sequence: GTATGTTT
aagccatggattactttgaa

SEQ ID NO: 41051 - DNA, 20 bp, Artificial Sequence
  Description of Artificial Sequence: Synthetic oligonucleotide
  Target: LAMA2; (-) strand; PAM type: NNNNGHTT; PAM sequence: CATGGATT
actgtgtttttttctcaagc

SEQ ID NO: 41052 - DNA, 20 bp, Artificial Sequence
  Description of Artificial Sequence: Synthetic oligonucleotide
  Target: LAMA2; (-) strand; PAM type: NNNNGHTT; PAM sequence: CTGTGTTT
aaatacttcgtaaatttaaa

SEQ ID NO: 41053 - DNA, 20 bp, Artificial Sequence
  Description of Artificial Sequence: Synthetic oligonucleotide
  Target: LAMA2; (-) strand; PAM type: NNNNGHTT; PAM sequence: TTCTGCTT
cctttccttaggtcattaat

SEQ ID NO: 41054 - DNA, 20 bp, Artificial Sequence
  Description of Artificial Sequence: Synthetic oligonucleotide
  Target: LAMA2; (-) strand; PAM type: NNNNGHTT; PAM sequence: TGCTGTTT
gtttattctaagaatcaact

SEQ ID NO: 41055 - DNA, 20 bp, Artificial Sequence
  Description of Artificial Sequence: Synthetic oligonucleotide
  Target: LAMA2; (-) strand; PAM type: NNNNGHTT; PAM sequence: GCTAGTTT
ttcttgtcttctgtttattt

SEQ ID NO: 41056 - DNA, 20 bp, Artificial Sequence
  Description of Artificial Sequence: Synthetic oligonucleotide
  Target: LAMA2; (-) strand; PAM type: NNNNGHTT; PAM sequence: TTCTGTTT
tttgcttaattgttcttgtc

SEQ ID NO: 41057 - DNA, 20 bp, Artificial Sequence
  Description of Artificial Sequence: Synthetic oligonucleotide
  Target: LAMA2; (-) strand; PAM type: NNNNGHTT; PAM sequence: CTTTGCTT
tattcatttgtgttgtctct

SEQ ID NO: 41058 - DNA, 20 bp, Artificial Sequence
  Description of Artificial Sequence: Synthetic oligonucleotide
  Target: LAMA2; (-) strand; PAM type: NNNNGHTT; PAM sequence: ATGTGTTT
tacttcacctaagtattcaa

SEQ ID NO: 41059 - DNA, 20 bp, Artificial Sequence
  Description of Artificial Sequence: Synthetic oligonucleotide
  Target: LAMA2; (-) strand; PAM type: NNNNGHTT; PAM sequence: TACTGTTT
agtaaattttgctctaaact

SEQ ID NO: 41060 - DNA, 20 bp, Artificial Sequence
  Description of Artificial Sequence: Synthetic oligonucleotide
  Target: LAMA2; (-) strand; PAM type: NNNNGHTT; PAM sequence: TCAAGATT
gtcctctgtagggcttgcca

SEQ ID NO: 41061 - DNA, 20 bp, Artificial Sequence
  Description of Artificial Sequence: Synthetic oligonucleotide
  Target: LAMA2; (-) strand; PAM type: NNNNGHTT; PAM sequence: TAGGGCTT
ctttgtagtactgtcctctg

SEQ ID NO: 41062 - DNA, 20 bp, Artificial Sequence
  Description of Artificial Sequence: Synthetic oligonucleotide
  Target: LAMA2; (-) strand; PAM type: NNNNGHTT; PAM sequence: TATAGTTT
ctctatttaaataactggcc

SEQ ID NO: 41063 - DNA, 20 bp, Artificial Sequence
  Description of Artificial Sequence: Synthetic oligonucleotide
  Target: LAMA2; (-) strand; PAM type: NNNNGHTT; PAM sequence: TGTAGCTT
gggttttataatatttcatt

SEQ ID NO: 41064 - DNA, 20 bp, Artificial Sequence
  Description of Artificial Sequence: Synthetic oligonucleotide
  Target: LAMA2; (-) strand; PAM type: NNNNGHTT; PAM sequence: CTGGGTTT
ttaaaatatgtacatttgaa

SEQ ID NO: 41065 - DNA, 20 bp, Artificial Sequence
  Description of Artificial Sequence: Synthetic oligonucleotide
  Target: LAMA2; (-) strand; PAM type: NNNNGHTT; PAM sequence: TAATGTTT
catctgtatctggcaaatgt

SEQ ID NO: 41066 - DNA, 20 bp, Artificial Sequence
  Description of Artificial Sequence: Synthetic oligonucleotide
  Target: LAMA2; (-) strand; PAM type: NNNNGHTT; PAM sequence: ATACGATT
ttaagtaggaaataagatag

SEQ ID NO: 41067 - DNA, 20 bp, Artificial Sequence
  Description of Artificial Sequence: Synthetic oligonucleotide
  Target: LAMA2; (-) strand; PAM type: NNNNGHTT; PAM sequence: GACAGATT
tagaacagattttattgcag

SEQ ID NO: 41068 - DNA, 20 bp, Artificial Sequence
  Description of Artificial Sequence: Synthetic oligonucleotide
  Target: LAMA2; (-) strand; PAM type: NNNNGHTT; PAM sequence: AACAGATT
tattttctttattattttag

SEQ ID NO: 41069 - DNA, 20 bp, Artificial Sequence
  Description of Artificial Sequence: Synthetic oligonucleotide
  Target: LAMA2; (-) strand; PAM type: NNNNGHTT; PAM sequence: TGTTGTTT
ctggtgtaaaggatgagggt

SEQ ID NO: 41070 - DNA, 20 bp, Artificial Sequence
  Description of Artificial Sequence: Synthetic oligonucleotide
  Target: LAMA2; (-) strand; PAM type: NNNNGHTT; PAM sequence: TGTTGCTT
gaaaagttaggttaggggat

SEQ ID NO: 41071 - DNA, 20 bp, Artificial Sequence
  Description of Artificial Sequence: Synthetic oligonucleotide
  Target: LAMA2; (-) strand; PAM type: NNNNGHTT; PAM sequence: AGGGGATT
gttgagagaaaagttaggtt

SEQ ID NO: 41072 - DNA, 20 bp, Artificial Sequence
  Description of Artificial Sequence: Synthetic oligonucleotide
  Target: LAMA2; (-) strand; PAM type: NNNNGHTT; PAM sequence: GTGAGCTT
gaattgttgatcctggagct

SEQ ID NO: 41073 - DNA, 20 bp, Artificial Sequence
  Description of Artificial Sequence: Synthetic oligonucleotide
  Target: LAMA2; (-) strand; PAM type: NNNNGHTT; PAM sequence: GAAAGATT
gtagtaaaagaagaatattt

SEQ ID NO: 41074 - DNA, 20 bp, Artificial Sequence
  Description of Artificial Sequence: Synthetic oligonucleotide
  Target: LAMA2; (-) strand; PAM type: NNNNGHTT; PAM sequence: AATAGCTT
aagggaagaatgaggacata

SEQ ID NO: 41075 - DNA, 20 bp, Artificial Sequence
  Description of Artificial Sequence: Synthetic oligonucleotide
  Target: LAMA2; (-) strand; PAM type: NNNNGHTT; PAM sequence: CTGGGATT
cacctcagcctcccaaagtg

SEQ ID NO: 41076 - DNA, 20 bp, Artificial Sequence
  Description of Artificial Sequence: Synthetic oligonucleotide
  Target: LAMA2; (-) strand; PAM type: NNNNGHTT; PAM sequence: TGGGGTTT
ttttgtatttttagtagaga

SEQ ID NO: 41077 - DNA, 20 bp, Artificial Sequence
  Description of Artificial Sequence: Synthetic oligonucleotide
  Target: LAMA2; (-) strand; PAM type: NNNNGHTT; PAM sequence: CCTGGATT
cacctcagcctcctgagtag

SEQ ID NO: 41078 - DNA, 20 bp, Artificial Sequence
  Description of Artificial Sequence: Synthetic oligonucleotide
  Target: LAMA2; (-) strand; PAM type: NNNNGHTT; PAM sequence: GAAAGCTT
aagtgtataatttcagcaaa

SEQ ID NO: 41079 - DNA, 20 bp, Artificial Sequence
  Description of Artificial Sequence: Synthetic oligonucleotide
  Target: LAMA2; (-) strand; PAM type: NNNNGHTT; PAM sequence: CGGAGCTT
aatggcgtgaacccgggagg

SEQ ID NO: 41080 - DNA, 20 bp, Artificial Sequence
  Description of Artificial Sequence: Synthetic oligonucleotide
  Target: LAMA2; (-) strand; PAM type: NNNNGHTT; PAM sequence: GGGAGATT
aaaatggagtgactgtccgg

SEQ ID NO: 41081 - DNA, 20 bp, Artificial Sequence
  Description of Artificial Sequence: Synthetic oligonucleotide
  Target: LAMA2; (-) strand; PAM type: NNNNGHTT; PAM sequence: TACAGATT
aacaaacagctcttcagaaa

SEQ ID NO: 41082 - DNA, 20 bp, Artificial Sequence
  Description of Artificial Sequence: Synthetic oligonucleotide
  Target: LAMA2; (-) strand; PAM type: NNNNGHTT; PAM sequence: AGAGGTTT
gcaaaggtgccactggccac

SEQ ID NO: 41083 - DNA, 20 bp, Artificial Sequence
  Description of Artificial Sequence: Synthetic oligonucleotide
  Target: LAMA2; (-) strand; PAM type: NNNNGHTT; PAM sequence: GCACGCTT
tgcccagcccactgcagctg

SEQ ID NO: 41084 - DNA, 20 bp, Artificial Sequence
  Description of Artificial Sequence: Synthetic oligonucleotide
  Target: LAMA2; (-) strand; PAM type: NNNNGHTT; PAM sequence: TGGTGCTT
caaactggagtgagaactta

SEQ ID NO: 41085 - DNA, 20 bp, Artificial Sequence
  Description of Artificial Sequence: Synthetic oligonucleotide
  Target: LAMA2; (-) strand; PAM type: NNNNGHTT; PAM sequence: TCTGGATT
cccctactatcttggcccct

SEQ ID NO: 41086 - DNA, 20 bp, Artificial Sequence
  Description of Artificial Sequence: Synthetic oligonucleotide
  Target: LAMA2; (-) strand; PAM type: NNNNGHTT; PAM sequence: GGCTGATT
ctcactgttcccggcaccca

SEQ ID NO: 41087 - DNA, 20 bp, Artificial Sequence
  Description of Artificial Sequence: Synthetic oligonucleotide
  Target: LAMA2; (-) strand; PAM type: NNNNGHTT; PAM sequence: TCTGGCTT
gtaatggcagtgtcagcctg

SEQ ID NO: 41088 - DNA, 20 bp, Artificial Sequence
  Description of Artificial Sequence: Synthetic oligonucleotide
  Target: LAMA2; (-) strand; PAM type: NNNNGHTT; PAM sequence: GTCAGCTT
ctggggagaggggatctatt

SEQ ID NO: 41089 - DNA, 20 bp, Artificial Sequence
  Description of Artificial Sequence: Synthetic oligonucleotide
  Target: LAMA2; (-) strand; PAM type: NNNNGHTT; PAM sequence: TCCTGATT
atctggactatcatagccat

SEQ ID NO: 41090 - DNA, 20 bp, Artificial Sequence
  Description of Artificial Sequence: Synthetic oligonucleotide
  Target: LAMA2; (-) strand; PAM type: NNNNGHTT; PAM sequence: AGAAGTTT
catcttccctcaatttaatt

SEQ ID NO: 41091 - DNA, 20 bp, Artificial Sequence
  Description of Artificial Sequence: Synthetic oligonucleotide
  Target: LAMA2; (-) strand; PAM type: NNNNGHTT; PAM sequence: CAGTGTTT
aggaatcagaacagactgca

SEQ ID NO: 41092 - DNA, 20 bp, Artificial Sequence
  Description of Artificial Sequence: Synthetic oligonucleotide
  Target: LAMA2; (-) strand; PAM type: NNNNGHTT; PAM sequence: CCTCGATT
gtagtgcatatttttaaata

SEQ ID NO: 41093 - DNA, 20 bp, Artificial Sequence
  Description of Artificial Sequence: Synthetic oligonucleotide
  Target: LAMA2; (-) strand; PAM type: NNNNGHTT; PAM sequence: AGTAGATT
cagcatggctttgctaagag

SEQ ID NO: 41094 - DNA, 20 bp, Artificial Sequence
  Description of Artificial Sequence: Synthetic oligonucleotide
  Target: LAMA2; (-) strand; PAM type: NNNNGHTT; PAM sequence: CATGGCTT
aaaaaaatcactaaagccag

SEQ ID NO: 41095 - DNA, 20 bp, Artificial Sequence
  Description of Artificial Sequence: Synthetic oligonucleotide
  Target: LAMA2; (-) strand; PAM type: NNNNGHTT; PAM sequence: CTCTGCTT
ctgggtcaaaaaatttattt

SEQ ID NO: 41096 - DNA, 20 bp, Artificial Sequence
  Description of Artificial Sequence: Synthetic oligonucleotide
  Target: LAMA2; (-) strand; PAM type: NNNNGHTT; PAM sequence: CTGTGTTT
tggcattgttcaaaagagtt

SEQ ID NO: 41097 - DNA, 20 bp, Artificial Sequence
  Description of Artificial Sequence: Synthetic oligonucleotide
  Target: LAMA2; (-) strand; PAM type: NNNNGHTT; PAM sequence: CTTAGATT
ttgaagaaaattagatcaaa

SEQ ID NO: 41098 - DNA, 20 bp, Artificial Sequence
  Description of Artificial Sequence: Synthetic oligonucleotide
  Target: LAMA2; (-) strand; PAM type: NNNNGHTT; PAM sequence: TCTTGATT
aaaacaacatcaatctcacc

SEQ ID NO: 41099 - DNA, 20 bp, Artificial Sequence
  Description of Artificial Sequence: Synthetic oligonucleotide
  Target: LAMA2; (-) strand; PAM type: NNNNGHTT; PAM sequence: GAGGGCTT
taagttagataccattctta

SEQ ID NO: 41100 - DNA, 20 bp, Artificial Sequence
  Description of Artificial Sequence: Synthetic oligonucleotide
  Target: LAMA2; (-) strand; PAM type: NNNNGHTT; PAM sequence: CTTAGTTT
gggcccataccacaaagagt

SEQ ID NO: 41101 - DNA, 20 bp, Artificial Sequence
  Description of Artificial Sequence: Synthetic oligonucleotide
  Target: LAMA2; (-) strand; PAM type: NNNNGHTT; PAM sequence: GACTGCTT
agtacctatgtgtaccacta

SEQ ID NO: 41102 - DNA, 20 bp, Artificial Sequence
  Description of Artificial Sequence: Synthetic oligonucleotide
  Target: LAMA2; (-) strand; PAM type: NNNNGHTT; PAM sequence: GATGGTTT
aaaatataaaatgaagtaag

SEQ ID NO: 41103 - DNA, 20 bp, Artificial Sequence
  Description of Artificial Sequence: Synthetic oligonucleotide
  Target: LAMA2; (-) strand; PAM type: NNNNGHTT; PAM sequence: TTTAGCTT
aaaattcgtgagtgtgaatt

SEQ ID NO: 41104 - DNA, 20 bp, Artificial Sequence
  Description of Artificial Sequence: Synthetic oligonucleotide
  Target: LAMA2; (-) strand; PAM type: NNNNGHTT; PAM sequence: TCAAGATT
atgggtcagatgagtatctg

SEQ ID NO: 41105 - DNA, 20 bp, Artificial Sequence
  Description of Artificial Sequence: Synthetic oligonucleotide
  Target: LAMA2; (-) strand; PAM type: NNNNGHTT; PAM sequence: GACGGCTT
gtcaagaaacaccccaaaga

SEQ ID NO: 41106 - DNA, 20 bp, Artificial Sequence
  Description of Artificial Sequence: Synthetic oligonucleotide
  Target: LAMA2; (-) strand; PAM type: NNNNGHTT; PAM sequence: AGGTGCTT
tcaccatgcatcaattttta

SEQ ID NO: 41107 - DNA, 20 bp, Artificial Sequence
  Description of Artificial Sequence: Synthetic oligonucleotide
  Target: LAMA2; (-) strand; PAM type: NNNNGHTT; PAM sequence: AGCTGCTT
tattttctataatagacata

SEQ ID NO: 41108 - DNA, 20 bp, Artificial Sequence
  Description of Artificial Sequence: Synthetic oligonucleotide
  Target: LAMA2; (-) strand; PAM type: NNNNGHTT; PAM sequence: TCTTGCTT
cacattttatattttcttct

SEQ ID NO: 41109 - DNA, 20 bp, Artificial Sequence
  Description of Artificial Sequence: Synthetic oligonucleotide
  Target: LAMA2; (-) strand; PAM type: NNNNGHTT; PAM sequence: TAGAGTTT
agtgagtaacagaagaaatt

SEQ ID NO: 41110 - DNA, 20 bp, Artificial Sequence
  Description of Artificial Sequence: Synthetic oligonucleotide
  Target: LAMA2; (-) strand; PAM type: NNNNGHTT; PAM sequence: ATGTGTTT
agggttggtgactggctgca

SEQ ID NO: 41111 - DNA, 20 bp, Artificial Sequence
  Description of Artificial Sequence: Synthetic oligonucleotide
  Target: LAMA2; (-) strand; PAM type: NNNNGHTT; PAM sequence: AAATGATT
ccaagataatataaaactta

SEQ ID NO: 41112 - DNA, 20 bp, Artificial Sequence
  Description of Artificial Sequence: Synthetic oligonucleotide
  Target: LAMA2; (-) strand; PAM type: NNNNGHTT; PAM sequence: CATGGTTT
agtaactaaaaattcatcag

SEQ ID NO: 41113 - DNA, 20 bp, Artificial Sequence
  Description of Artificial Sequence: Synthetic oligonucleotide
  Target: LAMA2; (-) strand; PAM type: NNNNGHTT; PAM sequence: TTTTGTTT
aaaatatttattttctgttt

SEQ ID NO: 41114 - DNA, 20 bp, Artificial Sequence
  Description of Artificial Sequence: Synthetic oligonucleotide
  Target: LAMA2; (-) strand; PAM type: NNNNGHTT; PAM sequence: TTCTGTTT
aaagatgtaaaatatttatt

SEQ ID NO: 41115 - DNA, 20 bp, Artificial Sequence
  Description of Artificial Sequence: Synthetic oligonucleotide
  Target: LAMA2; (-) strand; PAM type: NNNNGHTT; PAM sequence: TTTTGCTT
tgtttacattgctttatata

SEQ ID NO: 41116 - DNA, 20 bp, Artificial Sequence
  Description of Artificial Sequence: Synthetic oligonucleotide
  Target: LAMA2; (-) strand; PAM type: NNNNGHTT; PAM sequence: CATTGCTT
agtttaaaagttattgttta

SEQ ID NO: 41117 - DNA, 20 bp, Artificial Sequence
  Description of Artificial Sequence: Synthetic oligonucleotide
  Target: LAMA2; (-) strand; PAM type: NNNNGHTT; PAM sequence: TATTGTTT
aaacaagcaagtttaaaagt

SEQ ID NO: 41118 - DNA, 20 bp, Artificial Sequence
  Description of Artificial Sequence: Synthetic oligonucleotide
  Target: LAMA2; (-) strand; PAM type: NNNNGHTT; PAM sequence: GCAAGTTT
cccagtgattttctaaacaa

SEQ ID NO: 41119 - DNA, 20 bp, Artificial Sequence
  Description of Artificial Sequence: Synthetic oligonucleotide
  Target: LAMA2; (-) strand; PAM type: NNNNGHTT; PAM sequence: CAGTGATT
aggctgactaacctgtaccc

SEQ ID NO: 41120 - DNA, 20 bp, Artificial Sequence
  Description of Artificial Sequence: Synthetic oligonucleotide
  Target: LAMA2; (-) strand; PAM type: NNNNGHTT; PAM sequence: TAGAGTTT
agggaggtgtgaaggcaagt

SEQ ID NO: 41121 - DNA, 20 bp, Artificial Sequence
  Description of Artificial Sequence: Synthetic oligonucleotide
  Target: LAMA2; (-) strand; PAM type: NNNNGHTT; PAM sequence: AGATGTTT
aatggaacacagaaatgcct

SEQ ID NO: 41122 - DNA, 20 bp, Artificial Sequence
  Description of Artificial Sequence: Synthetic oligonucleotide
  Target: LAMA2; (-) strand; PAM type: NNNNGHTT; PAM sequence: AATTGATT
cattgattaatagataagtg

SEQ ID NO: 41123 - DNA, 20 bp, Artificial Sequence
  Description of Artificial Sequence: Synthetic oligonucleotide
  Target: LAMA2; (-) strand; PAM type: NNNNGHTT; PAM sequence: CATTGATT
ctcttgctaaagcatactgc

SEQ ID NO: 41124 - DNA, 20 bp, Artificial Sequence
  Description of Artificial Sequence: Synthetic oligonucleotide
  Target: LAMA2; (-) strand; PAM type: NNNNGHTT; PAM sequence: GTTAGTTT
gtaattgcattttaatacat

SEQ ID NO: 41125 - DNA, 20 bp, Artificial Sequence
  Description of Artificial Sequence: Synthetic oligonucleotide
  Target: LAMA2; (-) strand; PAM type: NNNNGHTT; PAM sequence: TTAGGATT
aaatgaaattataaagtctg

SEQ ID NO: 41126 - DNA, 20 bp, Artificial Sequence
  Description of Artificial Sequence: Synthetic oligonucleotide
  Target: LAMA2; (-) strand; PAM type: NNNNGHTT; PAM sequence: AATTGTTT
gtatgtttttattagttaat

SEQ ID NO: 41127 - DNA, 20 bp, Artificial Sequence
  Description of Artificial Sequence: Synthetic oligonucleotide
  Target: LAMA2; (-) strand; PAM type: NNNNGHTT; PAM sequence: GTATGTTT
ctatttttatgtaagttgct

SEQ ID NO: 41128 - DNA, 20 bp, Artificial Sequence
  Description of Artificial Sequence: Synthetic oligonucleotide
  Target: LAMA2; (-) strand; PAM type: NNNNGHTT; PAM sequence: AGAGGTTT
tattttgtttcttgcttttt

SEQ ID NO: 41129 - DNA, 20 bp, Artificial Sequence
  Description of Artificial Sequence: Synthetic oligonucleotide
  Target: LAMA2; (-) strand; PAM type: NNNNGHTT; PAM sequence: TCTTGCTT
gagttgcaagatattttgtt

SEQ ID NO: 41130 - DNA, 20 bp, Artificial Sequence
  Description of Artificial Sequence: Synthetic oligonucleotide
  Target: LAMA2; (-) strand; PAM type: NNNNGHTT; PAM sequence: TTTTGTTT
attctttgagttgcaagata

SEQ ID NO: 41131 - DNA, 20 bp, Artificial Sequence
  Description of Artificial Sequence: Synthetic oligonucleotide
  Target: LAMA2; (-) strand; PAM type: NNNNGHTT; PAM sequence: ATGAGATT
acagcatatgtgaaatataa

SEQ ID NO: 41132 - DNA, 20 bp, Artificial Sequence
  Description of Artificial Sequence: Synthetic oligonucleotide
  Target: LAMA2; (-) strand; PAM type: NNNNGHTT; PAM sequence: CATTGCTT
ttggagagaaccttttccag

SEQ ID NO: 41133 - DNA, 20 bp, Artificial Sequence
  Description of Artificial Sequence: Synthetic oligonucleotide
  Target: LAMA2; (-) strand; PAM type: NNNNGHTT; PAM sequence: CACCGTTT
aacatgttatgggtgaaaag

SEQ ID NO: 41134 - DNA, 20 bp, Artificial Sequence
  Description of Artificial Sequence: Synthetic oligonucleotide
  Target: LAMA2; (-) strand; PAM type: NNNNGHTT; PAM sequence: ACAGGCTT
cagcaatctgggtttaaagg

SEQ ID NO: 41135 - DNA, 20 bp, Artificial Sequence
  Description of Artificial Sequence: Synthetic oligonucleotide
  Target: LAMA2; (-) strand; PAM type: NNNNGHTT; PAM sequence: CTGGGTTT
acaagcagtctgccagcaat

SEQ ID NO: 41136 - DNA, 20 bp, Artificial Sequence
  Description of Artificial Sequence: Synthetic oligonucleotide
  Target: LAMA2; (-) strand; PAM type: NNNNGHTT; PAM sequence: AAGAGCTT
ctctctaaaatattaaagta

SEQ ID NO: 41137 - DNA, 20 bp, Artificial Sequence
  Description of Artificial Sequence: Synthetic oligonucleotide
  Target: LAMA2; (-) strand; PAM type: NNNNGHTT; PAM sequence: CAATGTTT
ttggaggaaaagacatgcct

SEQ ID NO: 41138 - DNA, 20 bp, Artificial Sequence
  Description of Artificial Sequence: Synthetic oligonucleotide
  Target: LAMA2; (-) strand; PAM type: NNNNGHTT; PAM sequence: AAGAGATT
gaattgagaggttaaaaatc

SEQ ID NO: 41139 - DNA, 20 bp, Artificial Sequence
  Description of Artificial Sequence: Synthetic oligonucleotide
  Target: LAMA2; (-) strand; PAM type: NNNNGHTT; PAM sequence: GAAAGTTT
atgagcaatttggaggcctt

SEQ ID NO: 41140 - DNA, 20 bp, Artificial Sequence
  Description of Artificial Sequence: Synthetic oligonucleotide
  Target: LAMA2; (-) strand; PAM type: NNNNGHTT; PAM sequence: GAAGGTTT
caggtcagagtcaatttctg

SEQ ID NO: 41141 - DNA, 20 bp, Artificial Sequence
  Description of Artificial Sequence: Synthetic oligonucleotide
  Target: LAMA2; (-) strand; PAM type: NNNNGHTT; PAM sequence: CTAAGTTT
agagcgagtatttcagctcc

SEQ ID NO: 41142 - DNA, 20 bp, Artificial Sequence
  Description of Artificial Sequence: Synthetic oligonucleotide
  Target: LAMA2; (-) strand; PAM type: NNNNGHTT; PAM sequence: CAGTGATT
ttccctgctttttaggaagt

SEQ ID NO: 41143 - DNA, 20 bp, Artificial Sequence
  Description of Artificial Sequence: Synthetic oligonucleotide
  Target: LAMA2; (-) strand; PAM type: NNNNGHTT; PAM sequence: CCCTGCTT
cttccaggcaattttttttt

SEQ ID NO: 41144 - DNA, 20 bp, Artificial Sequence
  Description of Artificial Sequence: Synthetic oligonucleotide
  Target: LAMA2; (-) strand; PAM type: NNNNGHTT; PAM sequence: CTTTGCTT
atttctgaatatcacctgct

SEQ ID NO: 41145 - DNA, 20 bp, Artificial Sequence
  Description of Artificial Sequence: Synthetic oligonucleotide
  Target: LAMA2; (-) strand; PAM type: NNNNGHTT; PAM sequence: TATTGATT
tggctggatgattatcaatg

SEQ ID NO: 41146 - DNA, 20 bp, Artificial Sequence
  Description of Artificial Sequence: Synthetic oligonucleotide
  Target: LAMA2; (-) strand; PAM type: NNNNGHTT; PAM sequence: GGATGATT
tttttctgattagtctggct

SEQ ID NO: 41147 - DNA, 20 bp, Artificial Sequence
  Description of Artificial Sequence: Synthetic oligonucleotide
  Target: LAMA2; (-) strand; PAM type: NNNNGHTT; PAM sequence: TTCTGATT
tggtgacttttctgattttt

SEQ ID NO: 41148 - DNA, 20 bp, Artificial Sequence
  Description of Artificial Sequence: Synthetic oligonucleotide
  Target: LAMA2; (-) strand; PAM type: NNNNGHTT; PAM sequence: TTCTGATT
atattggtagttggtgactt

SEQ ID NO: 41149 - DNA, 20 bp, Artificial Sequence
  Description of Artificial Sequence: Synthetic oligonucleotide
  Target: LAMA2; (-) strand; PAM type: NNNNGHTT; PAM sequence: TAGTGATT
tttactatctgcagaagttg

SEQ ID NO: 41150 - DNA, 20 bp, Artificial Sequence
  Description of Artificial Sequence: Synthetic oligonucleotide
  Target: LAMA2; (-) strand; PAM type: NNNNGHTT; PAM sequence: TTGTGATT
tatctgtgagttttggtagt

SEQ ID NO: 41151 - DNA, 20 bp, Artificial Sequence
  Description of Artificial Sequence: Synthetic oligonucleotide
  Target: LAMA2; (-) strand; PAM type: NNNNGHTT; PAM sequence: GGTAGTTT
attatttatctgtgagtttt

SEQ ID NO: 41152 - DNA, 20 bp, Artificial Sequence
  Description of Artificial Sequence: Synthetic oligonucleotide
  Target: LAMA2; (-) strand; PAM type: NNNNGHTT; PAM sequence: GTGAGTTT
actattcagattatttatct

SEQ ID NO: 41153 - DNA, 20 bp, Artificial Sequence
  Description of Artificial Sequence: Synthetic oligonucleotide
  Target: LAMA2; (-) strand; PAM type: NNNNGHTT; PAM sequence: TTCAGATT
ctctaatgaatatagaacta

SEQ ID NO: 41154 - DNA, 20 bp, Artificial Sequence
  Description of Artificial Sequence: Synthetic oligonucleotide
  Target: LAMA2; (-) strand; PAM type: NNNNGHTT; PAM sequence: GAAGGTTT
ggaactgaatttgtgtgtgt

SEQ ID NO: 41155 - DNA, 20 bp, Artificial Sequence
  Description of Artificial Sequence: Synthetic oligonucleotide
  Target: LAMA2; (-) strand; PAM type: NNNNGHTT; PAM sequence: AAGAGTTT
tctcctcttcaattttctga

SEQ ID NO: 41156 - DNA, 20 bp, Artificial Sequence
  Description of Artificial Sequence: Synthetic oligonucleotide
  Target: LAMA2; (-) strand; PAM type: NNNNGHTT; PAM sequence: ATTTGATT
tcctttgagtaaatcattag

SEQ ID NO: 41157 - DNA, 20 bp, Artificial Sequence
  Description of Artificial Sequence: Synthetic oligonucleotide
  Target: LAMA2; (-) strand; PAM type: NNNNGHTT; PAM sequence: ATTAGATT
tataatcctttgagtaaatc

SEQ ID NO: 41158 - DNA, 20 bp, Artificial Sequence
  Description of Artificial Sequence: Synthetic oligonucleotide
  Target: LAMA2; (-) strand; PAM type: NNNNGHTT; PAM sequence: TTTAGTTT
ggtgattatatagtttgctt

SEQ ID NO: 41159 - DNA, 20 bp, Artificial Sequence
  Description of Artificial Sequence: Synthetic oligonucleotide
  Target: LAMA2; (-) strand; PAM type: NNNNGHTT; PAM sequence: GTTTGCTT
tcaattgaggtgattatata

SEQ ID NO: 41160 - DNA, 20 bp, Artificial Sequence
  Description of Artificial Sequence: Synthetic oligonucleotide
  Target: LAMA2; (-) strand; PAM type: NNNNGHTT; PAM sequence: TATAGTTT
tgtatcaattgaggtgatta

SEQ ID NO: 41161 - DNA, 20 bp, Artificial Sequence
  Description of Artificial Sequence: Synthetic oligonucleotide
  Target: LAMA2; (-) strand; PAM type: NNNNGHTT; PAM sequence: AGGTGATT
tgcctttgctgtatcaattg

SEQ ID NO: 41162 - DNA, 20 bp, Artificial Sequence
  Description of Artificial Sequence: Synthetic oligonucleotide
  Target: LAMA2; (-) strand; PAM type: NNNNGHTT; PAM sequence: GGCAGTTT
aagttcccctactcttagta

SEQ ID NO: 41163 - DNA, 20 bp, Artificial Sequence
  Description of Artificial Sequence: Synthetic oligonucleotide
  Target: LAMA2; (-) strand; PAM type: NNNNGHTT; PAM sequence: ATAGGTTT
ctgttaggtttttttaaaaa

SEQ ID NO: 41164 - DNA, 20 bp, Artificial Sequence
  Description of Artificial Sequence: Synthetic oligonucleotide
  Target: LAMA2; (-) strand; PAM type: NNNNGHTT; PAM sequence: TTAGGTTT
gctaagtatgattttagctg

SEQ ID NO: 41165 - DNA, 20 bp, Artificial Sequence
  Description of Artificial Sequence: Synthetic oligonucleotide
  Target: LAMA2; (-) strand; PAM type: NNNNGHTT; PAM sequence: GTATGATT
taatcttagtcttgtgctaa

SEQ ID NO: 41166 - DNA, 20 bp, Artificial Sequence
  Description of Artificial Sequence: Synthetic oligonucleotide
  Target: LAMA2; (-) strand; PAM type: NNNNGHTT; PAM sequence: TTATGCTT
aggcatgaaccaccaggatt

SEQ ID NO: 41167 - DNA, 20 bp, Artificial Sequence
  Description of Artificial Sequence: Synthetic oligonucleotide
  Target: LAMA2; (-) strand; PAM type: NNNNGHTT; PAM sequence: CCAGGATT
agggttacaggcatgaacca

SEQ ID NO: 41168 - DNA, 20 bp, Artificial Sequence
  Description of Artificial Sequence: Synthetic oligonucleotide
  Target: LAMA2; (-) strand; PAM type: NNNNGHTT; PAM sequence: TTATGCTT
ttaatagatagcattttatt

SEQ ID NO: 41169 - DNA, 20 bp, Artificial Sequence
  Description of Artificial Sequence: Synthetic oligonucleotide
  Target: LAMA2; (-) strand; PAM type: NNNNGHTT; PAM sequence: GACTGATT
tccttgccagtctttgaaat

SEQ ID NO: 41170 - DNA, 20 bp, Artificial Sequence
  Description of Artificial Sequence: Synthetic oligonucleotide
  Target: LAMA2; (-) strand; PAM type: NNNNGHTT; PAM sequence: TTTAGATT
atggtatatctcttgattta

SEQ ID NO: 41171 - DNA, 20 bp, Artificial Sequence
  Description of Artificial Sequence: Synthetic oligonucleotide
  Target: LAMA2; (-) strand; PAM type: NNNNGHTT; PAM sequence: TCTTGATT
atctatgaacatggtatatc

SEQ ID NO: 41172 - DNA, 20 bp, Artificial Sequence
  Description of Artificial Sequence: Synthetic oligonucleotide
  Target: LAMA2; (-) strand; PAM type: NNNNGHTT; PAM sequence: CTAGGATT
tgtaggtcaatatgtataaa

SEQ ID NO: 41173 - DNA, 20 bp, Artificial Sequence
  Description of Artificial Sequence: Synthetic oligonucleotide
  Target: LAMA2; (-) strand; PAM type: NNNNGHTT; PAM sequence: CTGGGATT
aaaccttgctaggattttta

SEQ ID NO: 41174 - DNA, 20 bp, Artificial Sequence
  Description of Artificial Sequence: Synthetic oligonucleotide
  Target: LAMA2; (-) strand; PAM type: NNNNGHTT; PAM sequence: CTAGGATT
atttttaggaaaaaaccttg

SEQ ID NO: 41175 - DNA, 20 bp, Artificial Sequence
  Description of Artificial Sequence: Synthetic oligonucleotide
  Target: LAMA2; (-) strand; PAM type: NNNNGHTT; PAM sequence: CATAGCTT
acaccacattctctgattac

SEQ ID NO: 41176 - DNA, 20 bp, Artificial Sequence
  Description of Artificial Sequence: Synthetic oligonucleotide
  Target: LAMA2; (-) strand; PAM type: NNNNGHTT; PAM sequence: CTCTGATT
attgataccaacaccacatt

SEQ ID NO: 41177 - DNA, 20 bp, Artificial Sequence
  Description of Artificial Sequence: Synthetic oligonucleotide
  Target: LAMA2; (-) strand; PAM type: NNNNGHTT; PAM sequence: TATTGCTT
aatttgttaaatataccttg

SEQ ID NO: 41178 - DNA, 20 bp, Artificial Sequence
  Description of Artificial Sequence: Synthetic oligonucleotide
  Target: LAMA2; (-) strand; PAM type: NNNNGHTT; PAM sequence: TTATGTTT
tttttagatgttttatattt

SEQ ID NO: 41179 - DNA, 20 bp, Artificial Sequence
  Description of Artificial Sequence: Synthetic oligonucleotide
  Target: LAMA2; (-) strand; PAM type: NNNNGHTT; PAM sequence: AGATGTTT
gatttttcttatatattttt

SEQ ID NO: 41180 - DNA, 20 bp, Artificial Sequence
  Description of Artificial Sequence: Synthetic oligonucleotide
  Target: LAMA2; (-) strand; PAM type: NNNNGHTT; PAM sequence: CAAAGATT
ctttgctttacccaagatca

SEQ ID NO: 41181 - DNA, 20 bp, Artificial Sequence
  Description of Artificial Sequence: Synthetic oligonucleotide
  Target: LAMA2; (-) strand; PAM type: NNNNGHTT; PAM sequence: CTTTGCTT
ttggtggtgtatctaagaat

SEQ ID NO: 41182 - DNA, 20 bp, Artificial Sequence
  Description of Artificial Sequence: Synthetic oligonucleotide
  Target: LAMA2; (-) strand; PAM type: NNNNGHTT; PAM sequence: ATATGCTT
attttgttttccttttgagg

SEQ ID NO: 41183 - DNA, 20 bp, Artificial Sequence
  Description of Artificial Sequence: Synthetic oligonucleotide
  Target: LAMA2; (-) strand; PAM type: NNNNGHTT; PAM sequence: TTTTGTTT
gatgaaatttaagttgttaa

SEQ ID NO: 41184 - DNA, 20 bp, Artificial Sequence
  Description of Artificial Sequence: Synthetic oligonucleotide
  Target: LAMA2; (-) strand; PAM type: NNNNGHTT; PAM sequence: AAGTGCTT
ttatcttttcattttcttaa

SEQ ID NO: 41185 - DNA, 20 bp, Artificial Sequence
  Description of Artificial Sequence: Synthetic oligonucleotide
  Target: LAMA2; (-) strand; PAM type: NNNNGHTT; PAM sequence: ACTAGTTT
gtaatttggaaatatattct

SEQ ID NO: 41186 - DNA, 20 bp, Artificial Sequence
  Description of Artificial Sequence: Synthetic oligonucleotide
  Target: LAMA2; (-) strand; PAM type: NNNNGHTT; PAM sequence: TTGAGTTT
tgggttatttgctcttattt

SEQ ID NO: 41187 - DNA, 20 bp, Artificial Sequence
  Description of Artificial Sequence: Synthetic oligonucleotide
  Target: LAMA2; (-) strand; PAM type: NNNNGHTT; PAM sequence: ACCTGTTT
attttccaccttctttggtg

SEQ ID NO: 41188 - DNA, 20 bp, Artificial Sequence
  Description of Artificial Sequence: Synthetic oligonucleotide
  Target: LAMA2; (-) strand; PAM type: NNNNGHTT; PAM sequence: ACATGCTT
ataacattgagcatcttttc

SEQ ID NO: 41189 - DNA, 20 bp, Artificial Sequence
  Description of Artificial Sequence: Synthetic oligonucleotide
  Target: LAMA2; (-) strand; PAM type: NNNNGHTT; PAM sequence: TTGTGTTT
gtcatcattttggttttgct

SEQ ID NO: 41190 - DNA, 20 bp, Artificial Sequence
  Description of Artificial Sequence: Synthetic oligonucleotide
  Target: LAMA2; (-) strand; PAM type: NNNNGHTT; PAM sequence: TTTTGCTT
ctaactggtcatcattttgg

SEQ ID NO: 41191 - DNA, 20 bp, Artificial Sequence
  Description of Artificial Sequence: Synthetic oligonucleotide
  Target: LAMA2; (-) strand; PAM type: NNNNGHTT; PAM sequence: TTTGGTTT
acattctaactggtcatcat

SEQ ID NO: 41192 - DNA, 20 bp, Artificial Sequence
  Description of Artificial Sequence: Synthetic oligonucleotide
  Target: LAMA2; (-) strand; PAM type: NNNNGHTT; PAM sequence: ACCTGTTT
acgtttttaagaaattatca

SEQ ID NO: 41193 - DNA, 20 bp, Artificial Sequence
  Description of Artificial Sequence: Synthetic oligonucleotide
  Target: LAMA2; (-) strand; PAM type: NNNNGHTT; PAM sequence: TTACGTTT
gatcatatggtaatttatgt

SEQ ID NO: 41194 - DNA, 20 bp, Artificial Sequence
  Description of Artificial Sequence: Synthetic oligonucleotide
  Target: LAMA2; (-) strand; PAM type: NNNNGHTT; PAM sequence: TTATGTTT
tggctggatcatatggtaat

SEQ ID NO: 41195 - DNA, 20 bp, Artificial Sequence
  Description of Artificial Sequence: Synthetic oligonucleotide
  Target: LAMA2; (-) strand; PAM type: NNNNGHTT; PAM sequence: CATAGTTT
gtctggcttctttcactcaa

SEQ ID NO: 41196 - DNA, 20 bp, Artificial Sequence
  Description of Artificial Sequence: Synthetic oligonucleotide
  Target: LAMA2; (-) strand; PAM type: NNNNGHTT; PAM sequence: TCTGGCTT
ctgcatgtactctctttttg

SEQ ID NO: 41197 - DNA, 20 bp, Artificial Sequence
  Description of Artificial Sequence: Synthetic oligonucleotide
  Target: LAMA2; (-) strand; PAM type: NNNNGHTT; PAM sequence: GTAGGTTT
ctgatctgctttccatcact

SEQ ID NO: 41198 - DNA, 20 bp, Artificial Sequence
  Description of Artificial Sequence: Synthetic oligonucleotide
  Target: LAMA2; (-) strand; PAM type: NNNNGHTT; PAM sequence: ATCTGCTT
ctgtccccagacaaatactg

SEQ ID NO: 41199 - DNA, 20 bp, Artificial Sequence
  Description of Artificial Sequence: Synthetic oligonucleotide
  Target: LAMA2; (-) strand; PAM type: NNNNGHTT; PAM sequence: ATAAGTTT
gcaaaccaatttacaattgg

SEQ ID NO: 41200 - DNA, 20 bp, Artificial Sequence
  Description of Artificial Sequence: Synthetic oligonucleotide
  Target: LAMA2; (-) strand; PAM type: NNNNGHTT; PAM sequence: TACTGTTT
ctatgaccagagatgactaa

SEQ ID NO: 41201 - DNA, 20 bp, Artificial Sequence
  Description of Artificial Sequence: Synthetic oligonucleotide
  Target: LAMA2; (-) strand; PAM type: NNNNGHTT; PAM sequence: ACAAGTTT
tgtacctttgaacctaaaat

SEQ ID NO: 41202 - DNA, 20 bp, Artificial Sequence
  Description of Artificial Sequence: Synthetic oligonucleotide
  Target: LAMA2; (-) strand; PAM type: NNNNGHTT; PAM sequence: AAGAGTTT
atacaacaaacctccatgac

SEQ ID NO: 41203 - DNA, 20 bp, Artificial Sequence
  Description of Artificial Sequence: Synthetic oligonucleotide
  Target: LAMA2; (-) strand; PAM type: NNNNGHTT; PAM sequence: GGTTGATT
ggattaaagtggagagaaaa

SEQ ID NO: 41204 - DNA, 20 bp, Artificial Sequence
  Description of Artificial Sequence: Synthetic oligonucleotide
  Target: LAMA2; (-) strand; PAM type: NNNNGHTT; PAM sequence: ACAGGATT
tcaggtgtgcaaagtgaggc

SEQ ID NO: 41205 - DNA, 20 bp, Artificial Sequence
  Description of Artificial Sequence: Synthetic oligonucleotide
  Target: LAMA2; (-) strand; PAM type: NNNNGHTT; PAM sequence: AACAGCTT
gaaactagacaaaaaaagaa

SEQ ID NO: 41206 - DNA, 20 bp, Artificial Sequence
  Description of Artificial Sequence: Synthetic oligonucleotide
  Target: LAMA2; (-) strand; PAM type: NNNNGHTT; PAM sequence: TGAAGATT
aattacaatgaaagaatgtg

SEQ ID NO: 41207 - DNA, 20 bp, Artificial Sequence
  Description of Artificial Sequence: Synthetic oligonucleotide
  Target: LAMA2; (-) strand; PAM type: NNNNGHTT; PAM sequence: ATAGGTTT
tcatttttactcccttggtt

SEQ ID NO: 41208 - DNA, 20 bp, Artificial Sequence
  Description of Artificial Sequence: Synthetic oligonucleotide
  Target: LAMA2; (-) strand; PAM type: NNNNGHTT; PAM sequence: CTCAGATT
agtaagcctcaggttaccca

SEQ ID NO: 41209 - DNA, 20 bp, Artificial Sequence
  Description of Artificial Sequence: Synthetic oligonucleotide
  Target: LAMA2; (-) strand; PAM type: NNNNGHTT; PAM sequence: TGATGTTT
attattctccagaaaactga

SEQ ID NO: 41210 - DNA, 20 bp, Artificial Sequence
  Description of Artificial Sequence: Synthetic oligonucleotide
  Target: LAMA2; (-) strand; PAM type: NNNNGHTT; PAM sequence: GATTGATT
aattgattgctcatagaaca

SEQ ID NO: 41211 - DNA, 20 bp, Artificial Sequence
  Description of Artificial Sequence: Synthetic oligonucleotide
  Target: LAMA2; (-) strand; PAM type: NNNNGHTT; PAM sequence: AACAGATT
aaataattgattgctcatag

SEQ ID NO: 41212 - DNA, 20 bp, Artificial Sequence
  Description of Artificial Sequence: Synthetic oligonucleotide
  Target: LAMA2; (-) strand; PAM type: NNNNGHTT; PAM sequence: AATTGATT
ctaacagctttcaggtaaat

SEQ ID NO: 41213 - DNA, 20 bp, Artificial Sequence
  Description of Artificial Sequence: Synthetic oligonucleotide
  Target: LAMA2; (-) strand; PAM type: NNNNGHTT; PAM sequence: AACAGCTT
ttattttaatgtattattct

SEQ ID NO: 41214 - DNA, 20 bp, Artificial Sequence
  Description of Artificial Sequence: Synthetic oligonucleotide
  Target: LAMA2; (-) strand; PAM type: NNNNGHTT; PAM sequence: AAAAGATT
ttatttgaacattaaactag

SEQ ID NO: 41215 - DNA, 20 bp, Artificial Sequence
  Description of Artificial Sequence: Synthetic oligonucleotide
  Target: LAMA2; (-) strand; PAM type: NNNNGHTT; PAM sequence: CTCAGATT
gttgaagatataaatctgaa

SEQ ID NO: 41216 - DNA, 20 bp, Artificial Sequence
  Description of Artificial Sequence: Synthetic oligonucleotide
  Target: LAMA2; (-) strand; PAM type: NNNNGHTT; PAM sequence: TAGTGTTT
tgtctagttacccattttaa

SEQ ID NO: 41217 - DNA, 20 bp, Artificial Sequence
  Description of Artificial Sequence: Synthetic oligonucleotide
  Target: LAMA2; (-) strand; PAM type: NNNNGHTT; PAM sequence: GAATGTTT
atagaatgatatgggaaaag

SEQ ID NO: 41218 - DNA, 20 bp, Artificial Sequence
  Description of Artificial Sequence: Synthetic oligonucleotide
  Target: LAMA2; (-) strand; PAM type: NNNNGHTT; PAM sequence: CTCAGATT
caaagatatatttgtttaga

SEQ ID NO: 41219 - DNA, 20 bp, Artificial Sequence
  Description of Artificial Sequence: Synthetic oligonucleotide
  Target: LAMA2; (-) strand; PAM type: NNNNGHTT; PAM sequence: ATTTGTTT
ttatctccaagcaaagatat

SEQ ID NO: 41220 - DNA, 20 bp, Artificial Sequence
  Description of Artificial Sequence: Synthetic oligonucleotide
  Target: LAMA2; (-) strand; PAM type: NNNNGHTT; PAM sequence: CACTGCTT
agtgctgaaatgagaaagaa

SEQ ID NO: 41221 - DNA, 20 bp, Artificial Sequence
  Description of Artificial Sequence: Synthetic oligonucleotide
  Target: LAMA2; (-) strand; PAM type: NNNNGHTT; PAM sequence: CAATGTTT
aacagagttcttaggaactt

SEQ ID NO: 41222 - DNA, 20 bp, Artificial Sequence
  Description of Artificial Sequence: Synthetic oligonucleotide
  Target: LAMA2; (-) strand; PAM type: NNNNGHTT; PAM sequence: GACTGTTT
ttcggtagttaaagttagga

SEQ ID NO: 41223 - DNA, 20 bp, Artificial Sequence
  Description of Artificial Sequence: Synthetic oligonucleotide
  Target: LAMA2; (-) strand; PAM type: NNNNGHTT; PAM sequence: CAGAGTTT
tccagaaggcagttggtaca

SEQ ID NO: 41224 - DNA, 20 bp, Artificial Sequence
  Description of Artificial Sequence: Synthetic oligonucleotide
  Target: LAMA2; (-) strand; PAM type: NNNNGHTT; PAM sequence: TGAAGCTT
cttggcttcgttaagaatcc

SEQ ID NO: 41225 - DNA, 20 bp, Artificial Sequence
  Description of Artificial Sequence: Synthetic oligonucleotide
  Target: LAMA2; (-) strand; PAM type: NNNNGHTT; PAM sequence: CTTGGCTT
tttacatcatttgctaactt

SEQ ID NO: 41226 - DNA, 20 bp, Artificial Sequence
  Description of Artificial Sequence: Synthetic oligonucleotide
  Target: LAMA2; (-) strand; PAM type: NNNNGHTT; PAM sequence: ACCCGATT
agaatatcttatcagtaaca

SEQ ID NO: 41227 - DNA, 20 bp, Artificial Sequence
  Description of Artificial Sequence: Synthetic oligonucleotide
  Target: LAMA2; (-) strand; PAM type: NNNNGHTT; PAM sequence: AATAGATT
gagaaagtttacttgcatta

SEQ ID NO: 41228 - DNA, 20 bp, Artificial Sequence
  Description of Artificial Sequence: Synthetic oligonucleotide
  Target: LAMA2; (-) strand; PAM type: NNNNGHTT; PAM sequence: GAAAGTTT
acattttgtaaaactagtga

SEQ ID NO: 41229 - DNA, 20 bp, Artificial Sequence
  Description of Artificial Sequence: Synthetic oligonucleotide
  Target: LAMA2; (-) strand; PAM type: NNNNGHTT; PAM sequence: CTGGGTTT
tgtgagccactatggctggc

SEQ ID NO: 41230 - DNA, 20 bp, Artificial Sequence
  Description of Artificial Sequence: Synthetic oligonucleotide
  Target: LAMA2; (-) strand; PAM type: NNNNGHTT; PAM sequence: CTATGTTT
tttgtagagacaggatcttg

SEQ ID NO: 41231 - DNA, 20 bp, Artificial Sequence
  Description of Artificial Sequence: Synthetic oligonucleotide
  Target: LAMA2; (-) strand; PAM type: NNNNGHTT; PAM sequence: AAATGTTT
cacctgactaaatttttaaa

SEQ ID NO: 41232 - DNA, 20 bp, Artificial Sequence
  Description of Artificial Sequence: Synthetic oligonucleotide
  Target: LAMA2; (-) strand; PAM type: NNNNGHTT; PAM sequence: TTTTGTTT
aaaaagaaaaatgtatttaa

SEQ ID NO: 41233 - DNA, 20 bp, Artificial Sequence
  Description of Artificial Sequence: Synthetic oligonucleotide
  Target: LAMA2; (-) strand; PAM type: NNNNGHTT; PAM sequence: CAAAGATT
ccctgtctctactcaaaatg

SEQ ID NO: 41234 - DNA, 20 bp, Artificial Sequence
  Description of Artificial Sequence: Synthetic oligonucleotide
  Target: LAMA2; (-) strand; PAM type: NNNNGHTT; PAM sequence: TTTTGATT
ggcagtagatattttgtgca

SEQ ID NO: 41235 - DNA, 20 bp, Artificial Sequence
  Description of Artificial Sequence: Synthetic oligonucleotide
  Target: LAMA2; (-) strand; PAM type: NNNNGHTT; PAM sequence: CCATGTTT
atggctcatatagagagcag

SEQ ID NO: 41236 - DNA, 20 bp, Artificial Sequence
  Description of Artificial Sequence: Synthetic oligonucleotide
  Target: LAMA2; (-) strand; PAM type: NNNNGHTT; PAM sequence: GCATGTTT
catgaaggcttggaatagta

SEQ ID NO: 41237 - DNA, 20 bp, Artificial Sequence
  Description of Artificial Sequence: Synthetic oligonucleotide
  Target: LAMA2; (-) strand; PAM type: NNNNGHTT; PAM sequence: GAAGGCTT
agaaataatactgaaaacat

SEQ ID NO: 41238 - DNA, 20 bp, Artificial Sequence
  Description of Artificial Sequence: Synthetic oligonucleotide
  Target: LAMA2; (-) strand; PAM type: NNNNGHTT; PAM sequence: TTAGGTTT
catgtaaatcagatgaggtg

SEQ ID NO: 41239 - DNA, 20 bp, Artificial Sequence
  Description of Artificial Sequence: Synthetic oligonucleotide
  Target: LAMA2; (-) strand; PAM type: NNNNGHTT; PAM sequence: GGTGGTTT
attaattagtccatgattgt

SEQ ID NO: 41240 - DNA, 20 bp, Artificial Sequence
  Description of Artificial Sequence: Synthetic oligonucleotide
  Target: LAMA2; (-) strand; PAM type: NNNNGHTT; PAM sequence: CCATGATT
aagatggaatattaattagt

SEQ ID NO: 41241 - DNA, 20 bp, Artificial Sequence
  Description of Artificial Sequence: Synthetic oligonucleotide
  Target: LAMA2; (-) strand; PAM type: NNNNGHTT; PAM sequence: AAAAGTTT
catctgttatgcatcaataa

SEQ ID NO: 41242 - DNA, 20 bp, Artificial Sequence
  Description of Artificial Sequence: Synthetic oligonucleotide
  Target: LAMA2; (-) strand; PAM type: NNNNGHTT; PAM sequence: AAATGATT
gaccaaaacatgccaaatat

SEQ ID NO: 41243 - DNA, 20 bp, Artificial Sequence
  Description of Artificial Sequence: Synthetic oligonucleotide
  Target: LAMA2; (-) strand; PAM type: NNNNGHTT; PAM sequence: ATCAGCTT
gatagaacttgtaatttcat

SEQ ID NO: 41244 - DNA, 20 bp, Artificial Sequence
  Description of Artificial Sequence: Synthetic oligonucleotide
  Target: LAMA2; (-) strand; PAM type: NNNNGHTT; PAM sequence: GGGAGTTT
tgagcagaattatgtgtgta

SEQ ID NO: 41245 - DNA, 20 bp, Artificial Sequence
  Description of Artificial Sequence: Synthetic oligonucleotide
  Target: LAMA2; (-) strand; PAM type: NNNNGHTT; PAM sequence: TTCAGATT
ttggcttcttacagtcattc

SEQ ID NO: 41246 - DNA, 20 bp, Artificial Sequence
  Description of Artificial Sequence: Synthetic oligonucleotide
  Target: LAMA2; (-) strand; PAM type: NNNNGHTT; PAM sequence: TTTGGCTT
tgtccaataggaacacaggt

SEQ ID NO: 41247 - DNA, 20 bp, Artificial Sequence
  Description of Artificial Sequence: Synthetic oligonucleotide
  Target: LAMA2; (-) strand; PAM type: NNNNGHTT; PAM sequence: ACAGGTTT
tccatttgtccaataggaac

SEQ ID NO: 41248 - DNA, 20 bp, Artificial Sequence
  Description of Artificial Sequence: Synthetic oligonucleotide
  Target: LAMA2; (-) strand; PAM type: NNNNGHTT; PAM sequence: ACGGGATT
gaaggagtgaccgcaaagtc

SEQ ID NO: 41249 - DNA, 20 bp, Artificial Sequence
  Description of Artificial Sequence: Synthetic oligonucleotide
  Target: LAMA2; (-) strand; PAM type: NNNNGHTT; PAM sequence: ACAGGATT
gtattattaaaatcttaaag

SEQ ID NO: 41250 - DNA, 20 bp, Artificial Sequence
  Description of Artificial Sequence: Synthetic oligonucleotide
  Target: LAMA2; (-) strand; PAM type: NNNNGHTT; PAM sequence: CAGTGTTT
tttcttcatttttataatac

SEQ ID NO: 41251 - DNA, 20 bp, Artificial Sequence
  Description of Artificial Sequence: Synthetic oligonucleotide
  Target: LAMA2; (-) strand; PAM type: NNNNGHTT; PAM sequence: TTTAGATT
cccttcctacaatgcttgtc

SEQ ID NO: 41252 - DNA, 20 bp, Artificial Sequence
  Description of Artificial Sequence: Synthetic oligonucleotide
  Target: LAMA2; (-) strand; PAM type: NNNNGHTT; PAM sequence: CAATGCTT
ctgtctcctaacccttccta

SEQ ID NO: 41253 - DNA, 20 bp, Artificial Sequence
  Description of Artificial Sequence: Synthetic oligonucleotide
  Target: LAMA2; (-) strand; PAM type: NNNNGHTT; PAM sequence: GTGGGTTT
aattattacttgagtagttt

SEQ ID NO: 41254 - DNA, 20 bp, Artificial Sequence
  Description of Artificial Sequence: Synthetic oligonucleotide
  Target: LAMA2; (-) strand; PAM type: NNNNGHTT; PAM sequence: AGTAGTTT
tctagaggaattattacttg

SEQ ID NO: 41255 - DNA, 20 bp, Artificial Sequence
  Description of Artificial Sequence: Synthetic oligonucleotide
  Target: LAMA2; (-) strand; PAM type: NNNNGHTT; PAM sequence: CTTGGTTT
catctccgtcatagccttgg

SEQ ID NO: 41256 - DNA, 20 bp, Artificial Sequence
  Description of Artificial Sequence: Synthetic oligonucleotide
  Target: LAMA2; (-) strand; PAM type: NNNNGHTT; PAM sequence: CTTGGCTT
attcccatctccgtcatagc

SEQ ID NO: 41257 - DNA, 20 bp, Artificial Sequence
  Description of Artificial Sequence: Synthetic oligonucleotide
  Target: LAMA2; (-) strand; PAM type: NNNNGHTT; PAM sequence: CCCTGATT
ggtagtaatatatggcattt

SEQ ID NO: 41258 - DNA, 20 bp, Artificial Sequence
  Description of Artificial Sequence: Synthetic oligonucleotide
  Target: LAMA2; (-) strand; PAM type: NNNNGHTT; PAM sequence: AAGAGTTT
ctattttaatagctgctgtc

SEQ ID NO: 41259 - DNA, 20 bp, Artificial Sequence
  Description of Artificial Sequence: Synthetic oligonucleotide
  Target: LAMA2; (-) strand; PAM type: NNNNGHTT; PAM sequence: TTCAGATT
aacaaattgctcccggcaag

SEQ ID NO: 41260 - DNA, 20 bp, Artificial Sequence
  Description of Artificial Sequence: Synthetic oligonucleotide
  Target: LAMA2; (-) strand; PAM type: NNNNGHTT; PAM sequence: ACAGGCTT
attcgatcagtgcaatgtag

SEQ ID NO: 41261 - DNA, 20 bp, Artificial Sequence
  Description of Artificial Sequence: Synthetic oligonucleotide
  Target: LAMA2; (-) strand; PAM type: NNNNGHTT; PAM sequence: TTAGGATT
cacctcggtctcccgaagtg

SEQ ID NO: 41262 - DNA, 20 bp, Artificial Sequence
  Description of Artificial Sequence: Synthetic oligonucleotide
  Target: LAMA2; (-) strand; PAM type: NNNNGHTT; PAM sequence: CAGGGTTT
ttttgcgtttttagtagaga

SEQ ID NO: 41263 - DNA, 20 bp, Artificial Sequence
  Description of Artificial Sequence: Synthetic oligonucleotide
  Target: LAMA2; (-) strand; PAM type: NNNNGHTT; PAM sequence: TTGCGTTT
ccaccatgcccagctaattt

SEQ ID NO: 41264 - DNA, 20 bp, Artificial Sequence
  Description of Artificial Sequence: Synthetic oligonucleotide
  Target: LAMA2; (-) strand; PAM type: NNNNGHTT; PAM sequence: CTGGGATT
tacctcagcctcctgagtag

SEQ ID NO: 41265 - DNA, 20 bp, Artificial Sequence
  Description of Artificial Sequence: Synthetic oligonucleotide
  Target: LAMA2; (-) strand; PAM type: NNNNGHTT; PAM sequence: CCTAGTTT
tctattttataggtatgtta

SEQ ID NO: 41266 - DNA, 20 bp, Artificial Sequence
  Description of Artificial Sequence: Synthetic oligonucleotide
  Target: LAMA2; (-) strand; PAM type: NNNNGHTT; PAM sequence: CATGGATT
atgaagagtctaatgttata

SEQ ID NO: 41267 - DNA, 20 bp, Artificial Sequence
  Description of Artificial Sequence: Synthetic oligonucleotide
  Target: LAMA2; (-) strand; PAM type: NNNNGHTT; PAM sequence: TGAAGTTT
tatgttatgaagtttagtta

SEQ ID NO: 41268 - DNA, 20 bp, Artificial Sequence
  Description of Artificial Sequence: Synthetic oligonucleotide
  Target: LAMA2; (-) strand; PAM type: NNNNGHTT; PAM sequence: TGAAGTTT
agtttataaagtttatgtta

SEQ ID NO: 41269 - DNA, 20 bp, Artificial Sequence
  Description of Artificial Sequence: Synthetic oligonucleotide
  Target: LAMA2; (-) strand; PAM type: NNNNGHTT; PAM sequence: TAAAGTTT
tagattctttttttagttta

SEQ ID NO: 41270 - DNA, 20 bp, Artificial Sequence
  Description of Artificial Sequence: Synthetic oligonucleotide
  Target: LAMA2; (-) strand; PAM type: NNNNGHTT; PAM sequence: TTTAGTTT
gcttgggaatagattctttt

SEQ ID NO: 41271 - DNA, 20 bp, Artificial Sequence
  Description of Artificial Sequence: Synthetic oligonucleotide
  Target: LAMA2; (-) strand; PAM type: NNNNGHTT; PAM sequence: AATAGATT
attcattatttgggcttggg

SEQ ID NO: 41272 - DNA, 20 bp, Artificial Sequence
  Description of Artificial Sequence: Synthetic oligonucleotide
  Target: LAMA2; (-) strand; PAM type: NNNNGHTT; PAM sequence: TTGGGCTT
gcaatgcactgattcattat

SEQ ID NO: 41273 - DNA, 20 bp, Artificial Sequence
  Description of Artificial Sequence: Synthetic oligonucleotide
  Target: LAMA2; (-) strand; PAM type: NNNNGHTT; PAM sequence: CACTGATT
gcaccatatgtcaagcaatg

SEQ ID NO: 41274 - DNA, 20 bp, Artificial Sequence
  Description of Artificial Sequence: Synthetic oligonucleotide
  Target: LAMA2; (-) strand; PAM type: NNNNGHTT; PAM sequence: TAATGTTT
ataaaacttaatgattggaa

SEQ ID NO: 41275 - DNA, 20 bp, Artificial Sequence
  Description of Artificial Sequence: Synthetic oligonucleotide
  Target: LAMA2; (-) strand; PAM type: NNNNGHTT; PAM sequence: TAATGATT
tcaactggtttgataaaact

SEQ ID NO: 41276 - DNA, 20 bp, Artificial Sequence
  Description of Artificial Sequence: Synthetic oligonucleotide
  Target: LAMA2; (-) strand; PAM type: NNNNGHTT; PAM sequence: ACTGGTTT
tgtatagaaggaaggcttca

SEQ ID NO: 41277 - DNA, 20 bp, Artificial Sequence
  Description of Artificial Sequence: Synthetic oligonucleotide
  Target: LAMA2; (-) strand; PAM type: NNNNGHTT; PAM sequence: GAAGGCTT
ggaggaccactgtatagaag

SEQ ID NO: 41278 - DNA, 20 bp, Artificial Sequence
  Description of Artificial Sequence: Synthetic oligonucleotide
  Target: LAMA2; (-) strand; PAM type: NNNNGHTT; PAM sequence: GAGTGTTT
cttgtctgaacggaatgact

SEQ ID NO: 41279 - DNA, 20 bp, Artificial Sequence
  Description of Artificial Sequence: Synthetic oligonucleotide
  Target: LAMA2; (-) strand; PAM type: NNNNGHTT; PAM sequence: TAGCGTTT
aacacagaatctcaacaggt

SEQ ID NO: 41280 - DNA, 20 bp, Artificial Sequence
  Description of Artificial Sequence: Synthetic oligonucleotide
  Target: LAMA2; (-) strand; PAM type: NNNNGHTT; PAM sequence: TCCAGTTT
gtttagcagcactgcagtat

SEQ ID NO: 41281 - DNA, 20 bp, Artificial Sequence
  Description of Artificial Sequence: Synthetic oligonucleotide
  Target: LAMA2; (-) strand; PAM type: NNNNGHTT; PAM sequence: TTTGGTTT
attgcactcctatatcatac

SEQ ID NO: 41282 - DNA, 20 bp, Artificial Sequence
  Description of Artificial Sequence: Synthetic oligonucleotide
  Target: LAMA2; (-) strand; PAM type: NNNNGHTT; PAM sequence: GGCTGATT
ttgcatgcctgctatggaaa

SEQ ID NO: 41283 - DNA, 20 bp, Artificial Sequence
  Description of Artificial Sequence: Synthetic oligonucleotide
  Target: LAMA2; (-) strand; PAM type: NNNNGHTT; PAM sequence: TTTTGCTT
attgtggtcaatagagcaga

SEQ ID NO: 41284 - DNA, 20 bp, Artificial Sequence
  Description of Artificial Sequence: Synthetic oligonucleotide
  Target: LAMA2; (-) strand; PAM type: NNNNGHTT; PAM sequence: AGCAGATT
tctaaaattgtggtcaatag

SEQ ID NO: 41285 - DNA, 20 bp, Artificial Sequence
  Description of Artificial Sequence: Synthetic oligonucleotide
  Target: LAMA2; (-) strand; PAM type: NNNNGHTT; PAM sequence: CCAGGCTT
accacagtaggccaggggac

SEQ ID NO: 41286 - DNA, 20 bp, Artificial Sequence
  Description of Artificial Sequence: Synthetic oligonucleotide
  Target: LAMA2; (-) strand; PAM type: NNNNGHTT; PAM sequence: GACTGCTT
cagcaatttcacctggaaaa

SEQ ID NO: 41287 - DNA, 20 bp, Artificial Sequence
  Description of Artificial Sequence: Synthetic oligonucleotide
  Target: LAMA2; (-) strand; PAM type: NNNNGHTT; PAM sequence: CCTGGTTT
tttctctaatggaagtccac

SEQ ID NO: 41288 - DNA, 20 bp, Artificial Sequence
  Description of Artificial Sequence: Synthetic oligonucleotide
  Target: LAMA2; (-) strand; PAM type: NNNNGHTT; PAM sequence: TATTGTTT
tttgccactattttgccact

SEQ ID NO: 41289 - DNA, 20 bp, Artificial Sequence
  Description of Artificial Sequence: Synthetic oligonucleotide
  Target: LAMA2; (-) strand; PAM type: NNNNGHTT; PAM sequence: GTTTGTTT
tatacaggagtgttctgaat

SEQ ID NO: 41290 - DNA, 20 bp, Artificial Sequence
  Description of Artificial Sequence: Synthetic oligonucleotide
  Target: LAMA2; (-) strand; PAM type: NNNNGHTT; PAM sequence: GAATGTTT
atgatatacaggagtgttct

SEQ ID NO: 41291 - DNA, 20 bp, Artificial Sequence
  Description of Artificial Sequence: Synthetic oligonucleotide
  Target: LAMA2; (-) strand; PAM type: NNNNGHTT; PAM sequence: ATAAGTTT
gaacacacaacaaagcccag

SEQ ID NO: 41292 - DNA, 20 bp, Artificial Sequence
  Description of Artificial Sequence: Synthetic oligonucleotide
  Target: LAMA2; (-) strand; PAM type: NNNNGHTT; PAM sequence: CTCTGATT
aaacgccatagaatctcaga

SEQ ID NO: 41293 - DNA, 20 bp, Artificial Sequence
  Description of Artificial Sequence: Synthetic oligonucleotide
  Target: LAMA2; (-) strand; PAM type: NNNNGHTT; PAM sequence: TTCTGTTT
tgtaagtctcttgaaggcat

SEQ ID NO: 41294 - DNA, 20 bp, Artificial Sequence
  Description of Artificial Sequence: Synthetic oligonucleotide
  Target: LAMA2; (-) strand; PAM type: NNNNGHTT; PAM sequence: TTTGGTTT
tttaaataagacaaatagtc

SEQ ID NO: 41295 - DNA, 20 bp, Artificial Sequence
  Description of Artificial Sequence: Synthetic oligonucleotide
  Target: LAMA2; (-) strand; PAM type: NNNNGHTT; PAM sequence: TTGAGTTT
tcttttgcccagcaagaaaa

SEQ ID NO: 41296 - DNA, 20 bp, Artificial Sequence
  Description of Artificial Sequence: Synthetic oligonucleotide
  Target: LAMA2; (-) strand; PAM type: NNNNGHTT; PAM sequence: GCTTGTTT
tggtgactgtgggcttgcag

SEQ ID NO: 41297 - DNA, 20 bp, Artificial Sequence
  Description of Artificial Sequence: Synthetic oligonucleotide
  Target: LAMA2; (-) strand; PAM type: NNNNGHTT; PAM sequence: GCAGGCTT
gacatggtgactgtgggctt

SEQ ID NO: 41298 - DNA, 20 bp, Artificial Sequence
  Description of Artificial Sequence: Synthetic oligonucleotide
  Target: LAMA2; (-) strand; PAM type: NNNNGHTT; PAM sequence: GTGGGCTT
tcctctaggacatggtgact

SEQ ID NO: 41299 - DNA, 20 bp, Artificial Sequence
  Description of Artificial Sequence: Synthetic oligonucleotide
  Target: LAMA2; (-) strand; PAM type: NNNNGHTT; PAM sequence: CAAAGATT
ttgtctggtagcaggttctg

SEQ ID NO: 41300 - DNA, 20 bp, Artificial Sequence
  Description of Artificial Sequence: Synthetic oligonucleotide
  Target: LAMA2; (-) strand; PAM type: NNNNGHTT; PAM sequence: AGGAGCTT
tcccactagggggtcatagt

SEQ ID NO: 41301 - DNA, 20 bp, Artificial Sequence
  Description of Artificial Sequence: Synthetic oligonucleotide
  Target: LAMA2; (-) strand; PAM type: NNNNGHTT; PAM sequence: CCATGCTT
gatcttgttcgcaataagca

SEQ ID NO: 41302 - DNA, 20 bp, Artificial Sequence
  Description of Artificial Sequence: Synthetic oligonucleotide
  Target: LAMA2; (-) strand; PAM type: NNNNGHTT; PAM sequence: GACTGTTT
catatgggaacctcagagat

SEQ ID NO: 41303 - DNA, 20 bp, Artificial Sequence
  Description of Artificial Sequence: Synthetic oligonucleotide
  Target: LAMA2; (-) strand; PAM type: NNNNGHTT; PAM sequence: ATCTGATT
aagtttgggatgtgctgtat

SEQ ID NO: 41304 - DNA, 20 bp, Artificial Sequence
  Description of Artificial Sequence: Synthetic oligonucleotide
  Target: LAMA2; (-) strand; PAM type: NNNNGHTT; PAM sequence: ACAAGTTT
ccctttccctagtagctgtc

SEQ ID NO: 41305 - DNA, 20 bp, Artificial Sequence
  Description of Artificial Sequence: Synthetic oligonucleotide
  Target: LAMA2; (-) strand; PAM type: NNNNGHTT; PAM sequence: CTGTGCTT
ttctttcatgattgttactc

SEQ ID NO: 41306 - DNA, 20 bp, Artificial Sequence
  Description of Artificial Sequence: Synthetic oligonucleotide
  Target: LAMA2; (-) strand; PAM type: NNNNGHTT; PAM sequence: TCATGATT
tttatatttctagccttctt

SEQ ID NO: 41307 - DNA, 20 bp, Artificial Sequence
  Description of Artificial Sequence: Synthetic oligonucleotide
  Target: LAMA2; (-) strand; PAM type: NNNNGHTT; PAM sequence: CAATGATT
gcaatcattgaatttggtga

SEQ ID NO: 41308 - DNA, 20 bp, Artificial Sequence
  Description of Artificial Sequence: Synthetic oligonucleotide
  Target: LAMA2; (-) strand; PAM type: NNNNGHTT; PAM sequence: AATTGATT
tctctcctaggtctccagca

SEQ ID NO: 41309 - DNA, 20 bp, Artificial Sequence
  Description of Artificial Sequence: Synthetic oligonucleotide
  Target: LAMA2; (-) strand; PAM type: NNNNGHTT; PAM sequence: TTGAGATT
tgtgttcagattttggcttc

SEQ ID NO: 41310 - DNA, 20 bp, Artificial Sequence
  Description of Artificial Sequence: Synthetic oligonucleotide
  Target: LAMA2; (-) strand; PAM type: NNNNGHTT; PAM sequence: TTTGGCTT
ataagtgactgtgttcagat

SEQ ID NO: 41311 - DNA, 20 bp, Artificial Sequence
  Description of Artificial Sequence: Synthetic oligonucleotide
  Target: LAMA2; (-) strand; PAM type: NNNNGHTT; PAM sequence: TTCAGATT
tacaggcataagtgactgtg

SEQ ID NO: 41312 - DNA, 20 bp, Artificial Sequence
  Description of Artificial Sequence: Synthetic oligonucleotide
  Target: LAMA2; (-) strand; PAM type: NNNNGHTT; PAM sequence: CTGGGATT
gtgattacttttgaaaggac

SEQ ID NO: 41313 - DNA, 20 bp, Artificial Sequence
  Description of Artificial Sequence: Synthetic oligonucleotide
  Target: LAMA2; (-) strand; PAM type: NNNNGHTT; PAM sequence: ATGTGATT
caagggtgaaattcatggaa

SEQ ID NO: 41314 - DNA, 20 bp, Artificial Sequence
  Description of Artificial Sequence: Synthetic oligonucleotide
  Target: LAMA2; (-) strand; PAM type: NNNNGHTT; PAM sequence: TTGAGTTT
actattcaaattccatccag

SEQ ID NO: 41315 - DNA, 20 bp, Artificial Sequence
  Description of Artificial Sequence: Synthetic oligonucleotide
  Target: LAMA2; (-) strand; PAM type: NNNNGHTT; PAM sequence: AAATGTTT
atttttataaattttaatgg

SEQ ID NO: 41316 - DNA, 20 bp, Artificial Sequence
  Description of Artificial Sequence: Synthetic oligonucleotide
  Target: LAMA2; (-) strand; PAM type: NNNNGHTT; PAM sequence: GGACGATT
cacttttcaactaaatatcg

SEQ ID NO: 41317 - DNA, 20 bp, Artificial Sequence
  Description of Artificial Sequence: Synthetic oligonucleotide
  Target: LAMA2; (-) strand; PAM type: NNNNGHTT; PAM sequence: TTTCGTTT
tggtccagaacctaagttta

SEQ ID NO: 41318 - DNA, 20 bp, Artificial Sequence
  Description of Artificial Sequence: Synthetic oligonucleotide
  Target: LAMA2; (-) strand; PAM type: NNNNGHTT; PAM sequence: CTAAGTTT
taaattacttggtccagaac

SEQ ID NO: 41319 - DNA, 20 bp, Artificial Sequence
  Description of Artificial Sequence: Synthetic oligonucleotide
  Target: LAMA2; (-) strand; PAM type: NNNNGHTT; PAM sequence: ACCAGTTT
aaattgtcctggtgtgtttt

SEQ ID NO: 41320 - DNA, 20 bp, Artificial Sequence
  Description of Artificial Sequence: Synthetic oligonucleotide
  Target: LAMA2; (-) strand; PAM type: NNNNGHTT; PAM sequence: GTGTGTTT
ttggtttgaaaattgtcctg

SEQ ID NO: 41321 - DNA, 20 bp, Artificial Sequence
  Description of Artificial Sequence: Synthetic oligonucleotide
  Target: LAMA2; (-) strand; PAM type: NNNNGHTT; PAM sequence: ATTGGTTT
gtaaaaggtaacacactgac

SEQ ID NO: 41322 - DNA, 20 bp, Artificial Sequence
  Description of Artificial Sequence: Synthetic oligonucleotide
  Target: LAMA2; (-) strand; PAM type: NNNNGHTT; PAM sequence: GCTGGATT
tgggagatgtatgagaaagt

SEQ ID NO: 41323 - DNA, 20 bp, Artificial Sequence
  Description of Artificial Sequence: Synthetic oligonucleotide
  Target: LAMA2; (-) strand; PAM type: NNNNGHTT; PAM sequence: TAGGGCTT
acatgatgctaaatataaat

SEQ ID NO: 41324 - DNA, 20 bp, Artificial Sequence
  Description of Artificial Sequence: Synthetic oligonucleotide
  Target: LAMA2; (-) strand; PAM type: NNNNGHTT; PAM sequence: TCATGTTT
tgagcagttactcttgttta

SEQ ID NO: 41325 - DNA, 20 bp, Artificial Sequence
  Description of Artificial Sequence: Synthetic oligonucleotide
  Target: LAMA2; (-) strand; PAM type: NNNNGHTT; PAM sequence: TCTTGTTT
cattaataatgagcagttac

SEQ ID NO: 41326 - DNA, 20 bp, Artificial Sequence
  Description of Artificial Sequence: Synthetic oligonucleotide
  Target: LAMA2; (-) strand; PAM type: NNNNGHTT; PAM sequence: ATTAGTTT
tagaagaaaaatgtgctaga

SEQ ID NO: 41327 - DNA, 20 bp, Artificial Sequence
  Description of Artificial Sequence: Synthetic oligonucleotide
  Target: LAMA2; (-) strand; PAM type: NNNNGHTT; PAM sequence: TCTAGATT
tataatccatagttttattt

SEQ ID NO: 41328 - DNA, 20 bp, Artificial Sequence
  Description of Artificial Sequence: Synthetic oligonucleotide
  Target: LAMA2; (-) strand; PAM type: NNNNGHTT; PAM sequence: CATAGTTT
agaagatttaatttataatc

SEQ ID NO: 41329 - DNA, 20 bp, Artificial Sequence
  Description of Artificial Sequence: Synthetic oligonucleotide
  Target: LAMA2; (-) strand; PAM type: NNNNGHTT; PAM sequence: AGAAGATT
gtgatttctggagaataaga

SEQ ID NO: 41330 - DNA, 20 bp, Artificial Sequence
  Description of Artificial Sequence: Synthetic oligonucleotide
  Target: LAMA2; (-) strand; PAM type: NNNNGHTT; PAM sequence: TTGTGATT
atccaactgaatttttttac

SEQ ID NO: 41331 - DNA, 20 bp, Artificial Sequence
  Description of Artificial Sequence: Synthetic oligonucleotide
  Target: LAMA2; (-) strand; PAM type: NNNNGHTT; PAM sequence: TTCAGTTT
gtaagaaagaactcttgtga

SEQ ID NO: 41332 - DNA, 20 bp, Artificial Sequence
  Description of Artificial Sequence: Synthetic oligonucleotide
  Target: LAMA2; (-) strand; PAM type: NNNNGHTT; PAM sequence: TTGTGATT
ctaaaagtaagaaagaactc

SEQ ID NO: 41333 - DNA, 20 bp, Artificial Sequence
  Description of Artificial Sequence: Synthetic oligonucleotide
  Target: LAMA2; (-) strand; PAM type: NNNNGHTT; PAM sequence: GGCTGATT
tagaaaaataagcactcctg

SEQ ID NO: 41334 - DNA, 20 bp, Artificial Sequence
  Description of Artificial Sequence: Synthetic oligonucleotide
  Target: LAMA2; (-) strand; PAM type: NNNNGHTT; PAM sequence: TGCAGATT
gaagctattcagagaagaat

SEQ ID NO: 41335 - DNA, 20 bp, Artificial Sequence
  Description of Artificial Sequence: Synthetic oligonucleotide
  Target: LAMA2; (-) strand; PAM type: NNNNGHTT; PAM sequence: TGTAGCTT
tgaactacatctaaacattt

SEQ ID NO: 41336 - DNA, 20 bp, Artificial Sequence
  Description of Artificial Sequence: Synthetic oligonucleotide
  Target: LAMA2; (-) strand; PAM type: NNNNGHTT; PAM sequence: AGTAGTTT
cgctgatcacctttttctaa

SEQ ID NO: 41337 - DNA, 20 bp, Artificial Sequence
  Description of Artificial Sequence: Synthetic oligonucleotide
  Target: LAMA2; (-) strand; PAM type: NNNNGHTT; PAM sequence: AGCTGCTT
tgatttttttttaatgtttc

SEQ ID NO: 41338 - DNA, 20 bp, Artificial Sequence
  Description of Artificial Sequence: Synthetic oligonucleotide
  Target: LAMA2; (-) strand; PAM type: NNNNGHTT; PAM sequence: TAATGTTT
accctgttctgatttttttt

SEQ ID NO: 41339 - DNA, 20 bp, Artificial Sequence
  Description of Artificial Sequence: Synthetic oligonucleotide
  Target: LAMA2; (-) strand; PAM type: NNNNGHTT; PAM sequence: TTCTGATT
atgtgtatattccaaccctg

SEQ ID NO: 41340 - DNA, 20 bp, Artificial Sequence
  Description of Artificial Sequence: Synthetic oligonucleotide
  Target: LAMA2; (-) strand; PAM type: NNNNGHTT; PAM sequence: TTTTGATT
ctcaagttccaaagcgctaa

SEQ ID NO: 41341 - DNA, 20 bp, Artificial Sequence
  Description of Artificial Sequence: Synthetic oligonucleotide
  Target: LAMA2; (-) strand; PAM type: NNNNGHTT; PAM sequence: CTGGGTTT
cattaatttgaagggtatcc

SEQ ID NO: 41342 - DNA, 20 bp, Artificial Sequence
  Description of Artificial Sequence: Synthetic oligonucleotide
  Target: LAMA2; (-) strand; PAM type: NNNNGHTT; PAM sequence: TTTAGTTT
ttcttagcttcttgattgga

SEQ ID NO: 41343 - DNA, 20 bp, Artificial Sequence
  Description of Artificial Sequence: Synthetic oligonucleotide
  Target: LAMA2; (-) strand; PAM type: NNNNGHTT; PAM sequence: ATTGGATT
tttcatttcttagcttcttg

SEQ ID NO: 41344 - DNA, 20 bp, Artificial Sequence
  Description of Artificial Sequence: Synthetic oligonucleotide
  Target: LAMA2; (-) strand; PAM type: NNNNGHTT; PAM sequence: TCTTGATT
agaaatttcatttcttagct

SEQ ID NO: 41345 - DNA, 20 bp, Artificial Sequence
  Description of Artificial Sequence: Synthetic oligonucleotide
  Target: LAMA2; (-) strand; PAM type: NNNNGHTT; PAM sequence: CTTAGCTT
gaactgtagaaatttcattt

SEQ ID NO: 41346 - DNA, 20 bp, Artificial Sequence
  Description of Artificial Sequence: Synthetic oligonucleotide
  Target: LAMA2; (-) strand; PAM type: NNNNGHTT; PAM sequence: ATTAGCTT
taaagggctgctcttttgat

SEQ ID NO: 41347 - DNA, 20 bp, Artificial Sequence
  Description of Artificial Sequence: Synthetic oligonucleotide
  Target: LAMA2; (-) strand; PAM type: NNNNGHTT; PAM sequence: GTCTGATT
tactctctgaaataaagcca

SEQ ID NO: 41348 - DNA, 20 bp, Artificial Sequence
  Description of Artificial Sequence: Synthetic oligonucleotide
  Target: LAMA2; (-) strand; PAM type: NNNNGHTT; PAM sequence: TACTGTTT
tataatacttctgttatttt

SEQ ID NO: 41349 - DNA, 20 bp, Artificial Sequence
  Description of Artificial Sequence: Synthetic oligonucleotide
  Target: LAMA2; (-) strand; PAM type: NNNNGHTT; PAM sequence: ATTGGATT
caaaatatactttccaagta

SEQ ID NO: 41350 - DNA, 20 bp, Artificial Sequence
  Description of Artificial Sequence: Synthetic oligonucleotide
  Target: LAMA2; (-) strand; PAM type: NNNNGHTT; PAM sequence: CATTGTTT
atactaatataagcacataa

SEQ ID NO: 41351 - DNA, 20 bp, Artificial Sequence
  Description of Artificial Sequence: Synthetic oligonucleotide
  Target: LAMA2; (-) strand; PAM type: NNNNGHTT; PAM sequence: TACAGATT
accttaaacttctgttatac

SEQ ID NO: 41352 - DNA, 20 bp, Artificial Sequence
  Description of Artificial Sequence: Synthetic oligonucleotide
  Target: LAMA2; (-) strand; PAM type: NNNNGHTT; PAM sequence: AAGGGTTT
gattcactccacttcatata

SEQ ID NO: 41353 - DNA, 20 bp, Artificial Sequence
  Description of Artificial Sequence: Synthetic oligonucleotide
  Target: LAMA2; (-) strand; PAM type: NNNNGHTT; PAM sequence: TAATGATT
agagtacgggacatattaat

SEQ ID NO: 41354 - DNA, 20 bp, Artificial Sequence
  Description of Artificial Sequence: Synthetic oligonucleotide
  Target: LAMA2; (-) strand; PAM type: NNNNGHTT; PAM sequence: GGAGGATT
aaagggaaaggtggatagat

SEQ ID NO: 41355 - DNA, 20 bp, Artificial Sequence
  Description of Artificial Sequence: Synthetic oligonucleotide
  Target: LAMA2; (-) strand; PAM type: NNNNGHTT; PAM sequence: TCTTGATT
aaagaatagagctacagcag

SEQ ID NO: 41356 - DNA, 20 bp, Artificial Sequence
  Description of Artificial Sequence: Synthetic oligonucleotide
  Target: LAMA2; (-) strand; PAM type: NNNNGHTT; PAM sequence: GACTGATT
atgttatttgtcaacaccaa

SEQ ID NO: 41357 - DNA, 20 bp, Artificial Sequence
  Description of Artificial Sequence: Synthetic oligonucleotide
  Target: LAMA2; (-) strand; PAM type: NNNNGHTT; PAM sequence: CAATGTTT
gtgcatatatttctgttttt

SEQ ID NO: 41358 - DNA, 20 bp, Artificial Sequence
  Description of Artificial Sequence: Synthetic oligonucleotide
  Target: LAMA2; (-) strand; PAM type: NNNNGHTT; PAM sequence: TTCTGTTT
tgctttctgtgtgcatatat

SEQ ID NO: 41359 - DNA, 20 bp, Artificial Sequence
  Description of Artificial Sequence: Synthetic oligonucleotide
  Target: LAMA2; (-) strand; PAM type: NNNNGHTT; PAM sequence: AATTGCTT
atacccggttgtgctggcta

SEQ ID NO: 41360 - DNA, 20 bp, Artificial Sequence
  Description of Artificial Sequence: Synthetic oligonucleotide
  Target: LAMA2; (-) strand; PAM type: NNNNGHTT; PAM sequence: TGCTGTTT
ataccctaataagattaaag

SEQ ID NO: 41361 - DNA, 20 bp, Artificial Sequence
  Description of Artificial Sequence: Synthetic oligonucleotide
  Target: LAMA2; (-) strand; PAM type: NNNNGHTT; PAM sequence: ATAAGATT
gggggaataaaaatacccta

SEQ ID NO: 41362 - DNA, 20 bp, Artificial Sequence
  Description of Artificial Sequence: Synthetic oligonucleotide
  Target: LAMA2; (-) strand; PAM type: NNNNGHTT; PAM sequence: AAAAGATT
ttacccttcaatatacctgt

SEQ ID NO: 41363 - DNA, 20 bp, Artificial Sequence
  Description of Artificial Sequence: Synthetic oligonucleotide
  Target: LAMA2; (-) strand; PAM type: NNNNGHTT; PAM sequence: TTTGGTTT
gaattttaaatagacatgta

SEQ ID NO: 41364 - DNA, 20 bp, Artificial Sequence
  Description of Artificial Sequence: Synthetic oligonucleotide
  Target: LAMA2; (-) strand; PAM type: NNNNGHTT; PAM sequence: ATAAGTTT
attgtttgaagagcaagtta

SEQ ID NO: 41365 - DNA, 20 bp, Artificial Sequence
  Description of Artificial Sequence: Synthetic oligonucleotide
  Target: LAMA2; (-) strand; PAM type: NNNNGHTT; PAM sequence: CATTGTTT
gtggacgtgcagattgattc

SEQ ID NO: 41366 - DNA, 20 bp, Artificial Sequence
  Description of Artificial Sequence: Synthetic oligonucleotide
  Target: LAMA2; (-) strand; PAM type: NNNNGHTT; PAM sequence: GATTGATT
agagtgctagtggacgtgca

SEQ ID NO: 41367 - DNA, 20 bp, Artificial Sequence
  Description of Artificial Sequence: Synthetic oligonucleotide
  Target: LAMA2; (-) strand; PAM type: NNNNGHTT; PAM sequence: TGCAGATT
cacaagagtgctagtggacg

SEQ ID NO: 41368 - DNA, 20 bp, Artificial Sequence
  Description of Artificial Sequence: Synthetic oligonucleotide
  Target: LAMA2; (-) strand; PAM type: NNNNGHTT; PAM sequence: TTGAGATT
taagatgtcatttcttattt

SEQ ID NO: 41369 - DNA, 20 bp, Artificial Sequence
  Description of Artificial Sequence: Synthetic oligonucleotide
  Target: LAMA2; (-) strand; PAM type: NNNNGHTT; PAM sequence: TCAAGATT
atgaaattcgtaaaaagcac

SEQ ID NO: 41370 - DNA, 20 bp, Artificial Sequence
  Description of Artificial Sequence: Synthetic oligonucleotide
  Target: LAMA2; (-) strand; PAM type: NNNNGHTT; PAM sequence: TAGGGATT
caaggattgatagtcaaaac

SEQ ID NO: 41371 - DNA, 20 bp, Artificial Sequence
  Description of Artificial Sequence: Synthetic oligonucleotide
  Target: LAMA2; (-) strand; PAM type: NNNNGHTT; PAM sequence: CAAGGATT
tgctaactactgcattctac

SEQ ID NO: 41372 - DNA, 20 bp, Artificial Sequence
  Description of Artificial Sequence: Synthetic oligonucleotide
  Target: LAMA2; (-) strand; PAM type: NNNNGHTT; PAM sequence: CTAAGCTT
agagaagttgagtaaatttc

SEQ ID NO: 41373 - DNA, 20 bp, Artificial Sequence
  Description of Artificial Sequence: Synthetic oligonucleotide
  Target: LAMA2; (-) strand; PAM type: NNNNGHTT; PAM sequence: GGTTGTTT
agtgttcttcagtttcagtg

SEQ ID NO: 41374 - DNA, 20 bp, Artificial Sequence
  Description of Artificial Sequence: Synthetic oligonucleotide
  Target: LAMA2; (-) strand; PAM type: NNNNGHTT; PAM sequence: TTCAGTTT
gttacacgcatttagtgttc

SEQ ID NO: 41375 - DNA, 20 bp, Artificial Sequence
  Description of Artificial Sequence: Synthetic oligonucleotide
  Target: LAMA2; (-) strand; PAM type: NNNNGHTT; PAM sequence: AATTGTTT
tgttttgggacatgcgtact

SEQ ID NO: 41376 - DNA, 20 bp, Artificial Sequence
  Description of Artificial Sequence: Synthetic oligonucleotide
  Target: LAMA2; (-) strand; PAM type: NNNNGHTT; PAM sequence: AATTGTTT
atagtttcttatgccataaa

SEQ ID NO: 41377 - DNA, 20 bp, Artificial Sequence
  Description of Artificial Sequence: Synthetic oligonucleotide
  Target: LAMA2; (-) strand; PAM type: NNNNGHTT; PAM sequence: AATAGTTT
cattttttaggtaaattttt

SEQ ID NO: 41378 - DNA, 20 bp, Artificial Sequence
  Description of Artificial Sequence: Synthetic oligonucleotide
  Target: LAMA2; (-) strand; PAM type: NNNNGHTT; PAM sequence: ATAAGTTT
taaagatccaatctgttgat

SEQ ID NO: 41379 - DNA, 20 bp, Artificial Sequence
  Description of Artificial Sequence: Synthetic oligonucleotide
  Target: LAMA2; (-) strand; PAM type: NNNNGHTT; PAM sequence: AGCAGTTT
ttatattgtaatagtaacta

SEQ ID NO: 41380 - DNA, 20 bp, Artificial Sequence
  Description of Artificial Sequence: Synthetic oligonucleotide
  Target: LAMA2; (-) strand; PAM type: NNNNGHTT; PAM sequence: TTTAGATT
gtttttaatattctctaaac

SEQ ID NO: 41381 - DNA, 20 bp, Artificial Sequence
  Description of Artificial Sequence: Synthetic oligonucleotide
  Target: LAMA2; (-) strand; PAM type: NNNNGHTT; PAM sequence: ACTAGTTT
aagttttctagctgctttcc

SEQ ID NO: 41382 - DNA, 20 bp, Artificial Sequence
  Description of Artificial Sequence: Synthetic oligonucleotide
  Target: LAMA2; (-) strand; PAM type: NNNNGHTT; PAM sequence: AGCTGCTT
attacatatataagttttct

SEQ ID NO: 41383 - DNA, 20 bp, Artificial Sequence
  Description of Artificial Sequence: Synthetic oligonucleotide
  Target: LAMA2; (-) strand; PAM type: NNNNGHTT; PAM sequence: ATAAGTTT
gataatttaatattacatat

SEQ ID NO: 41384 - DNA, 20 bp, Artificial Sequence
  Description of Artificial Sequence: Synthetic oligonucleotide
  Target: LAMA2; (-) strand; PAM type: NNNNGHTT; PAM sequence: TATAGTTT
attgggtccaataaatttta

SEQ ID NO: 41385 - DNA, 20 bp, Artificial Sequence
  Description of Artificial Sequence: Synthetic oligonucleotide
  Target: LAMA2; (-) strand; PAM type: NNNNGHTT; PAM sequence: GATTGTTT
attttcaaaatctcagatat

SEQ ID NO: 41386 - DNA, 20 bp, Artificial Sequence
  Description of Artificial Sequence: Synthetic oligonucleotide
  Target: LAMA2; (-) strand; PAM type: NNNNGHTT; PAM sequence: ATATGATT
ttagattttcaaaatctcag

SEQ ID NO: 41387 - DNA, 20 bp, Artificial Sequence
  Description of Artificial Sequence: Synthetic oligonucleotide
  Target: LAMA2; (-) strand; PAM type: NNNNGHTT; PAM sequence: ATTAGATT
ttaccaaaatgaatcattgg

SEQ ID NO: 41388 - DNA, 20 bp, Artificial Sequence
  Description of Artificial Sequence: Synthetic oligonucleotide
  Target: LAMA2; (-) strand; PAM type: NNNNGHTT; PAM sequence: ATTGGATT
ttttattaccaaaatgaatc

SEQ ID NO: 41389 - DNA, 20 bp, Artificial Sequence
  Description of Artificial Sequence: Synthetic oligonucleotide
  Target: LAMA2; (-) strand; PAM type: NNNNGHTT; PAM sequence: CATTGATT
tgccctcttgttatcactcc

SEQ ID NO: 41390 - DNA, 20 bp, Artificial Sequence
  Description of Artificial Sequence: Synthetic oligonucleotide
  Target: LAMA2; (-) strand; PAM type: NNNNGHTT; PAM sequence: GGATGCTT
tttattatcattgaattatt

SEQ ID NO: 41391 - DNA, 20 bp, Artificial Sequence
  Description of Artificial Sequence: Synthetic oligonucleotide
  Target: LAMA2; (-) strand; PAM type: NNNNGHTT; PAM sequence: ATGTGTTT
tccaatcatattttaaaaat

SEQ ID NO: 41392 - DNA, 20 bp, Artificial Sequence
  Description of Artificial Sequence: Synthetic oligonucleotide
  Target: LAMA2; (-) strand; PAM type: NNNNGHTT; PAM sequence: CTGAGCTT
ttaaataagttttatcatcc

SEQ ID NO: 41393 - DNA, 20 bp, Artificial Sequence
  Description of Artificial Sequence: Synthetic oligonucleotide
  Target: LAMA2; (-) strand; PAM type: NNNNGHTT; PAM sequence: ATAAGTTT
aaaacaaaaaaaaggattaa

SEQ ID NO: 41394 - DNA, 20 bp, Artificial Sequence
  Description of Artificial Sequence: Synthetic oligonucleotide
  Target: LAMA2; (-) strand; PAM type: NNNNGHTT; PAM sequence: AAAGGATT
ctgcgaataaaaaacaaaaa

SEQ ID NO: 41395 - DNA, 20 bp, Artificial Sequence
  Description of Artificial Sequence: Synthetic oligonucleotide
  Target: LAMA2; (-) strand; PAM type: NNNNGHTT; PAM sequence: CCTGGTTT
ctagcatcagcattttctat

SEQ ID NO: 41396 - DNA, 20 bp, Artificial Sequence
  Description of Artificial Sequence: Synthetic oligonucleotide
  Target: LAMA2; (-) strand; PAM type: NNNNGHTT; PAM sequence: GAATGCTT
gacacagttggtagtgtcct

SEQ ID NO: 41397 - DNA, 20 bp, Artificial Sequence
  Description of Artificial Sequence: Synthetic oligonucleotide
  Target: LAMA2; (-) strand; PAM type: NNNNGHTT; PAM sequence: TTTAGTTT
taccataatgcaaagtatgg

SEQ ID NO: 41398 - DNA, 20 bp, Artificial Sequence
  Description of Artificial Sequence: Synthetic oligonucleotide
  Target: LAMA2; (-) strand; PAM type: NNNNGHTT; PAM sequence: TATGGTTT
aaaaataccataatgcaaag

SEQ ID NO: 41399 - DNA, 20 bp, Artificial Sequence
  Description of Artificial Sequence: Synthetic oligonucleotide
  Target: LAMA2; (-) strand; PAM type: NNNNGHTT; PAM sequence: ATGAGTTT
tcccctgccaatactgaagg

SEQ ID NO: 41400 - DNA, 20 bp, Artificial Sequence
  Description of Artificial Sequence: Synthetic oligonucleotide
  Target: LAMA2; (-) strand; PAM type: NNNNGHTT; PAM sequence: TAGGGATT
attaggtattataaatgatc

SEQ ID NO: 41401 - DNA, 20 bp, Artificial Sequence
  Description of Artificial Sequence: Synthetic oligonucleotide
  Target: LAMA2; (-) strand; PAM type: NNNNGHTT; PAM sequence: ACACGATT
atttattctatttcactaat

SEQ ID NO: 41402 - DNA, 20 bp, Artificial Sequence
  Description of Artificial Sequence: Synthetic oligonucleotide
  Target: LAMA2; (-) strand; PAM type: NNNNGHTT; PAM sequence: ATGTGATT
tattttagagattagtgtct

SEQ ID NO: 41403 - DNA, 20 bp, Artificial Sequence
  Description of Artificial Sequence: Synthetic oligonucleotide
  Target: LAMA2; (-) strand; PAM type: NNNNGHTT; PAM sequence: TAGAGATT
gtggtggtacatcagtattt

SEQ ID NO: 41404 - DNA, 20 bp, Artificial Sequence
  Description of Artificial Sequence: Synthetic oligonucleotide
  Target: LAMA2; (-) strand; PAM type: NNNNGHTT; PAM sequence: TAATGTTT
tacagacatggtttgaccac

SEQ ID NO: 41405 - DNA, 20 bp, Artificial Sequence
  Description of Artificial Sequence: Synthetic oligonucleotide
  Target: LAMA2; (-) strand; PAM type: NNNNGHTT; PAM sequence: CATGGTTT
aggtagaaagatattacaga

SEQ ID NO: 41406 - DNA, 20 bp, Artificial Sequence
  Description of Artificial Sequence: Synthetic oligonucleotide
  Target: LAMA2; (-) strand; PAM type: NNNNGHTT; PAM sequence: GTGTGCTT
agtagtatctttaaaataac

SEQ ID NO: 41407 - DNA, 20 bp, Artificial Sequence
  Description of Artificial Sequence: Synthetic oligonucleotide
  Target: LAMA2; (-) strand; PAM type: NNNNGHTT; PAM sequence: TCATGCTT
taatctttgttgttattata

SEQ ID NO: 41408 - DNA, 20 bp, Artificial Sequence
  Description of Artificial Sequence: Synthetic oligonucleotide
  Target: LAMA2; (-) strand; PAM type: NNNNGHTT; PAM sequence: AAGTGTTT
aagtatattaagtactcaat

SEQ ID NO: 41409 - DNA, 20 bp, Artificial Sequence
  Description of Artificial Sequence: Synthetic oligonucleotide
  Target: LAMA2; (-) strand; PAM type: NNNNGHTT; PAM sequence: TGAGGATT
tgtttttgctccaattggta

SEQ ID NO: 41410 - DNA, 20 bp, Artificial Sequence
  Description of Artificial Sequence: Synthetic oligonucleotide
  Target: LAMA2; (-) strand; PAM type: NNNNGHTT; PAM sequence: AAATGTTT
ttgatgcaagcaaatgaagc

SEQ ID NO: 41411 - DNA, 20 bp, Artificial Sequence
  Description of Artificial Sequence: Synthetic oligonucleotide
  Target: LAMA2; (-) strand; PAM type: NNNNGHTT; PAM sequence: GTCTGTTT
aatggccttcagtatcctct

SEQ ID NO: 41412 - DNA, 20 bp, Artificial Sequence
  Description of Artificial Sequence: Synthetic oligonucleotide
  Target: LAMA2; (-) strand; PAM type: NNNNGHTT; PAM sequence: TTAAGTTT
ctgaaatcaaactgtggggt

SEQ ID NO: 41413 - DNA, 20 bp, Artificial Sequence
  Description of Artificial Sequence: Synthetic oligonucleotide
  Target: LAMA2; (-) strand; PAM type: NNNNGHTT; PAM sequence: TGGGGTTT
taggctctgaaatcaaactg

SEQ ID NO: 41414 - DNA, 20 bp, Artificial Sequence
  Description of Artificial Sequence: Synthetic oligonucleotide
  Target: LAMA2; (-) strand; PAM type: NNNNGHTT; PAM sequence: CCGAGATT
cgttaaaaaagtaaaaacca

SEQ ID NO: 41415 - DNA, 20 bp, Artificial Sequence
  Description of Artificial Sequence: Synthetic oligonucleotide
  Target: LAMA2; (-) strand; PAM type: NNNNGHTT; PAM sequence: TCAGGTTT
atgaaaatctgaaaagttac

SEQ ID NO: 41416 - DNA, 20 bp, Artificial Sequence
  Description of Artificial Sequence: Synthetic oligonucleotide
  Target: LAMA2; (-) strand; PAM type: NNNNGHTT; PAM sequence: ACTTGTTT
atgttaggccatgcatttat

SEQ ID NO: 41417 - DNA, 20 bp, Artificial Sequence
  Description of Artificial Sequence: Synthetic oligonucleotide
  Target: LAMA2; (-) strand; PAM type: NNNNGHTT; PAM sequence: TTAAGATT
gagcttcatgaaaacgaggc

SEQ ID NO: 41418 - DNA, 20 bp, Artificial Sequence
  Description of Artificial Sequence: Synthetic oligonucleotide
  Target: LAMA2; (-) strand; PAM type: NNNNGHTT; PAM sequence: CGAGGCTT
ccacatgagcttcatgaaaa

SEQ ID NO: 41419 - DNA, 20 bp, Artificial Sequence
  Description of Artificial Sequence: Synthetic oligonucleotide
  Target: LAMA2; (-) strand; PAM type: NNNNGHTT; PAM sequence: ATGAGCTT
cacgagataaatttatccac

SEQ ID NO: 41420 - DNA, 20 bp, Artificial Sequence
  Description of Artificial Sequence: Synthetic oligonucleotide
  Target: LAMA2; (-) strand; PAM type: NNNNGHTT; PAM sequence: TTGTGATT
gttcattgtataagatcata

SEQ ID NO: 41421 - DNA, 20 bp, Artificial Sequence
  Description of Artificial Sequence: Synthetic oligonucleotide
  Target: LAMA2; (-) strand; PAM type: NNNNGHTT; PAM sequence: ACCTGATT
cagggacttttgctatgaat

SEQ ID NO: 41422 - DNA, 20 bp, Artificial Sequence
  Description of Artificial Sequence: Synthetic oligonucleotide
  Target: LAMA2; (-) strand; PAM type: NNNNGHTT; PAM sequence: CCATGCTT
tgtggagttagtggcttaat

SEQ ID NO: 41423 - DNA, 20 bp, Artificial Sequence
  Description of Artificial Sequence: Synthetic oligonucleotide
  Target: LAMA2; (-) strand; PAM type: NNNNGHTT; PAM sequence: AGTGGCTT
aaaacaaagggtgtggagtt

SEQ ID NO: 41424 - DNA, 20 bp, Artificial Sequence
  Description of Artificial Sequence: Synthetic oligonucleotide
  Target: LAMA2; (-) strand; PAM type: NNNNGHTT; PAM sequence: TGCAGTTT
tggctttgtccttaacagct

SEQ ID NO: 41425 - DNA, 20 bp, Artificial Sequence
  Description of Artificial Sequence: Synthetic oligonucleotide
  Target: LAMA2; (-) strand; PAM type: NNNNGHTT; PAM sequence: AACAGCTT
gcttgtctggctttgtcctt

SEQ ID NO: 41426 - DNA, 20 bp, Artificial Sequence
  Description of Artificial Sequence: Synthetic oligonucleotide
  Target: LAMA2; (-) strand; PAM type: NNNNGHTT; PAM sequence: TCTGGCTT
ttagctgtgtcgttggcttg

SEQ ID NO: 41427 - DNA, 20 bp, Artificial Sequence
  Description of Artificial Sequence: Synthetic oligonucleotide
  Target: LAMA2; (-) strand; PAM type: NNNNGHTT; PAM sequence: GTTGGCTT
agtacatctttagctgtgtc

SEQ ID NO: 41428 - DNA, 20 bp, Artificial Sequence
  Description of Artificial Sequence: Synthetic oligonucleotide
  Target: LAMA2; (-) strand; PAM type: NNNNGHTT; PAM sequence: GCTAGTTT
tcgttttggcgacgctgtct

SEQ ID NO: 41429 - DNA, 20 bp, Artificial Sequence
  Description of Artificial Sequence: Synthetic oligonucleotide
  Target: LAMA2; (-) strand; PAM type: NNNNGHTT; PAM sequence: ATTCGTTT
gaaggatctttaaccacagc

SEQ ID NO: 41430 - DNA, 20 bp, Artificial Sequence
  Description of Artificial Sequence: Synthetic oligonucleotide
  Target: LAMA2; (-) strand; PAM type: NNNNGHTT; PAM sequence: TCCAGCTT
cagagctagaagacttggat

SEQ ID NO: 41431 - DNA, 20 bp, Artificial Sequence
  Description of Artificial Sequence: Synthetic oligonucleotide
  Target: LAMA2; (-) strand; PAM type: NNNNGHTT; PAM sequence: CTTGGATT
accggggcagagctagaaga

SEQ ID NO: 41432 - DNA, 20 bp, Artificial Sequence
  Description of Artificial Sequence: Synthetic oligonucleotide
  Target: LAMA2; (-) strand; PAM type: NNNNGHTT; PAM sequence: AAGTGTTT
aattacacacacggattaaa

SEQ ID NO: 41433 - DNA, 20 bp, Artificial Sequence
  Description of Artificial Sequence: Synthetic oligonucleotide
  Target: LAMA2; (-) strand; PAM type: NNNNGHTT; PAM sequence: CACGGATT
actgtgtttttaattacaca

SEQ ID NO: 41434 - DNA, 20 bp, Artificial Sequence
  Description of Artificial Sequence: Synthetic oligonucleotide
  Target: LAMA2; (-) strand; PAM type: NNNNGHTT; PAM sequence: CTGTGTTT
atataattacccaagtacaa

SEQ ID NO: 41435 - DNA, 20 bp, Artificial Sequence
  Description of Artificial Sequence: Synthetic oligonucleotide
  Target: LAMA2; (-) strand; PAM type: NNNNGHTT; PAM sequence: TCAAGATT
ggaatctaaataataaaata

SEQ ID NO: 41436 - DNA, 20 bp, Artificial Sequence
  Description of Artificial Sequence: Synthetic oligonucleotide
  Target: LAMA2; (-) strand; PAM type: NNNNGHTT; PAM sequence: AAATGCTT
atagtctttagaaactagat

SEQ ID NO: 41437 - DNA, 20 bp, Artificial Sequence
  Description of Artificial Sequence: Synthetic oligonucleotide
  Target: LAMA2; (-) strand; PAM type: NNNNGHTT; PAM sequence: TCAGGTTT
ataagttatgatattttctc

SEQ ID NO: 41438 - DNA, 20 bp, Artificial Sequence
  Description of Artificial Sequence: Synthetic oligonucleotide
  Target: LAMA2; (-) strand; PAM type: NNNNGHTT; PAM sequence: CAAAGATT
cgcctcaggctcccaaagtg

SEQ ID NO: 41439 - DNA, 20 bp, Artificial Sequence
  Description of Artificial Sequence: Synthetic oligonucleotide
  Target: LAMA2; (-) strand; PAM type: NNNNGHTT; PAM sequence: CACAGATT
agtctcttgaaagtgaaaag

SEQ ID NO: 41440 - DNA, 20 bp, Artificial Sequence
  Description of Artificial Sequence: Synthetic oligonucleotide
  Target: LAMA2; (-) strand; PAM type: NNNNGHTT; PAM sequence: TTTTGTTT
tataataccaattacagtgc

SEQ ID NO: 41441 - DNA, 20 bp, Artificial Sequence
  Description of Artificial Sequence: Synthetic oligonucleotide
  Target: LAMA2; (-) strand; PAM type: NNNNGHTT; PAM sequence: CAGTGCTT
atggcatataataccaatta

SEQ ID NO: 41442 - DNA, 20 bp, Artificial Sequence
  Description of Artificial Sequence: Synthetic oligonucleotide
  Target: LAMA2; (-) strand; PAM type: NNNNGHTT; PAM sequence: ATTTGATT
tatatcatagcatccatagg

SEQ ID NO: 41443 - DNA, 20 bp, Artificial Sequence
  Description of Artificial Sequence: Synthetic oligonucleotide
  Target: LAMA2; (-) strand; PAM type: NNNNGHTT; PAM sequence: ATAGGATT
tctattatatcatagcatcc

SEQ ID NO: 41444 - DNA, 20 bp, Artificial Sequence
  Description of Artificial Sequence: Synthetic oligonucleotide
  Target: LAMA2; (-) strand; PAM type: NNNNGHTT; PAM sequence: ATGTGTTT
ggctctgaagtttatgttat

SEQ ID NO: 41445 - DNA, 20 bp, Artificial Sequence
  Description of Artificial Sequence: Synthetic oligonucleotide
  Target: LAMA2; (-) strand; PAM type: NNNNGHTT; PAM sequence: TGAAGTTT
cccctttttcaccctggctc

SEQ ID NO: 41446 - DNA, 20 bp, Artificial Sequence
  Description of Artificial Sequence: Synthetic oligonucleotide
  Target: LAMA2; (-) strand; PAM type: NNNNGHTT; PAM sequence: AAATGTTT
ttacattaaaaaattttaaa

SEQ ID NO: 41447 - DNA, 20 bp, Artificial Sequence
  Description of Artificial Sequence: Synthetic oligonucleotide
  Target: LAMA2; (-) strand; PAM type: NNNNGHTT; PAM sequence: CTGGGCTT
agctacaagagaagccattt

SEQ ID NO: 41448 - DNA, 20 bp, Artificial Sequence
  Description of Artificial Sequence: Synthetic oligonucleotide
  Target: LAMA2; (-) strand; PAM type: NNNNGHTT; PAM sequence: TTGTGATT
attcatttttagtgggaata

SEQ ID NO: 41449 - DNA, 20 bp, Artificial Sequence
  Description of Artificial Sequence: Synthetic oligonucleotide
  Target: LAMA2; (-) strand; PAM type: NNNNGHTT; PAM sequence: TTTTGTTT
atagtaatatttgattaaaa

SEQ ID NO: 41450 - DNA, 20 bp, Artificial Sequence
  Description of Artificial Sequence: Synthetic oligonucleotide
  Target: LAMA2; (-) strand; PAM type: NNNNGHTT; PAM sequence: ATTTGATT
taagcagcagagatagtaat

SEQ ID NO: 41451 - DNA, 20 bp, Artificial Sequence
  Description of Artificial Sequence: Synthetic oligonucleotide
  Target: LAMA2; (-) strand; PAM type: NNNNGHTT; PAM sequence: ACAGGTTT
ataaaacaaacccccatgac

SEQ ID NO: 41452 - DNA, 20 bp, Artificial Sequence
  Description of Artificial Sequence: Synthetic oligonucleotide
  Target: LAMA2; (-) strand; PAM type: NNNNGHTT; PAM sequence: CTAGGCTT
ggaaaaataactaatgggta

SEQ ID NO: 41453 - DNA, 20 bp, Artificial Sequence
  Description of Artificial Sequence: Synthetic oligonucleotide
  Target: LAMA2; (-) strand; PAM type: NNNNGHTT; PAM sequence: ATAGGATT
actatttctcataatagagg

SEQ ID NO: 41454 - DNA, 20 bp, Artificial Sequence
  Description of Artificial Sequence: Synthetic oligonucleotide
  Target: LAMA2; (-) strand; PAM type: NNNNGHTT; PAM sequence: CTATGTTT
ttgtattttaaaaattattt

SEQ ID NO: 41455 - DNA, 20 bp, Artificial Sequence
  Description of Artificial Sequence: Synthetic oligonucleotide
  Target: LAMA2; (-) strand; PAM type: NNNNGHTT; PAM sequence: TACTGATT
tatataagtaaacatatacg

SEQ ID NO: 41456 - DNA, 20 bp, Artificial Sequence
  Description of Artificial Sequence: Synthetic oligonucleotide
  Target: LAMA2; (-) strand; PAM type: NNNNGHTT; PAM sequence: CAATGTTT
cagtggaaagaatagctacg

SEQ ID NO: 41457 - DNA, 20 bp, Artificial Sequence
  Description of Artificial Sequence: Synthetic oligonucleotide
  Target: LAMA2; (-) strand; PAM type: NNNNGHTT; PAM sequence: GGAAGATT
acatatgacctttttataaa

SEQ ID NO: 41458 - DNA, 20 bp, Artificial Sequence
  Description of Artificial Sequence: Synthetic oligonucleotide
  Target: LAMA2; (-) strand; PAM type: NNNNGHTT; PAM sequence: CTATGTTT
tttgtagagatagagtcttg

SEQ ID NO: 41459 - DNA, 20 bp, Artificial Sequence
  Description of Artificial Sequence: Synthetic oligonucleotide
  Target: LAMA2; (-) strand; PAM type: NNNNGHTT; PAM sequence: TTCAGTTT
tagttaattctatagagaaa

SEQ ID NO: 41460 - DNA, 20 bp, Artificial Sequence
  Description of Artificial Sequence: Synthetic oligonucleotide
  Target: LAMA2; (-) strand; PAM type: NNNNGHTT; PAM sequence: GTGAGCTT
aattacaaggagaggaaaaa

SEQ ID NO: 41461 - DNA, 20 bp, Artificial Sequence
  Description of Artificial Sequence: Synthetic oligonucleotide
  Target: LAMA2; (-) strand; PAM type: NNNNGHTT; PAM sequence: ATGTGTTT
tgttaagacctagttttatt

SEQ ID NO: 41462 - DNA, 20 bp, Artificial Sequence
  Description of Artificial Sequence: Synthetic oligonucleotide
  Target: LAMA2; (-) strand; PAM type: NNNNGHTT; PAM sequence: CCTAGTTT
tagttgttcatttgttaaga

SEQ ID NO: 41463 - DNA, 20 bp, Artificial Sequence
  Description of Artificial Sequence: Synthetic oligonucleotide
  Target: LAMA2; (-) strand; PAM type: NNNNGHTT; PAM sequence: GGATGTTT
gactttcaatttaaactgtg

SEQ ID NO: 41464 - DNA, 20 bp, Artificial Sequence
  Description of Artificial Sequence: Synthetic oligonucleotide
  Target: LAMA2; (-) strand; PAM type: NNNNGHTT; PAM sequence: TTTAGTTT
ttattttttgtagctatttt

SEQ ID NO: 41465 - DNA, 20 bp, Artificial Sequence
  Description of Artificial Sequence: Synthetic oligonucleotide
  Target: LAMA2; (-) strand; PAM type: NNNNGHTT; PAM sequence: GATGGTTT
tttagaattgttatttcaat

SEQ ID NO: 41466 - DNA, 20 bp, Artificial Sequence
  Description of Artificial Sequence: Synthetic oligonucleotide
  Target: LAMA2; (-) strand; PAM type: NNNNGHTT; PAM sequence: GATTGTTT
tttctaaagtcagcaaagtt

SEQ ID NO: 41467 - DNA, 20 bp, Artificial Sequence
  Description of Artificial Sequence: Synthetic oligonucleotide
  Target: LAMA2; (-) strand; PAM type: NNNNGHTT; PAM sequence: AGTTGATT
gctttttctaaagtcagcaa

SEQ ID NO: 41468 - DNA, 20 bp, Artificial Sequence
  Description of Artificial Sequence: Synthetic oligonucleotide
  Target: LAMA2; (-) strand; PAM type: NNNNGHTT; PAM sequence: CTCTGCTT
tttttcattctttaagttaa

SEQ ID NO: 41469 - DNA, 20 bp, Artificial Sequence
  Description of Artificial Sequence: Synthetic oligonucleotide
  Target: LAMA2; (-) strand; PAM type: NNNNGHTT; PAM sequence: TTTTGATT
atattcctaaggagtcacct

SEQ ID NO: 41470 - DNA, 20 bp, Artificial Sequence
  Description of Artificial Sequence: Synthetic oligonucleotide
  Target: LAMA2; (-) strand; PAM type: NNNNGHTT; PAM sequence: TAGAGCTT
ttgtctagtgatacctcttt

SEQ ID NO: 41471 - DNA, 20 bp, Artificial Sequence
  Description of Artificial Sequence: Synthetic oligonucleotide
  Target: LAMA2; (-) strand; PAM type: NNNNGHTT; PAM sequence: TGAAGTTT
cctctattctccggagcagt

SEQ ID NO: 41472 - DNA, 20 bp, Artificial Sequence
  Description of Artificial Sequence: Synthetic oligonucleotide
  Target: LAMA2; (-) strand; PAM type: NNNNGHTT; PAM sequence: AAATGTTT
agttctcagaagtttttgcc

SEQ ID NO: 41473 - DNA, 20 bp, Artificial Sequence
  Description of Artificial Sequence: Synthetic oligonucleotide
  Target: LAMA2; (-) strand; PAM type: NNNNGHTT; PAM sequence: AGAAGTTT
ccttttattcacaagttctc

SEQ ID NO: 41474 - DNA, 20 bp, Artificial Sequence
  Description of Artificial Sequence: Synthetic oligonucleotide
  Target: LAMA2; (-) strand; PAM type: NNNNGHTT; PAM sequence: TTTAGATT
ctgaggcaaaatgatttaga

SEQ ID NO: 41475 - DNA, 20 bp, Artificial Sequence
  Description of Artificial Sequence: Synthetic oligonucleotide
  Target: LAMA2; (-) strand; PAM type: NNNNGHTT; PAM sequence: TTTAGATT
ctaaaactgaggcaaaatga

SEQ ID NO: 41476 - DNA, 20 bp, Artificial Sequence
  Description of Artificial Sequence: Synthetic oligonucleotide
  Target: LAMA2; (-) strand; PAM type: NNNNGHTT; PAM sequence: AAATGATT
attattctaaaactgaggca

SEQ ID NO: 41477 - DNA, 20 bp, Artificial Sequence
  Description of Artificial Sequence: Synthetic oligonucleotide
  Target: LAMA2; (-) strand; PAM type: NNNNGHTT; PAM sequence: AACCGTTT
tattttgtatgcttttaata

SEQ ID NO: 41478 - DNA, 20 bp, Artificial Sequence
  Description of Artificial Sequence: Synthetic oligonucleotide
  Target: LAMA2; (-) strand; PAM type: NNNNGHTT; PAM sequence: GTATGCTT
cacagtgatccctttatttt

SEQ ID NO: 41479 - DNA, 20 bp, Artificial Sequence
  Description of Artificial Sequence: Synthetic oligonucleotide
  Target: LAMA2; (-) strand; PAM type: NNNNGHTT; PAM sequence: AAATGTTT
aatgcatgttatctggatag

SEQ ID NO: 41480 - DNA, 20 bp, Artificial Sequence
  Description of Artificial Sequence: Synthetic oligonucleotide
  Target: LAMA2; (-) strand; PAM type: NNNNGHTT; PAM sequence: AATAGATT
gtctattattaaatttaact

SEQ ID NO: 41481 - DNA, 20 bp, Artificial Sequence
  Description of Artificial Sequence: Synthetic oligonucleotide
  Target: LAMA2; (-) strand; PAM type: NNNNGHTT; PAM sequence: TTAGGTTT
aaattatcatttttttaaaa

SEQ ID NO: 41482 - DNA, 20 bp, Artificial Sequence
  Description of Artificial Sequence: Synthetic oligonucleotide
  Target: LAMA2; (-) strand; PAM type: NNNNGHTT; PAM sequence: ATCTGCTT
gctgtgttagactctgaatg

SEQ ID NO: 41483 - DNA, 20 bp, Artificial Sequence
  Description of Artificial Sequence: Synthetic oligonucleotide
  Target: LAMA2; (-) strand; PAM type: NNNNGHTT; PAM sequence: AACTGCTT
tgactctgatgaaaaagtta

SEQ ID NO: 41484 - DNA, 20 bp, Artificial Sequence
  Description of Artificial Sequence: Synthetic oligonucleotide
  Target: LAMA2; (-) strand; PAM type: NNNNGHTT; PAM sequence: ATCTGATT
tccacactatgtcatttatt

SEQ ID NO: 41485 - DNA, 20 bp, Artificial Sequence
  Description of Artificial Sequence: Synthetic oligonucleotide
  Target: LAMA2; (-) strand; PAM type: NNNNGHTT; PAM sequence: ATGTGCTT
ctgatccatagactttcagt

SEQ ID NO: 41486 - DNA, 20 bp, Artificial Sequence
  Description of Artificial Sequence: Synthetic oligonucleotide
  Target: LAMA2; (-) strand; PAM type: NNNNGHTT; PAM sequence: CAAAGTTT
gggttacatattggcaattt

SEQ ID NO: 41487 - DNA, 20 bp, Artificial Sequence
  Description of Artificial Sequence: Synthetic oligonucleotide
  Target: LAMA2; (-) strand; PAM type: NNNNGHTT; PAM sequence: AGCTGTTT
taggttgacctatattaaac

SEQ ID NO: 41488 - DNA, 20 bp, Artificial Sequence
  Description of Artificial Sequence: Synthetic oligonucleotide
  Target: LAMA2; (-) strand; PAM type: NNNNGHTT; PAM sequence: AGTTGATT
tcaatttcattttgaagaat

SEQ ID NO: 41489 - DNA, 20 bp, Artificial Sequence
  Description of Artificial Sequence: Synthetic oligonucleotide
  Target: LAMA2; (-) strand; PAM type: NNNNGHTT; PAM sequence: ATTGGTTT
aatcagggtttttacacaaa

SEQ ID NO: 41490 - DNA, 20 bp, Artificial Sequence
  Description of Artificial Sequence: Synthetic oligonucleotide
  Target: LAMA2; (-) strand; PAM type: NNNNGHTT; PAM sequence: CAGGGTTT
agccagaactgtatttaaat

SEQ ID NO: 41491 - DNA, 20 bp, Artificial Sequence
  Description of Artificial Sequence: Synthetic oligonucleotide
  Target: LAMA2; (-) strand; PAM type: NNNNGHTT; PAM sequence: CAATGCTT
agaatatgaagaacttaatt

SEQ ID NO: 41492 - DNA, 20 bp, Artificial Sequence
  Description of Artificial Sequence: Synthetic oligonucleotide
  Target: LAMA2; (-) strand; PAM type: NNNNGHTT; PAM sequence: TTTTGATT
agagggccaccactttttct

SEQ ID NO: 41493 - DNA, 20 bp, Artificial Sequence
  Description of Artificial Sequence: Synthetic oligonucleotide
  Target: LAMA2; (-) strand; PAM type: NNNNGHTT; PAM sequence: GTATGCTT
cacacagaattagaatagca

SEQ ID NO: 41494 - DNA, 20 bp, Artificial Sequence
  Description of Artificial Sequence: Synthetic oligonucleotide
  Target: LAMA2; (-) strand; PAM type: NNNNGHTT; PAM sequence: GTCAGCTT
ttgagtttatctattagccg

SEQ ID NO: 41495 - DNA, 20 bp, Artificial Sequence
  Description of Artificial Sequence: Synthetic oligonucleotide
  Target: LAMA2; (-) strand; PAM type: NNNNGHTT; PAM sequence: TTGAGTTT
cctcaagttccttgatgggt

SEQ ID NO: 41496 - DNA, 20 bp, Artificial Sequence
  Description of Artificial Sequence: Synthetic oligonucleotide
  Target: LAMA2; (-) strand; PAM type: NNNNGHTT; PAM sequence: ATGGGTTT
ggttatcctcaagttccttg

SEQ ID NO: 41497 - DNA, 20 bp, Artificial Sequence
  Description of Artificial Sequence: Synthetic oligonucleotide
  Target: LAMA2; (-) strand; PAM type: NNNNGHTT; PAM sequence: AGATGTTT
tatcaattcctttatctcag

SEQ ID NO: 41498 - DNA, 20 bp, Artificial Sequence
  Description of Artificial Sequence: Synthetic oligonucleotide
  Target: LAMA2; (-) strand; PAM type: NNNNGHTT; PAM sequence: CTTGGTTT
agaattggcttgtttccgag

SEQ ID NO: 41499 - DNA, 20 bp, Artificial Sequence
  Description of Artificial Sequence: Synthetic oligonucleotide
  Target: LAMA2; (-) strand; PAM type: NNNNGHTT; PAM sequence: CCGAGCTT
cttacagaattggcttgttt

SEQ ID NO: 41500 - DNA, 20 bp, Artificial Sequence
  Description of Artificial Sequence: Synthetic oligonucleotide
  Target: LAMA2; (-) strand; PAM type: NNNNGHTT; PAM sequence: GCTTGTTT
aaaaagaacttacagaattg

SEQ ID NO: 41501 - DNA, 20 bp, Artificial Sequence
  Description of Artificial Sequence: Synthetic oligonucleotide
  Target: LAMA2; (-) strand; PAM type: NNNNGHTT; PAM sequence: ATTGGCTT
cgataaaaagaacttacaga

SEQ ID NO: 41502 - DNA, 20 bp, Artificial Sequence
  Description of Artificial Sequence: Synthetic oligonucleotide
  Target: LAMA2; (-) strand; PAM type: NNNNGHTT; PAM sequence: AATCGCTT
ctccaacccctcctacccca

SEQ ID NO: 41503 - DNA, 20 bp, Artificial Sequence
  Description of Artificial Sequence: Synthetic oligonucleotide
  Target: LAMA2; (-) strand; PAM type: NNNNGHTT; PAM sequence: TGGTGATT
cccagttttaaaacaataag

SEQ ID NO: 41504 - DNA, 20 bp, Artificial Sequence
  Description of Artificial Sequence: Synthetic oligonucleotide
  Target: LAMA2; (-) strand; PAM type: NNNNGHTT; PAM sequence: CCCAGTTT
taatagaatataccagaatt

SEQ ID NO: 41505 - DNA, 20 bp, Artificial Sequence
  Description of Artificial Sequence: Synthetic oligonucleotide
  Target: LAMA2; (-) strand; PAM type: NNNNGHTT; PAM sequence: TAAGGTTT
ggctttttagtatacaataa

SEQ ID NO: 41506 - DNA, 20 bp, Artificial Sequence
  Description of Artificial Sequence: Synthetic oligonucleotide
  Target: LAMA2; (-) strand; PAM type: NNNNGHTT; PAM sequence: CATGGCTT
aagaggaaggtactctcatc

SEQ ID NO: 41507 - DNA, 20 bp, Artificial Sequence
  Description of Artificial Sequence: Synthetic oligonucleotide
  Target: LAMA2; (-) strand; PAM type: NNNNGHTT; PAM sequence: GTTTGTTT
ttagttggcctttttttttg

SEQ ID NO: 41508 - DNA, 20 bp, Artificial Sequence
  Description of Artificial Sequence: Synthetic oligonucleotide
  Target: LAMA2; (-) strand; PAM type: NNNNGHTT; PAM sequence: TTTGGTTT
cccattagttggcctttttt

SEQ ID NO: 41509 - DNA, 20 bp, Artificial Sequence
  Description of Artificial Sequence: Synthetic oligonucleotide
  Target: LAMA2; (-) strand; PAM type: NNNNGHTT; PAM sequence: GTTTGTTT
aaagaatatatatgtaaaat

SEQ ID NO: 41510 - DNA, 20 bp, Artificial Sequence
  Description of Artificial Sequence: Synthetic oligonucleotide
  Target: LAMA2; (-) strand; PAM type: NNNNGHTT; PAM sequence: AAATGTTT
gacaaaagaatatatatgta

SEQ ID NO: 41511 - DNA, 20 bp, Artificial Sequence
  Description of Artificial Sequence: Synthetic oligonucleotide
  Target: LAMA2; (-) strand; PAM type: NNNNGHTT; PAM sequence: TGTTGTTT
ataaccaaagccatttttat

SEQ ID NO: 41512 - DNA, 20 bp, Artificial Sequence
  Description of Artificial Sequence: Synthetic oligonucleotide
  Target: LAMA2; (-) strand; PAM type: NNNNGHTT; PAM sequence: CTCTGTTT
gcatgctaccttctagaaag

SEQ ID NO: 41513 - DNA, 20 bp, Artificial Sequence
  Description of Artificial Sequence: Synthetic oligonucleotide
  Target: LAMA2; (-) strand; PAM type: NNNNGHTT; PAM sequence: TAAAGTTT
ccttacttccttcctttgac

SEQ ID NO: 41514 - DNA, 20 bp, Artificial Sequence
  Description of Artificial Sequence: Synthetic oligonucleotide
  Target: LAMA2; (-) strand; PAM type: NNNNGHTT; PAM sequence: AAAGGTTT
tggaaaactgaggtatctaa

SEQ ID NO: 41515 - DNA, 20 bp, Artificial Sequence
  Description of Artificial Sequence: Synthetic oligonucleotide
  Target: LAMA2; (-) strand; PAM type: NNNNGHTT; PAM sequence: AAGGGCTT
tataaactgatgaactaaga

SEQ ID NO: 41516 - DNA, 20 bp, Artificial Sequence
  Description of Artificial Sequence: Synthetic oligonucleotide
  Target: LAMA2; (-) strand; PAM type: NNNNGHTT; PAM sequence: AGTTGTTT
ccttgaacttactgtcttgg

SEQ ID NO: 41517 - DNA, 20 bp, Artificial Sequence
  Description of Artificial Sequence: Synthetic oligonucleotide
  Target: LAMA2; (-) strand; PAM type: NNNNGHTT; PAM sequence: CTAGGTTT
actaatctttttgttgtttt

SEQ ID NO: 41518 - DNA, 20 bp, Artificial Sequence
  Description of Artificial Sequence: Synthetic oligonucleotide
  Target: LAMA2; (-) strand; PAM type: NNNNGHTT; PAM sequence: TGTTGTTT
atcatcttcactaatctttt

SEQ ID NO: 41519 - DNA, 20 bp, Artificial Sequence
  Description of Artificial Sequence: Synthetic oligonucleotide
  Target: LAMA2; (-) strand; PAM type: NNNNGHTT; PAM sequence: CACTGATT
tatgttttctcagatctttt

SEQ ID NO: 41520 - DNA, 20 bp, Artificial Sequence
  Description of Artificial Sequence: Synthetic oligonucleotide
  Target: LAMA2; (-) strand; PAM type: NNNNGHTT; PAM sequence: ATATGTTT
ctttcatattctagctgaat

SEQ ID NO: 41521 - DNA, 20 bp, Artificial Sequence
  Description of Artificial Sequence: Synthetic oligonucleotide
  Target: LAMA2; (-) strand; PAM type: NNNNGHTT; PAM sequence: CCTGGCTT
atcacatgtcaacgatactg

SEQ ID NO: 41522 - DNA, 20 bp, Artificial Sequence
  Description of Artificial Sequence: Synthetic oligonucleotide
  Target: LAMA2; (-) strand; PAM type: NNNNGHTT; PAM sequence: TTGTGCTT
acatctggtttcttttaatc

SEQ ID NO: 41523 - DNA, 20 bp, Artificial Sequence
  Description of Artificial Sequence: Synthetic oligonucleotide
  Target: LAMA2; (-) strand; PAM type: NNNNGHTT; PAM sequence: TCTGGTTT
cttcaaaccttgaagtaaca

SEQ ID NO: 41524 - DNA, 20 bp, Artificial Sequence
  Description of Artificial Sequence: Synthetic oligonucleotide
  Target: LAMA2; (-) strand; PAM type: NNNNGHTT; PAM sequence: AGAGGCTT
aaagtaacactgaacatagt

SEQ ID NO: 41525 - DNA, 20 bp, Artificial Sequence
  Description of Artificial Sequence: Synthetic oligonucleotide
  Target: LAMA2; (-) strand; PAM type: NNNNGHTT; PAM sequence: CACGGCTT
agaacttttatgtcacttct

SEQ ID NO: 41526 - DNA, 20 bp, Artificial Sequence
  Description of Artificial Sequence: Synthetic oligonucleotide
  Target: LAMA2; (-) strand; PAM type: NNNNGHTT; PAM sequence: AGGTGATT
aaatcttcaggccctactag

SEQ ID NO: 41527 - DNA, 20 bp, Artificial Sequence
  Description of Artificial Sequence: Synthetic oligonucleotide
  Target: LAMA2; (-) strand; PAM type: NNNNGHTT; PAM sequence: CTTGGTTT
aaacttccttctcccactgc

SEQ ID NO: 41528 - DNA, 20 bp, Artificial Sequence
  Description of Artificial Sequence: Synthetic oligonucleotide
  Target: LAMA2; (-) strand; PAM type: NNNNGHTT; PAM sequence: ATGTGTTT
ctctgttgatctttctggtt

SEQ ID NO: 41529 - DNA, 20 bp, Artificial Sequence
  Description of Artificial Sequence: Synthetic oligonucleotide
  Target: LAMA2; (-) strand; PAM type: NNNNGHTT; PAM sequence: AACTGATT
gttgttaaatgaaattgctt

SEQ ID NO: 41530 - DNA, 20 bp, Artificial Sequence
  Description of Artificial Sequence: Synthetic oligonucleotide
  Target: LAMA2; (-) strand; PAM type: NNNNGHTT; PAM sequence: AATTGCTT
gtaccagtgttgttaaatga

SEQ ID NO: 41531 - DNA, 20 bp, Artificial Sequence
  Description of Artificial Sequence: Synthetic oligonucleotide
  Target: LAMA2; (-) strand; PAM type: NNNNGHTT; PAM sequence: TGAGGCTT
tttcagcttatcctaaccag

SEQ ID NO: 41532 - DNA, 20 bp, Artificial Sequence
  Description of Artificial Sequence: Synthetic oligonucleotide
  Target: LAMA2; (-) strand; PAM type: NNNNGHTT; PAM sequence: TTCAGCTT
tgtgttccatgctcaaagct

SEQ ID NO: 41533 - DNA, 20 bp, Artificial Sequence
  Description of Artificial Sequence: Synthetic oligonucleotide
  Target: LAMA2; (-) strand; PAM type: NNNNGHTT; PAM sequence: CAAAGCTT
attatactgtgttccatgct

SEQ ID NO: 41534 - DNA, 20 bp, Artificial Sequence
  Description of Artificial Sequence: Synthetic oligonucleotide
  Target: LAMA2; (-) strand; PAM type: NNNNGHTT; PAM sequence: CTCTGATT
tttatatttaaaaagcacag

SEQ ID NO: 41535 - DNA, 20 bp, Artificial Sequence
  Description of Artificial Sequence: Synthetic oligonucleotide
  Target: LAMA2; (-) strand; PAM type: NNNNGHTT; PAM sequence: TCTGGATT
catctaccccatacactgct

SEQ ID NO: 41536 - DNA, 20 bp, Artificial Sequence
  Description of Artificial Sequence: Synthetic oligonucleotide
  Target: LAMA2; (-) strand; PAM type: NNNNGHTT; PAM sequence: CACTGCTT
tttctttcatctaccccata

SEQ ID NO: 41537 - DNA, 20 bp, Artificial Sequence
  Description of Artificial Sequence: Synthetic oligonucleotide
  Target: LAMA2; (-) strand; PAM type: NNNNGHTT; PAM sequence: TATTGCTT
cacaaaataatatttactct

SEQ ID NO: 41538 - DNA, 20 bp, Artificial Sequence
  Description of Artificial Sequence: Synthetic oligonucleotide
  Target: LAMA2; (-) strand; PAM type: NNNNGHTT; PAM sequence: GTGAGATT
gtcagaaaatgtggctaaat

SEQ ID NO: 41539 - DNA, 20 bp, Artificial Sequence
  Description of Artificial Sequence: Synthetic oligonucleotide
  Target: LAMA2; (-) strand; PAM type: NNNNGHTT; PAM sequence: TCTAGATT
atgaagaaataataaaaatg

SEQ ID NO: 41540 - DNA, 20 bp, Artificial Sequence
  Description of Artificial Sequence: Synthetic oligonucleotide
  Target: LAMA2; (-) strand; PAM type: NNNNGHTT; PAM sequence: CACCGTTT
atgcttacatgtctgaattt

SEQ ID NO: 41541 - DNA, 20 bp, Artificial Sequence
  Description of Artificial Sequence: Synthetic oligonucleotide
  Target: LAMA2; (-) strand; PAM type: NNNNGHTT; PAM sequence: ATATGCTT
tgtactttaagacaggtttt

SEQ ID NO: 41542 - DNA, 20 bp, Artificial Sequence
  Description of Artificial Sequence: Synthetic oligonucleotide
  Target: LAMA2; (-) strand; PAM type: NNNNGHTT; PAM sequence: ACAGGTTT
cttttattttgtactttaag

SEQ ID NO: 41543 - DNA, 20 bp, Artificial Sequence
  Description of Artificial Sequence: Synthetic oligonucleotide
  Target: LAMA2; (-) strand; PAM type: NNNNGHTT; PAM sequence: ACAGGCTT
cctcccaaagtgttgggatg

SEQ ID NO: 41544 - DNA, 20 bp, Artificial Sequence
  Description of Artificial Sequence: Synthetic oligonucleotide
  Target: LAMA2; (-) strand; PAM type: NNNNGHTT; PAM sequence: TGTGGTTT
ttttcaattttttgtagaga

SEQ ID NO: 41545 - DNA, 20 bp, Artificial Sequence
  Description of Artificial Sequence: Synthetic oligonucleotide
  Target: LAMA2; (-) strand; PAM type: NNNNGHTT; PAM sequence: CAGGGTTT
tctttttttttgggggggga

SEQ ID NO: 41546 - DNA, 20 bp, Artificial Sequence
  Description of Artificial Sequence: Synthetic oligonucleotide
  Target: LAMA2; (-) strand; PAM type: NNNNGHTT; PAM sequence: CAATGATT
atttctttgaaatgcatgga

SEQ ID NO: 41547 - DNA, 20 bp, Artificial Sequence
  Description of Artificial Sequence: Synthetic oligonucleotide
  Target: LAMA2; (-) strand; PAM type: NNNNGHTT; PAM sequence: AACTGATT
tgttgtaattccatttccaa

SEQ ID NO: 41548 - DNA, 20 bp, Artificial Sequence
  Description of Artificial Sequence: Synthetic oligonucleotide
  Target: LAMA2; (-) strand; PAM type: NNNNGHTT; PAM sequence: TAATGTTT
tactttaaaataaatgtctt

SEQ ID NO: 41549 - DNA, 20 bp, Artificial Sequence
  Description of Artificial Sequence: Synthetic oligonucleotide
  Target: LAMA2; (-) strand; PAM type: NNNNGHTT; PAM sequence: ATTGGATT
agtatcccattattatatct

SEQ ID NO: 41550 - DNA, 20 bp, Artificial Sequence
  Description of Artificial Sequence: Synthetic oligonucleotide
  Target: LAMA2; (-) strand; PAM type: NNNNGHTT; PAM sequence: GAATGTTT
gaaattcaaacatcctttta

SEQ ID NO: 41551 - DNA, 20 bp, Artificial Sequence
  Description of Artificial Sequence: Synthetic oligonucleotide
  Target: LAMA2; (-) strand; PAM type: NNNNGHTT; PAM sequence: TTTTGATT
ttccttttgaatactttctg

SEQ ID NO: 41552 - DNA, 20 bp, Artificial Sequence
  Description of Artificial Sequence: Synthetic oligonucleotide
  Target: LAMA2; (-) strand; PAM type: NNNNGHTT; PAM sequence: TTCTGTTT
gtcttttccttttgaatact

SEQ ID NO: 41553 - DNA, 20 bp, Artificial Sequence
  Description of Artificial Sequence: Synthetic oligonucleotide
  Target: LAMA2; (-) strand; PAM type: NNNNGHTT; PAM sequence: TCTGGTTT
ggattacctgctttctgttt

SEQ ID NO: 41554 - DNA, 20 bp, Artificial Sequence
  Description of Artificial Sequence: Synthetic oligonucleotide
  Target: LAMA2; (-) strand; PAM type: NNNNGHTT; PAM sequence: TTCTGTTT
atactcttggattacctgct

SEQ ID NO: 41555 - DNA, 20 bp, Artificial Sequence
  Description of Artificial Sequence: Synthetic oligonucleotide
  Target: LAMA2; (-) strand; PAM type: NNNNGHTT; PAM sequence: ACCTGCTT
atagaaaatactcttggatt

SEQ ID NO: 41556 - DNA, 20 bp, Artificial Sequence
  Description of Artificial Sequence: Synthetic oligonucleotide
  Target: LAMA2; (-) strand; PAM type: NNNNGHTT; PAM sequence: CTTGGATT
acattcatatagaaaatact

SEQ ID NO: 41557 - DNA, 20 bp, Artificial Sequence
  Description of Artificial Sequence: Synthetic oligonucleotide
  Target: LAMA2; (-) strand; PAM type: NNNNGHTT; PAM sequence: AAAGGCTT
tgaattgatgccactattaa

SEQ ID NO: 41558 - DNA, 20 bp, Artificial Sequence
  Description of Artificial Sequence: Synthetic oligonucleotide
  Target: LAMA2; (-) strand; PAM type: NNNNGHTT; PAM sequence: AAGTGTTT
tgggaggggggccttttggg

SEQ ID NO: 41559 - DNA, 20 bp, Artificial Sequence
  Description of Artificial Sequence: Synthetic oligonucleotide
  Target: LAMA2; (-) strand; PAM type: NNNNGHTT; PAM sequence: ATTTGCTT
gaatgtgtccaacaaaattc

SEQ ID NO: 41560 - DNA, 20 bp, Artificial Sequence
  Description of Artificial Sequence: Synthetic oligonucleotide
  Target: LAMA2; (-) strand; PAM type: NNNNGHTT; PAM sequence: TATGGCTT
taatcctacagagtaactgc

SEQ ID NO: 41561 - DNA, 20 bp, Artificial Sequence
  Description of Artificial Sequence: Synthetic oligonucleotide
  Target: LAMA2; (-) strand; PAM type: NNNNGHTT; PAM sequence: ATATGATT
atagaatacatatctaacaa

SEQ ID NO: 41562 - DNA, 20 bp, Artificial Sequence
  Description of Artificial Sequence: Synthetic oligonucleotide
  Target: LAMA2; (-) strand; PAM type: NNNNGHTT; PAM sequence: GTGAGATT
cactccagcctggccacaga

SEQ ID NO: 41563 - DNA, 20 bp, Artificial Sequence
  Description of Artificial Sequence: Synthetic oligonucleotide
  Target: LAMA2; (-) strand; PAM type: NNNNGHTT; PAM sequence: CTGAGATT
gaggcggaggctgcagtgag

SEQ ID NO: 41564 - DNA, 20 bp, Artificial Sequence
  Description of Artificial Sequence: Synthetic oligonucleotide
  Target: LAMA2; (-) strand; PAM type: NNNNGHTT; PAM sequence: AATTGCTT
tcaggaggctgaggcaggag

SEQ ID NO: 41565 - DNA, 20 bp, Artificial Sequence
  Description of Artificial Sequence: Synthetic oligonucleotide
  Target: LAMA2; (-) strand; PAM type: NNNNGHTT; PAM sequence: AAGAGATT
ggcaggcggatcacgaggtc

SEQ ID NO: 41566 - DNA, 20 bp, Artificial Sequence
  Description of Artificial Sequence: Synthetic oligonucleotide
  Target: LAMA2; (-) strand; PAM type: NNNNGHTT; PAM sequence: CCATGATT
aaaaaaaaaaaaacgggatt

SEQ ID NO: 41567 - DNA, 20 bp, Artificial Sequence
  Description of Artificial Sequence: Synthetic oligonucleotide
  Target: LAMA2; (-) strand; PAM type: NNNNGHTT; PAM sequence: ACGGGATT
agcctggtaaaaaaaaaaaa

SEQ ID NO: 41568 - DNA, 20 bp, Artificial Sequence
  Description of Artificial Sequence: Synthetic oligonucleotide
  Target: LAMA2; (-) strand; PAM type: NNNNGHTT; PAM sequence: CATTGCTT
gtcacagaatgaatttcagt

SEQ ID NO: 41569 - DNA, 20 bp, Artificial Sequence
  Description of Artificial Sequence: Synthetic oligonucleotide
  Target: LAMA2; (-) strand; PAM type: NNNNGHTT; PAM sequence: AATTGCTT
tcaggaggctgagtcaggag

SEQ ID NO: 41570 - DNA, 20 bp, Artificial Sequence
  Description of Artificial Sequence: Synthetic oligonucleotide
  Target: LAMA2; (-) strand; PAM type: NNNNGHTT; PAM sequence: TTTTGTTT
tttaattcctaataaatcag

SEQ ID NO: 41571 - DNA, 20 bp, Artificial Sequence
  Description of Artificial Sequence: Synthetic oligonucleotide
  Target: LAMA2; (-) strand; PAM type: NNNNGHTT; PAM sequence: ATCAGTTT
gctagtttaattcctaataa

SEQ ID NO: 41572 - DNA, 20 bp, Artificial Sequence
  Description of Artificial Sequence: Synthetic oligonucleotide
  Target: LAMA2; (-) strand; PAM type: NNNNGHTT; PAM sequence: GCTAGTTT
ggccctatggctgtattatg

SEQ ID NO: 41573 - DNA, 20 bp, Artificial Sequence
  Description of Artificial Sequence: Synthetic oligonucleotide
  Target: LAMA2; (-) strand; PAM type: NNNNGHTT; PAM sequence: TATAGCTT
tttttatttaataaatgctt

SEQ ID NO: 41574 - DNA, 20 bp, Artificial Sequence
  Description of Artificial Sequence: Synthetic oligonucleotide
  Target: LAMA2; (-) strand; PAM type: NNNNGHTT; PAM sequence: AAATGCTT
ttacttcatttttatttaat

SEQ ID NO: 41575 - DNA, 20 bp, Artificial Sequence
  Description of Artificial Sequence: Synthetic oligonucleotide
  Target: LAMA2; (-) strand; PAM type: NNNNGHTT; PAM sequence: TGTAGTTT
tagtagtcaaagcgactgta

SEQ ID NO: 41576 - DNA, 20 bp, Artificial Sequence
  Description of Artificial Sequence: Synthetic oligonucleotide
  Target: LAMA2; (-) strand; PAM type: NNNNGHTT; PAM sequence: TAGTGATT
tcaggaaagggtgtcagata

SEQ ID NO: 41577 - DNA, 20 bp, Artificial Sequence
  Description of Artificial Sequence: Synthetic oligonucleotide
  Target: LAMA2; (-) strand; PAM type: NNNNGHTT; PAM sequence: AAGGGATT
agctataccaagggtcatcc

SEQ ID NO: 41578 - DNA, 20 bp, Artificial Sequence
  Description of Artificial Sequence: Synthetic oligonucleotide
  Target: LAMA2; (-) strand; PAM type: NNNNGHTT; PAM sequence: TCCTGCTT
ttttcagttgggaagttagt

SEQ ID NO: 41579 - DNA, 20 bp, Artificial Sequence
  Description of Artificial Sequence: Synthetic oligonucleotide
  Target: LAMA2; (-) strand; PAM type: NNNNGHTT; PAM sequence: GGTGGTTT
ggagacagtcttctggatag

SEQ ID NO: 41580 - DNA, 20 bp, Artificial Sequence
  Description of Artificial Sequence: Synthetic oligonucleotide
  Target: LAMA2; (-) strand; PAM type: NNNNGHTT; PAM sequence: GAGTGTTT
agggccaactatggtcctca

SEQ ID NO: 41581 - DNA, 20 bp, Artificial Sequence
  Description of Artificial Sequence: Synthetic oligonucleotide
  Target: LAMA2; (-) strand; PAM type: NNNNGHTT; PAM sequence: TACTGCTT
gctggacattccaggaagcc

SEQ ID NO: 41582 - DNA, 20 bp, Artificial Sequence
  Description of Artificial Sequence: Synthetic oligonucleotide
  Target: LAMA2; (-) strand; PAM type: NNNNGHTT; PAM sequence: GGCTGTTT
gtgttctggagagaaacagg

SEQ ID NO: 41583 - DNA, 20 bp, Artificial Sequence
  Description of Artificial Sequence: Synthetic oligonucleotide
  Target: LAMA2; (-) strand; PAM type: NNNNGHTT; PAM sequence: ATTTGTTT
acagaccgcataagtcattt

SEQ ID NO: 41584 - DNA, 20 bp, Artificial Sequence
  Description of Artificial Sequence: Synthetic oligonucleotide
  Target: LAMA2; (-) strand; PAM type: NNNNGHTT; PAM sequence: TATAGATT
ttttgcaataggtaaattca

SEQ ID NO: 41585 - DNA, 20 bp, Artificial Sequence
  Description of Artificial Sequence: Synthetic oligonucleotide
  Target: LAMA2; (-) strand; PAM type: NNNNGHTT; PAM sequence: GAGGGATT
attcaaaagagaaggctaaa

SEQ ID NO: 41586 - DNA, 20 bp, Artificial Sequence
  Description of Artificial Sequence: Synthetic oligonucleotide
  Target: LAMA2; (-) strand; PAM type: NNNNGHTT; PAM sequence: GTTGGATT
aaaggttgggtgccaaattg

SEQ ID NO: 41587 - DNA, 20 bp, Artificial Sequence
  Description of Artificial Sequence: Synthetic oligonucleotide
  Target: LAMA2; (-) strand; PAM type: NNNNGHTT; PAM sequence: TTGTGTTT
ggtgtctccaagagcctcat

SEQ ID NO: 41588 - DNA, 20 bp, Artificial Sequence
  Description of Artificial Sequence: Synthetic oligonucleotide
  Target: LAMA2; (-) strand; PAM type: NNNNGHTT; PAM sequence: AGTTGCTT
tactttcaggatagcaaaat

SEQ ID NO: 41589 - DNA, 20 bp, Artificial Sequence
  Description of Artificial Sequence: Synthetic oligonucleotide
  Target: LAMA2; (-) strand; PAM type: NNNNGHTT; PAM sequence: ATTTGATT
ataaataacactagttgatt

SEQ ID NO: 41590 - DNA, 20 bp, Artificial Sequence
  Description of Artificial Sequence: Synthetic oligonucleotide
  Target: LAMA2; (-) strand; PAM type: NNNNGHTT; PAM sequence: AGTTGATT
cttcaatcataaataacact

SEQ ID NO: 41591 - DNA, 20 bp, Artificial Sequence
  Description of Artificial Sequence: Synthetic oligonucleotide
  Target: LAMA2; (-) strand; PAM type: NNNNGHTT; PAM sequence: AATAGATT
cttacagttgaaagaggaca

SEQ ID NO: 41592 - DNA, 20 bp, Artificial Sequence
  Description of Artificial Sequence: Synthetic oligonucleotide
  Target: LAMA2; (-) strand; PAM type: NNNNGHTT; PAM sequence: TTTAGTTT
aactaagaaactatttttct

SEQ ID NO: 41593 - DNA, 20 bp, Artificial Sequence
  Description of Artificial Sequence: Synthetic oligonucleotide
  Target: LAMA2; (-) strand; PAM type: NNNNGHTT; PAM sequence: AGCGGTTT
aattttacaattgaaatttc

SEQ ID NO: 41594 - DNA, 20 bp, Artificial Sequence
  Description of Artificial Sequence: Synthetic oligonucleotide
  Target: LAMA2; (-) strand; PAM type: NNNNGHTT; PAM sequence: GGTTGTTT
atgagaatgaccttcattaa

SEQ ID NO: 41595 - DNA, 20 bp, Artificial Sequence
  Description of Artificial Sequence: Synthetic oligonucleotide
  Target: LAMA2; (-) strand; PAM type: NNNNGHTT; PAM sequence: AGGTGATT
aatatgggaacgttttaggc

SEQ ID NO: 41596 - DNA, 20 bp, Artificial Sequence
  Description of Artificial Sequence: Synthetic oligonucleotide
  Target: LAMA2; (-) strand; PAM type: NNNNGHTT; PAM sequence: GAACGTTT
tttctccattatcaatatgg

SEQ ID NO: 41597 - DNA, 20 bp, Artificial Sequence
  Description of Artificial Sequence: Synthetic oligonucleotide
  Target: LAMA2; (-) strand; PAM type: NNNNGHTT; PAM sequence: AGCAGTTT
cattaatgagggcacagaag

SEQ ID NO: 41598 - DNA, 20 bp, Artificial Sequence
  Description of Artificial Sequence: Synthetic oligonucleotide
  Target: LAMA2; (-) strand; PAM type: NNNNGHTT; PAM sequence: CATCGTTT
ccatacaaccacaaagccat

SEQ ID NO: 41599 - DNA, 20 bp, Artificial Sequence
  Description of Artificial Sequence: Synthetic oligonucleotide
  Target: LAMA2; (-) strand; PAM type: NNNNGHTT; PAM sequence: AGTAGCTT
aaatctctcagaaagtttga

SEQ ID NO: 41600 - DNA, 20 bp, Artificial Sequence
  Description of Artificial Sequence: Synthetic oligonucleotide
  Target: LAMA2; (-) strand; PAM type: NNNNGHTT; PAM sequence: GAAAGTTT
aaccaagagtaaatctctca

SEQ ID NO: 41601 - DNA, 20 bp, Artificial Sequence
  Description of Artificial Sequence: Synthetic oligonucleotide
  Target: LAMA2; (-) strand; PAM type: NNNNGHTT; PAM sequence: TCTGGTTT
tgtaacttcctttcttgatt

SEQ ID NO: 41602 - DNA, 20 bp, Artificial Sequence
  Description of Artificial Sequence: Synthetic oligonucleotide
  Target: LAMA2; (-) strand; PAM type: NNNNGHTT; PAM sequence: TCTTGATT
aatattattgtaacttcctt

SEQ ID NO: 41603 - DNA, 20 bp, Artificial Sequence
  Description of Artificial Sequence: Synthetic oligonucleotide
  Target: LAMA2; (-) strand; PAM type: NNNNGHTT; PAM sequence: TTCAGATT
atttggggattctatacatt

SEQ ID NO: 41604 - DNA, 20 bp, Artificial Sequence
  Description of Artificial Sequence: Synthetic oligonucleotide
  Target: LAMA2; (-) strand; PAM type: NNNNGHTT; PAM sequence: TGGGGATT
atttggggaccatatacatt

SEQ ID NO: 41605 - DNA, 20 bp, Artificial Sequence
  Description of Artificial Sequence: Synthetic oligonucleotide
  Target: LAMA2; (-) strand; PAM type: NNNNGHTT; PAM sequence: TGAGGTTT
aattttgtaaggtaagacgt

SEQ ID NO: 41606 - DNA, 20 bp, Artificial Sequence
  Description of Artificial Sequence: Synthetic oligonucleotide
  Target: LAMA2; (-) strand; PAM type: NNNNGHTT; PAM sequence: TGTAGTTT
aagtaaatgtgactaaacac

SEQ ID NO: 41607 - DNA, 20 bp, Artificial Sequence
  Description of Artificial Sequence: Synthetic oligonucleotide
  Target: LAMA2; (-) strand; PAM type: NNNNGHTT; PAM sequence: AATAGCTT
aataaataagaagtaaataa

SEQ ID NO: 41608 - DNA, 20 bp, Artificial Sequence
  Description of Artificial Sequence: Synthetic oligonucleotide
  Target: LAMA2; (-) strand; PAM type: NNNNGHTT; PAM sequence: TTTAGTTT
aacggaagagtttattgtaa

SEQ ID NO: 41609 - DNA, 20 bp, Artificial Sequence
  Description of Artificial Sequence: Synthetic oligonucleotide
  Target: LAMA2; (-) strand; PAM type: NNNNGHTT; PAM sequence: AAGAGTTT
tattttcatttcattaacgg

SEQ ID NO: 41610 - DNA, 20 bp, Artificial Sequence
  Description of Artificial Sequence: Synthetic oligonucleotide
  Target: LAMA2; (-) strand; PAM type: NNNNGHTT; PAM sequence: AAGAGTTT
ataaattcaacacaagttag

SEQ ID NO: 41611 - DNA, 20 bp, Artificial Sequence
  Description of Artificial Sequence: Synthetic oligonucleotide
  Target: LAMA2; (-) strand; PAM type: NNNNGHTT; PAM sequence: GTGGGCTT
aagaaattagaactttatgg

SEQ ID NO: 41612 - DNA, 20 bp, Artificial Sequence
  Description of Artificial Sequence: Synthetic oligonucleotide
  Target: LAMA2; (-) strand; PAM type: NNNNGHTT; PAM sequence: GAATGATT
caaatattgacttatgccat

SEQ ID NO: 41613 - DNA, 20 bp, Artificial Sequence
  Description of Artificial Sequence: Synthetic oligonucleotide
  Target: LAMA2; (-) strand; PAM type: NNNNGHTT; PAM sequence: CTATGATT
tgacatttttgagggggcag

SEQ ID NO: 41614 - DNA, 20 bp, Artificial Sequence
  Description of Artificial Sequence: Synthetic oligonucleotide
  Target: LAMA2; (-) strand; PAM type: NNNNGHTT; PAM sequence: GCATGTTT
aaaaagtccataatgctcag

SEQ ID NO: 41615 - DNA, 20 bp, Artificial Sequence
  Description of Artificial Sequence: Synthetic oligonucleotide
  Target: LAMA2; (-) strand; PAM type: NNNNGHTT; PAM sequence: AGGAGCTT
tgcagacatgtgaaatgatt

SEQ ID NO: 41616 - DNA, 20 bp, Artificial Sequence
  Description of Artificial Sequence: Synthetic oligonucleotide
  Target: LAMA2; (-) strand; PAM type: NNNNGHTT; PAM sequence: AAATGATT
gcgccatttgcagacatgtg

SEQ ID NO: 41617 - DNA, 20 bp, Artificial Sequence
  Description of Artificial Sequence: Synthetic oligonucleotide
  Target: LAMA2; (-) strand; PAM type: NNNNGHTT; PAM sequence: GAGTGTTT
ctttaaagaggagaccagca

SEQ ID NO: 41618 - DNA, 20 bp, Artificial Sequence
  Description of Artificial Sequence: Synthetic oligonucleotide
  Target: LAMA2; (-) strand; PAM type: NNNNGHTT; PAM sequence: AGGAGTTT
taccttattgaaatggaaat

SEQ ID NO: 41619 - DNA, 20 bp, Artificial Sequence
  Description of Artificial Sequence: Synthetic oligonucleotide
  Target: LAMA2; (-) strand; PAM type: NNNNGHTT; PAM sequence: ATGTGTTT
catgtataaaattcatacac

SEQ ID NO: 41620 - DNA, 20 bp, Artificial Sequence
  Description of Artificial Sequence: Synthetic oligonucleotide
  Target: LAMA2; (-) strand; PAM type: NNNNGHTT; PAM sequence: GAAGGTTT
gttcctctggtcaatacctg

SEQ ID NO: 41621 - DNA, 20 bp, Artificial Sequence
  Description of Artificial Sequence: Synthetic oligonucleotide
  Target: LAMA2; (-) strand; PAM type: NNNNGHTT; PAM sequence: TTTGGCTT
caataatggtgctcttatgc

SEQ ID NO: 41622 - DNA, 20 bp, Artificial Sequence
  Description of Artificial Sequence: Synthetic oligonucleotide
  Target: LAMA2; (-) strand; PAM type: NNNNGHTT; PAM sequence: TTATGCTT
gacaagcaataatggtgctc

SEQ ID NO: 41623 - DNA, 20 bp, Artificial Sequence
  Description of Artificial Sequence: Synthetic oligonucleotide
  Target: LAMA2; (-) strand; PAM type: NNNNGHTT; PAM sequence: CAGTGTTT
ggtatgttacataagaattt

SEQ ID NO: 41624 - DNA, 20 bp, Artificial Sequence
  Description of Artificial Sequence: Synthetic oligonucleotide
  Target: LAMA2; (-) strand; PAM type: NNNNGHTT; PAM sequence: TTGGGTTT
cctttcaactgttagctgct

SEQ ID NO: 41625 - DNA, 20 bp, Artificial Sequence
  Description of Artificial Sequence: Synthetic oligonucleotide
  Target: LAMA2; (-) strand; PAM type: NNNNGHTT; PAM sequence: AGCTGCTT
aaccatacctttcaactgtt

SEQ ID NO: 41626 - DNA, 20 bp, Artificial Sequence
  Description of Artificial Sequence: Synthetic oligonucleotide
  Target: LAMA2; (-) strand; PAM type: NNNNGHTT; PAM sequence: ATCAGCTT
ttaagtcttctctgtctctg

SEQ ID NO: 41627 - DNA, 20 bp, Artificial Sequence
  Description of Artificial Sequence: Synthetic oligonucleotide
  Target: LAMA2; (-) strand; PAM type: NNNNGHTT; PAM sequence: TATTGCTT
tccttaaaaagaactaaaaa

SEQ ID NO: 41628 - DNA, 20 bp, Artificial Sequence
  Description of Artificial Sequence: Synthetic oligonucleotide
  Target: LAMA2; (-) strand; PAM type: NNNNGHTT; PAM sequence: GATTGATT
tttcattttcttttttaagt

SEQ ID NO: 41629 - DNA, 20 bp, Artificial Sequence
  Description of Artificial Sequence: Synthetic oligonucleotide
  Target: LAMA2; (-) strand; PAM type: NNNNGHTT; PAM sequence: AAGTGATT
tttatttcattttctttttt

SEQ ID NO: 41630 - DNA, 20 bp, Artificial Sequence
  Description of Artificial Sequence: Synthetic oligonucleotide
  Target: LAMA2; (-) strand; PAM type: NNNNGHTT; PAM sequence: TTCAGATT
atacagtacaatatccaccc

SEQ ID NO: 41631 - DNA, 20 bp, Artificial Sequence
  Description of Artificial Sequence: Synthetic oligonucleotide
  Target: LAMA2; (-) strand; PAM type: NNNNGHTT; PAM sequence: TATTGTTT
tcctagaatggtatatcttt

SEQ ID NO: 41632 - DNA, 20 bp, Artificial Sequence
  Description of Artificial Sequence: Synthetic oligonucleotide
  Target: LAMA2; (-) strand; PAM type: NNNNGHTT; PAM sequence: CCCAGTTT
ttctttataatatcttggat

SEQ ID NO: 41633 - DNA, 20 bp, Artificial Sequence
  Description of Artificial Sequence: Synthetic oligonucleotide
  Target: LAMA2; (-) strand; PAM type: NNNNGHTT; PAM sequence: GCATGATT
accctttcatatcataagct

SEQ ID NO: 41634 - DNA, 20 bp, Artificial Sequence
  Description of Artificial Sequence: Synthetic oligonucleotide
  Target: LAMA2; (-) strand; PAM type: NNNNGHTT; PAM sequence: GCAAGTTT
taccaacacatacaatttat

SEQ ID NO: 41635 - DNA, 20 bp, Artificial Sequence
  Description of Artificial Sequence: Synthetic oligonucleotide
  Target: LAMA2; (-) strand; PAM type: NNNNGHTT; PAM sequence: TATGGCTT
taagtggaaagcctttttcc

SEQ ID NO: 41636 - DNA, 20 bp, Artificial Sequence
  Description of Artificial Sequence: Synthetic oligonucleotide
  Target: LAMA2; (-) strand; PAM type: NNNNGHTT; PAM sequence: TCCTGATT
cagaaccagtgagcaccagg

SEQ ID NO: 41637 - DNA, 20 bp, Artificial Sequence
  Description of Artificial Sequence: Synthetic oligonucleotide
  Target: LAMA2; (-) strand; PAM type: NNNNGHTT; PAM sequence: ATCAGTTT
gatcttggctcaacacttac

SEQ ID NO: 41638 - DNA, 20 bp, Artificial Sequence
  Description of Artificial Sequence: Synthetic oligonucleotide
  Target: LAMA2; (-) strand; PAM type: NNNNGHTT; PAM sequence: TTTAGTTT
atttaagagaaaactggctg

SEQ ID NO: 41639 - DNA, 20 bp, Artificial Sequence
  Description of Artificial Sequence: Synthetic oligonucleotide
  Target: LAMA2; (-) strand; PAM type: NNNNGHTT; PAM sequence: GGCTGTTT
taagaatttaagagaaaact

SEQ ID NO: 41640 - DNA, 20 bp, Artificial Sequence
  Description of Artificial Sequence: Synthetic oligonucleotide
  Target: LAMA2; (-) strand; PAM type: NNNNGHTT; PAM sequence: ACTTGTTT
aaaagatataaaatgcggag

SEQ ID NO: 41641 - DNA, 20 bp, Artificial Sequence
  Description of Artificial Sequence: Synthetic oligonucleotide
  Target: LAMA2; (-) strand; PAM type: NNNNGHTT; PAM sequence: TCCAGATT
tgcatcacatttctggtaat

SEQ ID NO: 41642 - DNA, 20 bp, Artificial Sequence
  Description of Artificial Sequence: Synthetic oligonucleotide
  Target: LAMA2; (-) strand; PAM type: NNNNGHTT; PAM sequence: GCTGGCTT
tggtgtgtgctgggcacaat

SEQ ID NO: 41643 - DNA, 20 bp, Artificial Sequence
  Description of Artificial Sequence: Synthetic oligonucleotide
  Target: LAMA2; (-) strand; PAM type: NNNNGHTT; PAM sequence: CAGAGCTT
taaaacgtgatcaagtttta

SEQ ID NO: 41644 - DNA, 20 bp, Artificial Sequence
  Description of Artificial Sequence: Synthetic oligonucleotide
  Target: LAMA2; (-) strand; PAM type: NNNNGHTT; PAM sequence: TCAAGTTT
gcaagttaagtaaaacgtga

SEQ ID NO: 41645 - DNA, 20 bp, Artificial Sequence
  Description of Artificial Sequence: Synthetic oligonucleotide
  Target: LAMA2; (-) strand; PAM type: NNNNGHTT; PAM sequence: TCATGTTT
aattcttactcaaagtaaat

SEQ ID NO: 41646 - DNA, 20 bp, Artificial Sequence
  Description of Artificial Sequence: Synthetic oligonucleotide
  Target: LAMA2; (-) strand; PAM type: NNNNGHTT; PAM sequence: TTGTGTTT
tacacataggcttaaaaata

SEQ ID NO: 41647 - DNA, 20 bp, Artificial Sequence
  Description of Artificial Sequence: Synthetic oligonucleotide
  Target: LAMA2; (-) strand; PAM type: NNNNGHTT; PAM sequence: ATAGGCTT
agctgtttaaataaatacac

SEQ ID NO: 41648 - DNA, 20 bp, Artificial Sequence
  Description of Artificial Sequence: Synthetic oligonucleotide
  Target: LAMA2; (-) strand; PAM type: NNNNGHTT; PAM sequence: AGCTGTTT
acagataaagacaaaacaac

SEQ ID NO: 41649 - DNA, 20 bp, Artificial Sequence
  Description of Artificial Sequence: Synthetic oligonucleotide
  Target: LAMA2; (-) strand; PAM type: NNNNGHTT; PAM sequence: AATCGATT
cttcatatctataaatcata

SEQ ID NO: 41650 - DNA, 20 bp, Artificial Sequence
  Description of Artificial Sequence: Synthetic oligonucleotide
  Target: LAMA2; (-) strand; PAM type: NNNNGHTT; PAM sequence: GAAAGCTT
taaaaaccagatcatgtttt

SEQ ID NO: 41651 - DNA, 20 bp, Artificial Sequence
  Description of Artificial Sequence: Synthetic oligonucleotide
  Target: LAMA2; (-) strand; PAM type: NNNNGHTT; PAM sequence: TCATGTTT
tgagaactttaaaaaccaga

SEQ ID NO: 41652 - DNA, 20 bp, Artificial Sequence
  Description of Artificial Sequence: Synthetic oligonucleotide
  Target: LAMA2; (-) strand; PAM type: NNNNGHTT; PAM sequence: ACAAGCTT
cctaattccatttaatcaac

SEQ ID NO: 41653 - DNA, 20 bp, Artificial Sequence
  Description of Artificial Sequence: Synthetic oligonucleotide
  Target: LAMA2; (-) strand; PAM type: NNNNGHTT; PAM sequence: AGTGGTTT
tgctcctgcatctcacccat

SEQ ID NO: 41654 - DNA, 20 bp, Artificial Sequence
  Description of Artificial Sequence: Synthetic oligonucleotide
  Target: LAMA2; (-) strand; PAM type: NNNNGHTT; PAM sequence: CCAGGATT
tcaggatgattctgacaagc

SEQ ID NO: 41655 - DNA, 20 bp, Artificial Sequence
  Description of Artificial Sequence: Synthetic oligonucleotide
  Target: LAMA2; (-) strand; PAM type: NNNNGHTT; PAM sequence: GGATGATT
ttctgactaatctcaactca

SEQ ID NO: 41656 - DNA, 20 bp, Artificial Sequence
  Description of Artificial Sequence: Synthetic oligonucleotide
  Target: LAMA2; (-) strand; PAM type: NNNNGHTT; PAM sequence: CCTGGCTT
cctcataaatttggggtcac

SEQ ID NO: 41657 - DNA, 20 bp, Artificial Sequence
  Description of Artificial Sequence: Synthetic oligonucleotide
  Target: LAMA2; (-) strand; PAM type: NNNNGHTT; PAM sequence: TGTGGTTT
aaacgaggataacttcagcg

SEQ ID NO: 41658 - DNA, 20 bp, Artificial Sequence
  Description of Artificial Sequence: Synthetic oligonucleotide
  Target: LAMA2; (-) strand; PAM type: NNNNGHTT; PAM sequence: CATGGCTT
ctggatttgatttcaaaatt

SEQ ID NO: 41659 - DNA, 20 bp, Artificial Sequence
  Description of Artificial Sequence: Synthetic oligonucleotide
  Target: LAMA2; (-) strand; PAM type: NNNNGHTT; PAM sequence: ATTTGATT
gaggaggaaatccaacctgg

SEQ ID NO: 41660 - DNA, 20 bp, Artificial Sequence
  Description of Artificial Sequence: Synthetic oligonucleotide
  Target: LAMA2; (-) strand; PAM type: NNNNGHTT; PAM sequence: CCTGGATT
tggaagaggaggaaatccaa

SEQ ID NO: 41661 - DNA, 20 bp, Artificial Sequence
  Description of Artificial Sequence: Synthetic oligonucleotide
  Target: LAMA2; (-) strand; PAM type: NNNNGHTT; PAM sequence: CCCAGTTT
gtttgtttatttataaacta

SEQ ID NO: 41662 - DNA, 20 bp, Artificial Sequence
  Description of Artificial Sequence: Synthetic oligonucleotide
  Target: LAMA2; (-) strand; PAM type: NNNNGHTT; PAM sequence: GTTTGTTT
aagaattgtgagaaataaat

SEQ ID NO: 41663 - DNA, 20 bp, Artificial Sequence
  Description of Artificial Sequence: Synthetic oligonucleotide
  Target: LAMA2; (-) strand; PAM type: NNNNGHTT; PAM sequence: AAATGTTT
cttcaagaattgtgagaaat

SEQ ID NO: 41664 - DNA, 20 bp, Artificial Sequence
  Description of Artificial Sequence: Synthetic oligonucleotide
  Target: LAMA2; (-) strand; PAM type: NNNNGHTT; PAM sequence: CTTAGCTT
agtaccttgatctcagactt

SEQ ID NO: 41665 - DNA, 20 bp, Artificial Sequence
  Description of Artificial Sequence: Synthetic oligonucleotide
  Target: LAMA2; (-) strand; PAM type: NNNNGHTT; PAM sequence: AGGAGCTT
cccttataaaataggtccaa

SEQ ID NO: 41666 - DNA, 20 bp, Artificial Sequence
  Description of Artificial Sequence: Synthetic oligonucleotide
  Target: LAMA2; (-) strand; PAM type: NNNNGHTT; PAM sequence: GTGAGTTT
gcaggcagggcatttgagag

SEQ ID NO: 41667 - DNA, 20 bp, Artificial Sequence
  Description of Artificial Sequence: Synthetic oligonucleotide
  Target: LAMA2; (-) strand; PAM type: NNNNGHTT; PAM sequence: TTCAGATT
gacatttaacatctctcttc

SEQ ID NO: 41668 - DNA, 20 bp, Artificial Sequence
  Description of Artificial Sequence: Synthetic oligonucleotide
  Target: LAMA2; (-) strand; PAM type: NNNNGHTT; PAM sequence: TACTGTTT
tttttctgagactgatagaa

SEQ ID NO: 41669 - DNA, 20 bp, Artificial Sequence
  Description of Artificial Sequence: Synthetic oligonucleotide
  Target: LAMA2; (-) strand; PAM type: NNNNGHTT; PAM sequence: TCATGTTT
ttgctatagatttcatttgt

SEQ ID NO: 41670 - DNA, 20 bp, Artificial Sequence
  Description of Artificial Sequence: Synthetic oligonucleotide
  Target: LAMA2; (-) strand; PAM type: NNNNGHTT; PAM sequence: TATAGATT
aatgatttcctaaggtttgc

SEQ ID NO: 41671 - DNA, 20 bp, Artificial Sequence
  Description of Artificial Sequence: Synthetic oligonucleotide
  Target: LAMA2; (-) strand; PAM type: NNNNGHTT; PAM sequence: TAAGGTTT
tcttggccaaaatgatttcc

SEQ ID NO: 41672 - DNA, 20 bp, Artificial Sequence
  Description of Artificial Sequence: Synthetic oligonucleotide
  Target: LAMA2; (-) strand; PAM type: NNNNGHTT; PAM sequence: AAATGATT
agtcttgaaattcttggcca

SEQ ID NO: 41673 - DNA, 20 bp, Artificial Sequence
  Description of Artificial Sequence: Synthetic oligonucleotide
  Target: LAMA2; (-) strand; PAM type: NNNNGHTT; PAM sequence: TTCAGCTT
agcaagttcatttagttgtt

SEQ ID NO: 41674 - DNA, 20 bp, Artificial Sequence
  Description of Artificial Sequence: Synthetic oligonucleotide
  Target: LAMA2; (-) strand; PAM type: NNNNGHTT; PAM sequence: AGTTGTTT
tctcatgagcaagttcattt

SEQ ID NO: 41675 - DNA, 20 bp, Artificial Sequence
  Description of Artificial Sequence: Synthetic oligonucleotide
  Target: LAMA2; (-) strand; PAM type: NNNNGHTT; PAM sequence: GAGAGATT
catcctgaaaagctatattt

SEQ ID NO: 41676 - DNA, 20 bp, Artificial Sequence
  Description of Artificial Sequence: Synthetic oligonucleotide
  Target: LAMA2; (-) strand; PAM type: NNNNGHTT; PAM sequence: TTTTGCTT
acttgtgaattctgcttgct

SEQ ID NO: 41677 - DNA, 20 bp, Artificial Sequence
  Description of Artificial Sequence: Synthetic oligonucleotide
  Target: LAMA2; (-) strand; PAM type: NNNNGHTT; PAM sequence: GCTTGCTT
ttatcctacttgtgaattct

SEQ ID NO: 41678 - DNA, 20 bp, Artificial Sequence
  Description of Artificial Sequence: Synthetic oligonucleotide
  Target: LAMA2; (-) strand; PAM type: NNNNGHTT; PAM sequence: TTCTGCTT
ttgattatcctacttgtgaa

SEQ ID NO: 41679 - DNA, 20 bp, Artificial Sequence
  Description of Artificial Sequence: Synthetic oligonucleotide
  Target: LAMA2; (-) strand; PAM type: NNNNGHTT; PAM sequence: GATTGATT
gaacctcttaattttctaga

SEQ ID NO: 41680 - DNA, 20 bp, Artificial Sequence
  Description of Artificial Sequence: Synthetic oligonucleotide
  Target: LAMA2; (-) strand; PAM type: NNNNGHTT; PAM sequence: TAGAGATT
ctctgaacctcttaattttc

SEQ ID NO: 41681 - DNA, 20 bp, Artificial Sequence
  Description of Artificial Sequence: Synthetic oligonucleotide
  Target: LAMA2; (-) strand; PAM type: NNNNGHTT; PAM sequence: GAAAGATT
atgtattgcacagccgcata

SEQ ID NO: 41682 - DNA, 20 bp, Artificial Sequence
  Description of Artificial Sequence: Synthetic oligonucleotide
  Target: LAMA2; (-) strand; PAM type: NNNNGHTT; PAM sequence: TATGGTTT
tctatggtatagcctactgc

SEQ ID NO: 41683 - DNA, 20 bp, Artificial Sequence
  Description of Artificial Sequence: Synthetic oligonucleotide
  Target: LAMA2; (-) strand; PAM type: NNNNGHTT; PAM sequence: TTTGGTTT
gaaaaacatgcattgactca

SEQ ID NO: 41684 - DNA, 20 bp, Artificial Sequence
  Description of Artificial Sequence: Synthetic oligonucleotide
  Target: LAMA2; (-) strand; PAM type: NNNNGHTT; PAM sequence: CTCAGATT
ccaaagtgaacccatattta

SEQ ID NO: 41685 - DNA, 20 bp, Artificial Sequence
  Description of Artificial Sequence: Synthetic oligonucleotide
  Target: LAMA2; (-) strand; PAM type: NNNNGHTT; PAM sequence: TGATGTTT
tgcaagtactgtacacttta

SEQ ID NO: 41686 - DNA, 20 bp, Artificial Sequence
  Description of Artificial Sequence: Synthetic oligonucleotide
  Target: LAMA2; (-) strand; PAM type: NNNNGHTT; PAM sequence: TCTAGATT
gtgtgtagtaggctgtacca

SEQ ID NO: 41687 - DNA, 20 bp, Artificial Sequence
  Description of Artificial Sequence: Synthetic oligonucleotide
  Target: LAMA2; (-) strand; PAM type: NNNNGHTT; PAM sequence: TTATGTTT
gtatttttactgtaccttgt

SEQ ID NO: 41688 - DNA, 20 bp, Artificial Sequence
  Description of Artificial Sequence: Synthetic oligonucleotide
  Target: LAMA2; (-) strand; PAM type: NNNNGHTT; PAM sequence: CCTTGTTT
aatactgtatttttactgta

SEQ ID NO: 41689 - DNA, 20 bp, Artificial Sequence
  Description of Artificial Sequence: Synthetic oligonucleotide
  Target: LAMA2; (-) strand; PAM type: NNNNGHTT; PAM sequence: TGGTGCTT
atgacagatcacatatatga

SEQ ID NO: 41690 - DNA, 20 bp, Artificial Sequence
  Description of Artificial Sequence: Synthetic oligonucleotide
  Target: LAMA2; (-) strand; PAM type: NNNNGHTT; PAM sequence: AAATGTTT
ttttggcattgacacattac

SEQ ID NO: 41691 - DNA, 20 bp, Artificial Sequence
  Description of Artificial Sequence: Synthetic oligonucleotide
  Target: LAMA2; (-) strand; PAM type: NNNNGHTT; PAM sequence: AACTGTTT
agtttgttgtaaattgaaac

SEQ ID NO: 41692 - DNA, 20 bp, Artificial Sequence
  Description of Artificial Sequence: Synthetic oligonucleotide
  Target: LAMA2; (-) strand; PAM type: NNNNGHTT; PAM sequence: AGAAGTTT
aatgacctggtccctcctag

SEQ ID NO: 41693 - DNA, 20 bp, Artificial Sequence
  Description of Artificial Sequence: Synthetic oligonucleotide
  Target: LAMA2; (-) strand; PAM type: NNNNGHTT; PAM sequence: TTAGGCTT
tcattttcacaggaaaagtc

SEQ ID NO: 41694 - DNA, 20 bp, Artificial Sequence
  Description of Artificial Sequence: Synthetic oligonucleotide
  Target: LAMA2; (-) strand; PAM type: NNNNGHTT; PAM sequence: GTTTGCTT
aatgagaccacattggtgtc

SEQ ID NO: 41695 - DNA, 20 bp, Artificial Sequence
  Description of Artificial Sequence: Synthetic oligonucleotide
  Target: LAMA2; (-) strand; PAM type: NNNNGHTT; PAM sequence: TGTCGTTT
aggaaatgagaccacattgg

SEQ ID NO: 41696 - DNA, 20 bp, Artificial Sequence
  Description of Artificial Sequence: Synthetic oligonucleotide
  Target: LAMA2; (-) strand; PAM type: NNNNGHTT; PAM sequence: AGAAGATT
taaatttctgttcacagcca

SEQ ID NO: 41697 - DNA, 20 bp, Artificial Sequence
  Description of Artificial Sequence: Synthetic oligonucleotide
  Target: LAMA2; (-) strand; PAM type: NNNNGHTT; PAM sequence: AAGAGATT
gggacatgctgatgacatag

SEQ ID NO: 41698 - DNA, 20 bp, Artificial Sequence
  Description of Artificial Sequence: Synthetic oligonucleotide
  Target: LAMA2; (-) strand; PAM type: NNNNGHTT; PAM sequence: CAAAGCTT
aaatttgggccatgcataca

SEQ ID NO: 41699 - DNA, 20 bp, Artificial Sequence
  Description of Artificial Sequence: Synthetic oligonucleotide
  Target: LAMA2; (-) strand; PAM type: NNNNGHTT; PAM sequence: CCTAGCTT
tcatcagtaaataaacactt

SEQ ID NO: 41700 - DNA, 20 bp, Artificial Sequence
  Description of Artificial Sequence: Synthetic oligonucleotide
  Target: LAMA2; (-) strand; PAM type: NNNNGHTT; PAM sequence: ACCAGTTT
tgctgattactttttgctat

SEQ ID NO: 41701 - DNA, 20 bp, Artificial Sequence
  Description of Artificial Sequence: Synthetic oligonucleotide
  Target: LAMA2; (-) strand; PAM type: NNNNGHTT; PAM sequence: TGCTGATT
tcaactatttaatccacgaa

SEQ ID NO: 41702 - DNA, 20 bp, Artificial Sequence
  Description of Artificial Sequence: Synthetic oligonucleotide
  Target: LAMA2; (-) strand; PAM type: NNNNGHTT; PAM sequence: CTTGGTTT
tttggaatttcacaaataat

SEQ ID NO: 41703 - DNA, 20 bp, Artificial Sequence
  Description of Artificial Sequence: Synthetic oligonucleotide
  Target: LAMA2; (-) strand; PAM type: NNNNGHTT; PAM sequence: GTATGTTT
cctataggtttgttgtcaaa

SEQ ID NO: 41704 - DNA, 20 bp, Artificial Sequence
  Description of Artificial Sequence: Synthetic oligonucleotide
  Target: LAMA2; (-) strand; PAM type: NNNNGHTT; PAM sequence: ATAGGTTT
ctcggaaattccacaaacct

SEQ ID NO: 41705 - DNA, 20 bp, Artificial Sequence
  Description of Artificial Sequence: Synthetic oligonucleotide
  Target: LAMA2; (-) strand; PAM type: NNNNGHTT; PAM sequence: CGAAGCTT
agaatattatgcaataaaat

SEQ ID NO: 41706 - DNA, 20 bp, Artificial Sequence
  Description of Artificial Sequence: Synthetic oligonucleotide
  Target: LAMA2; (-) strand; PAM type: NNNNGHTT; PAM sequence: ATTAGTTT
aggcagggacttgaagattc

SEQ ID NO: 41707 - DNA, 20 bp, Artificial Sequence
  Description of Artificial Sequence: Synthetic oligonucleotide
  Target: LAMA2; (-) strand; PAM type: NNNNGHTT; PAM sequence: TGAAGATT
tgcaaatgcaggcagggact

SEQ ID NO: 41708 - DNA, 20 bp, Artificial Sequence
  Description of Artificial Sequence: Synthetic oligonucleotide
  Target: LAMA2; (-) strand; PAM type: NNNNGHTT; PAM sequence: AACTGATT
gaacattggagtggaaactt

SEQ ID NO: 41709 - DNA, 20 bp, Artificial Sequence
  Description of Artificial Sequence: Synthetic oligonucleotide
  Target: LAMA2; (-) strand; PAM type: NNNNGHTT; PAM sequence: ATCAGTTT
tcagcaagacctgaaactta

SEQ ID NO: 41710 - DNA, 20 bp, Artificial Sequence
  Description of Artificial Sequence: Synthetic oligonucleotide
  Target: LAMA2; (-) strand; PAM type: NNNNGHTT; PAM sequence: ATAGGTTT
aagcagaatcattaaatccc

SEQ ID NO: 41711 - DNA, 20 bp, Artificial Sequence
  Description of Artificial Sequence: Synthetic oligonucleotide
  Target: LAMA2; (-) strand; PAM type: NNNNGHTT; PAM sequence: ACATGCTT
taaaagtgtttattctctac

SEQ ID NO: 41712 - DNA, 20 bp, Artificial Sequence
  Description of Artificial Sequence: Synthetic oligonucleotide
  Target: LAMA2; (-) strand; PAM type: NNNNGHTT; PAM sequence: AAGTGTTT
ctgtattcatttttatataa

SEQ ID NO: 41713 - DNA, 20 bp, Artificial Sequence
  Description of Artificial Sequence: Synthetic oligonucleotide
  Target: LAMA2; (-) strand; PAM type: NNNNGHTT; PAM sequence: CTAAGATT
gcttgggtgataagtgggct

SEQ ID NO: 41714 - DNA, 20 bp, Artificial Sequence
  Description of Artificial Sequence: Synthetic oligonucleotide
  Target: LAMA2; (-) strand; PAM type: NNNNGHTT; PAM sequence: TTAGGCTT
tttaatttaacaaaattgct

SEQ ID NO: 41715 - DNA, 20 bp, Artificial Sequence
  Description of Artificial Sequence: Synthetic oligonucleotide
  Target: LAMA2; (-) strand; PAM type: NNNNGHTT; PAM sequence: AATTGCTT
ttatagttttaatttaacaa

SEQ ID NO: 41716 - DNA, 20 bp, Artificial Sequence
  Description of Artificial Sequence: Synthetic oligonucleotide
  Target: LAMA2; (-) strand; PAM type: NNNNGHTT; PAM sequence: TATAGTTT
caggtatttaaagtatgttt

SEQ ID NO: 41717 - DNA, 20 bp, Artificial Sequence
  Description of Artificial Sequence: Synthetic oligonucleotide
  Target: LAMA2; (-) strand; PAM type: NNNNGHTT; PAM sequence: GTATGTTT
taactttgcaggtatttaaa

SEQ ID NO: 41718 - DNA, 20 bp, Artificial Sequence
  Description of Artificial Sequence: Synthetic oligonucleotide
  Target: LAMA2; (-) strand; PAM type: NNNNGHTT; PAM sequence: AATGGTTT
acacaaactccttagcactt

SEQ ID NO: 41719 - DNA, 20 bp, Artificial Sequence
  Description of Artificial Sequence: Synthetic oligonucleotide
  Target: LAMA2; (-) strand; PAM type: NNNNGHTT; PAM sequence: CTAGGATT
gaaatgtgaagtgtactttg

SEQ ID NO: 41720 - DNA, 20 bp, Artificial Sequence
  Description of Artificial Sequence: Synthetic oligonucleotide
  Target: LAMA2; (-) strand; PAM type: NNNNGHTT; PAM sequence: TCACGCTT
cattttaaacaatgaatggg

SEQ ID NO: 41721 - DNA, 20 bp, Artificial Sequence
  Description of Artificial Sequence: Synthetic oligonucleotide
  Target: LAMA2; (-) strand; PAM type: NNNNGHTT; PAM sequence: TTAAGATT
ccttccatgttaaattttgt

SEQ ID NO: 41722 - DNA, 20 bp, Artificial Sequence
  Description of Artificial Sequence: Synthetic oligonucleotide
  Target: LAMA2; (-) strand; PAM type: NNNNGHTT; PAM sequence: TTTTGTTT
agacaaccttccatgttaaa

SEQ ID NO: 41723 - DNA, 20 bp, Artificial Sequence
  Description of Artificial Sequence: Synthetic oligonucleotide
  Target: LAMA2; (-) strand; PAM type: NNNNGHTT; PAM sequence: GTGGGCTT
gtgagtagcagaatattaat

SEQ ID NO: 41724 - DNA, 20 bp, Artificial Sequence
  Description of Artificial Sequence: Synthetic oligonucleotide
  Target: LAMA2; (-) strand; PAM type: NNNNGHTT; PAM sequence: GTTGGTTT
acgcttagggaaaagttggt

SEQ ID NO: 41725 - DNA, 20 bp, Artificial Sequence
  Description of Artificial Sequence: Synthetic oligonucleotide
  Target: LAMA2; (-) strand; PAM type: NNNNGHTT; PAM sequence: AAACGCTT
tacttagaagtttaccaaag

SEQ ID NO: 41726 - DNA, 20 bp, Artificial Sequence
  Description of Artificial Sequence: Synthetic oligonucleotide
  Target: LAMA2; (-) strand; PAM type: NNNNGHTT; PAM sequence: AGAAGTTT
ggcttttgaaaatcctactt

SEQ ID NO: 41727 - DNA, 20 bp, Artificial Sequence
  Description of Artificial Sequence: Synthetic oligonucleotide
  Target: LAMA2; (-) strand; PAM type: NNNNGHTT; PAM sequence: ATAGGCTT
tagatgttttgttgttgata

SEQ ID NO: 41728 - DNA, 20 bp, Artificial Sequence
  Description of Artificial Sequence: Synthetic oligonucleotide
  Target: LAMA2; (-) strand; PAM type: NNNNGHTT; PAM sequence: AGATGTTT
aatggatatttaaatgcctt

SEQ ID NO: 41729 - DNA, 20 bp, Artificial Sequence
  Description of Artificial Sequence: Synthetic oligonucleotide
  Target: LAMA2; (-) strand; PAM type: NNNNGHTT; PAM sequence: TACAGTTT
gaattgataattagtgatgt

SEQ ID NO: 41730 - DNA, 20 bp, Artificial Sequence
  Description of Artificial Sequence: Synthetic oligonucleotide
  Target: LAMA2; (-) strand; PAM type: NNNNGHTT; PAM sequence: ATTTGTTT
gatatttgaactattttagt

SEQ ID NO: 41731 - DNA, 20 bp, Artificial Sequence
  Description of Artificial Sequence: Synthetic oligonucleotide
  Target: LAMA2; (-) strand; PAM type: NNNNGHTT; PAM sequence: ACTGGTTT
ctcttcctccctttgctctt

SEQ ID NO: 41732 - DNA, 20 bp, Artificial Sequence
  Description of Artificial Sequence: Synthetic oligonucleotide
  Target: LAMA2; (-) strand; PAM type: NNNNGHTT; PAM sequence: TCCGGCTT
ttgttcttttctaaaaacac

SEQ ID NO: 41733 - DNA, 20 bp, Artificial Sequence
  Description of Artificial Sequence: Synthetic oligonucleotide
  Target: LAMA2; (-) strand; PAM type: NNNNGHTT; PAM sequence: ACATGATT
gttatagggtagaaaaaaaa

SEQ ID NO: 41734 - DNA, 20 bp, Artificial Sequence
  Description of Artificial Sequence: Synthetic oligonucleotide
  Target: LAMA2; (-) strand; PAM type: NNNNGHTT; PAM sequence: TTTGGATT
cttcagctatgttggtttac

SEQ ID NO: 41735 - DNA, 20 bp, Artificial Sequence
  Description of Artificial Sequence: Synthetic oligonucleotide
  Target: LAMA2; (-) strand; PAM type: NNNNGHTT; PAM sequence: GTTGGTTT
aggttggtgtcttcagctat

SEQ ID NO: 41736 - DNA, 20 bp, Artificial Sequence
  Description of Artificial Sequence: Synthetic oligonucleotide
  Target: LAMA2; (-) strand; PAM type: NNNNGHTT; PAM sequence: GAGTGCTT
ccacgaacatttccgagata

SEQ ID NO: 41737 - DNA, 20 bp, Artificial Sequence
  Description of Artificial Sequence: Synthetic oligonucleotide
  Target: LAMA2; (-) strand; PAM type: NNNNGHTT; PAM sequence: TATAGTTT
ccttaaaaggaaaatgtgaa

SEQ ID NO: 41738 - DNA, 20 bp, Artificial Sequence
  Description of Artificial Sequence: Synthetic oligonucleotide
  Target: LAMA2; (-) strand; PAM type: NNNNGHTT; PAM sequence: ATAGGATT
acactaaaacattaaaaaat

SEQ ID NO: 41739 - DNA, 20 bp, Artificial Sequence
  Description of Artificial Sequence: Synthetic oligonucleotide
  Target: LAMA2; (-) strand; PAM type: NNNNGHTT; PAM sequence: CAGGGCTT
aaaattattcttacaaataa

SEQ ID NO: 41740 - DNA, 20 bp, Artificial Sequence
  Description of Artificial Sequence: Synthetic oligonucleotide
  Target: LAMA2; (-) strand; PAM type: NNNNGHTT; PAM sequence: AAGTGTTT
tctttatgttcaaatgtgat

SEQ ID NO: 41741 - DNA, 20 bp, Artificial Sequence
  Description of Artificial Sequence: Synthetic oligonucleotide
  Target: LAMA2; (-) strand; PAM type: NNNNGHTT; PAM sequence: GAATGATT
tcactcctgctctttagtag

SEQ ID NO: 41742 - DNA, 20 bp, Artificial Sequence
  Description of Artificial Sequence: Synthetic oligonucleotide
  Target: LAMA2; (-) strand; PAM type: NNNNGHTT; PAM sequence: GACAGATT
acacttttaaaaatatcttt

SEQ ID NO: 41743 - DNA, 20 bp, Artificial Sequence
  Description of Artificial Sequence: Synthetic oligonucleotide
  Target: LAMA2; (-) strand; PAM type: NNNNGHTT; PAM sequence: AGCAGATT
gctaactaaattttacttgc

SEQ ID NO: 41744 - DNA, 20 bp, Artificial Sequence
  Description of Artificial Sequence: Synthetic oligonucleotide
  Target: LAMA2; (-) strand; PAM type: NNNNGHTT; PAM sequence: TATAGATT
ttgatgtctggtaaagttag

SEQ ID NO: 41745 - DNA, 20 bp, Artificial Sequence
  Description of Artificial Sequence: Synthetic oligonucleotide
  Target: LAMA2; (-) strand; PAM type: NNNNGHTT; PAM sequence: TTTTGTTT
gctaggcttcttaatttgcc

SEQ ID NO: 41746 - DNA, 20 bp, Artificial Sequence
  Description of Artificial Sequence: Synthetic oligonucleotide
  Target: LAMA2; (-) strand; PAM type: NNNNGHTT; PAM sequence: CTAGGCTT
tctttcataattaataaatg

SEQ ID NO: 41747 - DNA, 20 bp, Artificial Sequence
  Description of Artificial Sequence: Synthetic oligonucleotide
  Target: LAMA2; (-) strand; PAM type: NNNNGHTT; PAM sequence: TCTGGCTT
actaggagaaacaaggtaag

SEQ ID NO: 41748 - DNA, 20 bp, Artificial Sequence
  Description of Artificial Sequence: Synthetic oligonucleotide
  Target: LAMA2; (-) strand; PAM type: NNNNGHTT; PAM sequence: CTGCGATT
tacctatctgtctgatgtta

SEQ ID NO: 41749 - DNA, 20 bp, Artificial Sequence
  Description of Artificial Sequence: Synthetic oligonucleotide
  Target: LAMA2; (-) strand; PAM type: NNNNGHTT; PAM sequence: ATATGTTT
caaattgcctcacagagaat

SEQ ID NO: 41750 - DNA, 20 bp, Artificial Sequence
  Description of Artificial Sequence: Synthetic oligonucleotide
  Target: LAMA2; (-) strand; PAM type: NNNNGHTT; PAM sequence: CAAAGATT
agttgatgtttgtaggatga

SEQ ID NO: 41751 - DNA, 20 bp, Artificial Sequence
  Description of Artificial Sequence: Synthetic oligonucleotide
  Target: LAMA2; (-) strand; PAM type: NNNNGHTT; PAM sequence: TGATGTTT
cttggatcctagaatccagt

SEQ ID NO: 41752 - DNA, 20 bp, Artificial Sequence
  Description of Artificial Sequence: Synthetic oligonucleotide
  Target: LAMA2; (-) strand; PAM type: NNNNGHTT; PAM sequence: AAGAGATT
taaatttcatgagaccatct

SEQ ID NO: 41753 - DNA, 20 bp, Artificial Sequence
  Description of Artificial Sequence: Synthetic oligonucleotide
  Target: LAMA2; (-) strand; PAM type: NNNNGHTT; PAM sequence: TATGGTTT
aggaggcctgtatttatttt

SEQ ID NO: 41754 - DNA, 20 bp, Artificial Sequence
  Description of Artificial Sequence: Synthetic oligonucleotide
  Target: LAMA2; (-) strand; PAM type: NNNNGHTT; PAM sequence: AGACGATT
ttctggaacaaattagattc

SEQ ID NO: 41755 - DNA, 20 bp, Artificial Sequence
  Description of Artificial Sequence: Synthetic oligonucleotide
  Target: LAMA2; (-) strand; PAM type: NNNNGHTT; PAM sequence: ATTAGATT
aacaaatttttctggaacaa

SEQ ID NO: 41756 - DNA, 20 bp, Artificial Sequence
  Description of Artificial Sequence: Synthetic oligonucleotide
  Target: LAMA2; (-) strand; PAM type: NNNNGHTT; PAM sequence: CGGGGTTT
gtggtatttgggcaaagggg

SEQ ID NO: 41757 - DNA, 20 bp, Artificial Sequence
  Description of Artificial Sequence: Synthetic oligonucleotide
  Target: LAMA2; (-) strand; PAM type: NNNNGHTT; PAM sequence: TGATGCTT
ttggtagtagatagttatat

SEQ ID NO: 41758 - DNA, 20 bp, Artificial Sequence
  Description of Artificial Sequence: Synthetic oligonucleotide
  Target: LAMA2; (-) strand; PAM type: NNNNGHTT; PAM sequence: TTATGTTT
cattagtttttttaagtgct

SEQ ID NO: 41759 - DNA, 20 bp, Artificial Sequence
  Description of Artificial Sequence: Synthetic oligonucleotide
  Target: LAMA2; (-) strand; PAM type: NNNNGHTT; PAM sequence: AAGTGCTT
actaagtcattagttttttt

SEQ ID NO: 41760 - DNA, 20 bp, Artificial Sequence
  Description of Artificial Sequence: Synthetic oligonucleotide
  Target: LAMA2; (-) strand; PAM type: NNNNGHTT; PAM sequence: ATTAGTTT
aggtgtgcaataactaagtc

SEQ ID NO: 41761 - DNA, 20 bp, Artificial Sequence
  Description of Artificial Sequence: Synthetic oligonucleotide
  Target: LAMA2; (-) strand; PAM type: NNNNGHTT; PAM sequence: TGATGATT
ctgataattttaccaataac

SEQ ID NO: 41762 - DNA, 20 bp, Artificial Sequence
  Description of Artificial Sequence: Synthetic oligonucleotide
  Target: LAMA2; (-) strand; PAM type: NNNNGHTT; PAM sequence: CCAGGCTT
ttggctgccagacaatcatc

SEQ ID NO: 41763 - DNA, 20 bp, Artificial Sequence
  Description of Artificial Sequence: Synthetic oligonucleotide
  Target: LAMA2; (-) strand; PAM type: NNNNGHTT; PAM sequence: CTGTGATT
aaatagtaattaaattgtat

SEQ ID NO: 41764 - DNA, 20 bp, Artificial Sequence
  Description of Artificial Sequence: Synthetic oligonucleotide
  Target: LAMA2; (-) strand; PAM type: NNNNGHTT; PAM sequence: AAAGGATT
tattaccggatgtattgctt

SEQ ID NO: 41765 - DNA, 20 bp, Artificial Sequence
  Description of Artificial Sequence: Synthetic oligonucleotide
  Target: LAMA2; (-) strand; PAM type: NNNNGHTT; PAM sequence: TATTGCTT
ggaaaaattattaccggatg

SEQ ID NO: 41766 - DNA, 20 bp, Artificial Sequence
  Description of Artificial Sequence: Synthetic oligonucleotide
  Target: LAMA2; (-) strand; PAM type: NNNNGHTT; PAM sequence: AGAAGATT
tttcaactcaggtctctgaa

SEQ ID NO: 41767 - DNA, 20 bp, Artificial Sequence
  Description of Artificial Sequence: Synthetic oligonucleotide
  Target: LAMA2; (-) strand; PAM type: NNNNGHTT; PAM sequence: TGTGGTTT
atgagtgttcacttttcttg

SEQ ID NO: 41768 - DNA, 20 bp, Artificial Sequence
  Description of Artificial Sequence: Synthetic oligonucleotide
  Target: LAMA2; (-) strand; PAM type: NNNNGHTT; PAM sequence: TTTTGATT
tccatttcccatcattatgg

SEQ ID NO: 41769 - DNA, 20 bp, Artificial Sequence
  Description of Artificial Sequence: Synthetic oligonucleotide
  Target: LAMA2; (-) strand; PAM type: NNNNGHTT; PAM sequence: TATGGTTT
tgatttccatttcccatcat

SEQ ID NO: 41770 - DNA, 20 bp, Artificial Sequence
  Description of Artificial Sequence: Synthetic oligonucleotide
  Target: LAMA2; (-) strand; PAM type: NNNNGHTT; PAM sequence: GAATGATT
ttttgaattcttgacagagt

SEQ ID NO: 41771 - DNA, 20 bp, Artificial Sequence
  Description of Artificial Sequence: Synthetic oligonucleotide
  Target: LAMA2; (-) strand; PAM type: NNNNGHTT; PAM sequence: CCTTGTTT
attattactgtaaaaactca

SEQ ID NO: 41772 - DNA, 20 bp, Artificial Sequence
  Description of Artificial Sequence: Synthetic oligonucleotide
  Target: LAMA2; (-) strand; PAM type: NNNNGHTT; PAM sequence: TCATGATT
gtacatgtgcactttggatt

SEQ ID NO: 41773 - DNA, 20 bp, Artificial Sequence
  Description of Artificial Sequence: Synthetic oligonucleotide
  Target: LAMA2; (-) strand; PAM type: NNNNGHTT; PAM sequence: TTTGGATT
ttgatcaggtacatgtgcac

SEQ ID NO: 41774 - DNA, 20 bp, Artificial Sequence
  Description of Artificial Sequence: Synthetic oligonucleotide
  Target: LAMA2; (-) strand; PAM type: NNNNGHTT; PAM sequence: CTCAGTTT
ttatgctttcaaattaagct

SEQ ID NO: 41775 - DNA, 20 bp, Artificial Sequence
  Description of Artificial Sequence: Synthetic oligonucleotide
  Target: LAMA2; (-) strand; PAM type: NNNNGHTT; PAM sequence: TTATGCTT
ttgcaagttgtaagacagtt

SEQ ID NO: 41776 - DNA, 20 bp, Artificial Sequence
  Description of Artificial Sequence: Synthetic oligonucleotide
  Target: LAMA2; (-) strand; PAM type: NNNNGHTT; PAM sequence: GACAGTTT
tataattttgcaagttgtaa

SEQ ID NO: 41777 - DNA, 20 bp, Artificial Sequence
  Description of Artificial Sequence: Synthetic oligonucleotide
  Target: LAMA2; (-) strand; PAM type: NNNNGHTT; PAM sequence: TATAGATT
taactatgccctaccactcc

SEQ ID NO: 41778 - DNA, 20 bp, Artificial Sequence
  Description of Artificial Sequence: Synthetic oligonucleotide
  Target: LAMA2; (-) strand; PAM type: NNNNGHTT; PAM sequence: AAATGTTT
ttatttacttgcaggcatac

SEQ ID NO: 41779 - DNA, 20 bp, Artificial Sequence
  Description of Artificial Sequence: Synthetic oligonucleotide
  Target: LAMA2; (-) strand; PAM type: NNNNGHTT; PAM sequence: AAGTGTTT
agataaaacaatgtttgtga

SEQ ID NO: 41780 - DNA, 20 bp, Artificial Sequence
  Description of Artificial Sequence: Synthetic oligonucleotide
  Target: LAMA2; (-) strand; PAM type: NNNNGHTT; PAM sequence: CAATGTTT
gcttatgtgatcagataaaa

SEQ ID NO: 41781 - DNA, 20 bp, Artificial Sequence
  Description of Artificial Sequence: Synthetic oligonucleotide
  Target: LAMA2; (-) strand; PAM type: NNNNGHTT; PAM sequence: ACCTGCTT
ctctaacactggaacaaaat

SEQ ID NO: 41782 - DNA, 20 bp, Artificial Sequence
  Description of Artificial Sequence: Synthetic oligonucleotide
  Target: LAMA2; (-) strand; PAM type: NNNNGHTT; PAM sequence: AAAAGTTT
atatatgtctgtgaccacat

SEQ ID NO: 41783 - DNA, 20 bp, Artificial Sequence
  Description of Artificial Sequence: Synthetic oligonucleotide
  Target: LAMA2; (-) strand; PAM type: NNNNGHTT; PAM sequence: CTTGGATT
ctacactcagaattaataga

SEQ ID NO: 41784 - DNA, 20 bp, Artificial Sequence
  Description of Artificial Sequence: Synthetic oligonucleotide
  Target: LAMA2; (-) strand; PAM type: NNNNGHTT; PAM sequence: CTGAGATT
ttgactcaagtgtctctctt

SEQ ID NO: 41785 - DNA, 20 bp, Artificial Sequence
  Description of Artificial Sequence: Synthetic oligonucleotide
  Target: LAMA2; (-) strand; PAM type: NNNNGHTT; PAM sequence: CTCTGTTT
actccagtggaaactgacct

SEQ ID NO: 41786 - DNA, 20 bp, Artificial Sequence
  Description of Artificial Sequence: Synthetic oligonucleotide
  Target: LAMA2; (-) strand; PAM type: NNNNGHTT; PAM sequence: TCCAGCTT
ttcatccagctaactcctca

SEQ ID NO: 41787 - DNA, 20 bp, Artificial Sequence
  Description of Artificial Sequence: Synthetic oligonucleotide
  Target: LAMA2; (-) strand; PAM type: NNNNGHTT; PAM sequence: ACATGCTT
cactactctgaaatgtccat

SEQ ID NO: 41788 - DNA, 20 bp, Artificial Sequence
  Description of Artificial Sequence: Synthetic oligonucleotide
  Target: LAMA2; (-) strand; PAM type: NNNNGHTT; PAM sequence: CCAGGCTT
tgttattctctctgatgact

SEQ ID NO: 41789 - DNA, 20 bp, Artificial Sequence
  Description of Artificial Sequence: Synthetic oligonucleotide
  Target: LAMA2; (-) strand; PAM type: NNNNGHTT; PAM sequence: TAGAGTTT
tcccatatgagaggtttctc

SEQ ID NO: 41790 - DNA, 20 bp, Artificial Sequence
  Description of Artificial Sequence: Synthetic oligonucleotide
  Target: LAMA2; (-) strand; PAM type: NNNNGHTT; PAM sequence: AGAGGTTT
gccagtttttgtcccatatg

SEQ ID NO: 41791 - DNA, 20 bp, Artificial Sequence
  Description of Artificial Sequence: Synthetic oligonucleotide
  Target: LAMA2; (-) strand; PAM type: NNNNGHTT; PAM sequence: GCCAGTTT
ccaaaataaagaattgcaaa

SEQ ID NO: 41792 - DNA, 20 bp, Artificial Sequence
  Description of Artificial Sequence: Synthetic oligonucleotide
  Target: LAMA2; (-) strand; PAM type: NNNNGHTT; PAM sequence: CAGAGCTT
ttactgaacaactaactaca

SEQ ID NO: 41793 - DNA, 20 bp, Artificial Sequence
  Description of Artificial Sequence: Synthetic oligonucleotide
  Target: LAMA2; (-) strand; PAM type: NNNNGHTT; PAM sequence: CTCTGATT
ttacaggaatggaaggattt

SEQ ID NO: 41794 - DNA, 20 bp, Artificial Sequence
  Description of Artificial Sequence: Synthetic oligonucleotide
  Target: LAMA2; (-) strand; PAM type: NNNNGHTT; PAM sequence: GAAGGATT
atgctagtattacaggaatg

SEQ ID NO: 41795 - DNA, 20 bp, Artificial Sequence
  Description of Artificial Sequence: Synthetic oligonucleotide
  Target: LAMA2; (-) strand; PAM type: NNNNGHTT; PAM sequence: TATGGATT
caacattcattcgtgtaggc

SEQ ID NO: 41796 - DNA, 20 bp, Artificial Sequence
  Description of Artificial Sequence: Synthetic oligonucleotide
  Target: LAMA2; (-) strand; PAM type: NNNNGHTT; PAM sequence: TATGGCTT
cttagagttctcggtatccc

SEQ ID NO: 41797 - DNA, 20 bp, Artificial Sequence
  Description of Artificial Sequence: Synthetic oligonucleotide
  Target: LAMA2; (-) strand; PAM type: NNNNGHTT; PAM sequence: ACATGATT
cattcctgttgctgcaaaag

SEQ ID NO: 41798 - DNA, 20 bp, Artificial Sequence
  Description of Artificial Sequence: Synthetic oligonucleotide
  Target: LAMA2; (-) strand; PAM type: NNNNGHTT; PAM sequence: TTCTGTTT
agaacatatggtattggatt

SEQ ID NO: 41799 - DNA, 20 bp, Artificial Sequence
  Description of Artificial Sequence: Synthetic oligonucleotide
  Target: LAMA2; (-) strand; PAM type: NNNNGHTT; PAM sequence: ATTGGATT
tgtaagtgagaacatatggt

SEQ ID NO: 41800 - DNA, 20 bp, Artificial Sequence
  Description of Artificial Sequence: Synthetic oligonucleotide
  Target: LAMA2; (-) strand; PAM type: NNNNGHTT; PAM sequence: TTTAGCTT
acgtcttcgtgtatccattg

SEQ ID NO: 41801 - DNA, 20 bp, Artificial Sequence
  Description of Artificial Sequence: Synthetic oligonucleotide
  Target: LAMA2; (-) strand; PAM type: NNNNGHTT; PAM sequence: CATTGTTT
tcttcacgtcttcgtgtatc

SEQ ID NO: 41802 - DNA, 20 bp, Artificial Sequence
  Description of Artificial Sequence: Synthetic oligonucleotide
  Target: LAMA2; (-) strand; PAM type: NNNNGHTT; PAM sequence: TATTGTTT
cttttggagtccccagtgtc

SEQ ID NO: 41803 - DNA, 20 bp, Artificial Sequence
  Description of Artificial Sequence: Synthetic oligonucleotide
  Target: LAMA2; (-) strand; PAM type: NNNNGHTT; PAM sequence: AGGCGATT
cagtgaacactgtacccaac

SEQ ID NO: 41804 - DNA, 20 bp, Artificial Sequence
  Description of Artificial Sequence: Synthetic oligonucleotide
  Target: LAMA2; (-) strand; PAM type: NNNNGHTT; PAM sequence: TTGGGCTT
atattgcataagagtgaagt

SEQ ID NO: 41805 - DNA, 20 bp, Artificial Sequence
  Description of Artificial Sequence: Synthetic oligonucleotide
  Target: LAMA2; (-) strand; PAM type: NNNNGHTT; PAM sequence: TGAAGTTT
atggatatattgcataagag

SEQ ID NO: 41806 - DNA, 20 bp, Artificial Sequence
  Description of Artificial Sequence: Synthetic oligonucleotide
  Target: LAMA2; (-) strand; PAM type: NNNNGHTT; PAM sequence: GTTTGTTT
tccaggtggtgcatatgaag

SEQ ID NO: 41807 - DNA, 20 bp, Artificial Sequence
  Description of Artificial Sequence: Synthetic oligonucleotide
  Target: LAMA2; (-) strand; PAM type: NNNNGHTT; PAM sequence: GAAGGTTT
tagatccaggtggtgcatat

SEQ ID NO: 41808 - DNA, 20 bp, Artificial Sequence
  Description of Artificial Sequence: Synthetic oligonucleotide
  Target: LAMA2; (-) strand; PAM type: NNNNGHTT; PAM sequence: TTCAGCTT
gagtttatagcattagccaa

SEQ ID NO: 41809 - DNA, 20 bp, Artificial Sequence
  Description of Artificial Sequence: Synthetic oligonucleotide
  Target: LAMA2; (-) strand; PAM type: NNNNGHTT; PAM sequence: TAGAGTTT
accaagcatattactatctt

SEQ ID NO: 41810 - DNA, 20 bp, Artificial Sequence
  Description of Artificial Sequence: Synthetic oligonucleotide
  Target: LAMA2; (-) strand; PAM type: NNNNGHTT; PAM sequence: CCCTGTTT
aagttgttgaatcattttat

SEQ ID NO: 41811 - DNA, 20 bp, Artificial Sequence
  Description of Artificial Sequence: Synthetic oligonucleotide
  Target: LAMA2; (-) strand; PAM type: NNNNGHTT; PAM sequence: TAGCGTTT
agcagactgattatggaaat

SEQ ID NO: 41812 - DNA, 20 bp, Artificial Sequence
  Description of Artificial Sequence: Synthetic oligonucleotide
  Target: LAMA2; (-) strand; PAM type: NNNNGHTT; PAM sequence: GACTGATT
gaataaaagttgagatagca

SEQ ID NO: 41813 - DNA, 20 bp, Artificial Sequence
  Description of Artificial Sequence: Synthetic oligonucleotide
  Target: LAMA2; (-) strand; PAM type: NNNNGHTT; PAM sequence: ATTTGTTT
agagcacagatcttttgttt

SEQ ID NO: 41814 - DNA, 20 bp, Artificial Sequence
  Description of Artificial Sequence: Synthetic oligonucleotide
  Target: LAMA2; (-) strand; PAM type: NNNNGHTT; PAM sequence: TTTTGTTT
attgattcagagcacagatc

SEQ ID NO: 41815 - DNA, 20 bp, Artificial Sequence
  Description of Artificial Sequence: Synthetic oligonucleotide
  Target: LAMA2; (-) strand; PAM type: NNNNGHTT; PAM sequence: TATTGATT
gtaacttgacctttgactaa

SEQ ID NO: 41816 - DNA, 20 bp, Artificial Sequence
  Description of Artificial Sequence: Synthetic oligonucleotide
  Target: LAMA2; (-) strand; PAM type: NNNNGHTT; PAM sequence: ATATGATT
ttttaactactttcacattt

SEQ ID NO: 41817 - DNA, 20 bp, Artificial Sequence
  Description of Artificial Sequence: Synthetic oligonucleotide
  Target: LAMA2; (-) strand; PAM type: NNNNGHTT; PAM sequence: TTCTGATT
ctgggataaaggaaaattct

SEQ ID NO: 41818 - DNA, 20 bp, Artificial Sequence
  Description of Artificial Sequence: Synthetic oligonucleotide
  Target: LAMA2; (-) strand; PAM type: NNNNGHTT; PAM sequence: AAGGGATT
ggtatcagccaactgtgtca

SEQ ID NO: 41819 - DNA, 20 bp, Artificial Sequence
  Description of Artificial Sequence: Synthetic oligonucleotide
  Target: LAMA2; (-) strand; PAM type: NNNNGHTT; PAM sequence: GACTGCTT
cccaaaataaaagtgagaat

SEQ ID NO: 41820 - DNA, 20 bp, Artificial Sequence
  Description of Artificial Sequence: Synthetic oligonucleotide
  Target: LAMA2; (-) strand; PAM type: NNNNGHTT; PAM sequence: GAATGATT
atacaatagagaagtaagga

SEQ ID NO: 41821 - DNA, 20 bp, Artificial Sequence
  Description of Artificial Sequence: Synthetic oligonucleotide
  Target: LAMA2; (-) strand; PAM type: NNNNGHTT; PAM sequence: TAGGGCTT
ttctgaacaactaaacctca

SEQ ID NO: 41822 - DNA, 20 bp, Artificial Sequence
  Description of Artificial Sequence: Synthetic oligonucleotide
  Target: LAMA2; (-) strand; PAM type: NNNNGHTT; PAM sequence: ACCTGTTT
ttattataataaaaaatttc

SEQ ID NO: 41823 - DNA, 20 bp, Artificial Sequence
  Description of Artificial Sequence: Synthetic oligonucleotide
  Target: LAMA2; (-) strand; PAM type: NNNNGHTT; PAM sequence: TATAGTTT
atgtggaaaaacagaacagc

SEQ ID NO: 41824 - DNA, 20 bp, Artificial Sequence
  Description of Artificial Sequence: Synthetic oligonucleotide
  Target: LAMA2; (-) strand; PAM type: NNNNGHTT; PAM sequence: CGATGCTT
tgctttttccattgcagctt

SEQ ID NO: 41825 - DNA, 20 bp, Artificial Sequence
  Description of Artificial Sequence: Synthetic oligonucleotide
  Target: LAMA2; (-) strand; PAM type: NNNNGHTT; PAM sequence: TGCAGCTT
ataacatttgctttttccat

SEQ ID NO: 41826 - DNA, 20 bp, Artificial Sequence
  Description of Artificial Sequence: Synthetic oligonucleotide
  Target: LAMA2; (-) strand; PAM type: NNNNGHTT; PAM sequence: ATTTGCTT
gtgaattatttgtttataac

SEQ ID NO: 41827 - DNA, 20 bp, Artificial Sequence
  Description of Artificial Sequence: Synthetic oligonucleotide
  Target: LAMA2; (-) strand; PAM type: NNNNGHTT; PAM sequence: ATTTGTTT
gcatttttcttttgtgaatt

SEQ ID NO: 41828 - DNA, 20 bp, Artificial Sequence
  Description of Artificial Sequence: Synthetic oligonucleotide
  Target: LAMA2; (-) strand; PAM type: NNNNGHTT; PAM sequence: AGAAGTTT
gcatttttcaactttatgta

SEQ ID NO: 41829 - DNA, 20 bp, Artificial Sequence
  Description of Artificial Sequence: Synthetic oligonucleotide
  Target: LAMA2; (-) strand; PAM type: NNNNGHTT; PAM sequence: TTGAGATT
gaccatatgcttgtcatcta

SEQ ID NO: 41830 - DNA, 20 bp, Artificial Sequence
  Description of Artificial Sequence: Synthetic oligonucleotide
  Target: LAMA2; (-) strand; PAM type: NNNNGHTT; PAM sequence: ATATGCTT
gctactgcaagtcaatgacc

SEQ ID NO: 41831 - DNA, 20 bp, Artificial Sequence
  Description of Artificial Sequence: Synthetic oligonucleotide
  Target: LAMA2; (-) strand; PAM type: NNNNGHTT; PAM sequence: TACTGCTT
ttccttttaaatttagattt

SEQ ID NO: 41832 - DNA, 20 bp, Artificial Sequence
  Description of Artificial Sequence: Synthetic oligonucleotide
  Target: LAMA2; (-) strand; PAM type: NNNNGHTT; PAM sequence: TTTAGATT
tttcttcttttccttttaaa

SEQ ID NO: 41833 - DNA, 20 bp, Artificial Sequence
  Description of Artificial Sequence: Synthetic oligonucleotide
  Target: LAMA2; (-) strand; PAM type: NNNNGHTT; PAM sequence: TGGTGTTT
ctccctccatatgtctccct

SEQ ID NO: 41834 - DNA, 20 bp, Artificial Sequence
  Description of Artificial Sequence: Synthetic oligonucleotide
  Target: LAMA2; (-) strand; PAM type: NNNNGHTT; PAM sequence: AACTGCTT
ttttggcctggatcgcctgc

SEQ ID NO: 41835 - DNA, 20 bp, Artificial Sequence
  Description of Artificial Sequence: Synthetic oligonucleotide
  Target: LAMA2; (-) strand; PAM type: NNNNGHTT; PAM sequence: TGATGCTT
tacatgtttatcttttcata

SEQ ID NO: 41836 - DNA, 20 bp, Artificial Sequence
  Description of Artificial Sequence: Synthetic oligonucleotide
  Target: LAMA2; (-) strand; PAM type: NNNNGHTT; PAM sequence: ACATGTTT
caaataattcatgtttttat

SEQ ID NO: 41837 - DNA, 20 bp, Artificial Sequence
  Description of Artificial Sequence: Synthetic oligonucleotide
  Target: LAMA2; (-) strand; PAM type: NNNNGHTT; PAM sequence: TCATGTTT
acaacagctgcccaaataat

SEQ ID NO: 41838 - DNA, 20 bp, Artificial Sequence
  Description of Artificial Sequence: Synthetic oligonucleotide
  Target: LAMA2; (-) strand; PAM type: NNNNGHTT; PAM sequence: AACTGATT
atttaaactccaataattca

SEQ ID NO: 41839 - DNA, 20 bp, Artificial Sequence
  Description of Artificial Sequence: Synthetic oligonucleotide
  Target: LAMA2; (-) strand; PAM type: NNNNGHTT; PAM sequence: AACAGCTT
aaactcctcaacacagttta

SEQ ID NO: 41840 - DNA, 20 bp, Artificial Sequence
  Description of Artificial Sequence: Synthetic oligonucleotide
  Target: LAMA2; (-) strand; PAM type: NNNNGHTT; PAM sequence: CACAGTTT
atgaaatgcaaactcctcaa

SEQ ID NO: 41841 - DNA, 20 bp, Artificial Sequence
  Description of Artificial Sequence: Synthetic oligonucleotide
  Target: LAMA2; (-) strand; PAM type: NNNNGHTT; PAM sequence: TTCAGTTT
atccaattgttcgctttgtc

SEQ ID NO: 41842 - DNA, 20 bp, Artificial Sequence
  Description of Artificial Sequence: Synthetic oligonucleotide
  Target: LAMA2; (-) strand; PAM type: NNNNGHTT; PAM sequence: GTTCGCTT
gactattattgaatccaatt

SEQ ID NO: 41843 - DNA, 20 bp, Artificial Sequence
  Description of Artificial Sequence: Synthetic oligonucleotide
  Target: LAMA2; (-) strand; PAM type: NNNNGHTT; PAM sequence: GGTGGATT
gctgtgtaatggtatcacat

SEQ ID NO: 41844 - DNA, 20 bp, Artificial Sequence
  Description of Artificial Sequence: Synthetic oligonucleotide
  Target: LAMA2; (-) strand; PAM type: NNNNGHTT; PAM sequence: ATTGGTTT
gaataattaggagtgaaatg

SEQ ID NO: 41845 - DNA, 20 bp, Artificial Sequence
  Description of Artificial Sequence: Synthetic oligonucleotide
  Target: LAMA2; (-) strand; PAM type: NNNNGHTT; PAM sequence: AAATGATT
tgggtgaataattaggagtg

SEQ ID NO: 41846 - DNA, 20 bp, Artificial Sequence
  Description of Artificial Sequence: Synthetic oligonucleotide
  Target: LAMA2; (-) strand; PAM type: NNNNGHTT; PAM sequence: ATATGCTT
tacaagtctttctataaaaa

SEQ ID NO: 41847 - DNA, 20 bp, Artificial Sequence
  Description of Artificial Sequence: Synthetic oligonucleotide
  Target: LAMA2; (-) strand; PAM type: NNNNGHTT; PAM sequence: TTCAGTTT
cgatggatatgtgatttgtt

SEQ ID NO: 41848 - DNA, 20 bp, Artificial Sequence
  Description of Artificial Sequence: Synthetic oligonucleotide
  Target: LAMA2; (-) strand; PAM type: NNNNGHTT; PAM sequence: ATTTGTTT
tacctgtcgatggatatgtg

SEQ ID NO: 41849 - DNA, 20 bp, Artificial Sequence
  Description of Artificial Sequence: Synthetic oligonucleotide
  Target: LAMA2; (-) strand; PAM type: NNNNGHTT; PAM sequence: ATGTGATT
ctatttacctgtcgatggat

SEQ ID NO: 41850 - DNA, 20 bp, Artificial Sequence
  Description of Artificial Sequence: Synthetic oligonucleotide
  Target: LAMA2; (-) strand; PAM type: NNNNGHTT; PAM sequence: ATTAGTTT
tctgctttctgtgactatag

SEQ ID NO: 41851 - DNA, 20 bp, Artificial Sequence
  Description of Artificial Sequence: Synthetic oligonucleotide
  Target: LAMA2; (-) strand; PAM type: NNNNGHTT; PAM sequence: TATAGATT
atccgtctgctttctgtgac

SEQ ID NO: 41852 - DNA, 20 bp, Artificial Sequence
  Description of Artificial Sequence: Synthetic oligonucleotide
  Target: LAMA2; (-) strand; PAM type: NNNNGHTT; PAM sequence: GTCTGCTT
accattcacaagtagcatcc

SEQ ID NO: 41853 - DNA, 20 bp, Artificial Sequence
  Description of Artificial Sequence: Synthetic oligonucleotide
  Target: LAMA2; (-) strand; PAM type: NNNNGHTT; PAM sequence: AGAAGTTT
atgaacacatccatcacccc

SEQ ID NO: 41854 - DNA, 20 bp, Artificial Sequence
  Description of Artificial Sequence: Synthetic oligonucleotide
  Target: LAMA2; (-) strand; PAM type: NNNNGHTT; PAM sequence: CCATGTTT
ttaacatgctataatttaaa

SEQ ID NO: 41855 - DNA, 20 bp, Artificial Sequence
  Description of Artificial Sequence: Synthetic oligonucleotide
  Target: LAMA2; (-) strand; PAM type: NNNNGHTT; PAM sequence: AACAGTTT
aatatctgtcctatttttaa

SEQ ID NO: 41856 - DNA, 20 bp, Artificial Sequence
  Description of Artificial Sequence: Synthetic oligonucleotide
  Target: LAMA2; (-) strand; PAM type: NNNNGHTT; PAM sequence: AACAGCTT
ctcaccacatctaatcaatc

SEQ ID NO: 41857 - DNA, 20 bp, Artificial Sequence
  Description of Artificial Sequence: Synthetic oligonucleotide
  Target: LAMA2; (-) strand; PAM type: NNNNGHTT; PAM sequence: ACCTGATT
ttaaatgtatgtatgcttgg

SEQ ID NO: 41858 - DNA, 20 bp, Artificial Sequence
  Description of Artificial Sequence: Synthetic oligonucleotide
  Target: LAMA2; (-) strand; PAM type: NNNNGHTT; PAM sequence: GTATGCTT
tattgatgacttaaatgtat

SEQ ID NO: 41859 - DNA, 20 bp, Artificial Sequence
  Description of Artificial Sequence: Synthetic oligonucleotide
  Target: LAMA2; (-) strand; PAM type: NNNNGHTT; PAM sequence: TCAAGTTT
ttttagccatctgggcaaac

SEQ ID NO: 41860 - DNA, 20 bp, Artificial Sequence
  Description of Artificial Sequence: Synthetic oligonucleotide
  Target: LAMA2; (-) strand; PAM type: NNNNGHTT; PAM sequence: TCAGGTTT
tcccttcctttgcccacatc

SEQ ID NO: 41861 - DNA, 20 bp, Artificial Sequence
  Description of Artificial Sequence: Synthetic oligonucleotide
  Target: LAMA2; (-) strand; PAM type: NNNNGHTT; PAM sequence: TGATGTTT
tttgaacacttctaaaatgt

SEQ ID NO: 41862 - DNA, 20 bp, Artificial Sequence
  Description of Artificial Sequence: Synthetic oligonucleotide
  Target: LAMA2; (-) strand; PAM type: NNNNGHTT; PAM sequence: TCTGGCTT
gcttccataatgtcaagctc

SEQ ID NO: 41863 - DNA, 20 bp, Artificial Sequence
  Description of Artificial Sequence: Synthetic oligonucleotide
  Target: LAMA2; (-) strand; PAM type: NNNNGHTT; PAM sequence: TCTGGCTT
cttccctataggaaatttct

SEQ ID NO: 41864 - DNA, 20 bp, Artificial Sequence
  Description of Artificial Sequence: Synthetic oligonucleotide
  Target: LAMA2; (-) strand; PAM type: NNNNGHTT; PAM sequence: TCATGTTT
cttttaaactttatctgaat

SEQ ID NO: 41865 - DNA, 20 bp, Artificial Sequence
  Description of Artificial Sequence: Synthetic oligonucleotide
  Target: LAMA2; (-) strand; PAM type: NNNNGHTT; PAM sequence: AAGTGTTT
atgctgagttgttataagct

SEQ ID NO: 41866 - DNA, 20 bp, Artificial Sequence
  Description of Artificial Sequence: Synthetic oligonucleotide
  Target: LAMA2; (-) strand; PAM type: NNNNGHTT; PAM sequence: TAAGGATT
tttataagtaggtagggaaa

SEQ ID NO: 41867 - DNA, 20 bp, Artificial Sequence
  Description of Artificial Sequence: Synthetic oligonucleotide
  Target: LAMA2; (-) strand; PAM type: NNNNGHTT; PAM sequence: ATGTGATT
ttcacagttgatgagttcag

SEQ ID NO: 41868 - DNA, 20 bp, Artificial Sequence
  Description of Artificial Sequence: Synthetic oligonucleotide
  Target: LAMA2; (-) strand; PAM type: NNNNGHTT; PAM sequence: GCTTGCTT
aaatgctagtaaatgctaat

SEQ ID NO: 41869 - DNA, 20 bp, Artificial Sequence
  Description of Artificial Sequence: Synthetic oligonucleotide
  Target: LAMA2; (-) strand; PAM type: NNNNGHTT; PAM sequence: TAATGCTT
caggaaatgctagtaaatgc

SEQ ID NO: 41870 - DNA, 20 bp, Artificial Sequence
  Description of Artificial Sequence: Synthetic oligonucleotide
  Target: LAMA2; (-) strand; PAM type: NNNNGHTT; PAM sequence: GAGTGCTT
tatttttactgacttaaagg

SEQ ID NO: 41871 - DNA, 20 bp, Artificial Sequence
  Description of Artificial Sequence: Synthetic oligonucleotide
  Target: LAMA2; (-) strand; PAM type: NNNNGHTT; PAM sequence: ACATGATT
ttagaaatcattctaagaaa

SEQ ID NO: 41872 - DNA, 20 bp, Artificial Sequence
  Description of Artificial Sequence: Synthetic oligonucleotide
  Target: LAMA2; (-) strand; PAM type: NNNNGHTT; PAM sequence: GGTGGTTT
caggcaagccagtgactgga

SEQ ID NO: 41873 - DNA, 20 bp, Artificial Sequence
  Description of Artificial Sequence: Synthetic oligonucleotide
  Target: LAMA2; (-) strand; PAM type: NNNNGHTT; PAM sequence: ATGAGATT
tattttaatggtgtctgaaa

SEQ ID NO: 41874 - DNA, 20 bp, Artificial Sequence
  Description of Artificial Sequence: Synthetic oligonucleotide
  Target: LAMA2; (-) strand; PAM type: NNNNGHTT; PAM sequence: AACTGTTT
aaaagaaaatagatttataa

SEQ ID NO: 41875 - DNA, 20 bp, Artificial Sequence
  Description of Artificial Sequence: Synthetic oligonucleotide
  Target: LAMA2; (-) strand; PAM type: NNNNGHTT; PAM sequence: AATAGATT
tggactgggggctaaaagaa

SEQ ID NO: 41876 - DNA, 20 bp, Artificial Sequence
  Description of Artificial Sequence: Synthetic oligonucleotide
  Target: LAMA2; (-) strand; PAM type: NNNNGHTT; PAM sequence: ATTAGTTT
ttattatttttatatacata

SEQ ID NO: 41877 - DNA, 20 bp, Artificial Sequence
  Description of Artificial Sequence: Synthetic oligonucleotide
  Target: LAMA2; (-) strand; PAM type: NNNNGHTT; PAM sequence: TTAAGATT
tattaaatatagctagcaag

SEQ ID NO: 41878 - DNA, 20 bp, Artificial Sequence
  Description of Artificial Sequence: Synthetic oligonucleotide
  Target: LAMA2; (-) strand; PAM type: NNNNGHTT; PAM sequence: TGAAGTTT
atcaaattccaaaattccct

SEQ ID NO: 41879 - DNA, 20 bp, Artificial Sequence
  Description of Artificial Sequence: Synthetic oligonucleotide
  Target: LAMA2; (-) strand; PAM type: NNNNGHTT; PAM sequence: GCTAGTTT
aaatgtttattctttaggat

SEQ ID NO: 41880 - DNA, 20 bp, Artificial Sequence
  Description of Artificial Sequence: Synthetic oligonucleotide
  Target: LAMA2; (-) strand; PAM type: NNNNGHTT; PAM sequence: AAATGTTT
tgggttataagggaatttct

SEQ ID NO: 41881 - DNA, 20 bp, Artificial Sequence
  Description of Artificial Sequence: Synthetic oligonucleotide
  Target: LAMA2; (-) strand; PAM type: NNNNGHTT; PAM sequence: AAGGGTTT
gatgtaggatctgaataagc

SEQ ID NO: 41882 - DNA, 20 bp, Artificial Sequence
  Description of Artificial Sequence: Synthetic oligonucleotide
  Target: LAMA2; (-) strand; PAM type: NNNNGHTT; PAM sequence: GATAGATT
tgacatcagtcccgtaagat

SEQ ID NO: 41883 - DNA, 20 bp, Artificial Sequence
  Description of Artificial Sequence: Synthetic oligonucleotide
  Target: LAMA2; (-) strand; PAM type: NNNNGHTT; PAM sequence: ACATGCTT
agctaggctttttctgaatt

SEQ ID NO: 41884 - DNA, 20 bp, Artificial Sequence
  Description of Artificial Sequence: Synthetic oligonucleotide
  Target: LAMA2; (-) strand; PAM type: NNNNGHTT; PAM sequence: CTAGGCTT
cccccttcttaggggtcaag

SEQ ID NO: 41885 - DNA, 20 bp, Artificial Sequence
  Description of Artificial Sequence: Synthetic oligonucleotide
  Target: LAMA2; (-) strand; PAM type: NNNNGHTT; PAM sequence: CATTGTTT
gcacttctctgttcaaactg

SEQ ID NO: 41886 - DNA, 20 bp, Artificial Sequence
  Description of Artificial Sequence: Synthetic oligonucleotide
  Target: LAMA2; (-) strand; PAM type: NNNNGHTT; PAM sequence: TCTTGCTT
gaggtacagtcctcatgcct

SEQ ID NO: 41887 - DNA, 20 bp, Artificial Sequence
  Description of Artificial Sequence: Synthetic oligonucleotide
  Target: LAMA2; (-) strand; PAM type: NNNNGHTT; PAM sequence: ATATGATT
caaagtgtcactgttgtaaa

SEQ ID NO: 41888 - DNA, 20 bp, Artificial Sequence
  Description of Artificial Sequence: Synthetic oligonucleotide
  Target: LAMA2; (-) strand; PAM type: NNNNGHTT; PAM sequence: CTGGGATT
tttactatccacaggaacta

SEQ ID NO: 41889 - DNA, 20 bp, Artificial Sequence
  Description of Artificial Sequence: Synthetic oligonucleotide
  Target: LAMA2; (-) strand; PAM type: NNNNGHTT; PAM sequence: GTAAGTTT
cctaatctatggctctttct

SEQ ID NO: 41890 - DNA, 20 bp, Artificial Sequence
  Description of Artificial Sequence: Synthetic oligonucleotide
  Target: LAMA2; (-) strand; PAM type: NNNNGHTT; PAM sequence: TGTAGTTT
aacatcaaagatccatttga

SEQ ID NO: 41891 - DNA, 20 bp, Artificial Sequence
  Description of Artificial Sequence: Synthetic oligonucleotide
  Target: LAMA2; (-) strand; PAM type: NNNNGHTT; PAM sequence: AATAGCTT
cccccaaagagcatgaaaat

SEQ ID NO: 41892 - DNA, 20 bp, Artificial Sequence
  Description of Artificial Sequence: Synthetic oligonucleotide
  Target: LAMA2; (-) strand; PAM type: NNNNGHTT; PAM sequence: TTTGGTTT
cattaatacttcaagacaaa

SEQ ID NO: 41893 - DNA, 20 bp, Artificial Sequence
  Description of Artificial Sequence: Synthetic oligonucleotide
  Target: LAMA2; (-) strand; PAM type: NNNNGHTT; PAM sequence: GAAAGTTT
tattggctgtaaaggagaaa

SEQ ID NO: 41894 - DNA, 20 bp, Artificial Sequence
  Description of Artificial Sequence: Synthetic oligonucleotide
  Target: LAMA2; (-) strand; PAM type: NNNNGHTT; PAM sequence: TCCTGATT
acgaagttgctatattctcc

SEQ ID NO: 41895 - DNA, 20 bp, Artificial Sequence
  Description of Artificial Sequence: Synthetic oligonucleotide
  Target: LAMA2; (-) strand; PAM type: NNNNGHTT; PAM sequence: AGTTGTTT
tgctttcaagtcaagaccaa

SEQ ID NO: 41896 - DNA, 20 bp, Artificial Sequence
  Description of Artificial Sequence: Synthetic oligonucleotide
  Target: LAMA2; (-) strand; PAM type: NNNNGHTT; PAM sequence: ATCTGCTT
ccaccaaaatatattttgtc

SEQ ID NO: 41897 - DNA, 20 bp, Artificial Sequence
  Description of Artificial Sequence: Synthetic oligonucleotide
  Target: LAMA2; (-) strand; PAM type: NNNNGHTT; PAM sequence: TCAAGTTT
tacatataaactaaattacc

SEQ ID NO: 41898 - DNA, 20 bp, Artificial Sequence
  Description of Artificial Sequence: Synthetic oligonucleotide
  Target: LAMA2; (-) strand; PAM type: NNNNGHTT; PAM sequence: CTTAGCTT
catttaattaaaacttaatc

SEQ ID NO: 41899 - DNA, 20 bp, Artificial Sequence
  Description of Artificial Sequence: Synthetic oligonucleotide
  Target: LAMA2; (-) strand; PAM type: NNNNGHTT; PAM sequence: TTTTGATT
tctaacatgcaacatgatgt

SEQ ID NO: 41900 - DNA, 20 bp, Artificial Sequence
  Description of Artificial Sequence: Synthetic oligonucleotide
  Target: LAMA2; (-) strand; PAM type: NNNNGHTT; PAM sequence: TGATGTTT
tgttgttctaacatgcaaca

SEQ ID NO: 41901 - DNA, 20 bp, Artificial Sequence
  Description of Artificial Sequence: Synthetic oligonucleotide
  Target: LAMA2; (-) strand; PAM type: NNNNGHTT; PAM sequence: TTTGGTTT
caaagatgtcaaattagtcc

SEQ ID NO: 41902 - DNA, 20 bp, Artificial Sequence
  Description of Artificial Sequence: Synthetic oligonucleotide
  Target: LAMA2; (-) strand; PAM type: NNNNGHTT; PAM sequence: TCTGGCTT
ttacaagatccacattcaac

SEQ ID NO: 41903 - DNA, 20 bp, Artificial Sequence
  Description of Artificial Sequence: Synthetic oligonucleotide
  Target: LAMA2; (-) strand; PAM type: NNNNGHTT; PAM sequence: TAATGCTT
ccaacacgccattatgatgc

SEQ ID NO: 41904 - DNA, 20 bp, Artificial Sequence
  Description of Artificial Sequence: Synthetic oligonucleotide
  Target: LAMA2; (-) strand; PAM type: NNNNGHTT; PAM sequence: TTATGTTT
taccatccttatagactatg

SEQ ID NO: 41905 - DNA, 20 bp, Artificial Sequence
  Description of Artificial Sequence: Synthetic oligonucleotide
  Target: LAMA2; (-) strand; PAM type: NNNNGHTT; PAM sequence: TACGGTTT
ggtagtctgtaataaactct

SEQ ID NO: 41906 - DNA, 20 bp, Artificial Sequence
  Description of Artificial Sequence: Synthetic oligonucleotide
  Target: LAMA2; (-) strand; PAM type: NNNNGHTT; PAM sequence: CTGGGATT
catcacacttttcagctatt

SEQ ID NO: 41907 - DNA, 20 bp, Artificial Sequence
  Description of Artificial Sequence: Synthetic oligonucleotide
  Target: LAMA2; (-) strand; PAM type: NNNNGHTT; PAM sequence: GCTCGTTT
aatgagactgaactttcact

SEQ ID NO: 41908 - DNA, 20 bp, Artificial Sequence
  Description of Artificial Sequence: Synthetic oligonucleotide
  Target: LAMA2; (-) strand; PAM type: NNNNGHTT; PAM sequence: TTTAGATT
acagttgcttcatctatgag

SEQ ID NO: 41909 - DNA, 20 bp, Artificial Sequence
  Description of Artificial Sequence: Synthetic oligonucleotide
  Target: LAMA2; (-) strand; PAM type: NNNNGHTT; PAM sequence: ATGAGTTT
attagacagttgcttcatct

SEQ ID NO: 41910 - DNA, 20 bp, Artificial Sequence
  Description of Artificial Sequence: Synthetic oligonucleotide
  Target: LAMA2; (-) strand; PAM type: NNNNGHTT; PAM sequence: AGTTGCTT
agctcatcagataattagac

SEQ ID NO: 41911 - DNA, 20 bp, Artificial Sequence
  Description of Artificial Sequence: Synthetic oligonucleotide
  Target: LAMA2; (-) strand; PAM type: NNNNGHTT; PAM sequence: TAATGTTT
tactatttaaatttgatttg

SEQ ID NO: 41912 - DNA, 20 bp, Artificial Sequence
  Description of Artificial Sequence: Synthetic oligonucleotide
  Target: LAMA2; (-) strand; PAM type: NNNNGHTT; PAM sequence: ATTTGATT
ataactgtggtactatttaa

SEQ ID NO: 41913 - DNA, 20 bp, Artificial Sequence
  Description of Artificial Sequence: Synthetic oligonucleotide
  Target: LAMA2; (-) strand; PAM type: NNNNGHTT; PAM sequence: ACTGGATT
aatcttagatttgaacaacc

SEQ ID NO: 41914 - DNA, 20 bp, Artificial Sequence
  Description of Artificial Sequence: Synthetic oligonucleotide
  Target: LAMA2; (-) strand; PAM type: NNNNGHTT; PAM sequence: CTTAGATT
aatgatcttgtaaagcaaat

SEQ ID NO: 41915 - DNA, 20 bp, Artificial Sequence
  Description of Artificial Sequence: Synthetic oligonucleotide
  Target: LAMA2; (-) strand; PAM type: NNNNGHTT; PAM sequence: TTAGGTTT
gaagctagatttgaataacc

SEQ ID NO: 41916 - DNA, 20 bp, Artificial Sequence
  Description of Artificial Sequence: Synthetic oligonucleotide
  Target: LAMA2; (-) strand; PAM type: NNNNGHTT; PAM sequence: GCTAGATT
tcatcactagaataaatgaa

SEQ ID NO: 41917 - DNA, 20 bp, Artificial Sequence
  Description of Artificial Sequence: Synthetic oligonucleotide
  Target: LAMA2; (-) strand; PAM type: NNNNGHTT; PAM sequence: AACAGATT
atttaacagattcagatttt

SEQ ID NO: 41918 - DNA, 20 bp, Artificial Sequence
  Description of Artificial Sequence: Synthetic oligonucleotide
  Target: LAMA2; (-) strand; PAM type: NNNNGHTT; PAM sequence: TTCAGATT
ataaagattcatttaacaga

SEQ ID NO: 41919 - DNA, 20 bp, Artificial Sequence
  Description of Artificial Sequence: Synthetic oligonucleotide
  Target: LAMA2; (-) strand; PAM type: NNNNGHTT; PAM sequence: AACAGATT
ttagtgataaagattcattt

SEQ ID NO: 41920 - DNA, 20 bp, Artificial Sequence
  Description of Artificial Sequence: Synthetic oligonucleotide
  Target: LAMA2; (-) strand; PAM type: NNNNGHTT; PAM sequence: TAAAGATT
aagtaaaaacattttagtga

SEQ ID NO: 41921 - DNA, 20 bp, Artificial Sequence
  Description of Artificial Sequence: Synthetic oligonucleotide
  Target: LAMA2; (-) strand; PAM type: NNNNGHTT; PAM sequence: GGCTGTTT
atcacaaatatacctctaat

SEQ ID NO: 41922 - DNA, 20 bp, Artificial Sequence
  Description of Artificial Sequence: Synthetic oligonucleotide
  Target: LAMA2; (-) strand; PAM type: NNNNGHTT; PAM sequence: GAATGTTT
gcaaaataacaggtaactat

SEQ ID NO: 41923 - DNA, 20 bp, Artificial Sequence
  Description of Artificial Sequence: Synthetic oligonucleotide
  Target: LAMA2; (-) strand; PAM type: NNNNGHTT; PAM sequence: TTATGTTT
acaatgcatgtaaaaataat

SEQ ID NO: 41924 - DNA, 20 bp, Artificial Sequence
  Description of Artificial Sequence: Synthetic oligonucleotide
  Target: LAMA2; (-) strand; PAM type: NNNNGHTT; PAM sequence: TTGAGCTT
aatattgcctctcaaacagc

SEQ ID NO: 41925 - DNA, 20 bp, Artificial Sequence
  Description of Artificial Sequence: Synthetic oligonucleotide
  Target: LAMA2; (-) strand; PAM type: NNNNGHTT; PAM sequence: AACAGCTT
cttataaatattgcctctca

SEQ ID NO: 41926 - DNA, 20 bp, Artificial Sequence
  Description of Artificial Sequence: Synthetic oligonucleotide
  Target: LAMA2; (-) strand; PAM type: NNNNGHTT; PAM sequence: AATGGCTT
actattctgtagtgttcatg

SEQ ID NO: 41927 - DNA, 20 bp, Artificial Sequence
  Description of Artificial Sequence: Synthetic oligonucleotide
  Target: LAMA2; (-) strand; PAM type: NNNNGHTT; PAM sequence: ATCAGCTT
atatgaccgtagctcacaat

SEQ ID NO: 41928 - DNA, 20 bp, Artificial Sequence
  Description of Artificial Sequence: Synthetic oligonucleotide
  Target: LAMA2; (-) strand; PAM type: NNNNGHTT; PAM sequence: CCTTGCTT
atgcataaatttaaatttta

SEQ ID NO: 41929 - DNA, 20 bp, Artificial Sequence
  Description of Artificial Sequence: Synthetic oligonucleotide
  Target: LAMA2; (-) strand; PAM type: NNNNGHTT; PAM sequence: GGCTGCTT
gtgttgctctgcttctgcac

SEQ ID NO: 41930 - DNA, 20 bp, Artificial Sequence
  Description of Artificial Sequence: Synthetic oligonucleotide
  Target: LAMA2; (-) strand; PAM type: NNNNGHTT; PAM sequence: CTCTGCTT
acaaagctgtactggtgttg

SEQ ID NO: 41931 - DNA, 20 bp, Artificial Sequence
  Description of Artificial Sequence: Synthetic oligonucleotide
  Target: LAMA2; (-) strand; PAM type: NNNNGHTT; PAM sequence: CACGGCTT
aggagaactctcacagaatg

SEQ ID NO: 41932 - DNA, 20 bp, Artificial Sequence
  Description of Artificial Sequence: Synthetic oligonucleotide
  Target: LAMA2; (-) strand; PAM type: NNNNGHTT; PAM sequence: CCGTGTTT
caactcaagagaccacttta

SEQ ID NO: 41933 - DNA, 20 bp, Artificial Sequence
  Description of Artificial Sequence: Synthetic oligonucleotide
  Target: LAMA2; (-) strand; PAM type: NNNNGHTT; PAM sequence: GTTTGATT
ggtaagcatgtgagagcaca

SEQ ID NO: 41934 - DNA, 20 bp, Artificial Sequence
  Description of Artificial Sequence: Synthetic oligonucleotide
  Target: LAMA2; (-) strand; PAM type: NNNNGHTT; PAM sequence: CACAGTTT
cagtggtaagcatgtgagag

SEQ ID NO: 41935 - DNA, 20 bp, Artificial Sequence
  Description of Artificial Sequence: Synthetic oligonucleotide
  Target: LAMA2; (-) strand; PAM type: NNNNGHTT; PAM sequence: AAATGTTT
aagaggtgcaaaggctgtgt

SEQ ID NO: 41936 - DNA, 20 bp, Artificial Sequence
  Description of Artificial Sequence: Synthetic oligonucleotide
  Target: LAMA2; (-) strand; PAM type: NNNNGHTT; PAM sequence: AACAGCTT
aataaacatgtcaatagata

SEQ ID NO: 41937 - DNA, 20 bp, Artificial Sequence
  Description of Artificial Sequence: Synthetic oligonucleotide
  Target: LAMA2; (-) strand; PAM type: NNNNGHTT; PAM sequence: GCTAGTTT
ttccttcatctggcaccata

SEQ ID NO: 41938 - DNA, 20 bp, Artificial Sequence
  Description of Artificial Sequence: Synthetic oligonucleotide
  Target: LAMA2; (-) strand; PAM type: NNNNGHTT; PAM sequence: CAGAGATT
tattttaaatatagtatttc

SEQ ID NO: 41939 - DNA, 20 bp, Artificial Sequence
  Description of Artificial Sequence: Synthetic oligonucleotide
  Target: LAMA2; (-) strand; PAM type: NNNNGHTT; PAM sequence: CACAGCTT
atttatggaggcccattgct

SEQ ID NO: 41940 - DNA, 20 bp, Artificial Sequence
  Description of Artificial Sequence: Synthetic oligonucleotide
  Target: LAMA2; (-) strand; PAM type: NNNNGHTT; PAM sequence: TGAGGTTT
ataccagccctgcacatctc

SEQ ID NO: 41941 - DNA, 20 bp, Artificial Sequence
  Description of Artificial Sequence: Synthetic oligonucleotide
  Target: LAMA2; (-) strand; PAM type: NNNNGHTT; PAM sequence: CCAGGCTT
ggctctgaaatgccaaaaca

SEQ ID NO: 41942 - DNA, 20 bp, Artificial Sequence
  Description of Artificial Sequence: Synthetic oligonucleotide
  Target: LAMA2; (-) strand; PAM type: NNNNGHTT; PAM sequence: TTCGGCTT
ttaaaaatttcttggatcag

SEQ ID NO: 41943 - DNA, 20 bp, Artificial Sequence
  Description of Artificial Sequence: Synthetic oligonucleotide
  Target: LAMA2; (-) strand; PAM type: NNNNGHTT; PAM sequence: CTCGGTTT
tctcttattaaaaatctagc

SEQ ID NO: 41944 - DNA, 20 bp, Artificial Sequence
  Description of Artificial Sequence: Synthetic oligonucleotide
  Target: LAMA2; (-) strand; PAM type: NNNNGHTT; PAM sequence: CATGGTTT
aactgtatcatgataaaacg

SEQ ID NO: 41945 - DNA, 20 bp, Artificial Sequence
  Description of Artificial Sequence: Synthetic oligonucleotide
  Target: LAMA2; (-) strand; PAM type: NNNNGHTT; PAM sequence: CTTCGCTT
atatttccatgaaagccagc

SEQ ID NO: 41946 - DNA, 20 bp, Artificial Sequence
  Description of Artificial Sequence: Synthetic oligonucleotide
  Target: LAMA2; (-) strand; PAM type: NNNNGHTT; PAM sequence: CCCTGTTT
actcaatggtaaccacgggt

SEQ ID NO: 41947 - DNA, 20 bp, Artificial Sequence
  Description of Artificial Sequence: Synthetic oligonucleotide
  Target: LAMA2; (-) strand; PAM type: NNNNGHTT; PAM sequence: ATATGATT
acacaaagaaccattccaaa

SEQ ID NO: 41948 - DNA, 20 bp, Artificial Sequence
  Description of Artificial Sequence: Synthetic oligonucleotide
  Target: LAMA2; (-) strand; PAM type: NNNNGHTT; PAM sequence: TATTGTTT
ctcctacaagttatatagtt

SEQ ID NO: 41949 - DNA, 20 bp, Artificial Sequence
  Description of Artificial Sequence: Synthetic oligonucleotide
  Target: LAMA2; (-) strand; PAM type: NNNNGHTT; PAM sequence: TATAGTTT
taaatcactcctacaagtta

SEQ ID NO: 41950 - DNA, 20 bp, Artificial Sequence
  Description of Artificial Sequence: Synthetic oligonucleotide
  Target: LAMA2; (-) strand; PAM type: NNNNGHTT; PAM sequence: ACTTGCTT
gaatttcattaacagtgttc

SEQ ID NO: 41951 - DNA, 20 bp, Artificial Sequence
  Description of Artificial Sequence: Synthetic oligonucleotide
  Target: LAMA2; (-) strand; PAM type: NNNNGHTT; PAM sequence: TTCTGCTT
gcccaactgtagggtgagaa

SEQ ID NO: 41952 - DNA, 20 bp, Artificial Sequence
  Description of Artificial Sequence: Synthetic oligonucleotide
  Target: LAMA2; (-) strand; PAM type: NNNNGHTT; PAM sequence: CAAGGTTT
tgataatttttccttgttcc

SEQ ID NO: 41953 - DNA, 20 bp, Artificial Sequence
  Description of Artificial Sequence: Synthetic oligonucleotide
  Target: LAMA2; (-) strand; PAM type: NNNNGHTT; PAM sequence: GTCTGTTT
ttatttcatgtcaggtgtct

SEQ ID NO: 41954 - DNA, 20 bp, Artificial Sequence
  Description of Artificial Sequence: Synthetic oligonucleotide
  Target: LAMA2; (-) strand; PAM type: NNNNGHTT; PAM sequence: AGGTGATT
agaccttggcagtgtatatc

SEQ ID NO: 41955 - DNA, 20 bp, Artificial Sequence
  Description of Artificial Sequence: Synthetic oligonucleotide
  Target: LAMA2; (-) strand; PAM type: NNNNGHTT; PAM sequence: TGATGATT
atatattgtagttgataggg

SEQ ID NO: 41956 - DNA, 20 bp, Artificial Sequence
  Description of Artificial Sequence: Synthetic oligonucleotide
  Target: LAMA2; (-) strand; PAM type: NNNNGHTT; PAM sequence: ATTTGATT
tgaatatttattgttattta

SEQ ID NO: 41957 - DNA, 20 bp, Artificial Sequence
  Description of Artificial Sequence: Synthetic oligonucleotide
  Target: LAMA2; (-) strand; PAM type: NNNNGHTT; PAM sequence: TGTAGCTT
gtggctattaggacttgaaa

SEQ ID NO: 41958 - DNA, 20 bp, Artificial Sequence
  Description of Artificial Sequence: Synthetic oligonucleotide
  Target: LAMA2; (-) strand; PAM type: NNNNGHTT; PAM sequence: GTCTGTTT
ttcctgtgatgatggatatt

SEQ ID NO: 41959 - DNA, 20 bp, Artificial Sequence
  Description of Artificial Sequence: Synthetic oligonucleotide
  Target: LAMA2; (-) strand; PAM type: NNNNGHTT; PAM sequence: AAAGGTTT
tacctacataatcaaattgc

SEQ ID NO: 41960 - DNA, 20 bp, Artificial Sequence
  Description of Artificial Sequence: Synthetic oligonucleotide
  Target: LAMA2; (-) strand; PAM type: NNNNGHTT; PAM sequence: AGCAGATT
taaaatggggcaagtgtgcc

SEQ ID NO: 41961 - DNA, 20 bp, Artificial Sequence
  Description of Artificial Sequence: Synthetic oligonucleotide
  Target: LAMA2; (-) strand; PAM type: NNNNGHTT; PAM sequence: GAATGTTT
tttatactcaaactacactt

SEQ ID NO: 41962 - DNA, 20 bp, Artificial Sequence
  Description of Artificial Sequence: Synthetic oligonucleotide
  Target: LAMA2; (-) strand; PAM type: NNNNGHTT; PAM sequence: TACAGATT
tttaacagattaatttagtt

SEQ ID NO: 41963 - DNA, 20 bp, Artificial Sequence
  Description of Artificial Sequence: Synthetic oligonucleotide
  Target: LAMA2; (-) strand; PAM type: NNNNGHTT; PAM sequence: TTTAGTTT
gtttttttttaacagattaa

SEQ ID NO: 41964 - DNA, 20 bp, Artificial Sequence
  Description of Artificial Sequence: Synthetic oligonucleotide
  Target: LAMA2; (-) strand; PAM type: NNNNGHTT; PAM sequence: AACAGATT
ataaaaaaatgttttttttt

SEQ ID NO: 41965 - DNA, 20 bp, Artificial Sequence
  Description of Artificial Sequence: Synthetic oligonucleotide
  Target: LAMA2; (-) strand; PAM type: NNNNGHTT; PAM sequence: AAATGTTT
atccctgtctcaaaataaaa

SEQ ID NO: 41966 - DNA, 20 bp, Artificial Sequence
  Description of Artificial Sequence: Synthetic oligonucleotide
  Target: LAMA2; (-) strand; PAM type: NNNNGHTT; PAM sequence: GATCGCTT
ttgggaggccgaagagggag

SEQ ID NO: 41967 - DNA, 20 bp, Artificial Sequence
  Description of Artificial Sequence: Synthetic oligonucleotide
  Target: LAMA2; (-) strand; PAM type: NNNNGHTT; PAM sequence: TTAGGTTT
aaaaaacagatgtttaaaaa

SEQ ID NO: 41968 - DNA, 20 bp, Artificial Sequence
  Description of Artificial Sequence: Synthetic oligonucleotide
  Target: LAMA2; (-) strand; PAM type: NNNNGHTT; PAM sequence: AGATGTTT
gattatatagtctaaaaaac

SEQ ID NO: 41969 - DNA, 20 bp, Artificial Sequence
  Description of Artificial Sequence: Synthetic oligonucleotide
  Target: LAMA2; (-) strand; PAM type: NNNNGHTT; PAM sequence: TTTGGATT
caaagtccaagaaacattct

SEQ ID NO: 41970 - DNA, 20 bp, Artificial Sequence
  Description of Artificial Sequence: Synthetic oligonucleotide
  Target: LAMA2; (-) strand; PAM type: NNNNGHTT; PAM sequence: TAAGGCTT
gataatattacatatctctt

SEQ ID NO: 41971 - DNA, 20 bp, Artificial Sequence
  Description of Artificial Sequence: Synthetic oligonucleotide
  Target: LAMA2; (-) strand; PAM type: NNNNGHTT; PAM sequence: TGAGGCTT
gaaaaagatttttttttatt

SEQ ID NO: 41972 - DNA, 20 bp, Artificial Sequence
  Description of Artificial Sequence: Synthetic oligonucleotide
  Target: LAMA2; (-) strand; PAM type: NNNNGHTT; PAM sequence: AAAAGATT
aaaacgtttatttattttga

SEQ ID NO: 41973 - DNA, 20 bp, Artificial Sequence
  Description of Artificial Sequence: Synthetic oligonucleotide
  Target: LAMA2; (-) strand; PAM type: NNNNGHTT; PAM sequence: AAACGTTT
agttagaaaaaaaaatctga

SEQ ID NO: 41974 - DNA, 20 bp, Artificial Sequence
  Description of Artificial Sequence: Synthetic oligonucleotide
  Target: LAMA2; (-) strand; PAM type: NNNNGHTT; PAM sequence: AAAAGTTT
cataaacaaactatatacca

SEQ ID NO: 41975 - DNA, 20 bp, Artificial Sequence
  Description of Artificial Sequence: Synthetic oligonucleotide
  Target: LAMA2; (-) strand; PAM type: NNNNGHTT; PAM sequence: ATAAGTTT
tgctttatatgtgtaatgaa

SEQ ID NO: 41976 - DNA, 20 bp, Artificial Sequence
  Description of Artificial Sequence: Synthetic oligonucleotide
  Target: LAMA2; (-) strand; PAM type: NNNNGHTT; PAM sequence: TGATGCTT
ggaattaactgacttcttat

SEQ ID NO: 41977 - DNA, 20 bp, Artificial Sequence
  Description of Artificial Sequence: Synthetic oligonucleotide
  Target: LAMA2; (-) strand; PAM type: NNNNGHTT; PAM sequence: TCTGGTTT
cacacgtgtacccagcaaac

SEQ ID NO: 41978 - DNA, 20 bp, Artificial Sequence
  Description of Artificial Sequence: Synthetic oligonucleotide
  Target: LAMA2; (-) strand; PAM type: NNNNGHTT; PAM sequence: TTCAGATT
tgaggcagccggaatatttc

SEQ ID NO: 41979 - DNA, 20 bp, Artificial Sequence
  Description of Artificial Sequence: Synthetic oligonucleotide
  Target: LAMA2; (-) strand; PAM type: NNNNGHTT; PAM sequence: ATGTGTTT
gtaagtgaaatctgatataa

SEQ ID NO: 41980 - DNA, 20 bp, Artificial Sequence
  Description of Artificial Sequence: Synthetic oligonucleotide
  Target: LAMA2; (-) strand; PAM type: NNNNGHTT; PAM sequence: TATCGTTT
agaatgctttaatcttgctt

SEQ ID NO: 41981 - DNA, 20 bp, Artificial Sequence
  Description of Artificial Sequence: Synthetic oligonucleotide
  Target: LAMA2; (-) strand; PAM type: NNNNGHTT; PAM sequence: TCTTGCTT
taatttagagaatgctttaa

SEQ ID NO: 41982 - DNA, 20 bp, Artificial Sequence
  Description of Artificial Sequence: Synthetic oligonucleotide
  Target: LAMA2; (-) strand; PAM type: NNNNGHTT; PAM sequence: GAATGCTT
ttttatcatggtaatttaga

SEQ ID NO: 41983 - DNA, 20 bp, Artificial Sequence
  Description of Artificial Sequence: Synthetic oligonucleotide
  Target: LAMA2; (-) strand; PAM type: NNNNGHTT; PAM sequence: AAGAGATT
aaaaaaagagaaaaacagaa

SEQ ID NO: 41984 - DNA, 20 bp, Artificial Sequence
  Description of Artificial Sequence: Synthetic oligonucleotide
  Target: LAMA2; (-) strand; PAM type: NNNNGHTT; PAM sequence: TCAAGTTT
aaagacaagggggctagact

SEQ ID NO: 41985 - DNA, 20 bp, Artificial Sequence
  Description of Artificial Sequence: Synthetic oligonucleotide
  Target: LAMA2; (-) strand; PAM type: NNNNGHTT; PAM sequence: AGTTGATT
tcaaacacaagtctttgcag

SEQ ID NO: 41986 - DNA, 20 bp, Artificial Sequence
  Description of Artificial Sequence: Synthetic oligonucleotide
  Target: LAMA2; (-) strand; PAM type: NNNNGHTT; PAM sequence: GGATGCTT
acgaaaataggggaatgcta

SEQ ID NO: 41987 - DNA, 20 bp, Artificial Sequence
  Description of Artificial Sequence: Synthetic oligonucleotide
  Target: LAMA2; (-) strand; PAM type: NNNNGHTT; PAM sequence: TCTTGCTT
atttgctgttgactattgac

SEQ ID NO: 41988 - DNA, 20 bp, Artificial Sequence
  Description of Artificial Sequence: Synthetic oligonucleotide
  Target: LAMA2; (-) strand; PAM type: NNNNGHTT; PAM sequence: TTGAGTTT
taaaaacaagctgatcacta

SEQ ID NO: 41989 - DNA, 20 bp, Artificial Sequence
  Description of Artificial Sequence: Synthetic oligonucleotide
  Target: LAMA2; (-) strand; PAM type: NNNNGHTT; PAM sequence: TAACGTTT
atgtatgagaatgacatatt

SEQ ID NO: 41990 - DNA, 20 bp, Artificial Sequence
  Description of Artificial Sequence: Synthetic oligonucleotide
  Target: LAMA2; (-) strand; PAM type: NNNNGHTT; PAM sequence: TTTTGATT
attggagtggtttaagataa

SEQ ID NO: 41991 - DNA, 20 bp, Artificial Sequence
  Description of Artificial Sequence: Synthetic oligonucleotide
  Target: LAMA2; (-) strand; PAM type: NNNNGHTT; PAM sequence: AGTGGTTT
catttccctaattctattgg

SEQ ID NO: 41992 - DNA, 20 bp, Artificial Sequence
  Description of Artificial Sequence: Synthetic oligonucleotide
  Target: LAMA2; (-) strand; PAM type: NNNNGHTT; PAM sequence: GGTGGATT
ttaaacctcatcattcaagt

SEQ ID NO: 41993 - DNA, 20 bp, Artificial Sequence
  Description of Artificial Sequence: Synthetic oligonucleotide
  Target: LAMA2; (-) strand; PAM type: NNNNGHTT; PAM sequence: ATGTGTTT
ccttacagttttagttctta

SEQ ID NO: 41994 - DNA, 20 bp, Artificial Sequence
  Description of Artificial Sequence: Synthetic oligonucleotide
  Target: LAMA2; (-) strand; PAM type: NNNNGHTT; PAM sequence: TACAGTTT
aagaagccagtatgggtcct

SEQ ID NO: 41995 - DNA, 20 bp, Artificial Sequence
  Description of Artificial Sequence: Synthetic oligonucleotide
  Target: LAMA2; (-) strand; PAM type: NNNNGHTT; PAM sequence: TGAAGATT
tgtgaatgagagttaggctt

SEQ ID NO: 41996 - DNA, 20 bp, Artificial Sequence
  Description of Artificial Sequence: Synthetic oligonucleotide
  Target: LAMA2; (-) strand; PAM type: NNNNGHTT; PAM sequence: TTAGGCTT
cttttgaatgtgaatgagag

SEQ ID NO: 41997 - DNA, 20 bp, Artificial Sequence
  Description of Artificial Sequence: Synthetic oligonucleotide
  Target: LAMA2; (-) strand; PAM type: NNNNGHTT; PAM sequence: GACAGTTT
cagaggctattcattttccg

SEQ ID NO: 41998 - DNA, 20 bp, Artificial Sequence
  Description of Artificial Sequence: Synthetic oligonucleotide
  Target: LAMA2; (-) strand; PAM type: NNNNGHTT; PAM sequence: TGGAGTTT
ctattccaattttcaaatca

SEQ ID NO: 41999 - DNA, 20 bp, Artificial Sequence
  Description of Artificial Sequence: Synthetic oligonucleotide
  Target: LAMA2; (-) strand; PAM type: NNNNGHTT; PAM sequence: ATCTGTTT
aagagctggtaaaatgtata

SEQ ID NO: 42000 - DNA, 20 bp, Artificial Sequence
  Description of Artificial Sequence: Synthetic oligonucleotide
  Target: LAMA2; (-) strand; PAM type: NNNNGHTT; PAM sequence: CAGTGTTT
tgtaggctattttcctccca

SEQ ID NO: 42001 - DNA, 20 bp, Artificial Sequence
  Description of Artificial Sequence: Synthetic oligonucleotide
  Target: LAMA2; (-) strand; PAM type: NNNNGHTT; PAM sequence: CCTAGATT
aaaatattcatttttaaagt

SEQ ID NO: 42002 - DNA, 20 bp, Artificial Sequence
  Description of Artificial Sequence: Synthetic oligonucleotide
  Target: LAMA2; (-) strand; PAM type: NNNNGHTT; PAM sequence: AAGTGCTT
cccatgtagttaggaattta

SEQ ID NO: 42003 - DNA, 20 bp, Artificial Sequence
  Description of Artificial Sequence: Synthetic oligonucleotide
  Target: LAMA2; (-) strand; PAM type: NNNNGHTT; PAM sequence: TATAGCTT
ctcaaagctgtgcagaagca

SEQ ID NO: 42004 - DNA, 20 bp, Artificial Sequence
  Description of Artificial Sequence: Synthetic oligonucleotide
  Target: LAMA2; (-) strand; PAM type: NNNNGHTT; PAM sequence: TCTAGTTT
ataaaacaaacatcgcatag

SEQ ID NO: 42005 - DNA, 20 bp, Artificial Sequence
  Description of Artificial Sequence: Synthetic oligonucleotide
  Target: LAMA2; (-) strand; PAM type: NNNNGHTT; PAM sequence: TTATGTTT
aaactctatcacttaattgt

SEQ ID NO: 42006 - DNA, 20 bp, Artificial Sequence
  Description of Artificial Sequence: Synthetic oligonucleotide
  Target: LAMA2; (-) strand; PAM type: NNNNGHTT; PAM sequence: AATTGTTT
ttgaataaactctatcactt

SEQ ID NO: 42007 - DNA, 20 bp, Artificial Sequence
  Description of Artificial Sequence: Synthetic oligonucleotide
  Target: LAMA2; (-) strand; PAM type: NNNNGHTT; PAM sequence: CTAAGTTT
catgtctagggagattgtcc

SEQ ID NO: 42008 - DNA, 20 bp, Artificial Sequence
  Description of Artificial Sequence: Synthetic oligonucleotide
  Target: LAMA2; (-) strand; PAM type: NNNNGHTT; PAM sequence: GGGAGATT
cacaagcaggtacatgtcta

SEQ ID NO: 42009 - DNA, 20 bp, Artificial Sequence
  Description of Artificial Sequence: Synthetic oligonucleotide
  Target: LAMA2; (-) strand; PAM type: NNNNGHTT; PAM sequence: CAAAGATT
tttgttgttgttgtttaaac

SEQ ID NO: 42010 - DNA, 20 bp, Artificial Sequence
  Description of Artificial Sequence: Synthetic oligonucleotide
  Target: LAMA2; (-) strand; PAM type: NNNNGHTT; PAM sequence: TGTTGTTT
taggtacctttttttgttgt

SEQ ID NO: 42011 - DNA, 20 bp, Artificial Sequence
  Description of Artificial Sequence: Synthetic oligonucleotide
  Target: LAMA2; (-) strand; PAM type: NNNNGHTT; PAM sequence: AGAAGATT
gagcttttgattttaaatat

SEQ ID NO: 42012 - DNA, 20 bp, Artificial Sequence
  Description of Artificial Sequence: Synthetic oligonucleotide
  Target: LAMA2; (-) strand; PAM type: NNNNGHTT; PAM sequence: TTTTGATT
ctctacttttattctagagc

SEQ ID NO: 42013 - DNA, 20 bp, Artificial Sequence
  Description of Artificial Sequence: Synthetic oligonucleotide
  Target: LAMA2; (-) strand; PAM type: NNNNGHTT; PAM sequence: TAGAGCTT
tatagcctctacttttattc

SEQ ID NO: 42014 - DNA, 20 bp, Artificial Sequence
  Description of Artificial Sequence: Synthetic oligonucleotide
  Target: LAMA2; (-) strand; PAM type: NNNNGHTT; PAM sequence: AGCAGTTT
tgataacttcaaatcttctg

SEQ ID NO: 42015 - DNA, 20 bp, Artificial Sequence
  Description of Artificial Sequence: Synthetic oligonucleotide
  Target: LAMA2; (-) strand; PAM type: NNNNGHTT; PAM sequence: GAAAGTTT
ttagaaagcaggaaaacatg

SEQ ID NO: 42016 - DNA, 20 bp, Artificial Sequence
  Description of Artificial Sequence: Synthetic oligonucleotide
  Target: LAMA2; (-) strand; PAM type: NNNNGHTT; PAM sequence: ATAGGTTT
atgtgattatgaaatacatc

SEQ ID NO: 42017 - DNA, 20 bp, Artificial Sequence
  Description of Artificial Sequence: Synthetic oligonucleotide
  Target: LAMA2; (-) strand; PAM type: NNNNGHTT; PAM sequence: ATGTGATT
caccctcctcgatgcaatta

SEQ ID NO: 42018 - DNA, 20 bp, Artificial Sequence
  Description of Artificial Sequence: Synthetic oligonucleotide
  Target: LAMA2; (-) strand; PAM type: NNNNGHTT; PAM sequence: CCAGGCTT
caggggagagctccacaaaa

SEQ ID NO: 42019 - DNA, 20 bp, Artificial Sequence
  Description of Artificial Sequence: Synthetic oligonucleotide
  Target: LAMA2; (-) strand; PAM type: NNNNGHTT; PAM sequence: GGTTGATT
attcttggtgctgaatgaca

SEQ ID NO: 42020 - DNA, 20 bp, Artificial Sequence
  Description of Artificial Sequence: Synthetic oligonucleotide
  Target: LAMA2; (-) strand; PAM type: NNNNGHTT; PAM sequence: CTTCGTTT
agggtacctgtccagtctgc

SEQ ID NO: 42021 - DNA, 20 bp, Artificial Sequence
  Description of Artificial Sequence: Synthetic oligonucleotide
  Target: LAMA2; (-) strand; PAM type: NNNNGHTT; PAM sequence: AACTGCTT
taaaaatacaaaagtaagtt

SEQ ID NO: 42022 - DNA, 20 bp, Artificial Sequence
  Description of Artificial Sequence: Synthetic oligonucleotide
  Target: LAMA2; (-) strand; PAM type: NNNNGHTT; PAM sequence: TACAGATT
agggaccgaagctgactgtc

SEQ ID NO: 42023 - DNA, 20 bp, Artificial Sequence
  Description of Artificial Sequence: Synthetic oligonucleotide
  Target: LAMA2; (-) strand; PAM type: NNNNGHTT; PAM sequence: TTCAGCTT
caggcccaaaagactattac

SEQ ID NO: 42024 - DNA, 20 bp, Artificial Sequence
  Description of Artificial Sequence: Synthetic oligonucleotide
  Target: LAMA2; (-) strand; PAM type: NNNNGHTT; PAM sequence: ACTTGCTT
gtctgtgttggttgtgttct

SEQ ID NO: 42025 - DNA, 20 bp, Artificial Sequence
  Description of Artificial Sequence: Synthetic oligonucleotide
  Target: LAMA2; (-) strand; PAM type: NNNNGHTT; PAM sequence: TTAGGCTT
acccggctggttgacattct

SEQ ID NO: 42026 - DNA, 20 bp, Artificial Sequence
  Description of Artificial Sequence: Synthetic oligonucleotide
  Target: LAMA2; (-) strand; PAM type: NNNNGHTT; PAM sequence: CTGGGATT
tgctttgacctgccaaagtg

SEQ ID NO: 42027 - DNA, 20 bp, Artificial Sequence
  Description of Artificial Sequence: Synthetic oligonucleotide
  Target: LAMA2; (-) strand; PAM type: NNNNGHTT; PAM sequence: TCCTGCTT
ctcctgggctcaaacgatcc

SEQ ID NO: 42028 - DNA, 20 bp, Artificial Sequence
  Description of Artificial Sequence: Synthetic oligonucleotide
  Target: LAMA2; (-) strand; PAM type: NNNNGHTT; PAM sequence: CCTAGTTT
ggtcttatcatgctgcctag

SEQ ID NO: 42029 - DNA, 20 bp, Artificial Sequence
  Description of Artificial Sequence: Synthetic oligonucleotide
  Target: LAMA2; (-) strand; PAM type: NNNNGHTT; PAM sequence: AAAAGTTT
aattgatactcttttttaaa

SEQ ID NO: 42030 - DNA, 20 bp, Artificial Sequence
  Description of Artificial Sequence: Synthetic oligonucleotide
  Target: LAMA2; (-) strand; PAM type: NNNNGHTT; PAM sequence: TAAAGTTT
tggacaggggatatagatac

SEQ ID NO: 42031 - DNA, 20 bp, Artificial Sequence
  Description of Artificial Sequence: Synthetic oligonucleotide
  Target: LAMA2; (-) strand; PAM type: NNNNGHTT; PAM sequence: GATTGCTT
ttaaatctgggcagttgagg

SEQ ID NO: 42032 - DNA, 20 bp, Artificial Sequence
  Description of Artificial Sequence: Synthetic oligonucleotide
  Target: LAMA2; (-) strand; PAM type: NNNNGHTT; PAM sequence: GAGGGATT
atgcttaaatctgggcagtt

SEQ ID NO: 42033 - DNA, 20 bp, Artificial Sequence
  Description of Artificial Sequence: Synthetic oligonucleotide
  Target: LAMA2; (-) strand; PAM type: NNNNGHTT; PAM sequence: TGATGCTT
taccaaggcaataagaggta

SEQ ID NO: 42034 - DNA, 20 bp, Artificial Sequence
  Description of Artificial Sequence: Synthetic oligonucleotide
  Target: LAMA2; (-) strand; PAM type: NNNNGHTT; PAM sequence: ATGTGATT
ggaaaattacgttttaaaaa

SEQ ID NO: 42035 - DNA, 20 bp, Artificial Sequence
  Description of Artificial Sequence: Synthetic oligonucleotide
  Target: LAMA2; (-) strand; PAM type: NNNNGHTT; PAM sequence: TTACGTTT
aaactagattaaatggaaaa

SEQ ID NO: 42036 - DNA, 20 bp, Artificial Sequence
  Description of Artificial Sequence: Synthetic oligonucleotide
  Target: LAMA2; (-) strand; PAM type: NNNNGHTT; PAM sequence: ACTAGATT
gaaccctttcattgagaaaa

SEQ ID NO: 42037 - DNA, 20 bp, Artificial Sequence
  Description of Artificial Sequence: Synthetic oligonucleotide
  Target: LAMA2; (-) strand; PAM type: NNNNGHTT; PAM sequence: TCTGGTTT
cgtaatcacaaataacatga

SEQ ID NO: 42038 - DNA, 20 bp, Artificial Sequence
  Description of Artificial Sequence: Synthetic oligonucleotide
  Target: LAMA2; (-) strand; PAM type: NNNNGHTT; PAM sequence: AATTGATT
cactaaatgttacatactaa

SEQ ID NO: 42039 - DNA, 20 bp, Artificial Sequence
  Description of Artificial Sequence: Synthetic oligonucleotide
  Target: LAMA2; (-) strand; PAM type: NNNNGHTT; PAM sequence: ATATGATT
taaataagatttgttacata

SEQ ID NO: 42040 - DNA, 20 bp, Artificial Sequence
  Description of Artificial Sequence: Synthetic oligonucleotide
  Target: LAMA2; (-) strand; PAM type: NNNNGHTT; PAM sequence: ATAAGATT
tgtattttttagaaaaataa

SEQ ID NO: 42041 - DNA, 20 bp, Artificial Sequence
  Description of Artificial Sequence: Synthetic oligonucleotide
  Target: LAMA2; (-) strand; PAM type: NNNNGHTT; PAM sequence: GTGGGCTT
tctctttgtgaatattttgt

SEQ ID NO: 42042 - DNA, 20 bp, Artificial Sequence
  Description of Artificial Sequence: Synthetic oligonucleotide
  Target: LAMA2; (-) strand; PAM type: NNNNGHTT; PAM sequence: TTTTGATT
gccactgtgcctggctgata

SEQ ID NO: 42043 - DNA, 20 bp, Artificial Sequence
  Description of Artificial Sequence: Synthetic oligonucleotide
  Target: LAMA2; (-) strand; PAM type: NNNNGHTT; PAM sequence: CTGGGATT
caccttggcctcccaaagtg

SEQ ID NO: 42044 - DNA, 20 bp, Artificial Sequence
  Description of Artificial Sequence: Synthetic oligonucleotide
  Target: LAMA2; (-) strand; PAM type: NNNNGHTT; PAM sequence: ACAGGATT
atttttagtatacaaattag

SEQ ID NO: 42045 - DNA, 20 bp, Artificial Sequence
  Description of Artificial Sequence: Synthetic oligonucleotide
  Target: LAMA2; (-) strand; PAM type: NNNNGHTT; PAM sequence: CTGGGATT
tgcctcagcctcccaagtaa

SEQ ID NO: 42046 - DNA, 20 bp, Artificial Sequence
  Description of Artificial Sequence: Synthetic oligonucleotide
  Target: LAMA2; (-) strand; PAM type: NNNNGHTT; PAM sequence: TTTAGATT
attgacaagattatattatt

SEQ ID NO: 42047 - DNA, 20 bp, Artificial Sequence
  Description of Artificial Sequence: Synthetic oligonucleotide
  Target: LAMA2; (-) strand; PAM type: NNNNGHTT; PAM sequence: ACAAGATT
aatgtttttactatctattg

SEQ ID NO: 42048 - DNA, 20 bp, Artificial Sequence
  Description of Artificial Sequence: Synthetic oligonucleotide
  Target: LAMA2; (-) strand; PAM type: NNNNGHTT; PAM sequence: AAATGTTT
aatgactgttaaattttacc

SEQ ID NO: 42049 - DNA, 20 bp, Artificial Sequence
  Description of Artificial Sequence: Synthetic oligonucleotide
  Target: LAMA2; (-) strand; PAM type: NNNNGHTT; PAM sequence: CTTAGTTT
ggctaaggaagttccttcct

SEQ ID NO: 42050 - DNA, 20 bp, Artificial Sequence
  Description of Artificial Sequence: Synthetic oligonucleotide
  Target: LAMA2; (-) strand; PAM type: NNNNGHTT; PAM sequence: TATAGTTT
tttaaatcaggaatacttgt

SEQ ID NO: 42051 - DNA, 20 bp, Artificial Sequence
  Description of Artificial Sequence: Synthetic oligonucleotide
  Target: LAMA2; (-) strand; PAM type: NNNNGHTT; PAM sequence: AAATGTTT
cttgggcttgattttatagc

SEQ ID NO: 42052 - DNA, 20 bp, Artificial Sequence
  Description of Artificial Sequence: Synthetic oligonucleotide
  Target: LAMA2; (-) strand; PAM type: NNNNGHTT; PAM sequence: GCTTGATT
aatagtcatctgtttcttgg

SEQ ID NO: 42053 - DNA, 20 bp, Artificial Sequence
  Description of Artificial Sequence: Synthetic oligonucleotide
  Target: LAMA2; (-) strand; PAM type: NNNNGHTT; PAM sequence: TTGGGCTT
tcaaaatagtcatctgtttc

SEQ ID NO: 42054 - DNA, 20 bp, Artificial Sequence
  Description of Artificial Sequence: Synthetic oligonucleotide
  Target: LAMA2; (-) strand; PAM type: NNNNGHTT; PAM sequence: ATCTGTTT
tcagtgcagtcaaaatagtc

SEQ ID NO: 42055 - DNA, 20 bp, Artificial Sequence
  Description of Artificial Sequence: Synthetic oligonucleotide
  Target: LAMA2; (-) strand; PAM type: NNNNGHTT; PAM sequence: TAATGATT
gctttatgtctattttgtta

SEQ ID NO: 42056 - DNA, 20 bp, Artificial Sequence
  Description of Artificial Sequence: Synthetic oligonucleotide
  Target: LAMA2; (-) strand; PAM type: NNNNGHTT; PAM sequence: ATGGGCTT
aattttataattttctccat

SEQ ID NO: 42057 - DNA, 20 bp, Artificial Sequence
  Description of Artificial Sequence: Synthetic oligonucleotide
  Target: LAMA2; (-) strand; PAM type: NNNNGHTT; PAM sequence: TCATGATT
ataaattttagaataagctg

SEQ ID NO: 42058 - DNA, 20 bp, Artificial Sequence
  Description of Artificial Sequence: Synthetic oligonucleotide
  Target: LAMA2; (-) strand; PAM type: NNNNGHTT; PAM sequence: CTATGCTT
ttgtcaaatgctgtttccat

SEQ ID NO: 42059 - DNA, 20 bp, Artificial Sequence
  Description of Artificial Sequence: Synthetic oligonucleotide
  Target: LAMA2; (-) strand; PAM type: NNNNGHTT; PAM sequence: TGCTGTTT
caatgccacttattgtcaaa

SEQ ID NO: 42060 - DNA, 20 bp, Artificial Sequence
  Description of Artificial Sequence: Synthetic oligonucleotide
  Target: LAMA2; (-) strand; PAM type: NNNNGHTT; PAM sequence: TTTAGTTT
ggtttgatatgaaaaagaaa

SEQ ID NO: 42061 - DNA, 20 bp, Artificial Sequence
  Description of Artificial Sequence: Synthetic oligonucleotide
  Target: LAMA2; (-) strand; PAM type: NNNNGHTT; PAM sequence: TTTGGTTT
aatttattgtgaatttattt

SEQ ID NO: 42062 - DNA, 20 bp, Artificial Sequence
  Description of Artificial Sequence: Synthetic oligonucleotide
  Target: LAMA2; (-) strand; PAM type: NNNNGHTT; PAM sequence: TAAAGATT
atattttcttctaagaattt

SEQ ID NO: 42063 - DNA, 20 bp, Artificial Sequence
  Description of Artificial Sequence: Synthetic oligonucleotide
  Target: LAMA2; (-) strand; PAM type: NNNNGHTT; PAM sequence: TCTTGTTT
taatgcagttccactcataa

SEQ ID NO: 42064 - DNA, 20 bp, Artificial Sequence
  Description of Artificial Sequence: Synthetic oligonucleotide
  Target: LAMA2; (-) strand; PAM type: NNNNGHTT; PAM sequence: AAGAGTTT
tttgtgttgtttgatgacca

SEQ ID NO: 42065 - DNA, 20 bp, Artificial Sequence
  Description of Artificial Sequence: Synthetic oligonucleotide
  Target: LAMA2; (-) strand; PAM type: NNNNGHTT; PAM sequence: TGTTGTTT
agactgaggcttgtgttttg

SEQ ID NO: 42066 - DNA, 20 bp, Artificial Sequence
  Description of Artificial Sequence: Synthetic oligonucleotide
  Target: LAMA2; (-) strand; PAM type: NNNNGHTT; PAM sequence: TTGTGTTT
gtacatttccagactgaggc

SEQ ID NO: 42067 - DNA, 20 bp, Artificial Sequence
  Description of Artificial Sequence: Synthetic oligonucleotide
  Target: LAMA2; (-) strand; PAM type: NNNNGHTT; PAM sequence: TGAGGCTT
tatactgtacatttccagac

SEQ ID NO: 42068 - DNA, 20 bp, Artificial Sequence
  Description of Artificial Sequence: Synthetic oligonucleotide
  Target: LAMA2; (-) strand; PAM type: NNNNGHTT; PAM sequence: TGTAGATT
gggacaaggactgtattccc

SEQ ID NO: 42069 - DNA, 20 bp, Artificial Sequence
  Description of Artificial Sequence: Synthetic oligonucleotide
  Target: LAMA2; (-) strand; PAM type: NNNNGHTT; PAM sequence: GTGAGCTT
atatcccattataaactgca

SEQ ID NO: 42070 - DNA, 20 bp, Artificial Sequence
  Description of Artificial Sequence: Synthetic oligonucleotide
  Target: LAMA2; (-) strand; PAM type: NNNNGHTT; PAM sequence: TATGGTTT
tctaatactataacaaccag

SEQ ID NO: 42071 - DNA, 20 bp, Artificial Sequence
  Description of Artificial Sequence: Synthetic oligonucleotide
  Target: LAMA2; (-) strand; PAM type: NNNNGHTT; PAM sequence: CTTTGATT
cagcagtgatcaagggcact

SEQ ID NO: 42072 - DNA, 20 bp, Artificial Sequence
  Description of Artificial Sequence: Synthetic oligonucleotide
  Target: LAMA2; (-) strand; PAM type: NNNNGHTT; PAM sequence: AATTGTTT
aacttcaggagatagtgcca

SEQ ID NO: 42073 - DNA, 20 bp, Artificial Sequence
  Description of Artificial Sequence: Synthetic oligonucleotide
  Target: LAMA2; (-) strand; PAM type: NNNNGHTT; PAM sequence: GCTGGCTT
ctgtacccaggagtggaatt

SEQ ID NO: 42074 - DNA, 20 bp, Artificial Sequence
  Description of Artificial Sequence: Synthetic oligonucleotide
  Target: LAMA2; (-) strand; PAM type: NNNNGHTT; PAM sequence: TCTAGTTT
tgatgaacacttgggttgtt

SEQ ID NO: 42075 - DNA, 20 bp, Artificial Sequence
  Description of Artificial Sequence: Synthetic oligonucleotide
  Target: LAMA2; (-) strand; PAM type: NNNNGHTT; PAM sequence: GGTTGTTT
ctccagctgatgaacacttg

SEQ ID NO: 42076 - DNA, 20 bp, Artificial Sequence
  Description of Artificial Sequence: Synthetic oligonucleotide
  Target: LAMA2; (-) strand; PAM type: NNNNGHTT; PAM sequence: CACAGTTT
atcccattatgcaaaagtgc

SEQ ID NO: 42077 - DNA, 20 bp, Artificial Sequence
  Description of Artificial Sequence: Synthetic oligonucleotide
  Target: LAMA2; (-) strand; PAM type: NNNNGHTT; PAM sequence: TGTTGTTT
acatgtgtctgtaaacaata

SEQ ID NO: 42078 - DNA, 20 bp, Artificial Sequence
  Description of Artificial Sequence: Synthetic oligonucleotide
  Target: LAMA2; (-) strand; PAM type: NNNNGHTT; PAM sequence: TTATGTTT
ggtaaccacaaatgtggatt

SEQ ID NO: 42079 - DNA, 20 bp, Artificial Sequence
  Description of Artificial Sequence: Synthetic oligonucleotide
  Target: LAMA2; (-) strand; PAM type: NNNNGHTT; PAM sequence: TGTGGATT
atctcagaggtaaccacaaa

SEQ ID NO: 42080 - DNA, 20 bp, Artificial Sequence
  Description of Artificial Sequence: Synthetic oligonucleotide
  Target: LAMA2; (-) strand; PAM type: NNNNGHTT; PAM sequence: CCTTGCTT
gtttctttctaataccatct

SEQ ID NO: 42081 - DNA, 20 bp, Artificial Sequence
  Description of Artificial Sequence: Synthetic oligonucleotide
  Target: LAMA2; (-) strand; PAM type: NNNNGHTT; PAM sequence: ATGAGTTT
acaataccattgcatctctt

SEQ ID NO: 42082 - DNA, 20 bp, Artificial Sequence
  Description of Artificial Sequence: Synthetic oligonucleotide
  Target: LAMA2; (-) strand; PAM type: NNNNGHTT; PAM sequence: TAGTGCTT
atttgtattttatatttatt

SEQ ID NO: 42083 - DNA, 20 bp, Artificial Sequence
  Description of Artificial Sequence: Synthetic oligonucleotide
  Target: LAMA2; (-) strand; PAM type: NNNNGHTT; PAM sequence: AAAAGTTT
tatcatttgcaatatgagaa

SEQ ID NO: 42084 - DNA, 20 bp, Artificial Sequence
  Description of Artificial Sequence: Synthetic oligonucleotide
  Target: LAMA2; (-) strand; PAM type: NNNNGHTT; PAM sequence: ACTAGCTT
gatctggtattcttattata

SEQ ID NO: 42085 - DNA, 20 bp, Artificial Sequence
  Description of Artificial Sequence: Synthetic oligonucleotide
  Target: LAMA2; (-) strand; PAM type: NNNNGHTT; PAM sequence: TAGTGTTT
agaaatttggagccagtagg

SEQ ID NO: 42086 - DNA, 20 bp, Artificial Sequence
  Description of Artificial Sequence: Synthetic oligonucleotide
  Target: LAMA2; (-) strand; PAM type: NNNNGHTT; PAM sequence: TGGTGATT
ttaagcactatcctgaaagc

SEQ ID NO: 42087 - DNA, 20 bp, Artificial Sequence
  Description of Artificial Sequence: Synthetic oligonucleotide
  Target: LAMA2; (-) strand; PAM type: NNNNGHTT; PAM sequence: ATCTGTTT
ttgtaattgttttaatagga

SEQ ID NO: 42088 - DNA, 20 bp, Artificial Sequence
  Description of Artificial Sequence: Synthetic oligonucleotide
  Target: LAMA2; (-) strand; PAM type: NNNNGHTT; PAM sequence: AATTGTTT
acatagtgttttcttattgt

SEQ ID NO: 42089 - DNA, 20 bp, Artificial Sequence
  Description of Artificial Sequence: Synthetic oligonucleotide
  Target: LAMA2; (-) strand; PAM type: NNNNGHTT; PAM sequence: TAGTGTTT
ttactttatactatactaca

SEQ ID NO: 42090 - DNA, 20 bp, Artificial Sequence
  Description of Artificial Sequence: Synthetic oligonucleotide
  Target: LAMA2; (-) strand; PAM type: NNNNGHTT; PAM sequence: GTTAGCTT
actctatgggtatcaaaacc

SEQ ID NO: 42091 - DNA, 20 bp, Artificial Sequence
  Description of Artificial Sequence: Synthetic oligonucleotide
  Target: LAMA2; (-) strand; PAM type: NNNNGHTT; PAM sequence: GATGGTTT
taaaaattccttagctcatg

SEQ ID NO: 42092 - DNA, 20 bp, Artificial Sequence
  Description of Artificial Sequence: Synthetic oligonucleotide
  Target: LAMA2; (-) strand; PAM type: NNNNGHTT; PAM sequence: GACAGATT
gagtcatctatggtggtaga

SEQ ID NO: 42093 - DNA, 20 bp, Artificial Sequence
  Description of Artificial Sequence: Synthetic oligonucleotide
  Target: LAMA2; (-) strand; PAM type: NNNNGHTT; PAM sequence: TGTGGTTT
actgttactatagcaaccag

SEQ ID NO: 42094 - DNA, 20 bp, Artificial Sequence
  Description of Artificial Sequence: Synthetic oligonucleotide
  Target: LAMA2; (-) strand; PAM type: NNNNGHTT; PAM sequence: GCCTGCTT
aatttttcatccacaagcat

SEQ ID NO: 42095 - DNA, 20 bp, Artificial Sequence
  Description of Artificial Sequence: Synthetic oligonucleotide
  Target: LAMA2; (-) strand; PAM type: NNNNGHTT; PAM sequence: GCTAGCTT
cttatattcacaagtggaca

SEQ ID NO: 42096 - DNA, 20 bp, Artificial Sequence
  Description of Artificial Sequence: Synthetic oligonucleotide
  Target: LAMA2; (-) strand; PAM type: NNNNGHTT; PAM sequence: CTGTGCTT
tgtgatgctgaaagtaacag

SEQ ID NO: 42097 - DNA, 20 bp, Artificial Sequence
  Description of Artificial Sequence: Synthetic oligonucleotide
  Target: LAMA2; (-) strand; PAM type: NNNNGHTT; PAM sequence: AGCAGATT
aatatagcagttctctgcaa

SEQ ID NO: 42098 - DNA, 20 bp, Artificial Sequence
  Description of Artificial Sequence: Synthetic oligonucleotide
  Target: LAMA2; (-) strand; PAM type: NNNNGHTT; PAM sequence: TTTTGCTT
tctttctaatcatttaccat

SEQ ID NO: 42099 - DNA, 20 bp, Artificial Sequence
  Description of Artificial Sequence: Synthetic oligonucleotide
  Target: LAMA2; (-) strand; PAM type: NNNNGHTT; PAM sequence: AACGGTTT
attaagactttattttctca

SEQ ID NO: 42100 - DNA, 20 bp, Artificial Sequence
  Description of Artificial Sequence: Synthetic oligonucleotide
  Target: LAMA2; (-) strand; PAM type: NNNNGHTT; PAM sequence: TAGAGATT
tctcatttatggcttagctt

SEQ ID NO: 42101 - DNA, 20 bp, Artificial Sequence
  Description of Artificial Sequence: Synthetic oligonucleotide
  Target: LAMA2; (-) strand; PAM type: NNNNGHTT; PAM sequence: CTTAGCTT
aacagaagtctcatttatgg

SEQ ID NO: 42102 - DNA, 20 bp, Artificial Sequence
  Description of Artificial Sequence: Synthetic oligonucleotide
  Target: LAMA2; (-) strand; PAM type: NNNNGHTT; PAM sequence: TATGGCTT
gattaaacagaagtctcatt

SEQ ID NO: 42103 - DNA, 20 bp, Artificial Sequence
  Description of Artificial Sequence: Synthetic oligonucleotide
  Target: LAMA2; (-) strand; PAM type: NNNNGHTT; PAM sequence: TGAAGATT
ctgcaacagcaagtggttat

SEQ ID NO: 42104 - DNA, 20 bp, Artificial Sequence
  Description of Artificial Sequence: Synthetic oligonucleotide
  Target: LAMA2; (-) strand; PAM type: NNNNGHTT; PAM sequence: AACAGATT
aatgttctcttccatcatga

SEQ ID NO: 42105 - DNA, 20 bp, Artificial Sequence
  Description of Artificial Sequence: Synthetic oligonucleotide
  Target: LAMA2; (-) strand; PAM type: NNNNGHTT; PAM sequence: TTTGGTTT
ttatagcttcagaaaatgca

SEQ ID NO: 42106 - DNA, 20 bp, Artificial Sequence
  Description of Artificial Sequence: Synthetic oligonucleotide
  Target: LAMA2; (-) strand; PAM type: NNNNGHTT; PAM sequence: TATAGCTT
agggagggatttttcttatt

SEQ ID NO: 42107 - DNA, 20 bp, Artificial Sequence
  Description of Artificial Sequence: Synthetic oligonucleotide
  Target: LAMA2; (-) strand; PAM type: NNNNGHTT; PAM sequence: GAGGGATT
atatttaagaggggcagagg

SEQ ID NO: 42108 - DNA, 20 bp, Artificial Sequence
  Description of Artificial Sequence: Synthetic oligonucleotide
  Target: LAMA2; (-) strand; PAM type: NNNNGHTT; PAM sequence: GTGAGTTT
ggctccagtggagctgattt

SEQ ID NO: 42109 - DNA, 20 bp, Artificial Sequence
  Description of Artificial Sequence: Synthetic oligonucleotide
  Target: LAMA2; (-) strand; PAM type: NNNNGHTT; PAM sequence: AGCTGATT
aagcctgctggctccagtgg

SEQ ID NO: 42110 - DNA, 20 bp, Artificial Sequence
  Description of Artificial Sequence: Synthetic oligonucleotide
  Target: LAMA2; (-) strand; PAM type: NNNNGHTT; PAM sequence: AACTGCTT
gacagctaagcagctgccat

SEQ ID NO: 42111 - DNA, 20 bp, Artificial Sequence
  Description of Artificial Sequence: Synthetic oligonucleotide
  Target: LAMA2; (-) strand; PAM type: NNNNGHTT; PAM sequence: CCTTGATT
gcagtcattttcctcccctc

SEQ ID NO: 42112 - DNA, 20 bp, Artificial Sequence
  Description of Artificial Sequence: Synthetic oligonucleotide
  Target: LAMA2; (-) strand; PAM type: NNNNGHTT; PAM sequence: GGTAGATT
agggctggggcaagcactct

SEQ ID NO: 42113 - DNA, 20 bp, Artificial Sequence
  Description of Artificial Sequence: Synthetic oligonucleotide
  Target: LAMA2; (-) strand; PAM type: NNNNGHTT; PAM sequence: ATCAGTTT
gcagcattctaaagaaagtc

SEQ ID NO: 42114 - DNA, 20 bp, Artificial Sequence
  Description of Artificial Sequence: Synthetic oligonucleotide
  Target: LAMA2; (-) strand; PAM type: NNNNGHTT; PAM sequence: TTCTGTTT
aacccctgaagtctctgggc

SEQ ID NO: 42115 - DNA, 20 bp, Artificial Sequence
  Description of Artificial Sequence: Synthetic oligonucleotide
  Target: LAMA2; (-) strand; PAM type: NNNNGHTT; PAM sequence: CTGGGCTT
ggtctgaacccctgaagtct

SEQ ID NO: 42116 - DNA, 20 bp, Artificial Sequence
  Description of Artificial Sequence: Synthetic oligonucleotide
  Target: LAMA2; (-) strand; PAM type: NNNNGHTT; PAM sequence: GCTGGCTT
ttcagtctgataaatggatt

SEQ ID NO: 42117 - DNA, 20 bp, Artificial Sequence
  Description of Artificial Sequence: Synthetic oligonucleotide
  Target: LAMA2; (-) strand; PAM type: NNNNGHTT; PAM sequence: AATGGATT
tctatgtcttcagtctgata

SEQ ID NO: 42118 - DNA, 20 bp, Artificial Sequence
  Description of Artificial Sequence: Synthetic oligonucleotide
  Target: LAMA2; (-) strand; PAM type: NNNNGHTT; PAM sequence: ATTGGATT
gtgttttgaggcctcatcaa

SEQ ID NO: 42119 - DNA, 20 bp, Artificial Sequence
  Description of Artificial Sequence: Synthetic oligonucleotide
  Target: LAMA2; (-) strand; PAM type: NNNNGHTT; PAM sequence: CTGTGTTT
gttgcatttaaaagtatcct

SEQ ID NO: 42120 - DNA, 20 bp, Artificial Sequence
  Description of Artificial Sequence: Synthetic oligonucleotide
  Target: LAMA2; (-) strand; PAM type: NNNNGHTT; PAM sequence: ATTGGCTT
gtctttcactgcaggatagt

SEQ ID NO: 42121 - DNA, 20 bp, Artificial Sequence
  Description of Artificial Sequence: Synthetic oligonucleotide
  Target: LAMA2; (-) strand; PAM type: NNNNGHTT; PAM sequence: AAATGTTT
gaaatctttattgcttatct

SEQ ID NO: 42122 - DNA, 20 bp, Artificial Sequence
  Description of Artificial Sequence: Synthetic oligonucleotide
  Target: LAMA2; (-) strand; PAM type: NNNNGHTT; PAM sequence: TATTGCTT
cttagaaggtaagaaatctt

SEQ ID NO: 42123 - DNA, 20 bp, Artificial Sequence
  Description of Artificial Sequence: Synthetic oligonucleotide
  Target: LAMA2; (-) strand; PAM type: NNNNGHTT; PAM sequence: TGTTGTTT
ataaaaactgaggaaagctt

SEQ ID NO: 42124 - DNA, 20 bp, Artificial Sequence
  Description of Artificial Sequence: Synthetic oligonucleotide
  Target: LAMA2; (-) strand; PAM type: NNNNGHTT; PAM sequence: GAAAGCTT
taataataataaaaactgag

SEQ ID NO: 42125 - DNA, 20 bp, Artificial Sequence
  Description of Artificial Sequence: Synthetic oligonucleotide
  Target: LAMA2; (-) strand; PAM type: NNNNGHTT; PAM sequence: GAACGCTT
tctcagtagccattctgcat

SEQ ID NO: 42126 - DNA, 20 bp, Artificial Sequence
  Description of Artificial Sequence: Synthetic oligonucleotide
  Target: LAMA2; (-) strand; PAM type: NNNNGHTT; PAM sequence: CATGGTTT
gatccctcatttgtctcgat

SEQ ID NO: 42127 - DNA, 20 bp, Artificial Sequence
  Description of Artificial Sequence: Synthetic oligonucleotide
  Target: LAMA2; (-) strand; PAM type: NNNNGHTT; PAM sequence: CTCAGTTT
ctgttagattagtaaaagtt

SEQ ID NO: 42128 - DNA, 20 bp, Artificial Sequence
  Description of Artificial Sequence: Synthetic oligonucleotide
  Target: LAMA2; (-) strand; PAM type: NNNNGHTT; PAM sequence: GTTAGATT
catgactacaatatctggct

SEQ ID NO: 42129 - DNA, 20 bp, Artificial Sequence
  Description of Artificial Sequence: Synthetic oligonucleotide
  Target: LAMA2; (-) strand; PAM type: NNNNGHTT; PAM sequence: TTCAGTTT
ctaagattcaaatgagagca

SEQ ID NO: 42130 - DNA, 20 bp, Artificial Sequence
  Description of Artificial Sequence: Synthetic oligonucleotide
  Target: LAMA2; (-) strand; PAM type: NNNNGHTT; PAM sequence: CTAAGATT
aaccaggattctaaagcatt

SEQ ID NO: 42131 - DNA, 20 bp, Artificial Sequence
  Description of Artificial Sequence: Synthetic oligonucleotide
  Target: LAMA2; (-) strand; PAM type: NNNNGHTT; PAM sequence: CCAGGATT
aatctagaagacatgtgaaa

SEQ ID NO: 42132 - DNA, 20 bp, Artificial Sequence
  Description of Artificial Sequence: Synthetic oligonucleotide
  Target: LAMA2; (-) strand; PAM type: NNNNGHTT; PAM sequence: TAAAGTTT
ctttccgcaatgaaaaggat

SEQ ID NO: 42133 - DNA, 20 bp, Artificial Sequence
  Description of Artificial Sequence: Synthetic oligonucleotide
  Target: LAMA2; (-) strand; PAM type: NNNNGHTT; PAM sequence: AAAGGATT
aaaagtcctttccgcaatga

SEQ ID NO: 42134 - DNA, 20 bp, Artificial Sequence
  Description of Artificial Sequence: Synthetic oligonucleotide
  Target: LAMA2; (-) strand; PAM type: NNNNGHTT; PAM sequence: TAAAGTTT
tgtgagccaccacgcccggc

SEQ ID NO: 42135 - DNA, 20 bp, Artificial Sequence
  Description of Artificial Sequence: Synthetic oligonucleotide
  Target: LAMA2; (-) strand; PAM type: NNNNGHTT; PAM sequence: CTGGGATT
tgccttggcctcccaaagtg

SEQ ID NO: 42136 - DNA, 20 bp, Artificial Sequence
  Description of Artificial Sequence: Synthetic oligonucleotide
  Target: LAMA2; (-) strand; PAM type: NNNNGHTT; PAM sequence: CGGGGTTT
ttttgcatttttagtagaga

SEQ ID NO: 42137 - DNA, 20 bp, Artificial Sequence
  Description of Artificial Sequence: Synthetic oligonucleotide
  Target: LAMA2; (-) strand; PAM type: NNNNGHTT; PAM sequence: TAATGTTT
cgcctaccaccatgtctggc

SEQ ID NO: 42138 - DNA, 20 bp, Artificial Sequence
  Description of Artificial Sequence: Synthetic oligonucleotide
  Target: LAMA2; (-) strand; PAM type: NNNNGHTT; PAM sequence: CTGTGATT
tgcctcagcctccagagtag

SEQ ID NO: 42139 - DNA, 20 bp, Artificial Sequence
  Description of Artificial Sequence: Synthetic oligonucleotide
  Target: LAMA2; (-) strand; PAM type: NNNNGHTT; PAM sequence: CCTGGTTT
ctcactgaaacctctgtccc

SEQ ID NO: 42140 - DNA, 20 bp, Artificial Sequence
  Description of Artificial Sequence: Synthetic oligonucleotide
  Target: LAMA2; (-) strand; PAM type: NNNNGHTT; PAM sequence: TTTTGTTT
gtttaaatgtttttgttttg

SEQ ID NO: 42141 - DNA, 20 bp, Artificial Sequence
  Description of Artificial Sequence: Synthetic oligonucleotide
  Target: LAMA2; (-) strand; PAM type: NNNNGHTT; PAM sequence: TTTTGTTT
ttaaagtttaaatgtttttg

SEQ ID NO: 42142 - DNA, 20 bp, Artificial Sequence
  Description of Artificial Sequence: Synthetic oligonucleotide
  Target: LAMA2; (-) strand; PAM type: NNNNGHTT; PAM sequence: TTTTGTTT
attccttaaagtttaaatgt

SEQ ID NO: 42143 - DNA, 20 bp, Artificial Sequence
  Description of Artificial Sequence: Synthetic oligonucleotide
  Target: LAMA2; (-) strand; PAM type: NNNNGHTT; PAM sequence: AAATGTTT
attgaaattccttaaagttt

SEQ ID NO: 42144 - DNA, 20 bp, Artificial Sequence
  Description of Artificial Sequence: Synthetic oligonucleotide
  Target: LAMA2; (-) strand; PAM type: NNNNGHTT; PAM sequence: TAAAGTTT
agttacttattgaaattcct

SEQ ID NO: 42145 - DNA, 20 bp, Artificial Sequence
  Description of Artificial Sequence: Synthetic oligonucleotide
  Target: LAMA2; (-) strand; PAM type: NNNNGHTT; PAM sequence: GAGTGATT
tcaacaaaataacacatttt

SEQ ID NO: 42146 - DNA, 20 bp, Artificial Sequence
  Description of Artificial Sequence: Synthetic oligonucleotide
  Target: LAMA2; (-) strand; PAM type: NNNNGHTT; PAM sequence: GTTGGATT
ctgagcttaatcaaataaag

SEQ ID NO: 42147 - DNA, 20 bp, Artificial Sequence
  Description of Artificial Sequence: Synthetic oligonucleotide
  Target: LAMA2; (-) strand; PAM type: NNNNGHTT; PAM sequence: CTGAGCTT
ttccagtgatgtactatata

SEQ ID NO: 42148 - DNA, 20 bp, Artificial Sequence
  Description of Artificial Sequence: Synthetic oligonucleotide
  Target: LAMA2; (-) strand; PAM type: NNNNGHTT; PAM sequence: ACTGGTTT
tatggccaattaactaaatg

SEQ ID NO: 42149 - DNA, 20 bp, Artificial Sequence
  Description of Artificial Sequence: Synthetic oligonucleotide
  Target: LAMA2; (-) strand; PAM type: NNNNGHTT; PAM sequence: GTTCGTTT
taacaatgaatggcaaaact

SEQ ID NO: 42150 - DNA, 20 bp, Artificial Sequence
  Description of Artificial Sequence: Synthetic oligonucleotide
  Target: LAMA2; (-) strand; PAM type: NNNNGHTT; PAM sequence: TACTGTTT
cattatggtagcaaatgtat

SEQ ID NO: 42151 - DNA, 20 bp, Artificial Sequence
  Description of Artificial Sequence: Synthetic oligonucleotide
  Target: LAMA2; (-) strand; PAM type: NNNNGHTT; PAM sequence: AGTAGATT
aatgtggcacttgcttatag

SEQ ID NO: 42152 - DNA, 20 bp, Artificial Sequence
  Description of Artificial Sequence: Synthetic oligonucleotide
  Target: LAMA2; (-) strand; PAM type: NNNNGHTT; PAM sequence: ACTTGCTT
gtcaatcagtttaatgtggc

SEQ ID NO: 42153 - DNA, 20 bp, Artificial Sequence
  Description of Artificial Sequence: Synthetic oligonucleotide
  Target: LAMA2; (-) strand; PAM type: NNNNGHTT; PAM sequence: ATCAGTTT
tcacttgcgatctctggtca

SEQ ID NO: 42154 - DNA, 20 bp, Artificial Sequence
  Description of Artificial Sequence: Synthetic oligonucleotide
  Target: LAMA2; (-) strand; PAM type: NNNNGHTT; PAM sequence: ACATGATT
ctggtcctgttatttgtagt

SEQ ID NO: 42155 - DNA, 20 bp, Artificial Sequence
  Description of Artificial Sequence: Synthetic oligonucleotide
  Target: LAMA2; (-) strand; PAM type: NNNNGHTT; PAM sequence: CCAGGATT
tattaaagctatcattttgt

SEQ ID NO: 42156 - DNA, 20 bp, Artificial Sequence
  Description of Artificial Sequence: Synthetic oligonucleotide
  Target: LAMA2; (-) strand; PAM type: NNNNGHTT; PAM sequence: CCCAGTTT
gcttcttgagaagcttggcc

SEQ ID NO: 42157 - DNA, 20 bp, Artificial Sequence
  Description of Artificial Sequence: Synthetic oligonucleotide
  Target: LAMA2; (-) strand; PAM type: NNNNGHTT; PAM sequence: AGAAGCTT
aagggagaaggagcttcttg

SEQ ID NO: 42158 - DNA, 20 bp, Artificial Sequence
  Description of Artificial Sequence: Synthetic oligonucleotide
  Target: LAMA2; (-) strand; PAM type: NNNNGHTT; PAM sequence: AGGAGCTT
gaggcagaggacaagggaga

SEQ ID NO: 42159 - DNA, 20 bp, Artificial Sequence
  Description of Artificial Sequence: Synthetic oligonucleotide
  Target: LAMA2; (-) strand; PAM type: NNNNGHTT; PAM sequence: GGGAGATT
tagataccaaagtgactaaa

SEQ ID NO: 42160 - DNA, 20 bp, Artificial Sequence
  Description of Artificial Sequence: Synthetic oligonucleotide
  Target: LAMA2; (-) strand; PAM type: NNNNGHTT; PAM sequence: TGATGTTT
tacttcaggctcttagggtt

SEQ ID NO: 42161 - DNA, 20 bp, Artificial Sequence
  Description of Artificial Sequence: Synthetic oligonucleotide
  Target: LAMA2; (-) strand; PAM type: NNNNGHTT; PAM sequence: TAGGGTTT
aagtaactacttcaggctct

SEQ ID NO: 42162 - DNA, 20 bp, Artificial Sequence
  Description of Artificial Sequence: Synthetic oligonucleotide
  Target: LAMA2; (-) strand; PAM type: NNNNGHTT; PAM sequence: ATTTGCTT
tcagttcagttgcttgtcct

SEQ ID NO: 42163 - DNA, 20 bp, Artificial Sequence
  Description of Artificial Sequence: Synthetic oligonucleotide
  Target: LAMA2; (-) strand; PAM type: NNNNGHTT; PAM sequence: AGTTGCTT
ccagaagaaaaactcagttc

SEQ ID NO: 42164 - DNA, 20 bp, Artificial Sequence
  Description of Artificial Sequence: Synthetic oligonucleotide
  Target: LAMA2; (-) strand; PAM type: NNNNGHTT; PAM sequence: GAAAGCTT
tatttctgtacctgtgtgaa

SEQ ID NO: 42165 - DNA, 20 bp, Artificial Sequence
  Description of Artificial Sequence: Synthetic oligonucleotide
  Target: LAMA2; (-) strand; PAM type: NNNNGHTT; PAM sequence: TTCTGTTT
taaatagaatctaatctttt

SEQ ID NO: 42166 - DNA, 20 bp, Artificial Sequence
  Description of Artificial Sequence: Synthetic oligonucleotide
  Target: LAMA2; (-) strand; PAM type: NNNNGHTT; PAM sequence: TAATGTTT
atattaagagaaatgtgtcc

SEQ ID NO: 42167 - DNA, 20 bp, Artificial Sequence
  Description of Artificial Sequence: Synthetic oligonucleotide
  Target: LAMA2; (-) strand; PAM type: NNNNGHTT; PAM sequence: GTTGGATT
ttttttttaaaaccatatca

SEQ ID NO: 42168 - DNA, 20 bp, Artificial Sequence
  Description of Artificial Sequence: Synthetic oligonucleotide
  Target: LAMA2; (-) strand; PAM type: NNNNGHTT; PAM sequence: TTAAGATT
tatttgtttggaatgtgggt

SEQ ID NO: 42169 - DNA, 20 bp, Artificial Sequence
  Description of Artificial Sequence: Synthetic oligonucleotide
  Target: LAMA2; (-) strand; PAM type: NNNNGHTT; PAM sequence: GTGGGTTT
atttcttatttgtttggaat

SEQ ID NO: 42170 - DNA, 20 bp, Artificial Sequence
  Description of Artificial Sequence: Synthetic oligonucleotide
  Target: LAMA2; (-) strand; PAM type: NNNNGHTT; PAM sequence: ATTTGTTT
ttacttataccctatttctt

SEQ ID NO: 42171 - DNA, 20 bp, Artificial Sequence
  Description of Artificial Sequence: Synthetic oligonucleotide
  Target: LAMA2; (-) strand; PAM type: NNNNGHTT; PAM sequence: ACTTGATT
attcttagagtttcataatt

SEQ ID NO: 42172 - DNA, 20 bp, Artificial Sequence
  Description of Artificial Sequence: Synthetic oligonucleotide
  Target: LAMA2; (-) strand; PAM type: NNNNGHTT; PAM sequence: TAGAGTTT
cagtttcagtggctgattct

SEQ ID NO: 42173 - DNA, 20 bp, Artificial Sequence
  Description of Artificial Sequence: Synthetic oligonucleotide
  Target: LAMA2; (-) strand; PAM type: NNNNGHTT; PAM sequence: GGCTGATT
tttttttttacagtttcagt

SEQ ID NO: 42174 - DNA, 20 bp, Artificial Sequence
  Description of Artificial Sequence: Synthetic oligonucleotide
  Target: LAMA2; (-) strand; PAM type: NNNNGHTT; PAM sequence: TACAGTTT
tcagctttattttttttttt

SEQ ID NO: 42175 - DNA, 20 bp, Artificial Sequence
  Description of Artificial Sequence: Synthetic oligonucleotide
  Target: LAMA2; (-) strand; PAM type: NNNNGHTT; PAM sequence: GTCAGCTT
ttactttagtattgtaatag

SEQ ID NO: 42176 - DNA, 20 bp, Artificial Sequence
  Description of Artificial Sequence: Synthetic oligonucleotide
  Target: LAMA2; (-) strand; PAM type: NNNNGHTT; PAM sequence: AACAGCTT
tttttaaaaagtatttattt

SEQ ID NO: 42177 - DNA, 20 bp, Artificial Sequence
  Description of Artificial Sequence: Synthetic oligonucleotide
  Target: LAMA2; (-) strand; PAM type: NNNNGHTT; PAM sequence: GTGTGTTT
atatgtccattatgattctg

SEQ ID NO: 42178 - DNA, 20 bp, Artificial Sequence
  Description of Artificial Sequence: Synthetic oligonucleotide
  Target: LAMA2; (-) strand; PAM type: NNNNGHTT; PAM sequence: TTATGATT
ggacattgccaatatgtcca

SEQ ID NO: 42179 - DNA, 20 bp, Artificial Sequence
  Description of Artificial Sequence: Synthetic oligonucleotide
  Target: LAMA2; (-) strand; PAM type: NNNNGHTT; PAM sequence: TTTAGTTT
catcaaatctagatcatttc

SEQ ID NO: 42180 - DNA, 20 bp, Artificial Sequence
  Description of Artificial Sequence: Synthetic oligonucleotide
  Target: LAMA2; (-) strand; PAM type: NNNNGHTT; PAM sequence: AAGGGATT
aacagcggaaaatattaatt

SEQ ID NO: 42181 - DNA, 20 bp, Artificial Sequence
  Description of Artificial Sequence: Synthetic oligonucleotide
  Target: LAMA2; (-) strand; PAM type: NNNNGHTT; PAM sequence: GGAAGCTT
ctggaattaagtactagtgt

SEQ ID NO: 42182 - DNA, 20 bp, Artificial Sequence
  Description of Artificial Sequence: Synthetic oligonucleotide
  Target: LAMA2; (-) strand; PAM type: NNNNGHTT; PAM sequence: GTGGGCTT
ggtggtgatggagaatgagt

SEQ ID NO: 42183 - DNA, 20 bp, Artificial Sequence
  Description of Artificial Sequence: Synthetic oligonucleotide
  Target: LAMA2; (-) strand; PAM type: NNNNGHTT; PAM sequence: TCTTGATT
caaggagagtaaatctctgt

SEQ ID NO: 42184 - DNA, 20 bp, Artificial Sequence
  Description of Artificial Sequence: Synthetic oligonucleotide
  Target: LAMA2; (-) strand; PAM type: NNNNGHTT; PAM sequence: TAAAGATT
tgaaggatataagcctctgt

SEQ ID NO: 42185 - DNA, 20 bp, Artificial Sequence
  Description of Artificial Sequence: Synthetic oligonucleotide
  Target: LAMA2; (-) strand; PAM type: NNNNGHTT; PAM sequence: TAAGGTTT
acatgatatcacagggcttc

SEQ ID NO: 42186 - DNA, 20 bp, Artificial Sequence
  Description of Artificial Sequence: Synthetic oligonucleotide
  Target: LAMA2; (-) strand; PAM type: NNNNGHTT; PAM sequence: CAGGGCTT
ttcttagcaacatgatatca

SEQ ID NO: 42187 - DNA, 20 bp, Artificial Sequence
  Description of Artificial Sequence: Synthetic oligonucleotide
  Target: LAMA2; (-) strand; PAM type: NNNNGHTT; PAM sequence: GGTGGTTT
gcttccttgctaagagtgtc

SEQ ID NO: 42188 - DNA, 20 bp, Artificial Sequence
  Description of Artificial Sequence: Synthetic oligonucleotide
  Target: LAMA2; (-) strand; PAM type: NNNNGHTT; PAM sequence: TTCAGCTT
tgttggcaaaacccaggagg

SEQ ID NO: 42189 - DNA, 20 bp, Artificial Sequence
  Description of Artificial Sequence: Synthetic oligonucleotide
  Target: LAMA2; (-) strand; PAM type: NNNNGHTT; PAM sequence: TGAGGTTT
agggggaaatgacatacttt

SEQ ID NO: 42190 - DNA, 20 bp, Artificial Sequence
  Description of Artificial Sequence: Synthetic oligonucleotide
  Target: LAMA2; (-) strand; PAM type: NNNNGHTT; PAM sequence: TTTAGTTT
tgaagaagggaccggtaaaa

SEQ ID NO: 42191 - DNA, 20 bp, Artificial Sequence
  Description of Artificial Sequence: Synthetic oligonucleotide
  Target: LAMA2; (-) strand; PAM type: NNNNGHTT; PAM sequence: AATGGATT
agtaagagaaagggacaaaa

SEQ ID NO: 42192 - DNA, 20 bp, Artificial Sequence
  Description of Artificial Sequence: Synthetic oligonucleotide
  Target: LAMA2; (-) strand; PAM type: NNNNGHTT; PAM sequence: AATGGATT
tcactagcctggggatcatg

SEQ ID NO: 42193 - DNA, 20 bp, Artificial Sequence
  Description of Artificial Sequence: Synthetic oligonucleotide
  Target: LAMA2; (-) strand; PAM type: NNNNGHTT; PAM sequence: TTGAGTTT
ttttgttccggaagcaagtt

SEQ ID NO: 42194 - DNA, 20 bp, Artificial Sequence
  Description of Artificial Sequence: Synthetic oligonucleotide
  Target: LAMA2; (-) strand; PAM type: NNNNGHTT; PAM sequence: GCAAGTTT
ttttctcttttgttccggaa

SEQ ID NO: 42195 - DNA, 20 bp, Artificial Sequence
  Description of Artificial Sequence: Synthetic oligonucleotide
  Target: LAMA2; (-) strand; PAM type: NNNNGHTT; PAM sequence: ATTTGCTT
ctgtttcattaattttccta

SEQ ID NO: 42196 - DNA, 20 bp, Artificial Sequence
  Description of Artificial Sequence: Synthetic oligonucleotide
  Target: LAMA2; (-) strand; PAM type: NNNNGHTT; PAM sequence: GGCTGTTT
ttgcaatgattttccttagt

SEQ ID NO: 42197 - DNA, 20 bp, Artificial Sequence
  Description of Artificial Sequence: Synthetic oligonucleotide
  Target: LAMA2; (-) strand; PAM type: NNNNGHTT; PAM sequence: CAATGATT
accctgctaattgttccttg

SEQ ID NO: 42198 - DNA, 20 bp, Artificial Sequence
  Description of Artificial Sequence: Synthetic oligonucleotide
  Target: LAMA2; (-) strand; PAM type: NNNNGHTT; PAM sequence: GATGGCTT
cttttataaagaatgtagct

SEQ ID NO: 42199 - DNA, 20 bp, Artificial Sequence
  Description of Artificial Sequence: Synthetic oligonucleotide
  Target: LAMA2; (-) strand; PAM type: NNNNGHTT; PAM sequence: CTTAGATT
acaaaccatgctcctgagag

SEQ ID NO: 42200 - DNA, 20 bp, Artificial Sequence
  Description of Artificial Sequence: Synthetic oligonucleotide
  Target: LAMA2; (-) strand; PAM type: NNNNGHTT; PAM sequence: GAGAGCTT
agggaacaaaccatgctcct

SEQ ID NO: 42201 - DNA, 20 bp, Artificial Sequence
  Description of Artificial Sequence: Synthetic oligonucleotide
  Target: LAMA2; (-) strand; PAM type: NNNNGHTT; PAM sequence: GCAGGTTT
gtctaaccgtataagggttg

SEQ ID NO: 42202 - DNA, 20 bp, Artificial Sequence
  Description of Artificial Sequence: Synthetic oligonucleotide
  Target: LAMA2; (-) strand; PAM type: NNNNGHTT; PAM sequence: TGAGGCTT
acacatgagcctgtgagaac

SEQ ID NO: 42203 - DNA, 20 bp, Artificial Sequence
  Description of Artificial Sequence: Synthetic oligonucleotide
  Target: LAMA2; (-) strand; PAM type: NNNNGHTT; PAM sequence: GAAAGTTT
ctccctcgttcactcttcct

SEQ ID NO: 42204 - DNA, 20 bp, Artificial Sequence
  Description of Artificial Sequence: Synthetic oligonucleotide
  Target: LAMA2; (-) strand; PAM type: NNNNGHTT; PAM sequence: GGATGCTT
cttttaagggagccaaaatt

SEQ ID NO: 42205 - DNA, 20 bp, Artificial Sequence
  Description of Artificial Sequence: Synthetic oligonucleotide
  Target: LAMA2; (-) strand; PAM type: NNNNGHTT; PAM sequence: CATAGCTT
cacccttcacccctctcaac

SEQ ID NO: 42206 - DNA, 20 bp, Artificial Sequence
  Description of Artificial Sequence: Synthetic oligonucleotide
  Target: LAMA2; (-) strand; PAM type: NNNNGHTT; PAM sequence: ATCTGATT
aataaacaagtataagtcac

SEQ ID NO: 42207 - DNA, 20 bp, Artificial Sequence
  Description of Artificial Sequence: Synthetic oligonucleotide
  Target: LAMA2; (-) strand; PAM type: NNNNGHTT; PAM sequence: TTCTGTTT
tgtcaggttttgcatgtatc

SEQ ID NO: 42208 - DNA, 20 bp, Artificial Sequence
  Description of Artificial Sequence: Synthetic oligonucleotide
  Target: LAMA2; (-) strand; PAM type: NNNNGHTT; PAM sequence: TCAGGTTT
ttcgataggctgttcaactg

SEQ ID NO: 42209 - DNA, 20 bp, Artificial Sequence
  Description of Artificial Sequence: Synthetic oligonucleotide
  Target: LAMA2; (-) strand; PAM type: NNNNGHTT; PAM sequence: AAAAGCTT
caggtggagcacccccaacg

SEQ ID NO: 42210 - DNA, 20 bp, Artificial Sequence
  Description of Artificial Sequence: Synthetic oligonucleotide
  Target: LAMA2; (-) strand; PAM type: NNNNGHTT; PAM sequence: ACAAGATT
ccacttacacagagttaata

SEQ ID NO: 42211 - DNA, 20 bp, Artificial Sequence
  Description of Artificial Sequence: Synthetic oligonucleotide
  Target: LAMA2; (-) strand; PAM type: NNNNGHTT; PAM sequence: CATTGTTT
cagtctaagttgaagatcct

SEQ ID NO: 42212 - DNA, 20 bp, Artificial Sequence
  Description of Artificial Sequence: Synthetic oligonucleotide
  Target: LAMA2; (-) strand; PAM type: NNNNGHTT; PAM sequence: GTGTGCTT
atgcctttttaagtccatta

SEQ ID NO: 42213 - DNA, 20 bp, Artificial Sequence
  Description of Artificial Sequence: Synthetic oligonucleotide
  Target: LAMA2; (-) strand; PAM type: NNNNGHTT; PAM sequence: TTTTGCTT
agatttttttattttcgttt

SEQ ID NO: 42214 - DNA, 20 bp, Artificial Sequence
  Description of Artificial Sequence: Synthetic oligonucleotide
  Target: LAMA2; (-) strand; PAM type: NNNNGHTT; PAM sequence: TTTCGTTT
aataaataagatttttttat

SEQ ID NO: 42215 - DNA, 20 bp, Artificial Sequence
  Description of Artificial Sequence: Synthetic oligonucleotide
  Target: LAMA2; (-) strand; PAM type: NNNNGHTT; PAM sequence: ATAAGATT
gggctaatagaatgtaataa

SEQ ID NO: 42216 - DNA, 20 bp, Artificial Sequence
  Description of Artificial Sequence: Synthetic oligonucleotide
  Target: LAMA2; (-) strand; PAM type: NNNNGHTT; PAM sequence: CGGAGTTT
ctgctccatcttcatcttca

SEQ ID NO: 42217 - DNA, 20 bp, Artificial Sequence
  Description of Artificial Sequence: Synthetic oligonucleotide
  Target: LAMA2; (-) strand; PAM type: NNNNGHTT; PAM sequence: ATAGGTTT
cattcaatgaagatgtaaga

SEQ ID NO: 42218 - DNA, 20 bp, Artificial Sequence
  Description of Artificial Sequence: Synthetic oligonucleotide
  Target: LAMA2; (-) strand; PAM type: NNNNGHTT; PAM sequence: TACTGTTT
caacatttcaactgaaaatg

SEQ ID NO: 42219 - DNA, 20 bp, Artificial Sequence
  Description of Artificial Sequence: Synthetic oligonucleotide
  Target: LAMA2; (-) strand; PAM type: NNNNGHTT; PAM sequence: CTGTGTTT
attcatgattctggatattt

SEQ ID NO: 42220 - DNA, 20 bp, Artificial Sequence
  Description of Artificial Sequence: Synthetic oligonucleotide
  Target: LAMA2; (-) strand; PAM type: NNNNGHTT; PAM sequence: TCATGATT
gtattataagtgtcttttat

SEQ ID NO: 42221 - DNA, 20 bp, Artificial Sequence
  Description of Artificial Sequence: Synthetic oligonucleotide
  Target: LAMA2; (-) strand; PAM type: NNNNGHTT; PAM sequence: ACTAGTTT
aacagttttagtggtgtatt

SEQ ID NO: 42222 - DNA, 20 bp, Artificial Sequence
  Description of Artificial Sequence: Synthetic oligonucleotide
  Target: LAMA2; (-) strand; PAM type: NNNNGHTT; PAM sequence: AACAGTTT
gccaccgcgcctggcctaga

SEQ ID NO: 42223 - DNA, 20 bp, Artificial Sequence
  Description of Artificial Sequence: Synthetic oligonucleotide
  Target: LAMA2; (-) strand; PAM type: NNNNGHTT; PAM sequence: CTAGGATT
tgccttggcctcccaaagtg

SEQ ID NO: 42224 - DNA, 20 bp, Artificial Sequence
  Description of Artificial Sequence: Synthetic oligonucleotide
  Target: LAMA2; (-) strand; PAM type: NNNNGHTT; PAM sequence: CGGGGTTT
tttttgtattttagaagaga

SEQ ID NO: 42225 - DNA, 20 bp, Artificial Sequence
  Description of Artificial Sequence: Synthetic oligonucleotide
  Target: LAMA2; (-) strand; PAM type: NNNNGHTT; PAM sequence: AAGCGATT
aacctccgcctcctgggttc

SEQ ID NO: 42226 - DNA, 20 bp, Artificial Sequence
  Description of Artificial Sequence: Synthetic oligonucleotide
  Target: LAMA2; (-) strand; PAM type: NNNNGHTT; PAM sequence: TACAGTTT
acatttatatgatgtttaga

SEQ ID NO: 42227 - DNA, 20 bp, Artificial Sequence
  Description of Artificial Sequence: Synthetic oligonucleotide
  Target: LAMA2; (-) strand; PAM type: NNNNGHTT; PAM sequence: TGATGTTT
attagacatacacatttata

SEQ ID NO: 42228 - DNA, 20 bp, Artificial Sequence
  Description of Artificial Sequence: Synthetic oligonucleotide
  Target: LAMA2; (-) strand; PAM type: NNNNGHTT; PAM sequence: CTGGGATT
acagatggtcggttacagtg

SEQ ID NO: 42229 - DNA, 20 bp, Artificial Sequence
  Description of Artificial Sequence: Synthetic oligonucleotide
  Target: LAMA2; (-) strand; PAM type: NNNNGHTT; PAM sequence: GGTAGCTT
actgagaaatagattggaca

SEQ ID NO: 42230 - DNA, 20 bp, Artificial Sequence
  Description of Artificial Sequence: Synthetic oligonucleotide
  Target: LAMA2; (-) strand; PAM type: NNNNGHTT; PAM sequence: AATAGATT
acttggatgggaaactgaga

SEQ ID NO: 42231 - DNA, 20 bp, Artificial Sequence
  Description of Artificial Sequence: Synthetic oligonucleotide
  Target: LAMA2; (-) strand; PAM type: NNNNGHTT; PAM sequence: AATTGTTT
tacatataatattgaatgaa

SEQ ID NO: 42232 - DNA, 20 bp, Artificial Sequence
  Description of Artificial Sequence: Synthetic oligonucleotide
  Target: LAMA2; (-) strand; PAM type: NNNNGHTT; PAM sequence: GGTTGCTT
actagtggtgtgagtgggtt

SEQ ID NO: 42233 - DNA, 20 bp, Artificial Sequence
  Description of Artificial Sequence: Synthetic oligonucleotide
  Target: LAMA2; (-) strand; PAM type: NNNNGHTT; PAM sequence: TATAGTTT
catagaggagctcatcagag

SEQ ID NO: 42234 - DNA, 20 bp, Artificial Sequence
  Description of Artificial Sequence: Synthetic oligonucleotide
  Target: LAMA2; (-) strand; PAM type: NNNNGHTT; PAM sequence: AAAAGCTT
agaataactggaaataatga

SEQ ID NO: 42235 - DNA, 20 bp, Artificial Sequence
  Description of Artificial Sequence: Synthetic oligonucleotide
  Target: LAMA2; (-) strand; PAM type: NNNNGHTT; PAM sequence: AAGAGTTT
aggaagagaatgagatattc

SEQ ID NO: 42236 - DNA, 20 bp, Artificial Sequence
  Description of Artificial Sequence: Synthetic oligonucleotide
  Target: LAMA2; (-) strand; PAM type: NNNNGHTT; PAM sequence: ACCAGTTT
aaggatgcttggagtaaata

SEQ ID NO: 42237 - DNA, 20 bp, Artificial Sequence
  Description of Artificial Sequence: Synthetic oligonucleotide
  Target: LAMA2; (-) strand; PAM type: NNNNGHTT; PAM sequence: GGATGCTT
ctattttacaaaggatgaaa

SEQ ID NO: 42238 - DNA, 20 bp, Artificial Sequence
  Description of Artificial Sequence: Synthetic oligonucleotide
  Target: LAMA2; (-) strand; PAM type: NNNNGHTT; PAM sequence: ATTTGATT
acttccgcatacattatccc

SEQ ID NO: 42239 - DNA, 20 bp, Artificial Sequence
  Description of Artificial Sequence: Synthetic oligonucleotide
  Target: LAMA2; (-) strand; PAM type: NNNNGHTT; PAM sequence: TCCAGTTT
gtctatgtgggtatgctttt

SEQ ID NO: 42240 - DNA, 20 bp, Artificial Sequence
  Description of Artificial Sequence: Synthetic oligonucleotide
  Target: LAMA2; (-) strand; PAM type: NNNNGHTT; PAM sequence: GTATGCTT
tcctcagagtgtctatgtgg

SEQ ID NO: 42241 - DNA, 20 bp, Artificial Sequence
  Description of Artificial Sequence: Synthetic oligonucleotide
  Target: LAMA2; (-) strand; PAM type: NNNNGHTT; PAM sequence: CAGGGATT
tagtagttattcactaaatg

SEQ ID NO: 42242 - DNA, 20 bp, Artificial Sequence
  Description of Artificial Sequence: Synthetic oligonucleotide
  Target: LAMA2; (-) strand; PAM type: NNNNGHTT; PAM sequence: GACAGCTT
ggaactaaccccccatgact

SEQ ID NO: 42243 - DNA, 20 bp, Artificial Sequence
  Description of Artificial Sequence: Synthetic oligonucleotide
  Target: LAMA2; (-) strand; PAM type: NNNNGHTT; PAM sequence: GAATGCTT
atccatgtggcagatctcag

SEQ ID NO: 42244 - DNA, 20 bp, Artificial Sequence
  Description of Artificial Sequence: Synthetic oligonucleotide
  Target: LAMA2; (-) strand; PAM type: NNNNGHTT; PAM sequence: ACATGATT
tgtttatgagtctgagaaac

SEQ ID NO: 42245 - DNA, 20 bp, Artificial Sequence
  Description of Artificial Sequence: Synthetic oligonucleotide
  Target: LAMA2; (-) strand; PAM type: NNNNGHTT; PAM sequence: ACATGTTT
ttctaattcttcaactgaaa

SEQ ID NO: 42246 - DNA, 20 bp, Artificial Sequence
  Description of Artificial Sequence: Synthetic oligonucleotide
  Target: LAMA2; (-) strand; PAM type: NNNNGHTT; PAM sequence: TGATGTTT
aaaaaagtttattcaactca

SEQ ID NO: 42247 - DNA, 20 bp, Artificial Sequence
  Description of Artificial Sequence: Synthetic oligonucleotide
  Target: LAMA2; (-) strand; PAM type: NNNNGHTT; PAM sequence: AAAAGTTT
acattaggatccaaggtcaa

SEQ ID NO: 42248 - DNA, 20 bp, Artificial Sequence
  Description of Artificial Sequence: Synthetic oligonucleotide
  Target: LAMA2; (-) strand; PAM type: NNNNGHTT; PAM sequence: GGCTGTTT
agttagtcatttagaaatta

SEQ ID NO: 42249 - DNA, 20 bp, Artificial Sequence
  Description of Artificial Sequence: Synthetic oligonucleotide
  Target: LAMA2; (-) strand; PAM type: NNNNGHTT; PAM sequence: TTTAGTTT
tctttagggctcttgccaat

SEQ ID NO: 42250 - DNA, 20 bp, Artificial Sequence
  Description of Artificial Sequence: Synthetic oligonucleotide
  Target: LAMA2; (-) strand; PAM type: NNNNGHTT; PAM sequence: TGGTGATT
aaggaacccatgcattaaga

SEQ ID NO: 42251 - DNA, 20 bp, Artificial Sequence
  Description of Artificial Sequence: Synthetic oligonucleotide
  Target: LAMA2; (-) strand; PAM type: NNNNGHTT; PAM sequence: GATGGCTT
agttttaacttaatgtaacc

SEQ ID NO: 42252 - DNA, 20 bp, Artificial Sequence
  Description of Artificial Sequence: Synthetic oligonucleotide
  Target: LAMA2; (-) strand; PAM type: NNNNGHTT; PAM sequence: CTCAGTTT
ttacatagaagttttaggga

SEQ ID NO: 42253 - DNA, 20 bp, Artificial Sequence
  Description of Artificial Sequence: Synthetic oligonucleotide
  Target: LAMA2; (-) strand; PAM type: NNNNGHTT; PAM sequence: AGAAGTTT
tagaaatacaatcattacat

SEQ ID NO: 42254 - DNA, 20 bp, Artificial Sequence
  Description of Artificial Sequence: Synthetic oligonucleotide
  Target: LAMA2; (-) strand; PAM type: NNNNGHTT; PAM sequence: ATGTGTTT
acagaggacacataaatgta

SEQ ID NO: 42255 - DNA, 20 bp, Artificial Sequence
  Description of Artificial Sequence: Synthetic oligonucleotide
  Target: LAMA2; (-) strand; PAM type: NNNNGHTT; PAM sequence: ACCCGATT
tctgcttgattgaatatggt

SEQ ID NO: 42256 - DNA, 20 bp, Artificial Sequence
  Description of Artificial Sequence: Synthetic oligonucleotide
  Target: LAMA2; (-) strand; PAM type: NNNNGHTT; PAM sequence: GCTTGATT
aagaaggtccatgaggttct

SEQ ID NO: 42257 - DNA, 20 bp, Artificial Sequence
  Description of Artificial Sequence: Synthetic oligonucleotide
  Target: LAMA2; (-) strand; PAM type: NNNNGHTT; PAM sequence: TTCTGCTT
agagaagaaggtccatgagg

SEQ ID NO: 42258 - DNA, 20 bp, Artificial Sequence
  Description of Artificial Sequence: Synthetic oligonucleotide
  Target: LAMA2; (-) strand; PAM type: NNNNGHTT; PAM sequence: TGCAGTTT
gcttgagaggccctataaaa

SEQ ID NO: 42259 - DNA, 20 bp, Artificial Sequence
  Description of Artificial Sequence: Synthetic oligonucleotide
  Target: LAMA2; (-) strand; PAM type: NNNNGHTT; PAM sequence: ATGTGCTT
tctctaaataccacagaaaa

SEQ ID NO: 42260 - DNA, 20 bp, Artificial Sequence
  Description of Artificial Sequence: Synthetic oligonucleotide
  Target: LAMA2; (-) strand; PAM type: NNNNGHTT; PAM sequence: CTCTGTTT
ctcatctactaagtggaatg

SEQ ID NO: 42261 - DNA, 20 bp, Artificial Sequence
  Description of Artificial Sequence: Synthetic oligonucleotide
  Target: LAMA2; (-) strand; PAM type: NNNNGHTT; PAM sequence: TTTTGCTT
atttggcatgctactcaact

SEQ ID NO: 42262 - DNA, 20 bp, Artificial Sequence
  Description of Artificial Sequence: Synthetic oligonucleotide
  Target: LAMA2; (-) strand; PAM type: NNNNGHTT; PAM sequence: CTGTGATT
tgtcttctagctctaatgtt

SEQ ID NO: 42263 - DNA, 20 bp, Artificial Sequence
  Description of Artificial Sequence: Synthetic oligonucleotide
  Target: LAMA2; (-) strand; PAM type: NNNNGHTT; PAM sequence: GAGGGCTT
ctgggccatgctgtaagttt

SEQ ID NO: 42264 - DNA, 20 bp, Artificial Sequence
  Description of Artificial Sequence: Synthetic oligonucleotide
  Target: LAMA2; (-) strand; PAM type: NNNNGHTT; PAM sequence: GTAAGTTT
gtaaccccctgggccatgct

SEQ ID NO: 42265 - DNA, 20 bp, Artificial Sequence
  Description of Artificial Sequence: Synthetic oligonucleotide
  Target: LAMA2; (-) strand; PAM type: NNNNGHTT; PAM sequence: CTGGGTTT
agcagttggaatttagatat

SEQ ID NO: 42266 - DNA, 20 bp, Artificial Sequence
  Description of Artificial Sequence: Synthetic oligonucleotide
  Target: LAMA2; (-) strand; PAM type: NNNNGHTT; PAM sequence: ACGAGATT
gaggtggaggttgcagtgag

SEQ ID NO: 42267 - DNA, 20 bp, Artificial Sequence
  Description of Artificial Sequence: Synthetic oligonucleotide
  Target: LAMA2; (-) strand; PAM type: NNNNGHTT; PAM sequence: AATTGCTT
tcgggaggctgaagcaggag

SEQ ID NO: 42268 - DNA, 20 bp, Artificial Sequence
  Description of Artificial Sequence: Synthetic oligonucleotide
  Target: LAMA2; (-) strand; PAM type: NNNNGHTT; PAM sequence: ATCTGATT
aagatatgtgtggcttcatg

SEQ ID NO: 42269 - DNA, 20 bp, Artificial Sequence
  Description of Artificial Sequence: Synthetic oligonucleotide
  Target: LAMA2; (-) strand; PAM type: NNNNGHTT; PAM sequence: TGTGGCTT
aaattaaaacagaagatatg

SEQ ID NO: 42270 - DNA, 20 bp, Artificial Sequence
  Description of Artificial Sequence: Synthetic oligonucleotide
  Target: LAMA2; (-) strand; PAM type: NNNNGHTT; PAM sequence: AGGTGCTT
tattcatctttgcacttagt

SEQ ID NO: 42271 - DNA, 20 bp, Artificial Sequence
  Description of Artificial Sequence: Synthetic oligonucleotide
  Target: LAMA2; (-) strand; PAM type: NNNNGHTT; PAM sequence: AGGTGCTT
tttgagccaagcatggtgct

SEQ ID NO: 42272 - DNA, 20 bp, Artificial Sequence
  Description of Artificial Sequence: Synthetic oligonucleotide
  Target: LAMA2; (-) strand; PAM type: NNNNGHTT; PAM sequence: AATTGCTT
aaaccaataaaagggtttgg

SEQ ID NO: 42273 - DNA, 20 bp, Artificial Sequence
  Description of Artificial Sequence: Synthetic oligonucleotide
  Target: LAMA2; (-) strand; PAM type: NNNNGHTT; PAM sequence: AAGGGTTT
attacatatcaaaccaataa

SEQ ID NO: 42274 - DNA, 20 bp, Artificial Sequence
  Description of Artificial Sequence: Synthetic oligonucleotide
  Target: LAMA2; (-) strand; PAM type: NNNNGHTT; PAM sequence: CCATGATT
gaggttaaggctgcagtaag

SEQ ID NO: 42275 - DNA, 20 bp, Artificial Sequence
  Description of Artificial Sequence: Synthetic oligonucleotide
  Target: LAMA2; (-) strand; PAM type: NNNNGHTT; PAM sequence: GGTGGCTT
ctaaattctgggccaggcgt

SEQ ID NO: 42276 - DNA, 20 bp, Artificial Sequence
  Description of Artificial Sequence: Synthetic oligonucleotide
  Target: LAMA2; (-) strand; PAM type: NNNNGHTT; PAM sequence: GCAGGATT
cctcatgctgtaagttgctg

SEQ ID NO: 42277 - DNA, 20 bp, Artificial Sequence
  Description of Artificial Sequence: Synthetic oligonucleotide
  Target: LAMA2; (-) strand; PAM type: NNNNGHTT; PAM sequence: CAGGGCTT
acataatccatttcacaagg

SEQ ID NO: 42278 - DNA, 20 bp, Artificial Sequence
  Description of Artificial Sequence: Synthetic oligonucleotide
  Target: LAMA2; (-) strand; PAM type: NNNNGHTT; PAM sequence: ATAAGATT
gtgttcaacatgaattaatc

SEQ ID NO: 42279 - DNA, 20 bp, Artificial Sequence
  Description of Artificial Sequence: Synthetic oligonucleotide
  Target: LAMA2; (-) strand; PAM type: NNNNGHTT; PAM sequence: AAATGTTT
tccacaaatagaacatgtag

SEQ ID NO: 42280 - DNA, 20 bp, Artificial Sequence
  Description of Artificial Sequence: Synthetic oligonucleotide
  Target: LAMA2; (-) strand; PAM type: NNNNGHTT; PAM sequence: TCACGTTT
acatacttgcagagaacttg

SEQ ID NO: 42281 - DNA, 20 bp, Artificial Sequence
  Description of Artificial Sequence: Synthetic oligonucleotide
  Target: LAMA2; (-) strand; PAM type: NNNNGHTT; PAM sequence: TGAGGTTT
agttttcacattttaaactg

SEQ ID NO: 42282 - DNA, 20 bp, Artificial Sequence
  Description of Artificial Sequence: Synthetic oligonucleotide
  Target: LAMA2; (-) strand; PAM type: NNNNGHTT; PAM sequence: CTTAGTTT
tggctacttgtattgttttt

SEQ ID NO: 42283 - DNA, 20 bp, Artificial Sequence
  Description of Artificial Sequence: Synthetic oligonucleotide
  Target: LAMA2; (-) strand; PAM type: NNNNGHTT; PAM sequence: TATTGTTT
gaattctccatggctacttg

SEQ ID NO: 42284 - DNA, 20 bp, Artificial Sequence
  Description of Artificial Sequence: Synthetic oligonucleotide
  Target: LAMA2; (-) strand; PAM type: NNNNGHTT; PAM sequence: AATCGCTT
agcactaaagctgctaggga

SEQ ID NO: 42285 - DNA, 20 bp, Artificial Sequence
  Description of Artificial Sequence: Synthetic oligonucleotide
  Target: LAMA2; (-) strand; PAM type: NNNNGHTT; PAM sequence: ATCAGTTT
taaatacatatcagtatcca

SEQ ID NO: 42286 - DNA, 20 bp, Artificial Sequence
  Description of Artificial Sequence: Synthetic oligonucleotide
  Target: LAMA2; (-) strand; PAM type: NNNNGHTT; PAM sequence: GTATGTTT
ttccttgataagtggaaaat

SEQ ID NO: 42287 - DNA, 20 bp, Artificial Sequence
  Description of Artificial Sequence: Synthetic oligonucleotide
  Target: LAMA2; (-) strand; PAM type: NNNNGHTT; PAM sequence: CAAGGATT
tttatacattaatgtctaaa

SEQ ID NO: 42288 - DNA, 20 bp, Artificial Sequence
  Description of Artificial Sequence: Synthetic oligonucleotide
  Target: LAMA2; (-) strand; PAM type: NNNNGHTT; PAM sequence: AGATGTTT
aaatataaaagccctactca

SEQ ID NO: 42289 - DNA, 20 bp, Artificial Sequence
  Description of Artificial Sequence: Synthetic oligonucleotide
  Target: LAMA2; (-) strand; PAM type: NNNNGHTT; PAM sequence: TCATGATT
tcacatctggtgcttatttg

SEQ ID NO: 42290 - DNA, 20 bp, Artificial Sequence
  Description of Artificial Sequence: Synthetic oligonucleotide
  Target: LAMA2; (-) strand; PAM type: NNNNGHTT; PAM sequence: TGGTGCTT
atgtgggctaaaatcacatc

SEQ ID NO: 42291 - DNA, 20 bp, Artificial Sequence
  Description of Artificial Sequence: Synthetic oligonucleotide
  Target: LAMA2; (-) strand; PAM type: NNNNGHTT; PAM sequence: CAGAGATT
tgaatttcctgggtcctgag

SEQ ID NO: 42292 - DNA, 20 bp, Artificial Sequence
  Description of Artificial Sequence: Synthetic oligonucleotide
  Target: LAMA2; (-) strand; PAM type: NNNNGHTT; PAM sequence: GTATGATT
gttcttagattcaggagtgc

SEQ ID NO: 42293 - DNA, 20 bp, Artificial Sequence
  Description of Artificial Sequence: Synthetic oligonucleotide
  Target: LAMA2; (-) strand; PAM type: NNNNGHTT; PAM sequence: CTTAGATT
ctgacatttggaaatgagtt

SEQ ID NO: 42294 - DNA, 20 bp, Artificial Sequence
  Description of Artificial Sequence: Synthetic oligonucleotide
  Target: LAMA2; (-) strand; PAM type: NNNNGHTT; PAM sequence: TGCAGATT
aatggtcttttctaactaac

SEQ ID NO: 42295 - DNA, 20 bp, Artificial Sequence
  Description of Artificial Sequence: Synthetic oligonucleotide
  Target: LAMA2; (-) strand; PAM type: NNNNGHTT; PAM sequence: AAACGTTT
ccaaattggtaacggggcca

SEQ ID NO: 42296 - DNA, 20 bp, Artificial Sequence
  Description of Artificial Sequence: Synthetic oligonucleotide
  Target: LAMA2; (-) strand; PAM type: NNNNGHTT; PAM sequence: CCTTGTTT
aggaagccatgctcccaaag

SEQ ID NO: 42297 - DNA, 20 bp, Artificial Sequence
  Description of Artificial Sequence: Synthetic oligonucleotide
  Target: LAMA2; (-) strand; PAM type: NNNNGHTT; PAM sequence: TGTTGATT
gtctcgcgtggtggtgcacc

SEQ ID NO: 42298 - DNA, 20 bp, Artificial Sequence
  Description of Artificial Sequence: Synthetic oligonucleotide
  Target: LAMA2; (-) strand; PAM type: NNNNGHTT; PAM sequence: CTTTGCTT
tacgcttgtttttcatttgc

SEQ ID NO: 42299 - DNA, 20 bp, Artificial Sequence
  Description of Artificial Sequence: Synthetic oligonucleotide
  Target: LAMA2; (-) strand; PAM type: NNNNGHTT; PAM sequence: GCTTGTTT
tatgaaaggaggacagatac

SEQ ID NO: 42300 - DNA, 20 bp, Artificial Sequence
  Description of Artificial Sequence: Synthetic oligonucleotide
  Target: LAMA2; (-) strand; PAM type: NNNNGHTT; PAM sequence: ATACGCTT
gggatatgaaaggaggacag

SEQ ID NO: 42301 - DNA, 20 bp, Artificial Sequence
  Description of Artificial Sequence: Synthetic oligonucleotide
  Target: LAMA2; (-) strand; PAM type: NNNNGHTT; PAM sequence: TGTTGTTT
tggatgtgatgctttacctg

SEQ ID NO: 42302 - DNA, 20 bp, Artificial Sequence
  Description of Artificial Sequence: Synthetic oligonucleotide
  Target: LAMA2; (-) strand; PAM type: NNNNGHTT; PAM sequence: TGATGCTT
cgtcctcatctctatggatg

SEQ ID NO: 42303 - DNA, 20 bp, Artificial Sequence
  Description of Artificial Sequence: Synthetic oligonucleotide
  Target: LAMA2; (-) strand; PAM type: NNNNGHTT; PAM sequence: CTCTGCTT
actaaggatgatgttttcaa

SEQ ID NO: 42304 - DNA, 20 bp, Artificial Sequence
  Description of Artificial Sequence: Synthetic oligonucleotide
  Target: LAMA2; (-) strand; PAM type: NNNNGHTT; PAM sequence: TGATGTTT
aatgatcttgtcactaagga

SEQ ID NO: 42305 - DNA, 20 bp, Artificial Sequence
  Description of Artificial Sequence: Synthetic oligonucleotide
  Target: LAMA2; (-) strand; PAM type: NNNNGHTT; PAM sequence: CTGTGCTT
gagatggaatagaaactgcc

SEQ ID NO: 42306 - DNA, 20 bp, Artificial Sequence
  Description of Artificial Sequence: Synthetic oligonucleotide
  Target: LAMA2; (-) strand; PAM type: NNNNGHTT; PAM sequence: TCAAGCTT
ggagctgctcatccagctgc

SEQ ID NO: 42307 - DNA, 20 bp, Artificial Sequence
  Description of Artificial Sequence: Synthetic oligonucleotide
  Target: LAMA2; (-) strand; PAM type: NNNNGHTT; PAM sequence: TGTTGCTT
cagtttattgctttgcccgg

SEQ ID NO: 42308 - DNA, 20 bp, Artificial Sequence
  Description of Artificial Sequence: Synthetic oligonucleotide
  Target: LAMA2; (-) strand; PAM type: NNNNGHTT; PAM sequence: TATTGCTT
tgttcagggcagcaccagtt

SEQ ID NO: 42309 - DNA, 20 bp, Artificial Sequence
  Description of Artificial Sequence: Synthetic oligonucleotide
  Target: LAMA2; (-) strand; PAM type: NNNNGHTT; PAM sequence: ACCAGTTT
catgatgtgttcagggcagc

SEQ ID NO: 42310 - DNA, 20 bp, Artificial Sequence
  Description of Artificial Sequence: Synthetic oligonucleotide
  Target: LAMA2; (-) strand; PAM type: NNNNGHTT; PAM sequence: CTATGATT
gagttcaaggttagagtgag

SEQ ID NO: 42311 - DNA, 20 bp, Artificial Sequence
  Description of Artificial Sequence: Synthetic oligonucleotide
  Target: LAMA2; (-) strand; PAM type: NNNNGHTT; PAM sequence: AGTAGTTT
caggaagatcgcttgaggct

SEQ ID NO: 42312 - DNA, 20 bp, Artificial Sequence
  Description of Artificial Sequence: Synthetic oligonucleotide
  Target: LAMA2; (-) strand; PAM type: NNNNGHTT; PAM sequence: GATCGCTT
ttggaaagccgaggcaggaa

SEQ ID NO: 42313 - DNA, 20 bp, Artificial Sequence
  Description of Artificial Sequence: Synthetic oligonucleotide
  Target: LAMA2; (-) strand; PAM type: NNNNGHTT; PAM sequence: TCATGTTT
taagggatgggcgtggtggc

SEQ ID NO: 42314 - DNA, 20 bp, Artificial Sequence
  Description of Artificial Sequence: Synthetic oligonucleotide
  Target: LAMA2; (-) strand; PAM type: NNNNGHTT; PAM sequence: CCTTGCTT
tgtacaaatctcgacctccc

SEQ ID NO: 42315 - DNA, 20 bp, Artificial Sequence
  Description of Artificial Sequence: Synthetic oligonucleotide
  Target: LAMA2; (-) strand; PAM type: NNNNGHTT; PAM sequence: TAGTGTTT
ttccccaccctctaatttgg

SEQ ID NO: 42316 - DNA, 20 bp, Artificial Sequence
  Description of Artificial Sequence: Synthetic oligonucleotide
  Target: LAMA2; (-) strand; PAM type: NNNNGHTT; PAM sequence: TTAGGATT
ggtttttaaaaatatgtacc

SEQ ID NO: 42317 - DNA, 20 bp, Artificial Sequence
  Description of Artificial Sequence: Synthetic oligonucleotide
  Target: LAMA2; (-) strand; PAM type: NNNNGHTT; PAM sequence: GAGGGTTT
actgagaagtgctggtgtaa

SEQ ID NO: 42318 - DNA, 20 bp, Artificial Sequence
  Description of Artificial Sequence: Synthetic oligonucleotide
  Target: LAMA2; (-) strand; PAM type: NNNNGHTT; PAM sequence: TACTGTTT
ttgatttgcaacaggatgga

SEQ ID NO: 42319 - DNA, 20 bp, Artificial Sequence
  Description of Artificial Sequence: Synthetic oligonucleotide
  Target: LAMA2; (-) strand; PAM type: NNNNGHTT; PAM sequence: CATTGATT
aggtgatgtttactatcaat

SEQ ID NO: 42320 - DNA, 20 bp, Artificial Sequence
  Description of Artificial Sequence: Synthetic oligonucleotide
  Target: LAMA2; (-) strand; PAM type: NNNNGHTT; PAM sequence: TGATGTTT
gtttttaaggacatccaagg

SEQ ID NO: 42321 - DNA, 20 bp, Artificial Sequence
  Description of Artificial Sequence: Synthetic oligonucleotide
  Target: LAMA2; (-) strand; PAM type: NNNNGHTT; PAM sequence: CTTTGTTT
agccattatggtgtatagtc

SEQ ID NO: 42322 - DNA, 20 bp, Artificial Sequence
  Description of Artificial Sequence: Synthetic oligonucleotide
  Target: LAMA2; (-) strand; PAM type: NNNNGHTT; PAM sequence: CAAAGTTT
atcactctaacatgtaacct

SEQ ID NO: 42323 - DNA, 20 bp, Artificial Sequence
  Description of Artificial Sequence: Synthetic oligonucleotide
  Target: LAMA2; (-) strand; PAM type: NNNNGHTT; PAM sequence: CAGTGCTT
cctcaagaagcaggcagaag

SEQ ID NO: 42324 - DNA, 20 bp, Artificial Sequence
  Description of Artificial Sequence: Synthetic oligonucleotide
  Target: LAMA2; (-) strand; PAM type: NNNNGHTT; PAM sequence: CTCCGTTT
aacacctcctggattagatc

SEQ ID NO: 42325 - DNA, 20 bp, Artificial Sequence
  Description of Artificial Sequence: Synthetic oligonucleotide
  Target: LAMA2; (-) strand; PAM type: NNNNGHTT; PAM sequence: CCTGGATT
atttaggaagaagaacacct

SEQ ID NO: 42326 - DNA, 20 bp, Artificial Sequence
  Description of Artificial Sequence: Synthetic oligonucleotide
  Target: LAMA2; (-) strand; PAM type: NNNNGHTT; PAM sequence: ATGAGATT
ttgttgtttcgttgtatact

SEQ ID NO: 42327 - DNA, 20 bp, Artificial Sequence
  Description of Artificial Sequence: Synthetic oligonucleotide
  Target: LAMA2; (-) strand; PAM type: NNNNGHTT; PAM sequence: TGTTGTTT
ttggtttgtttttattttgt

SEQ ID NO: 42328 - DNA, 20 bp, Artificial Sequence
  Description of Artificial Sequence: Synthetic oligonucleotide
  Target: LAMA2; (-) strand; PAM type: NNNNGHTT; PAM sequence: GTTTGTTT
agctaagcagcagttttttg

SEQ ID NO: 42329 - DNA, 20 bp, Artificial Sequence
  Description of Artificial Sequence: Synthetic oligonucleotide
  Target: LAMA2; (-) strand; PAM type: NNNNGHTT; PAM sequence: TTTGGTTT
cctgagctaagcagcagttt

SEQ ID NO: 42330 - DNA, 20 bp, Artificial Sequence
  Description of Artificial Sequence: Synthetic oligonucleotide
  Target: LAMA2; (-) strand; PAM type: NNNNGHTT; PAM sequence: AGCAGTTT
aaactggtcctgagctaagc

SEQ ID NO: 42331 - DNA, 20 bp, Artificial Sequence
  Description of Artificial Sequence: Synthetic oligonucleotide
  Target: LAMA2; (-) strand; PAM type: NNNNGHTT; PAM sequence: TTTGGATT
gctgtatgttatggggaact

SEQ ID NO: 42332 - DNA, 20 bp, Artificial Sequence
  Description of Artificial Sequence: Synthetic oligonucleotide
  Target: LAMA2; (-) strand; PAM type: NNNNGHTT; PAM sequence: TGTAGCTT
ggaattaggaaacaattaca

SEQ ID NO: 42333 - DNA, 20 bp, Artificial Sequence
  Description of Artificial Sequence: Synthetic oligonucleotide
  Target: LAMA2; (-) strand; PAM type: NNNNGHTT; PAM sequence: GAGGGATT
caccctcagctctgaaaatt

SEQ ID NO: 42334 - DNA, 20 bp, Artificial Sequence
  Description of Artificial Sequence: Synthetic oligonucleotide
  Target: LAMA2; (-) strand; PAM type: NNNNGHTT; PAM sequence: CGCAGCTT
ggaccgtctcgataaacaca

SEQ ID NO: 42335 - DNA, 20 bp, Artificial Sequence
  Description of Artificial Sequence: Synthetic oligonucleotide
  Target: LAMA2; (-) strand; PAM type: NNNNGHTT; PAM sequence: TGTAGCTT
agcccgaatggaaaggcctc

SEQ ID NO: 42336 - DNA, 20 bp, Artificial Sequence
  Description of Artificial Sequence: Synthetic oligonucleotide
  Target: LAMA2; (-) strand; PAM type: NNNNGHTT; PAM sequence: TCTTGCTT
cttcatggaagtatttccct

SEQ ID NO: 42337 - DNA, 20 bp, Artificial Sequence
  Description of Artificial Sequence: Synthetic oligonucleotide
  Target: LAMA2; (-) strand; PAM type: NNNNGHTT; PAM sequence: AAGTGTTT
cacagcaggtaaaaggctta

SEQ ID NO: 42338 - DNA, 20 bp, Artificial Sequence
  Description of Artificial Sequence: Synthetic oligonucleotide
  Target: LAMA2; (-) strand; PAM type: NNNNGHTT; PAM sequence: AAAGGCTT
gcactctgccacagcaggta

SEQ ID NO: 42339 - DNA, 20 bp, Artificial Sequence
  Description of Artificial Sequence: Synthetic oligonucleotide
  Target: LAMA2; (-) strand; PAM type: NNNNGHTT; PAM sequence: GCAGGCTT
aggttctcaagcagcccaag

SEQ ID NO: 42340 - DNA, 20 bp, Artificial Sequence
  Description of Artificial Sequence: Synthetic oligonucleotide
  Target: LAMA2; (-) strand; PAM type: NNNNGHTT; PAM sequence: ATCTGTTT
ctgcacactctcaccaacac

SEQ ID NO: 42341 - DNA, 20 bp, Artificial Sequence
  Description of Artificial Sequence: Synthetic oligonucleotide
  Target: LAMA2; (-) strand; PAM type: NNNNGHTT; PAM sequence: GGCTGCTT
acaagataggtcgatataca

SEQ ID NO: 42342 - DNA, 20 bp, Artificial Sequence
  Description of Artificial Sequence: Synthetic oligonucleotide
  Target: LAMA2; (-) strand; PAM type: NNNNGHTT; PAM sequence: CATGGTTT
ggtgcggggctgtgcagtca

SEQ ID NO: 42343 - DNA, 20 bp, Artificial Sequence
  Description of Artificial Sequence: Synthetic oligonucleotide
  Target: LAMA2; (-) strand; PAM type: NNNNGHTT; PAM sequence: ATCAGCTT
tcaactgccactgttcaaag

SEQ ID NO: 42344 - DNA, 20 bp, Artificial Sequence
  Description of Artificial Sequence: Synthetic oligonucleotide
  Target: LAMA2; (-) strand; PAM type: NNNNGHTT; PAM sequence: GAAGGTTT
tgaaaattatcagtccacta

SEQ ID NO: 42345 - DNA, 20 bp, Artificial Sequence
  Description of Artificial Sequence: Synthetic oligonucleotide
  Target: LAMA2; (-) strand; PAM type: NNNNGHTT; PAM sequence: ATGTGTTT
tgggttataagagtagcaaa

SEQ ID NO: 42346 - DNA, 20 bp, Artificial Sequence
  Description of Artificial Sequence: Synthetic oligonucleotide
  Target: LAMA2; (-) strand; PAM type: NNNNGHTT; PAM sequence: CATAGTTT
gacatatttattgattaact

SEQ ID NO: 42347 - DNA, 20 bp, Artificial Sequence
  Description of Artificial Sequence: Synthetic oligonucleotide
  Target: LAMA2; (-) strand; PAM type: NNNNGHTT; PAM sequence: TATTGATT
ggaatgtgctcagacatatt

SEQ ID NO: 42348 - DNA, 20 bp, Artificial Sequence
  Description of Artificial Sequence: Synthetic oligonucleotide
  Target: LAMA2; (-) strand; PAM type: NNNNGHTT; PAM sequence: ATCAGTTT
tgagtgctcagtgcgtgtga

SEQ ID NO: 42349 - DNA, 20 bp, Artificial Sequence
  Description of Artificial Sequence: Synthetic oligonucleotide
  Target: LAMA2; (-) strand; PAM type: NNNNGHTT; PAM sequence: AATTGTTT
aaaaggtaatgatgctgtct

SEQ ID NO: 42350 - DNA, 20 bp, Artificial Sequence
  Description of Artificial Sequence: Synthetic oligonucleotide
  Target: LAMA2; (-) strand; PAM type: NNNNGHTT; PAM sequence: AGGAGATT
aatacccaggagagaaaaac

SEQ ID NO: 42351 - DNA, 20 bp, Artificial Sequence
  Description of Artificial Sequence: Synthetic oligonucleotide
  Target: LAMA2; (-) strand; PAM type: NNNNGHTT; PAM sequence: TTCTGATT
ctccctatcaaaagagctgg

SEQ ID NO: 42352 - DNA, 20 bp, Artificial Sequence
  Description of Artificial Sequence: Synthetic oligonucleotide
  Target: LAMA2; (-) strand; PAM type: NNNNGHTT; PAM sequence: AACTGCTT
gactgtttcttgaaagcccg

SEQ ID NO: 42353 - DNA, 20 bp, Artificial Sequence
  Description of Artificial Sequence: Synthetic oligonucleotide
  Target: LAMA2; (-) strand; PAM type: NNNNGHTT; PAM sequence: GACTGTTT
atcaaatgcaattgcaatgt

SEQ ID NO: 42354 - DNA, 20 bp, Artificial Sequence
  Description of Artificial Sequence: Synthetic oligonucleotide
  Target: LAMA2; (-) strand; PAM type: NNNNGHTT; PAM sequence: ACCGGTTT
agtgtctcaggatgatacat

SEQ ID NO: 42355 - DNA, 20 bp, Artificial Sequence
  Description of Artificial Sequence: Synthetic oligonucleotide
  Target: LAMA2; (-) strand; PAM type: NNNNGHTT; PAM sequence: ACTTGATT
taataagtgtagtagattca

SEQ ID NO: 42356 - DNA, 20 bp, Artificial Sequence
  Description of Artificial Sequence: Synthetic oligonucleotide
  Target: LAMA2; (-) strand; PAM type: NNNNGHTT; PAM sequence: AGTAGATT
cttcattaattaataagtgt

SEQ ID NO: 42357 - DNA, 20 bp, Artificial Sequence
  Description of Artificial Sequence: Synthetic oligonucleotide
  Target: LAMA2; (-) strand; PAM type: NNNNGHTT; PAM sequence: TACTGATT
agatgaggactttatcaggc

SEQ ID NO: 42358 - DNA, 20 bp, Artificial Sequence
  Description of Artificial Sequence: Synthetic oligonucleotide
  Target: LAMA2; (-) strand; PAM type: NNNNGHTT; PAM sequence: TTCAGCTT
atgtaaaaaagcaagccgga

SEQ ID NO: 42359 - DNA, 20 bp, Artificial Sequence
  Description of Artificial Sequence: Synthetic oligonucleotide
  Target: LAMA2; (-) strand; PAM type: NNNNGHTT; PAM sequence: GCCGGATT
cgagccatgtaaaaaagcaa

SEQ ID NO: 42360 - DNA, 20 bp, Artificial Sequence
  Description of Artificial Sequence: Synthetic oligonucleotide
  Target: LAMA2; (-) strand; PAM type: NNNNGHTT; PAM sequence: GCATGATT
gctgaactgttgcaaaatca

SEQ ID NO: 42361 - DNA, 20 bp, Artificial Sequence
  Description of Artificial Sequence: Synthetic oligonucleotide
  Target: LAMA2; (-) strand; PAM type: NNNNGHTT; PAM sequence: CATTGATT
taccttgtgccactggccat

SEQ ID NO: 42362 - DNA, 20 bp, Artificial Sequence
  Description of Artificial Sequence: Synthetic oligonucleotide
  Target: LAMA2; (-) strand; PAM type: NNNNGHTT; PAM sequence: TTTAGCTT
tatatggcacttattttatt

SEQ ID NO: 42363 - DNA, 20 bp, Artificial Sequence
  Description of Artificial Sequence: Synthetic oligonucleotide
  Target: LAMA2; (-) strand; PAM type: NNNNGHTT; PAM sequence: CCAAGATT
cacaggtctgagcacatttt

SEQ ID NO: 42364 - DNA, 20 bp, Artificial Sequence
  Description of Artificial Sequence: Synthetic oligonucleotide
  Target: LAMA2; (-) strand; PAM type: NNNNGHTT; PAM sequence: AGATGTTT
cctggcctcagtttatgggt

SEQ ID NO: 42365 - DNA, 20 bp, Artificial Sequence
  Description of Artificial Sequence: Synthetic oligonucleotide
  Target: LAMA2; (-) strand; PAM type: NNNNGHTT; PAM sequence: CTCAGTTT
aatgtcttcagccacctggc

SEQ ID NO: 42366 - DNA, 20 bp, Artificial Sequence
  Description of Artificial Sequence: Synthetic oligonucleotide
  Target: LAMA2; (-) strand; PAM type: NNNNGHTT; PAM sequence: CTACGTTT
gatggtgaacacactctgtt

SEQ ID NO: 42367 - DNA, 20 bp, Artificial Sequence
  Description of Artificial Sequence: Synthetic oligonucleotide
  Target: LAMA2; (-) strand; PAM type: NNNNGHTT; PAM sequence: TCGAGCTT
attccttaaaattgaataca

SEQ ID NO: 42368 - DNA, 20 bp, Artificial Sequence
  Description of Artificial Sequence: Synthetic oligonucleotide
  Target: LAMA2; (-) strand; PAM type: NNNNGHTT; PAM sequence: TTTTGCTT
cccattttagtgttgccaac

SEQ ID NO: 42369 - DNA, 20 bp, Artificial Sequence
  Description of Artificial Sequence: Synthetic oligonucleotide
  Target: LAMA2; (-) strand; PAM type: NNNNGHTT; PAM sequence: CCTGGTTT
caaccagagattcctggatt

SEQ ID NO: 42370 - DNA, 20 bp, Artificial Sequence
  Description of Artificial Sequence: Synthetic oligonucleotide
  Target: LAMA2; (-) strand; PAM type: NNNNGHTT; PAM sequence: CCTGGATT
aacacgatcaaccagagatt

SEQ ID NO: 42371 - DNA, 20 bp, Artificial Sequence
  Description of Artificial Sequence: Synthetic oligonucleotide
  Target: LAMA2; (-) strand; PAM type: NNNNGHTT; PAM sequence: CAGAGATT
gccctttaaacacgatcaac

SEQ ID NO: 42372 - DNA, 20 bp, Artificial Sequence
  Description of Artificial Sequence: Synthetic oligonucleotide
  Target: LAMA2; (-) strand; PAM type: NNNNGHTT; PAM sequence: CAACGTTT
ccagtttctgggtgtaaggc

SEQ ID NO: 42373 - DNA, 20 bp, Artificial Sequence
  Description of Artificial Sequence: Synthetic oligonucleotide
  Target: LAMA2; (-) strand; PAM type: NNNNGHTT; PAM sequence: ACCAGTTT
ccttctgtgcccataatagt

SEQ ID NO: 42374 - DNA, 20 bp, Artificial Sequence
  Description of Artificial Sequence: Synthetic oligonucleotide
  Target: LAMA2; (-) strand; PAM type: NNNNGHTT; PAM sequence: TTTTGTTT
tgcagagacaaatgttgaga

SEQ ID NO: 42375 - DNA, 20 bp, Artificial Sequence
  Description of Artificial Sequence: Synthetic oligonucleotide
  Target: LAMA2; (-) strand; PAM type: NNNNGHTT; PAM sequence: TTGAGATT
cgcaggtgcagagacaaatg

SEQ ID NO: 42376 - DNA, 20 bp, Artificial Sequence
  Description of Artificial Sequence: Synthetic oligonucleotide
  Target: LAMA2; (-) strand; PAM type: NNNNGHTT; PAM sequence: CTTTGCTT
tattggtctacctagggaag

SEQ ID NO: 42377 - DNA, 20 bp, Artificial Sequence
  Description of Artificial Sequence: Synthetic oligonucleotide
  Target: LAMA2; (-) strand; PAM type: NNNNGHTT; PAM sequence: GGAAGCTT
aattttattggtctacctag

SEQ ID NO: 42378 - DNA, 20 bp, Artificial Sequence
  Description of Artificial Sequence: Synthetic oligonucleotide
  Target: LAMA2; (-) strand; PAM type: NNNNGHTT; PAM sequence: TTTGGCTT
cttcgcgttttttaaggttc

SEQ ID NO: 42379 - DNA, 20 bp, Artificial Sequence
  Description of Artificial Sequence: Synthetic oligonucleotide
  Target: LAMA2; (-) strand; PAM type: NNNNGHTT; PAM sequence: TCGCGTTT
tgataacaaattggttggct

SEQ ID NO: 42380 - DNA, 20 bp, Artificial Sequence
  Description of Artificial Sequence: Synthetic oligonucleotide
  Target: LAMA2; (-) strand; PAM type: NNNNGHTT; PAM sequence: GTTGGCTT
atttccatgataacaaattg

SEQ ID NO: 42381 - DNA, 20 bp, Artificial Sequence
  Description of Artificial Sequence: Synthetic oligonucleotide
  Target: LAMA2; (-) strand; PAM type: NNNNGHTT; PAM sequence: TGAAGATT
tcataagctcccagcaaaaa

SEQ ID NO: 42382 - DNA, 20 bp, Artificial Sequence
  Description of Artificial Sequence: Synthetic oligonucleotide
  Target: LAMA2; (-) strand; PAM type: NNNNGHTT; PAM sequence: TCTGGTTT
ttcattttacacatatctat

SEQ ID NO: 42383 - DNA, 20 bp, Artificial Sequence
  Description of Artificial Sequence: Synthetic oligonucleotide
  Target: LAMA2; (-) strand; PAM type: NNNNGHTT; PAM sequence: TCAGGATT
ggtttaaaaatgagtctggg

SEQ ID NO: 42384 - DNA, 20 bp, Artificial Sequence
  Description of Artificial Sequence: Synthetic oligonucleotide
  Target: LAMA2; (-) strand; PAM type: NNNNGHTT; PAM sequence: GATGGTTT
gtgaaatgctaaagtaccat

SEQ ID NO: 42385 - DNA, 20 bp, Artificial Sequence
  Description of Artificial Sequence: Synthetic oligonucleotide
  Target: LAMA2; (-) strand; PAM type: NNNNGHTT; PAM sequence: GTTTGATT
acagttttaaaagtgcatta

SEQ ID NO: 42386 - DNA, 20 bp, Artificial Sequence
  Description of Artificial Sequence: Synthetic oligonucleotide
  Target: LAMA2; (-) strand; PAM type: NNNNGHTT; PAM sequence: ATTAGTTT
atgcacagttttaaaagtgc

SEQ ID NO: 42387 - DNA, 20 bp, Artificial Sequence
  Description of Artificial Sequence: Synthetic oligonucleotide
  Target: LAMA2; (-) strand; PAM type: NNNNGHTT; PAM sequence: CACAGTTT
agtgggtagcaaaattcatg

SEQ ID NO: 42388 - DNA, 20 bp, Artificial Sequence
  Description of Artificial Sequence: Synthetic oligonucleotide
  Target: LAMA2; (-) strand; PAM type: NNNNGHTT; PAM sequence: GGTAGATT
ttttaggtcgaagtctcctc

SEQ ID NO: 42389 - DNA, 20 bp, Artificial Sequence
  Description of Artificial Sequence: Synthetic oligonucleotide
  Target: LAMA2; (-) strand; PAM type: NNNNGHTT; PAM sequence: GTCAGTTT
agaataccaaattttcctgg

SEQ ID NO: 42390 - DNA, 20 bp, Artificial Sequence
  Description of Artificial Sequence: Synthetic oligonucleotide
  Target: LAMA2; (-) strand; PAM type: NNNNGHTT; PAM sequence: CAGTGCTT
aaaaattgaaacaatgtaca

SEQ ID NO: 42391 - DNA, 20 bp, Artificial Sequence
  Description of Artificial Sequence: Synthetic oligonucleotide
  Target: LAMA2; (-) strand; PAM type: NNNNGHTT; PAM sequence: TCTTGCTT
catctacataaagaattcct

SEQ ID NO: 42392 - DNA, 20 bp, Artificial Sequence
  Description of Artificial Sequence: Synthetic oligonucleotide
  Target: LAMA2; (-) strand; PAM type: NNNNGHTT; PAM sequence: GTCGGCTT
attcccacgacatccaggat

SEQ ID NO: 42393 - DNA, 20 bp, Artificial Sequence
  Description of Artificial Sequence: Synthetic oligonucleotide
  Target: LAMA2; (-) strand; PAM type: NNNNGHTT; PAM sequence: ATCAGTTT
agatgacttcctattcacct

SEQ ID NO: 42394 - DNA, 20 bp, Artificial Sequence
  Description of Artificial Sequence: Synthetic oligonucleotide
  Target: LAMA2; (-) strand; PAM type: NNNNGHTT; PAM sequence: GAGAGCTT
aatggcgtgaacccgggagg

SEQ ID NO: 42395 - DNA, 20 bp, Artificial Sequence
  Description of Artificial Sequence: Synthetic oligonucleotide
  Target: LAMA2; (-) strand; PAM type: NNNNGHTT; PAM sequence: AGGAGATT
ggcaggcggatcatgaggtc

SEQ ID NO: 42396 - DNA, 20 bp, Artificial Sequence
  Description of Artificial Sequence: Synthetic oligonucleotide
  Target: LAMA2; (-) strand; PAM type: NNNNGHTT; PAM sequence: GACAGTTT
taaataggtattcaaaccaa

SEQ ID NO: 42397 - DNA, 20 bp, Artificial Sequence
  Description of Artificial Sequence: Synthetic oligonucleotide
  Target: LAMA2; (-) strand; PAM type: NNNNGHTT; PAM sequence: AAAAGATT
aaaagagaaatctttgttaa

SEQ ID NO: 42398 - DNA, 20 bp, Artificial Sequence
  Description of Artificial Sequence: Synthetic oligonucleotide
  Target: LAMA2; (-) strand; PAM type: NNNNGHTT; PAM sequence: CCCTGTTT
tttgtttagtattatcatta

SEQ ID NO: 42399 - DNA, 20 bp, Artificial Sequence
  Description of Artificial Sequence: Synthetic oligonucleotide
  Target: LAMA2; (-) strand; PAM type: NNNNGHTT; PAM sequence: TTTTGTTT
tttaatctttatgcaatcct

SEQ ID NO: 42400 - DNA, 20 bp, Artificial Sequence
  Description of Artificial Sequence: Synthetic oligonucleotide
  Target: LAMA2; (-) strand; PAM type: NNNNGHTT; PAM sequence: CTGGGATT
tgccttggcctcccaaagtg

SEQ ID NO: 42401 - DNA, 20 bp, Artificial Sequence
  Description of Artificial Sequence: Synthetic oligonucleotide
  Target: LAMA2; (-) strand; PAM type: NNNNGHTT; PAM sequence: CAGGGTTT
tttttgtatttttgtagaga

SEQ ID NO: 42402 - DNA, 20 bp, Artificial Sequence
  Description of Artificial Sequence: Synthetic oligonucleotide
  Target: LAMA2; (-) strand; PAM type: NNNNGHTT; PAM sequence: AAGTGATT
aacctctgaccctcgggttc

SEQ ID NO: 42403 - DNA, 20 bp, Artificial Sequence
  Description of Artificial Sequence: Synthetic oligonucleotide
  Target: LAMA2; (-) strand; PAM type: NNNNGHTT; PAM sequence: CAGTGCTT
ataccatcattttcatcttt

SEQ ID NO: 42404 - DNA, 20 bp, Artificial Sequence
  Description of Artificial Sequence: Synthetic oligonucleotide
  Target: LAMA2; (-) strand; PAM type: NNNNGHTT; PAM sequence: GAGGGCTT
atattgatttacaaaactgt

SEQ ID NO: 42405 - DNA, 20 bp, Artificial Sequence
  Description of Artificial Sequence: Synthetic oligonucleotide
  Target: LAMA2; (-) strand; PAM type: NNNNGHTT; PAM sequence: TATTGATT
ataaaaaattattttgtgaa

SEQ ID NO: 42406 - DNA, 20 bp, Artificial Sequence
  Description of Artificial Sequence: Synthetic oligonucleotide
  Target: LAMA2; (-) strand; PAM type: NNNNGHTT; PAM sequence: CCGTGCTT
taaaagcaccaatcaatccc

SEQ ID NO: 42407 - DNA, 20 bp, Artificial Sequence
  Description of Artificial Sequence: Synthetic oligonucleotide
  Target: LAMA2; (-) strand; PAM type: NNNNGHTT; PAM sequence: GGGTGATT
ctgagaattacaactataat

SEQ ID NO: 42408 - DNA, 20 bp, Artificial Sequence
  Description of Artificial Sequence: Synthetic oligonucleotide
  Target: LAMA2; (-) strand; PAM type: NNNNGHTT; PAM sequence: TTTAGTTT
accagtgtcacttcagagac

SEQ ID NO: 42409 - DNA, 20 bp, Artificial Sequence
  Description of Artificial Sequence: Synthetic oligonucleotide
  Target: LAMA2; (-) strand; PAM type: NNNNGHTT; PAM sequence: AATTGCTT
tgtttttagaaattcaagtg

SEQ ID NO: 42410 - DNA, 20 bp, Artificial Sequence
  Description of Artificial Sequence: Synthetic oligonucleotide
  Target: LAMA2; (-) strand; PAM type: NNNNGHTT; PAM sequence: ATCTGTTT
actctggtccattatatttt

SEQ ID NO: 42411 - DNA, 20 bp, Artificial Sequence
  Description of Artificial Sequence: Synthetic oligonucleotide
  Target: LAMA2; (-) strand; PAM type: NNNNGHTT; PAM sequence: GAAAGTTT
tgcaaatatgcataaaactt

SEQ ID NO: 42412 - DNA, 20 bp, Artificial Sequence
  Description of Artificial Sequence: Synthetic oligonucleotide
  Target: LAMA2; (-) strand; PAM type: NNNNGHTT; PAM sequence: CAGTGCTT
aaaggtaattaggtttggtt

SEQ ID NO: 42413 - DNA, 20 bp, Artificial Sequence
  Description of Artificial Sequence: Synthetic oligonucleotide
  Target: LAMA2; (-) strand; PAM type: NNNNGHTT; PAM sequence: TTAGGTTT
atttctatttgaaaaggtaa

SEQ ID NO: 42414 - DNA, 20 bp, Artificial Sequence
  Description of Artificial Sequence: Synthetic oligonucleotide
  Target: LAMA2; (-) strand; PAM type: NNNNGHTT; PAM sequence: AATAGTTT
cctgattttatgtttctatt

SEQ ID NO: 42415 - DNA, 20 bp, Artificial Sequence
  Description of Artificial Sequence: Synthetic oligonucleotide
  Target: LAMA2; (-) strand; PAM type: NNNNGHTT; PAM sequence: TTATGTTT
ggtctcttacgttcctgatt

SEQ ID NO: 42416 - DNA, 20 bp, Artificial Sequence
  Description of Artificial Sequence: Synthetic oligonucleotide
  Target: LAMA2; (-) strand; PAM type: NNNNGHTT; PAM sequence: TCCTGATT
ttttaattggtctcttacgt

SEQ ID NO: 42417 - DNA, 20 bp, Artificial Sequence
  Description of Artificial Sequence: Synthetic oligonucleotide
  Target: LAMA2; (-) strand; PAM type: NNNNGHTT; PAM sequence: ATAAGTTT
atgggccccatgttggtatc

SEQ ID NO: 42418 - DNA, 20 bp, Artificial Sequence
  Description of Artificial Sequence: Synthetic oligonucleotide
  Target: LAMA2; (-) strand; PAM type: NNNNGHTT; PAM sequence: ATTGGTTT
atactgcacactatgtctcc

SEQ ID NO: 42419 - DNA, 20 bp, Artificial Sequence
  Description of Artificial Sequence: Synthetic oligonucleotide
  Target: LAMA2; (-) strand; PAM type: NNNNGHTT; PAM sequence: TTGTGCTT
tggatgcagaaaatcctgtg

SEQ ID NO: 42420 - DNA, 20 bp, Artificial Sequence
  Description of Artificial Sequence: Synthetic oligonucleotide
  Target: LAMA2; (-) strand; PAM type: NNNNGHTT; PAM sequence: TCAGGTTT
cagatcagaagaaacaaatg

SEQ ID NO: 42421 - DNA, 20 bp, Artificial Sequence
  Description of Artificial Sequence: Synthetic oligonucleotide
  Target: LAMA2; (-) strand; PAM type: NNNNGHTT; PAM sequence: TGGAGATT
cggcaggggcctctgccatg

SEQ ID NO: 42422 - DNA, 20 bp, Artificial Sequence
  Description of Artificial Sequence: Synthetic oligonucleotide
  Target: LAMA2; (-) strand; PAM type: NNNNGHTT; PAM sequence: ACCTGCTT
gaaggaaatgaaagagcctt

SEQ ID NO: 42423 - DNA, 20 bp, Artificial Sequence
  Description of Artificial Sequence: Synthetic oligonucleotide
  Target: LAMA2; (-) strand; PAM type: NNNNGHTT; PAM sequence: ACTAGTTT
ttttggcttaaataaaggat

SEQ ID NO: 42424 - DNA, 20 bp, Artificial Sequence
  Description of Artificial Sequence: Synthetic oligonucleotide
  Target: LAMA2; (-) strand; PAM type: NNNNGHTT; PAM sequence: TTTGGCTT
attacttccataagtttctt

SEQ ID NO: 42425 - DNA, 20 bp, Artificial Sequence
  Description of Artificial Sequence: Synthetic oligonucleotide
  Target: LAMA2; (-) strand; PAM type: NNNNGHTT; PAM sequence: ATAAGTTT
gcatttttgaaattacttcc

SEQ ID NO: 42426 - DNA, 20 bp, Artificial Sequence
  Description of Artificial Sequence: Synthetic oligonucleotide
  Target: LAMA2; (-) strand; PAM type: NNNNGHTT; PAM sequence: AGGAGATT
atgggtgtgtgttgatgggg

SEQ ID NO: 42427 - DNA, 20 bp, Artificial Sequence
  Description of Artificial Sequence: Synthetic oligonucleotide
  Target: LAMA2; (-) strand; PAM type: NNNNGHTT; PAM sequence: AAAGGATT
acccacaaaaattaaaaatt

SEQ ID NO: 42428 - DNA, 20 bp, Artificial Sequence
  Description of Artificial Sequence: Synthetic oligonucleotide
  Target: LAMA2; (-) strand; PAM type: NNNNGHTT; PAM sequence: ATATGATT
tggataccccatttaccctg

SEQ ID NO: 42429 - DNA, 20 bp, Artificial Sequence
  Description of Artificial Sequence: Synthetic oligonucleotide
  Target: LAMA2; (-) strand; PAM type: NNNNGHTT; PAM sequence: ACATGTTT
ttgtttgaaacataaaggat

SEQ ID NO: 42430 - DNA, 20 bp, Artificial Sequence
  Description of Artificial Sequence: Synthetic oligonucleotide
  Target: LAMA2; (-) strand; PAM type: NNNNGHTT; PAM sequence: GATTGTTT
taactaaaagagtataatca

SEQ ID NO: 42431 - DNA, 20 bp, Artificial Sequence
  Description of Artificial Sequence: Synthetic oligonucleotide
  Target: LAMA2; (-) strand; PAM type: NNNNGHTT; PAM sequence: ATCAGATT
aaaataactaaaagagtata

SEQ ID NO: 42432 - DNA, 20 bp, Artificial Sequence
  Description of Artificial Sequence: Synthetic oligonucleotide
  Target: LAMA2; (-) strand; PAM type: NNNNGHTT; PAM sequence: ATAAGATT
atgatacaaaaatagtttga

SEQ ID NO: 42433 - DNA, 20 bp, Artificial Sequence
  Description of Artificial Sequence: Synthetic oligonucleotide
  Target: LAMA2; (-) strand; PAM type: NNNNGHTT; PAM sequence: AATAGTTT
gggatggttaatgatacaaa

SEQ ID NO: 42434 - DNA, 20 bp, Artificial Sequence
  Description of Artificial Sequence: Synthetic oligonucleotide
  Target: LAMA2; (-) strand; PAM type: NNNNGHTT; PAM sequence: AATAGATT
tttattgcagcactagttac

SEQ ID NO: 42435 - DNA, 20 bp, Artificial Sequence
  Description of Artificial Sequence: Synthetic oligonucleotide
  Target: LAMA2; (-) strand; PAM type: NNNNGHTT; PAM sequence: CCACGTTT
ttgaagagatatctgcactc

SEQ ID NO: 42436 - DNA, 20 bp, Artificial Sequence
  Description of Artificial Sequence: Synthetic oligonucleotide
  Target: LAMA2; (-) strand; PAM type: NNNNGHTT; PAM sequence: AACAGTTT
ctagtgcaactgctatgcag

SEQ ID NO: 42437 - DNA, 20 bp, Artificial Sequence
  Description of Artificial Sequence: Synthetic oligonucleotide
  Target: LAMA2; (-) strand; PAM type: NNNNGHTT; PAM sequence: AATGGCTT
tatcatctcacccaagttaa

SEQ ID NO: 42438 - DNA, 20 bp, Artificial Sequence
  Description of Artificial Sequence: Synthetic oligonucleotide
  Target: LAMA2; (-) strand; PAM type: NNNNGHTT; PAM sequence: ACAAGATT
aatcctatttaaaaatgggt

SEQ ID NO: 42439 - DNA, 20 bp, Artificial Sequence
  Description of Artificial Sequence: Synthetic oligonucleotide
  Target: LAMA2; (-) strand; PAM type: NNNNGHTT; PAM sequence: AAGGGATT
ttgcaaactacccatctgag

SEQ ID NO: 42440 - DNA, 20 bp, Artificial Sequence
  Description of Artificial Sequence: Synthetic oligonucleotide
  Target: LAMA2; (-) strand; PAM type: NNNNGHTT; PAM sequence: AAAAGCTT
aatgggatcacatcaagtta

SEQ ID NO: 42441 - DNA, 20 bp, Artificial Sequence
  Description of Artificial Sequence: Synthetic oligonucleotide
  Target: LAMA2; (-) strand; PAM type: NNNNGHTT; PAM sequence: AGTGGATT
atatacaaaaatcaaatcaa

SEQ ID NO: 42442 - DNA, 20 bp, Artificial Sequence
  Description of Artificial Sequence: Synthetic oligonucleotide
  Target: LAMA2; (-) strand; PAM type: NNNNGHTT; PAM sequence: ATGAGATT
taatccctattaaaatacca

SEQ ID NO: 42443 - DNA, 20 bp, Artificial Sequence
  Description of Artificial Sequence: Synthetic oligonucleotide
  Target: LAMA2; (-) strand; PAM type: NNNNGHTT; PAM sequence: TGCAGATT
ccatactacccagagcaatc

SEQ ID NO: 42444 - DNA, 20 bp, Artificial Sequence
  Description of Artificial Sequence: Synthetic oligonucleotide
  Target: LAMA2; (-) strand; PAM type: NNNNGHTT; PAM sequence: AATGGATT
aaaataagatattccatgtt

SEQ ID NO: 42445 - DNA, 20 bp, Artificial Sequence
  Description of Artificial Sequence: Synthetic oligonucleotide
  Target: LAMA2; (-) strand; PAM type: NNNNGHTT; PAM sequence: TGCCGTTT
aatttgacttcttccttgga

SEQ ID NO: 42446 - DNA, 20 bp, Artificial Sequence
  Description of Artificial Sequence: Synthetic oligonucleotide
  Target: LAMA2; (-) strand; PAM type: NNNNGHTT; PAM sequence: TTAGGCTT
atggttttttggtggggtct

SEQ ID NO: 42447 - DNA, 20 bp, Artificial Sequence
  Description of Artificial Sequence: Synthetic oligonucleotide
  Target: LAMA2; (-) strand; PAM type: NNNNGHTT; PAM sequence: AATGGTTT
ttactgaatttatcagttct

SEQ ID NO: 42448 - DNA, 20 bp, Artificial Sequence
  Description of Artificial Sequence: Synthetic oligonucleotide
  Target: LAMA2; (-) strand; PAM type: NNNNGHTT; PAM sequence: TGCAGCTT
tgtatgttgactttgtatcc

SEQ ID NO: 42449 - DNA, 20 bp, Artificial Sequence
  Description of Artificial Sequence: Synthetic oligonucleotide
  Target: LAMA2; (-) strand; PAM type: NNNNGHTT; PAM sequence: TACTGATT
ctgttggcatatagaaatgt

SEQ ID NO: 42450 - DNA, 20 bp, Artificial Sequence
  Description of Artificial Sequence: Synthetic oligonucleotide
  Target: LAMA2; (-) strand; PAM type: NNNNGHTT; PAM sequence: GATTGTTT
ctttcttgatttctttttct

SEQ ID NO: 42451 - DNA, 20 bp, Artificial Sequence
  Description of Artificial Sequence: Synthetic oligonucleotide
  Target: LAMA2; (-) strand; PAM type: NNNNGHTT; PAM sequence: TTCTGATT
attactttcttgatttcttt

SEQ ID NO: 42452 - DNA, 20 bp, Artificial Sequence
  Description of Artificial Sequence: Synthetic oligonucleotide
  Target: LAMA2; (-) strand; PAM type: NNNNGHTT; PAM sequence: TCTTGATT
tactgtaaatggaattactt

SEQ ID NO: 42453 - DNA, 20 bp, Artificial Sequence
  Description of Artificial Sequence: Synthetic oligonucleotide
  Target: LAMA2; (-) strand; PAM type: NNNNGHTT; PAM sequence: TGCAGTTT
gcagattttaaaaattatta

SEQ ID NO: 42454 - DNA, 20 bp, Artificial Sequence
  Description of Artificial Sequence: Synthetic oligonucleotide
  Target: LAMA2; (-) strand; PAM type: NNNNGHTT; PAM sequence: TGCAGATT
ctatcttaaagtacattaat

SEQ ID NO: 42455 - DNA, 20 bp, Artificial Sequence
  Description of Artificial Sequence: Synthetic oligonucleotide
  Target: LAMA2; (-) strand; PAM type: NNNNGHTT; PAM sequence: ATTAGTTT
tctccacatattatgtgctt

SEQ ID NO: 42456 - DNA, 20 bp, Artificial Sequence
  Description of Artificial Sequence: Synthetic oligonucleotide
  Target: LAMA2; (-) strand; PAM type: NNNNGHTT; PAM sequence: ATGTGCTT
catcataatctccacatatt

SEQ ID NO: 42457 - DNA, 20 bp, Artificial Sequence
  Description of Artificial Sequence: Synthetic oligonucleotide
  Target: LAMA2; (-) strand; PAM type: NNNNGHTT; PAM sequence: TTCTGTTT
gaaagaactatgttacttat

SEQ ID NO: 42458 - DNA, 20 bp, Artificial Sequence
  Description of Artificial Sequence: Synthetic oligonucleotide
  Target: LAMA2; (-) strand; PAM type: NNNNGHTT; PAM sequence: CTGTGCTT
ttttctaagtatctacagaa

SEQ ID NO: 42459 - DNA, 20 bp, Artificial Sequence
  Description of Artificial Sequence: Synthetic oligonucleotide
  Target: LAMA2; (-) strand; PAM type: NNNNGHTT; PAM sequence: AAACGTTT
caaatgctgattcctccatg

SEQ ID NO: 42460 - DNA, 20 bp, Artificial Sequence
  Description of Artificial Sequence: Synthetic oligonucleotide
  Target: LAMA2; (-) strand; PAM type: NNNNGHTT; PAM sequence: TGCTGATT
cacctgaagccttgctcaaa

SEQ ID NO: 42461 - DNA, 20 bp, Artificial Sequence
  Description of Artificial Sequence: Synthetic oligonucleotide
  Target: LAMA2; (-) strand; PAM type: NNNNGHTT; PAM sequence: TGGGGTTT
gttttctgcttccctgtagg

SEQ ID NO: 42462 - DNA, 20 bp, Artificial Sequence
  Description of Artificial Sequence: Synthetic oligonucleotide
  Target: LAMA2; (-) strand; PAM type: NNNNGHTT; PAM sequence: TTCTGCTT
atatcctgtgtttttctgtt

SEQ ID NO: 42463 - DNA, 20 bp, Artificial Sequence
  Description of Artificial Sequence: Synthetic oligonucleotide
  Target: LAMA2; (-) strand; PAM type: NNNNGHTT; PAM sequence: TTCTGTTT
atttaacatatcctgtgttt

SEQ ID NO: 42464 - DNA, 20 bp, Artificial Sequence
  Description of Artificial Sequence: Synthetic oligonucleotide
  Target: LAMA2; (-) strand; PAM type: NNNNGHTT; PAM sequence: CTGTGTTT
gtttcaatatttaacatatc

SEQ ID NO: 42465 - DNA, 20 bp, Artificial Sequence
  Description of Artificial Sequence: Synthetic oligonucleotide
  Target: LAMA2; (-) strand; PAM type: NNNNGHTT; PAM sequence: TAACGTTT
tcggggttcagcataacctg

SEQ ID NO: 42466 - DNA, 20 bp, Artificial Sequence
  Description of Artificial Sequence: Synthetic oligonucleotide
  Target: LAMA2; (-) strand; PAM type: NNNNGHTT; PAM sequence: GGAAGCTT
gaatttgcagaaatcttggg

SEQ ID NO: 42467 - DNA, 20 bp, Artificial Sequence
  Description of Artificial Sequence: Synthetic oligonucleotide
  Target: LAMA2; (-) strand; PAM type: NNNNGHTT; PAM sequence: TTTTGTTT
ggaagtgagtaattttctgg

SEQ ID NO: 42468 - DNA, 20 bp, Artificial Sequence
  Description of Artificial Sequence: Synthetic oligonucleotide
  Target: LAMA2; (-) strand; PAM type: NNNNGHTT; PAM sequence: TCTGGTTT
acagaggaagtgagtaattt

SEQ ID NO: 42469 - DNA, 20 bp, Artificial Sequence
  Description of Artificial Sequence: Synthetic oligonucleotide
  Target: LAMA2; (-) strand; PAM type: NNNNGHTT; PAM sequence: GTATGTTT
gtcaaaggttaagatgaatt

SEQ ID NO: 42470 - DNA, 20 bp, Artificial Sequence
  Description of Artificial Sequence: Synthetic oligonucleotide
  Target: LAMA2; (-) strand; PAM type: NNNNGHTT; PAM sequence: CAGTGATT
aagaggccaaaaaaaagccc

SEQ ID NO: 42471 - DNA, 20 bp, Artificial Sequence
  Description of Artificial Sequence: Synthetic oligonucleotide
  Target: LAMA2; (-) strand; PAM type: NNNNGHTT; PAM sequence: AGCAGATT
attggcaaaggtgggtttat

SEQ ID NO: 42472 - DNA, 20 bp, Artificial Sequence
  Description of Artificial Sequence: Synthetic oligonucleotide
  Target: LAMA2; (-) strand; PAM type: NNNNGHTT; PAM sequence: GTGGGTTT
atgggtttggattggcaaag

SEQ ID NO: 42473 - DNA, 20 bp, Artificial Sequence
  Description of Artificial Sequence: Synthetic oligonucleotide
  Target: LAMA2; (-) strand; PAM type: NNNNGHTT; PAM sequence: TTTGGATT
ctactgagaaccttgatggg

SEQ ID NO: 42474 - DNA, 20 bp, Artificial Sequence
  Description of Artificial Sequence: Synthetic oligonucleotide
  Target: LAMA2; (-) strand; PAM type: NNNNGHTT; PAM sequence: ATGGGTTT
ttgttctactgagaaccttg

SEQ ID NO: 42475 - DNA, 20 bp, Artificial Sequence
  Description of Artificial Sequence: Synthetic oligonucleotide
  Target: LAMA2; (-) strand; PAM type: NNNNGHTT; PAM sequence: CTTTGATT
atgattttccatatttgact

SEQ ID NO: 42476 - DNA, 20 bp, Artificial Sequence
  Description of Artificial Sequence: Synthetic oligonucleotide
  Target: LAMA2; (-) strand; PAM type: NNNNGHTT; PAM sequence: CTATGATT
catccagttaattctttcct

SEQ ID NO: 42477 - DNA, 20 bp, Artificial Sequence
  Description of Artificial Sequence: Synthetic oligonucleotide
  Target: LAMA2; (-) strand; PAM type: NNNNGHTT; PAM sequence: GGAAGCTT
ctgtaagtacaatgttgatg

SEQ ID NO: 42478 - DNA, 20 bp, Artificial Sequence
  Description of Artificial Sequence: Synthetic oligonucleotide
  Target: LAMA2; (-) strand; PAM type: NNNNGHTT; PAM sequence: AAAGGTTT
aatggtgccacaatcatctg

SEQ ID NO: 42479 - DNA, 20 bp, Artificial Sequence
  Description of Artificial Sequence: Synthetic oligonucleotide
  Target: LAMA2; (-) strand; PAM type: NNNNGHTT; PAM sequence: TAAAGTTT
acatttcagttatttttcag

SEQ ID NO: 42480 - DNA, 20 bp, Artificial Sequence
  Description of Artificial Sequence: Synthetic oligonucleotide
  Target: LAMA2; (-) strand; PAM type: NNNNGHTT; PAM sequence: CTGAGATT
tttgaataaatggatacaca

SEQ ID NO: 42481 - DNA, 20 bp, Artificial Sequence
  Description of Artificial Sequence: Synthetic oligonucleotide
  Target: LAMA2; (-) strand; PAM type: NNNNGHTT; PAM sequence: GAGGGTTT
caaagtatctggcacaacat

SEQ ID NO: 42482 - DNA, 20 bp, Artificial Sequence
  Description of Artificial Sequence: Synthetic oligonucleotide
  Target: LAMA2; (-) strand; PAM type: NNNNGHTT; PAM sequence: CTGTGCTT
tatttttcaccattttatcc

SEQ ID NO: 42483 - DNA, 20 bp, Artificial Sequence
  Description of Artificial Sequence: Synthetic oligonucleotide
  Target: LAMA2; (-) strand; PAM type: NNNNGHTT; PAM sequence: TATTGCTT
taacacactccatagttagt

SEQ ID NO: 42484 - DNA, 20 bp, Artificial Sequence
  Description of Artificial Sequence: Synthetic oligonucleotide
  Target: LAMA2; (-) strand; PAM type: NNNNGHTT; PAM sequence: ATAAGTTT
agctaattctaatgagggct

SEQ ID NO: 42485 - DNA, 20 bp, Artificial Sequence
  Description of Artificial Sequence: Synthetic oligonucleotide
  Target: LAMA2; (-) strand; PAM type: NNNNGHTT; PAM sequence: TGGGGATT
aaatattttggattagagga

SEQ ID NO: 42486 - DNA, 20 bp, Artificial Sequence
  Description of Artificial Sequence: Synthetic oligonucleotide
  Target: LAMA2; (-) strand; PAM type: NNNNGHTT; PAM sequence: TTTGGATT
aaatgaagattttaaaatat

SEQ ID NO: 42487 - DNA, 20 bp, Artificial Sequence
  Description of Artificial Sequence: Synthetic oligonucleotide
  Target: LAMA2; (-) strand; PAM type: NNNNGHTT; PAM sequence: TGAAGATT
tgaatccaccaactgtaaaa

SEQ ID NO: 42488 - DNA, 20 bp, Artificial Sequence
  Description of Artificial Sequence: Synthetic oligonucleotide
  Target: LAMA2; (-) strand; PAM type: NNNNGHTT; PAM sequence: AAATGTTT
caatatcatgaagaaatcag

SEQ ID NO: 42489 - DNA, 20 bp, Artificial Sequence
  Description of Artificial Sequence: Synthetic oligonucleotide
  Target: LAMA2; (-) strand; PAM type: NNNNGHTT; PAM sequence: TCGAGTTT
acagccgggcttcaaaatat

SEQ ID NO: 42490 - DNA, 20 bp, Artificial Sequence
  Description of Artificial Sequence: Synthetic oligonucleotide
  Target: LAMA2; (-) strand; PAM type: NNNNGHTT; PAM sequence: CCGGGCTT
tctcccaacaaagaatacag

SEQ ID NO: 42491 - DNA, 20 bp, Artificial Sequence
  Description of Artificial Sequence: Synthetic oligonucleotide
  Target: LAMA2; (-) strand; PAM type: NNNNGHTT; PAM sequence: TTTAGCTT
agaaggatgaaaacatacaa

SEQ ID NO: 42492 - DNA, 20 bp, Artificial Sequence
  Description of Artificial Sequence: Synthetic oligonucleotide
  Target: LAMA2; (-) strand; PAM type: NNNNGHTT; PAM sequence: ATTGGCTT
gttcattattagtcaacacg

SEQ ID NO: 42493 - DNA, 20 bp, Artificial Sequence
  Description of Artificial Sequence: Synthetic oligonucleotide
  Target: LAMA2; (-) strand; PAM type: NNNNGHTT; PAM sequence: ACACGATT
atttggttcattattagtca

SEQ ID NO: 42494 - DNA, 20 bp, Artificial Sequence
  Description of Artificial Sequence: Synthetic oligonucleotide
  Target: LAMA2; (-) strand; PAM type: NNNNGHTT; PAM sequence: GTGTGTTT
tccttaagaggagaataaga

SEQ ID NO: 42495 - DNA, 20 bp, Artificial Sequence
  Description of Artificial Sequence: Synthetic oligonucleotide
  Target: LAMA2; (-) strand; PAM type: NNNNGHTT; PAM sequence: CTTGGCTT
ctgatgcgtcagttggctac

SEQ ID NO: 42496 - DNA, 20 bp, Artificial Sequence
  Description of Artificial Sequence: Synthetic oligonucleotide
  Target: LAMA2; (-) strand; PAM type: NNNNGHTT; PAM sequence: GGATGCTT
tgttttttgaaatggtagct

SEQ ID NO: 42497 - DNA, 20 bp, Artificial Sequence
  Description of Artificial Sequence: Synthetic oligonucleotide
  Target: LAMA2; (-) strand; PAM type: NNNNGHTT; PAM sequence: TGCTGTTT
acacactacttttataaatt

SEQ ID NO: 42498 - DNA, 20 bp, Artificial Sequence
  Description of Artificial Sequence: Synthetic oligonucleotide
  Target: LAMA2; (-) strand; PAM type: NNNNGHTT; PAM sequence: ATTTGATT
ggctgaaagaggtgtttaga

SEQ ID NO: 42499 - DNA, 20 bp, Artificial Sequence
  Description of Artificial Sequence: Synthetic oligonucleotide
  Target: LAMA2; (-) strand; PAM type: NNNNGHTT; PAM sequence: AGGTGTTT
tcttaatgcagggctgaaag

SEQ ID NO: 42500 - DNA, 20 bp, Artificial Sequence
  Description of Artificial Sequence: Synthetic oligonucleotide
  Target: LAMA2; (-) strand; PAM type: NNNNGHTT; PAM sequence: CTCTGTTT
gaaatttcttgttttccctt

SEQ ID NO: 42501 - DNA, 20 bp, Artificial Sequence
  Description of Artificial Sequence: Synthetic oligonucleotide
  Target: LAMA2; (-) strand; PAM type: NNNNGHTT; PAM sequence: TCTTGTTT
aatagaaaacttgtgaaatt

SEQ ID NO: 42502 - DNA, 20 bp, Artificial Sequence
  Description of Artificial Sequence: Synthetic oligonucleotide
  Target: LAMA2; (-) strand; PAM type: NNNNGHTT; PAM sequence: GTACGATT
gaaacgtgaactgagttgaa

SEQ ID NO: 42503 - DNA, 20 bp, Artificial Sequence
  Description of Artificial Sequence: Synthetic oligonucleotide
  Target: LAMA2; (-) strand; PAM type: NNNNGHTT; PAM sequence: GTGTGATT
aaaaactattttaggtcact

SEQ ID NO: 42504 - DNA, 20 bp, Artificial Sequence
  Description of Artificial Sequence: Synthetic oligonucleotide
  Target: LAMA2; (-) strand; PAM type: NNNNGHTT; PAM sequence: GACAGTTT
ctatattacctttgttggag

SEQ ID NO: 42505 - DNA, 20 bp, Artificial Sequence
  Description of Artificial Sequence: Synthetic oligonucleotide
  Target: LAMA2; (-) strand; PAM type: NNNNGHTT; PAM sequence: GTATGTTT
ttgaaaaagatgtagtaaaa

SEQ ID NO: 42506 - DNA, 20 bp, Artificial Sequence
  Description of Artificial Sequence: Synthetic oligonucleotide
  Target: LAMA2; (-) strand; PAM type: NNNNGHTT; PAM sequence: AGGAGCTT
aacaggcttttgcatgtaaa

SEQ ID NO: 42507 - DNA, 20 bp, Artificial Sequence
  Description of Artificial Sequence: Synthetic oligonucleotide
  Target: LAMA2; (-) strand; PAM type: NNNNGHTT; PAM sequence: ACAGGCTT
tattgggtggagtttgcata

SEQ ID NO: 42508 - DNA, 20 bp, Artificial Sequence
  Description of Artificial Sequence: Synthetic oligonucleotide
  Target: LAMA2; (-) strand; PAM type: NNNNGHTT; PAM sequence: TGGAGTTT
gaaatgtttactatattggg

SEQ ID NO: 42509 - DNA, 20 bp, Artificial Sequence
  Description of Artificial Sequence: Synthetic oligonucleotide
  Target: LAMA2; (-) strand; PAM type: NNNNGHTT; PAM sequence: AAATGTTT
tattgatgtaattattaatg

SEQ ID NO: 42510 - DNA, 20 bp, Artificial Sequence
  Description of Artificial Sequence: Synthetic oligonucleotide
  Target: LAMA2; (-) strand; PAM type: NNNNGHTT; PAM sequence: AAAAGTTT
aaaatgcaagtaaataggtg

SEQ ID NO: 42511 - DNA, 20 bp, Artificial Sequence
  Description of Artificial Sequence: Synthetic oligonucleotide
  Target: LAMA2; (-) strand; PAM type: NNNNGHTT; PAM sequence: GAAAGATT
aagaaatgaagtcttaagaa

SEQ ID NO: 42512 - DNA, 20 bp, Artificial Sequence
  Description of Artificial Sequence: Synthetic oligonucleotide
  Target: LAMA2; (-) strand; PAM type: NNNNGHTT; PAM sequence: GTCAGTTT
ttgaaacactaaaaacatta

SEQ ID NO: 42513 - DNA, 20 bp, Artificial Sequence
  Description of Artificial Sequence: Synthetic oligonucleotide
  Target: LAMA2; (-) strand; PAM type: NNNNGHTT; PAM sequence: ATCTGTTT
ttctggtctaaatgagaaaa

SEQ ID NO: 42514 - DNA, 20 bp, Artificial Sequence
  Description of Artificial Sequence: Synthetic oligonucleotide
  Target: LAMA2; (-) strand; PAM type: NNNNGHTT; PAM sequence: GCCCGTTT
tacataaattacattttgga

SEQ ID NO: 42515 - DNA, 20 bp, Artificial Sequence
  Description of Artificial Sequence: Synthetic oligonucleotide
  Target: LAMA2; (-) strand; PAM type: NNNNGHTT; PAM sequence: ACAAGATT
tcatggatttcattttatat

SEQ ID NO: 42516 - DNA, 20 bp, Artificial Sequence
  Description of Artificial Sequence: Synthetic oligonucleotide
  Target: LAMA2; (-) strand; PAM type: NNNNGHTT; PAM sequence: CATGGATT
ttaattatatttttttcctt

SEQ ID NO: 42517 - DNA, 20 bp, Artificial Sequence
  Description of Artificial Sequence: Synthetic oligonucleotide
  Target: LAMA2; (-) strand; PAM type: NNNNGHTT; PAM sequence: TGATGTTT
ttttttaaattttaaacttt

SEQ ID NO: 42518 - DNA, 20 bp, Artificial Sequence
  Description of Artificial Sequence: Synthetic oligonucleotide
  Target: LAMA2; (-) strand; PAM type: NNNNGHTT; PAM sequence: AAAGGATT
ttggtttacaaattcaaagt

SEQ ID NO: 42519 - DNA, 20 bp, Artificial Sequence
  Description of Artificial Sequence: Synthetic oligonucleotide
  Target: LAMA2; (-) strand; PAM type: NNNNGHTT; PAM sequence: TTTGGTTT
tgtttaaagtgactcattaa

SEQ ID NO: 42520 - DNA, 20 bp, Artificial Sequence
  Description of Artificial Sequence: Synthetic oligonucleotide
  Target: LAMA2; (-) strand; PAM type: NNNNGHTT; PAM sequence: TATTGTTT
tataaaattttcttaaaaga

SEQ ID NO: 42521 - DNA, 20 bp, Artificial Sequence
  Description of Artificial Sequence: Synthetic oligonucleotide
  Target: LAMA2; (-) strand; PAM type: NNNNGHTT; PAM sequence: TTCTGCTT
atacgtaaagctggtaataa

SEQ ID NO: 42522 - DNA, 20 bp, Artificial Sequence
  Description of Artificial Sequence: Synthetic oligonucleotide
  Target: LAMA2; (-) strand; PAM type: NNNNGHTT; PAM sequence: CTTTGCTT
caggagccacaaattatgct

SEQ ID NO: 42523 - DNA, 20 bp, Artificial Sequence
  Description of Artificial Sequence: Synthetic oligonucleotide
  Target: LAMA2; (-) strand; PAM type: NNNNGHTT; PAM sequence: GATGGTTT
taggaaatagaacagtcaca

SEQ ID NO: 42524 - DNA, 20 bp, Artificial Sequence
  Description of Artificial Sequence: Synthetic oligonucleotide
  Target: LAMA2; (-) strand; PAM type: NNNNGHTT; PAM sequence: CGGTGTTT
catcgactgtgagctcaatg

SEQ ID NO: 42525 - DNA, 20 bp, Artificial Sequence
  Description of Artificial Sequence: Synthetic oligonucleotide
  Target: LAMA2; (-) strand; PAM type: NNNNGHTT; PAM sequence: TTGGGCTT
gtagatgctgggtttgggct

SEQ ID NO: 42526 - DNA, 20 bp, Artificial Sequence
  Description of Artificial Sequence: Synthetic oligonucleotide
  Target: LAMA2; (-) strand; PAM type: NNNNGHTT; PAM sequence: TTGGGCTT
agctgatgtagatgctgggt

SEQ ID NO: 42527 - DNA, 20 bp, Artificial Sequence
  Description of Artificial Sequence: Synthetic oligonucleotide
  Target: LAMA2; (-) strand; PAM type: NNNNGHTT; PAM sequence: CTGGGTTT
tgtgtcagctgatgtagatg

SEQ ID NO: 42528 - DNA, 20 bp, Artificial Sequence
  Description of Artificial Sequence: Synthetic oligonucleotide
  Target: LAMA2; (-) strand; PAM type: NNNNGHTT; PAM sequence: AAATGTTT
tcttagacacacgtaaatat

SEQ ID NO: 42529 - DNA, 20 bp, Artificial Sequence
  Description of Artificial Sequence: Synthetic oligonucleotide
  Target: LAMA2; (-) strand; PAM type: NNNNGHTT; PAM sequence: AGCAGATT
taggtaaggtgcagattcta

SEQ ID NO: 42530 - DNA, 20 bp, Artificial Sequence
  Description of Artificial Sequence: Synthetic oligonucleotide
  Target: LAMA2; (-) strand; PAM type: NNNNGHTT; PAM sequence: TGCAGATT
actggaaattttaggtaagg

SEQ ID NO: 42531 - DNA, 20 bp, Artificial Sequence
  Description of Artificial Sequence: Synthetic oligonucleotide
  Target: LAMA2; (-) strand; PAM type: NNNNGHTT; PAM sequence: TGTGGTTT
tcatgaaaagttcagtccca

SEQ ID NO: 42532 - DNA, 20 bp, Artificial Sequence
  Description of Artificial Sequence: Synthetic oligonucleotide
  Target: LAMA2; (-) strand; PAM type: NNNNGHTT; PAM sequence: TCCAGCTT
tataagccaaattcatttcc

SEQ ID NO: 42533 - DNA, 20 bp, Artificial Sequence
  Description of Artificial Sequence: Synthetic oligonucleotide
  Target: LAMA2; (-) strand; PAM type: NNNNGHTT; PAM sequence: CCAAGTTT
taaaaaaatcagaaagaaca

SEQ ID NO: 42534 - DNA, 20 bp, Artificial Sequence
  Description of Artificial Sequence: Synthetic oligonucleotide
  Target: LAMA2; (-) strand; PAM type: NNNNGHTT; PAM sequence: GATTGATT
taagttccataacattttat

SEQ ID NO: 42535 - DNA, 20 bp, Artificial Sequence
  Description of Artificial Sequence: Synthetic oligonucleotide
  Target: LAMA2; (-) strand; PAM type: NNNNGHTT; PAM sequence: TTATGATT
gaaataagttccataacatt

SEQ ID NO: 42536 - DNA, 20 bp, Artificial Sequence
  Description of Artificial Sequence: Synthetic oligonucleotide
  Target: LAMA2; (-) strand; PAM type: NNNNGHTT; PAM sequence: CAATGATT
gaaattagctatgtttaacc

SEQ ID NO: 42537 - DNA, 20 bp, Artificial Sequence
  Description of Artificial Sequence: Synthetic oligonucleotide
  Target: LAMA2; (-) strand; PAM type: NNNNGHTT; PAM sequence: CTATGTTT
taacataagggggaaattag

SEQ ID NO: 42538 - DNA, 20 bp, Artificial Sequence
  Description of Artificial Sequence: Synthetic oligonucleotide
  Target: LAMA2; (-) strand; PAM type: NNNNGHTT; PAM sequence: TTGCGTTT
tctgaatgaggatttattgc

SEQ ID NO: 42539 - DNA, 20 bp, Artificial Sequence
  Description of Artificial Sequence: Synthetic oligonucleotide
  Target: LAMA2; (-) strand; PAM type: NNNNGHTT; PAM sequence: TATTGCTT
aaggattctgaatgaggatt

SEQ ID NO: 42540 - DNA, 20 bp, Artificial Sequence
  Description of Artificial Sequence: Synthetic oligonucleotide
  Target: LAMA2; (-) strand; PAM type: NNNNGHTT; PAM sequence: TGAGGATT
tgctagagaaggattctgaa

SEQ ID NO: 42541 - DNA, 20 bp, Artificial Sequence
  Description of Artificial Sequence: Synthetic oligonucleotide
  Target: LAMA2; (-) strand; PAM type: NNNNGHTT; PAM sequence: GAAGGATT
gctatatttaatgtgctaga

SEQ ID NO: 42542 - DNA, 20 bp, Artificial Sequence
  Description of Artificial Sequence: Synthetic oligonucleotide
  Target: LAMA2; (-) strand; PAM type: NNNNGHTT; PAM sequence: TCTTGTTT
cttctcatcaagttggccac

SEQ ID NO: 42543 - DNA, 20 bp, Artificial Sequence
  Description of Artificial Sequence: Synthetic oligonucleotide
  Target: LAMA2; (-) strand; PAM type: NNNNGHTT; PAM sequence: CTTGGCTT
acagtacttattaagaggca

SEQ ID NO: 42544 - DNA, 20 bp, Artificial Sequence
  Description of Artificial Sequence: Synthetic oligonucleotide
  Target: LAMA2; (-) strand; PAM type: NNNNGHTT; PAM sequence: AGGAGCTT
ttgcttgtttcatttagcaa

SEQ ID NO: 42545 - DNA, 20 bp, Artificial Sequence
  Description of Artificial Sequence: Synthetic oligonucleotide
  Target: LAMA2; (-) strand; PAM type: NNNNGHTT; PAM sequence: GCTTGTTT
aattgctgaatatacatttt

SEQ ID NO: 42546 - DNA, 20 bp, Artificial Sequence
  Description of Artificial Sequence: Synthetic oligonucleotide
  Target: LAMA2; (-) strand; PAM type: NNNNGHTT; PAM sequence: TTTTGCTT
caacaattgctgaatataca

SEQ ID NO: 42547 - DNA, 20 bp, Artificial Sequence
  Description of Artificial Sequence: Synthetic oligonucleotide
  Target: LAMA2; (-) strand; PAM type: NNNNGHTT; PAM sequence: TCCTGATT
tcataatatcttggaattta

SEQ ID NO: 42548 - DNA, 20 bp, Artificial Sequence
  Description of Artificial Sequence: Synthetic oligonucleotide
  Target: LAMA2; (-) strand; PAM type: NNNNGHTT; PAM sequence: GCTTGTTT
cttcctcttattatagaggt

SEQ ID NO: 42549 - DNA, 20 bp, Artificial Sequence
  Description of Artificial Sequence: Synthetic oligonucleotide
  Target: LAMA2; (-) strand; PAM type: NNNNGHTT; PAM sequence: AGGTGCTT
gaatcttcctcttattatag

SEQ ID NO: 42550 - DNA, 20 bp, Artificial Sequence
  Description of Artificial Sequence: Synthetic oligonucleotide
  Target: LAMA2; (-) strand; PAM type: NNNNGHTT; PAM sequence: CTTGGTTT
catcttaagacatgaaataa

SEQ ID NO: 42551 - DNA, 20 bp, Artificial Sequence
  Description of Artificial Sequence: Synthetic oligonucleotide
  Target: LAMA2; (-) strand; PAM type: NNNNGHTT; PAM sequence: TTGGGATT
caaagtgtaattccaaagtg

SEQ ID NO: 42552 - DNA, 20 bp, Artificial Sequence
  Description of Artificial Sequence: Synthetic oligonucleotide
  Target: LAMA2; (-) strand; PAM type: NNNNGHTT; PAM sequence: CAAGGCTT
ctggagtgcaatggcgcaat

SEQ ID NO: 42553 - DNA, 20 bp, Artificial Sequence
  Description of Artificial Sequence: Synthetic oligonucleotide
  Target: LAMA2; (-) strand; PAM type: NNNNGHTT; PAM sequence: TTTTGTTT
gttttatgcaaagttagtgg

SEQ ID NO: 42554 - DNA, 20 bp, Artificial Sequence
  Description of Artificial Sequence: Synthetic oligonucleotide
  Target: LAMA2; (-) strand; PAM type: NNNNGHTT; PAM sequence: AGTGGTTT
atgctgttttatgcaaagtt

SEQ ID NO: 42555 - DNA, 20 bp, Artificial Sequence
  Description of Artificial Sequence: Synthetic oligonucleotide
  Target: LAMA2; (-) strand; PAM type: NNNNGHTT; PAM sequence: TGCTGTTT
agcttgagattaaattggaa

SEQ ID NO: 42556 - DNA, 20 bp, Artificial Sequence
  Description of Artificial Sequence: Synthetic oligonucleotide
  Target: LAMA2; (-) strand; PAM type: NNNNGHTT; PAM sequence: TTGAGATT
tttcaaagtcaactgttagc

SEQ ID NO: 42557 - DNA, 20 bp, Artificial Sequence
  Description of Artificial Sequence: Synthetic oligonucleotide
  Target: LAMA2; (-) strand; PAM type: NNNNGHTT; PAM sequence: GTTAGCTT
agcatgtttcaaagtcaact

SEQ ID NO: 42558 - DNA, 20 bp, Artificial Sequence
  Description of Artificial Sequence: Synthetic oligonucleotide
  Target: LAMA2; (-) strand; PAM type: NNNNGHTT; PAM sequence: GCATGTTT
tcctgcaccaaatattaaga

SEQ ID NO: 42559 - DNA, 20 bp, Artificial Sequence
  Description of Artificial Sequence: Synthetic oligonucleotide
  Target: LAMA2; (-) strand; PAM type: NNNNGHTT; PAM sequence: CTCAGCTT
aaaaaggcaatgcaagaggg

SEQ ID NO: 42560 - DNA, 20 bp, Artificial Sequence
  Description of Artificial Sequence: Synthetic oligonucleotide
  Target: LAMA2; (-) strand; PAM type: NNNNGHTT; PAM sequence: AACTGCTT
gaatactggttgttaggcca

SEQ ID NO: 42561 - DNA, 20 bp, Artificial Sequence
  Description of Artificial Sequence: Synthetic oligonucleotide
  Target: LAMA2; (-) strand; PAM type: NNNNGHTT; PAM sequence: GTGAGCTT
gtggcttgcctgtgcctttg

SEQ ID NO: 42562 - DNA, 20 bp, Artificial Sequence
  Description of Artificial Sequence: Synthetic oligonucleotide
  Target: LAMA2; (-) strand; PAM type: NNNNGHTT; PAM sequence: AGTGGCTT
ccttggcaaaattaacctcc

SEQ ID NO: 42563 - DNA, 20 bp, Artificial Sequence
  Description of Artificial Sequence: Synthetic oligonucleotide
  Target: LAMA2; (-) strand; PAM type: NNNNGHTT; PAM sequence: ACTTGTTT
ttgtttgttttacttgatat

SEQ ID NO: 42564 - DNA, 20 bp, Artificial Sequence
  Description of Artificial Sequence: Synthetic oligonucleotide
  Target: LAMA2; (-) strand; PAM type: NNNNGHTT; PAM sequence: GTTTGTTT
tatataggtaaaatatattt

SEQ ID NO: 42565 - DNA, 20 bp, Artificial Sequence
  Description of Artificial Sequence: Synthetic oligonucleotide
  Target: LAMA2; (-) strand; PAM type: NNNNGHTT; PAM sequence: ATTTGTTT
aacatatataggtaaaatat

SEQ ID NO: 42566 - DNA, 20 bp, Artificial Sequence
  Description of Artificial Sequence: Synthetic oligonucleotide
  Target: LAMA2; (-) strand; PAM type: NNNNGHTT; PAM sequence: ATTAGTTT
aattctatgtacatgcacaa

SEQ ID NO: 42567 - DNA, 20 bp, Artificial Sequence
  Description of Artificial Sequence: Synthetic oligonucleotide
  Target: LAMA2; (-) strand; PAM type: NNNNGHTT; PAM sequence: ATCAGTTT
caattatttagaatgaaata

SEQ ID NO: 42568 - DNA, 20 bp, Artificial Sequence
  Description of Artificial Sequence: Synthetic oligonucleotide
  Target: LAMA2; (-) strand; PAM type: NNNNGHTT; PAM sequence: AGTGGCTT
tgccaaattcacttgctgtc

SEQ ID NO: 42569 - DNA, 20 bp, Artificial Sequence
  Description of Artificial Sequence: Synthetic oligonucleotide
  Target: LAMA2; (-) strand; PAM type: NNNNGHTT; PAM sequence: AACTGATT
tttcataaatagagtaaggg

SEQ ID NO: 42570 - DNA, 20 bp, Artificial Sequence
  Description of Artificial Sequence: Synthetic oligonucleotide
  Target: LAMA2; (-) strand; PAM type: NNNNGHTT; PAM sequence: CAATGATT
ataatgaacttgggtcagga

SEQ ID NO: 42571 - DNA, 20 bp, Artificial Sequence
  Description of Artificial Sequence: Synthetic oligonucleotide
  Target: LAMA2; (-) strand; PAM type: NNNNGHTT; PAM sequence: TTAAGCTT
caaataagaaaatcaagtaa

SEQ ID NO: 42572 - DNA, 20 bp, Artificial Sequence
  Description of Artificial Sequence: Synthetic oligonucleotide
  Target: LAMA2; (-) strand; PAM type: NNNNGHTT; PAM sequence: CTTGGTTT
gcttggttgtcattcataag

SEQ ID NO: 42573 - DNA, 20 bp, Artificial Sequence
  Description of Artificial Sequence: Synthetic oligonucleotide
  Target: LAMA2; (-) strand; PAM type: NNNNGHTT; PAM sequence: ATAAGCTT
tgtgtgcttggttgtcattc

SEQ ID NO: 42574 - DNA, 20 bp, Artificial Sequence
  Description of Artificial Sequence: Synthetic oligonucleotide
  Target: LAMA2; (-) strand; PAM type: NNNNGHTT; PAM sequence: GTGTGCTT
ttagtactgtagtatcaaat

SEQ ID NO: 42575 - DNA, 20 bp, Artificial Sequence
  Description of Artificial Sequence: Synthetic oligonucleotide
  Target: LAMA2; (-) strand; PAM type: NNNNGHTT; PAM sequence: GTAGGCTT
tgtaaattgtgatattcact

SEQ ID NO: 42576 - DNA, 20 bp, Artificial Sequence
  Description of Artificial Sequence: Synthetic oligonucleotide
  Target: LAMA2; (-) strand; PAM type: NNNNGHTT; PAM sequence: TATTGTTT
tgccttttaagtttctggtt

SEQ ID NO: 42577 - DNA, 20 bp, Artificial Sequence
  Description of Artificial Sequence: Synthetic oligonucleotide
  Target: LAMA2; (-) strand; PAM type: NNNNGHTT; PAM sequence: TCTGGTTT
tgaagtatgccttttaagtt

SEQ ID NO: 42578 - DNA, 20 bp, Artificial Sequence
  Description of Artificial Sequence: Synthetic oligonucleotide
  Target: LAMA2; (-) strand; PAM type: NNNNGHTT; PAM sequence: TTAAGTTT
gactcaatgaagtatgcctt

SEQ ID NO: 42579 - DNA, 20 bp, Artificial Sequence
  Description of Artificial Sequence: Synthetic oligonucleotide
  Target: LAMA2; (-) strand; PAM type: NNNNGHTT; PAM sequence: GAACGTTT
ttaaaggagaacaaaacaca

SEQ ID NO: 42580 - DNA, 20 bp, Artificial Sequence
  Description of Artificial Sequence: Synthetic oligonucleotide
  Target: LAMA2; (-) strand; PAM type: NNNNGHTT; PAM sequence: AAACGTTT
tctactaaagatggcaaatg

SEQ ID NO: 42581 - DNA, 20 bp, Artificial Sequence
  Description of Artificial Sequence: Synthetic oligonucleotide
  Target: LAMA2; (-) strand; PAM type: NNNNGHTT; PAM sequence: AGGAGTTT
ctaaaatttccataggagaa

SEQ ID NO: 42582 - DNA, 20 bp, Artificial Sequence
  Description of Artificial Sequence: Synthetic oligonucleotide
  Target: LAMA2; (-) strand; PAM type: NNNNGHTT; PAM sequence: AGAGGATT
gtggataacaacattgtcag

SEQ ID NO: 42583 - DNA, 20 bp, Artificial Sequence
  Description of Artificial Sequence: Synthetic oligonucleotide
  Target: LAMA2; (-) strand; PAM type: NNNNGHTT; PAM sequence: AATTGCTT
aacactgagctaagcttgag

SEQ ID NO: 42584 - DNA, 20 bp, Artificial Sequence
  Description of Artificial Sequence: Synthetic oligonucleotide
  Target: LAMA2; (-) strand; PAM type: NNNNGHTT; PAM sequence: CTAAGCTT
agttttttaaaaacactgag

SEQ ID NO: 42585 - DNA, 20 bp, Artificial Sequence
  Description of Artificial Sequence: Synthetic oligonucleotide
  Target: LAMA2; (-) strand; PAM type: NNNNGHTT; PAM sequence: GGCAGTTT
aggcacttttctaaagcata

SEQ ID NO: 42586 - DNA, 20 bp, Artificial Sequence
  Description of Artificial Sequence: Synthetic oligonucleotide
  Target: LAMA2; (-) strand; PAM type: NNNNGHTT; PAM sequence: ACTAGATT
tcagaatcactggaccaggt

SEQ ID NO: 42587 - DNA, 20 bp, Artificial Sequence
  Description of Artificial Sequence: Synthetic oligonucleotide
  Target: LAMA2; (-) strand; PAM type: NNNNGHTT; PAM sequence: GGCAGATT
cactttgggaggctgaggca

SEQ ID NO: 42588 - DNA, 20 bp, Artificial Sequence
  Description of Artificial Sequence: Synthetic oligonucleotide
  Target: LAMA2; (-) strand; PAM type: NNNNGHTT; PAM sequence: TCATGCTT
gggaatgtttttaagaatcc

SEQ ID NO: 42589 - DNA, 20 bp, Artificial Sequence
  Description of Artificial Sequence: Synthetic oligonucleotide
  Target: LAMA2; (-) strand; PAM type: NNNNGHTT; PAM sequence: GAATGTTT
aacacattagaattgcctgg

SEQ ID NO: 42590 - DNA, 20 bp, Artificial Sequence
  Description of Artificial Sequence: Synthetic oligonucleotide
  Target: LAMA2; (-) strand; PAM type: NNNNGHTT; PAM sequence: TATTGCTT
taaatagggaatcctttccc

SEQ ID NO: 42591 - DNA, 20 bp, Artificial Sequence
  Description of Artificial Sequence: Synthetic oligonucleotide
  Target: LAMA2; (-) strand; PAM type: NNNNGHTT; PAM sequence: GCCAGTTT
cagctttctacttatggctt

SEQ ID NO: 42592 - DNA, 20 bp, Artificial Sequence
  Description of Artificial Sequence: Synthetic oligonucleotide
  Target: LAMA2; (-) strand; PAM type: NNNNGHTT; PAM sequence: TATGGCTT
tccagtttcagctttctact

SEQ ID NO: 42593 - DNA, 20 bp, Artificial Sequence
  Description of Artificial Sequence: Synthetic oligonucleotide
  Target: LAMA2; (-) strand; PAM type: NNNNGHTT; PAM sequence: TTCAGCTT
gtgtaaggaagggatccagt

SEQ ID NO: 42594 - DNA, 20 bp, Artificial Sequence
  Description of Artificial Sequence: Synthetic oligonucleotide
  Target: LAMA2; (-) strand; PAM type: NNNNGHTT; PAM sequence: TCCAGTTT
tataaggtgtaaggaaggga

SEQ ID NO: 42595 - DNA, 20 bp, Artificial Sequence
  Description of Artificial Sequence: Synthetic oligonucleotide
  Target: LAMA2; (-) strand; PAM type: NNNNGHTT; PAM sequence: TAACGTTT
ggtttgtatggttttaggtc

SEQ ID NO: 42596 - DNA, 20 bp, Artificial Sequence
  Description of Artificial Sequence: Synthetic oligonucleotide
  Target: LAMA2; (-) strand; PAM type: NNNNGHTT; PAM sequence: TATGGTTT
aggttttcttctagggtttg

SEQ ID NO: 42597 - DNA, 20 bp, Artificial Sequence
  Description of Artificial Sequence: Synthetic oligonucleotide
  Target: LAMA2; (-) strand; PAM type: NNNNGHTT; PAM sequence: TAGGGTTT
gtaatgcctaggttttcttc

SEQ ID NO: 42598 - DNA, 20 bp, Artificial Sequence
  Description of Artificial Sequence: Synthetic oligonucleotide
  Target: LAMA2; (-) strand; PAM type: NNNNGHTT; PAM sequence: CTAGGTTT
tatgtcctgaatggtaatgc

SEQ ID NO: 42599 - DNA, 20 bp, Artificial Sequence
  Description of Artificial Sequence: Synthetic oligonucleotide
  Target: LAMA2; (-) strand; PAM type: NNNNGHTT; PAM sequence: TGGTGTTT
gcttttgttgccattgcttt

SEQ ID NO: 42600 - DNA, 20 bp, Artificial Sequence
  Description of Artificial Sequence: Synthetic oligonucleotide
  Target: LAMA2; (-) strand; PAM type: NNNNGHTT; PAM sequence: CATTGCTT
tcaattttggcttttgttgc

SEQ ID NO: 42601 - DNA, 20 bp, Artificial Sequence
  Description of Artificial Sequence: Synthetic oligonucleotide
  Target: LAMA2; (-) strand; PAM type: NNNNGHTT; PAM sequence: TTTGGCTT
attagatcccatttgtcaat

SEQ ID NO: 42602 - DNA, 20 bp, Artificial Sequence
  Description of Artificial Sequence: Synthetic oligonucleotide
  Target: LAMA2; (-) strand; PAM type: NNNNGHTT; PAM sequence: TTTAGTTT
cttttgctgtgcagaagctc

SEQ ID NO: 42603 - DNA, 20 bp, Artificial Sequence
  Description of Artificial Sequence: Synthetic oligonucleotide
  Target: LAMA2; (-) strand; PAM type: NNNNGHTT; PAM sequence: GGTAGTTT
ggttgcctgttcgctctgct

SEQ ID NO: 42604 - DNA, 20 bp, Artificial Sequence
  Description of Artificial Sequence: Synthetic oligonucleotide
  Target: LAMA2; (-) strand; PAM type: NNNNGHTT; PAM sequence: TGTAGATT
gtaaatttgtttgagttcat

SEQ ID NO: 42605 - DNA, 20 bp, Artificial Sequence
  Description of Artificial Sequence: Synthetic oligonucleotide
  Target: LAMA2; (-) strand; PAM type: NNNNGHTT; PAM sequence: ATTTGTTT
gggttgtttttttcttgtaa

SEQ ID NO: 42606 - DNA, 20 bp, Artificial Sequence
  Description of Artificial Sequence: Synthetic oligonucleotide
  Target: LAMA2; (-) strand; PAM type: NNNNGHTT; PAM sequence: GGTTGTTT
ctttgcccactttttgatgg

SEQ ID NO: 42607 - DNA, 20 bp, Artificial Sequence
  Description of Artificial Sequence: Synthetic oligonucleotide
  Target: LAMA2; (-) strand; PAM type: NNNNGHTT; PAM sequence: TTTTGATT
gagatggtatctcattgtgg

SEQ ID NO: 42608 - DNA, 20 bp, Artificial Sequence
  Description of Artificial Sequence: Synthetic oligonucleotide
  Target: LAMA2; (-) strand; PAM type: NNNNGHTT; PAM sequence: TGTGGTTT
ggtgtgagatggtatctcat

SEQ ID NO: 42609 - DNA, 20 bp, Artificial Sequence
  Description of Artificial Sequence: Synthetic oligonucleotide
  Target: LAMA2; (-) strand; PAM type: NNNNGHTT; PAM sequence: TAATGATT
cctgttgtttcctgactttt

SEQ ID NO: 42610 - DNA, 20 bp, Artificial Sequence
  Description of Artificial Sequence: Synthetic oligonucleotide
  Target: LAMA2; (-) strand; PAM type: NNNNGHTT; PAM sequence: TGTTGTTT
tccacatcctctccagcacc

SEQ ID NO: 42611 - DNA, 20 bp, Artificial Sequence
  Description of Artificial Sequence: Synthetic oligonucleotide
  Target: LAMA2; (-) strand; PAM type: NNNNGHTT; PAM sequence: ACTAGTTT
ctgacttccacaatggttga

SEQ ID NO: 42612 - DNA, 20 bp, Artificial Sequence
  Description of Artificial Sequence: Synthetic oligonucleotide
  Target: LAMA2; (-) strand; PAM type: NNNNGHTT; PAM sequence: GCATGATT
gtgcatgtgtctttatagca

SEQ ID NO: 42613 - DNA, 20 bp, Artificial Sequence
  Description of Artificial Sequence: Synthetic oligonucleotide
  Target: LAMA2; (-) strand; PAM type: NNNNGHTT; PAM sequence: ATTTGCTT
ccatggtgtatatgtgccac

SEQ ID NO: 42614 - DNA, 20 bp, Artificial Sequence
  Description of Artificial Sequence: Synthetic oligonucleotide
  Target: LAMA2; (-) strand; PAM type: NNNNGHTT; PAM sequence: TCCAGTTT
gtttactgagaatgatgatt

SEQ ID NO: 42615 - DNA, 20 bp, Artificial Sequence
  Description of Artificial Sequence: Synthetic oligonucleotide
  Target: LAMA2; (-) strand; PAM type: NNNNGHTT; PAM sequence: TGATGATT
ttgtgatagtttactgagaa

SEQ ID NO: 42616 - DNA, 20 bp, Artificial Sequence
  Description of Artificial Sequence: Synthetic oligonucleotide
  Target: LAMA2; (-) strand; PAM type: NNNNGHTT; PAM sequence: GATAGTTT
gtttggttttttgtccttgt

SEQ ID NO: 42617 - DNA, 20 bp, Artificial Sequence
  Description of Artificial Sequence: Synthetic oligonucleotide
  Target: LAMA2; (-) strand; PAM type: NNNNGHTT; PAM sequence: TTTGGTTT
atgagtgagaacatgcgttg

SEQ ID NO: 42618 - DNA, 20 bp, Artificial Sequence
  Description of Artificial Sequence: Synthetic oligonucleotide
  Target: LAMA2; (-) strand; PAM type: NNNNGHTT; PAM sequence: CGTTGTTT
catctatgagtgagaacatg

SEQ ID NO: 42619 - DNA, 20 bp, Artificial Sequence
  Description of Artificial Sequence: Synthetic oligonucleotide
  Target: LAMA2; (-) strand; PAM type: NNNNGHTT; PAM sequence: TTAAGTTT
ttttttattattattatact

SEQ ID NO: 42620 - DNA, 20 bp, Artificial Sequence
  Description of Artificial Sequence: Synthetic oligonucleotide
  Target: LAMA2; (-) strand; PAM type: NNNNGHTT; PAM sequence: TAGTGCTT
gataatgtttctttttagaa

SEQ ID NO: 42621 - DNA, 20 bp, Artificial Sequence
  Description of Artificial Sequence: Synthetic oligonucleotide
  Target: LAMA2; (-) strand; PAM type: NNNNGHTT; PAM sequence: TAATGTTT
ctctttgttggcatggagga

SEQ ID NO: 42622 - DNA, 20 bp, Artificial Sequence
  Description of Artificial Sequence: Synthetic oligonucleotide
  Target: LAMA2; (-) strand; PAM type: NNNNGHTT; PAM sequence: CTGGGATT
ctgcctgagcgaccaaagtg

SEQ ID NO: 42623 - DNA, 20 bp, Artificial Sequence
  Description of Artificial Sequence: Synthetic oligonucleotide
  Target: LAMA2; (-) strand; PAM type: NNNNGHTT; PAM sequence: TGGAGCTT
tggtataatcatcagctcac

SEQ ID NO: 42624 - DNA, 20 bp, Artificial Sequence
  Description of Artificial Sequence: Synthetic oligonucleotide
  Target: LAMA2; (-) strand; PAM type: NNNNGHTT; PAM sequence: ACTAGATT
atgttttatatattaaattc

SEQ ID NO: 42625 - DNA, 20 bp, Artificial Sequence
  Description of Artificial Sequence: Synthetic oligonucleotide
  Target: LAMA2; (-) strand; PAM type: NNNNGHTT; PAM sequence: CAATGTTT
taaaagatattcactagatt

SEQ ID NO: 42626 - DNA, 20 bp, Artificial Sequence
  Description of Artificial Sequence: Synthetic oligonucleotide
  Target: LAMA2; (-) strand; PAM type: NNNNGHTT; PAM sequence: ACTAGATT
agtttggttaaaagatattc

SEQ ID NO: 42627 - DNA, 20 bp, Artificial Sequence
  Description of Artificial Sequence: Synthetic oligonucleotide
  Target: LAMA2; (-) strand; PAM type: NNNNGHTT; PAM sequence: TAAAGTTT
tttcaaaaagttttatttct

SEQ ID NO: 42628 - DNA, 20 bp, Artificial Sequence
  Description of Artificial Sequence: Synthetic oligonucleotide
  Target: LAMA2; (-) strand; PAM type: NNNNGHTT; PAM sequence: AAAAGTTT
ttaaaacacattggttttca

SEQ ID NO: 42629 - DNA, 20 bp, Artificial Sequence
  Description of Artificial Sequence: Synthetic oligonucleotide
  Target: LAMA2; (-) strand; PAM type: NNNNGHTT; PAM sequence: ATTGGTTT
tgtttccacttttaaaacac

SEQ ID NO: 42630 - DNA, 20 bp, Artificial Sequence
  Description of Artificial Sequence: Synthetic oligonucleotide
  Target: LAMA2; (-) strand; PAM type: NNNNGHTT; PAM sequence: GTATGTTT
tgtcagcgtttagtgcagat

SEQ ID NO: 42631 - DNA, 20 bp, Artificial Sequence
  Description of Artificial Sequence: Synthetic oligonucleotide
  Target: LAMA2; (-) strand; PAM type: NNNNGHTT; PAM sequence: CAGCGTTT
ttaagcccaaaaagtcatgt

SEQ ID NO: 42632 - DNA, 20 bp, Artificial Sequence
  Description of Artificial Sequence: Synthetic oligonucleotide
  Target: LAMA2; (-) strand; PAM type: NNNNGHTT; PAM sequence: TCCAGATT
cctgtttatcccactcagtg

SEQ ID NO: 42633 - DNA, 20 bp, Artificial Sequence
  Description of Artificial Sequence: Synthetic oligonucleotide
  Target: LAMA2; (-) strand; PAM type: NNNNGHTT; PAM sequence: TCCTGTTT
aaggaacccaacatctttat

SEQ ID NO: 42634 - DNA, 20 bp, Artificial Sequence
  Description of Artificial Sequence: Synthetic oligonucleotide
  Target: LAMA2; (-) strand; PAM type: NNNNGHTT; PAM sequence: TTTAGCTT
aggactcaagaaagaaaggc

SEQ ID NO: 42635 - DNA, 20 bp, Artificial Sequence
  Description of Artificial Sequence: Synthetic oligonucleotide
  Target: LAMA2; (-) strand; PAM type: NNNNGHTT; PAM sequence: AAAGGCTT
ctgtgcaggactcaagaaag

SEQ ID NO: 42636 - DNA, 20 bp, Artificial Sequence
  Description of Artificial Sequence: Synthetic oligonucleotide
  Target: LAMA2; (-) strand; PAM type: NNNNGHTT; PAM sequence: TTCCGTTT
ccaatttaactgcctttgct

SEQ ID NO: 42637 - DNA, 20 bp, Artificial Sequence
  Description of Artificial Sequence: Synthetic oligonucleotide
  Target: LAMA2; (-) strand; PAM type: NNNNGHTT; PAM sequence: CTTTGCTT
aggagtgccaatttaactgc

SEQ ID NO: 42638 - DNA, 20 bp, Artificial Sequence
  Description of Artificial Sequence: Synthetic oligonucleotide
  Target: LAMA2; (-) strand; PAM type: NNNNGHTT; PAM sequence: TGTAGATT
gctgctgtgcccagcccaaa

SEQ ID NO: 42639 - DNA, 20 bp, Artificial Sequence
  Description of Artificial Sequence: Synthetic oligonucleotide
  Target: LAMA2; (-) strand; PAM type: NNNNGHTT; PAM sequence: TTGGGATT
tgccttggcctcccagagtg

SEQ ID NO: 42640 - DNA, 20 bp, Artificial Sequence
  Description of Artificial Sequence: Synthetic oligonucleotide
  Target: LAMA2; (-) strand; PAM type: NNNNGHTT; PAM sequence: CTGGGCTT
ctcaggctggtctcaaactc

SEQ ID NO: 42641 - DNA, 20 bp, Artificial Sequence
  Description of Artificial Sequence: Synthetic oligonucleotide
  Target: LAMA2; (-) strand; PAM type: NNNNGHTT; PAM sequence: CTCAGCTT
tgctcaagtgaacctcccac

SEQ ID NO: 42642 - DNA, 20 bp, Artificial Sequence
  Description of Artificial Sequence: Synthetic oligonucleotide
  Target: LAMA2; (-) strand; PAM type: NNNNGHTT; PAM sequence: TATTGCTT
ttttcttttttgagacagga

SEQ ID NO: 42643 - DNA, 20 bp, Artificial Sequence
  Description of Artificial Sequence: Synthetic oligonucleotide
  Target: LAMA2; (-) strand; PAM type: NNNNGHTT; PAM sequence: TATAGTTT
cctgggccctacccagagat

SEQ ID NO: 42644 - DNA, 20 bp, Artificial Sequence
  Description of Artificial Sequence: Synthetic oligonucleotide
  Target: LAMA2; (-) strand; PAM type: NNNNGHTT; PAM sequence: CAGAGATT
gccaatgcctgggccctacc

SEQ ID NO: 42645 - DNA, 20 bp, Artificial Sequence
  Description of Artificial Sequence: Synthetic oligonucleotide
  Target: LAMA2; (-) strand; PAM type: NNNNGHTT; PAM sequence: TGGGGATT
ggtttcacatttgaatcaag

SEQ ID NO: 42646 - DNA, 20 bp, Artificial Sequence
  Description of Artificial Sequence: Synthetic oligonucleotide
  Target: LAMA2; (-) strand; PAM type: NNNNGHTT; PAM sequence: CTTGGTTT
ggagcccaggggttttcagt

SEQ ID NO: 42647 - DNA, 20 bp, Artificial Sequence
  Description of Artificial Sequence: Synthetic oligonucleotide
  Target: LAMA2; (-) strand; PAM type: NNNNGHTT; PAM sequence: AGGGGTTT
tgtggaggtgacaggagccc

SEQ ID NO: 42648 - DNA, 20 bp, Artificial Sequence
  Description of Artificial Sequence: Synthetic oligonucleotide
  Target: LAMA2; (-) strand; PAM type: NNNNGHTT; PAM sequence: TTCTGCTT
tccaaacctaattcagtgaa

SEQ ID NO: 42649 - DNA, 20 bp, Artificial Sequence
  Description of Artificial Sequence: Synthetic oligonucleotide
  Target: LAMA2; (-) strand; PAM type: NNNNGHTT; PAM sequence: ACAAGTTT
gagtatgaattttgcatggg

SEQ ID NO: 42650 - DNA, 20 bp, Artificial Sequence
  Description of Artificial Sequence: Synthetic oligonucleotide
  Target: LAMA2; (-) strand; PAM type: NNNNGHTT; PAM sequence: CTGGGATT
tgcttcagcctcccaaagtg

SEQ ID NO: 42651 - DNA, 20 bp, Artificial Sequence
  Description of Artificial Sequence: Synthetic oligonucleotide
  Target: LAMA2; (-) strand; PAM type: NNNNGHTT; PAM sequence: ACCTGCTT
ctcctgacctcaggtggtcc

SEQ ID NO: 42652 - DNA, 20 bp, Artificial Sequence
  Description of Artificial Sequence: Synthetic oligonucleotide
  Target: LAMA2; (-) strand; PAM type: NNNNGHTT; PAM sequence: TGGGGTTT
ttttgtattgttagtagaga

SEQ ID NO: 42653 - DNA, 20 bp, Artificial Sequence
  Description of Artificial Sequence: Synthetic oligonucleotide
  Target: LAMA2; (-) strand; PAM type: NNNNGHTT; PAM sequence: CTGAGATT
tgcctcagcctcccgagtag

SEQ ID NO: 42654 - DNA, 20 bp, Artificial Sequence
  Description of Artificial Sequence: Synthetic oligonucleotide
  Target: LAMA2; (-) strand; PAM type: NNNNGHTT; PAM sequence: AAGCGATT
aacctccgcctcttgggttc

SEQ ID NO: 42655 - DNA, 20 bp, Artificial Sequence
  Description of Artificial Sequence: Synthetic oligonucleotide
  Target: LAMA2; (-) strand; PAM type: NNNNGHTT; PAM sequence: GACAGATT
atttatttatttatttttga

SEQ ID NO: 42656 - DNA, 20 bp, Artificial Sequence
  Description of Artificial Sequence: Synthetic oligonucleotide
  Target: LAMA2; (-) strand; PAM type: NNNNGHTT; PAM sequence: ATTTGATT
ttgttttgggataagaacta

SEQ ID NO: 42657 - DNA, 20 bp, Artificial Sequence
  Description of Artificial Sequence: Synthetic oligonucleotide
  Target: LAMA2; (-) strand; PAM type: NNNNGHTT; PAM sequence: TCTTGTTT
tgggtagaggaaatatttta

SEQ ID NO: 42658 - DNA, 20 bp, Artificial Sequence
  Description of Artificial Sequence: Synthetic oligonucleotide
  Target: LAMA2; (-) strand; PAM type: NNNNGHTT; PAM sequence: TTCTGCTT
tggaaaataagtgaaaagtc

SEQ ID NO: 42659 - DNA, 20 bp, Artificial Sequence
  Description of Artificial Sequence: Synthetic oligonucleotide
  Target: LAMA2; (-) strand; PAM type: NNNNGHTT; PAM sequence: GGGTGTTT
gctgacaacctggtaggagt

SEQ ID NO: 42660 - DNA, 20 bp, Artificial Sequence
  Description of Artificial Sequence: Synthetic oligonucleotide
  Target: LAMA2; (-) strand; PAM type: NNNNGHTT; PAM sequence: AAATGTTT
ttcaataaaagtcccctcac

SEQ ID NO: 42661 - DNA, 20 bp, Artificial Sequence
  Description of Artificial Sequence: Synthetic oligonucleotide
  Target: LAMA2; (+) strand; PAM type: NNNNGHTT; PAM sequence: CACTGCTT
gtacattcaaaactataagg

SEQ ID NO: 42662 - DNA, 20 bp, Artificial Sequence
  Description of Artificial Sequence: Synthetic oligonucleotide
  Target: LAMA2; (+) strand; PAM type: NNNNGHTT; PAM sequence: TTGTGCTT
ttaccatatgatccaggcaa

SEQ ID NO: 42663 - DNA, 20 bp, Artificial Sequence
  Description of Artificial Sequence: Synthetic oligonucleotide
  Target: LAMA2; (+) strand; PAM type: NNNNGHTT; PAM sequence: GGGGGATT
tttttctgggaatggaggtt

SEQ ID NO: 42664 - DNA, 20 bp, Artificial Sequence
  Description of Artificial Sequence: Synthetic oligonucleotide
  Target: LAMA2; (+) strand; PAM type: NNNNGHTT; PAM sequence: AGGTGTTT
tcaaaacttggaaccaacca

SEQ ID NO: 42665 - DNA, 20 bp, Artificial Sequence
  Description of Artificial Sequence: Synthetic oligonucleotide
  Target: LAMA2; (+) strand; PAM type: NNNNGHTT; PAM sequence: GTATGATT
tatctgaaaggctatatatt

SEQ ID NO: 42666 - DNA, 20 bp, Artificial Sequence
  Description of Artificial Sequence: Synthetic oligonucleotide
  Target: LAMA2; (+) strand; PAM type: NNNNGHTT; PAM sequence: CAGTGTTT
gtaaaaagatcagtggttgc

SEQ ID NO: 42667 - DNA, 20 bp, Artificial Sequence
  Description of Artificial Sequence: Synthetic oligonucleotide
  Target: LAMA2; (+) strand; PAM type: NNNNGHTT; PAM sequence: GTAGGTTT
agtgataatgatatgtcaat

SEQ ID NO: 42668 - DNA, 20 bp, Artificial Sequence
  Description of Artificial Sequence: Synthetic oligonucleotide
  Target: LAMA2; (+) strand; PAM type: NNNNGHTT; PAM sequence: AATAGATT
aatattcaacttcaccaatg

SEQ ID NO: 42669 - DNA, 20 bp, Artificial Sequence
  Description of Artificial Sequence: Synthetic oligonucleotide
  Target: LAMA2; (+) strand; PAM type: NNNNGHTT; PAM sequence: TTTTGTTT
acctaaaatagtaaagataa

SEQ ID NO: 42670 - DNA, 20 bp, Artificial Sequence
  Description of Artificial Sequence: Synthetic oligonucleotide
  Target: LAMA2; (+) strand; PAM type: NNNNGHTT; PAM sequence: ATAGGATT
ttgttttgtaaaacaacatt

SEQ ID NO: 42671 - DNA, 20 bp, Artificial Sequence
  Description of Artificial Sequence: Synthetic oligonucleotide
  Target: LAMA2; (+) strand; PAM type: NNNNGHTT; PAM sequence: CAATGATT
gttcacaactttggtgtagg

SEQ ID NO: 42672 - DNA, 20 bp, Artificial Sequence
  Description of Artificial Sequence: Synthetic oligonucleotide
  Target: LAMA2; (+) strand; PAM type: NNNNGHTT; PAM sequence: GAATGATT
caaaaaatattaagcataat

SEQ ID NO: 42673 - DNA, 20 bp, Artificial Sequence
  Description of Artificial Sequence: Synthetic oligonucleotide
  Target: LAMA2; (+) strand; PAM type: NNNNGHTT; PAM sequence: CACAGATT
ctccaaatgcaaagtcaagc

SEQ ID NO: 42674 - DNA, 20 bp, Artificial Sequence
  Description of Artificial Sequence: Synthetic oligonucleotide
  Target: LAMA2; (+) strand; PAM type: NNNNGHTT; PAM sequence: CAAAGATT
ggcaaacaaagcaaaatgag

SEQ ID NO: 42675 - DNA, 20 bp, Artificial Sequence
  Description of Artificial Sequence: Synthetic oligonucleotide
  Target: LAMA2; (+) strand; PAM type: NNNNGHTT; PAM sequence: TGACGATT
cacaaaataagatatacaaa

SEQ ID NO: 42676 - DNA, 20 bp, Artificial Sequence
  Description of Artificial Sequence: Synthetic oligonucleotide
  Target: LAMA2; (+) strand; PAM type: NNNNGHTT; PAM sequence: CACAGTTT
acaacattggaaaagaggtt

SEQ ID NO: 42677 - DNA, 20 bp, Artificial Sequence
  Description of Artificial Sequence: Synthetic oligonucleotide
  Target: LAMA2; (+) strand; PAM type: NNNNGHTT; PAM sequence: CTGTGTTT
taaacatgtccatgcgaaca

SEQ ID NO: 42678 - DNA, 20 bp, Artificial Sequence
  Description of Artificial Sequence: Synthetic oligonucleotide
  Target: LAMA2; (+) strand; PAM type: NNNNGHTT; PAM sequence: AAAAGATT
aagtgaaagaagccagacac

SEQ ID NO: 42679 - DNA, 20 bp, Artificial Sequence
  Description of Artificial Sequence: Synthetic oligonucleotide
  Target: LAMA2; (+) strand; PAM type: NNNNGHTT; PAM sequence: GGGGGATT
tttttctgggaatggaggtt

SEQ ID NO: 42680 - DNA, 20 bp, Artificial Sequence
  Description of Artificial Sequence: Synthetic oligonucleotide
  Target: LAMA2; (+) strand; PAM type: NNNNGHTT; PAM sequence: TTGAGATT
aaggtcagaaagaaaacttt

SEQ ID NO: 42681 - DNA, 20 bp, Artificial Sequence
  Description of Artificial Sequence: Synthetic oligonucleotide
  Target: LAMA2; (+) strand; PAM type: NNNNGHTT; PAM sequence: AAATGTTT
gatgagtatttacatctaaa

SEQ ID NO: 42682 - DNA, 20 bp, Artificial Sequence
  Description of Artificial Sequence: Synthetic oligonucleotide
  Target: LAMA2; (+) strand; PAM type: NNNNGHTT; PAM sequence: TTAGGTTT
gtgtgtaaattgtaccttat

SEQ ID NO: 42683 - DNA, 20 bp, Artificial Sequence
  Description of Artificial Sequence: Synthetic oligonucleotide
  Target: LAMA2; (+) strand; PAM type: NNNNGHTT; PAM sequence: TATTGATT
tgcagaaaagcaggtacaaa

SEQ ID NO: 42684 - DNA, 20 bp, Artificial Sequence
  Description of Artificial Sequence: Synthetic oligonucleotide
  Target: LAMA2; (+) strand; PAM type: NNNNGHTT; PAM sequence: TTCTGATT
tagagttagcagctgcatca

SEQ ID NO: 42685 - DNA, 20 bp, Artificial Sequence
  Description of Artificial Sequence: Synthetic oligonucleotide
  Target: LAMA2; (+) strand; PAM type: NNNNGHTT; PAM sequence: ATTAGATT
ataaatattttttattattt

SEQ ID NO: 42686 - DNA, 20 bp, Artificial Sequence
  Description of Artificial Sequence: Synthetic oligonucleotide
  Target: LAMA2; (+) strand; PAM type: NNNNGHTT; PAM sequence: ATTAGATT
ataaatattttttattattt

SEQ ID NO: 42687 - DNA, 20 bp, Artificial Sequence
  Description of Artificial Sequence: Synthetic oligonucleotide
  Target: LAMA2; (+) strand; PAM type: NNNNGHTT; PAM sequence: ATAGGTTT
taatcattctgagaatagca

SEQ ID NO: 42688 - DNA, 20 bp, Artificial Sequence
  Description of Artificial Sequence: Synthetic oligonucleotide
  Target: LAMA2; (+) strand; PAM type: NNNNGHTT; PAM sequence: TGGGGCTT
ttagaccaaattaaaaacac

SEQ ID NO: 42689 - DNA, 20 bp, Artificial Sequence
  Description of Artificial Sequence: Synthetic oligonucleotide
  Target: LAMA2; (+) strand; PAM type: NNNNGHTT; PAM sequence: ATAAGTTT
attataataaactctcaaat

SEQ ID NO: 42690 - DNA, 20 bp, Artificial Sequence
  Description of Artificial Sequence: Synthetic oligonucleotide
  Target: LAMA2; (+) strand; PAM type: NNNNGHTT; PAM sequence: TATTGTTT
ctctcaaatataagttttat

SEQ ID NO: 42691 - DNA, 20 bp, Artificial Sequence
  Description of Artificial Sequence: Synthetic oligonucleotide
  Target: LAMA2; (+) strand; PAM type: NNNNGHTT; PAM sequence: AAAGGATT
caaatttccacagtaaggta

SEQ ID NO: 42692 - DNA, 20 bp, Artificial Sequence
  Description of Artificial Sequence: Synthetic oligonucleotide
  Target: LAMA2; (+) strand; PAM type: NNNNGHTT; PAM sequence: CAAAGCTT
acagtaaggtaaaaggatta

SEQ ID NO: 42693 - DNA, 20 bp, Artificial Sequence
  Description of Artificial Sequence: Synthetic oligonucleotide
  Target: LAMA2; (+) strand; PAM type: NNNNGHTT; PAM sequence: ATGGGCTT
gacatgaataatattaaaga

SEQ ID NO: 42694 - DNA, 20 bp, Artificial Sequence
  Description of Artificial Sequence: Synthetic oligonucleotide
  Target: LAMA2; (+) strand; PAM type: NNNNGHTT; PAM sequence: TAGTGATT
attaaagaatgggctttggc

SEQ ID NO: 42695 - DNA, 20 bp, Artificial Sequence
  Description of Artificial Sequence: Synthetic oligonucleotide
  Target: LAMA2; (+) strand; PAM type: NNNNGHTT; PAM sequence: AAATGCTT
caatatgtatttcaacatat

SEQ ID NO: 42696 - DNA, 20 bp, Artificial Sequence
  Description of Artificial Sequence: Synthetic oligonucleotide
  Target: LAMA2; (+) strand; PAM type: NNNNGHTT; PAM sequence: AAAAGTTT
cttaggaggcaaaataaaat

SEQ ID NO: 42697 - DNA, 20 bp, Artificial Sequence
  Description of Artificial Sequence: Synthetic oligonucleotide
  Target: LAMA2; (+) strand; PAM type: NNNNGHTT; PAM sequence: ATGTGCTT
gggcaaggttgttatcagtg

SEQ ID NO: 42698 - DNA, 20 bp, Artificial Sequence
  Description of Artificial Sequence: Synthetic oligonucleotide
  Target: LAMA2; (+) strand; PAM type: NNNNGHTT; PAM sequence: TTAGGTTT
gatgtggaaacaaacttaaa

SEQ ID NO: 42699 - DNA, 20 bp, Artificial Sequence
  Description of Artificial Sequence: Synthetic oligonucleotide
  Target: LAMA2; (+) strand; PAM type: NNNNGHTT; PAM sequence: CAAGGTTT
attaggtttcaaatataagg

SEQ ID NO: 42700 - DNA, 20 bp, Artificial Sequence
  Description of Artificial Sequence: Synthetic oligonucleotide
  Target: LAMA2; (+) strand; PAM type: NNNNGHTT; PAM sequence: TGTTGTTT
tcaaatataaggcaaggttt

SEQ ID NO: 42701 - DNA, 20 bp, Artificial Sequence
  Description of Artificial Sequence: Synthetic oligonucleotide
  Target: LAMA2; (+) strand; PAM type: NNNNGHTT; PAM sequence: TTTTGTTT
tataaggcaaggttttgttg

SEQ ID NO: 42702 - DNA, 20 bp, Artificial Sequence
  Description of Artificial Sequence: Synthetic oligonucleotide
  Target: LAMA2; (+) strand; PAM type: NNNNGHTT; PAM sequence: GTTTGTTT
aggcaaggttttgttgtttt

SEQ ID NO: 42703 - DNA, 20 bp, Artificial Sequence
  Description of Artificial Sequence: Synthetic oligonucleotide
  Target: LAMA2; (+) strand; PAM type: NNNNGHTT; PAM sequence: GTTTGTTT
aaggttttgttgttttgttt

SEQ ID NO: 42704 - DNA, 20 bp, Artificial Sequence
  Description of Artificial Sequence: Synthetic oligonucleotide
  Target: LAMA2; (+) strand; PAM type: NNNNGHTT; PAM sequence: AGTTGTTT
actcacaaaatccattatgg

SEQ ID NO: 42705 - DNA, 20 bp, Artificial Sequence
  Description of Artificial Sequence: Synthetic oligonucleotide
  Target: LAMA2; (+) strand; PAM type: NNNNGHTT; PAM sequence: ATTAGTTT
tgaaagccttcattctaacc

SEQ ID NO: 42706 - DNA, 20 bp, Artificial Sequence
  Description of Artificial Sequence: Synthetic oligonucleotide
  Target: LAMA2; (+) strand; PAM type: NNNNGHTT; PAM sequence: GGCTGTTT
catttcagggacgccagggt

SEQ ID NO: 42707 - DNA, 20 bp, Artificial Sequence
  Description of Artificial Sequence: Synthetic oligonucleotide
  Target: LAMA2; (+) strand; PAM type: NNNNGHTT; PAM sequence: CACAGTTT
ctaggtacacagtggctgca

SEQ ID NO: 42708 - DNA, 20 bp, Artificial Sequence
  Description of Artificial Sequence: Synthetic oligonucleotide
  Target: LAMA2; (+) strand; PAM type: NNNNGHTT; PAM sequence: AGCTGTTT
ctcaagaggtaaaagttcct

SEQ ID NO: 42709 - DNA, 20 bp, Artificial Sequence
  Description of Artificial Sequence: Synthetic oligonucleotide
  Target: LAMA2; (+) strand; PAM type: NNNNGHTT; PAM sequence: TAATGTTT
ctgtttgcatttcccagaaa

SEQ ID NO: 42710 - DNA, 20 bp, Artificial Sequence
  Description of Artificial Sequence: Synthetic oligonucleotide
  Target: LAMA2; (+) strand; PAM type: NNNNGHTT; PAM sequence: TAGGGATT
gaaataatgttttccatgtg

SEQ ID NO: 42711 - DNA, 20 bp, Artificial Sequence
  Description of Artificial Sequence: Synthetic oligonucleotide
  Target: LAMA2; (+) strand; PAM type: NNNNGHTT; PAM sequence: TACAGATT
ttttccatgtgtagggattt

SEQ ID NO: 42712 - DNA, 20 bp, Artificial Sequence
  Description of Artificial Sequence: Synthetic oligonucleotide
  Target: LAMA2; (+) strand; PAM type: NNNNGHTT; PAM sequence: AAGTGCTT
tagggattttacagatttca

SEQ ID NO: 42713 - DNA, 20 bp, Artificial Sequence
  Description of Artificial Sequence: Synthetic oligonucleotide
  Target: LAMA2; (+) strand; PAM type: NNNNGHTT; PAM sequence: ATGGGCTT
caaagaggtacagtcgaggc

SEQ ID NO: 42714 - DNA, 20 bp, Artificial Sequence
  Description of Artificial Sequence: Synthetic oligonucleotide
  Target: LAMA2; (+) strand; PAM type: NNNNGHTT; PAM sequence: CCGAGATT
ggttgcatcctttgccggga

SEQ ID NO: 42715 - DNA, 20 bp, Artificial Sequence
  Description of Artificial Sequence: Synthetic oligonucleotide
  Target: LAMA2; (+) strand; PAM type: NNNNGHTT; PAM sequence: TCTTGCTT
ttgctgtctgtggactgccg

SEQ ID NO: 42716 - DNA, 20 bp, Artificial Sequence
  Description of Artificial Sequence: Synthetic oligonucleotide
  Target: LAMA2; (+) strand; PAM type: NNNNGHTT; PAM sequence: GAGTGCTT
agtcctgcaaaaggaacggg

SEQ ID NO: 42717 - DNA, 20 bp, Artificial Sequence
  Description of Artificial Sequence: Synthetic oligonucleotide
  Target: LAMA2; (+) strand; PAM type: NNNNGHTT; PAM sequence: TTTAGTTT
gggagtgcttttcattgttc

SEQ ID NO: 42718 - DNA, 20 bp, Artificial Sequence
  Description of Artificial Sequence: Synthetic oligonucleotide
  Target: LAMA2; (+) strand; PAM type: NNNNGHTT; PAM sequence: AATTGATT
ctatcacgatacatcccgta

SEQ ID NO: 42719 - DNA, 20 bp, Artificial Sequence
  Description of Artificial Sequence: Synthetic oligonucleotide
  Target: LAMA2; (+) strand; PAM type: NNNNGHTT; PAM sequence: AAAGGCTT
tcagagcccatcctgcagag

SEQ ID NO: 42720 - DNA, 20 bp, Artificial Sequence
  Description of Artificial Sequence: Synthetic oligonucleotide
  Target: LAMA2; (+) strand; PAM type: NNNNGHTT; PAM sequence: TAAAGTTT
cacacacatatatatatata

SEQ ID NO: 42721 - DNA, 20 bp, Artificial Sequence
  Description of Artificial Sequence: Synthetic oligonucleotide
  Target: LAMA2; (+) strand; PAM type: NNNNGHTT; PAM sequence: CTTTGTTT
atatataaagttttacagaa

SEQ ID NO: 42722 - DNA, 20 bp, Artificial Sequence
  Description of Artificial Sequence: Synthetic oligonucleotide
  Target: LAMA2; (+) strand; PAM type: NNNNGHTT; PAM sequence: ACAGGATT
ctttgttttcaacttttaaa

SEQ ID NO: 42723 - DNA, 20 bp, Artificial Sequence
  Description of Artificial Sequence: Synthetic oligonucleotide
  Target: LAMA2; (+) strand; PAM type: NNNNGHTT; PAM sequence: TGTGGTTT
caggatttctaaagaagtta

SEQ ID NO: 42724 - DNA, 20 bp, Artificial Sequence
  Description of Artificial Sequence: Synthetic oligonucleotide
  Target: LAMA2; (+) strand; PAM type: NNNNGHTT; PAM sequence: TTTTGCTT
tgaaatcgtgaaatttctcc

SEQ ID NO: 42725 - DNA, 20 bp, Artificial Sequence
  Description of Artificial Sequence: Synthetic oligonucleotide
  Target: LAMA2; (+) strand; PAM type: NNNNGHTT; PAM sequence: TAGTGTTT
ttattctcctcagagcctct

SEQ ID NO: 42726 - DNA, 20 bp, Artificial Sequence
  Description of Artificial Sequence: Synthetic oligonucleotide
  Target: LAMA2; (+) strand; PAM type: NNNNGHTT; PAM sequence: TTCGGTTT
aaaaaaagaaatatttatta

SEQ ID NO: 42727 - DNA, 20 bp, Artificial Sequence
  Description of Artificial Sequence: Synthetic oligonucleotide
  Target: LAMA2; (+) strand; PAM type: NNNNGHTT; PAM sequence: AAATGTTT
ttattcggttttaaatatga

SEQ ID NO: 42728 - DNA, 20 bp, Artificial Sequence
  Description of Artificial Sequence: Synthetic oligonucleotide
  Target: LAMA2; (+) strand; PAM type: NNNNGHTT; PAM sequence: AGAAGCTT
gagtacaaaatctgtaggtt

SEQ ID NO: 42729 - DNA, 20 bp, Artificial Sequence
  Description of Artificial Sequence: Synthetic oligonucleotide
  Target: LAMA2; (+) strand; PAM type: NNNNGHTT; PAM sequence: AAAAGTTT
tctgtaggttagaagctttt

SEQ ID NO: 42730 - DNA, 20 bp, Artificial Sequence
  Description of Artificial Sequence: Synthetic oligonucleotide
  Target: LAMA2; (+) strand; PAM type: NNNNGHTT; PAM sequence: ATCTGCTT
aaaagttttaatgaggctga

SEQ ID NO: 42731 - DNA, 20 bp, Artificial Sequence
  Description of Artificial Sequence: Synthetic oligonucleotide
  Target: LAMA2; (+) strand; PAM type: NNNNGHTT; PAM sequence: TTAAGTTT
tttaatgaggctgaatctgc

SEQ ID NO: 42732 - DNA, 20 bp, Artificial Sequence
  Description of Artificial Sequence: Synthetic oligonucleotide
  Target: LAMA2; (+) strand; PAM type: NNNNGHTT; PAM sequence: CCCTGATT
ctctttctataataataact

SEQ ID NO: 42733 - DNA, 20 bp, Artificial Sequence
  Description of Artificial Sequence: Synthetic oligonucleotide
  Target: LAMA2; (+) strand; PAM type: NNNNGHTT; PAM sequence: TTTTGCTT
tataacttttttccttctat

SEQ ID NO: 42734 - DNA, 20 bp, Artificial Sequence
  Description of Artificial Sequence: Synthetic oligonucleotide
  Target: LAMA2; (+) strand; PAM type: NNNNGHTT; PAM sequence: TTTTGCTT
ttttttccttctatttttgc

SEQ ID NO: 42735 - DNA, 20 bp, Artificial Sequence
  Description of Artificial Sequence: Synthetic oligonucleotide
  Target: LAMA2; (+) strand; PAM type: NNNNGHTT; PAM sequence: GAGTGATT
ttaattaatataatttacga

SEQ ID NO: 42736 - DNA, 20 bp, Artificial Sequence
  Description of Artificial Sequence: Synthetic oligonucleotide
  Target: LAMA2; (+) strand; PAM type: NNNNGHTT; PAM sequence: GTGTGTTT
aaactttgctcaattacaag

SEQ ID NO: 42737 - DNA, 20 bp, Artificial Sequence
  Description of Artificial Sequence: Synthetic oligonucleotide
  Target: LAMA2; (+) strand; PAM type: NNNNGHTT; PAM sequence: ACAGGATT
aagaattatcctgaacacac

SEQ ID NO: 42738 - DNA, 20 bp, Artificial Sequence
  Description of Artificial Sequence: Synthetic oligonucleotide
  Target: LAMA2; (+) strand; PAM type: NNNNGHTT; PAM sequence: CTCTGATT
ttcaaataaggtaatattaa

SEQ ID NO: 42739 - DNA, 20 bp, Artificial Sequence
  Description of Artificial Sequence: Synthetic oligonucleotide
  Target: LAMA2; (+) strand; PAM type: NNNNGHTT; PAM sequence: AAGGGTTT
gatgaagtgaattcaggagg

SEQ ID NO: 42740 - DNA, 20 bp, Artificial Sequence
  Description of Artificial Sequence: Synthetic oligonucleotide
  Target: LAMA2; (+) strand; PAM type: NNNNGHTT; PAM sequence: TAGTGATT
catgaaactttaaaattgga

SEQ ID NO: 42741 - DNA, 20 bp, Artificial Sequence
  Description of Artificial Sequence: Synthetic oligonucleotide
  Target: LAMA2; (+) strand; PAM type: NNNNGHTT; PAM sequence: TTATGATT
ctttaaaattggatagtgat

SEQ ID NO: 42742 - DNA, 20 bp, Artificial Sequence
  Description of Artificial Sequence: Synthetic oligonucleotide
  Target: LAMA2; (+) strand; PAM type: NNNNGHTT; PAM sequence: TTAGGCTT
tcaaaggacaaatttagaac

SEQ ID NO: 42743 - DNA, 20 bp, Artificial Sequence
  Description of Artificial Sequence: Synthetic oligonucleotide
  Target: LAMA2; (+) strand; PAM type: NNNNGHTT; PAM sequence: TTAAGTTT
aggcttccagtagttgtaat

SEQ ID NO: 42744 - DNA, 20 bp, Artificial Sequence
  Description of Artificial Sequence: Synthetic oligonucleotide
  Target: LAMA2; (+) strand; PAM type: NNNNGHTT; PAM sequence: TATTGTTT
aacaactaaaacacttccgg

SEQ ID NO: 42745 - DNA, 20 bp, Artificial Sequence
  Description of Artificial Sequence: Synthetic oligonucleotide
  Target: LAMA2; (+) strand; PAM type: NNNNGHTT; PAM sequence: CAAGGTTT
aattcccttttttatggttc

SEQ ID NO: 42746 - DNA, 20 bp, Artificial Sequence
  Description of Artificial Sequence: Synthetic oligonucleotide
  Target: LAMA2; (+) strand; PAM type: NNNNGHTT; PAM sequence: AATTGTTT
ttccaaggtttctttccatt

SEQ ID NO: 42747 - DNA, 20 bp, Artificial Sequence
  Description of Artificial Sequence: Synthetic oligonucleotide
  Target: LAMA2; (+) strand; PAM type: NNNNGHTT; PAM sequence: CCATGTTT
ctttccattaattgtttagg

SEQ ID NO: 42748 - DNA, 20 bp, Artificial Sequence
  Description of Artificial Sequence: Synthetic oligonucleotide
  Target: LAMA2; (+) strand; PAM type: NNNNGHTT; PAM sequence: ATGAGTTT
ctctgtgaaaatcacgggat

SEQ ID NO: 42749 - DNA, 20 bp, Artificial Sequence
  Description of Artificial Sequence: Synthetic oligonucleotide
  Target: LAMA2; (+) strand; PAM type: NNNNGHTT; PAM sequence: AAGGGTTT
ggatatgagtttgactggag

SEQ ID NO: 42750 - DNA, 20 bp, Artificial Sequence
  Description of Artificial Sequence: Synthetic oligonucleotide
  Target: LAMA2; (+) strand; PAM type: NNNNGHTT; PAM sequence: TTCTGTTT
ttcctggctatgatcaactt

SEQ ID NO: 42751 - DNA, 20 bp, Artificial Sequence
  Description of Artificial Sequence: Synthetic oligonucleotide
  Target: LAMA2; (+) strand; PAM type: NNNNGHTT; PAM sequence: TTTCGATT
gctatgatcaacttttctgt

SEQ ID NO: 42752 - DNA, 20 bp, Artificial Sequence
  Description of Artificial Sequence: Synthetic oligonucleotide
  Target: LAMA2; (+) strand; PAM type: NNNNGHTT; PAM sequence: TTTTGTTT
gttagaaacataaccagact

SEQ ID NO: 42753 - DNA, 20 bp, Artificial Sequence
  Description of Artificial Sequence: Synthetic oligonucleotide
  Target: LAMA2; (+) strand; PAM type: NNNNGHTT; PAM sequence: TGTGGTTT
actttttctttgaaatctta

SEQ ID NO: 42754 - DNA, 20 bp, Artificial Sequence
  Description of Artificial Sequence: Synthetic oligonucleotide
  Target: LAMA2; (+) strand; PAM type: NNNNGHTT; PAM sequence: ACTCGATT
ttatgtggtttctatagcat

SEQ ID NO: 42755 - DNA, 20 bp, Artificial Sequence
  Description of Artificial Sequence: Synthetic oligonucleotide
  Target: LAMA2; (+) strand; PAM type: NNNNGHTT; PAM sequence: CATTGATT
ctcgattgtagtatgaatag

SEQ ID NO: 42756 - DNA, 20 bp, Artificial Sequence
  Description of Artificial Sequence: Synthetic oligonucleotide
  Target: LAMA2; (+) strand; PAM type: NNNNGHTT; PAM sequence: AAATGATT
gaaatagaatgatgcaatca

SEQ ID NO: 42757 - DNA, 20 bp, Artificial Sequence
  Description of Artificial Sequence: Synthetic oligonucleotide
  Target: LAMA2; (+) strand; PAM type: NNNNGHTT; PAM sequence: AAATGTTT
tttcagcaaggcagtgtcta

SEQ ID NO: 42758 - DNA, 20 bp, Artificial Sequence
  Description of Artificial Sequence: Synthetic oligonucleotide
  Target: LAMA2; (+) strand; PAM type: NNNNGHTT; PAM sequence: AACTGATT
cataatggcaggtaaattgc

SEQ ID NO: 42759 - DNA, 20 bp, Artificial Sequence
  Description of Artificial Sequence: Synthetic oligonucleotide
  Target: LAMA2; (+) strand; PAM type: NNNNGHTT; PAM sequence: AGTGGATT
gttcacaaagaatattgcat

SEQ ID NO: 42760 - DNA, 20 bp, Artificial Sequence
  Description of Artificial Sequence: Synthetic oligonucleotide
  Target: LAMA2; (+) strand; PAM type: NNNNGHTT; PAM sequence: AGAGGTTT
gaagtctctagcagtgcaac

SEQ ID NO: 42761 - DNA, 20 bp, Artificial Sequence
  Description of Artificial Sequence: Synthetic oligonucleotide
  Target: LAMA2; (+) strand; PAM type: NNNNGHTT; PAM sequence: AATGGCTT
ttatactcaactatcttggt

SEQ ID NO: 42762 - DNA, 20 bp, Artificial Sequence
  Description of Artificial Sequence: Synthetic oligonucleotide
  Target: LAMA2; (+) strand; PAM type: NNNNGHTT; PAM sequence: CCAAGCTT
cttgatggaaaatgtaaaat

SEQ ID NO: 42763 - DNA, 20 bp, Artificial Sequence
  Description of Artificial Sequence: Synthetic oligonucleotide
  Target: LAMA2; (+) strand; PAM type: NNNNGHTT; PAM sequence: AGTTGCTT
catgaatggcacctacatga

SEQ ID NO: 42764 - DNA, 20 bp, Artificial Sequence
  Description of Artificial Sequence: Synthetic oligonucleotide
  Target: LAMA2; (+) strand; PAM type: NNNNGHTT; PAM sequence: CATTGTTT
gctcttctggaaattagtta

SEQ ID NO: 42765 - DNA, 20 bp, Artificial Sequence
  Description of Artificial Sequence: Synthetic oligonucleotide
  Target: LAMA2; (+) strand; PAM type: NNNNGHTT; PAM sequence: ATATGTTT
ggaaattagttacattgttt

SEQ ID NO: 42766 - DNA, 20 bp, Artificial Sequence
  Description of Artificial Sequence: Synthetic oligonucleotide
  Target: LAMA2; (+) strand; PAM type: NNNNGHTT; PAM sequence: TGTTGCTT
ctcatagaagcacataggtc

SEQ ID NO: 42767 - DNA, 20 bp, Artificial Sequence
  Description of Artificial Sequence: Synthetic oligonucleotide
  Target: LAMA2; (+) strand; PAM type: NNNNGHTT; PAM sequence: AGAAGATT
gcagaatggttaagagtctg

SEQ ID NO: 42768 - DNA, 20 bp, Artificial Sequence
  Description of Artificial Sequence: Synthetic oligonucleotide
  Target: LAMA2; (+) strand; PAM type: NNNNGHTT; PAM sequence: GAAAGATT
aatctttccatctgaacaag

SEQ ID NO: 42769 - DNA, 20 bp, Artificial Sequence
  Description of Artificial Sequence: Synthetic oligonucleotide
  Target: LAMA2; (+) strand; PAM type: NNNNGHTT; PAM sequence: CCAGGTTT
tagaagaacatgacaaacaa

SEQ ID NO: 42770 - DNA, 20 bp, Artificial Sequence
  Description of Artificial Sequence: Synthetic oligonucleotide
  Target: LAMA2; (+) strand; PAM type: NNNNGHTT; PAM sequence: TTGTGTTT
gttgttcagaaatagctgaa

SEQ ID NO: 42771 - DNA, 20 bp, Artificial Sequence
  Description of Artificial Sequence: Synthetic oligonucleotide
  Target: LAMA2; (+) strand; PAM type: NNNNGHTT; PAM sequence: ACTTGCTT
agctgaattgtgtttgagca

SEQ ID NO: 42772 - DNA, 20 bp, Artificial Sequence
  Description of Artificial Sequence: Synthetic oligonucleotide
  Target: LAMA2; (+) strand; PAM type: NNNNGHTT; PAM sequence: GGATGCTT
tcagatgtacagttagtgag

SEQ ID NO: 42773 - DNA, 20 bp, Artificial Sequence
  Description of Artificial Sequence: Synthetic oligonucleotide
  Target: LAMA2; (+) strand; PAM type: NNNNGHTT; PAM sequence: CTAAGATT
tgtctagccatttgtcagtt

SEQ ID NO: 42774 - DNA, 20 bp, Artificial Sequence
  Description of Artificial Sequence: Synthetic oligonucleotide
  Target: LAMA2; (+) strand; PAM type: NNNNGHTT; PAM sequence: TATTGCTT
aagattctaatattatagtc

SEQ ID NO: 42775 - DNA, 20 bp, Artificial Sequence
  Description of Artificial Sequence: Synthetic oligonucleotide
  Target: LAMA2; (+) strand; PAM type: NNNNGHTT; PAM sequence: ATGTGTTT
aaaatgttaaatatataaaa

SEQ ID NO: 42776 - DNA, 20 bp, Artificial Sequence
  Description of Artificial Sequence: Synthetic oligonucleotide
  Target: LAMA2; (+) strand; PAM type: NNNNGHTT; PAM sequence: CTGGGATT
aatgtgtttttaaatccctt

SEQ ID NO: 42777 - DNA, 20 bp, Artificial Sequence
  Description of Artificial Sequence: Synthetic oligonucleotide
  Target: LAMA2; (+) strand; PAM type: NNNNGHTT; PAM sequence: ACATGTTT
ttctgggatttaaaataaaa

SEQ ID NO: 42778 - DNA, 20 bp, Artificial Sequence
  Description of Artificial Sequence: Synthetic oligonucleotide
  Target: LAMA2; (+) strand; PAM type: NNNNGHTT; PAM sequence: CATGGATT
aagaatacttagatatttag

SEQ ID NO: 42779 - DNA, 20 bp, Artificial Sequence
  Description of Artificial Sequence: Synthetic oligonucleotide
  Target: LAMA2; (+) strand; PAM type: NNNNGHTT; PAM sequence: AGGGGATT
aaattacctgagaaattttc

SEQ ID NO: 42780 - DNA, 20 bp, Artificial Sequence
  Description of Artificial Sequence: Synthetic oligonucleotide
  Target: LAMA2; (+) strand; PAM type: NNNNGHTT; PAM sequence: TTTGGCTT
tttgctgcatatgttaactt

SEQ ID NO: 42781 - DNA, 20 bp, Artificial Sequence
  Description of Artificial Sequence: Synthetic oligonucleotide
  Target: LAMA2; (+) strand; PAM type: NNNNGHTT; PAM sequence: GCTTGTTT
ctgcatatgttaactttttg

SEQ ID NO: 42782 - DNA, 20 bp, Artificial Sequence
  Description of Artificial Sequence: Synthetic oligonucleotide
  Target: LAMA2; (+) strand; PAM type: NNNNGHTT; PAM sequence: AAATGATT
ctgacctaatcatttagtaa

SEQ ID NO: 42783 - DNA, 20 bp, Artificial Sequence
  Description of Artificial Sequence: Synthetic oligonucleotide
  Target: LAMA2; (+) strand; PAM type: NNNNGHTT; PAM sequence: TACAGATT
atatttcacatatcaatgtg

SEQ ID NO: 42784 - DNA, 20 bp, Artificial Sequence
  Description of Artificial Sequence: Synthetic oligonucleotide
  Target: LAMA2; (+) strand; PAM type: NNNNGHTT; PAM sequence: TTAAGATT
gtacagatttctggtctatc

SEQ ID NO: 42785 - DNA, 20 bp, Artificial Sequence
  Description of Artificial Sequence: Synthetic oligonucleotide
  Target: LAMA2; (+) strand; PAM type: NNNNGHTT; PAM sequence: CTAGGATT
tatcttaagatttttctacc

SEQ ID NO: 42786 - DNA, 20 bp, Artificial Sequence
  Description of Artificial Sequence: Synthetic oligonucleotide
  Target: LAMA2; (+) strand; PAM type: NNNNGHTT; PAM sequence: AAAAGATT
caaaacaaaacaaaaattta

SEQ ID NO: 42787 - DNA, 20 bp, Artificial Sequence
  Description of Artificial Sequence: Synthetic oligonucleotide
  Target: LAMA2; (+) strand; PAM type: NNNNGHTT; PAM sequence: TCCAGTTT
gatttgcaacttatcatcta

SEQ ID NO: 42788 - DNA, 20 bp, Artificial Sequence
  Description of Artificial Sequence: Synthetic oligonucleotide
  Target: LAMA2; (+) strand; PAM type: NNNNGHTT; PAM sequence: AGTGGTTT
ttattgtaaatggttgcaca

SEQ ID NO: 42789 - DNA, 20 bp, Artificial Sequence
  Description of Artificial Sequence: Synthetic oligonucleotide
  Target: LAMA2; (+) strand; PAM type: NNNNGHTT; PAM sequence: AGAAGATT
agtggtttaacttctaatct

SEQ ID NO: 42790 - DNA, 20 bp, Artificial Sequence
  Description of Artificial Sequence: Synthetic oligonucleotide
  Target: LAMA2; (+) strand; PAM type: NNNNGHTT; PAM sequence: TCGGGTTT
taacttctaatctagaagat

SEQ ID NO: 42791 - DNA, 20 bp, Artificial Sequence
  Description of Artificial Sequence: Synthetic oligonucleotide
  Target: LAMA2; (+) strand; PAM type: NNNNGHTT; PAM sequence: TTAGGATT
ctaatctagaagattcgggt

SEQ ID NO: 42792 - DNA, 20 bp, Artificial Sequence
  Description of Artificial Sequence: Synthetic oligonucleotide
  Target: LAMA2; (+) strand; PAM type: NNNNGHTT; PAM sequence: ATTTGTTT
ctagaagattcgggtttagg

SEQ ID NO: 42793 - DNA, 20 bp, Artificial Sequence
  Description of Artificial Sequence: Synthetic oligonucleotide
  Target: LAMA2; (+) strand; PAM type: NNNNGHTT; PAM sequence: CTCCGTTT
aacaggaatttaggcagaag

SEQ ID NO: 42794 - DNA, 20 bp, Artificial Sequence
  Description of Artificial Sequence: Synthetic oligonucleotide
  Target: LAMA2; (+) strand; PAM type: NNNNGHTT; PAM sequence: CAGAGTTT
cagtaaatgagaaaacaaga

SEQ ID NO: 42795 - DNA, 20 bp, Artificial Sequence
  Description of Artificial Sequence: Synthetic oligonucleotide
  Target: LAMA2; (+) strand; PAM type: NNNNGHTT; PAM sequence: AGTAGATT
agagtttagagaaagataaa

SEQ ID NO: 42796 - DNA, 20 bp, Artificial Sequence
  Description of Artificial Sequence: Synthetic oligonucleotide
  Target: LAMA2; (+) strand; PAM type: NNNNGHTT; PAM sequence: CCAGGCTT
gaaagataaaagtagatttt

SEQ ID NO: 42797 - DNA, 20 bp, Artificial Sequence
  Description of Artificial Sequence: Synthetic oligonucleotide
  Target: LAMA2; (+) strand; PAM type: NNNNGHTT; PAM sequence: CTAGGCTT
agatagaaataaaactaatt

SEQ ID NO: 42798 - DNA, 20 bp, Artificial Sequence
  Description of Artificial Sequence: Synthetic oligonucleotide
  Target: LAMA2; (+) strand; PAM type: NNNNGHTT; PAM sequence: GAATGTTT
ttggaatgtggtaaatgaat

SEQ ID NO: 42799 - DNA, 20 bp, Artificial Sequence
  Description of Artificial Sequence: Synthetic oligonucleotide
  Target: LAMA2; (+) strand; PAM type: NNNNGHTT; PAM sequence: GAGTGATT
aacacttgaagatgacgtgg

SEQ ID NO: 42800 - DNA, 20 bp, Artificial Sequence
  Description of Artificial Sequence: Synthetic oligonucleotide
  Target: LAMA2; (+) strand; PAM type: NNNNGHTT; PAM sequence: CTAAGCTT
gggagcaggcctatgaggat

SEQ ID NO: 42801 - DNA, 20 bp, Artificial Sequence
  Description of Artificial Sequence: Synthetic oligonucleotide
  Target: LAMA2; (+) strand; PAM type: NNNNGHTT; PAM sequence: TAAAGATT
agcattgttgaccttaattt

SEQ ID NO: 42802 - DNA, 20 bp, Artificial Sequence
  Description of Artificial Sequence: Synthetic oligonucleotide
  Target: LAMA2; (+) strand; PAM type: NNNNGHTT; PAM sequence: GTGAGTTT
agtgagatgaggaggcatcg

SEQ ID NO: 42803 - DNA, 20 bp, Artificial Sequence
  Description of Artificial Sequence: Synthetic oligonucleotide
  Target: LAMA2; (+) strand; PAM type: NNNNGHTT; PAM sequence: ACAGGTTT
ttaaataaatgaataaaatc

SEQ ID NO: 42804 - DNA, 20 bp, Artificial Sequence
  Description of Artificial Sequence: Synthetic oligonucleotide
  Target: LAMA2; (+) strand; PAM type: NNNNGHTT; PAM sequence: TTTAGATT
cagtccaagcatagaattat

SEQ ID NO: 42805 - DNA, 20 bp, Artificial Sequence
  Description of Artificial Sequence: Synthetic oligonucleotide
  Target: LAMA2; (+) strand; PAM type: NNNNGHTT; PAM sequence: AAGTGATT
tccactgatagaacacattt

SEQ ID NO: 42806 - DNA, 20 bp, Artificial Sequence
  Description of Artificial Sequence: Synthetic oligonucleotide
  Target: LAMA2; (+) strand; PAM type: NNNNGHTT; PAM sequence: CGCAGCTT
atttgtgtgcagggaacttc

SEQ ID NO: 42807 - DNA, 20 bp, Artificial Sequence
  Description of Artificial Sequence: Synthetic oligonucleotide
  Target: LAMA2; (+) strand; PAM type: NNNNGHTT; PAM sequence: GACAGATT
tccagtgtagttagaaatat

SEQ ID NO: 42808 - DNA, 20 bp, Artificial Sequence
  Description of Artificial Sequence: Synthetic oligonucleotide
  Target: LAMA2; (+) strand; PAM type: NNNNGHTT; PAM sequence: TAAAGTTT
tctatttcaatctcagacgc

SEQ ID NO: 42809 - DNA, 20 bp, Artificial Sequence
  Description of Artificial Sequence: Synthetic oligonucleotide
  Target: LAMA2; (+) strand; PAM type: NNNNGHTT; PAM sequence: TGATGATT
gacatagtgatgtattgatc

SEQ ID NO: 42810 - DNA, 20 bp, Artificial Sequence
  Description of Artificial Sequence: Synthetic oligonucleotide
  Target: LAMA2; (+) strand; PAM type: NNNNGHTT; PAM sequence: ACCTGTTT
gatatgaaatttgaaatgct

SEQ ID NO: 42811 - DNA, 20 bp, Artificial Sequence
  Description of Artificial Sequence: Synthetic oligonucleotide
  Target: LAMA2; (+) strand; PAM type: NNNNGHTT; PAM sequence: TTCTGTTT
attcagaaacttattctatg

SEQ ID NO: 42812 - DNA, 20 bp, Artificial Sequence
  Description of Artificial Sequence: Synthetic oligonucleotide
  Target: LAMA2; (+) strand; PAM type: NNNNGHTT; PAM sequence: TACTGTTT
tgttctgtttccatttttgt

SEQ ID NO: 42813 - DNA, 20 bp, Artificial Sequence
  Description of Artificial Sequence: Synthetic oligonucleotide
  Target: LAMA2; (+) strand; PAM type: NNNNGHTT; PAM sequence: GTAAGCTT
tactgttttaagaatcactt

SEQ ID NO: 42814 - DNA, 20 bp, Artificial Sequence
  Description of Artificial Sequence: Synthetic oligonucleotide
  Target: LAMA2; (+) strand; PAM type: NNNNGHTT; PAM sequence: TAACGTTT
tcacttgtaagctttaacaa

SEQ ID NO: 42815 - DNA, 20 bp, Artificial Sequence
  Description of Artificial Sequence: Synthetic oligonucleotide
  Target: LAMA2; (+) strand; PAM type: NNNNGHTT; PAM sequence: GATAGCTT
caaaaaaggtaaaaaaattg

SEQ ID NO: 42816 - DNA, 20 bp, Artificial Sequence
  Description of Artificial Sequence: Synthetic oligonucleotide
  Target: LAMA2; (+) strand; PAM type: NNNNGHTT; PAM sequence: GATAGTTT
acaggtaattactatctaaa

SEQ ID NO: 42817 - DNA, 20 bp, Artificial Sequence
  Description of Artificial Sequence: Synthetic oligonucleotide
  Target: LAMA2; (+) strand; PAM type: NNNNGHTT; PAM sequence: ATTTGCTT
ggtgagttaaagctaaagac

SEQ ID NO: 42818 - DNA, 20 bp, Artificial Sequence
  Description of Artificial Sequence: Synthetic oligonucleotide
  Target: LAMA2; (+) strand; PAM type: NNNNGHTT; PAM sequence: ATGGGTTT
gcttgtcaaagatgtataat

SEQ ID NO: 42819 - DNA, 20 bp, Artificial Sequence
  Description of Artificial Sequence: Synthetic oligonucleotide
  Target: LAMA2; (+) strand; PAM type: NNNNGHTT; PAM sequence: AAATGTTT
gatgtataatatgggtttaa

SEQ ID NO: 42820 - DNA, 20 bp, Artificial Sequence
  Description of Artificial Sequence: Synthetic oligonucleotide
  Target: LAMA2; (+) strand; PAM type: NNNNGHTT; PAM sequence: TTTGGATT
aatatgggaactttatgcta

SEQ ID NO: 42821 - DNA, 20 bp, Artificial Sequence
  Description of Artificial Sequence: Synthetic oligonucleotide
  Target: LAMA2; (+) strand; PAM type: NNNNGHTT; PAM sequence: TGAGGATT
tgacatttacaaaagatcat

SEQ ID NO: 42822 - DNA, 20 bp, Artificial Sequence
  Description of Artificial Sequence: Synthetic oligonucleotide
  Target: LAMA2; (+) strand; PAM type: NNNNGHTT; PAM sequence: GATGGTTT
tagctgcgtcttgagtgcca

SEQ ID NO: 42823 - DNA, 20 bp, Artificial Sequence
  Description of Artificial Sequence: Synthetic oligonucleotide
  Target: LAMA2; (+) strand; PAM type: NNNNGHTT; PAM sequence: TTTAGATT
gcgtcttgagtgccagatgg

SEQ ID NO: 42824 - DNA, 20 bp, Artificial Sequence
  Description of Artificial Sequence: Synthetic oligonucleotide
  Target: LAMA2; (+) strand; PAM type: NNNNGHTT; PAM sequence: AGCTGTTT
cacatttacttacgtagcag

SEQ ID NO: 42825 - DNA, 20 bp, Artificial Sequence
  Description of Artificial Sequence: Synthetic oligonucleotide
  Target: LAMA2; (+) strand; PAM type: NNNNGHTT; PAM sequence: AGTAGATT
cttacgtagcagagctgttt

SEQ ID NO: 42826 - DNA, 20 bp, Artificial Sequence
  Description of Artificial Sequence: Synthetic oligonucleotide
  Target: LAMA2; (+) strand; PAM type: NNNNGHTT; PAM sequence: CTCAGTTT
agtagattaatataattatc

SEQ ID NO: 42827 - DNA, 20 bp, Artificial Sequence
  Description of Artificial Sequence: Synthetic oligonucleotide
  Target: LAMA2; (+) strand; PAM type: NNNNGHTT; PAM sequence: CAATGCTT
tcaaggacaaacaaaaattc

SEQ ID NO: 42828 - DNA, 20 bp, Artificial Sequence
  Description of Artificial Sequence: Synthetic oligonucleotide
  Target: LAMA2; (+) strand; PAM type: NNNNGHTT; PAM sequence: CAGAGATT
ttatgttagtctatcatatc

SEQ ID NO: 42829 - DNA, 20 bp, Artificial Sequence
  Description of Artificial Sequence: Synthetic oligonucleotide
  Target: LAMA2; (+) strand; PAM type: NNNNGHTT; PAM sequence: TGCTGCTT
cacacacacacacacacaca

SEQ ID NO: 42830 - DNA, 20 bp, Artificial Sequence
  Description of Artificial Sequence: Synthetic oligonucleotide
  Target: LAMA2; (+) strand; PAM type: NNNNGHTT; PAM sequence: TAGTGTTT
caaatgcattcatcaaattt

SEQ ID NO: 42831 - DNA, 20 bp, Artificial Sequence
  Description of Artificial Sequence: Synthetic oligonucleotide
  Target: LAMA2; (+) strand; PAM type: NNNNGHTT; PAM sequence: CTTTGATT
tagtgtttacattcttggaa

SEQ ID NO: 42832 - DNA, 20 bp, Artificial Sequence
  Description of Artificial Sequence: Synthetic oligonucleotide
  Target: LAMA2; (+) strand; PAM type: NNNNGHTT; PAM sequence: AATTGATT
ctaggctataagaaaatatt

SEQ ID NO: 42833 - DNA, 20 bp, Artificial Sequence
  Description of Artificial Sequence: Synthetic oligonucleotide
  Target: LAMA2; (+) strand; PAM type: NNNNGHTT; PAM sequence: ATTGGCTT
aaaatattaattgattcttt

SEQ ID NO: 42834 - DNA, 20 bp, Artificial Sequence
  Description of Artificial Sequence: Synthetic oligonucleotide
  Target: LAMA2; (+) strand; PAM type: NNNNGHTT; PAM sequence: GCAAGATT
agatatacctaagaatcaga

SEQ ID NO: 42835 - DNA, 20 bp, Artificial Sequence
  Description of Artificial Sequence: Synthetic oligonucleotide
  Target: LAMA2; (+) strand; PAM type: NNNNGHTT; PAM sequence: CCCAGATT
agacaaaagtcttccaatct

SEQ ID NO: 42836 - DNA, 20 bp, Artificial Sequence
  Description of Artificial Sequence: Synthetic oligonucleotide
  Target: LAMA2; (+) strand; PAM type: NNNNGHTT; PAM sequence: ATGTGATT
gagggtgtatttgtgtatgt

SEQ ID NO: 42837 - DNA, 20 bp, Artificial Sequence
  Description of Artificial Sequence: Synthetic oligonucleotide
  Target: LAMA2; (+) strand; PAM type: NNNNGHTT; PAM sequence: GTATGTTT
ggacctaatttgtatattta

SEQ ID NO: 42838 - DNA, 20 bp, Artificial Sequence
  Description of Artificial Sequence: Synthetic oligonucleotide
  Target: LAMA2; (+) strand; PAM type: NNNNGHTT; PAM sequence: TTCTGTTT
atttgtatatttagtatgtt

SEQ ID NO: 42839 - DNA, 20 bp, Artificial Sequence
  Description of Artificial Sequence: Synthetic oligonucleotide
  Target: LAMA2; (+) strand; PAM type: NNNNGHTT; PAM sequence: GTTTGATT
gtatatttagtatgttttct

SEQ ID NO: 42840 - DNA, 20 bp, Artificial Sequence
  Description of Artificial Sequence: Synthetic oligonucleotide
  Target: LAMA2; (+) strand; PAM type: NNNNGHTT; PAM sequence: ATTAGATT
gatttttgttgtcttaaggt

SEQ ID NO: 42841 - DNA, 20 bp, Artificial Sequence
  Description of Artificial Sequence: Synthetic oligonucleotide
  Target: LAMA2; (+) strand; PAM type: NNNNGHTT; PAM sequence: TTTTGTTT
tgttgtcttaaggtattaga

SEQ ID NO: 42842 - DNA, 20 bp, Artificial Sequence
  Description of Artificial Sequence: Synthetic oligonucleotide
  Target: LAMA2; (+) strand; PAM type: NNNNGHTT; PAM sequence: AAATGATT
aaaactctagttgccttgac

SEQ ID NO: 42843 - DNA, 20 bp, Artificial Sequence
  Description of Artificial Sequence: Synthetic oligonucleotide
  Target: LAMA2; (+) strand; PAM type: NNNNGHTT; PAM sequence: AGTTGCTT
ccaaggtataatccctttcg

SEQ ID NO: 42844 - DNA, 20 bp, Artificial Sequence
  Description of Artificial Sequence: Synthetic oligonucleotide
  Target: LAMA2; (+) strand; PAM type: NNNNGHTT; PAM sequence: TAGAGTTT
tatagaagaaatagagttag

SEQ ID NO: 42845 - DNA, 20 bp, Artificial Sequence
  Description of Artificial Sequence: Synthetic oligonucleotide
  Target: LAMA2; (+) strand; PAM type: NNNNGHTT; PAM sequence: CCTGGCTT
tattatagttgacacaattt

SEQ ID NO: 42846 - DNA, 20 bp, Artificial Sequence
  Description of Artificial Sequence: Synthetic oligonucleotide
  Target: LAMA2; (+) strand; PAM type: NNNNGHTT; PAM sequence: GAAAGTTT
ttcaattattggatgaggct

SEQ ID NO: 42847 - DNA, 20 bp, Artificial Sequence
  Description of Artificial Sequence: Synthetic oligonucleotide
  Target: LAMA2; (+) strand; PAM type: NNNNGHTT; PAM sequence: ATTGGTTT
tcagtgagctacctcatctc

SEQ ID NO: 42848 - DNA, 20 bp, Artificial Sequence
  Description of Artificial Sequence: Synthetic oligonucleotide
  Target: LAMA2; (+) strand; PAM type: NNNNGHTT; PAM sequence: GACTGTTT
ggtataccaaattcagttga

SEQ ID NO: 42849 - DNA, 20 bp, Artificial Sequence
  Description of Artificial Sequence: Synthetic oligonucleotide
  Target: LAMA2; (+) strand; PAM type: NNNNGHTT; PAM sequence: ATTTGCTT
gactgtttgtgaaggaagga

SEQ ID NO: 42850 - DNA, 20 bp, Artificial Sequence
  Description of Artificial Sequence: Synthetic oligonucleotide
  Target: LAMA2; (+) strand; PAM type: NNNNGHTT; PAM sequence: TATAGCTT
tatttctttattctcaactt

SEQ ID NO: 42851 - DNA, 20 bp, Artificial Sequence
  Description of Artificial Sequence: Synthetic oligonucleotide
  Target: LAMA2; (+) strand; PAM type: NNNNGHTT; PAM sequence: TTTAGTTT
aatacgtacctctttatacc

SEQ ID NO: 42852 - DNA, 20 bp, Artificial Sequence
  Description of Artificial Sequence: Synthetic oligonucleotide
  Target: LAMA2; (+) strand; PAM type: NNNNGHTT; PAM sequence: ATAGGTTT
ttaaattttctattcgtaag

SEQ ID NO: 42853 - DNA, 20 bp, Artificial Sequence
  Description of Artificial Sequence: Synthetic oligonucleotide
  Target: LAMA2; (+) strand; PAM type: NNNNGHTT; PAM sequence: AAAAGATT
tatgagcataaaactaaaaa

SEQ ID NO: 42854 - DNA, 20 bp, Artificial Sequence
  Description of Artificial Sequence: Synthetic oligonucleotide
  Target: LAMA2; (+) strand; PAM type: NNNNGHTT; PAM sequence: ATTTGCTT
gcataaaactaaaaaaaaag

SEQ ID NO: 42855 - DNA, 20 bp, Artificial Sequence
  Description of Artificial Sequence: Synthetic oligonucleotide
  Target: LAMA2; (+) strand; PAM type: NNNNGHTT; PAM sequence: TTTTGCTT
ctttgcatatagcatatcct

SEQ ID NO: 42856 - DNA, 20 bp, Artificial Sequence
  Description of Artificial Sequence: Synthetic oligonucleotide
  Target: LAMA2; (+) strand; PAM type: NNNNGHTT; PAM sequence: AAGAGATT
aaactatttatctcattgcc

SEQ ID NO: 42857 - DNA, 20 bp, Artificial Sequence
  Description of Artificial Sequence: Synthetic oligonucleotide
  Target: LAMA2; (+) strand; PAM type: NNNNGHTT; PAM sequence: AAGTGATT
tgttagtagctctgtgtgag

SEQ ID NO: 42858 - DNA, 20 bp, Artificial Sequence
  Description of Artificial Sequence: Synthetic oligonucleotide
  Target: LAMA2; (+) strand; PAM type: NNNNGHTT; PAM sequence: AAACGTTT
tacttcaaatgtggtacaat

SEQ ID NO: 42859 - DNA, 20 bp, Artificial Sequence
  Description of Artificial Sequence: Synthetic oligonucleotide
  Target: LAMA2; (+) strand; PAM type: NNNNGHTT; PAM sequence: ATATGTTT
aaacttctttaatacttata

SEQ ID NO: 42860 - DNA, 20 bp, Artificial Sequence
  Description of Artificial Sequence: Synthetic oligonucleotide
  Target: LAMA2; (+) strand; PAM type: NNNNGHTT; PAM sequence: ATATGTTT
ttattcttagtctatgaagt

SEQ ID NO: 42861 - DNA, 20 bp, Artificial Sequence
  Description of Artificial Sequence: Synthetic oligonucleotide
  Target: LAMA2; (+) strand; PAM type: NNNNGHTT; PAM sequence: ATCTGCTT
aagtatatgttttcattgac

SEQ ID NO: 42862 - DNA, 20 bp, Artificial Sequence
  Description of Artificial Sequence: Synthetic oligonucleotide
  Target: LAMA2; (+) strand; PAM type: NNNNGHTT; PAM sequence: GCGTGTTT
tgggtagagatgacaatgtg

SEQ ID NO: 42863 - DNA, 20 bp, Artificial Sequence
  Description of Artificial Sequence: Synthetic oligonucleotide
  Target: LAMA2; (+) strand; PAM type: NNNNGHTT; PAM sequence: ATTGGATT
ggccttcagtggaaagtcta

SEQ ID NO: 42864 - DNA, 20 bp, Artificial Sequence
  Description of Artificial Sequence: Synthetic oligonucleotide
  Target: LAMA2; (+) strand; PAM type: NNNNGHTT; PAM sequence: TATAGATT
gattgcagaaaatctctcaa

SEQ ID NO: 42865 - DNA, 20 bp, Artificial Sequence
  Description of Artificial Sequence: Synthetic oligonucleotide
  Target: LAMA2; (+) strand; PAM type: NNNNGHTT; PAM sequence: GGAGGATT
tttaatacaactctggatag

SEQ ID NO: 42866 - DNA, 20 bp, Artificial Sequence
  Description of Artificial Sequence: Synthetic oligonucleotide
  Target: LAMA2; (+) strand; PAM type: NNNNGHTT; PAM sequence: AACTGCTT
tctaacaaatctctagagaa

SEQ ID NO: 42867 - DNA, 20 bp, Artificial Sequence
  Description of Artificial Sequence: Synthetic oligonucleotide
  Target: LAMA2; (+) strand; PAM type: NNNNGHTT; PAM sequence: GCTGGATT
gcttttctaaacttgggaac

SEQ ID NO: 42868 - DNA, 20 bp, Artificial Sequence
  Description of Artificial Sequence: Synthetic oligonucleotide
  Target: LAMA2; (+) strand; PAM type: NNNNGHTT; PAM sequence: GCCCGTTT
agacaaaacacttcttaaag

SEQ ID NO: 42869 - DNA, 20 bp, Artificial Sequence
  Description of Artificial Sequence: Synthetic oligonucleotide
  Target: LAMA2; (+) strand; PAM type: NNNNGHTT; PAM sequence: AAAAGTTT
taaaggcccgtttaccatca

SEQ ID NO: 42870 - DNA, 20 bp, Artificial Sequence
  Description of Artificial Sequence: Synthetic oligonucleotide
  Target: LAMA2; (+) strand; PAM type: NNNNGHTT; PAM sequence: ACTGGATT
tctgatacattagaaaagtc

SEQ ID NO: 42871 - DNA, 20 bp, Artificial Sequence
  Description of Artificial Sequence: Synthetic oligonucleotide
  Target: LAMA2; (+) strand; PAM type: NNNNGHTT; PAM sequence: AAGAGATT
tttccctctagctcttccta

SEQ ID NO: 42872 - DNA, 20 bp, Artificial Sequence
  Description of Artificial Sequence: Synthetic oligonucleotide
  Target: LAMA2; (+) strand; PAM type: NNNNGHTT; PAM sequence: TGAAGTTT
gtcttaggcatcattggtta

SEQ ID NO: 42873 - DNA, 20 bp, Artificial Sequence
  Description of Artificial Sequence: Synthetic oligonucleotide
  Target: LAMA2; (+) strand; PAM type: NNNNGHTT; PAM sequence: CTTTGTTT
agttttgctccacccccttt

SEQ ID NO: 42874 - DNA, 20 bp, Artificial Sequence
  Description of Artificial Sequence: Synthetic oligonucleotide
  Target: LAMA2; (+) strand; PAM type: NNNNGHTT; PAM sequence: TCCTGTTT
tgtattaatatacttagttc

SEQ ID NO: 42875 - DNA, 20 bp, Artificial Sequence
  Description of Artificial Sequence: Synthetic oligonucleotide
  Target: LAMA2; (+) strand; PAM type: NNNNGHTT; PAM sequence: CATAGCTT
gttttcaaggacccatgaca

SEQ ID NO: 42876 - DNA, 20 bp, Artificial Sequence
  Description of Artificial Sequence: Synthetic oligonucleotide
  Target: LAMA2; (+) strand; PAM type: NNNNGHTT; PAM sequence: ATTTGTTT
tttcaaacatggcacaaatt

SEQ ID NO: 42877 - DNA, 20 bp, Artificial Sequence
  Description of Artificial Sequence: Synthetic oligonucleotide
  Target: LAMA2; (+) strand; PAM type: NNNNGHTT; PAM sequence: ATCAGCTT
tatggtatctgaaagtgtac

SEQ ID NO: 42878 - DNA, 20 bp, Artificial Sequence
  Description of Artificial Sequence: Synthetic oligonucleotide
  Target: LAMA2; (+) strand; PAM type: NNNNGHTT; PAM sequence: TCAAGATT
gggctctgaaacattctatg

SEQ ID NO: 42879 - DNA, 20 bp, Artificial Sequence
  Description of Artificial Sequence: Synthetic oligonucleotide
  Target: LAMA2; (+) strand; PAM type: NNNNGHTT; PAM sequence: CTTTGATT
cctcttaaaaataattgaaa

SEQ ID NO: 42880 - DNA, 20 bp, Artificial Sequence
  Description of Artificial Sequence: Synthetic oligonucleotide
  Target: LAMA2; (+) strand; PAM type: NNNNGHTT; PAM sequence: ATTTGATT
tgatttatggtatatctact

SEQ ID NO: 42881 - DNA, 20 bp, Artificial Sequence
  Description of Artificial Sequence: Synthetic oligonucleotide
  Target: LAMA2; (+) strand; PAM type: NNNNGHTT; PAM sequence: AAATGTTT
attaaaattgggaaatttaa

SEQ ID NO: 42882 - DNA, 20 bp, Artificial Sequence
  Description of Artificial Sequence: Synthetic oligonucleotide
  Target: LAMA2; (+) strand; PAM type: NNNNGHTT; PAM sequence: TCTGGCTT
caaaataaaactcttcaatg

SEQ ID NO: 42883 - DNA, 20 bp, Artificial Sequence
  Description of Artificial Sequence: Synthetic oligonucleotide
  Target: LAMA2; (+) strand; PAM type: NNNNGHTT; PAM sequence: ACTGGATT
gtctggcttaatagaagaga

SEQ ID NO: 42884 - DNA, 20 bp, Artificial Sequence
  Description of Artificial Sequence: Synthetic oligonucleotide
  Target: LAMA2; (+) strand; PAM type: NNNNGHTT; PAM sequence: TTTAGTTT
ttcaaattattacatgttat

SEQ ID NO: 42885 - DNA, 20 bp, Artificial Sequence
  Description of Artificial Sequence: Synthetic oligonucleotide
  Target: LAMA2; (+) strand; PAM type: NNNNGHTT; PAM sequence: TTTGGTTT
gttattttagtttaaattat

SEQ ID NO: 42886 - DNA, 20 bp, Artificial Sequence
  Description of Artificial Sequence: Synthetic oligonucleotide
  Target: LAMA2; (+) strand; PAM type: NNNNGHTT; PAM sequence: CTTTGATT
ttaagatagctgtaaatatt

SEQ ID NO: 42887 - DNA, 20 bp, Artificial Sequence
  Description of Artificial Sequence: Synthetic oligonucleotide
  Target: LAMA2; (+) strand; PAM type: NNNNGHTT; PAM sequence: GGTAGTTT
tataccaaaactcagtaagt

SEQ ID NO: 42888 - DNA, 20 bp, Artificial Sequence
  Description of Artificial Sequence: Synthetic oligonucleotide
  Target: LAMA2; (+) strand; PAM type: NNNNGHTT; PAM sequence: AAAAGATT
ctcagtaagtggtagttttc

SEQ ID NO: 42889 - DNA, 20 bp, Artificial Sequence
  Description of Artificial Sequence: Synthetic oligonucleotide
  Target: LAMA2; (+) strand; PAM type: NNNNGHTT; PAM sequence: GTACGCTT
actgcatcaacgatattttt

SEQ ID NO: 42890 - DNA, 20 bp, Artificial Sequence
  Description of Artificial Sequence: Synthetic oligonucleotide
  Target: LAMA2; (+) strand; PAM type: NNNNGHTT; PAM sequence: TACTGATT
ttcatagatcatttggaaga

SEQ ID NO: 42891 - DNA, 20 bp, Artificial Sequence
  Description of Artificial Sequence: Synthetic oligonucleotide
  Target: LAMA2; (+) strand; PAM type: NNNNGHTT; PAM sequence: GACAGATT
atgcagatcagccacaactt

SEQ ID NO: 42892 - DNA, 20 bp, Artificial Sequence
  Description of Artificial Sequence: Synthetic oligonucleotide
  Target: LAMA2; (+) strand; PAM type: NNNNGHTT; PAM sequence: GTAAGTTT
cagaatttttattttcattt

SEQ ID NO: 42893 - DNA, 20 bp, Artificial Sequence
  Description of Artificial Sequence: Synthetic oligonucleotide
  Target: LAMA2; (+) strand; PAM type: NNNNGHTT; PAM sequence: AAATGTTT
tactttattcattcttaaga

SEQ ID NO: 42894 - DNA, 20 bp, Artificial Sequence
  Description of Artificial Sequence: Synthetic oligonucleotide
  Target: LAMA2; (+) strand; PAM type: NNNNGHTT; PAM sequence: GCTAGTTT
ggtattccacgaaaaaagtg

SEQ ID NO: 42895 - DNA, 20 bp, Artificial Sequence
  Description of Artificial Sequence: Synthetic oligonucleotide
  Target: LAMA2; (+) strand; PAM type: NNNNGHTT; PAM sequence: TTTAGCTT
tccacgaaaaaagtggctag

SEQ ID NO: 42896 - DNA, 20 bp, Artificial Sequence
  Description of Artificial Sequence: Synthetic oligonucleotide
  Target: LAMA2; (+) strand; PAM type: NNNNGHTT; PAM sequence: AAATGCTT
gcagctgaaaacaactgtac

SEQ ID NO: 42897 - DNA, 20 bp, Artificial Sequence
  Description of Artificial Sequence: Synthetic oligonucleotide
  Target: LAMA2; (+) strand; PAM type: NNNNGHTT; PAM sequence: TCATGCTT
gcttttcctcaaatcaacca

SEQ ID NO: 42898 - DNA, 20 bp, Artificial Sequence
  Description of Artificial Sequence: Synthetic oligonucleotide
  Target: LAMA2; (+) strand; PAM type: NNNNGHTT; PAM sequence: CCAAGATT
ttgatgttaaaaagatgtac

SEQ ID NO: 42899 - DNA, 20 bp, Artificial Sequence
  Description of Artificial Sequence: Synthetic oligonucleotide
  Target: LAMA2; (+) strand; PAM type: NNNNGHTT; PAM sequence: AGTTGTTT
gtacattcatctgtgaaact

SEQ ID NO: 42900 - DNA, 20 bp, Artificial Sequence
  Description of Artificial Sequence: Synthetic oligonucleotide
  Target: LAMA2; (+) strand; PAM type: NNNNGHTT; PAM sequence: CATGGTTT
aaaactaaactgaccactag

SEQ ID NO: 42901 - DNA, 20 bp, Artificial Sequence
  Description of Artificial Sequence: Synthetic oligonucleotide
  Target: LAMA2; (+) strand; PAM type: NNNNGHTT; PAM sequence: CCTTGATT
agcatggtttagtacccctg

SEQ ID NO: 42902 - DNA, 20 bp, Artificial Sequence
  Description of Artificial Sequence: Synthetic oligonucleotide
  Target: LAMA2; (+) strand; PAM type: NNNNGHTT; PAM sequence: CAGTGTTT
gatttgtgctaatgtaccat

SEQ ID NO: 42903 - DNA, 20 bp, Artificial Sequence
  Description of Artificial Sequence: Synthetic oligonucleotide
  Target: LAMA2; (+) strand; PAM type: NNNNGHTT; PAM sequence: TATTGCTT
ccatcagtgtttcccaccac

SEQ ID NO: 42904 - DNA, 20 bp, Artificial Sequence
  Description of Artificial Sequence: Synthetic oligonucleotide
  Target: LAMA2; (+) strand; PAM type: NNNNGHTT; PAM sequence: AAAGGATT
ataattaaatcttgttacta

SEQ ID NO: 42905 - DNA, 20 bp, Artificial Sequence
  Description of Artificial Sequence: Synthetic oligonucleotide
  Target: LAMA2; (+) strand; PAM type: NNNNGHTT; PAM sequence: CAGGGATT
gataatgtattgtggactcc

SEQ ID NO: 42906 - DNA, 20 bp, Artificial Sequence
  Description of Artificial Sequence: Synthetic oligonucleotide
  Target: LAMA2; (+) strand; PAM type: NNNNGHTT; PAM sequence: TTCAGTTT
tcagaaaaagccaaaaccac

SEQ ID NO: 42907 - DNA, 20 bp, Artificial Sequence
  Description of Artificial Sequence: Synthetic oligonucleotide
  Target: LAMA2; (+) strand; PAM type: NNNNGHTT; PAM sequence: AAAAGCTT
ttaagggggaagaaatccag

SEQ ID NO: 42908 - DNA, 20 bp, Artificial Sequence
  Description of Artificial Sequence: Synthetic oligonucleotide
  Target: LAMA2; (+) strand; PAM type: NNNNGHTT; PAM sequence: GGGCGCTT
aattagccgggcgtggtggc

SEQ ID NO: 42909 - DNA, 20 bp, Artificial Sequence
  Description of Artificial Sequence: Synthetic oligonucleotide
  Target: LAMA2; (+) strand; PAM type: NNNNGHTT; PAM sequence: AGGAGCTT
aatggcgtgaatccgggagg

SEQ ID NO: 42910 - DNA, 20 bp, Artificial Sequence
  Description of Artificial Sequence: Synthetic oligonucleotide
  Target: LAMA2; (+) strand; PAM type: NNNNGHTT; PAM sequence: CCGAGATT
gaggaggagcttgcagtgag

SEQ ID NO: 42911 - DNA, 20 bp, Artificial Sequence
  Description of Artificial Sequence: Synthetic oligonucleotide
  Target: LAMA2; (+) strand; PAM type: NNNNGHTT; PAM sequence: TCCAGCTT
ccgagattgcgccactgcac

SEQ ID NO: 42912 - DNA, 20 bp, Artificial Sequence
  Description of Artificial Sequence: Synthetic oligonucleotide
  Target: LAMA2; (+) strand; PAM type: NNNNGHTT; PAM sequence: CAAGGTTT
agactccgtgaactcatgag

SEQ ID NO: 42913 - DNA, 20 bp, Artificial Sequence
  Description of Artificial Sequence: Synthetic oligonucleotide
  Target: LAMA2; (+) strand; PAM type: NNNNGHTT; PAM sequence: AAGAGATT
gtaattctgaatattagcag

SEQ ID NO: 42914 - DNA, 20 bp, Artificial Sequence
  Description of Artificial Sequence: Synthetic oligonucleotide
  Target: LAMA2; (+) strand; PAM type: NNNNGHTT; PAM sequence: TGAAGTTT
cttcatttatttctagcctt

SEQ ID NO: 42915 - DNA, 20 bp, Artificial Sequence
  Description of Artificial Sequence: Synthetic oligonucleotide
  Target: LAMA2; (+) strand; PAM type: NNNNGHTT; PAM sequence: TTGTGATT
tatttctagcctttgaagtt

SEQ ID NO: 42916 - DNA, 20 bp, Artificial Sequence
  Description of Artificial Sequence: Synthetic oligonucleotide
  Target: LAMA2; (+) strand; PAM type: NNNNGHTT; PAM sequence: AAAGGTTT
tgtgatttctaaagcattta

SEQ ID NO: 42917 - DNA, 20 bp, Artificial Sequence
  Description of Artificial Sequence: Synthetic oligonucleotide
  Target: LAMA2; (+) strand; PAM type: NNNNGHTT; PAM sequence: ACGTGATT
tgtaatgttgagaacctaaa

SEQ ID NO: 42918 - DNA, 20 bp, Artificial Sequence
  Description of Artificial Sequence: Synthetic oligonucleotide
  Target: LAMA2; (+) strand; PAM type: NNNNGHTT; PAM sequence: TCTGGTTT
tatgtgtgtcatatgatgga

SEQ ID NO: 42919 - DNA, 20 bp, Artificial Sequence
  Description of Artificial Sequence: Synthetic oligonucleotide
  Target: LAMA2; (+) strand; PAM type: NNNNGHTT; PAM sequence: CTCTGATT
tcttcaagggcctcatactg

SEQ ID NO: 42920 - DNA, 20 bp, Artificial Sequence
  Description of Artificial Sequence: Synthetic oligonucleotide
  Target: LAMA2; (+) strand; PAM type: NNNNGHTT; PAM sequence: TATTGCTT
tgatttcagatgtatagata

SEQ ID NO: 42921 - DNA, 20 bp, Artificial Sequence
  Description of Artificial Sequence: Synthetic oligonucleotide
  Target: LAMA2; (+) strand; PAM type: NNNNGHTT; PAM sequence: TCCAGATT
atgagtggtagtaagatatt

SEQ ID NO: 42922 - DNA, 20 bp, Artificial Sequence
  Description of Artificial Sequence: Synthetic oligonucleotide
  Target: LAMA2; (+) strand; PAM type: NNNNGHTT; PAM sequence: TGAGGTTT
tatttaaatgactaaatttt

SEQ ID NO: 42923 - DNA, 20 bp, Artificial Sequence
  Description of Artificial Sequence: Synthetic oligonucleotide
  Target: LAMA2; (+) strand; PAM type: NNNNGHTT; PAM sequence: ACTGGCTT
aatttatctttaaaaattag

SEQ ID NO: 42924 - DNA, 20 bp, Artificial Sequence
  Description of Artificial Sequence: Synthetic oligonucleotide
  Target: LAMA2; (+) strand; PAM type: NNNNGHTT; PAM sequence: GTCAGATT
attagactggcttggcatat

SEQ ID NO: 42925 - DNA, 20 bp, Artificial Sequence
  Description of Artificial Sequence: Synthetic oligonucleotide
  Target: LAMA2; (+) strand; PAM type: NNNNGHTT; PAM sequence: AACAGATT
gttcaatgttagacaaagtg

SEQ ID NO: 42926 - DNA, 20 bp, Artificial Sequence
  Description of Artificial Sequence: Synthetic oligonucleotide
  Target: LAMA2; (+) strand; PAM type: NNNNGHTT; PAM sequence: TATTGCTT
taattgatgtgtcccatctt

SEQ ID NO: 42927 - DNA, 20 bp, Artificial Sequence
  Description of Artificial Sequence: Synthetic oligonucleotide
  Target: LAMA2; (+) strand; PAM type: NNNNGHTT; PAM sequence: GTATGTTT
cactttatatgtagataatg

SEQ ID NO: 42928 - DNA, 20 bp, Artificial Sequence
  Description of Artificial Sequence: Synthetic oligonucleotide
  Target: LAMA2; (+) strand; PAM type: NNNNGHTT; PAM sequence: AATAGCTT
atgttttaaaattctgcaaa

SEQ ID NO: 42929 - DNA, 20 bp, Artificial Sequence
  Description of Artificial Sequence: Synthetic oligonucleotide
  Target: LAMA2; (+) strand; PAM type: NNNNGHTT; PAM sequence: TCAAGCTT
aattctctttattctctttc

SEQ ID NO: 42930 - DNA, 20 bp, Artificial Sequence
  Description of Artificial Sequence: Synthetic oligonucleotide
  Target: LAMA2; (+) strand; PAM type: NNNNGHTT; PAM sequence: GACTGATT
tttttcattcaacttttagg

SEQ ID NO: 42931 - DNA, 20 bp, Artificial Sequence
  Description of Artificial Sequence: Synthetic oligonucleotide
  Target: LAMA2; (+) strand; PAM type: NNNNGHTT; PAM sequence: AAATGTTT
tgctgagaaaacattattct

SEQ ID NO: 42932 - DNA, 20 bp, Artificial Sequence
  Description of Artificial Sequence: Synthetic oligonucleotide
  Target: LAMA2; (+) strand; PAM type: NNNNGHTT; PAM sequence: AAATGTTT
tcacaggctattcttttcta

SEQ ID NO: 42933 - DNA, 20 bp, Artificial Sequence
  Description of Artificial Sequence: Synthetic oligonucleotide
  Target: LAMA2; (+) strand; PAM type: NNNNGHTT; PAM sequence: GACAGTTT
tatctgctgacctccttttt

SEQ ID NO: 42934 - DNA, 20 bp, Artificial Sequence
  Description of Artificial Sequence: Synthetic oligonucleotide
  Target: LAMA2; (+) strand; PAM type: NNNNGHTT; PAM sequence: TTAAGTTT
tttgacagtttaggactgta

SEQ ID NO: 42935 - DNA, 20 bp, Artificial Sequence
  Description of Artificial Sequence: Synthetic oligonucleotide
  Target: LAMA2; (+) strand; PAM type: NNNNGHTT; PAM sequence: CCAAGATT
aaccagtgaactggtagaga

SEQ ID NO: 42936 - DNA, 20 bp, Artificial Sequence
  Description of Artificial Sequence: Synthetic oligonucleotide
  Target: LAMA2; (+) strand; PAM type: NNNNGHTT; PAM sequence: AAGGGCTT
agagtacaaattagtaagta

SEQ ID NO: 42937 - DNA, 20 bp, Artificial Sequence
  Description of Artificial Sequence: Synthetic oligonucleotide
  Target: LAMA2; (+) strand; PAM type: NNNNGHTT; PAM sequence: AGGTGATT
cctttagtgacatacttcag

SEQ ID NO: 42938 - DNA, 20 bp, Artificial Sequence
  Description of Artificial Sequence: Synthetic oligonucleotide
  Target: LAMA2; (+) strand; PAM type: NNNNGHTT; PAM sequence: GTGAGATT
tgattttatttccctttttt

SEQ ID NO: 42939 - DNA, 20 bp, Artificial Sequence
  Description of Artificial Sequence: Synthetic oligonucleotide
  Target: LAMA2; (+) strand; PAM type: NNNNGHTT; PAM sequence: AAAAGATT
tttttgtgagatttcctatg

SEQ ID NO: 42940 - DNA, 20 bp, Artificial Sequence
  Description of Artificial Sequence: Synthetic oligonucleotide
  Target: LAMA2; (+) strand; PAM type: NNNNGHTT; PAM sequence: TTTAGATT
aatttaaacaatatttgcca

SEQ ID NO: 42941 - DNA, 20 bp, Artificial Sequence
  Description of Artificial Sequence: Synthetic oligonucleotide
  Target: LAMA2; (+) strand; PAM type: NNNNGHTT; PAM sequence: AAGAGTTT
ctgaattttttgagtcatat

SEQ ID NO: 42942 - DNA, 20 bp, Artificial Sequence
  Description of Artificial Sequence: Synthetic oligonucleotide
  Target: LAMA2; (+) strand; PAM type: NNNNGHTT; PAM sequence: ATGTGCTT
tgttaacttaattggtaaga

SEQ ID NO: 42943 - DNA, 20 bp, Artificial Sequence
  Description of Artificial Sequence: Synthetic oligonucleotide
  Target: LAMA2; (+) strand; PAM type: NNNNGHTT; PAM sequence: CAGGGCTT
aaccaaaaataatcaaggcc

SEQ ID NO: 42944 - DNA, 20 bp, Artificial Sequence
  Description of Artificial Sequence: Synthetic oligonucleotide
  Target: LAMA2; (+) strand; PAM type: NNNNGHTT; PAM sequence: TATAGCTT
aaaaatgaccattttgttgt

SEQ ID NO: 42945 - DNA, 20 bp, Artificial Sequence
  Description of Artificial Sequence: Synthetic oligonucleotide
  Target: LAMA2; (+) strand; PAM type: NNNNGHTT; PAM sequence: TTCTGCTT
gttgatcaaagatcttgtaa

SEQ ID NO: 42946 - DNA, 20 bp, Artificial Sequence
  Description of Artificial Sequence: Synthetic oligonucleotide
  Target: LAMA2; (+) strand; PAM type: NNNNGHTT; PAM sequence: CTTGGATT
cagttggccccctttatgaa

SEQ ID NO: 42947 - DNA, 20 bp, Artificial Sequence
  Description of Artificial Sequence: Synthetic oligonucleotide
  Target: LAMA2; (+) strand; PAM type: NNNNGHTT; PAM sequence: GCCAGTTT
ttgcaatggaagtcctatcg

SEQ ID NO: 42948 - DNA, 20 bp, Artificial Sequence
  Description of Artificial Sequence: Synthetic oligonucleotide
  Target: LAMA2; (+) strand; PAM type: NNNNGHTT; PAM sequence: GAGAGTTT
cacttttgaagttagacatc

SEQ ID NO: 42949 - DNA, 20 bp, Artificial Sequence
  Description of Artificial Sequence: Synthetic oligonucleotide
  Target: LAMA2; (+) strand; PAM type: NNNNGHTT; PAM sequence: CCTAGATT
tagacatcgagagtttgagt

SEQ ID NO: 42950 - DNA, 20 bp, Artificial Sequence
  Description of Artificial Sequence: Synthetic oligonucleotide
  Target: LAMA2; (+) strand; PAM type: NNNNGHTT; PAM sequence: TAAGGATT
tgaaaatagtagtgcctttt

SEQ ID NO: 42951 - DNA, 20 bp, Artificial Sequence
  Description of Artificial Sequence: Synthetic oligonucleotide
  Target: LAMA2; (+) strand; PAM type: NNNNGHTT; PAM sequence: TGGTGTTT
ttcaaagactttacaatcag

SEQ ID NO: 42952 - DNA, 20 bp, Artificial Sequence
  Description of Artificial Sequence: Synthetic oligonucleotide
  Target: LAMA2; (+) strand; PAM type: NNNNGHTT; PAM sequence: TGGAGCTT
gtgttttcagcatggacaac

SEQ ID NO: 42953 - DNA, 20 bp, Artificial Sequence
  Description of Artificial Sequence: Synthetic oligonucleotide
  Target: LAMA2; (+) strand; PAM type: NNNNGHTT; PAM sequence: CTGGGCTT
taacttaaaagatctagaaa

SEQ ID NO: 42954 - DNA, 20 bp, Artificial Sequence
  Description of Artificial Sequence: Synthetic oligonucleotide
  Target: LAMA2; (+) strand; PAM type: NNNNGHTT; PAM sequence: CACAGTTT
tagaaactgggcttgttggc

SEQ ID NO: 42955 - DNA, 20 bp, Artificial Sequence
  Description of Artificial Sequence: Synthetic oligonucleotide
  Target: LAMA2; (+) strand; PAM type: NNNNGHTT; PAM sequence: GTGTGATT
gcttgttggccacagtttta

SEQ ID NO: 42956 - DNA, 20 bp, Artificial Sequence
  Description of Artificial Sequence: Synthetic oligonucleotide
  Target: LAMA2; (+) strand; PAM type: NNNNGHTT; PAM sequence: CCAGGATT
tccttcacagcgaacatttg

SEQ ID NO: 42957 - DNA, 20 bp, Artificial Sequence
  Description of Artificial Sequence: Synthetic oligonucleotide
  Target: LAMA2; (+) strand; PAM type: NNNNGHTT; PAM sequence: ATCAGCTT
atttcctcaactcttttccc

SEQ ID NO: 42958 - DNA, 20 bp, Artificial Sequence
  Description of Artificial Sequence: Synthetic oligonucleotide
  Target: LAMA2; (+) strand; PAM type: NNNNGHTT; PAM sequence: CCCAGATT
cttctctctttccttcacct

SEQ ID NO: 42959 - DNA, 20 bp, Artificial Sequence
  Description of Artificial Sequence: Synthetic oligonucleotide
  Target: LAMA2; (+) strand; PAM type: NNNNGHTT; PAM sequence: CAGAGTTT
atgtctgtcatccacaccac

SEQ ID NO: 42960 - DNA, 20 bp, Artificial Sequence
  Description of Artificial Sequence: Synthetic oligonucleotide
  Target: LAMA2; (+) strand; PAM type: NNNNGHTT; PAM sequence: ATCAGATT
gtgaactctgaaaatagtaa

SEQ ID NO: 42961 - DNA, 20 bp, Artificial Sequence
  Description of Artificial Sequence: Synthetic oligonucleotide
  Target: LAMA2; (+) strand; PAM type: NNNNGHTT; PAM sequence: CTCTGCTT
taaatcagattagatctttc

SEQ ID NO: 42962 - DNA, 20 bp, Artificial Sequence
  Description of Artificial Sequence: Synthetic oligonucleotide
  Target: LAMA2; (+) strand; PAM type: NNNNGHTT; PAM sequence: ATTAGATT
taagaataaattctaaattc

SEQ ID NO: 42963 - DNA, 20 bp, Artificial Sequence
  Description of Artificial Sequence: Synthetic oligonucleotide
  Target: LAMA2; (+) strand; PAM type: NNNNGHTT; PAM sequence: CTCTGATT
atgacagctcttgtattttt

SEQ ID NO: 42964 - DNA, 20 bp, Artificial Sequence
  Description of Artificial Sequence: Synthetic oligonucleotide
  Target: LAMA2; (+) strand; PAM type: NNNNGHTT; PAM sequence: ATTAGCTT
tttccagaggaccactttaa

SEQ ID NO: 42965 - DNA, 20 bp, Artificial Sequence
  Description of Artificial Sequence: Synthetic oligonucleotide
  Target: LAMA2; (+) strand; PAM type: NNNNGHTT; PAM sequence: AAATGTTT
tgtaatttctttgaacaatt

SEQ ID NO: 42966 - DNA, 20 bp, Artificial Sequence
  Description of Artificial Sequence: Synthetic oligonucleotide
  Target: LAMA2; (+) strand; PAM type: NNNNGHTT; PAM sequence: CCTTGTTT
taaatgtttatcttgaatac

SEQ ID NO: 42967 - DNA, 20 bp, Artificial Sequence
  Description of Artificial Sequence: Synthetic oligonucleotide
  Target: LAMA2; (+) strand; PAM type: NNNNGHTT; PAM sequence: TGTTGTTT
gtttatttacttttcttctt

SEQ ID NO: 42968 - DNA, 20 bp, Artificial Sequence
  Description of Artificial Sequence: Synthetic oligonucleotide
  Target: LAMA2; (+) strand; PAM type: NNNNGHTT; PAM sequence: ATTGGATT
attccatggaggaggtcaaa

SEQ ID NO: 42969 - DNA, 20 bp, Artificial Sequence
  Description of Artificial Sequence: Synthetic oligonucleotide
  Target: LAMA2; (+) strand; PAM type: NNNNGHTT; PAM sequence: TCCCGTTT
tcctgtatgtagtgaatctg

SEQ ID NO: 42970 - DNA, 20 bp, Artificial Sequence
  Description of Artificial Sequence: Synthetic oligonucleotide
  Target: LAMA2; (+) strand; PAM type: NNNNGHTT; PAM sequence: TTATGATT
atgtagtgaatctgtcccgt

SEQ ID NO: 42971 - DNA, 20 bp, Artificial Sequence
  Description of Artificial Sequence: Synthetic oligonucleotide
  Target: LAMA2; (+) strand; PAM type: NNNNGHTT; PAM sequence: CATTGTTT
tgctaggactttttgtcttt

SEQ ID NO: 42972 - DNA, 20 bp, Artificial Sequence
  Description of Artificial Sequence: Synthetic oligonucleotide
  Target: LAMA2; (+) strand; PAM type: NNNNGHTT; PAM sequence: TGTTGCTT
tttttgtctttcattgtttc

SEQ ID NO: 42973 - DNA, 20 bp, Artificial Sequence
  Description of Artificial Sequence: Synthetic oligonucleotide
  Target: LAMA2; (+) strand; PAM type: NNNNGHTT; PAM sequence: TCCAGCTT
attgtttctgttgctttatc

SEQ ID NO: 42974 - DNA, 20 bp, Artificial Sequence
  Description of Artificial Sequence: Synthetic oligonucleotide
  Target: LAMA2; (+) strand; PAM type: NNNNGHTT; PAM sequence: GAATGTTT
gatccttttatagtatgaat

SEQ ID NO: 42975 - DNA, 20 bp, Artificial Sequence
  Description of Artificial Sequence: Synthetic oligonucleotide
  Target: LAMA2; (+) strand; PAM type: NNNNGHTT; PAM sequence: TCTTGCTT
agtgaggctaccttaaatta

SEQ ID NO: 42976 - DNA, 20 bp, Artificial Sequence
  Description of Artificial Sequence: Synthetic oligonucleotide
  Target: LAMA2; (+) strand; PAM type: NNNNGHTT; PAM sequence: TTGAGTTT
accttaaattatcttgcttc

SEQ ID NO: 42977 - DNA, 20 bp, Artificial Sequence
  Description of Artificial Sequence: Synthetic oligonucleotide
  Target: LAMA2; (+) strand; PAM type: NNNNGHTT; PAM sequence: TTAAGCTT
cagtaagagttgagcagtat

SEQ ID NO: 42978 - DNA, 20 bp, Artificial Sequence
  Description of Artificial Sequence: Synthetic oligonucleotide
  Target: LAMA2; (+) strand; PAM type: NNNNGHTT; PAM sequence: CTTGGCTT
tggataaggaatgcatattt

SEQ ID NO: 42979 - DNA, 20 bp, Artificial Sequence
  Description of Artificial Sequence: Synthetic oligonucleotide
  Target: LAMA2; (+) strand; PAM type: NNNNGHTT; PAM sequence: ATAAGATT
ttggatgagaattatactac

SEQ ID NO: 42980 - DNA, 20 bp, Artificial Sequence
  Description of Artificial Sequence: Synthetic oligonucleotide
  Target: LAMA2; (+) strand; PAM type: NNNNGHTT; PAM sequence: GGGTGATT
aaatatagataactcacatg

SEQ ID NO: 42981 - DNA, 20 bp, Artificial Sequence
  Description of Artificial Sequence: Synthetic oligonucleotide
  Target: LAMA2; (+) strand; PAM type: NNNNGHTT; PAM sequence: ATTTGATT
tagataactcacatggggtg

SEQ ID NO: 42982 - DNA, 20 bp, Artificial Sequence
  Description of Artificial Sequence: Synthetic oligonucleotide
  Target: LAMA2; (+) strand; PAM type: NNNNGHTT; PAM sequence: ATCTGTTT
catggggtgatttgattggc

SEQ ID NO: 42983 - DNA, 20 bp, Artificial Sequence
  Description of Artificial Sequence: Synthetic oligonucleotide
  Target: LAMA2; (+) strand; PAM type: NNNNGHTT; PAM sequence: CTTTGTTT
tggcatctgttttcattttt

SEQ ID NO: 42984 - DNA, 20 bp, Artificial Sequence
  Description of Artificial Sequence: Synthetic oligonucleotide
  Target: LAMA2; (+) strand; PAM type: NNNNGHTT; PAM sequence: ATATGTTT
ttcctatttcaggcaaaaag

SEQ ID NO: 42985 - DNA, 20 bp, Artificial Sequence
  Description of Artificial Sequence: Synthetic oligonucleotide
  Target: LAMA2; (+) strand; PAM type: NNNNGHTT; PAM sequence: TCTTGCTT
gtccttggatgtgtatggtc

SEQ ID NO: 42986 - DNA, 20 bp, Artificial Sequence
  Description of Artificial Sequence: Synthetic oligonucleotide
  Target: LAMA2; (+) strand; PAM type: NNNNGHTT; PAM sequence: GAGGGATT
gagctggcccttcagcaaag

SEQ ID NO: 42987 - DNA, 20 bp, Artificial Sequence
  Description of Artificial Sequence: Synthetic oligonucleotide
  Target: LAMA2; (+) strand; PAM type: NNNNGHTT; PAM sequence: GTCTGTTT
cctttgagatcagggcccag

SEQ ID NO: 42988 - DNA, 20 bp, Artificial Sequence
  Description of Artificial Sequence: Synthetic oligonucleotide
  Target: LAMA2; (+) strand; PAM type: NNNNGHTT; PAM sequence: TAAAGATT
ggcacctagcatggtcacag

SEQ ID NO: 42989 - DNA, 20 bp, Artificial Sequence
  Description of Artificial Sequence: Synthetic oligonucleotide
  Target: LAMA2; (+) strand; PAM type: NNNNGHTT; PAM sequence: CATGGATT
atgaaagaaaggtgtaagat

SEQ ID NO: 42990 - DNA, 20 bp, Artificial Sequence
  Description of Artificial Sequence: Synthetic oligonucleotide
  Target: LAMA2; (+) strand; PAM type: NNNNGHTT; PAM sequence: TGAGGATT
attaaatatttaaatttaag

SEQ ID NO: 42991 - DNA, 20 bp, Artificial Sequence
  Description of Artificial Sequence: Synthetic oligonucleotide
  Target: LAMA2; (+) strand; PAM type: NNNNGHTT; PAM sequence: AGGAGTTT
taaatttaagtgaggattgt

SEQ ID NO: 42992 - DNA, 20 bp, Artificial Sequence
  Description of Artificial Sequence: Synthetic oligonucleotide
  Target: LAMA2; (+) strand; PAM type: NNNNGHTT; PAM sequence: TGCTGCTT
cagctatttaaaatacgccc

SEQ ID NO: 42993 - DNA, 20 bp, Artificial Sequence
  Description of Artificial Sequence: Synthetic oligonucleotide
  Target: LAMA2; (+) strand; PAM type: NNNNGHTT; PAM sequence: ATAAGATT
cttcaaagctcatcacttgg

SEQ ID NO: 42994 - DNA, 20 bp, Artificial Sequence
  Description of Artificial Sequence: Synthetic oligonucleotide
  Target: LAMA2; (+) strand; PAM type: NNNNGHTT; PAM sequence: GATGGCTT
ttggaaggccaaggcaggag

SEQ ID NO: 42995 - DNA, 20 bp, Artificial Sequence
  Description of Artificial Sequence: Synthetic oligonucleotide
  Target: LAMA2; (+) strand; PAM type: NNNNGHTT; PAM sequence: ACCAGCTT
cttgaggccaggagttcaag

SEQ ID NO: 42996 - DNA, 20 bp, Artificial Sequence
  Description of Artificial Sequence: Synthetic oligonucleotide
  Target: LAMA2; (+) strand; PAM type: NNNNGHTT; PAM sequence: GGAAGATT
ctactcaggaggctgagatg

SEQ ID NO: 42997 - DNA, 20 bp, Artificial Sequence
  Description of Artificial Sequence: Synthetic oligonucleotide
  Target: LAMA2; (+) strand; PAM type: NNNNGHTT; PAM sequence: TATAGATT
aaaacatgttatagactatc

SEQ ID NO: 42998 - DNA, 20 bp, Artificial Sequence
  Description of Artificial Sequence: Synthetic oligonucleotide
  Target: LAMA2; (+) strand; PAM type: NNNNGHTT; PAM sequence: CTATGCTT
agattcaattttcaaaaatc

SEQ ID NO: 42999 - DNA, 20 bp, Artificial Sequence
  Description of Artificial Sequence: Synthetic oligonucleotide
  Target: LAMA2; (+) strand; PAM type: NNNNGHTT; PAM sequence: ATTAGCTT
tataatactgcaattttcaa

SEQ ID NO: 43000 - DNA, 20 bp, Artificial Sequence
  Description of Artificial Sequence: Synthetic oligonucleotide
  Target: LAMA2; (+) strand; PAM type: NNNNGHTT; PAM sequence: CTGGGATT
tatagaaccaaaatgcatgt

SEQ ID NO: 43001 - DNA, 20 bp, Artificial Sequence
  Description of Artificial Sequence: Synthetic oligonucleotide
  Target: LAMA2; (+) strand; PAM type: NNNNGHTT; PAM sequence: TTGGGATT
tgtctgggatttagaaaatc

SEQ ID NO: 43002 - DNA, 20 bp, Artificial Sequence
  Description of Artificial Sequence: Synthetic oligonucleotide
  Target: LAMA2; (+) strand; PAM type: NNNNGHTT; PAM sequence: TTCTGTTT
ggatttagaaaatcttggga

SEQ ID NO: 43003 - DNA, 20 bp, Artificial Sequence
  Description of Artificial Sequence: Synthetic oligonucleotide
  Target: LAMA2; (+) strand; PAM type: NNNNGHTT; PAM sequence: CCTTGCTT
tcttgggattctgtttccat

SEQ ID NO: 43004 - DNA, 20 bp, Artificial Sequence
  Description of Artificial Sequence: Synthetic oligonucleotide
  Target: LAMA2; (+) strand; PAM type: NNNNGHTT; PAM sequence: ATTTGATT
aattaagaccatcagatagt

SEQ ID NO: 43005 - DNA, 20 bp, Artificial Sequence
  Description of Artificial Sequence: Synthetic oligonucleotide
  Target: LAMA2; (+) strand; PAM type: NNNNGHTT; PAM sequence: TTAAGTTT
tagttactgaaatttagaca

SEQ ID NO: 43006 - DNA, 20 bp, Artificial Sequence
  Description of Artificial Sequence: Synthetic oligonucleotide
  Target: LAMA2; (+) strand; PAM type: NNNNGHTT; PAM sequence: CAGAGTTT
aataattctacagttgactg

SEQ ID NO: 43007 - DNA, 20 bp, Artificial Sequence
  Description of Artificial Sequence: Synthetic oligonucleotide
  Target: LAMA2; (+) strand; PAM type: NNNNGHTT; PAM sequence: TACTGTTT
taatgtcttttcaatcactt

SEQ ID NO: 43008 - DNA, 20 bp, Artificial Sequence
  Description of Artificial Sequence: Synthetic oligonucleotide
  Target: LAMA2; (+) strand; PAM type: NNNNGHTT; PAM sequence: TCTTGATT
ttttcaatcactttactgtt

SEQ ID NO: 43009 - DNA, 20 bp, Artificial Sequence
  Description of Artificial Sequence: Synthetic oligonucleotide
  Target: LAMA2; (+) strand; PAM type: NNNNGHTT; PAM sequence: AGAGGTTT
caagactgggcaatttacaa

SEQ ID NO: 43010 - DNA, 20 bp, Artificial Sequence
  Description of Artificial Sequence: Synthetic oligonucleotide
  Target: LAMA2; (+) strand; PAM type: NNNNGHTT; PAM sequence: TGGGGATT
gaggtccctcccccaacaca

SEQ ID NO: 43011 - DNA, 20 bp, Artificial Sequence
  Description of Artificial Sequence: Synthetic oligonucleotide
  Target: LAMA2; (+) strand; PAM type: NNNNGHTT; PAM sequence: TTTGGATT
ccaacacatggggattacaa

SEQ ID NO: 43012 - DNA, 20 bp, Artificial Sequence
  Description of Artificial Sequence: Synthetic oligonucleotide
  Target: LAMA2; (+) strand; PAM type: NNNNGHTT; PAM sequence: ATGAGATT
aatttggattacaattcaag

SEQ ID NO: 43013 - DNA, 20 bp, Artificial Sequence
  Description of Artificial Sequence: Synthetic oligonucleotide
  Target: LAMA2; (+) strand; PAM type: NNNNGHTT; PAM sequence: ATGAGCTT
gcaatgaggacttggaagaa

SEQ ID NO: 43014 - DNA, 20 bp, Artificial Sequence
  Description of Artificial Sequence: Synthetic oligonucleotide
  Target: LAMA2; (+) strand; PAM type: NNNNGHTT; PAM sequence: GGGTGTTT
ggtgcgctacgcaaagtgga

SEQ ID NO: 43015 - DNA, 20 bp, Artificial Sequence
  Description of Artificial Sequence: Synthetic oligonucleotide
  Target: LAMA2; (+) strand; PAM type: NNNNGHTT; PAM sequence: TGTTGTTT
gtggagggtgtttttgttgt

SEQ ID NO: 43016 - DNA, 20 bp, Artificial Sequence
  Description of Artificial Sequence: Synthetic oligonucleotide
  Target: LAMA2; (+) strand; PAM type: NNNNGHTT; PAM sequence: CTGGGATT
tgcctcagtctccctcagtg

SEQ ID NO: 43017 - DNA, 20 bp, Artificial Sequence
  Description of Artificial Sequence: Synthetic oligonucleotide
  Target: LAMA2; (+) strand; PAM type: NNNNGHTT; PAM sequence: CAATGTTT
aatgtgagctacccaacacc

SEQ ID NO: 43018 - DNA, 20 bp, Artificial Sequence
  Description of Artificial Sequence: Synthetic oligonucleotide
  Target: LAMA2; (+) strand; PAM type: NNNNGHTT; PAM sequence: TCTTGATT
ctacccaacacccaatgttt

SEQ ID NO: 43019 - DNA, 20 bp, Artificial Sequence
  Description of Artificial Sequence: Synthetic oligonucleotide
  Target: LAMA2; (+) strand; PAM type: NNNNGHTT; PAM sequence: GATGGTTT
cttgattgtaaaagaaaatt

SEQ ID NO: 43020 - DNA, 20 bp, Artificial Sequence
  Description of Artificial Sequence: Synthetic oligonucleotide
  Target: LAMA2; (+) strand; PAM type: NNNNGHTT; PAM sequence: ATGTGTTT
aacatccattcattttatca

SEQ ID NO: 43021 - DNA, 20 bp, Artificial Sequence
  Description of Artificial Sequence: Synthetic oligonucleotide
  Target: LAMA2; (+) strand; PAM type: NNNNGHTT; PAM sequence: AAGTGTTT
ttactccttctttcacttta

SEQ ID NO: 43022 - DNA, 20 bp, Artificial Sequence
  Description of Artificial Sequence: Synthetic oligonucleotide
  Target: LAMA2; (+) strand; PAM type: NNNNGHTT; PAM sequence: AATAGATT
cacacattttgttcttctat

SEQ ID NO: 43023 - DNA, 20 bp, Artificial Sequence
  Description of Artificial Sequence: Synthetic oligonucleotide
  Target: LAMA2; (+) strand; PAM type: NNNNGHTT; PAM sequence: TATGGTTT
tcttctataatagatttgtg

SEQ ID NO: 43024 - DNA, 20 bp, Artificial Sequence
  Description of Artificial Sequence: Synthetic oligonucleotide
  Target: LAMA2; (+) strand; PAM type: NNNNGHTT; PAM sequence: GTATGTTT
aatactgatgttaacatcta

SEQ ID NO: 43025 - DNA, 20 bp, Artificial Sequence
  Description of Artificial Sequence: Synthetic oligonucleotide
  Target: LAMA2; (+) strand; PAM type: NNNNGHTT; PAM sequence: GGAGGCTT
atgtttatttgagggatata

SEQ ID NO: 43026 - DNA, 20 bp, Artificial Sequence
  Description of Artificial Sequence: Synthetic oligonucleotide
  Target: LAMA2; (+) strand; PAM type: NNNNGHTT; PAM sequence: CCAAGATT
acagtgaaatcatcctttca

SEQ ID NO: 43027 - DNA, 20 bp, Artificial Sequence
  Description of Artificial Sequence: Synthetic oligonucleotide
  Target: LAMA2; (+) strand; PAM type: NNNNGHTT; PAM sequence: TTGTGCTT
gtaagacactgttactggaa

SEQ ID NO: 43028 - DNA, 20 bp, Artificial Sequence
  Description of Artificial Sequence: Synthetic oligonucleotide
  Target: LAMA2; (+) strand; PAM type: NNNNGHTT; PAM sequence: GTGTGCTT
tctgtattaaaatgcattat

SEQ ID NO: 43029 - DNA, 20 bp, Artificial Sequence
  Description of Artificial Sequence: Synthetic oligonucleotide
  Target: LAMA2; (+) strand; PAM type: NNNNGHTT; PAM sequence: TTCTGTTT
tgcattatgtgtgctttcaa

SEQ ID NO: 43030 - DNA, 20 bp, Artificial Sequence
  Description of Artificial Sequence: Synthetic oligonucleotide
  Target: LAMA2; (+) strand; PAM type: NNNNGHTT; PAM sequence: CATTGATT
ttctgttttaaagaaattgc

SEQ ID NO: 43031 - DNA, 20 bp, Artificial Sequence
  Description of Artificial Sequence: Synthetic oligonucleotide
  Target: LAMA2; (+) strand; PAM type: NNNNGHTT; PAM sequence: AAGAGTTT
tgatttacatggttgtatgg

SEQ ID NO: 43032 - DNA, 20 bp, Artificial Sequence
  Description of Artificial Sequence: Synthetic oligonucleotide
  Target: LAMA2; (+) strand; PAM type: NNNNGHTT; PAM sequence: TTTTGTTT
tacatggttgtatggaagag

SEQ ID NO: 43033 - DNA, 20 bp, Artificial Sequence
  Description of Artificial Sequence: Synthetic oligonucleotide
  Target: LAMA2; (+) strand; PAM type: NNNNGHTT; PAM sequence: GCCTGATT
agttttgtttaaatgccatt

SEQ ID NO: 43034 - DNA, 20 bp, Artificial Sequence
  Description of Artificial Sequence: Synthetic oligonucleotide
  Target: LAMA2; (+) strand; PAM type: NNNNGHTT; PAM sequence: GGTGGCTT
atgccattgcctgatttcct

SEQ ID NO: 43035 - DNA, 20 bp, Artificial Sequence
  Description of Artificial Sequence: Synthetic oligonucleotide
  Target: LAMA2; (+) strand; PAM type: NNNNGHTT; PAM sequence: GTTGGTTT
ttcttagggtattggctact

SEQ ID NO: 43036 - DNA, 20 bp, Artificial Sequence
  Description of Artificial Sequence: Synthetic oligonucleotide
  Target: LAMA2; (+) strand; PAM type: NNNNGHTT; PAM sequence: TATGGATT
gtttgaaatgagatacaact

SEQ ID NO: 43037 - DNA, 20 bp, Artificial Sequence
  Description of Artificial Sequence: Synthetic oligonucleotide
  Target: LAMA2; (+) strand; PAM type: NNNNGHTT; PAM sequence: ATATGTTT
atacaacttatggattataa

SEQ ID NO: 43038 - DNA, 20 bp, Artificial Sequence
  Description of Artificial Sequence: Synthetic oligonucleotide
  Target: LAMA2; (+) strand; PAM type: NNNNGHTT; PAM sequence: TGTAGCTT
tgtggacattaagctgtaat

SEQ ID NO: 43039 - DNA, 20 bp, Artificial Sequence
  Description of Artificial Sequence: Synthetic oligonucleotide
  Target: LAMA2; (+) strand; PAM type: NNNNGHTT; PAM sequence: GCAAGCTT
tgtaattgtagctttctctt

SEQ ID NO: 43040 - DNA, 20 bp, Artificial Sequence
  Description of Artificial Sequence: Synthetic oligonucleotide
  Target: LAMA2; (+) strand; PAM type: NNNNGHTT; PAM sequence: CTCTGCTT
ctcttgcaagcttctttatc

SEQ ID NO: 43041 - DNA, 20 bp, Artificial Sequence
  Description of Artificial Sequence: Synthetic oligonucleotide
  Target: LAMA2; (+) strand; PAM type: NNNNGHTT; PAM sequence: TAATGCTT
aaattaagtattttatataa

SEQ ID NO: 43042 - DNA, 20 bp, Artificial Sequence
  Description of Artificial Sequence: Synthetic oligonucleotide
  Target: LAMA2; (+) strand; PAM type: NNNNGHTT; PAM sequence: AAGAGCTT
taaagagggaaattaagata

SEQ ID NO: 43043 - DNA, 20 bp, Artificial Sequence
  Description of Artificial Sequence: Synthetic oligonucleotide
  Target: LAMA2; (+) strand; PAM type: NNNNGHTT; PAM sequence: CCTGGATT
ttggcaaatataggatcttt

SEQ ID NO: 43044 - DNA, 20 bp, Artificial Sequence
  Description of Artificial Sequence: Synthetic oligonucleotide
  Target: LAMA2; (+) strand; PAM type: NNNNGHTT; PAM sequence: GTATGTTT
tataggatctttcctggatt

SEQ ID NO: 43045 - DNA, 20 bp, Artificial Sequence
  Description of Artificial Sequence: Synthetic oligonucleotide
  Target: LAMA2; (+) strand; PAM type: NNNNGHTT; PAM sequence: CTGAGATT
ctttcctggattgtatgttt

SEQ ID NO: 43046 - DNA, 20 bp, Artificial Sequence
  Description of Artificial Sequence: Synthetic oligonucleotide
  Target: LAMA2; (+) strand; PAM type: NNNNGHTT; PAM sequence: TTTGGTTT
agtagacagagacagtggac

SEQ ID NO: 43047 - DNA, 20 bp, Artificial Sequence
  Description of Artificial Sequence: Synthetic oligonucleotide
  Target: LAMA2; (+) strand; PAM type: NNNNGHTT; PAM sequence: TTGTGTTT
aggcatccagctgcaggtaa

SEQ ID NO: 43048 - DNA, 20 bp, Artificial Sequence
  Description of Artificial Sequence: Synthetic oligonucleotide
  Target: LAMA2; (+) strand; PAM type: NNNNGHTT; PAM sequence: AAGAGTTT
ctaaagaggcaactcccgat

SEQ ID NO: 43049 - DNA, 20 bp, Artificial Sequence
  Description of Artificial Sequence: Synthetic oligonucleotide
  Target: LAMA2; (+) strand; PAM type: NNNNGHTT; PAM sequence: AATAGTTT
caactcccgataagagtttc

SEQ ID NO: 43050 - DNA, 20 bp, Artificial Sequence
  Description of Artificial Sequence: Synthetic oligonucleotide
  Target: LAMA2; (+) strand; PAM type: NNNNGHTT; PAM sequence: GACAGCTT
agttagtaaccacctcaaaa

SEQ ID NO: 43051 - DNA, 20 bp, Artificial Sequence
  Description of Artificial Sequence: Synthetic oligonucleotide
  Target: LAMA2; (+) strand; PAM type: NNNNGHTT; PAM sequence: TTTAGCTT
ataccacctacagtcttact

SEQ ID NO: 43052 - DNA, 20 bp, Artificial Sequence
  Description of Artificial Sequence: Synthetic oligonucleotide
  Target: LAMA2; (+) strand; PAM type: NNNNGHTT; PAM sequence: CTTGGTTT
acctacagtcttacttttag

SEQ ID NO: 43053 - DNA, 20 bp, Artificial Sequence
  Description of Artificial Sequence: Synthetic oligonucleotide
  Target: LAMA2; (+) strand; PAM type: NNNNGHTT; PAM sequence: AACAGATT
tcctgttcattacttacaga

SEQ ID NO: 43054 - DNA, 20 bp, Artificial Sequence
  Description of Artificial Sequence: Synthetic oligonucleotide
  Target: LAMA2; (+) strand; PAM type: NNNNGHTT; PAM sequence: ACCAGTTT
ggagtgtgaatgcccttaac

SEQ ID NO: 43055 - DNA, 20 bp, Artificial Sequence
  Description of Artificial Sequence: Synthetic oligonucleotide
  Target: LAMA2; (+) strand; PAM type: NNNNGHTT; PAM sequence: ATGTGATT
gcatttttaattctacaata

SEQ ID NO: 43056 - DNA, 20 bp, Artificial Sequence
  Description of Artificial Sequence: Synthetic oligonucleotide
  Target: LAMA2; (+) strand; PAM type: NNNNGHTT; PAM sequence: GTTGGATT
ctagatagaaatatgtggag

SEQ ID NO: 43057 - DNA, 20 bp, Artificial Sequence
  Description of Artificial Sequence: Synthetic oligonucleotide
  Target: LAMA2; (+) strand; PAM type: NNNNGHTT; PAM sequence: CTGAGTTT
tgtggaggttggatttcctg

SEQ ID NO: 43058 - DNA, 20 bp, Artificial Sequence
  Description of Artificial Sequence: Synthetic oligonucleotide
  Target: LAMA2; (+) strand; PAM type: NNNNGHTT; PAM sequence: AAGTGATT
aacctccgcctcccgggttc

SEQ ID NO: 43059 - DNA, 20 bp, Artificial Sequence
  Description of Artificial Sequence: Synthetic oligonucleotide
  Target: LAMA2; (+) strand; PAM type: NNNNGHTT; PAM sequence: CTGGGATT
tgcctcagcctcctgagtag

SEQ ID NO: 43060 - DNA, 20 bp, Artificial Sequence
  Description of Artificial Sequence: Synthetic oligonucleotide
  Target: LAMA2; (+) strand; PAM type: NNNNGHTT; PAM sequence: TGGGGTTT
tcttgtatttttagtaggga

SEQ ID NO: 43061 - DNA, 20 bp, Artificial Sequence
  Description of Artificial Sequence: Synthetic oligonucleotide
  Target: LAMA2; (+) strand; PAM type: NNNNGHTT; PAM sequence: CTGGGATT
tgccttggcctcccaaagtt

SEQ ID NO: 43062 - DNA, 20 bp, Artificial Sequence
  Description of Artificial Sequence: Synthetic oligonucleotide
  Target: LAMA2; (+) strand; PAM type: NNNNGHTT; PAM sequence: CTGAGTTT
cacagtgcccagccttcctg

SEQ ID NO: 43063 - DNA, 20 bp, Artificial Sequence
  Description of Artificial Sequence: Synthetic oligonucleotide
  Target: LAMA2; (+) strand; PAM type: NNNNGHTT; PAM sequence: TATGGTTT
cgtctcttttccaagatgca

SEQ ID NO: 43064 - DNA, 20 bp, Artificial Sequence
  Description of Artificial Sequence: Synthetic oligonucleotide
  Target: LAMA2; (+) strand; PAM type: NNNNGHTT; PAM sequence: TTTTGCTT
ccaagatgcatatggttttc

SEQ ID NO: 43065 - DNA, 20 bp, Artificial Sequence
  Description of Artificial Sequence: Synthetic oligonucleotide
  Target: LAMA2; (+) strand; PAM type: NNNNGHTT; PAM sequence: CATAGTTT
taatgcattatattctgggt

SEQ ID NO: 43066 - DNA, 20 bp, Artificial Sequence
  Description of Artificial Sequence: Synthetic oligonucleotide
  Target: LAMA2; (+) strand; PAM type: NNNNGHTT; PAM sequence: ACGTGTTT
cctgacctaataaatgatgt

SEQ ID NO: 43067 - DNA, 20 bp, Artificial Sequence
  Description of Artificial Sequence: Synthetic oligonucleotide
  Target: LAMA2; (+) strand; PAM type: NNNNGHTT; PAM sequence: TTTAGATT
gacacgtattttgataatca

SEQ ID NO: 43068 - DNA, 20 bp, Artificial Sequence
  Description of Artificial Sequence: Synthetic oligonucleotide
  Target: LAMA2; (+) strand; PAM type: NNNNGHTT; PAM sequence: TATGGTTT
aataaaatttctttggaaaa

SEQ ID NO: 43069 - DNA, 20 bp, Artificial Sequence
  Description of Artificial Sequence: Synthetic oligonucleotide
  Target: LAMA2; (+) strand; PAM type: NNNNGHTT; PAM sequence: TTGAGTTT
tctttggaaaatatggttta

SEQ ID NO: 43070 - DNA, 20 bp, Artificial Sequence
  Description of Artificial Sequence: Synthetic oligonucleotide
  Target: LAMA2; (+) strand; PAM type: NNNNGHTT; PAM sequence: CTTTGTTT
tgtgtcaggcattttattca

SEQ ID NO: 43071 - DNA, 20 bp, Artificial Sequence
  Description of Artificial Sequence: Synthetic oligonucleotide
  Target: LAMA2; (+) strand; PAM type: NNNNGHTT; PAM sequence: GGAGGATT
tcaactgttcttgagatccc

SEQ ID NO: 43072 - DNA, 20 bp, Artificial Sequence
  Description of Artificial Sequence: Synthetic oligonucleotide
  Target: LAMA2; (+) strand; PAM type: NNNNGHTT; PAM sequence: GGAAGCTT
taagtctataactgaggaaa

SEQ ID NO: 43073 - DNA, 20 bp, Artificial Sequence
  Description of Artificial Sequence: Synthetic oligonucleotide
  Target: LAMA2; (+) strand; PAM type: NNNNGHTT; PAM sequence: TTTTGTTT
ttttaaaggtataatttctt

SEQ ID NO: 43074 - DNA, 20 bp, Artificial Sequence
  Description of Artificial Sequence: Synthetic oligonucleotide
  Target: LAMA2; (+) strand; PAM type: NNNNGHTT; PAM sequence: GTTTGTTT
aaaggtataatttctttttt

SEQ ID NO: 43075 - DNA, 20 bp, Artificial Sequence
  Description of Artificial Sequence: Synthetic oligonucleotide
  Target: LAMA2; (+) strand; PAM type: NNNNGHTT; PAM sequence: TTTCGTTT
atttcttttttgtttgtttt

SEQ ID NO: 43076 - DNA, 20 bp, Artificial Sequence
  Description of Artificial Sequence: Synthetic oligonucleotide
  Target: LAMA2; (+) strand; PAM type: NNNNGHTT; PAM sequence: TTAAGTTT
ttttcttttattattatact

SEQ ID NO: 43077 - DNA, 20 bp, Artificial Sequence
  Description of Artificial Sequence: Synthetic oligonucleotide
  Target: LAMA2; (+) strand; PAM type: NNNNGHTT; PAM sequence: CTATGATT
tctcattgttcaattcccac

SEQ ID NO: 43078 - DNA, 20 bp, Artificial Sequence
  Description of Artificial Sequence: Synthetic oligonucleotide
  Target: LAMA2; (+) strand; PAM type: NNNNGHTT; PAM sequence: CGGTGTTT
cacctatgattgagaacatg

SEQ ID NO: 43079 - DNA, 20 bp, Artificial Sequence
  Description of Artificial Sequence: Synthetic oligonucleotide
  Target: LAMA2; (+) strand; PAM type: NNNNGHTT; PAM sequence: TTTGGTTT
atgattgagaacatgcggtg

SEQ ID NO: 43080 - DNA, 20 bp, Artificial Sequence
  Description of Artificial Sequence: Synthetic oligonucleotide
  Target: LAMA2; (+) strand; PAM type: NNNNGHTT; PAM sequence: GATAGTTT
gtttggttttttattcttgt

SEQ ID NO: 43081 - DNA, 20 bp, Artificial Sequence
  Description of Artificial Sequence: Synthetic oligonucleotide
  Target: LAMA2; (+) strand; PAM type: NNNNGHTT; PAM sequence: TGATGATT
ttgtgatagtttgctgagaa

SEQ ID NO: 43082 - DNA, 20 bp, Artificial Sequence
  Description of Artificial Sequence: Synthetic oligonucleotide
  Target: LAMA2; (+) strand; PAM type: NNNNGHTT; PAM sequence: GCATGATT
gtgcatgtgtctttatagca

SEQ ID NO: 43083 - DNA, 20 bp, Artificial Sequence
  Description of Artificial Sequence: Synthetic oligonucleotide
  Target: LAMA2; (+) strand; PAM type: NNNNGHTT; PAM sequence: ACTAGTTT
ctgacttccacaatggttga

SEQ ID NO: 43084 - DNA, 20 bp, Artificial Sequence
  Description of Artificial Sequence: Synthetic oligonucleotide
  Target: LAMA2; (+) strand; PAM type: NNNNGHTT; PAM sequence: TGTTGTTT
tccacatcctctccagcacc

SEQ ID NO: 43085 - DNA, 20 bp, Artificial Sequence
  Description of Artificial Sequence: Synthetic oligonucleotide
  Target: LAMA2; (+) strand; PAM type: NNNNGHTT; PAM sequence: TGTGGTTT
ggtgtgagatggtatctcat

SEQ ID NO: 43086 - DNA, 20 bp, Artificial Sequence
  Description of Artificial Sequence: Synthetic oligonucleotide
  Target: LAMA2; (+) strand; PAM type: NNNNGHTT; PAM sequence: TTTTGATT
gagatggtatctcattgtgg

SEQ ID NO: 43087 - DNA, 20 bp, Artificial Sequence
  Description of Artificial Sequence: Synthetic oligonucleotide
  Target: LAMA2; (+) strand; PAM type: NNNNGHTT; PAM sequence: ATGTGTTT
gtgatgatgagcattttttc

SEQ ID NO: 43088 - DNA, 20 bp, Artificial Sequence
  Description of Artificial Sequence: Synthetic oligonucleotide
  Target: LAMA2; (+) strand; PAM type: NNNNGHTT; PAM sequence: GGTTGTTT
cttcgcccactttttgatgg

SEQ ID NO: 43089 - DNA, 20 bp, Artificial Sequence
  Description of Artificial Sequence: Synthetic oligonucleotide
  Target: LAMA2; (+) strand; PAM type: NNNNGHTT; PAM sequence: GTTTGTTT
gcccactttttgatggggtt

SEQ ID NO: 43090 - DNA, 20 bp, Artificial Sequence
  Description of Artificial Sequence: Synthetic oligonucleotide
  Target: LAMA2; (+) strand; PAM type: NNNNGHTT; PAM sequence: ATTTGTTT
tgtttgtttttttcttgtaa

SEQ ID NO: 43091 - DNA, 20 bp, Artificial Sequence
  Description of Artificial Sequence: Synthetic oligonucleotide
  Target: LAMA2; (+) strand; PAM type: NNNNGHTT; PAM sequence: TGTAGATT
gtaaatttgtttgagttcat

SEQ ID NO: 43092 - DNA, 20 bp, Artificial Sequence
  Description of Artificial Sequence: Synthetic oligonucleotide
  Target: LAMA2; (+) strand; PAM type: NNNNGHTT; PAM sequence: GGTAGTTT
ggttgcctgttcactctgat

SEQ ID NO: 43093 - DNA, 20 bp, Artificial Sequence
  Description of Artificial Sequence: Synthetic oligonucleotide
  Target: LAMA2; (+) strand; PAM type: NNNNGHTT; PAM sequence: TTTAGTTT
cttttgctgcacagaagctc

SEQ ID NO: 43094 - DNA, 20 bp, Artificial Sequence
  Description of Artificial Sequence: Synthetic oligonucleotide
  Target: LAMA2; (+) strand; PAM type: NNNNGHTT; PAM sequence: TTTGGCTT
attagatcccatttgtccat

SEQ ID NO: 43095 - DNA, 20 bp, Artificial Sequence
  Description of Artificial Sequence: Synthetic oligonucleotide
  Target: LAMA2; (+) strand; PAM type: NNNNGHTT; PAM sequence: CATTGCTT
tccattttggcttttgttgc

SEQ ID NO: 43096 - DNA, 20 bp, Artificial Sequence
  Description of Artificial Sequence: Synthetic oligonucleotide
  Target: LAMA2; (+) strand; PAM type: NNNNGHTT; PAM sequence: TGGTGTTT
gcttttgttgccattgcttt

SEQ ID NO: 43097 - DNA, 20 bp, Artificial Sequence
  Description of Artificial Sequence: Synthetic oligonucleotide
  Target: LAMA2; (+) strand; PAM type: NNNNGHTT; PAM sequence: CTAGGTTT
tatgtcctgaatggtactgc

SEQ ID NO: 43098 - DNA, 20 bp, Artificial Sequence
  Description of Artificial Sequence: Synthetic oligonucleotide
  Target: LAMA2; (+) strand; PAM type: NNNNGHTT; PAM sequence: TAGGGTTT
gtactgcctaggttttcttc

SEQ ID NO: 43099 - DNA, 20 bp, Artificial Sequence
  Description of Artificial Sequence: Synthetic oligonucleotide
  Target: LAMA2; (+) strand; PAM type: NNNNGHTT; PAM sequence: TATGGTTT
aggttttcttctagggtttt

SEQ ID NO: 43100 - DNA, 20 bp, Artificial Sequence
  Description of Artificial Sequence: Synthetic oligonucleotide
  Target: LAMA2; (+) strand; PAM type: NNNNGHTT; PAM sequence: TAACGTTT
ggtttttatggttttaggtc

SEQ ID NO: 43101 - DNA, 20 bp, Artificial Sequence
  Description of Artificial Sequence: Synthetic oligonucleotide
  Target: LAMA2; (+) strand; PAM type: NNNNGHTT; PAM sequence: AATTGATT
taagtctttaatccatcttg

SEQ ID NO: 43102 - DNA, 20 bp, Artificial Sequence
  Description of Artificial Sequence: Synthetic oligonucleotide
  Target: LAMA2; (+) strand; PAM type: NNNNGHTT; PAM sequence: TCCAGTTT
tataaggtgtaaggaaggga

SEQ ID NO: 43103 - DNA, 20 bp, Artificial Sequence
  Description of Artificial Sequence: Synthetic oligonucleotide
  Target: LAMA2; (+) strand; PAM type: NNNNGHTT; PAM sequence: TTCAGCTT
gtgtaaggaagggatccagt

SEQ ID NO: 43104 - DNA, 20 bp, Artificial Sequence
  Description of Artificial Sequence: Synthetic oligonucleotide
  Target: LAMA2; (+) strand; PAM type: NNNNGHTT; PAM sequence: GCCAGTTT
cagctttctacatatggcta

SEQ ID NO: 43105 - DNA, 20 bp, Artificial Sequence
  Description of Artificial Sequence: Synthetic oligonucleotide
  Target: LAMA2; (+) strand; PAM type: NNNNGHTT; PAM sequence: CATTGCTT
taaatagggaatcctttccc

SEQ ID NO: 43106 - DNA, 20 bp, Artificial Sequence
  Description of Artificial Sequence: Synthetic oligonucleotide
  Target: LAMA2; (+) strand; PAM type: NNNNGHTT; PAM sequence: GCTTGTTT
tagggaatcctttccccatt

SEQ ID NO: 43107 - DNA, 20 bp, Artificial Sequence
  Description of Artificial Sequence: Synthetic oligonucleotide
  Target: LAMA2; (+) strand; PAM type: NNNNGHTT; PAM sequence: TCAGGTTT
ttccccattgcttgtttttc

SEQ ID NO: 43108 - DNA, 20 bp, Artificial Sequence
  Description of Artificial Sequence: Synthetic oligonucleotide
  Target: LAMA2; (+) strand; PAM type: NNNNGHTT; PAM sequence: CTCTGTTT
tctgttccattgatctatat

SEQ ID NO: 43109 - DNA, 20 bp, Artificial Sequence
  Description of Artificial Sequence: Synthetic oligonucleotide
  Target: LAMA2; (+) strand; PAM type: NNNNGHTT; PAM sequence: TGCTGTTT
ctgttttggtaccagtacca

SEQ ID NO: 43110 - DNA, 20 bp, Artificial Sequence
  Description of Artificial Sequence: Synthetic oligonucleotide
  Target: LAMA2; (+) strand; PAM type: NNNNGHTT; PAM sequence: TATAGTTT
tggttactgtagacttgtag

SEQ ID NO: 43111 - DNA, 20 bp, Artificial Sequence
  Description of Artificial Sequence: Synthetic oligonucleotide
  Target: LAMA2; (+) strand; PAM type: NNNNGHTT; PAM sequence: TCCAGCTT
aagtcaggtagtgtgatgcc

SEQ ID NO: 43112 - DNA, 20 bp, Artificial Sequence
  Description of Artificial Sequence: Synthetic oligonucleotide
  Target: LAMA2; (+) strand; PAM type: NNNNGHTT; PAM sequence: TTTGGCTT
gatgcctccagctttgttct

SEQ ID NO: 43113 - DNA, 20 bp, Artificial Sequence
  Description of Artificial Sequence: Synthetic oligonucleotide
  Target: LAMA2; (+) strand; PAM type: NNNNGHTT; PAM sequence: TTAGGATT
tccagctttgttcttttggc

SEQ ID NO: 43114 - DNA, 20 bp, Artificial Sequence
  Description of Artificial Sequence: Synthetic oligonucleotide
  Target: LAMA2; (+) strand; PAM type: NNNNGHTT; PAM sequence: AGTAGTTT
tggttccatatgaactttaa

SEQ ID NO: 43115 - DNA, 20 bp, Artificial Sequence
  Description of Artificial Sequence: Synthetic oligonucleotide
  Target: LAMA2; (+) strand; PAM type: NNNNGHTT; PAM sequence: GGTAGCTT
attctgtgaagaaaggcatt

SEQ ID NO: 43116 - DNA, 20 bp, Artificial Sequence
  Description of Artificial Sequence: Synthetic oligonucleotide
  Target: LAMA2; (+) strand; PAM type: NNNNGHTT; PAM sequence: TATTGATT
cagtatggccattttcacga

SEQ ID NO: 43117 - DNA, 20 bp, Artificial Sequence
  Description of Artificial Sequence: Synthetic oligonucleotide
  Target: LAMA2; (+) strand; PAM type: NNNNGHTT; PAM sequence: ATTTGTTT
tgagcatggaatgttcttcc

SEQ ID NO: 43118 - DNA, 20 bp, Artificial Sequence
  Description of Artificial Sequence: Synthetic oligonucleotide
  Target: LAMA2; (+) strand; PAM type: NNNNGHTT; PAM sequence: AGTGGTTT
cctcttttatttccttgagc

SEQ ID NO: 43119 - DNA, 20 bp, Artificial Sequence
  Description of Artificial Sequence: Synthetic oligonucleotide
  Target: LAMA2; (+) strand; PAM type: NNNNGHTT; PAM sequence: GTTGGATT
gtccttcacatcccttgtaa

SEQ ID NO: 43120 - DNA, 20 bp, Artificial Sequence
  Description of Artificial Sequence: Synthetic oligonucleotide
  Target: LAMA2; (+) strand; PAM type: NNNNGHTT; PAM sequence: TCATGATT
aattgtgaatgggagttcac

SEQ ID NO: 43121 - DNA, 20 bp, Artificial Sequence
  Description of Artificial Sequence: Synthetic oligonucleotide
  Target: LAMA2; (+) strand; PAM type: NNNNGHTT; PAM sequence: CTCTGTTT
ggagttcactcatgatttgg

SEQ ID NO: 43122 - DNA, 20 bp, Artificial Sequence
  Description of Artificial Sequence: Synthetic oligonucleotide
  Target: LAMA2; (+) strand; PAM type: NNNNGHTT; PAM sequence: GAATGCTT
tgtctgttgttggtgtataa

SEQ ID NO: 43123 - DNA, 20 bp, Artificial Sequence
  Description of Artificial Sequence: Synthetic oligonucleotide
  Target: LAMA2; (+) strand; PAM type: NNNNGHTT; PAM sequence: TTGTGATT
ttgttggtgtataagaatgc

SEQ ID NO: 43124 - DNA, 20 bp, Artificial Sequence
  Description of Artificial Sequence: Synthetic oligonucleotide
  Target: LAMA2; (+) strand; PAM type: NNNNGHTT; PAM sequence: CATTGATT
gaatgcttgtgatttttgca

SEQ ID NO: 43125 - DNA, 20 bp, Artificial Sequence
  Description of Artificial Sequence: Synthetic oligonucleotide
  Target: LAMA2; (+) strand; PAM type: NNNNGHTT; PAM sequence: AGTTGCTT
gtatcctgagactttgctga

SEQ ID NO: 43126 - DNA, 20 bp, Artificial Sequence
  Description of Artificial Sequence: Synthetic oligonucleotide
  Target: LAMA2; (+) strand; PAM type: NNNNGHTT; PAM sequence: ATCAGCTT
agactttgctgaagttgctt

SEQ ID NO: 43127 - DNA, 20 bp, Artificial Sequence
  Description of Artificial Sequence: Synthetic oligonucleotide
  Target: LAMA2; (+) strand; PAM type: NNNNGHTT; PAM sequence: AGGAGATT
tgaagttgcttatcagctta

SEQ ID NO: 43128 - DNA, 20 bp, Artificial Sequence
  Description of Artificial Sequence: Synthetic oligonucleotide
  Target: LAMA2; (+) strand; PAM type: NNNNGHTT; PAM sequence: TGGGGTTT
gagattttggactgagacaa

SEQ ID NO: 43129 - DNA, 20 bp, Artificial Sequence
  Description of Artificial Sequence: Synthetic oligonucleotide
  Target: LAMA2; (+) strand; PAM type: NNNNGHTT; PAM sequence: GCCAGTTT
agagggcatccctgtcttgt

SEQ ID NO: 43130 - DNA, 20 bp, Artificial Sequence
  Description of Artificial Sequence: Synthetic oligonucleotide
  Target: LAMA2; (+) strand; PAM type: NNNNGHTT; PAM sequence: GAATGCTT
cttgtgccagttttcaaagg

SEQ ID NO: 43131 - DNA, 20 bp, Artificial Sequence
  Description of Artificial Sequence: Synthetic oligonucleotide
  Target: LAMA2; (+) strand; PAM type: NNNNGHTT; PAM sequence: TCCAGTTT
cagttttcaaagggaatgct

SEQ ID NO: 43132 - DNA, 20 bp, Artificial Sequence
  Description of Artificial Sequence: Synthetic oligonucleotide
  Target: LAMA2; (+) strand; PAM type: NNNNGHTT; PAM sequence: GTGGGTTT
aattcagtatgatattcgct

SEQ ID NO: 43133 - DNA, 20 bp, Artificial Sequence
  Description of Artificial Sequence: Synthetic oligonucleotide
  Target: LAMA2; (+) strand; PAM type: NNNNGHTT; PAM sequence: GAGAGTTT
ccatcaatacctaatttatt

SEQ ID NO: 43134 - DNA, 20 bp, Artificial Sequence
  Description of Artificial Sequence: Synthetic oligonucleotide
  Target: LAMA2; (+) strand; PAM type: NNNNGHTT; PAM sequence: TGTGGTTT
tgcatctattgagataatca

SEQ ID NO: 43135 - DNA, 20 bp, Artificial Sequence
  Description of Artificial Sequence: Synthetic oligonucleotide
  Target: LAMA2; (+) strand; PAM type: NNNNGHTT; PAM sequence: CCCTGTTT
catgtggtttttgtctttgg

SEQ ID NO: 43136 - DNA, 20 bp, Artificial Sequence
  Description of Artificial Sequence: Synthetic oligonucleotide
  Target: LAMA2; (+) strand; PAM type: NNNNGHTT; PAM sequence: GCTGGATT
gtctttggccctgtttatat

SEQ ID NO: 43137 - DNA, 20 bp, Artificial Sequence
  Description of Artificial Sequence: Synthetic oligonucleotide
  Target: LAMA2; (+) strand; PAM type: NNNNGHTT; PAM sequence: TACTGATT
tttatatgctggattacatt

SEQ ID NO: 43138 - DNA, 20 bp, Artificial Sequence
  Description of Artificial Sequence: Synthetic oligonucleotide
  Target: LAMA2; (+) strand; PAM type: NNNNGHTT; PAM sequence: ATAAGCTT
agcccacttgatcatggtgg

SEQ ID NO: 43139 - DNA, 20 bp, Artificial Sequence
  Description of Artificial Sequence: Synthetic oligonucleotide
  Target: LAMA2; (+) strand; PAM type: NNNNGHTT; PAM sequence: GCTGGATT
gataagctttttgatgtgct

SEQ ID NO: 43140 - DNA, 20 bp, Artificial Sequence
  Description of Artificial Sequence: Synthetic oligonucleotide
  Target: LAMA2; (+) strand; PAM type: NNNNGHTT; PAM sequence: ATTTGTTT
gctttttgatgtgctgctgg

SEQ ID NO: 43141 - DNA, 20 bp, Artificial Sequence
  Description of Artificial Sequence: Synthetic oligonucleotide
  Target: LAMA2; (+) strand; PAM type: NNNNGHTT; PAM sequence: TGAGGATT
ttgttttgccagtattttat

SEQ ID NO: 43142 - DNA, 20 bp, Artificial Sequence
  Description of Artificial Sequence: Synthetic oligonucleotide
  Target: LAMA2; (+) strand; PAM type: NNNNGHTT; PAM sequence: CCTGGCTT
cttttttggttgtgtctctg

SEQ ID NO: 43143 - DNA, 20 bp, Artificial Sequence
  Description of Artificial Sequence: Synthetic oligonucleotide
  Target: LAMA2; (+) strand; PAM type: NNNNGHTT; PAM sequence: GGAGGATT
ggcctcataaaatgagttag

SEQ ID NO: 43144 - DNA, 20 bp, Artificial Sequence
  Description of Artificial Sequence: Synthetic oligonucleotide
  Target: LAMA2; (+) strand; PAM type: NNNNGHTT; PAM sequence: TATTGATT
gggaggattccctctttttc

SEQ ID NO: 43145 - DNA, 20 bp, Artificial Sequence
  Description of Artificial Sequence: Synthetic oligonucleotide
  Target: LAMA2; (+) strand; PAM type: NNNNGHTT; PAM sequence: AATAGTTT
cctctttttctattgattgg

SEQ ID NO: 43146 - DNA, 20 bp, Artificial Sequence
  Description of Artificial Sequence: Synthetic oligonucleotide
  Target: LAMA2; (+) strand; PAM type: NNNNGHTT; PAM sequence: TATTGATT
actctttttggttggtaagc

SEQ ID NO: 43147 - DNA, 20 bp, Artificial Sequence
  Description of Artificial Sequence: Synthetic oligonucleotide
  Target: LAMA2; (+) strand; PAM type: NNNNGHTT; PAM sequence: CAGAGATT
gatcctgttatttgtctatt

SEQ ID NO: 43148 - DNA, 20 bp, Artificial Sequence
  Description of Artificial Sequence: Synthetic oligonucleotide
  Target: LAMA2; (+) strand; PAM type: NNNNGHTT; PAM sequence: CCTGGTTT
attcagagattcaacttctt

SEQ ID NO: 43149 - DNA, 20 bp, Artificial Sequence
  Description of Artificial Sequence: Synthetic oligonucleotide
  Target: LAMA2; (+) strand; PAM type: NNNNGHTT; PAM sequence: TCTAGATT
cgaggaatttatccatttct

SEQ ID NO: 43150 - DNA, 20 bp, Artificial Sequence
  Description of Artificial Sequence: Synthetic oligonucleotide
  Target: LAMA2; (+) strand; PAM type: NNNNGHTT; PAM sequence: TCTAGTTT
tatccatttcttctagattt

SEQ ID NO: 43151 - DNA, 20 bp, Artificial Sequence
  Description of Artificial Sequence: Synthetic oligonucleotide
  Target: LAMA2; (+) strand; PAM type: NNNNGHTT; PAM sequence: AGGTGTTT
tttctagtttatttgcgtag

SEQ ID NO: 43152 - DNA, 20 bp, Artificial Sequence
  Description of Artificial Sequence: Synthetic oligonucleotide
  Target: LAMA2; (+) strand; PAM type: NNNNGHTT; PAM sequence: GGTAGTTT
tgtttatagtattctctgat

SEQ ID NO: 43153 - DNA, 20 bp, Artificial Sequence
  Description of Artificial Sequence: Synthetic oligonucleotide
  Target: LAMA2; (+) strand; PAM type: NNNNGHTT; PAM sequence: ATTTGATT
tatcattttttattgcgtct

SEQ ID NO: 43154 - DNA, 20 bp, Artificial Sequence
  Description of Artificial Sequence: Synthetic oligonucleotide
  Target: LAMA2; (+) strand; PAM type: NNNNGHTT; PAM sequence: CCTGGATT
atcctttcaaaaaaccagct

SEQ ID NO: 43155 - DNA, 20 bp, Artificial Sequence
  Description of Artificial Sequence: Synthetic oligonucleotide
  Target: LAMA2; (+) strand; PAM type: NNNNGHTT; PAM sequence: AAGGGTTT
ctggattcattaattttttg

SEQ ID NO: 43156 - DNA, 20 bp, Artificial Sequence
  Description of Artificial Sequence: Synthetic oligonucleotide
  Target: LAMA2; (+) strand; PAM type: NNNNGHTT; PAM sequence: CTCTGATT
ctctatttccttcagttctg

SEQ ID NO: 43157 - DNA, 20 bp, Artificial Sequence
  Description of Artificial Sequence: Synthetic oligonucleotide
  Target: LAMA2; (+) strand; PAM type: NNNNGHTT; PAM sequence: GCTAGCTT
ttagttatttcttgccttct

SEQ ID NO: 43158 - DNA, 20 bp, Artificial Sequence
  Description of Artificial Sequence: Synthetic oligonucleotide
  Target: LAMA2; (+) strand; PAM type: NNNNGHTT; PAM sequence: ATGTGTTT
tgccttctgctagcttttga

SEQ ID NO: 43159 - DNA, 20 bp, Artificial Sequence
  Description of Artificial Sequence: Synthetic oligonucleotide
  Target: LAMA2; (+) strand; PAM type: NNNNGHTT; PAM sequence: TCTTGCTT
tagcttttgaatgtgtttgc

SEQ ID NO: 43160 - DNA, 20 bp, Artificial Sequence
  Description of Artificial Sequence: Synthetic oligonucleotide
  Target: LAMA2; (+) strand; PAM type: NNNNGHTT; PAM sequence: CACTGCTT
gctataaatttccctctaca

SEQ ID NO: 43161 - DNA, 20 bp, Artificial Sequence
  Description of Artificial Sequence: Synthetic oligonucleotide
  Target: LAMA2; (+) strand; PAM type: NNNNGHTT; PAM sequence: CAGAGATT
acactgctttgaatgtgtcc

SEQ ID NO: 43162 - DNA, 20 bp, Artificial Sequence
  Description of Artificial Sequence: Synthetic oligonucleotide
  Target: LAMA2; (+) strand; PAM type: NNNNGHTT; PAM sequence: GTCGGTTT
tatgttgtgtctttgttctt

SEQ ID NO: 43163 - DNA, 20 bp, Artificial Sequence
  Description of Artificial Sequence: Synthetic oligonucleotide
  Target: LAMA2; (+) strand; PAM type: NNNNGHTT; PAM sequence: TTCAGTTT
agtcattcaggagcaggttg

SEQ ID NO: 43164 - DNA, 20 bp, Artificial Sequence
  Description of Artificial Sequence: Synthetic oligonucleotide
  Target: LAMA2; (+) strand; PAM type: NNNNGHTT; PAM sequence: AGCAGTTT
gttcagtttccatgtagttg

SEQ ID NO: 43165 - DNA, 20 bp, Artificial Sequence
  Description of Artificial Sequence: Synthetic oligonucleotide
  Target: LAMA2; (+) strand; PAM type: NNNNGHTT; PAM sequence: GTGAGATT
atgtagttgagcagttttga

SEQ ID NO: 43166 - DNA, 20 bp, Artificial Sequence
  Description of Artificial Sequence: Synthetic oligonucleotide
  Target: LAMA2; (+) strand; PAM type: NNNNGHTT; PAM sequence: TCTAGTTT
tgagattcttaatcctgagt

SEQ ID NO: 43167 - DNA, 20 bp, Artificial Sequence
  Description of Artificial Sequence: Synthetic oligonucleotide
  Target: LAMA2; (+) strand; PAM type: NNNNGHTT; PAM sequence: GTTTGATT
attcttaatcctgagttcta

SEQ ID NO: 43168 - DNA, 20 bp, Artificial Sequence
  Description of Artificial Sequence: Synthetic oligonucleotide
  Target: LAMA2; (+) strand; PAM type: NNNNGHTT; PAM sequence: GATAGTTT
gattgcactgtggtctgaga

SEQ ID NO: 43169 - DNA, 20 bp, Artificial Sequence
  Description of Artificial Sequence: Synthetic oligonucleotide
  Target: LAMA2; (+) strand; PAM type: NNNNGHTT; PAM sequence: GAGAGCTT
gttcttttacatttgctgag

SEQ ID NO: 43170 - DNA, 20 bp, Artificial Sequence
  Description of Artificial Sequence: Synthetic oligonucleotide
  Target: LAMA2; (+) strand; PAM type: NNNNGHTT; PAM sequence: TGTTGATT
gctgaaaaaaatgtatattc

SEQ ID NO: 43171 - DNA, 20 bp, Artificial Sequence
  Description of Artificial Sequence: Synthetic oligonucleotide
  Target: LAMA2; (+) strand; PAM type: NNNNGHTT; PAM sequence: GTCCGCTT
gttctgtagatgtctatcag

SEQ ID NO: 43172 - DNA, 20 bp, Artificial Sequence
  Description of Artificial Sequence: Synthetic oligonucleotide
  Target: LAMA2; (+) strand; PAM type: NNNNGHTT; PAM sequence: ACTTGCTT
ctctttgtaggtcactcagg

SEQ ID NO: 43173 - DNA, 20 bp, Artificial Sequence
  Description of Artificial Sequence: Synthetic oligonucleotide
  Target: LAMA2; (+) strand; PAM type: NNNNGHTT; PAM sequence: GTTGGTTT
ctttgtctcttttgatcttt

SEQ ID NO: 43174 - DNA, 20 bp, Artificial Sequence
  Description of Artificial Sequence: Synthetic oligonucleotide
  Target: LAMA2; (+) strand; PAM type: NNNNGHTT; PAM sequence: ATCTGTTT
ttgatctttgttggtttaaa

SEQ ID NO: 43175 - DNA, 20 bp, Artificial Sequence
  Description of Artificial Sequence: Synthetic oligonucleotide
  Target: LAMA2; (+) strand; PAM type: NNNNGHTT; PAM sequence: CTAGGATT
aaaatctgttttatcagaga

SEQ ID NO: 43176 - DNA, 20 bp, Artificial Sequence
  Description of Artificial Sequence: Synthetic oligonucleotide
  Target: LAMA2; (+) strand; PAM type: NNNNGHTT; PAM sequence: TTTTGTTT
ggattgcaacccctgccttt

SEQ ID NO: 43177 - DNA, 20 bp, Artificial Sequence
  Description of Artificial Sequence: Synthetic oligonucleotide
  Target: LAMA2; (+) strand; PAM type: NNNNGHTT; PAM sequence: ATTTGCTT
cctgcctttttttgttttcc

SEQ ID NO: 43178 - DNA, 20 bp, Artificial Sequence
  Description of Artificial Sequence: Synthetic oligonucleotide
  Target: LAMA2; (+) strand; PAM type: NNNNGHTT; PAM sequence: ATGGGTTT
tgtgtgtctctgcacgtgag

SEQ ID NO: 43179 - DNA, 20 bp, Artificial Sequence
  Description of Artificial Sequence: Synthetic oligonucleotide
  Target: LAMA2; (+) strand; PAM type: NNNNGHTT; PAM sequence: TGCAGTTT
ttattttgctcgttagttga

SEQ ID NO: 43180 - DNA, 20 bp, Artificial Sequence
  Description of Artificial Sequence: Synthetic oligonucleotide
  Target: LAMA2; (+) strand; PAM type: NNNNGHTT; PAM sequence: GCATGATT
tcgatggtctttacattttg

SEQ ID NO: 43181 - DNA, 20 bp, Artificial Sequence
  Description of Artificial Sequence: Synthetic oligonucleotide
  Target: LAMA2; (+) strand; PAM type: NNNNGHTT; PAM sequence: AGTGGCTT
acattttggcatgattttgc

SEQ ID NO: 43182 - DNA, 20 bp, Artificial Sequence
  Description of Artificial Sequence: Synthetic oligonucleotide
  Target: LAMA2; (+) strand; PAM type: NNNNGHTT; PAM sequence: CCATGTTT
cttgtactggttgttccttt

SEQ ID NO: 43183 - DNA, 20 bp, Artificial Sequence
  Description of Artificial Sequence: Synthetic oligonucleotide
  Target: LAMA2; (+) strand; PAM type: NNNNGHTT; PAM sequence: TAGTGCTT
tggttgttcctttccatgtt

SEQ ID NO: 43184 - DNA, 20 bp, Artificial Sequence
  Description of Artificial Sequence: Synthetic oligonucleotide
  Target: LAMA2; (+) strand; PAM type: NNNNGHTT; PAM sequence: ATTTGCTT
tggtgacaaaatctctcagc

SEQ ID NO: 43185 - DNA, 20 bp, Artificial Sequence
  Description of Artificial Sequence: Synthetic oligonucleotide
  Target: LAMA2; (+) strand; PAM type: NNNNGHTT; PAM sequence: CTTCGCTT
tgtaaagtattttatttctc

SEQ ID NO: 43186 - DNA, 20 bp, Artificial Sequence
  Description of Artificial Sequence: Synthetic oligonucleotide
  Target: LAMA2; (+) strand; PAM type: NNNNGHTT; PAM sequence: TGAAGCTT
ttttatttctccttcgctta

SEQ ID NO: 43187 - DNA, 20 bp, Artificial Sequence
  Description of Artificial Sequence: Synthetic oligonucleotide
  Target: LAMA2; (+) strand; PAM type: NNNNGHTT; PAM sequence: CTTAGTTT
tttctccttcgcttatgaag

SEQ ID NO: 43188 - DNA, 20 bp, Artificial Sequence
  Description of Artificial Sequence: Synthetic oligonucleotide
  Target: LAMA2; (+) strand; PAM type: NNNNGHTT; PAM sequence: TCTGGCTT
aatattggcccccactctct

SEQ ID NO: 43189 - DNA, 20 bp, Artificial Sequence
  Description of Artificial Sequence: Synthetic oligonucleotide
  Target: LAMA2; (+) strand; PAM type: NNNNGHTT; PAM sequence: TAGGGTTT
ccccactctcttctggcttg

SEQ ID NO: 43190 - DNA, 20 bp, Artificial Sequence
  Description of Artificial Sequence: Synthetic oligonucleotide
  Target: LAMA2; (+) strand; PAM type: NNNNGHTT; PAM sequence: ATGGGCTT
agagatctgctgttagtctg

SEQ ID NO: 43191 - DNA, 20 bp, Artificial Sequence
  Description of Artificial Sequence: Synthetic oligonucleotide
  Target: LAMA2; (+) strand; PAM type: NNNNGHTT; PAM sequence: CCGTGCTT
ggcttcccttccagggtaac

SEQ ID NO: 43192 - DNA, 20 bp, Artificial Sequence
  Description of Artificial Sequence: Synthetic oligonucleotide
  Target: LAMA2; (+) strand; PAM type: NNNNGHTT; PAM sequence: AGTTGCTT
ctgacaattatgtgtcttgg

SEQ ID NO: 43193 - DNA, 20 bp, Artificial Sequence
  Description of Artificial Sequence: Synthetic oligonucleotide
  Target: LAMA2; (+) strand; PAM type: NNNNGHTT; PAM sequence: GCTAGATT
tctgaacgttggcctgcctt

SEQ ID NO: 43194 - DNA, 20 bp, Artificial Sequence
  Description of Artificial Sequence: Synthetic oligonucleotide
  Target: LAMA2; (+) strand; PAM type: NNNNGHTT; PAM sequence: GAGTGTTT
ctcctggataatatcctgca

SEQ ID NO: 43195 - DNA, 20 bp, Artificial Sequence
  Description of Artificial Sequence: Synthetic oligonucleotide
  Target: LAMA2; (+) strand; PAM type: NNNNGHTT; PAM sequence: CTTGGTTT
tcctgcagagtgttttccaa

SEQ ID NO: 43196 - DNA, 20 bp, Artificial Sequence
  Description of Artificial Sequence: Synthetic oligonucleotide
  Target: LAMA2; (+) strand; PAM type: NNNNGHTT; PAM sequence: CGTGGATT
tttcaggtacaccaatcaga

SEQ ID NO: 43197 - DNA, 20 bp, Artificial Sequence
  Description of Artificial Sequence: Synthetic oligonucleotide
  Target: LAMA2; (+) strand; PAM type: NNNNGHTT; PAM sequence: GGAGGCTT
cacatagtcccatatttctt

SEQ ID NO: 43198 - DNA, 20 bp, Artificial Sequence
  Description of Artificial Sequence: Synthetic oligonucleotide
  Target: LAMA2; (+) strand; PAM type: NNNNGHTT; PAM sequence: TCTTGCTT
ttttttctctaaacttccct

SEQ ID NO: 43199 - DNA, 20 bp, Artificial Sequence
  Description of Artificial Sequence: Synthetic oligonucleotide
  Target: LAMA2; (+) strand; PAM type: NNNNGHTT; PAM sequence: TGAGGCTT
cagttgatcgcatcggctcc

SEQ ID NO: 43200 - DNA, 20 bp, Artificial Sequence
  Description of Artificial Sequence: Synthetic oligonucleotide
  Target: LAMA2; (+) strand; PAM type: NNNNGHTT; PAM sequence: CTTGGTTT
tcttcacgtagttctcgagc

SEQ ID NO: 43201 - DNA, 20 bp, Artificial Sequence
  Description of Artificial Sequence: Synthetic oligonucleotide
  Target: LAMA2; (+) strand; PAM type: NNNNGHTT; PAM sequence: CAAAGTTT
acattcttctaaattttttt

SEQ ID NO: 43202 - DNA, 20 bp, Artificial Sequence
  Description of Artificial Sequence: Synthetic oligonucleotide
  Target: LAMA2; (+) strand; PAM type: NNNNGHTT; PAM sequence: TTTGGTTT
aagttttcaacttctttgcc

SEQ ID NO: 43203 - DNA, 20 bp, Artificial Sequence
  Description of Artificial Sequence: Synthetic oligonucleotide
  Target: LAMA2; (+) strand; PAM type: NNNNGHTT; PAM sequence: TCTAGCTT
ctcgtcaaagtcgttctccg

SEQ ID NO: 43204 - DNA, 20 bp, Artificial Sequence
  Description of Artificial Sequence: Synthetic oligonucleotide
  Target: LAMA2; (+) strand; PAM type: NNNNGHTT; PAM sequence: CTCTGCTT
cctttggaggaggagaggcg

SEQ ID NO: 43205 - DNA, 20 bp, Artificial Sequence
  Description of Artificial Sequence: Synthetic oligonucleotide
  Target: LAMA2; (+) strand; PAM type: NNNNGHTT; PAM sequence: TAGAGTTT
aggagaggcgctctgctttt

SEQ ID NO: 43206 - DNA, 20 bp, Artificial Sequence
  Description of Artificial Sequence: Synthetic oligonucleotide
  Target: LAMA2; (+) strand; PAM type: NNNNGHTT; PAM sequence: TCCAGTTT
gcgctctgctttttagagtt

SEQ ID NO: 43207 - DNA, 20 bp, Artificial Sequence
  Description of Artificial Sequence: Synthetic oligonucleotide
  Target: LAMA2; (+) strand; PAM type: NNNNGHTT; PAM sequence: TTCTGTTT
tagagtttccagtttttctg

SEQ ID NO: 43208 - DNA, 20 bp, Artificial Sequence
  Description of Artificial Sequence: Synthetic oligonucleotide
  Target: LAMA2; (+) strand; PAM type: NNNNGHTT; PAM sequence: TGTGGTTT
ttctgttttttccccatctt

SEQ ID NO: 43209 - DNA, 20 bp, Artificial Sequence
  Description of Artificial Sequence: Synthetic oligonucleotide
  Target: LAMA2; (+) strand; PAM type: NNNNGHTT; PAM sequence: TTCTGTTT
gttcttggtgtggatgtcct

SEQ ID NO: 43210 - DNA, 20 bp, Artificial Sequence
  Description of Artificial Sequence: Synthetic oligonucleotide
  Target: LAMA2; (+) strand; PAM type: NNNNGHTT; PAM sequence: ATTAGTTT
tgtggatgtcctttctgttt

SEQ ID NO: 43211 - DNA, 20 bp, Artificial Sequence
  Description of Artificial Sequence: Synthetic oligonucleotide
  Target: LAMA2; (+) strand; PAM type: NNNNGHTT; PAM sequence: TTTTGTTT
tgcagaggttactgctgtct

SEQ ID NO: 43212 - DNA, 20 bp, Artificial Sequence
  Description of Artificial Sequence: Synthetic oligonucleotide
  Target: LAMA2; (+) strand; PAM type: NNNNGHTT; PAM sequence: TCGAGCTT
tgtggtgggctacacccagt

SEQ ID NO: 43213 - DNA, 20 bp, Artificial Sequence
  Description of Artificial Sequence: Synthetic oligonucleotide
  Target: LAMA2; (+) strand; PAM type: NNNNGHTT; PAM sequence: GGCTGCTT
acacccagttcgagcttccc

SEQ ID NO: 43214 - DNA, 20 bp, Artificial Sequence
  Description of Artificial Sequence: Synthetic oligonucleotide
  Target: LAMA2; (+) strand; PAM type: NNNNGHTT; PAM sequence: CTTTGTTT
cagttcgagcttcccggctg

SEQ ID NO: 43215 - DNA, 20 bp, Artificial Sequence
  Description of Artificial Sequence: Synthetic oligonucleotide
  Target: LAMA2; (+) strand; PAM type: NNNNGHTT; PAM sequence: TGCAGTTT
ccccagcctcgctgccgcct

SEQ ID NO: 43216 - DNA, 20 bp, Artificial Sequence
  Description of Artificial Sequence: Synthetic oligonucleotide
  Target: LAMA2; (+) strand; PAM type: NNNNGHTT; PAM sequence: CGCCGTTT
caggatataatctcgtggtt

SEQ ID NO: 43217 - DNA, 20 bp, Artificial Sequence
  Description of Artificial Sequence: Synthetic oligonucleotide
  Target: LAMA2; (+) strand; PAM type: NNNNGHTT; PAM sequence: ACCAGATT
gcagtattcgggtgggagtg

SEQ ID NO: 43218 - DNA, 20 bp, Artificial Sequence
  Description of Artificial Sequence: Synthetic oligonucleotide
  Target: LAMA2; (+) strand; PAM type: NNNNGHTT; PAM sequence: TTGCGCTT
aaagggaactccctgacccc

SEQ ID NO: 43219 - DNA, 20 bp, Artificial Sequence
  Description of Artificial Sequence: Synthetic oligonucleotide
  Target: LAMA2; (+) strand; PAM type: NNNNGHTT; PAM sequence: CCCTGCTT
ccgagtgaggcaatgcctca

SEQ ID NO: 43220 - DNA, 20 bp, Artificial Sequence
  Description of Artificial Sequence: Synthetic oligonucleotide
  Target: LAMA2; (+) strand; PAM type: NNNNGHTT; PAM sequence: TAAAGTTT
aaggtataatttctataaaa

SEQ ID NO: 43221 - DNA, 20 bp, Artificial Sequence
  Description of Artificial Sequence: Synthetic oligonucleotide
  Target: LAMA2; (+) strand; PAM type: NNNNGHTT; PAM sequence: CACTGTTT
ctcctttcccagaaggccct

SEQ ID NO: 43222 - DNA, 20 bp, Artificial Sequence
  Description of Artificial Sequence: Synthetic oligonucleotide
  Target: LAMA2; (+) strand; PAM type: NNNNGHTT; PAM sequence: ATCTGATT
tccacagccctgaaactctt

SEQ ID NO: 43223 - DNA, 20 bp, Artificial Sequence
  Description of Artificial Sequence: Synthetic oligonucleotide
  Target: LAMA2; (+) strand; PAM type: NNNNGHTT; PAM sequence: ATTAGTTT
agccctgaaactcttatctg

SEQ ID NO: 43224 - DNA, 20 bp, Artificial Sequence
  Description of Artificial Sequence: Synthetic oligonucleotide
  Target: LAMA2; (+) strand; PAM type: NNNNGHTT; PAM sequence: TCATGTTT
ctactgtctgtaaaaatcat

SEQ ID NO: 43225 - DNA, 20 bp, Artificial Sequence
  Description of Artificial Sequence: Synthetic oligonucleotide
  Target: LAMA2; (+) strand; PAM type: NNNNGHTT; PAM sequence: GACTGTTT
tggcctgttgatgacattaa

SEQ ID NO: 43226 - DNA, 20 bp, Artificial Sequence
  Description of Artificial Sequence: Synthetic oligonucleotide
  Target: LAMA2; (+) strand; PAM type: NNNNGHTT; PAM sequence: TCCAGTTT
ttgatgacattaagactgtt

SEQ ID NO: 43227 - DNA, 20 bp, Artificial Sequence
  Description of Artificial Sequence: Synthetic oligonucleotide
  Target: LAMA2; (+) strand; PAM type: NNNNGHTT; PAM sequence: ACAAGCTT
ttgctatatacaagtcatgt

SEQ ID NO: 43228 - DNA, 20 bp, Artificial Sequence
  Description of Artificial Sequence: Synthetic oligonucleotide
  Target: LAMA2; (+) strand; PAM type: NNNNGHTT; PAM sequence: ATATGTTT
gtacaagcttttttatggac

SEQ ID NO: 43229 - DNA, 20 bp, Artificial Sequence
  Description of Artificial Sequence: Synthetic oligonucleotide
  Target: LAMA2; (+) strand; PAM type: NNNNGHTT; PAM sequence: TCATGTTT
tggacatatgttttcatttg

SEQ ID NO: 43230 - DNA, 20 bp, Artificial Sequence
  Description of Artificial Sequence: Synthetic oligonucleotide
  Target: LAMA2; (+) strand; PAM type: NNNNGHTT; PAM sequence: GTTCGTTT
ctgggttgcatggaaaaaat

SEQ ID NO: 43231 - DNA, 20 bp, Artificial Sequence
  Description of Artificial Sequence: Synthetic oligonucleotide
  Target: LAMA2; (+) strand; PAM type: NNNNGHTT; PAM sequence: AATTGTTT
gtttaattttataatagaca

SEQ ID NO: 43232 - DNA, 20 bp, Artificial Sequence
  Description of Artificial Sequence: Synthetic oligonucleotide
  Target: LAMA2; (+) strand; PAM type: NNNNGHTT; PAM sequence: TAATGTTT
aaggcatgatcttagtctag

SEQ ID NO: 43233 - DNA, 20 bp, Artificial Sequence
  Description of Artificial Sequence: Synthetic oligonucleotide
  Target: LAMA2; (+) strand; PAM type: NNNNGHTT; PAM sequence: ATGTGTTT
ttatttacttctatcaacat

SEQ ID NO: 43234 - DNA, 20 bp, Artificial Sequence
  Description of Artificial Sequence: Synthetic oligonucleotide
  Target: LAMA2; (+) strand; PAM type: NNNNGHTT; PAM sequence: AAAGGTTT
taaaagttggctctataggg

SEQ ID NO: 43235 - DNA, 20 bp, Artificial Sequence
  Description of Artificial Sequence: Synthetic oligonucleotide
  Target: LAMA2; (+) strand; PAM type: NNNNGHTT; PAM sequence: TTGAGATT
tttttacatttctggcaaat

SEQ ID NO: 43236 - DNA, 20 bp, Artificial Sequence
  Description of Artificial Sequence: Synthetic oligonucleotide
  Target: LAMA2; (+) strand; PAM type: NNNNGHTT; PAM sequence: TTTTGTTT
tataaaacagagtaagtata

SEQ ID NO: 43237 - DNA, 20 bp, Artificial Sequence
  Description of Artificial Sequence: Synthetic oligonucleotide
  Target: LAMA2; (+) strand; PAM type: NNNNGHTT; PAM sequence: AGTTGTTT
cagggtattattcatttgtt

SEQ ID NO: 43238 - DNA, 20 bp, Artificial Sequence
  Description of Artificial Sequence: Synthetic oligonucleotide
  Target: LAMA2; (+) strand; PAM type: NNNNGHTT; PAM sequence: AGACGATT
tccaaatacaaagatgagca

SEQ ID NO: 43239 - DNA, 20 bp, Artificial Sequence
  Description of Artificial Sequence: Synthetic oligonucleotide
  Target: LAMA2; (+) strand; PAM type: NNNNGHTT; PAM sequence: ATTAGATT
aaagtaagtgtatgtatatc

SEQ ID NO: 43240 - DNA, 20 bp, Artificial Sequence
  Description of Artificial Sequence: Synthetic oligonucleotide
  Target: LAMA2; (+) strand; PAM type: NNNNGHTT; PAM sequence: AAGGGCTT
acagtcaggctgaatgtgga

SEQ ID NO: 43241 - DNA, 20 bp, Artificial Sequence
  Description of Artificial Sequence: Synthetic oligonucleotide
  Target: LAMA2; (+) strand; PAM type: NNNNGHTT; PAM sequence: AATTGTTT
ggctttaagaaagttattaa

SEQ ID NO: 43242 - DNA, 20 bp, Artificial Sequence
  Description of Artificial Sequence: Synthetic oligonucleotide
  Target: LAMA2; (+) strand; PAM type: NNNNGHTT; PAM sequence: GGCAGTTT
tttccatctaacaggaacag

SEQ ID NO: 43243 - DNA, 20 bp, Artificial Sequence
  Description of Artificial Sequence: Synthetic oligonucleotide
  Target: LAMA2; (+) strand; PAM type: NNNNGHTT; PAM sequence: CTGAGTTT
cagaggagttggaatttgga

SEQ ID NO: 43244 - DNA, 20 bp, Artificial Sequence
  Description of Artificial Sequence: Synthetic oligonucleotide
  Target: LAMA2; (+) strand; PAM type: NNNNGHTT; PAM sequence: GGCAGATT
ggagcatgggcgaccagaaa

SEQ ID NO: 43245 - DNA, 20 bp, Artificial Sequence
  Description of Artificial Sequence: Synthetic oligonucleotide
  Target: LAMA2; (+) strand; PAM type: NNNNGHTT; PAM sequence: ACAGGATT
ggttgacaaattgggagaac

SEQ ID NO: 43246 - DNA, 20 bp, Artificial Sequence
  Description of Artificial Sequence: Synthetic oligonucleotide
  Target: LAMA2; (+) strand; PAM type: NNNNGHTT; PAM sequence: TTAAGTTT
caggattaagggactggaat

SEQ ID NO: 43247 - DNA, 20 bp, Artificial Sequence
  Description of Artificial Sequence: Synthetic oligonucleotide
  Target: LAMA2; (+) strand; PAM type: NNNNGHTT; PAM sequence: TTTAGATT
ttaagggactggaatttaag

SEQ ID NO: 43248 - DNA, 20 bp, Artificial Sequence
  Description of Artificial Sequence: Synthetic oligonucleotide
  Target: LAMA2; (+) strand; PAM type: NNNNGHTT; PAM sequence: ATTTGCTT
ggactggaatttaagtttag

SEQ ID NO: 43249 - DNA, 20 bp, Artificial Sequence
  Description of Artificial Sequence: Synthetic oligonucleotide
  Target: LAMA2; (+) strand; PAM type: NNNNGHTT; PAM sequence: GAGAGATT
tttaaaaaccaatccactct

SEQ ID NO: 43250 - DNA, 20 bp, Artificial Sequence
  Description of Artificial Sequence: Synthetic oligonucleotide
  Target: LAMA2; (+) strand; PAM type: NNNNGHTT; PAM sequence: ATGTGATT
tatttttagtaatttttcaa

SEQ ID NO: 43251 - DNA, 20 bp, Artificial Sequence
  Description of Artificial Sequence: Synthetic oligonucleotide
  Target: LAMA2; (+) strand; PAM type: NNNNGHTT; PAM sequence: ATCAGTTT
cacatttctatgaaaaaaag

SEQ ID NO: 43252 - DNA, 20 bp, Artificial Sequence
  Description of Artificial Sequence: Synthetic oligonucleotide
  Target: LAMA2; (+) strand; PAM type: NNNNGHTT; PAM sequence: TCAGGCTT
agatcagtttcactaactcc

SEQ ID NO: 43253 - DNA, 20 bp, Artificial Sequence
  Description of Artificial Sequence: Synthetic oligonucleotide
  Target: LAMA2; (+) strand; PAM type: NNNNGHTT; PAM sequence: CTTTGCTT
tgtatgaacgtaagctataa

SEQ ID NO: 43254 - DNA, 20 bp, Artificial Sequence
  Description of Artificial Sequence: Synthetic oligonucleotide
  Target: LAMA2; (+) strand; PAM type: NNNNGHTT; PAM sequence: TGTTGTTT
aagctataactttgcttcat

SEQ ID NO: 43255 - DNA, 20 bp, Artificial Sequence
  Description of Artificial Sequence: Synthetic oligonucleotide
  Target: LAMA2; (+) strand; PAM type: NNNNGHTT; PAM sequence: ATTGGTTT
ttgtttagatgacattaata

SEQ ID NO: 43256 - DNA, 20 bp, Artificial Sequence
  Description of Artificial Sequence: Synthetic oligonucleotide
  Target: LAMA2; (+) strand; PAM type: NNNNGHTT; PAM sequence: ACAAGATT
ctgactatgggcattttaat

SEQ ID NO: 43257 - DNA, 20 bp, Artificial Sequence
  Description of Artificial Sequence: Synthetic oligonucleotide
  Target: LAMA2; (+) strand; PAM type: NNNNGHTT; PAM sequence: TGTAGCTT
ccattttaaaagtgtgtact

SEQ ID NO: 43258 - DNA, 20 bp, Artificial Sequence
  Description of Artificial Sequence: Synthetic oligonucleotide
  Target: LAMA2; (+) strand; PAM type: NNNNGHTT; PAM sequence: CTAAGCTT
cactagtcaagcaatcagag

SEQ ID NO: 43259 - DNA, 20 bp, Artificial Sequence
  Description of Artificial Sequence: Synthetic oligonucleotide
  Target: LAMA2; (+) strand; PAM type: NNNNGHTT; PAM sequence: AGCAGATT
aatcagagctaagctttcaa

SEQ ID NO: 43260 - DNA, 20 bp, Artificial Sequence
  Description of Artificial Sequence: Synthetic oligonucleotide
  Target: LAMA2; (+) strand; PAM type: NNNNGHTT; PAM sequence: GGAAGCTT
agctttcaaagcagattaga

SEQ ID NO: 43261 - DNA, 20 bp, Artificial Sequence
  Description of Artificial Sequence: Synthetic oligonucleotide
  Target: LAMA2; (+) strand; PAM type: NNNNGHTT; PAM sequence: ATGAGTTT
acatggagaatctaaattaa

SEQ ID NO: 43262 - DNA, 20 bp, Artificial Sequence
  Description of Artificial Sequence: Synthetic oligonucleotide
  Target: LAMA2; (+) strand; PAM type: NNNNGHTT; PAM sequence: TGAGGTTT
aaattaaatgagtttataat

SEQ ID NO: 43263 - DNA, 20 bp, Artificial Sequence
  Description of Artificial Sequence: Synthetic oligonucleotide
  Target: LAMA2; (+) strand; PAM type: NNNNGHTT; PAM sequence: AAAGGATT
ggcaaaaattagaaaaataa

SEQ ID NO: 43264 - DNA, 20 bp, Artificial Sequence
  Description of Artificial Sequence: Synthetic oligonucleotide
  Target: LAMA2; (+) strand; PAM type: NNNNGHTT; PAM sequence: AATAGCTT
aattgcatttctactttaaa

SEQ ID NO: 43265 - DNA, 20 bp, Artificial Sequence
  Description of Artificial Sequence: Synthetic oligonucleotide
  Target: LAMA2; (+) strand; PAM type: NNNNGHTT; PAM sequence: GAAGGTTT
aaaaatagctttctatggct

SEQ ID NO: 43266 - DNA, 20 bp, Artificial Sequence
  Description of Artificial Sequence: Synthetic oligonucleotide
  Target: LAMA2; (+) strand; PAM type: NNNNGHTT; PAM sequence: GTTTGCTT
atagctttctatggctgaag

SEQ ID NO: 43267 - DNA, 20 bp, Artificial Sequence
  Description of Artificial Sequence: Synthetic oligonucleotide
  Target: LAMA2; (+) strand; PAM type: NNNNGHTT; PAM sequence: AGTTGTTT
tatggctgaaggtttgcttc

SEQ ID NO: 43268 - DNA, 20 bp, Artificial Sequence
  Description of Artificial Sequence: Synthetic oligonucleotide
  Target: LAMA2; (+) strand; PAM type: NNNNGHTT; PAM sequence: AATGGTTT
acaatttgatacttcaaacc

SEQ ID NO: 43269 - DNA, 20 bp, Artificial Sequence
  Description of Artificial Sequence: Synthetic oligonucleotide
  Target: LAMA2; (+) strand; PAM type: NNNNGHTT; PAM sequence: GCATGTTT
ttgcactttagaaaatgtct

SEQ ID NO: 43270 - DNA, 20 bp, Artificial Sequence
  Description of Artificial Sequence: Synthetic oligonucleotide
  Target: LAMA2; (+) strand; PAM type: NNNNGHTT; PAM sequence: TATAGCTT
acttcaaacgaagatgttgc

SEQ ID NO: 43271 - DNA, 20 bp, Artificial Sequence
  Description of Artificial Sequence: Synthetic oligonucleotide
  Target: LAMA2; (+) strand; PAM type: NNNNGHTT; PAM sequence: ATAGGCTT
ctatagctttattttatttt

SEQ ID NO: 43272 - DNA, 20 bp, Artificial Sequence
  Description of Artificial Sequence: Synthetic oligonucleotide
  Target: LAMA2; (+) strand; PAM type: NNNNGHTT; PAM sequence: GACAGCTT
tatcacctatagataacaaa

SEQ ID NO: 43273 - DNA, 20 bp, Artificial Sequence
  Description of Artificial Sequence: Synthetic oligonucleotide
  Target: LAMA2; (+) strand; PAM type: NNNNGHTT; PAM sequence: ATATGCTT
ttcattattatcaaattgaa

SEQ ID NO: 43274 - DNA, 20 bp, Artificial Sequence
  Description of Artificial Sequence: Synthetic oligonucleotide
  Target: LAMA2; (+) strand; PAM type: NNNNGHTT; PAM sequence: TAATGTTT
ttgaaatatgctttattttg

SEQ ID NO: 43275 - DNA, 20 bp, Artificial Sequence
  Description of Artificial Sequence: Synthetic oligonucleotide
  Target: LAMA2; (+) strand; PAM type: NNNNGHTT; PAM sequence: AAATGCTT
caaaaatattacttcttcaa

SEQ ID NO: 43276 - DNA, 20 bp, Artificial Sequence
  Description of Artificial Sequence: Synthetic oligonucleotide
  Target: LAMA2; (+) strand; PAM type: NNNNGHTT; PAM sequence: TACTGATT
gctttatacttcatgtatat

SEQ ID NO: 43277 - DNA, 20 bp, Artificial Sequence
  Description of Artificial Sequence: Synthetic oligonucleotide
  Target: LAMA2; (+) strand; PAM type: NNNNGHTT; PAM sequence: AGCAGCTT
ttatgagtagctctaattgg

SEQ ID NO: 43278 - DNA, 20 bp, Artificial Sequence
  Description of Artificial Sequence: Synthetic oligonucleotide
  Target: LAMA2; (+) strand; PAM type: NNNNGHTT; PAM sequence: AAATGTTT
acatatatttgcctccgtca

SEQ ID NO: 43279 - DNA, 20 bp, Artificial Sequence
  Description of Artificial Sequence: Synthetic oligonucleotide
  Target: LAMA2; (+) strand; PAM type: NNNNGHTT; PAM sequence: ACCTGCTT
tttctctcttttagttgcta

SEQ ID NO: 43280 - DNA, 20 bp, Artificial Sequence
  Description of Artificial Sequence: Synthetic oligonucleotide
  Target: LAMA2; (+) strand; PAM type: NNNNGHTT; PAM sequence: TTTAGATT
ttttagttgctaacctgctt

SEQ ID NO: 43281 - DNA, 20 bp, Artificial Sequence
  Description of Artificial Sequence: Synthetic oligonucleotide
  Target: LAMA2; (+) strand; PAM type: NNNNGHTT; PAM sequence: AAGCGTTT
taaggaaggaattctatgca

SEQ ID NO: 43282 - DNA, 20 bp, Artificial Sequence
  Description of Artificial Sequence: Synthetic oligonucleotide
  Target: LAMA2; (+) strand; PAM type: NNNNGHTT; PAM sequence: TTCTGATT
aggaattctatgcaaagcgt

SEQ ID NO: 43283 - DNA, 20 bp, Artificial Sequence
  Description of Artificial Sequence: Synthetic oligonucleotide
  Target: LAMA2; (+) strand; PAM type: NNNNGHTT; PAM sequence: CACTGCTT
gataagtacagcccactgaa

SEQ ID NO: 43284 - DNA, 20 bp, Artificial Sequence
  Description of Artificial Sequence: Synthetic oligonucleotide
  Target: LAMA2; (+) strand; PAM type: NNNNGHTT; PAM sequence: AGCAGTTT
cccactgaacactgcttacc

SEQ ID NO: 43285 - DNA, 20 bp, Artificial Sequence
  Description of Artificial Sequence: Synthetic oligonucleotide
  Target: LAMA2; (+) strand; PAM type: NNNNGHTT; PAM sequence: GTGTGTTT
gctgtgtgagcactattgaa

SEQ ID NO: 43286 - DNA, 20 bp, Artificial Sequence
  Description of Artificial Sequence: Synthetic oligonucleotide
  Target: LAMA2; (+) strand; PAM type: NNNNGHTT; PAM sequence: TGACGTTT
aattgtatcacaatttggaa

SEQ ID NO: 43287 - DNA, 20 bp, Artificial Sequence
  Description of Artificial Sequence: Synthetic oligonucleotide
  Target: LAMA2; (+) strand; PAM type: NNNNGHTT; PAM sequence: ATAAGCTT
aacaaccgtgggggaataat

SEQ ID NO: 43288 - DNA, 20 bp, Artificial Sequence
  Description of Artificial Sequence: Synthetic oligonucleotide
  Target: LAMA2; (+) strand; PAM type: NNNNGHTT; PAM sequence: TGGTGATT
ataatataagcttaatcatt

SEQ ID NO: 43289 - DNA, 20 bp, Artificial Sequence
  Description of Artificial Sequence: Synthetic oligonucleotide
  Target: LAMA2; (+) strand; PAM type: NNNNGHTT; PAM sequence: TATAGTTT
tattttaaaaggaatttaaa

SEQ ID NO: 43290 - DNA, 20 bp, Artificial Sequence
  Description of Artificial Sequence: Synthetic oligonucleotide
  Target: LAMA2; (+) strand; PAM type: NNNNGHTT; PAM sequence: AGCAGTTT
atttcatggcaattttcaat

SEQ ID NO: 43291 - DNA, 20 bp, Artificial Sequence
  Description of Artificial Sequence: Synthetic oligonucleotide
  Target: LAMA2; (+) strand; PAM type: NNNNGHTT; PAM sequence: TCTTGATT
tttttttaaaacttcaatta

SEQ ID NO: 43292 - DNA, 20 bp, Artificial Sequence
  Description of Artificial Sequence: Synthetic oligonucleotide
  Target: LAMA2; (+) strand; PAM type: NNNNGHTT; PAM sequence: ACTAGTTT
agagaacaccaactgtaggt

SEQ ID NO: 43293 - DNA, 20 bp, Artificial Sequence
  Description of Artificial Sequence: Synthetic oligonucleotide
  Target: LAMA2; (+) strand; PAM type: NNNNGHTT; PAM sequence: CTGAGCTT
aacaactggcgttaaaatca

SEQ ID NO: 43294 - DNA, 20 bp, Artificial Sequence
  Description of Artificial Sequence: Synthetic oligonucleotide
  Target: LAMA2; (+) strand; PAM type: NNNNGHTT; PAM sequence: CACTGCTT
aattgggcatttcagttgaa

SEQ ID NO: 43295 - DNA, 20 bp, Artificial Sequence
  Description of Artificial Sequence: Synthetic oligonucleotide
  Target: LAMA2; (+) strand; PAM type: NNNNGHTT; PAM sequence: TAGTGATT
catttcaagtcttccttctg

SEQ ID NO: 43296 - DNA, 20 bp, Artificial Sequence
  Description of Artificial Sequence: Synthetic oligonucleotide
  Target: LAMA2; (+) strand; PAM type: NNNNGHTT; PAM sequence: GATTGCTT
tcaagtcttccttctgtagt

SEQ ID NO: 43297 - DNA, 20 bp, Artificial Sequence
  Description of Artificial Sequence: Synthetic oligonucleotide
  Target: LAMA2; (+) strand; PAM type: NNNNGHTT; PAM sequence: CAATGATT
gtgattgctttgtctttatt

SEQ ID NO: 43298 - DNA, 20 bp, Artificial Sequence
  Description of Artificial Sequence: Synthetic oligonucleotide
  Target: LAMA2; (+) strand; PAM type: NNNNGHTT; PAM sequence: GATTGCTT
ttgctttgtctttattcaat

SEQ ID NO: 43299 - DNA, 20 bp, Artificial Sequence
  Description of Artificial Sequence: Synthetic oligonucleotide
  Target: LAMA2; (+) strand; PAM type: NNNNGHTT; PAM sequence: TGGTGTTT
catggttctttcctatgcag

SEQ ID NO: 43300 - DNA, 20 bp, Artificial Sequence
  Description of Artificial Sequence: Synthetic oligonucleotide
  Target: LAMA2; (+) strand; PAM type: NNNNGHTT; PAM sequence: CACTGTTT
gccctccagctggatctttc

SEQ ID NO: 43301 - DNA, 20 bp, Artificial Sequence
  Description of Artificial Sequence: Synthetic oligonucleotide
  Target: LAMA2; (+) strand; PAM type: NNNNGHTT; PAM sequence: GTAAGATT
gataagttataaggcagatg

SEQ ID NO: 43302 - DNA, 20 bp, Artificial Sequence
  Description of Artificial Sequence: Synthetic oligonucleotide
  Target: LAMA2; (+) strand; PAM type: NNNNGHTT; PAM sequence: TGGAGTTT
taagattggatctgatggga

SEQ ID NO: 43303 - DNA, 20 bp, Artificial Sequence
  Description of Artificial Sequence: Synthetic oligonucleotide
  Target: LAMA2; (+) strand; PAM type: NNNNGHTT; PAM sequence: TTAGGTTT
gaagtggaaacttttaagca

SEQ ID NO: 43304 - DNA, 20 bp, Artificial Sequence
  Description of Artificial Sequence: Synthetic oligonucleotide
  Target: LAMA2; (+) strand; PAM type: NNNNGHTT; PAM sequence: ATTTGTTT
ccccctgacattatcctcac

SEQ ID NO: 43305 - DNA, 20 bp, Artificial Sequence
  Description of Artificial Sequence: Synthetic oligonucleotide
  Target: LAMA2; (+) strand; PAM type: NNNNGHTT; PAM sequence: ACCTGATT
caccatatctaccttgatcc

SEQ ID NO: 43306 - DNA, 20 bp, Artificial Sequence
  Description of Artificial Sequence: Synthetic oligonucleotide
  Target: LAMA2; (+) strand; PAM type: NNNNGHTT; PAM sequence: GCTGGCTT
ttttctttcattctctttgt

SEQ ID NO: 43307 - DNA, 20 bp, Artificial Sequence
  Description of Artificial Sequence: Synthetic oligonucleotide
  Target: LAMA2; (+) strand; PAM type: NNNNGHTT; PAM sequence: ATATGTTT
aaactaattacagaattaat

SEQ ID NO: 43308 - DNA, 20 bp, Artificial Sequence
  Description of Artificial Sequence: Synthetic oligonucleotide
  Target: LAMA2; (+) strand; PAM type: NNNNGHTT; PAM sequence: GAGAGCTT
aactatatataaacaaaaaa

SEQ ID NO: 43309 - DNA, 20 bp, Artificial Sequence
  Description of Artificial Sequence: Synthetic oligonucleotide
  Target: LAMA2; (+) strand; PAM type: NNNNGHTT; PAM sequence: TGAAGATT
gcaaaattggttgagtacct

SEQ ID NO: 43310 - DNA, 20 bp, Artificial Sequence
  Description of Artificial Sequence: Synthetic oligonucleotide
  Target: LAMA2; (+) strand; PAM type: NNNNGHTT; PAM sequence: CTTTGTTT
caacaaatgaattaaatttc

SEQ ID NO: 43311 - DNA, 20 bp, Artificial Sequence
  Description of Artificial Sequence: Synthetic oligonucleotide
  Target: LAMA2; (+) strand; PAM type: NNNNGHTT; PAM sequence: CTTTGTTT
tcaatggagaaagaggctcc

SEQ ID NO: 43312 - DNA, 20 bp, Artificial Sequence
  Description of Artificial Sequence: Synthetic oligonucleotide
  Target: LAMA2; (+) strand; PAM type: NNNNGHTT; PAM sequence: GTTTGCTT
tggagaaagaggctcccttt

SEQ ID NO: 43313 - DNA, 20 bp, Artificial Sequence
  Description of Artificial Sequence: Synthetic oligonucleotide
  Target: LAMA2; (+) strand; PAM type: NNNNGHTT; PAM sequence: AAGAGCTT
ccttaggtaaatgaaatgag

SEQ ID NO: 43314 - DNA, 20 bp, Artificial Sequence
  Description of Artificial Sequence: Synthetic oligonucleotide
  Target: LAMA2; (+) strand; PAM type: NNNNGHTT; PAM sequence: TTTAGTTT
ctagttcttccccatggaat

SEQ ID NO: 43315 - DNA, 20 bp, Artificial Sequence
  Description of Artificial Sequence: Synthetic oligonucleotide
  Target: LAMA2; (+) strand; PAM type: NNNNGHTT; PAM sequence: CATGGCTT
ctgaagtgcagtggcaggat

SEQ ID NO: 43316 - DNA, 20 bp, Artificial Sequence
  Description of Artificial Sequence: Synthetic oligonucleotide
  Target: LAMA2; (+) strand; PAM type: NNNNGHTT; PAM sequence: CTCAGTTT
gcttattgtgcccttgacat

SEQ ID NO: 43317 - DNA, 20 bp, Artificial Sequence
  Description of Artificial Sequence: Synthetic oligonucleotide
  Target: LAMA2; (+) strand; PAM type: NNNNGHTT; PAM sequence: CTAGGATT
cacctcggcctcccatagtg

SEQ ID NO: 43318 - DNA, 20 bp, Artificial Sequence
  Description of Artificial Sequence: Synthetic oligonucleotide
  Target: LAMA2; (+) strand; PAM type: NNNNGHTT; PAM sequence: CCTGGCTT
tataggcatgagccactgca

SEQ ID NO: 43319 - DNA, 20 bp, Artificial Sequence
  Description of Artificial Sequence: Synthetic oligonucleotide
  Target: LAMA2; (+) strand; PAM type: NNNNGHTT; PAM sequence: TCTTGTTT
gcttttatattcttaatatt

SEQ ID NO: 43320 - DNA, 20 bp, Artificial Sequence
  Description of Artificial Sequence: Synthetic oligonucleotide
  Target: LAMA2; (+) strand; PAM type: NNNNGHTT; PAM sequence: GAAAGATT
tgggttaatcaagagtgatg

SEQ ID NO: 43321 - DNA, 20 bp, Artificial Sequence
  Description of Artificial Sequence: Synthetic oligonucleotide
  Target: LAMA2; (+) strand; PAM type: NNNNGHTT; PAM sequence: CTCTGTTT
aagagtgatggaaagattag

SEQ ID NO: 43322 - DNA, 20 bp, Artificial Sequence
  Description of Artificial Sequence: Synthetic oligonucleotide
  Target: LAMA2; (+) strand; PAM type: NNNNGHTT; PAM sequence: GAAAGATT
ctgtttttctgtgtgtgagt

SEQ ID NO: 43323 - DNA, 20 bp, Artificial Sequence
  Description of Artificial Sequence: Synthetic oligonucleotide
  Target: LAMA2; (+) strand; PAM type: NNNNGHTT; PAM sequence: TGATGTTT
tattcttcttcccaaagtaa

SEQ ID NO: 43324 - DNA, 20 bp, Artificial Sequence
  Description of Artificial Sequence: Synthetic oligonucleotide
  Target: LAMA2; (+) strand; PAM type: NNNNGHTT; PAM sequence: AATGGATT
tagtaaagtaggacttctga

SEQ ID NO: 43325 - DNA, 20 bp, Artificial Sequence
  Description of Artificial Sequence: Synthetic oligonucleotide
  Target: LAMA2; (+) strand; PAM type: NNNNGHTT; PAM sequence: TTGTGTTT
tatttgcatgccattcatgg

SEQ ID NO: 43326 - DNA, 20 bp, Artificial Sequence
  Description of Artificial Sequence: Synthetic oligonucleotide
  Target: LAMA2; (+) strand; PAM type: NNNNGHTT; PAM sequence: TTCAGATT
aaatattggaagttaaaatt

SEQ ID NO: 43327 - DNA, 20 bp, Artificial Sequence
  Description of Artificial Sequence: Synthetic oligonucleotide
  Target: LAMA2; (+) strand; PAM type: NNNNGHTT; PAM sequence: ATTTGATT
ttttaaatttctagtataaa

SEQ ID NO: 43328 - DNA, 20 bp, Artificial Sequence
  Description of Artificial Sequence: Synthetic oligonucleotide
  Target: LAMA2; (+) strand; PAM type: NNNNGHTT; PAM sequence: CCCAGTTT
ttgatttgtgactctgagcc

SEQ ID NO: 43329 - DNA, 20 bp, Artificial Sequence
  Description of Artificial Sequence: Synthetic oligonucleotide
  Target: LAMA2; (+) strand; PAM type: NNNNGHTT; PAM sequence: GGGTGCTT
ttccttagggcaaacaatat

SEQ ID NO: 43330 - DNA, 20 bp, Artificial Sequence
  Description of Artificial Sequence: Synthetic oligonucleotide
  Target: LAMA2; (+) strand; PAM type: NNNNGHTT; PAM sequence: TCAGGATT
acataagtaatgtcacggtg

SEQ ID NO: 43331 - DNA, 20 bp, Artificial Sequence
  Description of Artificial Sequence: Synthetic oligonucleotide
  Target: LAMA2; (+) strand; PAM type: NNNNGHTT; PAM sequence: TCCTGATT
tgggaggtgtgcattttgga

SEQ ID NO: 43332 - DNA, 20 bp, Artificial Sequence
  Description of Artificial Sequence: Synthetic oligonucleotide
  Target: LAMA2; (+) strand; PAM type: NNNNGHTT; PAM sequence: TTGTGATT
gtatcaacgtaggtaatata

SEQ ID NO: 43333 - DNA, 20 bp, Artificial Sequence
  Description of Artificial Sequence: Synthetic oligonucleotide
  Target: LAMA2; (+) strand; PAM type: NNNNGHTT; PAM sequence: GATTGTTT
caacgtaggtaatatattgt

SEQ ID NO: 43334 - DNA, 20 bp, Artificial Sequence
  Description of Artificial Sequence: Synthetic oligonucleotide
  Target: LAMA2; (+) strand; PAM type: NNNNGHTT; PAM sequence: TGATGTTT
ctgacttcaaatctgactca

SEQ ID NO: 43335 - DNA, 20 bp, Artificial Sequence
  Description of Artificial Sequence: Synthetic oligonucleotide
  Target: LAMA2; (+) strand; PAM type: NNNNGHTT; PAM sequence: TACTGTTT
ctgtgttctgctgatctcca

SEQ ID NO: 43336 - DNA, 20 bp, Artificial Sequence
  Description of Artificial Sequence: Synthetic oligonucleotide
  Target: LAMA2; (+) strand; PAM type: NNNNGHTT; PAM sequence: GGAAGTTT
tgatgggcccaaaaaatgct

SEQ ID NO: 43337 - DNA, 20 bp, Artificial Sequence
  Description of Artificial Sequence: Synthetic oligonucleotide
  Target: LAMA2; (+) strand; PAM type: NNNNGHTT; PAM sequence: TTGGGATT
tgagaatcatgaggcactca

SEQ ID NO: 43338 - DNA, 20 bp, Artificial Sequence
  Description of Artificial Sequence: Synthetic oligonucleotide
  Target: LAMA2; (+) strand; PAM type: NNNNGHTT; PAM sequence: CTTGGATT
cactcattgggattgtggtt

SEQ ID NO: 43339 - DNA, 20 bp, Artificial Sequence
  Description of Artificial Sequence: Synthetic oligonucleotide
  Target: LAMA2; (+) strand; PAM type: NNNNGHTT; PAM sequence: GATTGTTT
cattgggattgtggttcttg

SEQ ID NO: 43340 - DNA, 20 bp, Artificial Sequence
  Description of Artificial Sequence: Synthetic oligonucleotide
  Target: LAMA2; (+) strand; PAM type: NNNNGHTT; PAM sequence: CTGTGTTT
aggtagcaattttaaatgtt

SEQ ID NO: 43341 - DNA, 20 bp, Artificial Sequence
  Description of Artificial Sequence: Synthetic oligonucleotide
  Target: LAMA2; (+) strand; PAM type: NNNNGHTT; PAM sequence: ACAGGCTT
attattacttcaatttcctt

SEQ ID NO: 43342 - DNA, 20 bp, Artificial Sequence
  Description of Artificial Sequence: Synthetic oligonucleotide
  Target: LAMA2; (+) strand; PAM type: NNNNGHTT; PAM sequence: CAGTGATT
ttacaggcttacagccaaca

SEQ ID NO: 43343 - DNA, 20 bp, Artificial Sequence
  Description of Artificial Sequence: Synthetic oligonucleotide
  Target: LAMA2; (+) strand; PAM type: NNNNGHTT; PAM sequence: TCTTGCTT
tgtggccttctaatggatat

SEQ ID NO: 43344 - DNA, 20 bp, Artificial Sequence
  Description of Artificial Sequence: Synthetic oligonucleotide
  Target: LAMA2; (+) strand; PAM type: NNNNGHTT; PAM sequence: ATTTGTTT
ttgcaatttagccctccccc

SEQ ID NO: 43345 - DNA, 20 bp, Artificial Sequence
  Description of Artificial Sequence: Synthetic oligonucleotide
  Target: LAMA2; (+) strand; PAM type: NNNNGHTT; PAM sequence: TTAAGCTT
tttgttgtacttcagctagg

SEQ ID NO: 43346 - DNA, 20 bp, Artificial Sequence
  Description of Artificial Sequence: Synthetic oligonucleotide
  Target: LAMA2; (+) strand; PAM type: NNNNGHTT; PAM sequence: ATCTGATT
ctctaaaatgctgtcatggc

SEQ ID NO: 43347 - DNA, 20 bp, Artificial Sequence
  Description of Artificial Sequence: Synthetic oligonucleotide
  Target: LAMA2; (+) strand; PAM type: NNNNGHTT; PAM sequence: ATGTGATT
ataaaatccaagctctgtta

SEQ ID NO: 43348 - DNA, 20 bp, Artificial Sequence
  Description of Artificial Sequence: Synthetic oligonucleotide
  Target: LAMA2; (+) strand; PAM type: NNNNGHTT; PAM sequence: CCTGGTTT
cccagttagtctctgacagc

SEQ ID NO: 43349 - DNA, 20 bp, Artificial Sequence
  Description of Artificial Sequence: Synthetic oligonucleotide
  Target: LAMA2; (+) strand; PAM type: NNNNGHTT; PAM sequence: ACTGGTTT
ccctttattctcagaagtgg

SEQ ID NO: 43350 - DNA, 20 bp, Artificial Sequence
  Description of Artificial Sequence: Synthetic oligonucleotide
  Target: LAMA2; (+) strand; PAM type: NNNNGHTT; PAM sequence: TTTGGATT
ctgtatccattctgaattcc

SEQ ID NO: 43351 - DNA, 20 bp, Artificial Sequence
  Description of Artificial Sequence: Synthetic oligonucleotide
  Target: LAMA2; (+) strand; PAM type: NNNNGHTT; PAM sequence: AAGCGATT
aacctccacctcccgggttc

SEQ ID NO: 43352 - DNA, 20 bp, Artificial Sequence
  Description of Artificial Sequence: Synthetic oligonucleotide
  Target: LAMA2; (+) strand; PAM type: NNNNGHTT; PAM sequence: ACAGGATT
tttttgtatttttagtagag

SEQ ID NO: 43353 - DNA, 20 bp, Artificial Sequence
  Description of Artificial Sequence: Synthetic oligonucleotide
  Target: LAMA2; (+) strand; PAM type: NNNNGHTT; PAM sequence: CTGGGATT
cgcctcaggctcccaaagtg

SEQ ID NO: 43354 - DNA, 20 bp, Artificial Sequence
  Description of Artificial Sequence: Synthetic oligonucleotide
  Target: LAMA2; (+) strand; PAM type: NNNNGHTT; PAM sequence: TATAGTTT
ggtccctcatgctccatttt

SEQ ID NO: 43355 - DNA, 20 bp, Artificial Sequence
  Description of Artificial Sequence: Synthetic oligonucleotide
  Target: LAMA2; (+) strand; PAM type: NNNNGHTT; PAM sequence: ACTAGTTT
aagcactttctgacctctag

SEQ ID NO: 43356 - DNA, 20 bp, Artificial Sequence
  Description of Artificial Sequence: Synthetic oligonucleotide
  Target: LAMA2; (+) strand; PAM type: NNNNGHTT; PAM sequence: CCATGTTT
caaacccttttcccaattaa

SEQ ID NO: 43357 - DNA, 20 bp, Artificial Sequence
  Description of Artificial Sequence: Synthetic oligonucleotide
  Target: LAMA2; (+) strand; PAM type: NNNNGHTT; PAM sequence: CCTAGTTT
ccaattaaccatgtttatat

SEQ ID NO: 43358 - DNA, 20 bp, Artificial Sequence
  Description of Artificial Sequence: Synthetic oligonucleotide
  Target: LAMA2; (+) strand; PAM type: NNNNGHTT; PAM sequence: ATGTGCTT
ccatgtttatatcctagttt

SEQ ID NO: 43359 - DNA, 20 bp, Artificial Sequence
  Description of Artificial Sequence: Synthetic oligonucleotide
  Target: LAMA2; (+) strand; PAM type: NNNNGHTT; PAM sequence: CATTGTTT
tgcttccttttagcatgtac

SEQ ID NO: 43360 - DNA, 20 bp, Artificial Sequence
  Description of Artificial Sequence: Synthetic oligonucleotide
  Target: LAMA2; (+) strand; PAM type: NNNNGHTT; PAM sequence: GGTTGCTT
tgagacaaaatacaacttta

SEQ ID NO: 43361 - DNA, 20 bp, Artificial Sequence
  Description of Artificial Sequence: Synthetic oligonucleotide
  Target: LAMA2; (+) strand; PAM type: NNNNGHTT; PAM sequence: GGCTGATT
agaaagagagaccagaaaag

SEQ ID NO: 43362 - DNA, 20 bp, Artificial Sequence
  Description of Artificial Sequence: Synthetic oligonucleotide
  Target: LAMA2; (+) strand; PAM type: NNNNGHTT; PAM sequence: AGAGGCTT
gaacacatagaaaacaagta

SEQ ID NO: 43363 - DNA, 20 bp, Artificial Sequence
  Description of Artificial Sequence: Synthetic oligonucleotide
  Target: LAMA2; (+) strand; PAM type: NNNNGHTT; PAM sequence: TATTGCTT
catcgatcctgtctttgcac

SEQ ID NO: 43364 - DNA, 20 bp, Artificial Sequence
  Description of Artificial Sequence: Synthetic oligonucleotide
  Target: LAMA2; (+) strand; PAM type: NNNNGHTT; PAM sequence: TTACGTTT
agtataagtatagataggaa

SEQ ID NO: 43365 - DNA, 20 bp, Artificial Sequence
  Description of Artificial Sequence: Synthetic oligonucleotide
  Target: LAMA2; (+) strand; PAM type: NNNNGHTT; PAM sequence: CTAAGATT
aaatttgagtaagtattgga

SEQ ID NO: 43366 - DNA, 20 bp, Artificial Sequence
  Description of Artificial Sequence: Synthetic oligonucleotide
  Target: LAMA2; (+) strand; PAM type: NNNNGHTT; PAM sequence: GGTTGTTT
aaatgatgactaaaagtaag

SEQ ID NO: 43367 - DNA, 20 bp, Artificial Sequence
  Description of Artificial Sequence: Synthetic oligonucleotide
  Target: LAMA2; (+) strand; PAM type: NNNNGHTT; PAM sequence: ATAAGATT
gggttgtttaaatccatttt

SEQ ID NO: 43368 - DNA, 20 bp, Artificial Sequence
  Description of Artificial Sequence: Synthetic oligonucleotide
  Target: LAMA2; (+) strand; PAM type: NNNNGHTT; PAM sequence: ACTGGTTT
ttaagttaaggtgatgtcat

SEQ ID NO: 43369 - DNA, 20 bp, Artificial Sequence
  Description of Artificial Sequence: Synthetic oligonucleotide
  Target: LAMA2; (+) strand; PAM type: NNNNGHTT; PAM sequence: TTTGGTTT
ggaaccaactaggctgacat

SEQ ID NO: 43370 - DNA, 20 bp, Artificial Sequence
  Description of Artificial Sequence: Synthetic oligonucleotide
  Target: LAMA2; (+) strand; PAM type: NNNNGHTT; PAM sequence: GTCTGTTT
tcctgaactgtgaaatgaat

SEQ ID NO: 43371 - DNA, 20 bp, Artificial Sequence
  Description of Artificial Sequence: Synthetic oligonucleotide
  Target: LAMA2; (+) strand; PAM type: NNNNGHTT; PAM sequence: TTAAGTTT
ttttttattattattatact

SEQ ID NO: 43372 - DNA, 20 bp, Artificial Sequence
  Description of Artificial Sequence: Synthetic oligonucleotide
  Target: LAMA2; (+) strand; PAM type: NNNNGHTT; PAM sequence: TGCCGATT
tagggtacatgtgcacaatg

SEQ ID NO: 43373 - DNA, 20 bp, Artificial Sequence
  Description of Artificial Sequence: Synthetic oligonucleotide
  Target: LAMA2; (+) strand; PAM type: NNNNGHTT; PAM sequence: TCATGCTT
gttacatatgtatacatgtg

SEQ ID NO: 43374 - DNA, 20 bp, Artificial Sequence
  Description of Artificial Sequence: Synthetic oligonucleotide
  Target: LAMA2; (+) strand; PAM type: NNNNGHTT; PAM sequence: CGGTGTTT
cacctatgagtgagaatatg

SEQ ID NO: 43375 - DNA, 20 bp, Artificial Sequence
  Description of Artificial Sequence: Synthetic oligonucleotide
  Target: LAMA2; (+) strand; PAM type: NNNNGHTT; PAM sequence: TTTGGTTT
atgagtgagaatatgcggtg

SEQ ID NO: 43376 - DNA, 20 bp, Artificial Sequence
  Description of Artificial Sequence: Synthetic oligonucleotide
  Target: LAMA2; (+) strand; PAM type: NNNNGHTT; PAM sequence: GATAGTTT
gtttggttttttgtccttgt

SEQ ID NO: 43377 - DNA, 20 bp, Artificial Sequence
  Description of Artificial Sequence: Synthetic oligonucleotide
  Target: LAMA2; (+) strand; PAM type: NNNNGHTT; PAM sequence: TGATGATT
ttgtgatagtttactgagaa

SEQ ID NO: 43378 - DNA, 20 bp, Artificial Sequence
  Description of Artificial Sequence: Synthetic oligonucleotide
  Target: LAMA2; (+) strand; PAM type: NNNNGHTT; PAM sequence: TCCAGTTT
gtttactgagaatgatgatt

SEQ ID NO: 43379 - DNA, 20 bp, Artificial Sequence
  Description of Artificial Sequence: Synthetic oligonucleotide
  Target: LAMA2; (+) strand; PAM type: NNNNGHTT; PAM sequence: GCATGATT
gtgtatgtgtctttatagca

SEQ ID NO: 43380 - DNA, 20 bp, Artificial Sequence
  Description of Artificial Sequence: Synthetic oligonucleotide
  Target: LAMA2; (+) strand; PAM type: NNNNGHTT; PAM sequence: ACTAGTTT
ctgacttccacaatggttga

SEQ ID NO: 43381 - DNA, 20 bp, Artificial Sequence
  Description of Artificial Sequence: Synthetic oligonucleotide
  Target: LAMA2; (+) strand; PAM type: NNNNGHTT; PAM sequence: TGTTGTTT
tccacatcctctccagcccc

SEQ ID NO: 43382 - DNA, 20 bp, Artificial Sequence
  Description of Artificial Sequence: Synthetic oligonucleotide
  Target: LAMA2; (+) strand; PAM type: NNNNGHTT; PAM sequence: TAATGATT
cctgttgtttcctgactttt

SEQ ID NO: 43383 - DNA, 20 bp, Artificial Sequence
  Description of Artificial Sequence: Synthetic oligonucleotide
  Target: LAMA2; (+) strand; PAM type: NNNNGHTT; PAM sequence: TGTGGTTT
ggtgtgagatggtatctcat

SEQ ID NO: 43384 - DNA, 20 bp, Artificial Sequence
  Description of Artificial Sequence: Synthetic oligonucleotide
  Target: LAMA2; (+) strand; PAM type: NNNNGHTT; PAM sequence: TTTTGATT
gagatggtatctcattgtgg

SEQ ID NO: 43385 - DNA, 20 bp, Artificial Sequence
  Description of Artificial Sequence: Synthetic oligonucleotide
  Target: LAMA2; (+) strand; PAM type: NNNNGHTT; PAM sequence: GGTTGTTT
cttcgcccacttgttgatgg

SEQ ID NO: 43386 - DNA, 20 bp, Artificial Sequence
  Description of Artificial Sequence: Synthetic oligonucleotide
  Target: LAMA2; (+) strand; PAM type: NNNNGHTT; PAM sequence: GTTTGTTT
gcccacttgttgatggggtt

SEQ ID NO: 43387 - DNA, 20 bp, Artificial Sequence
  Description of Artificial Sequence: Synthetic oligonucleotide
  Target: LAMA2; (+) strand; PAM type: NNNNGHTT; PAM sequence: ATTTGTTT
tgtttgtttttttcttgtaa

SEQ ID NO: 43388 - DNA, 20 bp, Artificial Sequence
  Description of Artificial Sequence: Synthetic oligonucleotide
  Target: LAMA2; (+) strand; PAM type: NNNNGHTT; PAM sequence: TGTAGATT
gtaaatttgtttgagttcat

SEQ ID NO: 43389 - DNA, 20 bp, Artificial Sequence
  Description of Artificial Sequence: Synthetic oligonucleotide
  Target: LAMA2; (+) strand; PAM type: NNNNGHTT; PAM sequence: GGTAGTTT
ggttgcctgttcactctgct

SEQ ID NO: 43390 - DNA, 20 bp, Artificial Sequence
  Description of Artificial Sequence: Synthetic oligonucleotide
  Target: LAMA2; (+) strand; PAM type: NNNNGHTT; PAM sequence: TTTAGTTT
cttttgctgtgcagaagctc

SEQ ID NO: 43391 - DNA, 20 bp, Artificial Sequence
  Description of Artificial Sequence: Synthetic oligonucleotide
  Target: LAMA2; (+) strand; PAM type: NNNNGHTT; PAM sequence: TTTGGCTT
attagatcccatttgtccat

SEQ ID NO: 43392 - DNA, 20 bp, Artificial Sequence
  Description of Artificial Sequence: Synthetic oligonucleotide
  Target: LAMA2; (+) strand; PAM type: NNNNGHTT; PAM sequence: CATTGCTT
tccattttggcttttgttgc

SEQ ID NO: 43393 - DNA, 20 bp, Artificial Sequence
  Description of Artificial Sequence: Synthetic oligonucleotide
  Target: LAMA2; (+) strand; PAM type: NNNNGHTT; PAM sequence: TGGTGTTT
gcttttgttgccattgcttt

SEQ ID NO: 43394 - DNA, 20 bp, Artificial Sequence
  Description of Artificial Sequence: Synthetic oligonucleotide
  Target: LAMA2; (+) strand; PAM type: NNNNGHTT; PAM sequence: CTAGGTTT
tatgtcctgaatggtaatgc

SEQ ID NO: 43395 - DNA, 20 bp, Artificial Sequence
  Description of Artificial Sequence: Synthetic oligonucleotide
  Target: LAMA2; (+) strand; PAM type: NNNNGHTT; PAM sequence: TAGTGTTT
gtaatgcctaggttttcttc

SEQ ID NO: 43396 - DNA, 20 bp, Artificial Sequence
  Description of Artificial Sequence: Synthetic oligonucleotide
  Target: LAMA2; (+) strand; PAM type: NNNNGHTT; PAM sequence: TATGGTTT
aggttttcttctagtgtttt

SEQ ID NO: 43397 - DNA, 20 bp, Artificial Sequence
  Description of Artificial Sequence: Synthetic oligonucleotide
  Target: LAMA2; (+) strand; PAM type: NNNNGHTT; PAM sequence: TAACGTTT
tgtttttatggttttaggtc

SEQ ID NO: 43398 - DNA, 20 bp, Artificial Sequence
  Description of Artificial Sequence: Synthetic oligonucleotide
  Target: LAMA2; (+) strand; PAM type: NNNNGHTT; PAM sequence: AATTGATT
taattctttaatccatcttg

SEQ ID NO: 43399 - DNA, 20 bp, Artificial Sequence
  Description of Artificial Sequence: Synthetic oligonucleotide
  Target: LAMA2; (+) strand; PAM type: NNNNGHTT; PAM sequence: TCCAGTTT
tataaggtgtaaggaaggga

SEQ ID NO: 43400 - DNA, 20 bp, Artificial Sequence
  Description of Artificial Sequence: Synthetic oligonucleotide
  Target: LAMA2; (+) strand; PAM type: NNNNGHTT; PAM sequence: TTCAGCTT
gtgtaaggaagggatccagt

SEQ ID NO: 43401 - DNA, 20 bp, Artificial Sequence
  Description of Artificial Sequence: Synthetic oligonucleotide
  Target: LAMA2; (+) strand; PAM type: NNNNGHTT; PAM sequence: GCCAGTTT
cagctttctacatatggcta

SEQ ID NO: 43402 - DNA, 20 bp, Artificial Sequence
  Description of Artificial Sequence: Synthetic oligonucleotide
  Target: LAMA2; (+) strand; PAM type: NNNNGHTT; PAM sequence: CATTGCTT
taaatagggaatcctttccg

SEQ ID NO: 43403 - DNA, 20 bp, Artificial Sequence
  Description of Artificial Sequence: Synthetic oligonucleotide
  Target: LAMA2; (+) strand; PAM type: NNNNGHTT; PAM sequence: GCTTGTTT
tagggaatcctttccgcatt

SEQ ID NO: 43404 - DNA, 20 bp, Artificial Sequence
  Description of Artificial Sequence: Synthetic oligonucleotide
  Target: LAMA2; (+) strand; PAM type: NNNNGHTT; PAM sequence: TCAGGTTT
ttccgcattgcttgtttttc

SEQ ID NO: 43405 - DNA, 20 bp, Artificial Sequence
  Description of Artificial Sequence: Synthetic oligonucleotide
  Target: LAMA2; (+) strand; PAM type: NNNNGHTT; PAM sequence: CTCTGTTT
tctgttccattgatctatat

SEQ ID NO: 43406 - DNA, 20 bp, Artificial Sequence
  Description of Artificial Sequence: Synthetic oligonucleotide
  Target: LAMA2; (+) strand; PAM type: NNNNGHTT; PAM sequence: TGCTGTTT
ctgttttggtaccagtacca

SEQ ID NO: 43407 - DNA, 20 bp, Artificial Sequence
  Description of Artificial Sequence: Synthetic oligonucleotide
  Target: LAMA2; (+) strand; PAM type: NNNNGHTT; PAM sequence: TATAGTTT
tggttactgtagccttgtag

SEQ ID NO: 43408 - DNA, 20 bp, Artificial Sequence
  Description of Artificial Sequence: Synthetic oligonucleotide
  Target: LAMA2; (+) strand; PAM type: NNNNGHTT; PAM sequence: TCCAGCTT
aagtcaggtagtgtgatgcc

SEQ ID NO: 43409 - DNA, 20 bp, Artificial Sequence
  Description of Artificial Sequence: Synthetic oligonucleotide
  Target: LAMA2; (+) strand; PAM type: NNNNGHTT; PAM sequence: TTTGGCTT
gatgcctccagctttgttct

SEQ ID NO: 43410 - DNA, 20 bp, Artificial Sequence
  Description of Artificial Sequence: Synthetic oligonucleotide
  Target: LAMA2; (+) strand; PAM type: NNNNGHTT; PAM sequence: TTAGGATT
tccagctttgttcttttggc

SEQ ID NO: 43411 - DNA, 20 bp, Artificial Sequence
  Description of Artificial Sequence: Synthetic oligonucleotide
  Target: LAMA2; (+) strand; PAM type: NNNNGHTT; PAM sequence: AGTAGTTT
tggttccatatgaactttaa

SEQ ID NO: 43412 - DNA, 20 bp, Artificial Sequence
  Description of Artificial Sequence: Synthetic oligonucleotide
  Target: LAMA2; (+) strand; PAM type: NNNNGHTT; PAM sequence: GGTAGCTT
actctgtgaagaaagtcatt

SEQ ID NO: 43413 - DNA, 20 bp, Artificial Sequence
  Description of Artificial Sequence: Synthetic oligonucleotide
  Target: LAMA2; (+) strand; PAM type: NNNNGHTT; PAM sequence: TATTGATT
cagtatggccattttcacga

SEQ ID NO: 43414 - DNA, 20 bp, Artificial Sequence
  Description of Artificial Sequence: Synthetic oligonucleotide
  Target: LAMA2; (+) strand; PAM type: NNNNGHTT; PAM sequence: ATTTGTTT
tgagcatggaatgttcttcc

SEQ ID NO: 43415 - DNA, 20 bp, Artificial Sequence
  Description of Artificial Sequence: Synthetic oligonucleotide
  Target: LAMA2; (+) strand; PAM type: NNNNGHTT; PAM sequence: AGTGGTTT
cctcttttatttccttgagc

SEQ ID NO: 43416 - DNA, 20 bp, Artificial Sequence
  Description of Artificial Sequence: Synthetic oligonucleotide
  Target: LAMA2; (+) strand; PAM type: NNNNGHTT; PAM sequence: GTTGGATT
gtccttcacatcccttgtaa

SEQ ID NO: 43417 - DNA, 20 bp, Artificial Sequence
  Description of Artificial Sequence: Synthetic oligonucleotide
  Target: LAMA2; (+) strand; PAM type: NNNNGHTT; PAM sequence: TGTTGTTT
cctaggtattttagaatgtc

SEQ ID NO: 43418 - DNA, 20 bp, Artificial Sequence
  Description of Artificial Sequence: Synthetic oligonucleotide
  Target: LAMA2; (+) strand; PAM type: NNNNGHTT; PAM sequence: CCTAGTTT
atgtctgttgttttaagcca

SEQ ID NO: 43419 - DNA, 20 bp, Artificial Sequence
  Description of Artificial Sequence: Synthetic oligonucleotide
  Target: LAMA2; (+) strand; PAM type: NNNNGHTT; PAM sequence: GTCTGATT
atcactaatctgctgtagta

SEQ ID NO: 43420 - DNA, 20 bp, Artificial Sequence
  Description of Artificial Sequence: Synthetic oligonucleotide
  Target: LAMA2; (+) strand; PAM type: NNNNGHTT; PAM sequence: AGAGGTTT
tcttaaaatcttagcattat

SEQ ID NO: 43421 - DNA, 20 bp, Artificial Sequence
  Description of Artificial Sequence: Synthetic oligonucleotide
  Target: LAMA2; (+) strand; PAM type: NNNNGHTT; PAM sequence: CTCCGCTT
gactcagggtcccagttgtc

SEQ ID NO: 43422 - DNA, 20 bp, Artificial Sequence
  Description of Artificial Sequence: Synthetic oligonucleotide
  Target: LAMA2; (+) strand; PAM type: NNNNGHTT; PAM sequence: TGATGTTT
tcccagttgtcctccgctta

SEQ ID NO: 43423 - DNA, 20 bp, Artificial Sequence
  Description of Artificial Sequence: Synthetic oligonucleotide
  Target: LAMA2; (+) strand; PAM type: NNNNGHTT; PAM sequence: CAGTGCTT
ggagctggcacctaggtctt

SEQ ID NO: 43424 - DNA, 20 bp, Artificial Sequence
  Description of Artificial Sequence: Synthetic oligonucleotide
  Target: LAMA2; (+) strand; PAM type: NNNNGHTT; PAM sequence: CTCTGCTT
tattttttgagagctactat

SEQ ID NO: 43425 - DNA, 20 bp, Artificial Sequence
  Description of Artificial Sequence: Synthetic oligonucleotide
  Target: LAMA2; (+) strand; PAM type: NNNNGHTT; PAM sequence: CAAAGATT
ttaaaatcatactatgctct

SEQ ID NO: 43426 - DNA, 20 bp, Artificial Sequence
  Description of Artificial Sequence: Synthetic oligonucleotide
  Target: LAMA2; (+) strand; PAM type: NNNNGHTT; PAM sequence: ACAAGCTT
ttatccctgctataattttt

SEQ ID NO: 43427 - DNA, 20 bp, Artificial Sequence
  Description of Artificial Sequence: Synthetic oligonucleotide
  Target: LAMA2; (+) strand; PAM type: NNNNGHTT; PAM sequence: GTAAGTTT
gaggaggagaaattttccag

SEQ ID NO: 43428 - DNA, 20 bp, Artificial Sequence
  Description of Artificial Sequence: Synthetic oligonucleotide
  Target: LAMA2; (+) strand; PAM type: NNNNGHTT; PAM sequence: TTTTGATT
gtaaaggaaacaacctgcca

SEQ ID NO: 43429 - DNA, 20 bp, Artificial Sequence
  Description of Artificial Sequence: Synthetic oligonucleotide
  Target: LAMA2; (+) strand; PAM type: NNNNGHTT; PAM sequence: GATTGTTT
aggaaacaacctgccatttt

SEQ ID NO: 43430 - DNA, 20 bp, Artificial Sequence
  Description of Artificial Sequence: Synthetic oligonucleotide
  Target: LAMA2; (+) strand; PAM type: NNNNGHTT; PAM sequence: TAAAGCTT
aaatcccctgtataataaac

SEQ ID NO: 43431 - DNA, 20 bp, Artificial Sequence
  Description of Artificial Sequence: Synthetic oligonucleotide
  Target: LAMA2; (+) strand; PAM type: NNNNGHTT; PAM sequence: GCTGGATT
gggtgccccccgtcttccct

SEQ ID NO: 43432 - DNA, 20 bp, Artificial Sequence
  Description of Artificial Sequence: Synthetic oligonucleotide
  Target: LAMA2; (+) strand; PAM type: NNNNGHTT; PAM sequence: ACATGCTT
acaagccttttacagaatat

SEQ ID NO: 43433 - DNA, 20 bp, Artificial Sequence
  Description of Artificial Sequence: Synthetic oligonucleotide
  Target: LAMA2; (+) strand; PAM type: NNNNGHTT; PAM sequence: TTAAGTTT
cttttacagaatatacatgc

SEQ ID NO: 43434 - DNA, 20 bp, Artificial Sequence
  Description of Artificial Sequence: Synthetic oligonucleotide
  Target: LAMA2; (+) strand; PAM type: NNNNGHTT; PAM sequence: AAGTGTTT
ccatattgttgagatatttt

SEQ ID NO: 43435 - DNA, 20 bp, Artificial Sequence
  Description of Artificial Sequence: Synthetic oligonucleotide
  Target: LAMA2; (+) strand; PAM type: NNNNGHTT; PAM sequence: GGAAGCTT
tcggttgtaaaaaattcaaa

SEQ ID NO: 43436 - DNA, 20 bp, Artificial Sequence
  Description of Artificial Sequence: Synthetic oligonucleotide
  Target: LAMA2; (+) strand; PAM type: NNNNGHTT; PAM sequence: TTATGATT
tcacaaaaagacaaatgctg

SEQ ID NO: 43437 - DNA, 20 bp, Artificial Sequence
  Description of Artificial Sequence: Synthetic oligonucleotide
  Target: LAMA2; (+) strand; PAM type: NNNNGHTT; PAM sequence: TGGTGATT
catagagacagaaagtataa

SEQ ID NO: 43438 - DNA, 20 bp, Artificial Sequence
  Description of Artificial Sequence: Synthetic oligonucleotide
  Target: LAMA2; (+) strand; PAM type: NNNNGHTT; PAM sequence: CCGAGTTT
gagttattatttaatgagta

SEQ ID NO: 43439 - DNA, 20 bp, Artificial Sequence
  Description of Artificial Sequence: Synthetic oligonucleotide
  Target: LAMA2; (+) strand; PAM type: NNNNGHTT; PAM sequence: TTCAGTTT
ttatttaatgagtaccgagt

SEQ ID NO: 43440 - DNA, 20 bp, Artificial Sequence
  Description of Artificial Sequence: Synthetic oligonucleotide
  Target: LAMA2; (+) strand; PAM type: NNNNGHTT; PAM sequence: CTGCGTTT
aatgtctttattctttagtt

SEQ ID NO: 43441 - DNA, 20 bp, Artificial Sequence
  Description of Artificial Sequence: Synthetic oligonucleotide
  Target: LAMA2; (+) strand; PAM type: NNNNGHTT; PAM sequence: TATGGTTT
caaattctcacatagcaata

SEQ ID NO: 43442 - DNA, 20 bp, Artificial Sequence
  Description of Artificial Sequence: Synthetic oligonucleotide
  Target: LAMA2; (+) strand; PAM type: NNNNGHTT; PAM sequence: CTTTGATT
atagcaatatatggtttatt

SEQ ID NO: 43443 - DNA, 20 bp, Artificial Sequence
  Description of Artificial Sequence: Synthetic oligonucleotide
  Target: LAMA2; (+) strand; PAM type: NNNNGHTT; PAM sequence: GAATGTTT
ttctcatgaaatattcatga

SEQ ID NO: 43444 - DNA, 20 bp, Artificial Sequence
  Description of Artificial Sequence: Synthetic oligonucleotide
  Target: LAMA2; (+) strand; PAM type: NNNNGHTT; PAM sequence: CTAGGATT
atgagaatgtttcaccagat

SEQ ID NO: 43445 - DNA, 20 bp, Artificial Sequence
  Description of Artificial Sequence: Synthetic oligonucleotide
  Target: LAMA2; (+) strand; PAM type: NNNNGHTT; PAM sequence: GTTGGCTT
cctacatggggaggtagagt

SEQ ID NO: 43446 - DNA, 20 bp, Artificial Sequence
  Description of Artificial Sequence: Synthetic oligonucleotide
  Target: LAMA2; (+) strand; PAM type: NNNNGHTT; PAM sequence: CTGAGTTT
aattgcatctttccacaact

SEQ ID NO: 43447 - DNA, 20 bp, Artificial Sequence
  Description of Artificial Sequence: Synthetic oligonucleotide
  Target: LAMA2; (+) strand; PAM type: NNNNGHTT; PAM sequence: CTGAGTTT
tttccacaactctgagtttt

SEQ ID NO: 43448 - DNA, 20 bp, Artificial Sequence
  Description of Artificial Sequence: Synthetic oligonucleotide
  Target: LAMA2; (+) strand; PAM type: NNNNGHTT; PAM sequence: TCTCGTTT
agagtatgaataccaactcc

SEQ ID NO: 43449 - DNA, 20 bp, Artificial Sequence
  Description of Artificial Sequence: Synthetic oligonucleotide
  Target: LAMA2; (+) strand; PAM type: NNNNGHTT; PAM sequence: TACCGCTT
ttctttagatatggtcattt

SEQ ID NO: 43450 - DNA, 20 bp, Artificial Sequence
  Description of Artificial Sequence: Synthetic oligonucleotide
  Target: LAMA2; (+) strand; PAM type: NNNNGHTT; PAM sequence: ATCTGATT
tgtataattctttaataaca

SEQ ID NO: 43451 - DNA, 20 bp, Artificial Sequence
  Description of Artificial Sequence: Synthetic oligonucleotide
  Target: LAMA2; (+) strand; PAM type: NNNNGHTT; PAM sequence: TAATGCTT
aaaggaaatttttaaaactc

SEQ ID NO: 43452 - DNA, 20 bp, Artificial Sequence
  Description of Artificial Sequence: Synthetic oligonucleotide
  Target: LAMA2; (+) strand; PAM type: NNNNGHTT; PAM sequence: AGATGTTT
gttaaagctcagagttgaaa

SEQ ID NO: 43453 - DNA, 20 bp, Artificial Sequence
  Description of Artificial Sequence: Synthetic oligonucleotide
  Target: LAMA2; (+) strand; PAM type: NNNNGHTT; PAM sequence: TCCAGTTT
gaatcttattaaggttgaca

SEQ ID NO: 43454 - DNA, 20 bp, Artificial Sequence
  Description of Artificial Sequence: Synthetic oligonucleotide
  Target: LAMA2; (+) strand; PAM type: NNNNGHTT; PAM sequence: TATAGTTT
aatacattcatcctctaagg

SEQ ID NO: 43455 - DNA, 20 bp, Artificial Sequence
  Description of Artificial Sequence: Synthetic oligonucleotide
  Target: LAMA2; (+) strand; PAM type: NNNNGHTT; PAM sequence: GGTGGATT
gctgcagaacatagagatct

SEQ ID NO: 43456 - DNA, 20 bp, Artificial Sequence
  Description of Artificial Sequence: Synthetic oligonucleotide
  Target: LAMA2; (+) strand; PAM type: NNNNGHTT; PAM sequence: ACTGGTTT
ttttatattcttttttaaat

SEQ ID NO: 43457 - DNA, 20 bp, Artificial Sequence
  Description of Artificial Sequence: Synthetic oligonucleotide
  Target: LAMA2; (+) strand; PAM type: NNNNGHTT; PAM sequence: CACAGATT
ttttcagtctcatctaggca

SEQ ID NO: 43458 - DNA, 20 bp, Artificial Sequence
  Description of Artificial Sequence: Synthetic oligonucleotide
  Target: LAMA2; (+) strand; PAM type: NNNNGHTT; PAM sequence: CGTGGCTT
ttccagaacgtacaacttaa

SEQ ID NO: 43459 - DNA, 20 bp, Artificial Sequence
  Description of Artificial Sequence: Synthetic oligonucleotide
  Target: LAMA2; (+) strand; PAM type: NNNNGHTT; PAM sequence: TCCTGTTT
cctccatcaagttattttcc

SEQ ID NO: 43460 - DNA, 20 bp, Artificial Sequence
  Description of Artificial Sequence: Synthetic oligonucleotide
  Target: LAMA2; (+) strand; PAM type: NNNNGHTT; PAM sequence: ATTAGATT
cagtcttccaggtgtaaacc

SEQ ID NO: 43461 - DNA, 20 bp, Artificial Sequence
  Description of Artificial Sequence: Synthetic oligonucleotide
  Target: LAMA2; (+) strand; PAM type: NNNNGHTT; PAM sequence: TCTTGATT
tactatatcagtgagcaagg

SEQ ID NO: 43462 - DNA, 20 bp, Artificial Sequence
  Description of Artificial Sequence: Synthetic oligonucleotide
  Target: LAMA2; (+) strand; PAM type: NNNNGHTT; PAM sequence: TTTCGTTT
tgagcaaggtcttgattcta

SEQ ID NO: 43463 - DNA, 20 bp, Artificial Sequence
  Description of Artificial Sequence: Synthetic oligonucleotide
  Target: LAMA2; (+) strand; PAM type: NNNNGHTT; PAM sequence: TCCAGTTT
aatagaaaataaacacttat

SEQ ID NO: 43464 - DNA, 20 bp, Artificial Sequence
  Description of Artificial Sequence: Synthetic oligonucleotide
  Target: LAMA2; (+) strand; PAM type: NNNNGHTT; PAM sequence: TGTGGCTT
ctttgactaagacaatgaaa

SEQ ID NO: 43465 - DNA, 20 bp, Artificial Sequence
  Description of Artificial Sequence: Synthetic oligonucleotide
  Target: LAMA2; (+) strand; PAM type: NNNNGHTT; PAM sequence: ATTTGCTT
taaaaaaagtaatcagcacc

SEQ ID NO: 43466 - DNA, 20 bp, Artificial Sequence
  Description of Artificial Sequence: Synthetic oligonucleotide
  Target: LAMA2; (+) strand; PAM type: NNNNGHTT; PAM sequence: TAAAGTTT
ggtctttcagaatttgttct

SEQ ID NO: 43467 - DNA, 20 bp, Artificial Sequence
  Description of Artificial Sequence: Synthetic oligonucleotide
  Target: LAMA2; (+) strand; PAM type: NNNNGHTT; PAM sequence: ACATGCTT
tctacggtagctcaagagag

SEQ ID NO: 43468 - DNA, 20 bp, Artificial Sequence
  Description of Artificial Sequence: Synthetic oligonucleotide
  Target: LAMA2; (+) strand; PAM type: NNNNGHTT; PAM sequence: CTGTGATT
tgctattggtccttaatgtc

SEQ ID NO: 43469 - DNA, 20 bp, Artificial Sequence
  Description of Artificial Sequence: Synthetic oligonucleotide
  Target: LAMA2; (+) strand; PAM type: NNNNGHTT; PAM sequence: AATAGTTT
aatgtcctgtgattttagga

SEQ ID NO: 43470 - DNA, 20 bp, Artificial Sequence
  Description of Artificial Sequence: Synthetic oligonucleotide
  Target: LAMA2; (+) strand; PAM type: NNNNGHTT; PAM sequence: TTTGGATT
cctgtgattttaggaaatag

SEQ ID NO: 43471 - DNA, 20 bp, Artificial Sequence
  Description of Artificial Sequence: Synthetic oligonucleotide
  Target: LAMA2; (+) strand; PAM type: NNNNGHTT; PAM sequence: TTTAGTTT
attttaggaaatagtttgga

SEQ ID NO: 43472 - DNA, 20 bp, Artificial Sequence
  Description of Artificial Sequence: Synthetic oligonucleotide
  Target: LAMA2; (+) strand; PAM type: NNNNGHTT; PAM sequence: ACATGTTT
ttaatttattcagaaatcaa

SEQ ID NO: 43473 - DNA, 20 bp, Artificial Sequence
  Description of Artificial Sequence: Synthetic oligonucleotide
  Target: LAMA2; (+) strand; PAM type: NNNNGHTT; PAM sequence: GCTGGTTT
ctctggcagagtaagggtat

SEQ ID NO: 43474 - DNA, 20 bp, Artificial Sequence
  Description of Artificial Sequence: Synthetic oligonucleotide
  Target: LAMA2; (+) strand; PAM type: NNNNGHTT; PAM sequence: AAATGTTT
aaccaatatctatttcaaca

SEQ ID NO: 43475 - DNA, 20 bp, Artificial Sequence
  Description of Artificial Sequence: Synthetic oligonucleotide
  Target: LAMA2; (+) strand; PAM type: NNNNGHTT; PAM sequence: TGTTGCTT
acaaagacgactcagctcta

SEQ ID NO: 43476 - DNA, 20 bp, Artificial Sequence
  Description of Artificial Sequence: Synthetic oligonucleotide
  Target: LAMA2; (+) strand; PAM type: NNNNGHTT; PAM sequence: GCTGGCTT
caaccttagtcagagctcct

SEQ ID NO: 43477 - DNA, 20 bp, Artificial Sequence
  Description of Artificial Sequence: Synthetic oligonucleotide
  Target: LAMA2; (+) strand; PAM type: NNNNGHTT; PAM sequence: TAGTGTTT
aagtggactttgtgagagaa

SEQ ID NO: 43478 - DNA, 20 bp, Artificial Sequence
  Description of Artificial Sequence: Synthetic oligonucleotide
  Target: LAMA2; (+) strand; PAM type: NNNNGHTT; PAM sequence: CAGCGTTT
atccacactgtggaccgcag

SEQ ID NO: 43479 - DNA, 20 bp, Artificial Sequence
  Description of Artificial Sequence: Synthetic oligonucleotide
  Target: LAMA2; (+) strand; PAM type: NNNNGHTT; PAM sequence: TAGGGATT
acagatccaaaaactctgga

SEQ ID NO: 43480 - DNA, 20 bp, Artificial Sequence
  Description of Artificial Sequence: Synthetic oligonucleotide
  Target: LAMA2; (+) strand; PAM type: NNNNGHTT; PAM sequence: CTGAGCTT
gagctcccacccagcgcctt

SEQ ID NO: 43481 - DNA, 20 bp, Artificial Sequence
  Description of Artificial Sequence: Synthetic oligonucleotide
  Target: LAMA2; (+) strand; PAM type: NNNNGHTT; PAM sequence: CTCTGATT
agcgccttctgagcttcttc

SEQ ID NO: 43482 - DNA, 20 bp, Artificial Sequence
  Description of Artificial Sequence: Synthetic oligonucleotide
  Target: LAMA2; (+) strand; PAM type: NNNNGHTT; PAM sequence: AGTAGCTT
atagcacacctccatctttg

SEQ ID NO: 43483 - DNA, 20 bp, Artificial Sequence
  Description of Artificial Sequence: Synthetic oligonucleotide
  Target: LAMA2; (+) strand; PAM type: NNNNGHTT; PAM sequence: GATCGATT
tctttatggtatgccgacca

SEQ ID NO: 43484 - DNA, 20 bp, Artificial Sequence
  Description of Artificial Sequence: Synthetic oligonucleotide
  Target: LAMA2; (+) strand; PAM type: NNNNGHTT; PAM sequence: TTCTGCTT
tggtatgccgaccagatcga

SEQ ID NO: 43485 - DNA, 20 bp, Artificial Sequence
  Description of Artificial Sequence: Synthetic oligonucleotide
  Target: LAMA2; (+) strand; PAM type: NNNNGHTT; PAM sequence: AAGCGCTT
tggagccccagatgccgcaa

SEQ ID NO: 43486 - DNA, 20 bp, Artificial Sequence
  Description of Artificial Sequence: Synthetic oligonucleotide
  Target: LAMA2; (+) strand; PAM type: NNNNGHTT; PAM sequence: CTCGGTTT
atatggaatagtgatgcggt

SEQ ID NO: 43487 - DNA, 20 bp, Artificial Sequence
  Description of Artificial Sequence: Synthetic oligonucleotide
  Target: LAMA2; (+) strand; PAM type: NNNNGHTT; PAM sequence: CTGCGTTT
ctctgacgtgcacggcggca

SEQ ID NO: 43488 - DNA, 20 bp, Artificial Sequence
  Description of Artificial Sequence: Synthetic oligonucleotide
  Target: LAMA2; (+) strand; PAM type: NNNNGHTT; PAM sequence: TACTGCTT
ttcctatttcttttcattcc

SEQ ID NO: 43489 - DNA, 20 bp, Artificial Sequence
  Description of Artificial Sequence: Synthetic oligonucleotide
  Target: LAMA2; (+) strand; PAM type: NNNNGHTT; PAM sequence: GTAGGATT
attctccttttgggcatata

SEQ ID NO: 43490 - DNA, 20 bp, Artificial Sequence
  Description of Artificial Sequence: Synthetic oligonucleotide
  Target: LAMA2; (+) strand; PAM type: NNNNGHTT; PAM sequence: ACATGCTT
atgaaatgtgaacagaactg

SEQ ID NO: 43491 - DNA, 20 bp, Artificial Sequence
  Description of Artificial Sequence: Synthetic oligonucleotide
  Target: LAMA2; (+) strand; PAM type: NNNNGHTT; PAM sequence: CTTAGATT
cagaactgacatgctttact

SEQ ID NO: 43492 - DNA, 20 bp, Artificial Sequence
  Description of Artificial Sequence: Synthetic oligonucleotide
  Target: LAMA2; (+) strand; PAM type: NNNNGHTT; PAM sequence: ACGAGTTT
gctttactcttagattgaat

SEQ ID NO: 43493 - DNA, 20 bp, Artificial Sequence
  Description of Artificial Sequence: Synthetic oligonucleotide
  Target: LAMA2; (+) strand; PAM type: NNNNGHTT; PAM sequence: GTTAGTTT
tacacgtccttgctatcttt

SEQ ID NO: 43494 - DNA, 20 bp, Artificial Sequence
  Description of Artificial Sequence: Synthetic oligonucleotide
  Target: LAMA2; (+) strand; PAM type: NNNNGHTT; PAM sequence: AACTGATT
cctgactgatatgatccctt

SEQ ID NO: 43495 - DNA, 20 bp, Artificial Sequence
  Description of Artificial Sequence: Synthetic oligonucleotide
  Target: LAMA2; (+) strand; PAM type: NNNNGHTT; PAM sequence: CTCCGATT
ctactcaaagtctcttctcc

SEQ ID NO: 43496 - DNA, 20 bp, Artificial Sequence
  Description of Artificial Sequence: Synthetic oligonucleotide
  Target: LAMA2; (+) strand; PAM type: NNNNGHTT; PAM sequence: ACTGGCTT
aatatttccctgttatcttc

SEQ ID NO: 43497 - DNA, 20 bp, Artificial Sequence
  Description of Artificial Sequence: Synthetic oligonucleotide
  Target: LAMA2; (+) strand; PAM type: NNNNGHTT; PAM sequence: CACGGTTT
caacttccttttaaaacacc

SEQ ID NO: 43498 - DNA, 20 bp, Artificial Sequence
  Description of Artificial Sequence: Synthetic oligonucleotide
  Target: LAMA2; (+) strand; PAM type: NNNNGHTT; PAM sequence: GTTCGCTT
acacacacactttctaacac

SEQ ID NO: 43499 - DNA, 20 bp, Artificial Sequence
  Description of Artificial Sequence: Synthetic oligonucleotide
  Target: LAMA2; (+) strand; PAM type: NNNNGHTT; PAM sequence: CTATGATT
acacgttcgcttttctgttc

SEQ ID NO: 43500 - DNA, 20 bp, Artificial Sequence
  Description of Artificial Sequence: Synthetic oligonucleotide
  Target: LAMA2; (+) strand; PAM type: NNNNGHTT; PAM sequence: TGAGGCTT
ttcaaatgccagtatctcta

SEQ ID NO: 43501 - DNA, 20 bp, Artificial Sequence
  Description of Artificial Sequence: Synthetic oligonucleotide
  Target: LAMA2; (+) strand; PAM type: NNNNGHTT; PAM sequence: GCCAGATT
tggcaattacttataagtaa

SEQ ID NO: 43502 - DNA, 20 bp, Artificial Sequence
  Description of Artificial Sequence: Synthetic oligonucleotide
  Target: LAMA2; (+) strand; PAM type: NNNNGHTT; PAM sequence: TATAGCTT
aaatataactaacctgtctc

SEQ ID NO: 43503 - DNA, 20 bp, Artificial Sequence
  Description of Artificial Sequence: Synthetic oligonucleotide
  Target: LAMA2; (+) strand; PAM type: NNNNGHTT; PAM sequence: AATTGTTT
tacaggtaaaagttctgtga

SEQ ID NO: 43504 - DNA, 20 bp, Artificial Sequence
  Description of Artificial Sequence: Synthetic oligonucleotide
  Target: LAMA2; (+) strand; PAM type: NNNNGHTT; PAM sequence: AAATGATT
aactaaataaatgaattccc

SEQ ID NO: 43505 - DNA, 20 bp, Artificial Sequence
  Description of Artificial Sequence: Synthetic oligonucleotide
  Target: LAMA2; (+) strand; PAM type: NNNNGHTT; PAM sequence: TACCGTTT
gttgcattttattttaaaac

SEQ ID NO: 43506 - DNA, 20 bp, Artificial Sequence
  Description of Artificial Sequence: Synthetic oligonucleotide
  Target: LAMA2; (+) strand; PAM type: NNNNGHTT; PAM sequence: CACAGCTT
tcaaagggtgaactctgggt

SEQ ID NO: 43507 - DNA, 20 bp, Artificial Sequence
  Description of Artificial Sequence: Synthetic oligonucleotide
  Target: LAMA2; (+) strand; PAM type: NNNNGHTT; PAM sequence: TTTAGCTT
cttttctctgactaatttta

SEQ ID NO: 43508 - DNA, 20 bp, Artificial Sequence
  Description of Artificial Sequence: Synthetic oligonucleotide
  Target: LAMA2; (+) strand; PAM type: NNNNGHTT; PAM sequence: TGTGGCTT
ttagctttcaagcatttctt

SEQ ID NO: 43509 - DNA, 20 bp, Artificial Sequence
  Description of Artificial Sequence: Synthetic oligonucleotide
  Target: LAMA2; (+) strand; PAM type: NNNNGHTT; PAM sequence: TTCAGTTT
ttcaagcatttctttgtggc

SEQ ID NO: 43510 - DNA, 20 bp, Artificial Sequence
  Description of Artificial Sequence: Synthetic oligonucleotide
  Target: LAMA2; (+) strand; PAM type: NNNNGHTT; PAM sequence: TTCAGTTT
tttgtggcttcagttttgac

SEQ ID NO: 43511 - DNA, 20 bp, Artificial Sequence
  Description of Artificial Sequence: Synthetic oligonucleotide
  Target: LAMA2; (+) strand; PAM type: NNNNGHTT; PAM sequence: TTTTGTTT
cttttaatttaactccatta

SEQ ID NO: 43512 - DNA, 20 bp, Artificial Sequence
  Description of Artificial Sequence: Synthetic oligonucleotide
  Target: LAMA2; (+) strand; PAM type: NNNNGHTT; PAM sequence: TAATGATT
ccattattttgttttaaatg

SEQ ID NO: 43513 - DNA, 20 bp, Artificial Sequence
  Description of Artificial Sequence: Synthetic oligonucleotide
  Target: LAMA2; (+) strand; PAM type: NNNNGHTT; PAM sequence: AACTGCTT
tgttcattatatttttctcc

SEQ ID NO: 43514 - DNA, 20 bp, Artificial Sequence
  Description of Artificial Sequence: Synthetic oligonucleotide
  Target: LAMA2; (+) strand; PAM type: NNNNGHTT; PAM sequence: AGTAGTTT
ggccttgtgcaaatctctcc

SEQ ID NO: 43515 - DNA, 20 bp, Artificial Sequence
  Description of Artificial Sequence: Synthetic oligonucleotide
  Target: LAMA2; (+) strand; PAM type: NNNNGHTT; PAM sequence: AAGTGTTT
ctcagaatcaatcactcaac

SEQ ID NO: 43516 - DNA, 20 bp, Artificial Sequence
  Description of Artificial Sequence: Synthetic oligonucleotide
  Target: LAMA2; (+) strand; PAM type: NNNNGHTT; PAM sequence: GAAAGCTT
tcactcaacaagtgtttact

SEQ ID NO: 43517 - DNA, 20 bp, Artificial Sequence
  Description of Artificial Sequence: Synthetic oligonucleotide
  Target: LAMA2; (+) strand; PAM type: NNNNGHTT; PAM sequence: AAGAGTTT
tgggatataattccagcctg

SEQ ID NO: 43518 - DNA, 20 bp, Artificial Sequence
  Description of Artificial Sequence: Synthetic oligonucleotide
  Target: LAMA2; (+) strand; PAM type: NNNNGHTT; PAM sequence: AAATGATT
acagagaagcgtaacagagc

SEQ ID NO: 43519 - DNA, 20 bp, Artificial Sequence
  Description of Artificial Sequence: Synthetic oligonucleotide
  Target: LAMA2; (+) strand; PAM type: NNNNGHTT; PAM sequence: CTAAGTTT
acagagcaaatgattaagtt

SEQ ID NO: 43520 - DNA, 20 bp, Artificial Sequence
  Description of Artificial Sequence: Synthetic oligonucleotide
  Target: LAMA2; (+) strand; PAM type: NNNNGHTT; PAM sequence: TTAAGATT
gaacatatctagtcctggag

SEQ ID NO: 43521 - DNA, 20 bp, Artificial Sequence
  Description of Artificial Sequence: Synthetic oligonucleotide
  Target: LAMA2; (+) strand; PAM type: NNNNGHTT; PAM sequence: TCTAGATT
gagttaagatttctattttt

SEQ ID NO: 43522 - DNA, 20 bp, Artificial Sequence
  Description of Artificial Sequence: Synthetic oligonucleotide
  Target: LAMA2; (+) strand; PAM type: NNNNGHTT; PAM sequence: TGACGATT
gtgtatattctagatatgca

SEQ ID NO: 43523 - DNA, 20 bp, Artificial Sequence
  Description of Artificial Sequence: Synthetic oligonucleotide
  Target: LAMA2; (+) strand; PAM type: NNNNGHTT; PAM sequence: AAATGATT
taatatacatatacattgtg

SEQ ID NO: 43524 - DNA, 20 bp, Artificial Sequence
  Description of Artificial Sequence: Synthetic oligonucleotide
  Target: LAMA2; (+) strand; PAM type: NNNNGHTT; PAM sequence: GCGTGTTT
atagttatcactttgtgtgt

SEQ ID NO: 43525 - DNA, 20 bp, Artificial Sequence
  Description of Artificial Sequence: Synthetic oligonucleotide
  Target: LAMA2; (+) strand; PAM type: NNNNGHTT; PAM sequence: GTTTGTTT
ttatcactttgtgtgtgcgt

SEQ ID NO: 43526 - DNA, 20 bp, Artificial Sequence
  Description of Artificial Sequence: Synthetic oligonucleotide
  Target: LAMA2; (+) strand; PAM type: NNNNGHTT; PAM sequence: CTGTGTTT
gcatggaggacatttaagat

SEQ ID NO: 43527 - DNA, 20 bp, Artificial Sequence
  Description of Artificial Sequence: Synthetic oligonucleotide
  Target: LAMA2; (+) strand; PAM type: NNNNGHTT; PAM sequence: CTCTGCTT
attcattccaccattctact

SEQ ID NO: 43528 - DNA, 20 bp, Artificial Sequence
  Description of Artificial Sequence: Synthetic oligonucleotide
  Target: LAMA2; (+) strand; PAM type: NNNNGHTT; PAM sequence: TTTAGATT
tgcttctatgagttcaactt

SEQ ID NO: 43529 - DNA, 20 bp, Artificial Sequence
  Description of Artificial Sequence: Synthetic oligonucleotide
  Target: LAMA2; (+) strand; PAM type: NNNNGHTT; PAM sequence: ATTTGTTT
tgtgagtgagatcatactgt

SEQ ID NO: 43530 - DNA, 20 bp, Artificial Sequence
  Description of Artificial Sequence: Synthetic oligonucleotide
  Target: LAMA2; (+) strand; PAM type: NNNNGHTT; PAM sequence: TGTGGCTT
actgtatttgtttttctatg

SEQ ID NO: 43531 - DNA, 20 bp, Artificial Sequence
  Description of Artificial Sequence: Synthetic oligonucleotide
  Target: LAMA2; (+) strand; PAM type: NNNNGHTT; PAM sequence: TCAGGCTT
ctcacctagcacaatgccct

SEQ ID NO: 43532 - DNA, 20 bp, Artificial Sequence
  Description of Artificial Sequence: Synthetic oligonucleotide
  Target: LAMA2; (+) strand; PAM type: NNNNGHTT; PAM sequence: GCAGGATT
tatccatgtcattgcaaata

SEQ ID NO: 43533 - DNA, 20 bp, Artificial Sequence
  Description of Artificial Sequence: Synthetic oligonucleotide
  Target: LAMA2; (+) strand; PAM type: NNNNGHTT; PAM sequence: ATGGGATT
tttaaaatatatagctagaa

SEQ ID NO: 43534 - DNA, 20 bp, Artificial Sequence
  Description of Artificial Sequence: Synthetic oligonucleotide
  Target: LAMA2; (+) strand; PAM type: NNNNGHTT; PAM sequence: CTATGCTT
tttcatttttggaagaatct

SEQ ID NO: 43535 - DNA, 20 bp, Artificial Sequence
  Description of Artificial Sequence: Synthetic oligonucleotide
  Target: LAMA2; (+) strand; PAM type: NNNNGHTT; PAM sequence: TGCTGTTT
ggaagaatctctatgcttaa

SEQ ID NO: 43536 - DNA, 20 bp, Artificial Sequence
  Description of Artificial Sequence: Synthetic oligonucleotide
  Target: LAMA2; (+) strand; PAM type: NNNNGHTT; PAM sequence: AAGGGTTT
cattcccaccaaaagtgtag

SEQ ID NO: 43537 - DNA, 20 bp, Artificial Sequence
  Description of Artificial Sequence: Synthetic oligonucleotide
  Target: LAMA2; (+) strand; PAM type: NNNNGHTT; PAM sequence: CTCTGTTT
gtgtagaagggtttcttttt

SEQ ID NO: 43538 - DNA, 20 bp, Artificial Sequence
  Description of Artificial Sequence: Synthetic oligonucleotide
  Target: LAMA2; (+) strand; PAM type: NNNNGHTT; PAM sequence: TGTGGTTT
ggtatgaggtgatatctcac

SEQ ID NO: 43539 - DNA, 20 bp, Artificial Sequence
  Description of Artificial Sequence: Synthetic oligonucleotide
  Target: LAMA2; (+) strand; PAM type: NNNNGHTT; PAM sequence: TTTTGATT
gaggtgatatctcactgtgg

SEQ ID NO: 43540 - DNA, 20 bp, Artificial Sequence
  Description of Artificial Sequence: Synthetic oligonucleotide
  Target: LAMA2; (+) strand; PAM type: NNNNGHTT; PAM sequence: TGATGATT
ggttttgatttgtatttccc

SEQ ID NO: 43541 - DNA, 20 bp, Artificial Sequence
  Description of Artificial Sequence: Synthetic oligonucleotide
  Target: LAMA2; (+) strand; PAM type: NNNNGHTT; PAM sequence: ATATGTTT
gaaacatgtctattttttag

SEQ ID NO: 43542 - DNA, 20 bp, Artificial Sequence
  Description of Artificial Sequence: Synthetic oligonucleotide
  Target: LAMA2; (+) strand; PAM type: NNNNGHTT; PAM sequence: ATTGGCTT
ggtcctttgtccattttgaa

SEQ ID NO: 43543 - DNA, 20 bp, Artificial Sequence
  Description of Artificial Sequence: Synthetic oligonucleotide
  Target: LAMA2; (+) strand; PAM type: NNNNGHTT; PAM sequence: TTGTGTTT
cattttgaaattggcttatt

SEQ ID NO: 43544 - DNA, 20 bp, Artificial Sequence
  Description of Artificial Sequence: Synthetic oligonucleotide
  Target: LAMA2; (+) strand; PAM type: NNNNGHTT; PAM sequence: TATGGTTT
tattaactcctgatcatata

SEQ ID NO: 43545 - DNA, 20 bp, Artificial Sequence
  Description of Artificial Sequence: Synthetic oligonucleotide
  Target: LAMA2; (+) strand; PAM type: NNNNGHTT; PAM sequence: TGTTGATT
cacaacttgcctttttattt

SEQ ID NO: 43546 - DNA, 20 bp, Artificial Sequence
  Description of Artificial Sequence: Synthetic oligonucleotide
  Target: LAMA2; (+) strand; PAM type: NNNNGHTT; PAM sequence: AGAAGTTT
ttgattgtatcctctgctgt

SEQ ID NO: 43547 - DNA, 20 bp, Artificial Sequence
  Description of Artificial Sequence: Synthetic oligonucleotide
  Target: LAMA2; (+) strand; PAM type: NNNNGHTT; PAM sequence: TTTAGTTT
tatcctctgctgtagaagtt

SEQ ID NO: 43548 - DNA, 20 bp, Artificial Sequence
  Description of Artificial Sequence: Synthetic oligonucleotide
  Target: LAMA2; (+) strand; PAM type: NNNNGHTT; PAM sequence: CTTTGTTT
agtttgctgcagttacactt

SEQ ID NO: 43549 - DNA, 20 bp, Artificial Sequence
  Description of Artificial Sequence: Synthetic oligonucleotide
  Target: LAMA2; (+) strand; PAM type: NNNNGHTT; PAM sequence: TTTTGCTT
ctgcagttacacttctttgt

SEQ ID NO: 43550 - DNA, 20 bp, Artificial Sequence
  Description of Artificial Sequence: Synthetic oligonucleotide
  Target: LAMA2; (+) strand; PAM type: NNNNGHTT; PAM sequence: CTGTGCTT
tttgtttttgctttcattgc

SEQ ID NO: 43551 - DNA, 20 bp, Artificial Sequence
  Description of Artificial Sequence: Synthetic oligonucleotide
  Target: LAMA2; (+) strand; PAM type: NNNNGHTT; PAM sequence: AGAAGCTT
cttttctttatatttatttt

SEQ ID NO: 43552 - DNA, 20 bp, Artificial Sequence
  Description of Artificial Sequence: Synthetic oligonucleotide
  Target: LAMA2; (+) strand; PAM type: NNNNGHTT; PAM sequence: TATGGTTT
tatatttattttagaagctt

SEQ ID NO: 43553 - DNA, 20 bp, Artificial Sequence
  Description of Artificial Sequence: Synthetic oligonucleotide
  Target: LAMA2; (+) strand; PAM type: NNNNGHTT; PAM sequence: AGTTGATT
tcagtcttgaatccattttc

SEQ ID NO: 43554 - DNA, 20 bp, Artificial Sequence
  Description of Artificial Sequence: Synthetic oligonucleotide
  Target: LAMA2; (+) strand; PAM type: NNNNGHTT; PAM sequence: TCTAGTTT
cattcttttgcatgtggata

SEQ ID NO: 43555 - DNA, 20 bp, Artificial Sequence
  Description of Artificial Sequence: Synthetic oligonucleotide
  Target: LAMA2; (+) strand; PAM type: NNNNGHTT; PAM sequence: TACAGTTT
tggatatctagtttccccaa

SEQ ID NO: 43556 - DNA, 20 bp, Artificial Sequence
  Description of Artificial Sequence: Synthetic oligonucleotide
  Target: LAMA2; (+) strand; PAM type: NNNNGHTT; PAM sequence: TGTAGTTT
agactatttgttccccattg

SEQ ID NO: 43557 - DNA, 20 bp, Artificial Sequence
  Description of Artificial Sequence: Synthetic oligonucleotide
  Target: LAMA2; (+) strand; PAM type: NNNNGHTT; PAM sequence: CAAAGATT
tgtagttttaatggcctagt

SEQ ID NO: 43558 - DNA, 20 bp, Artificial Sequence
  Description of Artificial Sequence: Synthetic oligonucleotide
  Target: LAMA2; (+) strand; PAM type: NNNNGHTT; PAM sequence: GTGGGTTT
gattagttggccatatattt

SEQ ID NO: 43559 - DNA, 20 bp, Artificial Sequence
  Description of Artificial Sequence: Synthetic oligonucleotide
  Target: LAMA2; (+) strand; PAM type: NNNNGHTT; PAM sequence: TTCCGTTT
gtgggtttatttctgggcta

SEQ ID NO: 43560 - DNA, 20 bp, Artificial Sequence
  Description of Artificial Sequence: Synthetic oligonucleotide
  Target: LAMA2; (+) strand; PAM type: NNNNGHTT; PAM sequence: GTCTGTTT
tccgtttcattggtctatat

SEQ ID NO: 43561 - DNA, 20 bp, Artificial Sequence
  Description of Artificial Sequence: Synthetic oligonucleotide
  Target: LAMA2; (+) strand; PAM type: NNNNGHTT; PAM sequence: CACTGTTT
ctgtttttatagcactatca

SEQ ID NO: 43562 - DNA, 20 bp, Artificial Sequence
  Description of Artificial Sequence: Synthetic oligonucleotide
  Target: LAMA2; (+) strand; PAM type: NNNNGHTT; PAM sequence: TTTTGATT
tttatagcactatcacactg

SEQ ID NO: 43563 - DNA, 20 bp, Artificial Sequence
  Description of Artificial Sequence: Synthetic oligonucleotide
  Target: LAMA2; (+) strand; PAM type: NNNNGHTT; PAM sequence: CATGGCTT
tatcacactgttttgattac

SEQ ID NO: 43564 - DNA, 20 bp, Artificial Sequence
  Description of Artificial Sequence: Synthetic oligonucleotide
  Target: LAMA2; (+) strand; PAM type: NNNNGHTT; PAM sequence: TATAGTTT
ttgattaccatggctttgta

SEQ ID NO: 43565 - DNA, 20 bp, Artificial Sequence
  Description of Artificial Sequence: Synthetic oligonucleotide
  Target: LAMA2; (+) strand; PAM type: NNNNGHTT; PAM sequence: TGGTGCTT
tagtttgaaatcaggaccca

SEQ ID NO: 43566 - DNA, 20 bp, Artificial Sequence
  Description of Artificial Sequence: Synthetic oligonucleotide
  Target: LAMA2; (+) strand; PAM type: NNNNGHTT; PAM sequence: TCTGGCTT
aaatcaggacccatggtgct

SEQ ID NO: 43567 - DNA, 20 bp, Artificial Sequence
  Description of Artificial Sequence: Synthetic oligonucleotide
  Target: LAMA2; (+) strand; PAM type: NNNNGHTT; PAM sequence: TTAAGATT
tctggctttgtccttctttc

SEQ ID NO: 43568 - DNA, 20 bp, Artificial Sequence
  Description of Artificial Sequence: Synthetic oligonucleotide
  Target: LAMA2; (+) strand; PAM type: NNNNGHTT; PAM sequence: GATTGCTT
gctttgtccttctttcttaa

SEQ ID NO: 43569 - DNA, 20 bp, Artificial Sequence
  Description of Artificial Sequence: Synthetic oligonucleotide
  Target: LAMA2; (+) strand; PAM type: NNNNGHTT; PAM sequence: TTGTGATT
ctttggatattttgggtcat

SEQ ID NO: 43570 - DNA, 20 bp, Artificial Sequence
  Description of Artificial Sequence: Synthetic oligonucleotide
  Target: LAMA2; (+) strand; PAM type: NNNNGHTT; PAM sequence: AACTGTTT
attcttattcttttttttag

SEQ ID NO: 43571 - DNA, 20 bp, Artificial Sequence
  Description of Artificial Sequence: Synthetic oligonucleotide
  Target: LAMA2; (+) strand; PAM type: NNNNGHTT; PAM sequence: AAGTGATT
aacctccgtctcctgggttc

SEQ ID NO: 43572 - DNA, 20 bp, Artificial Sequence
  Description of Artificial Sequence: Synthetic oligonucleotide
  Target: LAMA2; (+) strand; PAM type: NNNNGHTT; PAM sequence: CTGAGATT
tgcctcagcctcctgagtag

SEQ ID NO: 43573 - DNA, 20 bp, Artificial Sequence
  Description of Artificial Sequence: Synthetic oligonucleotide
  Target: LAMA2; (+) strand; PAM type: NNNNGHTT; PAM sequence: TGGGGTTT
tttgtatttcttagtagaga

SEQ ID NO: 43574 - DNA, 20 bp, Artificial Sequence
  Description of Artificial Sequence: Synthetic oligonucleotide
  Target: LAMA2; (+) strand; PAM type: NNNNGHTT; PAM sequence: CTGGGATT
cacctcagcctcccaaagtg

SEQ ID NO: 43575 - DNA, 20 bp, Artificial Sequence
  Description of Artificial Sequence: Synthetic oligonucleotide
  Target: LAMA2; (+) strand; PAM type: NNNNGHTT; PAM sequence: TATAGTTT
catttctttcttcaatgtct

SEQ ID NO: 43576 - DNA, 20 bp, Artificial Sequence
  Description of Artificial Sequence: Synthetic oligonucleotide
  Target: LAMA2; (+) strand; PAM type: NNNNGHTT; PAM sequence: TATTGCTT
tatttcattatttttgacgc

SEQ ID NO: 43577 - DNA, 20 bp, Artificial Sequence
  Description of Artificial Sequence: Synthetic oligonucleotide
  Target: LAMA2; (+) strand; PAM type: NNNNGHTT; PAM sequence: TTTGGTTT
attatttttgacgctattgc

SEQ ID NO: 43578 - DNA, 20 bp, Artificial Sequence
  Description of Artificial Sequence: Synthetic oligonucleotide
  Target: LAMA2; (+) strand; PAM type: NNNNGHTT; PAM sequence: GCAGGTTT
agggtacttgtgcacaatgt

SEQ ID NO: 43579 - DNA, 20 bp, Artificial Sequence
  Description of Artificial Sequence: Synthetic oligonucleotide
  Target: LAMA2; (+) strand; PAM type: NNNNGHTT; PAM sequence: GTTGGTTT
cataggtatacatgtgccat

SEQ ID NO: 43580 - DNA, 20 bp, Artificial Sequence
  Description of Artificial Sequence: Synthetic oligonucleotide
  Target: LAMA2; (+) strand; PAM type: NNNNGHTT; PAM sequence: CACTGTTT
cacttatgagtgagaacaca

SEQ ID NO: 43581 - DNA, 20 bp, Artificial Sequence
  Description of Artificial Sequence: Synthetic oligonucleotide
  Target: LAMA2; (+) strand; PAM type: NNNNGHTT; PAM sequence: TTTGGTTT
atgagtgagaacacacactg

SEQ ID NO: 43582 - DNA, 20 bp, Artificial Sequence
  Description of Artificial Sequence: Synthetic oligonucleotide
  Target: LAMA2; (+) strand; PAM type: NNNNGHTT; PAM sequence: GTTGGTTT
tgtgatattttgctgagaat

SEQ ID NO: 43583 - DNA, 20 bp, Artificial Sequence
  Description of Artificial Sequence: Synthetic oligonucleotide
  Target: LAMA2; (+) strand; PAM type: NNNNGHTT; PAM sequence: TCCAGCTT
ttttgctgagaatgttggtt

SEQ ID NO: 43584 - DNA, 20 bp, Artificial Sequence
  Description of Artificial Sequence: Synthetic oligonucleotide
  Target: LAMA2; (+) strand; PAM type: NNNNGHTT; PAM sequence: GCATGATT
gtacatgtgtctttatagta

SEQ ID NO: 43585 - DNA, 20 bp, Artificial Sequence
  Description of Artificial Sequence: Synthetic oligonucleotide
  Target: LAMA2; (+) strand; PAM type: NNNNGHTT; PAM sequence: GACTGATT
tgttgttaatatagatgcac

SEQ ID NO: 43586 - DNA, 20 bp, Artificial Sequence
  Description of Artificial Sequence: Synthetic oligonucleotide
  Target: LAMA2; (+) strand; PAM type: NNNNGHTT; PAM sequence: TGTTGATT
atgcacgactgattttcata

SEQ ID NO: 43587 - DNA, 20 bp, Artificial Sequence
  Description of Artificial Sequence: Synthetic oligonucleotide
  Target: LAMA2; (+) strand; PAM type: NNNNGHTT; PAM sequence: ATTAGCTT
caactttattgaatttcttt

SEQ ID NO: 43588 - DNA, 20 bp, Artificial Sequence
  Description of Artificial Sequence: Synthetic oligonucleotide
  Target: LAMA2; (+) strand; PAM type: NNNNGHTT; PAM sequence: TGGAGTTT
gcttctaatagcactttaga

SEQ ID NO: 43589 - DNA, 20 bp, Artificial Sequence
  Description of Artificial Sequence: Synthetic oligonucleotide
  Target: LAMA2; (+) strand; PAM type: NNNNGHTT; PAM sequence: TAGGGTTT
atagcactttagatggagtt

SEQ ID NO: 43590 - DNA, 20 bp, Artificial Sequence
  Description of Artificial Sequence: Synthetic oligonucleotide
  Target: LAMA2; (+) strand; PAM type: NNNNGHTT; PAM sequence: TGTTGATT
gactaggactcatagtacta

SEQ ID NO: 43591 - DNA, 20 bp, Artificial Sequence
  Description of Artificial Sequence: Synthetic oligonucleotide
  Target: LAMA2; (+) strand; PAM type: NNNNGHTT; PAM sequence: TTAGGCTT
agactgggcacctgataagg

SEQ ID NO: 43592 - DNA, 20 bp, Artificial Sequence
  Description of Artificial Sequence: Synthetic oligonucleotide
  Target: LAMA2; (+) strand; PAM type: NNNNGHTT; PAM sequence: GCCAGTTT
aaggtaattgaatcatggag

SEQ ID NO: 43593 - DNA, 20 bp, Artificial Sequence
  Description of Artificial Sequence: Synthetic oligonucleotide
  Target: LAMA2; (+) strand; PAM type: NNNNGHTT; PAM sequence: CGATGCTT
atcatggaggccagtttccc

SEQ ID NO: 43594 - DNA, 20 bp, Artificial Sequence
  Description of Artificial Sequence: Synthetic oligonucleotide
  Target: LAMA2; (+) strand; PAM type: NNNNGHTT; PAM sequence: GATAGTTT
agtgagttctcatgagctct

SEQ ID NO: 43595 - DNA, 20 bp, Artificial Sequence
  Description of Artificial Sequence: Synthetic oligonucleotide
  Target: LAMA2; (+) strand; PAM type: NNNNGHTT; PAM sequence: CTTCGCTT
tttataaggggctcttcccc

SEQ ID NO: 43596 - DNA, 20 bp, Artificial Sequence
  Description of Artificial Sequence: Synthetic oligonucleotide
  Target: LAMA2; (+) strand; PAM type: NNNNGHTT; PAM sequence: CCTTGCTT
gctgccttgtgaggaaggta

SEQ ID NO: 43597 - DNA, 20 bp, Artificial Sequence
  Description of Artificial Sequence: Synthetic oligonucleotide
  Target: LAMA2; (+) strand; PAM type: NNNNGHTT; PAM sequence: GTAAGCTT
cttggccttctgccacggtt

SEQ ID NO: 43598 - DNA, 20 bp, Artificial Sequence
  Description of Artificial Sequence: Synthetic oligonucleotide
  Target: LAMA2; (+) strand; PAM type: NNNNGHTT; PAM sequence: CTGTGATT
gtctccccagccgtgctgaa

SEQ ID NO: 43599 - DNA, 20 bp, Artificial Sequence
  Description of Artificial Sequence: Synthetic oligonucleotide
  Target: LAMA2; (+) strand; PAM type: NNNNGHTT; PAM sequence: CCCAGTTT
actttttcctttataaatca

SEQ ID NO: 43600 - DNA, 20 bp, Artificial Sequence
  Description of Artificial Sequence: Synthetic oligonucleotide
  Target: LAMA2; (+) strand; PAM type: NNNNGHTT; PAM sequence: AAAAGCTT
tatcttattcctaatctcag

SEQ ID NO: 43601 - DNA, 20 bp, Artificial Sequence
  Description of Artificial Sequence: Synthetic oligonucleotide
  Target: LAMA2; (+) strand; PAM type: NNNNGHTT; PAM sequence: GGGAGCTT
ttttctatacctaatttgtt

SEQ ID NO: 43602 - DNA, 20 bp, Artificial Sequence
  Description of Artificial Sequence: Synthetic oligonucleotide
  Target: LAMA2; (+) strand; PAM type: NNNNGHTT; PAM sequence: AAATGCTT
acaggatgttgaattttttc

SEQ ID NO: 43603 - DNA, 20 bp, Artificial Sequence
  Description of Artificial Sequence: Synthetic oligonucleotide
  Target: LAMA2; (+) strand; PAM type: NNNNGHTT; PAM sequence: ATATGATT
tttctacatctgagatgata

SEQ ID NO: 43604 - DNA, 20 bp, Artificial Sequence
  Description of Artificial Sequence: Synthetic oligonucleotide
  Target: LAMA2; (+) strand; PAM type: NNNNGHTT; PAM sequence: TGCAGATT
ccccagagtatgtctgaaac

SEQ ID NO: 43605 - DNA, 20 bp, Artificial Sequence
  Description of Artificial Sequence: Synthetic oligonucleotide
  Target: LAMA2; (+) strand; PAM type: NNNNGHTT; PAM sequence: GTATGCTT
tgtactgacacctacatata

SEQ ID NO: 43606 - DNA, 20 bp, Artificial Sequence
  Description of Artificial Sequence: Synthetic oligonucleotide
  Target: LAMA2; (+) strand; PAM type: NNNNGHTT; PAM sequence: AAAAGTTT
ttctatgtatatacctatga

SEQ ID NO: 43607 - DNA, 20 bp, Artificial Sequence
  Description of Artificial Sequence: Synthetic oligonucleotide
  Target: LAMA2; (+) strand; PAM type: NNNNGHTT; PAM sequence: AAGAGATT
taatttatgttaggcacagc

SEQ ID NO: 43608 - DNA, 20 bp, Artificial Sequence
  Description of Artificial Sequence: Synthetic oligonucleotide
  Target: LAMA2; (+) strand; PAM type: NNNNGHTT; PAM sequence: CCATGATT
tgtgagatgataaaaggcca

SEQ ID NO: 43609 - DNA, 20 bp, Artificial Sequence
  Description of Artificial Sequence: Synthetic oligonucleotide
  Target: LAMA2; (+) strand; PAM type: NNNNGHTT; PAM sequence: TATTGATT
gtaacataaagttaggttat

SEQ ID NO: 43610 - DNA, 20 bp, Artificial Sequence
  Description of Artificial Sequence: Synthetic oligonucleotide
  Target: LAMA2; (+) strand; PAM type: NNNNGHTT; PAM sequence: ATCTGCTT
gatgcatcagaaggaagacc

SEQ ID NO: 43611 - DNA, 20 bp, Artificial Sequence
  Description of Artificial Sequence: Synthetic oligonucleotide
  Target: LAMA2; (+) strand; PAM type: NNNNGHTT; PAM sequence: CCTTGATT
gaccatctgctttgagcgac

SEQ ID NO: 43612 - DNA, 20 bp, Artificial Sequence
  Description of Artificial Sequence: Synthetic oligonucleotide
  Target: LAMA2; (+) strand; PAM type: NNNNGHTT; PAM sequence: TACAGTTT
gtccaacaggtcggttgtga

SEQ ID NO: 43613 - DNA, 20 bp, Artificial Sequence
  Description of Artificial Sequence: Synthetic oligonucleotide
  Target: LAMA2; (+) strand; PAM type: NNNNGHTT; PAM sequence: GTAAGATT
gtgggaggaaacaggacagt

SEQ ID NO: 43614 - DNA, 20 bp, Artificial Sequence
  Description of Artificial Sequence: Synthetic oligonucleotide
  Target: LAMA2; (+) strand; PAM type: NNNNGHTT; PAM sequence: AATTGTTT
tgcacaattcaaaacttatg

SEQ ID NO: 43615 - DNA, 20 bp, Artificial Sequence
  Description of Artificial Sequence: Synthetic oligonucleotide
  Target: LAMA2; (+) strand; PAM type: NNNNGHTT; PAM sequence: CCATGATT
ttccacttaatattttcaga

SEQ ID NO: 43616 - DNA, 20 bp, Artificial Sequence
  Description of Artificial Sequence: Synthetic oligonucleotide
  Target: LAMA2; (+) strand; PAM type: NNNNGHTT; PAM sequence: ATTTGATT
tccttttgatatgccgttga

SEQ ID NO: 43617 - DNA, 20 bp, Artificial Sequence
  Description of Artificial Sequence: Synthetic oligonucleotide
  Target: LAMA2; (+) strand; PAM type: NNNNGHTT; PAM sequence: TGAGGATT
ttgatttgctagtatttttt

SEQ ID NO: 43618 - DNA, 20 bp, Artificial Sequence
  Description of Artificial Sequence: Synthetic oligonucleotide
  Target: LAMA2; (+) strand; PAM type: NNNNGHTT; PAM sequence: ATGAGATT
tataatagttacctcatata

SEQ ID NO: 43619 - DNA, 20 bp, Artificial Sequence
  Description of Artificial Sequence: Synthetic oligonucleotide
  Target: LAMA2; (+) strand; PAM type: NNNNGHTT; PAM sequence: GGGAGATT
gtcttgaacttttctttatt

SEQ ID NO: 43620 - DNA, 20 bp, Artificial Sequence
  Description of Artificial Sequence: Synthetic oligonucleotide
  Target: LAMA2; (+) strand; PAM type: NNNNGHTT; PAM sequence: TTCTGATT
ctttattgggagattttttt

SEQ ID NO: 43621 - DNA, 20 bp, Artificial Sequence
  Description of Artificial Sequence: Synthetic oligonucleotide
  Target: LAMA2; (+) strand; PAM type: NNNNGHTT; PAM sequence: TTCAGATT
gtactcattacccaaatttg

SEQ ID NO: 43622 - DNA, 20 bp, Artificial Sequence
  Description of Artificial Sequence: Synthetic oligonucleotide
  Target: LAMA2; (+) strand; PAM type: NNNNGHTT; PAM sequence: GGTCGATT
tttcttcatcattcagtctt

SEQ ID NO: 43623 - DNA, 20 bp, Artificial Sequence
  Description of Artificial Sequence: Synthetic oligonucleotide
  Target: LAMA2; (+) strand; PAM type: NNNNGHTT; PAM sequence: CTTAGTTT
tgaatcctcattcctttttt

SEQ ID NO: 43624 - DNA, 20 bp, Artificial Sequence
  Description of Artificial Sequence: Synthetic oligonucleotide
  Target: LAMA2; (+) strand; PAM type: NNNNGHTT; PAM sequence: GAAGGTTT
ccttttttcttagtttggct

SEQ ID NO: 43625 - DNA, 20 bp, Artificial Sequence
  Description of Artificial Sequence: Synthetic oligonucleotide
  Target: LAMA2; (+) strand; PAM type: NNNNGHTT; PAM sequence: TTTTGTTT
tttggctgaaggtttgtcaa

SEQ ID NO: 43626 - DNA, 20 bp, Artificial Sequence
  Description of Artificial Sequence: Synthetic oligonucleotide
  Target: LAMA2; (+) strand; PAM type: NNNNGHTT; PAM sequence: CTTAGTTT
cttcccttttctatctttgt

SEQ ID NO: 43627 - DNA, 20 bp, Artificial Sequence
  Description of Artificial Sequence: Synthetic oligonucleotide
  Target: LAMA2; (+) strand; PAM type: NNNNGHTT; PAM sequence: AGAAGTTT
aacgtcttttgctgcatccc

SEQ ID NO: 43628 - DNA, 20 bp, Artificial Sequence
  Description of Artificial Sequence: Synthetic oligonucleotide
  Target: LAMA2; (+) strand; PAM type: NNNNGHTT; PAM sequence: TTTTGATT
tttcatttgtctcaagatac

SEQ ID NO: 43629 - DNA, 20 bp, Artificial Sequence
  Description of Artificial Sequence: Synthetic oligonucleotide
  Target: LAMA2; (+) strand; PAM type: NNNNGHTT; PAM sequence: TTTGGATT
caagatacttttgatttctc

SEQ ID NO: 43630 - DNA, 20 bp, Artificial Sequence
  Description of Artificial Sequence: Synthetic oligonucleotide
  Target: LAMA2; (+) strand; PAM type: NNNNGHTT; PAM sequence: TGTTGCTT
ccattggtcattttggagtg

SEQ ID NO: 43631 - DNA, 20 bp, Artificial Sequence
  Description of Artificial Sequence: Synthetic oligonucleotide
  Target: LAMA2; (+) strand; PAM type: NNNNGHTT; PAM sequence: CTGGGATT
ttactttccatatatctgtg

SEQ ID NO: 43632 - DNA, 20 bp, Artificial Sequence
  Description of Artificial Sequence: Synthetic oligonucleotide
  Target: LAMA2; (+) strand; PAM type: NNNNGHTT; PAM sequence: TTTAGCTT
acttcaccacttacaaggta

SEQ ID NO: 43633 - DNA, 20 bp, Artificial Sequence
  Description of Artificial Sequence: Synthetic oligonucleotide
  Target: LAMA2; (+) strand; PAM type: NNNNGHTT; PAM sequence: GACTGATT
atgagagtatctacctccct

SEQ ID NO: 43634 - DNA, 20 bp, Artificial Sequence
  Description of Artificial Sequence: Synthetic oligonucleotide
  Target: LAMA2; (+) strand; PAM type: NNNNGHTT; PAM sequence: TTATGATT
gcatacagtatttattattt

SEQ ID NO: 43635 - DNA, 20 bp, Artificial Sequence
  Description of Artificial Sequence: Synthetic oligonucleotide
  Target: LAMA2; (+) strand; PAM type: NNNNGHTT; PAM sequence: TAATGTTT
ttattatttttatgattaac

SEQ ID NO: 43636 - DNA, 20 bp, Artificial Sequence
  Description of Artificial Sequence: Synthetic oligonucleotide
  Target: LAMA2; (+) strand; PAM type: NNNNGHTT; PAM sequence: CACTGTTT
gaggtccttagagtgctaga

SEQ ID NO: 43637 - DNA, 20 bp, Artificial Sequence
  Description of Artificial Sequence: Synthetic oligonucleotide
  Target: LAMA2; (+) strand; PAM type: NNNNGHTT; PAM sequence: AAAAGTTT
atctcaccacaaccttataa

SEQ ID NO: 43638 - DNA, 20 bp, Artificial Sequence
  Description of Artificial Sequence: Synthetic oligonucleotide
  Target: LAMA2; (+) strand; PAM type: NNNNGHTT; PAM sequence: CGATGTTT
ataaaaaagtttttattgtc

SEQ ID NO: 43639 - DNA, 20 bp, Artificial Sequence
  Description of Artificial Sequence: Synthetic oligonucleotide
  Target: LAMA2; (+) strand; PAM type: NNNNGHTT; PAM sequence: GTTAGTTT
tagacggcgtagttatagga

SEQ ID NO: 43640 - DNA, 20 bp, Artificial Sequence
  Description of Artificial Sequence: Synthetic oligonucleotide
  Target: LAMA2; (+) strand; PAM type: NNNNGHTT; PAM sequence: ATAAGATT
agagaagctgctaggcaaac

SEQ ID NO: 43641 - DNA, 20 bp, Artificial Sequence
  Description of Artificial Sequence: Synthetic oligonucleotide
  Target: LAMA2; (+) strand; PAM type: NNNNGHTT; PAM sequence: TTATGTTT
agaagtattctttctcttac

SEQ ID NO: 43642 - DNA, 20 bp, Artificial Sequence
  Description of Artificial Sequence: Synthetic oligonucleotide
  Target: LAMA2; (+) strand; PAM type: NNNNGHTT; PAM sequence: TTTTGCTT
cttacttatgttttgttaat

SEQ ID NO: 43643 - DNA, 20 bp, Artificial Sequence
  Description of Artificial Sequence: Synthetic oligonucleotide
  Target: LAMA2; (+) strand; PAM type: NNNNGHTT; PAM sequence: CTTGGTTT
ttatgttttgttaatttttg

SEQ ID NO: 43644 - DNA, 20 bp, Artificial Sequence
  Description of Artificial Sequence: Synthetic oligonucleotide
  Target: LAMA2; (+) strand; PAM type: NNNNGHTT; PAM sequence: TTTTGATT
ttttgttaatttttgcttgg

SEQ ID NO: 43645 - DNA, 20 bp, Artificial Sequence
  Description of Artificial Sequence: Synthetic oligonucleotide
  Target: LAMA2; (+) strand; PAM type: NNNNGHTT; PAM sequence: ATCAGTTT
gcttggttttgattgtagac

SEQ ID NO: 43646 - DNA, 20 bp, Artificial Sequence
  Description of Artificial Sequence: Synthetic oligonucleotide
  Target: LAMA2; (+) strand; PAM type: NNNNGHTT; PAM sequence: TGCTGCTT
taatcttagttaatgatccc

SEQ ID NO: 43647 - DNA, 20 bp, Artificial Sequence
  Description of Artificial Sequence: Synthetic oligonucleotide
  Target: LAMA2; (+) strand; PAM type: NNNNGHTT; PAM sequence: TTTTGCTT
tactgacttctaactcatct

SEQ ID NO: 43648 - DNA, 20 bp, Artificial Sequence
  Description of Artificial Sequence: Synthetic oligonucleotide
  Target: LAMA2; (+) strand; PAM type: NNNNGHTT; PAM sequence: TTCAGCTT
tctcttatttggaacagtta

SEQ ID NO: 43649 - DNA, 20 bp, Artificial Sequence
  Description of Artificial Sequence: Synthetic oligonucleotide
  Target: LAMA2; (+) strand; PAM type: NNNNGHTT; PAM sequence: ACACGTTT
ttcaattccaactcaggttc

SEQ ID NO: 43650 - DNA, 20 bp, Artificial Sequence
  Description of Artificial Sequence: Synthetic oligonucleotide
  Target: LAMA2; (+) strand; PAM type: NNNNGHTT; PAM sequence: AAGGGCTT
acgtttatcacctagtgtag

SEQ ID NO: 43651 - DNA, 20 bp, Artificial Sequence
  Description of Artificial Sequence: Synthetic oligonucleotide
  Target: LAMA2; (+) strand; PAM type: NNNNGHTT; PAM sequence: CACAGTTT
agtgtagaagggctttcctc

SEQ ID NO: 43652 - DNA, 20 bp, Artificial Sequence
  Description of Artificial Sequence: Synthetic oligonucleotide
  Target: LAMA2; (+) strand; PAM type: NNNNGHTT; PAM sequence: TTTTGCTT
agaagggctttcctccacag

SEQ ID NO: 43653 - DNA, 20 bp, Artificial Sequence
  Description of Artificial Sequence: Synthetic oligonucleotide
  Target: LAMA2; (+) strand; PAM type: NNNNGHTT; PAM sequence: TACAGTTT
tagactttgtcataatgtat

SEQ ID NO: 43654 - DNA, 20 bp, Artificial Sequence
  Description of Artificial Sequence: Synthetic oligonucleotide
  Target: LAMA2; (+) strand; PAM type: NNNNGHTT; PAM sequence: AAGAGTTT
gaggaaagcaccacaagacc

SEQ ID NO: 43655 - DNA, 20 bp, Artificial Sequence
  Description of Artificial Sequence: Synthetic oligonucleotide
  Target: LAMA2; (+) strand; PAM type: NNNNGHTT; PAM sequence: CAATGCTT
ttcctttttttttttcatcc

SEQ ID NO: 43656 - DNA, 20 bp, Artificial Sequence
  Description of Artificial Sequence: Synthetic oligonucleotide
  Target: LAMA2; (+) strand; PAM type: NNNNGHTT; PAM sequence: TGGAGTTT
atatataccttcacctgact

SEQ ID NO: 43657 - DNA, 20 bp, Artificial Sequence
  Description of Artificial Sequence: Synthetic oligonucleotide
  Target: LAMA2; (+) strand; PAM type: NNNNGHTT; PAM sequence: AACAGCTT
tggagtttcataaggaatgc

SEQ ID NO: 43658 - DNA, 20 bp, Artificial Sequence
  Description of Artificial Sequence: Synthetic oligonucleotide
  Target: LAMA2; (+) strand; PAM type: NNNNGHTT; PAM sequence: TTTTGCTT
ttccaattcatttactttct

SEQ ID NO: 43659 - DNA, 20 bp, Artificial Sequence
  Description of Artificial Sequence: Synthetic oligonucleotide
  Target: LAMA2; (+) strand; PAM type: NNNNGHTT; PAM sequence: AAAAGATT
aaaagttaaatattataaat

SEQ ID NO: 43660 - DNA, 20 bp, Artificial Sequence
  Description of Artificial Sequence: Synthetic oligonucleotide
  Target: LAMA2; (+) strand; PAM type: NNNNGHTT; PAM sequence: AAAAGATT
gatatttttaaaggagacag

SEQ ID NO: 43661 - DNA, 20 bp, Artificial Sequence
  Description of Artificial Sequence: Synthetic oligonucleotide
  Target: LAMA2; (+) strand; PAM type: NNNNGHTT; PAM sequence: AGGAGCTT
caataagaagcaaatgctca

SEQ ID NO: 43662 - DNA, 20 bp, Artificial Sequence
  Description of Artificial Sequence: Synthetic oligonucleotide
  Target: LAMA2; (+) strand; PAM type: NNNNGHTT; PAM sequence: GGCTGATT
catctctttattatcttatt

SEQ ID NO: 43663 - DNA, 20 bp, Artificial Sequence
  Description of Artificial Sequence: Synthetic oligonucleotide
  Target: LAMA2; (+) strand; PAM type: NNNNGHTT; PAM sequence: ATTAGCTT
tttatacttcttgtaaaata

SEQ ID NO: 43664 - DNA, 20 bp, Artificial Sequence
  Description of Artificial Sequence: Synthetic oligonucleotide
  Target: LAMA2; (+) strand; PAM type: NNNNGHTT; PAM sequence: GGCAGATT
agaaacaagaatctctccta

SEQ ID NO: 43665 - DNA, 20 bp, Artificial Sequence
  Description of Artificial Sequence: Synthetic oligonucleotide
  Target: LAMA2; (+) strand; PAM type: NNNNGHTT; PAM sequence: AAAAGTTT
ggcatccagaatgatgatcc

SEQ ID NO: 43666 - DNA, 20 bp, Artificial Sequence
  Description of Artificial Sequence: Synthetic oligonucleotide
  Target: LAMA2; (+) strand; PAM type: NNNNGHTT; PAM sequence: AAAAGTTT
tttgggtccaaatgtgatgc

SEQ ID NO: 43667 - DNA, 20 bp, Artificial Sequence
  Description of Artificial Sequence: Synthetic oligonucleotide
  Target: LAMA2; (+) strand; PAM type: NNNNGHTT; PAM sequence: TCATGATT
tgttctgccattcttgctca

SEQ ID NO: 43668 - DNA, 20 bp, Artificial Sequence
  Description of Artificial Sequence: Synthetic oligonucleotide
  Target: LAMA2; (+) strand; PAM type: NNNNGHTT; PAM sequence: CTCAGTTT
cttgctcatcatgattttgc

SEQ ID NO: 43669 - DNA, 20 bp, Artificial Sequence
  Description of Artificial Sequence: Synthetic oligonucleotide
  Target: LAMA2; (+) strand; PAM type: NNNNGHTT; PAM sequence: TTATGTTT
ttttgcctcagtttttcaag

SEQ ID NO: 43670 - DNA, 20 bp, Artificial Sequence
  Description of Artificial Sequence: Synthetic oligonucleotide
  Target: LAMA2; (+) strand; PAM type: NNNNGHTT; PAM sequence: AATGGATT
tcaagttatgttttgttcat

SEQ ID NO: 43671 - DNA, 20 bp, Artificial Sequence
  Description of Artificial Sequence: Synthetic oligonucleotide
  Target: LAMA2; (+) strand; PAM type: NNNNGHTT; PAM sequence: TTTTGTTT
tttgttcataatggattttt

SEQ ID NO: 43672 - DNA, 20 bp, Artificial Sequence
  Description of Artificial Sequence: Synthetic oligonucleotide
  Target: LAMA2; (+) strand; PAM type: NNNNGHTT; PAM sequence: GTTTGTTT
ttcataatggattttttttt

SEQ ID NO: 43673 - DNA, 20 bp, Artificial Sequence
  Description of Artificial Sequence: Synthetic oligonucleotide
  Target: LAMA2; (+) strand; PAM type: NNNNGHTT; PAM sequence: CTATGTTT
acatccctttattaggggta

SEQ ID NO: 43674 - DNA, 20 bp, Artificial Sequence
  Description of Artificial Sequence: Synthetic oligonucleotide
  Target: LAMA2; (+) strand; PAM type: NNNNGHTT; PAM sequence: AGTTGATT
aattattgacccattgaatg

SEQ ID NO: 43675 - DNA, 20 bp, Artificial Sequence
  Description of Artificial Sequence: Synthetic oligonucleotide
  Target: LAMA2; (+) strand; PAM type: NNNNGHTT; PAM sequence: ATAAGCTT
atgtcccttccttctttatt

SEQ ID NO: 43676 - DNA, 20 bp, Artificial Sequence
  Description of Artificial Sequence: Synthetic oligonucleotide
  Target: LAMA2; (+) strand; PAM type: NNNNGHTT; PAM sequence: TTCTGTTT
tttaagagggcaaaaactat

SEQ ID NO: 43677 - DNA, 20 bp, Artificial Sequence
  Description of Artificial Sequence: Synthetic oligonucleotide
  Target: LAMA2; (+) strand; PAM type: NNNNGHTT; PAM sequence: TAGTGCTT
tcttaccatctttccctctt

SEQ ID NO: 43678 - DNA, 20 bp, Artificial Sequence
  Description of Artificial Sequence: Synthetic oligonucleotide
  Target: LAMA2; (+) strand; PAM type: NNNNGHTT; PAM sequence: TAAAGATT
gtaatgcattcatgagtgaa

SEQ ID NO: 43679 - DNA, 20 bp, Artificial Sequence
  Description of Artificial Sequence: Synthetic oligonucleotide
  Target: LAMA2; (+) strand; PAM type: NNNNGHTT; PAM sequence: TTTTGTTT
tcatatttttgtggtaaata

SEQ ID NO: 43680 - DNA, 20 bp, Artificial Sequence
  Description of Artificial Sequence: Synthetic oligonucleotide
  Target: LAMA2; (+) strand; PAM type: NNNNGHTT; PAM sequence: AAAGGTTT
gacctgaaagccatggaatg

SEQ ID NO: 43681 - DNA, 20 bp, Artificial Sequence
  Description of Artificial Sequence: Synthetic oligonucleotide
  Target: LAMA2; (+) strand; PAM type: NNNNGHTT; PAM sequence: AATCGCTT
tctagagaccagggtgagag

SEQ ID NO: 43682 - DNA, 20 bp, Artificial Sequence
  Description of Artificial Sequence: Synthetic oligonucleotide
  Target: LAMA2; (+) strand; PAM type: NNNNGHTT; PAM sequence: GGAGGATT
ctactccaaaggctgaagtg

SEQ ID NO: 43683 - DNA, 20 bp, Artificial Sequence
  Description of Artificial Sequence: Synthetic oligonucleotide
  Target: LAMA2; (+) strand; PAM type: NNNNGHTT; PAM sequence: GAAAGTTT
cccaaaatttttttaaataa

SEQ ID NO: 43684 - DNA, 20 bp, Artificial Sequence
  Description of Artificial Sequence: Synthetic oligonucleotide
  Target: LAMA2; (+) strand; PAM type: NNNNGHTT; PAM sequence: ATTAGTTT
aaagttttaataagcagaat

SEQ ID NO: 43685 - DNA, 20 bp, Artificial Sequence
  Description of Artificial Sequence: Synthetic oligonucleotide
  Target: LAMA2; (+) strand; PAM type: NNNNGHTT; PAM sequence: TGGGGCTT
gcaatgatgtggaataagca

SEQ ID NO: 43686 - DNA, 20 bp, Artificial Sequence
  Description of Artificial Sequence: Synthetic oligonucleotide
  Target: LAMA2; (+) strand; PAM type: NNNNGHTT; PAM sequence: GACTGATT
tcgaacattcaacaaacact

SEQ ID NO: 43687 - DNA, 20 bp, Artificial Sequence
  Description of Artificial Sequence: Synthetic oligonucleotide
  Target: LAMA2; (+) strand; PAM type: NNNNGHTT; PAM sequence: CAAAGTTT
tggaaaggaaaatacataat

SEQ ID NO: 43688 - DNA, 20 bp, Artificial Sequence
  Description of Artificial Sequence: Synthetic oligonucleotide
  Target: LAMA2; (+) strand; PAM type: NNNNGHTT; PAM sequence: GAAGGCTT
tgtgttagaagggtcaatct

SEQ ID NO: 43689 - DNA, 20 bp, Artificial Sequence
  Description of Artificial Sequence: Synthetic oligonucleotide
  Target: LAMA2; (+) strand; PAM type: NNNNGHTT; PAM sequence: GGATGTTT
aaatggatctgggataggga

SEQ ID NO: 43690 - DNA, 20 bp, Artificial Sequence
  Description of Artificial Sequence: Synthetic oligonucleotide
  Target: LAMA2; (+) strand; PAM type: NNNNGHTT; PAM sequence: TCATGATT
caattaattcaataaactaa

SEQ ID NO: 43691 - DNA, 20 bp, Artificial Sequence
  Description of Artificial Sequence: Synthetic oligonucleotide
  Target: LAMA2; (+) strand; PAM type: NNNNGHTT; PAM sequence: CTTAGTTT
gagtattctatgaaccctca

SEQ ID NO: 43692 - DNA, 20 bp, Artificial Sequence
  Description of Artificial Sequence: Synthetic oligonucleotide
  Target: LAMA2; (+) strand; PAM type: NNNNGHTT; PAM sequence: GTTTGATT
attctatgaaccctcactta

SEQ ID NO: 43693 - DNA, 20 bp, Artificial Sequence
  Description of Artificial Sequence: Synthetic oligonucleotide
  Target: LAMA2; (+) strand; PAM type: NNNNGHTT; PAM sequence: CTTTGCTT
aactttgtatttcactactt

SEQ ID NO: 43694 - DNA, 20 bp, Artificial Sequence
  Description of Artificial Sequence: Synthetic oligonucleotide
  Target: LAMA2; (+) strand; PAM type: NNNNGHTT; PAM sequence: TGATGATT
tatataagtgagaaatatga

SEQ ID NO: 43695 - DNA, 20 bp, Artificial Sequence
  Description of Artificial Sequence: Synthetic oligonucleotide
  Target: LAMA2; (+) strand; PAM type: NNNNGHTT; PAM sequence: GGTGGTTT
gcgagttggtatctactgat

SEQ ID NO: 43696 - DNA, 20 bp, Artificial Sequence
  Description of Artificial Sequence: Synthetic oligonucleotide
  Target: LAMA2; (+) strand; PAM type: NNNNGHTT; PAM sequence: CTTAGCTT
caatgttggcctgcattaat

SEQ ID NO: 43697 - DNA, 20 bp, Artificial Sequence
  Description of Artificial Sequence: Synthetic oligonucleotide
  Target: LAMA2; (+) strand; PAM type: NNNNGHTT; PAM sequence: CTCTGTTT
cacagctctacttattcaag

SEQ ID NO: 43698 - DNA, 20 bp, Artificial Sequence
  Description of Artificial Sequence: Synthetic oligonucleotide
  Target: LAMA2; (+) strand; PAM type: NNNNGHTT; PAM sequence: TTAAGCTT
ttcaagctctgtttcggaca

SEQ ID NO: 43699 - DNA, 20 bp, Artificial Sequence
  Description of Artificial Sequence: Synthetic oligonucleotide
  Target: LAMA2; (+) strand; PAM type: NNNNGHTT; PAM sequence: TCGTGTTT
ttttttcatagccataactt

SEQ ID NO: 43700 - DNA, 20 bp, Artificial Sequence
  Description of Artificial Sequence: Synthetic oligonucleotide
  Target: LAMA2; (+) strand; PAM type: NNNNGHTT; PAM sequence: GGAGGTTT
aaaaaaaaatctctataaat

SEQ ID NO: 43701 - DNA, 20 bp, Artificial Sequence
  Description of Artificial Sequence: Synthetic oligonucleotide
  Target: LAMA2; (+) strand; PAM type: NNNNGHTT; PAM sequence: AAGAGCTT
taaatggaggttttttactc

SEQ ID NO: 43702 - DNA, 20 bp, Artificial Sequence
  Description of Artificial Sequence: Synthetic oligonucleotide
  Target: LAMA2; (+) strand; PAM type: NNNNGHTT; PAM sequence: AATAGATT
actatgaattggctcattta

SEQ ID NO: 43703 - DNA, 20 bp, Artificial Sequence
  Description of Artificial Sequence: Synthetic oligonucleotide
  Target: LAMA2; (+) strand; PAM type: NNNNGHTT; PAM sequence: TGGAGATT
gggtctgaacactgttgtca

SEQ ID NO: 43704 - DNA, 20 bp, Artificial Sequence
  Description of Artificial Sequence: Synthetic oligonucleotide
  Target: LAMA2; (+) strand; PAM type: NNNNGHTT; PAM sequence: GGCAGTTT
ttgttgtgtacagtggagat

SEQ ID NO: 43705 - DNA, 20 bp, Artificial Sequence
  Description of Artificial Sequence: Synthetic oligonucleotide
  Target: LAMA2; (+) strand; PAM type: NNNNGHTT; PAM sequence: TGATGCTT
gatggcagttttcttctagt

SEQ ID NO: 43706 - DNA, 20 bp, Artificial Sequence
  Description of Artificial Sequence: Synthetic oligonucleotide
  Target: LAMA2; (+) strand; PAM type: NNNNGHTT; PAM sequence: AAAAGTTT
tgcttctgtagaataaaaaa

SEQ ID NO: 43707 - DNA, 20 bp, Artificial Sequence
  Description of Artificial Sequence: Synthetic oligonucleotide
  Target: LAMA2; (+) strand; PAM type: NNNNGHTT; PAM sequence: TGTGGATT
aatcacttacgtatttaatc

SEQ ID NO: 43708 - DNA, 20 bp, Artificial Sequence
  Description of Artificial Sequence: Synthetic oligonucleotide
  Target: LAMA2; (+) strand; PAM type: NNNNGHTT; PAM sequence: TATTGTTT
gaaaagtgtgggagctgagg

SEQ ID NO: 43709 - DNA, 20 bp, Artificial Sequence
  Description of Artificial Sequence: Synthetic oligonucleotide
  Target: LAMA2; (+) strand; PAM type: NNNNGHTT; PAM sequence: CGTAGTTT
ggcagtgtgactgctccaat

SEQ ID NO: 43710 - DNA, 20 bp, Artificial Sequence
  Description of Artificial Sequence: Synthetic oligonucleotide
  Target: LAMA2; (+) strand; PAM type: NNNNGHTT; PAM sequence: GCAAGATT
tgaggaagagcaccatctgt

SEQ ID NO: 43711 - DNA, 20 bp, Artificial Sequence
  Description of Artificial Sequence: Synthetic oligonucleotide
  Target: LAMA2; (+) strand; PAM type: NNNNGHTT; PAM sequence: CATTGCTT
agttctatgtgctctcaaat

SEQ ID NO: 43712 - DNA, 20 bp, Artificial Sequence
  Description of Artificial Sequence: Synthetic oligonucleotide
  Target: LAMA2; (+) strand; PAM type: NNNNGHTT; PAM sequence: ATAGGTTT
taagctattttttaagacat

SEQ ID NO: 43713 - DNA, 20 bp, Artificial Sequence
  Description of Artificial Sequence: Synthetic oligonucleotide
  Target: LAMA2; (+) strand; PAM type: NNNNGHTT; PAM sequence: CTCTGTTT
tacgcacaagaagactgtct

SEQ ID NO: 43714 - DNA, 20 bp, Artificial Sequence
  Description of Artificial Sequence: Synthetic oligonucleotide
  Target: LAMA2; (+) strand; PAM type: NNNNGHTT; PAM sequence: CAGGGTTT
tttttttttttttgaagaga

SEQ ID NO: 43715 - DNA, 20 bp, Artificial Sequence
  Description of Artificial Sequence: Synthetic oligonucleotide
  Target: LAMA2; (+) strand; PAM type: NNNNGHTT; PAM sequence: CCTGGCTT
cctggacctccagcaattct

SEQ ID NO: 43716 - DNA, 20 bp, Artificial Sequence
  Description of Artificial Sequence: Synthetic oligonucleotide
  Target: LAMA2; (+) strand; PAM type: NNNNGHTT; PAM sequence: CTTGGCTT
acctccagcaattctcctgg

SEQ ID NO: 43717 - DNA, 20 bp, Artificial Sequence
  Description of Artificial Sequence: Synthetic oligonucleotide
  Target: LAMA2; (+) strand; PAM type: NNNNGHTT; PAM sequence: TGAAGTTT
ctaggaacaatgagactttt

SEQ ID NO: 43718 - DNA, 20 bp, Artificial Sequence
  Description of Artificial Sequence: Synthetic oligonucleotide
  Target: LAMA2; (+) strand; PAM type: NNNNGHTT; PAM sequence: TTCCGTTT
atgagactttttgaagtttt

SEQ ID NO: 43719 - DNA, 20 bp, Artificial Sequence
  Description of Artificial Sequence: Synthetic oligonucleotide
  Target: LAMA2; (+) strand; PAM type: NNNNGHTT; PAM sequence: GTCTGCTT
atgaagaagacaagaaaaat

SEQ ID NO: 43720 - DNA, 20 bp, Artificial Sequence
  Description of Artificial Sequence: Synthetic oligonucleotide
  Target: LAMA2; (+) strand; PAM type: NNNNGHTT; PAM sequence: TAAAGATT
gaaggagcaattctcattaa

SEQ ID NO: 43721 - DNA, 20 bp, Artificial Sequence
  Description of Artificial Sequence: Synthetic oligonucleotide
  Target: LAMA2; (+) strand; PAM type: NNNNGHTT; PAM sequence: AAAAGATT
tatgagggaatcaagatctg

SEQ ID NO: 43722 - DNA, 20 bp, Artificial Sequence
  Description of Artificial Sequence: Synthetic oligonucleotide
  Target: LAMA2; (+) strand; PAM type: NNNNGHTT; PAM sequence: TGGAGATT
aattgtgatatactgtctac

SEQ ID NO: 43723 - DNA, 20 bp, Artificial Sequence
  Description of Artificial Sequence: Synthetic oligonucleotide
  Target: LAMA2; (+) strand; PAM type: NNNNGHTT; PAM sequence: GGGGGCTT
aactaatgtgtataatctta

SEQ ID NO: 43724 - DNA, 20 bp, Artificial Sequence
  Description of Artificial Sequence: Synthetic oligonucleotide
  Target: LAMA2; (+) strand; PAM type: NNNNGHTT; PAM sequence: CATGGTTT
ccttaaacaatatgaataga

SEQ ID NO: 43725 - DNA, 20 bp, Artificial Sequence
  Description of Artificial Sequence: Synthetic oligonucleotide
  Target: LAMA2; (+) strand; PAM type: NNNNGHTT; PAM sequence: CCTAGATT
tgcacagttaaggtacccca

SEQ ID NO: 43726 - DNA, 20 bp, Artificial Sequence
  Description of Artificial Sequence: Synthetic oligonucleotide
  Target: LAMA2; (+) strand; PAM type: NNNNGHTT; PAM sequence: TTGGGTTT
taaatgaattaattttggac

SEQ ID NO: 43727 - DNA, 20 bp, Artificial Sequence
  Description of Artificial Sequence: Synthetic oligonucleotide
  Target: LAMA2; (+) strand; PAM type: NNNNGHTT; PAM sequence: CAAAGTTT
aggacttcttatgttcaccc

SEQ ID NO: 43728 - DNA, 20 bp, Artificial Sequence
  Description of Artificial Sequence: Synthetic oligonucleotide
  Target: LAMA2; (+) strand; PAM type: NNNNGHTT; PAM sequence: TTCTGTTT
gatgataggcctgatccatc

SEQ ID NO: 43729 - DNA, 20 bp, Artificial Sequence
  Description of Artificial Sequence: Synthetic oligonucleotide
  Target: LAMA2; (+) strand; PAM type: NNNNGHTT; PAM sequence: AGATGATT
ctggataatttctaaagaaa

SEQ ID NO: 43730 - DNA, 20 bp, Artificial Sequence
  Description of Artificial Sequence: Synthetic oligonucleotide
  Target: LAMA2; (+) strand; PAM type: NNNNGHTT; PAM sequence: CCAGGATT
agtggctcacgcctgtaatc

SEQ ID NO: 43731 - DNA, 20 bp, Artificial Sequence
  Description of Artificial Sequence: Synthetic oligonucleotide
  Target: LAMA2; (+) strand; PAM type: NNNNGHTT; PAM sequence: AGACGATT
aaaaagaagaaagaaagaaa

SEQ ID NO: 43732 - DNA, 20 bp, Artificial Sequence
  Description of Artificial Sequence: Synthetic oligonucleotide
  Target: LAMA2; (+) strand; PAM type: NNNNGHTT; PAM sequence: TCTAGATT
agaaaagacgattaagtggt

SEQ ID NO: 43733 - DNA, 20 bp, Artificial Sequence
  Description of Artificial Sequence: Synthetic oligonucleotide
  Target: LAMA2; (+) strand; PAM type: NNNNGHTT; PAM sequence: GGAAGCTT
ctgcctctggggaggcctca

SEQ ID NO: 43734 - DNA, 20 bp, Artificial Sequence
  Description of Artificial Sequence: Synthetic oligonucleotide
  Target: LAMA2; (+) strand; PAM type: NNNNGHTT; PAM sequence: TGGAGATT
ccaggcccctcccctaacat

SEQ ID NO: 43735 - DNA, 20 bp, Artificial Sequence
  Description of Artificial Sequence: Synthetic oligonucleotide
  Target: LAMA2; (+) strand; PAM type: NNNNGHTT; PAM sequence: ACGAGATT
attggagattacatttcaat

SEQ ID NO: 43736 - DNA, 20 bp, Artificial Sequence
  Description of Artificial Sequence: Synthetic oligonucleotide
  Target: LAMA2; (+) strand; PAM type: NNNNGHTT; PAM sequence: GAAGGTTT
gaaagagtggaggtagctct

SEQ ID NO: 43737 - DNA, 20 bp, Artificial Sequence
  Description of Artificial Sequence: Synthetic oligonucleotide
  Target: LAMA2; (+) strand; PAM type: NNNNGHTT; PAM sequence: AGTTGTTT
aggcgtagacaagatatacc

SEQ ID NO: 43738 - DNA, 20 bp, Artificial Sequence
  Description of Artificial Sequence: Synthetic oligonucleotide
  Target: LAMA2; (+) strand; PAM type: NNNNGHTT; PAM sequence: TTTTGATT
gtgcctcacttgcctaaaca

SEQ ID NO: 43739 - DNA, 20 bp, Artificial Sequence
  Description of Artificial Sequence: Synthetic oligonucleotide
  Target: LAMA2; (+) strand; PAM type: NNNNGHTT; PAM sequence: AGTAGATT
tttgattaaaaatgcatttt

SEQ ID NO: 43740 - DNA, 20 bp, Artificial Sequence
  Description of Artificial Sequence: Synthetic oligonucleotide
  Target: LAMA2; (+) strand; PAM type: NNNNGHTT; PAM sequence: ACCAGCTT
agttgccatcggactcaccc

SEQ ID NO: 43741 - DNA, 20 bp, Artificial Sequence
  Description of Artificial Sequence: Synthetic oligonucleotide
  Target: LAMA2; (+) strand; PAM type: NNNNGHTT; PAM sequence: AGCTGCTT
tacagcaggcagtgaagaac

SEQ ID NO: 43742 - DNA, 20 bp, Artificial Sequence
  Description of Artificial Sequence: Synthetic oligonucleotide
  Target: LAMA2; (+) strand; PAM type: NNNNGHTT; PAM sequence: AAGTGTTT
aggtaccaataactagggat

SEQ ID NO: 43743 - DNA, 20 bp, Artificial Sequence
  Description of Artificial Sequence: Synthetic oligonucleotide
  Target: LAMA2; (+) strand; PAM type: NNNNGHTT; PAM sequence: AATAGCTT
ttaccaagagcagttatttc

SEQ ID NO: 43744 - DNA, 20 bp, Artificial Sequence
  Description of Artificial Sequence: Synthetic oligonucleotide
  Target: LAMA2; (+) strand; PAM type: NNNNGHTT; PAM sequence: ACCAGATT
tcaatagcttgaacttaaat

SEQ ID NO: 43745 - DNA, 20 bp, Artificial Sequence
  Description of Artificial Sequence: Synthetic oligonucleotide
  Target: LAMA2; (+) strand; PAM type: NNNNGHTT; PAM sequence: TAATGTTT
taattttcacagaataaaaa

SEQ ID NO: 43746 - DNA, 20 bp, Artificial Sequence
  Description of Artificial Sequence: Synthetic oligonucleotide
  Target: LAMA2; (+) strand; PAM type: NNNNGHTT; PAM sequence: ATAAGTTT
gaataaaaataatgtttagt

SEQ ID NO: 43747 - DNA, 20 bp, Artificial Sequence
  Description of Artificial Sequence: Synthetic oligonucleotide
  Target: LAMA2; (+) strand; PAM type: NNNNGHTT; PAM sequence: GGTTGCTT
cttggtgacttttaagttgt

SEQ ID NO: 43748 - DNA, 20 bp, Artificial Sequence
  Description of Artificial Sequence: Synthetic oligonucleotide
  Target: LAMA2; (+) strand; PAM type: NNNNGHTT; PAM sequence: CTCTGTTT
ggttgctttttaaatgactt

SEQ ID NO: 43749 - DNA, 20 bp, Artificial Sequence
  Description of Artificial Sequence: Synthetic oligonucleotide
  Target: LAMA2; (+) strand; PAM type: NNNNGHTT; PAM sequence: GGAAGATT
ttcctatcacatttgtggta

SEQ ID NO: 43750 - DNA, 20 bp, Artificial Sequence
  Description of Artificial Sequence: Synthetic oligonucleotide
  Target: LAMA2; (+) strand; PAM type: NNNNGHTT; PAM sequence: TCAAGATT
ggaagattctaagatgaccc

SEQ ID NO: 43751 - DNA, 20 bp, Artificial Sequence
  Description of Artificial Sequence: Synthetic oligonucleotide
  Target: LAMA2; (+) strand; PAM type: NNNNGHTT; PAM sequence: GTGTGATT
atatgatcccctcctgttga

SEQ ID NO: 43752 - DNA, 20 bp, Artificial Sequence
  Description of Artificial Sequence: Synthetic oligonucleotide
  Target: LAMA2; (+) strand; PAM type: NNNNGHTT; PAM sequence: CCATGATT
aatatgatgggacatcattc

SEQ ID NO: 43753 - DNA, 20 bp, Artificial Sequence
  Description of Artificial Sequence: Synthetic oligonucleotide
  Target: LAMA2; (+) strand; PAM type: NNNNGHTT; PAM sequence: ATTAGTTT
gatataactcaggtggctaa

SEQ ID NO: 43754 - DNA, 20 bp, Artificial Sequence
  Description of Artificial Sequence: Synthetic oligonucleotide
  Target: LAMA2; (+) strand; PAM type: NNNNGHTT; PAM sequence: GGAAGATT
tttcttcaagctactcaaaa

SEQ ID NO: 43755 - DNA, 20 bp, Artificial Sequence
  Description of Artificial Sequence: Synthetic oligonucleotide
  Target: LAMA2; (+) strand; PAM type: NNNNGHTT; PAM sequence: GAGAGCTT
aaaagagtgtctagttctca

SEQ ID NO: 43756 - DNA, 20 bp, Artificial Sequence
  Description of Artificial Sequence: Synthetic oligonucleotide
  Target: LAMA2; (+) strand; PAM type: NNNNGHTT; PAM sequence: AGAGGCTT
tgtgagaaggccacacagca

SEQ ID NO: 43757 - DNA, 20 bp, Artificial Sequence
  Description of Artificial Sequence: Synthetic oligonucleotide
  Target: LAMA2; (+) strand; PAM type: NNNNGHTT; PAM sequence: ACTGGATT
ctctagaagctgagagcagc

SEQ ID NO: 43758 - DNA, 20 bp, Artificial Sequence
  Description of Artificial Sequence: Synthetic oligonucleotide
  Target: LAMA2; (+) strand; PAM type: NNNNGHTT; PAM sequence: AACTGATT
agcctctctaggtcgacagg

SEQ ID NO: 43759 - DNA, 20 bp, Artificial Sequence
  Description of Artificial Sequence: Synthetic oligonucleotide
  Target: LAMA2; (+) strand; PAM type: NNNNGHTT; PAM sequence: TGTTGTTT
aggaactgattatcaatgaa

SEQ ID NO: 43760 - DNA, 20 bp, Artificial Sequence
  Description of Artificial Sequence: Synthetic oligonucleotide
  Target: LAMA2; (+) strand; PAM type: NNNNGHTT; PAM sequence: CTACGTTT
atgaatgttgttttaagtca

SEQ ID NO: 43761 - DNA, 20 bp, Artificial Sequence
  Description of Artificial Sequence: Synthetic oligonucleotide
  Target: LAMA2; (+) strand; PAM type: NNNNGHTT; PAM sequence: AAAAGATT
cagtaataaaaaccaaatac

SEQ ID NO: 43762 - DNA, 20 bp, Artificial Sequence
  Description of Artificial Sequence: Synthetic oligonucleotide
  Target: LAMA2; (+) strand; PAM type: NNNNGHTT; PAM sequence: CATAGTTT
acacctaacctactgaacat

SEQ ID NO: 43763 - DNA, 20 bp, Artificial Sequence
  Description of Artificial Sequence: Synthetic oligonucleotide
  Target: LAMA2; (+) strand; PAM type: NNNNGHTT; PAM sequence: CTCAGCTT
acatgtggtggactgggatc

SEQ ID NO: 43764 - DNA, 20 bp, Artificial Sequence
  Description of Artificial Sequence: Synthetic oligonucleotide
  Target: LAMA2; (+) strand; PAM type: NNNNGHTT; PAM sequence: ATGTGCTT
gcccagcatcacagagagaa

SEQ ID NO: 43765 - DNA, 20 bp, Artificial Sequence
  Description of Artificial Sequence: Synthetic oligonucleotide
  Target: LAMA2; (+) strand; PAM type: NNNNGHTT; PAM sequence: GTATGATT
atcaaaattcaaaatttgaa

SEQ ID NO: 43766 - DNA, 20 bp, Artificial Sequence
  Description of Artificial Sequence: Synthetic oligonucleotide
  Target: LAMA2; (+) strand; PAM type: NNNNGHTT; PAM sequence: TATTGCTT
tatgatttatattgactatg

SEQ ID NO: 43767 - DNA, 20 bp, Artificial Sequence
  Description of Artificial Sequence: Synthetic oligonucleotide
  Target: LAMA2; (+) strand; PAM type: NNNNGHTT; PAM sequence: TCTTGATT
ctatttatatagtcaatact

SEQ ID NO: 43768 - DNA, 20 bp, Artificial Sequence
  Description of Artificial Sequence: Synthetic oligonucleotide
  Target: LAMA2; (+) strand; PAM type: NNNNGHTT; PAM sequence: AAAGGATT
tcaatacttcttgatttgaa

SEQ ID NO: 43769 - DNA, 20 bp, Artificial Sequence
  Description of Artificial Sequence: Synthetic oligonucleotide
  Target: LAMA2; (+) strand; PAM type: NNNNGHTT; PAM sequence: AAAAGTTT
attggatgataatagaagtg

SEQ ID NO: 43770 - DNA, 20 bp, Artificial Sequence
  Description of Artificial Sequence: Synthetic oligonucleotide
  Target: LAMA2; (+) strand; PAM type: NNNNGHTT; PAM sequence: GAATGATT
ataatagaagtgaaaagttt

SEQ ID NO: 43771 - DNA, 20 bp, Artificial Sequence
  Description of Artificial Sequence: Synthetic oligonucleotide
  Target: LAMA2; (+) strand; PAM type: NNNNGHTT; PAM sequence: GAAAGTTT
ttctaaggttgtaaattgct

SEQ ID NO: 43772 - DNA, 20 bp, Artificial Sequence
  Description of Artificial Sequence: Synthetic oligonucleotide
  Target: LAMA2; (+) strand; PAM type: NNNNGHTT; PAM sequence: TTAGGTTT
ggttgtaaattgctgaaagt

SEQ ID NO: 43773 - DNA, 20 bp, Artificial Sequence
  Description of Artificial Sequence: Synthetic oligonucleotide
  Target: LAMA2; (+) strand; PAM type: NNNNGHTT; PAM sequence: TGATGATT
gaaagtttaggttttcttat

SEQ ID NO: 43774 - DNA, 20 bp, Artificial Sequence
  Description of Artificial Sequence: Synthetic oligonucleotide
  Target: LAMA2; (+) strand; PAM type: NNNNGHTT; PAM sequence: TGTAGCTT
ttaacttagtggtctgcact

SEQ ID NO: 43775 - DNA, 20 bp, Artificial Sequence
  Description of Artificial Sequence: Synthetic oligonucleotide
  Target: LAMA2; (+) strand; PAM type: NNNNGHTT; PAM sequence: AATTGTTT
gtctgcacttgtagcttgtt

SEQ ID NO: 43776 - DNA, 20 bp, Artificial Sequence
  Description of Artificial Sequence: Synthetic oligonucleotide
  Target: LAMA2; (+) strand; PAM type: NNNNGHTT; PAM sequence: GATAGCTT
aagtaaagtgttatatcaca

SEQ ID NO: 43777 - DNA, 20 bp, Artificial Sequence
  Description of Artificial Sequence: Synthetic oligonucleotide
  Target: LAMA2; (+) strand; PAM type: NNNNGHTT; PAM sequence: CCCTGTTT
ttctaattgcaaacacatca

SEQ ID NO: 43778 - DNA, 20 bp, Artificial Sequence
  Description of Artificial Sequence: Synthetic oligonucleotide
  Target: LAMA2; (+) strand; PAM type: NNNNGHTT; PAM sequence: CCAGGTTT
ctgctgaagtattttaacta

SEQ ID NO: 43779 - DNA, 20 bp, Artificial Sequence
  Description of Artificial Sequence: Synthetic oligonucleotide
  Target: LAMA2; (+) strand; PAM type: NNNNGHTT; PAM sequence: TTATGCTT
aggtttgcacgttgacttct

SEQ ID NO: 43780 - DNA, 20 bp, Artificial Sequence
  Description of Artificial Sequence: Synthetic oligonucleotide
  Target: LAMA2; (+) strand; PAM type: NNNNGHTT; PAM sequence: TTTGGATT
gttgacttctttatgcttca

SEQ ID NO: 43781 - DNA, 20 bp, Artificial Sequence
  Description of Artificial Sequence: Synthetic oligonucleotide
  Target: LAMA2; (+) strand; PAM type: NNNNGHTT; PAM sequence: TGAGGCTT
tatgcttcatttggattttc

SEQ ID NO: 43782 - DNA, 20 bp, Artificial Sequence
  Description of Artificial Sequence: Synthetic oligonucleotide
  Target: LAMA2; (+) strand; PAM type: NNNNGHTT; PAM sequence: TAACGTTT
atttggattttctgaggctt

SEQ ID NO: 43783 - DNA, 20 bp, Artificial Sequence
  Description of Artificial Sequence: Synthetic oligonucleotide
  Target: LAMA2; (+) strand; PAM type: NNNNGHTT; PAM sequence: TTCCGTTT
ttttctgaggctttaacgtt

SEQ ID NO: 43784 - DNA, 20 bp, Artificial Sequence
  Description of Artificial Sequence: Synthetic oligonucleotide
  Target: LAMA2; (+) strand; PAM type: NNNNGHTT; PAM sequence: TTATGTTT
tcatgaaaattaattgctat

SEQ ID NO: 43785 - DNA, 20 bp, Artificial Sequence
  Description of Artificial Sequence: Synthetic oligonucleotide
  Target: LAMA2; (+) strand; PAM type: NNNNGHTT; PAM sequence: AAGTGCTT
tgaaatctaatgacactgaa

SEQ ID NO: 43786 - DNA, 20 bp, Artificial Sequence
  Description of Artificial Sequence: Synthetic oligonucleotide
  Target: LAMA2; (+) strand; PAM type: NNNNGHTT; PAM sequence: ACAAGTTT
gtaattcaatcatgaggtta

SEQ ID NO: 43787 - DNA, 20 bp, Artificial Sequence
  Description of Artificial Sequence: Synthetic oligonucleotide
  Target: LAMA2; (+) strand; PAM type: NNNNGHTT; PAM sequence: ATGAGATT
gttaacaagttttatctcag

SEQ ID NO: 43788 - DNA, 20 bp, Artificial Sequence
  Description of Artificial Sequence: Synthetic oligonucleotide
  Target: LAMA2; (+) strand; PAM type: NNNNGHTT; PAM sequence: GTGTGATT
tttatctcagatgagattgt

SEQ ID NO: 43789 - DNA, 20 bp, Artificial Sequence
  Description of Artificial Sequence: Synthetic oligonucleotide
  Target: LAMA2; (+) strand; PAM type: NNNNGHTT; PAM sequence: CATGGATT
acattattgaaaaagaagag

SEQ ID NO: 43790 - DNA, 20 bp, Artificial Sequence
  Description of Artificial Sequence: Synthetic oligonucleotide
  Target: LAMA2; (+) strand; PAM type: NNNNGHTT; PAM sequence: TTTGGTTT
ctgtggctgttacatatttt

SEQ ID NO: 43791 - DNA, 20 bp, Artificial Sequence
  Description of Artificial Sequence: Synthetic oligonucleotide
  Target: LAMA2; (+) strand; PAM type: NNNNGHTT; PAM sequence: TAGAGATT
gttaagaaggcaaagaggga

SEQ ID NO: 43792 - DNA, 20 bp, Artificial Sequence
  Description of Artificial Sequence: Synthetic oligonucleotide
  Target: LAMA2; (+) strand; PAM type: NNNNGHTT; PAM sequence: AGAGGCTT
agttacagtgttataaaggg

SEQ ID NO: 43793 - DNA, 20 bp, Artificial Sequence
  Description of Artificial Sequence: Synthetic oligonucleotide
  Target: LAMA2; (+) strand; PAM type: NNNNGHTT; PAM sequence: CAAGGTTT
ggagacgataaatagctcag

SEQ ID NO: 43794 - DNA, 20 bp, Artificial Sequence
  Description of Artificial Sequence: Synthetic oligonucleotide
  Target: LAMA2; (+) strand; PAM type: NNNNGHTT; PAM sequence: CTCAGATT
ttttagggaagcagaaatga

SEQ ID NO: 43795 - DNA, 20 bp, Artificial Sequence
  Description of Artificial Sequence: Synthetic oligonucleotide
  Target: LAMA2; (+) strand; PAM type: NNNNGHTT; PAM sequence: ACTTGATT
gcaaagcaggtaacaagagg

SEQ ID NO: 43796 - DNA, 20 bp, Artificial Sequence
  Description of Artificial Sequence: Synthetic oligonucleotide
  Target: LAMA2; (+) strand; PAM type: NNNNGHTT; PAM sequence: AACAGATT
ggacttgattccagactgtg

SEQ ID NO: 43797 - DNA, 20 bp, Artificial Sequence
  Description of Artificial Sequence: Synthetic oligonucleotide
  Target: LAMA2; (+) strand; PAM type: NNNNGHTT; PAM sequence: AGAGGCTT
atattatactggtcctgtga

SEQ ID NO: 43798 - DNA, 20 bp, Artificial Sequence
  Description of Artificial Sequence: Synthetic oligonucleotide
  Target: LAMA2; (+) strand; PAM type: NNNNGHTT; PAM sequence: CCCAGTTT
gtgaagaggcttagtcactt

SEQ ID NO: 43799 - DNA, 20 bp, Artificial Sequence
  Description of Artificial Sequence: Synthetic oligonucleotide
  Target: LAMA2; (+) strand; PAM type: NNNNGHTT; PAM sequence: TCAAGATT
cacttcccagtttatgtatt

SEQ ID NO: 43800 - DNA, 20 bp, Artificial Sequence
  Description of Artificial Sequence: Synthetic oligonucleotide
  Target: LAMA2; (+) strand; PAM type: NNNNGHTT; PAM sequence: AGAAGTTT
agattatattcctaaaacac

SEQ ID NO: 43801 - DNA, 20 bp, Artificial Sequence
  Description of Artificial Sequence: Synthetic oligonucleotide
  Target: LAMA2; (+) strand; PAM type: NNNNGHTT; PAM sequence: TTCAGTTT
ttcctaaaacacagaagttt

SEQ ID NO: 43802 - DNA, 20 bp, Artificial Sequence
  Description of Artificial Sequence: Synthetic oligonucleotide
  Target: LAMA2; (+) strand; PAM type: NNNNGHTT; PAM sequence: ACCTGTTT
ccctaacctgaccccagtct

SEQ ID NO: 43803 - DNA, 20 bp, Artificial Sequence
  Description of Artificial Sequence: Synthetic oligonucleotide
  Target: LAMA2; (+) strand; PAM type: NNNNGHTT; PAM sequence: CTATGCTT
agccacacaaaaaacacaca

SEQ ID NO: 43804 - DNA, 20 bp, Artificial Sequence
  Description of Artificial Sequence: Synthetic oligonucleotide
  Target: LAMA2; (+) strand; PAM type: NNNNGHTT; PAM sequence: ATGTGATT
gaaattaggacatttgggaa

SEQ ID NO: 43805 - DNA, 20 bp, Artificial Sequence
  Description of Artificial Sequence: Synthetic oligonucleotide
  Target: LAMA2; (+) strand; PAM type: NNNNGHTT; PAM sequence: ATATGATT
acatttgggaaatgtgattg

SEQ ID NO: 43806 - DNA, 20 bp, Artificial Sequence
  Description of Artificial Sequence: Synthetic oligonucleotide
  Target: LAMA2; (+) strand; PAM type: NNNNGHTT; PAM sequence: GCATGTTT
aaatgtgattgatatgattt

SEQ ID NO: 43807 - DNA, 20 bp, Artificial Sequence
  Description of Artificial Sequence: Synthetic oligonucleotide
  Target: LAMA2; (+) strand; PAM type: NNNNGHTT; PAM sequence: AGGTGATT
tggacgtggggactggtggg

SEQ ID NO: 43808 - DNA, 20 bp, Artificial Sequence
  Description of Artificial Sequence: Synthetic oligonucleotide
  Target: LAMA2; (+) strand; PAM type: NNNNGHTT; PAM sequence: GGTTGTTT
ccttagttcccatgagatct

SEQ ID NO: 43809 - DNA, 20 bp, Artificial Sequence
  Description of Artificial Sequence: Synthetic oligonucleotide
  Target: LAMA2; (+) strand; PAM type: NNNNGHTT; PAM sequence: TCCAGCTT
cctccatgtgacatgtgtgc

SEQ ID NO: 43810 - DNA, 20 bp, Artificial Sequence
  Description of Artificial Sequence: Synthetic oligonucleotide
  Target: LAMA2; (+) strand; PAM type: NNNNGHTT; PAM sequence: GGAAGCTT
ctttatcttctgccatgact

SEQ ID NO: 43811 - DNA, 20 bp, Artificial Sequence
  Description of Artificial Sequence: Synthetic oligonucleotide
  Target: LAMA2; (+) strand; PAM type: NNNNGHTT; PAM sequence: AGATGTTT
tttataaattacccagcctc

SEQ ID NO: 43812 - DNA, 20 bp, Artificial Sequence
  Description of Artificial Sequence: Synthetic oligonucleotide
  Target: LAMA2; (+) strand; PAM type: NNNNGHTT; PAM sequence: AATGGCTT
ttcttaaaagcagtgcaaaa

SEQ ID NO: 43813 - DNA, 20 bp, Artificial Sequence
  Description of Artificial Sequence: Synthetic oligonucleotide
  Target: LAMA2; (+) strand; PAM type: NNNNGHTT; PAM sequence: TTAAGCTT
aatatttttatgagtaataa

SEQ ID NO: 43814 - DNA, 20 bp, Artificial Sequence
  Description of Artificial Sequence: Synthetic oligonucleotide
  Target: LAMA2; (+) strand; PAM type: NNNNGHTT; PAM sequence: TGCAGATT
gttcccaatctgatattagg

SEQ ID NO: 43815 - DNA, 20 bp, Artificial Sequence
  Description of Artificial Sequence: Synthetic oligonucleotide
  Target: LAMA2; (+) strand; PAM type: NNNNGHTT; PAM sequence: AAATGTTT
aaataaatatcaaaatgtgg

SEQ ID NO: 43816 - DNA, 20 bp, Artificial Sequence
  Description of Artificial Sequence: Synthetic oligonucleotide
  Target: LAMA2; (+) strand; PAM type: NNNNGHTT; PAM sequence: GAATGTTT
ggagagaagggaaggaagga

SEQ ID NO: 43817 - DNA, 20 bp, Artificial Sequence
  Description of Artificial Sequence: Synthetic oligonucleotide
  Target: LAMA2; (+) strand; PAM type: NNNNGHTT; PAM sequence: ATGAGCTT
ggaaggaaggagaatgtttg

SEQ ID NO: 43818 - DNA, 20 bp, Artificial Sequence
  Description of Artificial Sequence: Synthetic oligonucleotide
  Target: LAMA2; (+) strand; PAM type: NNNNGHTT; PAM sequence: ATGGGATT
gcaactgagtgtgaatttag

SEQ ID NO: 43819 - DNA, 20 bp, Artificial Sequence
  Description of Artificial Sequence: Synthetic oligonucleotide
  Target: LAMA2; (+) strand; PAM type: NNNNGHTT; PAM sequence: CAGTGATT
gaagaaaaaacagatacatt

SEQ ID NO: 43820 - DNA, 20 bp, Artificial Sequence
  Description of Artificial Sequence: Synthetic oligonucleotide
  Target: LAMA2; (+) strand; PAM type: NNNNGHTT; PAM sequence: TTCTGTTT
tttaaaaatggggtaattct

SEQ ID NO: 43821 - DNA, 20 bp, Artificial Sequence
  Description of Artificial Sequence: Synthetic oligonucleotide
  Target: LAMA2; (+) strand; PAM type: NNNNGHTT; PAM sequence: TAGAGTTT
aagtcttttgtaacttattt

SEQ ID NO: 43822 - DNA, 20 bp, Artificial Sequence
  Description of Artificial Sequence: Synthetic oligonucleotide
  Target: LAMA2; (+) strand; PAM type: NNNNGHTT; PAM sequence: ACCAGTTT
ccaccaagtgttaaagatga

SEQ ID NO: 43823 - DNA, 20 bp, Artificial Sequence
  Description of Artificial Sequence: Synthetic oligonucleotide
  Target: LAMA2; (+) strand; PAM type: NNNNGHTT; PAM sequence: AGACGATT
aaccagttttaattttaact

SEQ ID NO: 43824 - DNA, 20 bp, Artificial Sequence
  Description of Artificial Sequence: Synthetic oligonucleotide
  Target: LAMA2; (+) strand; PAM type: NNNNGHTT; PAM sequence: TTTTGATT
tttttattacttctaaaata

SEQ ID NO: 43825 - DNA, 20 bp, Artificial Sequence
  Description of Artificial Sequence: Synthetic oligonucleotide
  Target: LAMA2; (+) strand; PAM type: NNNNGHTT; PAM sequence: TATTGTTT
tactaaaaatttaagtcaaa

SEQ ID NO: 43826 - DNA, 20 bp, Artificial Sequence
  Description of Artificial Sequence: Synthetic oligonucleotide
  Target: LAMA2; (+) strand; PAM type: NNNNGHTT; PAM sequence: GTGAGCTT
taaatctgagataacatgat

SEQ ID NO: 43827 - DNA, 20 bp, Artificial Sequence
  Description of Artificial Sequence: Synthetic oligonucleotide
  Target: LAMA2; (+) strand; PAM type: NNNNGHTT; PAM sequence: AGAAGCTT
gtgtgcaactgcaggtgggg

SEQ ID NO: 43828 - DNA, 20 bp, Artificial Sequence
  Description of Artificial Sequence: Synthetic oligonucleotide
  Target: LAMA2; (+) strand; PAM type: NNNNGHTT; PAM sequence: TTGGGTTT
actgcaggtggggagaagct

SEQ ID NO: 43829 - DNA, 20 bp, Artificial Sequence
  Description of Artificial Sequence: Synthetic oligonucleotide
  Target: LAMA2; (+) strand; PAM type: NNNNGHTT; PAM sequence: CACTGATT
caaagcagaagggtaaaggg

SEQ ID NO: 43830 - DNA, 20 bp, Artificial Sequence
  Description of Artificial Sequence: Synthetic oligonucleotide
  Target: LAMA2; (+) strand; PAM type: NNNNGHTT; PAM sequence: AGTAGCTT
ataaagagtcaacatctggg

SEQ ID NO: 43831 - DNA, 20 bp, Artificial Sequence
  Description of Artificial Sequence: Synthetic oligonucleotide
  Target: LAMA2; (+) strand; PAM type: NNNNGHTT; PAM sequence: CCAGGATT
ttaggtgggttccacatggc

SEQ ID NO: 43832 - DNA, 20 bp, Artificial Sequence
  Description of Artificial Sequence: Synthetic oligonucleotide
  Target: LAMA2; (+) strand; PAM type: NNNNGHTT; PAM sequence: AGCTGTTT
acctctttctctcccttctt

SEQ ID NO: 43833 - DNA, 20 bp, Artificial Sequence
  Description of Artificial Sequence: Synthetic oligonucleotide
  Target: LAMA2; (+) strand; PAM type: NNNNGHTT; PAM sequence: CTCTGTTT
agttatgtcacctctcatgc

SEQ ID NO: 43834 - DNA, 20 bp, Artificial Sequence
  Description of Artificial Sequence: Synthetic oligonucleotide
  Target: LAMA2; (+) strand; PAM type: NNNNGHTT; PAM sequence: TGAGGATT
taaggtaataataagtattg

SEQ ID NO: 43835 - DNA, 20 bp, Artificial Sequence
  Description of Artificial Sequence: Synthetic oligonucleotide
  Target: LAMA2; (+) strand; PAM type: NNNNGHTT; PAM sequence: ATATGTTT
cacacatatataatctgcac

SEQ ID NO: 43836 - DNA, 20 bp, Artificial Sequence
  Description of Artificial Sequence: Synthetic oligonucleotide
  Target: LAMA2; (+) strand; PAM type: NNNNGHTT; PAM sequence: AGGTGCTT
catgtatacatatacatgta

SEQ ID NO: 43837 - DNA, 20 bp, Artificial Sequence
  Description of Artificial Sequence: Synthetic oligonucleotide
  Target: LAMA2; (+) strand; PAM type: NNNNGHTT; PAM sequence: TTTGGTTT
atcaacattaactattatta

SEQ ID NO: 43838 - DNA, 20 bp, Artificial Sequence
  Description of Artificial Sequence: Synthetic oligonucleotide
  Target: LAMA2; (+) strand; PAM type: NNNNGHTT; PAM sequence: ATGTGATT
agcaaattctttcaacaata

SEQ ID NO: 43839 - DNA, 20 bp, Artificial Sequence
  Description of Artificial Sequence: Synthetic oligonucleotide
  Target: LAMA2; (+) strand; PAM type: NNNNGHTT; PAM sequence: GTGAGATT
atgtgattgtatttgtctgt

SEQ ID NO: 43840 - DNA, 20 bp, Artificial Sequence
  Description of Artificial Sequence: Synthetic oligonucleotide
  Target: LAMA2; (+) strand; PAM type: NNNNGHTT; PAM sequence: AGTAGTTT
aggcagatatgaatttgaaa

SEQ ID NO: 43841 - DNA, 20 bp, Artificial Sequence
  Description of Artificial Sequence: Synthetic oligonucleotide
  Target: LAMA2; (+) strand; PAM type: NNNNGHTT; PAM sequence: AGCCGTTT
aaagtagttttccctccact

SEQ ID NO: 43842 - DNA, 20 bp, Artificial Sequence
  Description of Artificial Sequence: Synthetic oligonucleotide
  Target: LAMA2; (+) strand; PAM type: NNNNGHTT; PAM sequence: TAGGGATT
attttttattattaaaaaaa

SEQ ID NO: 43843 - DNA, 20 bp, Artificial Sequence
  Description of Artificial Sequence: Synthetic oligonucleotide
  Target: LAMA2; (+) strand; PAM type: NNNNGHTT; PAM sequence: GTAAGATT
aaaatagggattttttcttt

SEQ ID NO: 43844 - DNA, 20 bp, Artificial Sequence
  Description of Artificial Sequence: Synthetic oligonucleotide
  Target: LAMA2; (+) strand; PAM type: NNNNGHTT; PAM sequence: AGAGGATT
tttctttgtaagatttttca

SEQ ID NO: 43845 - DNA, 20 bp, Artificial Sequence
  Description of Artificial Sequence: Synthetic oligonucleotide
  Target: LAMA2; (+) strand; PAM type: NNNNGHTT; PAM sequence: TGTAGCTT
atcaagccagtccactgaac

SEQ ID NO: 43846 - DNA, 20 bp, Artificial Sequence
  Description of Artificial Sequence: Synthetic oligonucleotide
  Target: LAMA2; (+) strand; PAM type: NNNNGHTT; PAM sequence: AAAAGCTT
taattctcctttaaagaggc

SEQ ID NO: 43847 - DNA, 20 bp, Artificial Sequence
  Description of Artificial Sequence: Synthetic oligonucleotide
  Target: LAMA2; (+) strand; PAM type: NNNNGHTT; PAM sequence: TGTTGTTT
aactcagcatgtcacagaaa

SEQ ID NO: 43848 - DNA, 20 bp, Artificial Sequence
  Description of Artificial Sequence: Synthetic oligonucleotide
  Target: LAMA2; (+) strand; PAM type: NNNNGHTT; PAM sequence: TTTTGTTT
ttgtttatccactttggcta

SEQ ID NO: 43849 - DNA, 20 bp, Artificial Sequence
  Description of Artificial Sequence: Synthetic oligonucleotide
  Target: LAMA2; (+) strand; PAM type: NNNNGHTT; PAM sequence: GGAGGCTT
gtggtaatcacagcactttg

SEQ ID NO: 43850 - DNA, 20 bp, Artificial Sequence
  Description of Artificial Sequence: Synthetic oligonucleotide
  Target: LAMA2; (+) strand; PAM type: NNNNGHTT; PAM sequence: GATCGCTT
ttgggaggcttgtgcaggag

SEQ ID NO: 43851 - DNA, 20 bp, Artificial Sequence
  Description of Artificial Sequence: Synthetic oligonucleotide
  Target: LAMA2; (+) strand; PAM type: NNNNGHTT; PAM sequence: AATTGCTT
tcgagaggctgaggtgggag

SEQ ID NO: 43852 - DNA, 20 bp, Artificial Sequence
  Description of Artificial Sequence: Synthetic oligonucleotide
  Target: LAMA2; (+) strand; PAM type: NNNNGHTT; PAM sequence: AGGAGTTT
tgggagaattgcttgagtcc

SEQ ID NO: 43853 - DNA, 20 bp, Artificial Sequence
  Description of Artificial Sequence: Synthetic oligonucleotide
  Target: LAMA2; (+) strand; PAM type: NNNNGHTT; PAM sequence: TAGTGCTT
gaaaattcagttaagtggtc

SEQ ID NO: 43854 - DNA, 20 bp, Artificial Sequence
  Description of Artificial Sequence: Synthetic oligonucleotide
  Target: LAMA2; (+) strand; PAM type: NNNNGHTT; PAM sequence: AACTGCTT
agcagctaccataaataaga

SEQ ID NO: 43855 - DNA, 20 bp, Artificial Sequence
  Description of Artificial Sequence: Synthetic oligonucleotide
  Target: LAMA2; (+) strand; PAM type: NNNNGHTT; PAM sequence: TCTAGTTT
ataatttcagccctcaagga

SEQ ID NO: 43856 - DNA, 20 bp, Artificial Sequence
  Description of Artificial Sequence: Synthetic oligonucleotide
  Target: LAMA2; (+) strand; PAM type: NNNNGHTT; PAM sequence: TAAAGCTT
ttcttgaattcaaaaaaaat

SEQ ID NO: 43857 - DNA, 20 bp, Artificial Sequence
  Description of Artificial Sequence: Synthetic oligonucleotide
  Target: LAMA2; (+) strand; PAM type: NNNNGHTT; PAM sequence: GCTTGATT
tgaattcaaaaaaaattaaa

SEQ ID NO: 43858 - DNA, 20 bp, Artificial Sequence
  Description of Artificial Sequence: Synthetic oligonucleotide
  Target: LAMA2; (+) strand; PAM type: NNNNGHTT; PAM sequence: AGATGTTT
caatttcatctatatttagg

SEQ ID NO: 43859 - DNA, 20 bp, Artificial Sequence
  Description of Artificial Sequence: Synthetic oligonucleotide
  Target: LAMA2; (+) strand; PAM type: NNNNGHTT; PAM sequence: GTTGGATT
gtgataatattattaacact

SEQ ID NO: 43860 - DNA, 20 bp, Artificial Sequence
  Description of Artificial Sequence: Synthetic oligonucleotide
  Target: LAMA2; (+) strand; PAM type: NNNNGHTT; PAM sequence: TTTTGCTT
gaattttatagaataggtca

SEQ ID NO: 43861 - DNA, 20 bp, Artificial Sequence
  Description of Artificial Sequence: Synthetic oligonucleotide
  Target: LAMA2; (+) strand; PAM type: NNNNGHTT; PAM sequence: CTAAGCTT
aggactctcccctctctctt

SEQ ID NO: 43862 - DNA, 20 bp, Artificial Sequence
  Description of Artificial Sequence: Synthetic oligonucleotide
  Target: LAMA2; (+) strand; PAM type: NNNNGHTT; PAM sequence: TAGGGTTT
tttgttgtctttattttcac

SEQ ID NO: 43863 - DNA, 20 bp, Artificial Sequence
  Description of Artificial Sequence: Synthetic oligonucleotide
  Target: LAMA2; (+) strand; PAM type: NNNNGHTT; PAM sequence: ACAGGTTT
taaaatggctactagtagct

SEQ ID NO: 43864 - DNA, 20 bp, Artificial Sequence
  Description of Artificial Sequence: Synthetic oligonucleotide
  Target: LAMA2; (+) strand; PAM type: NNNNGHTT; PAM sequence: AGCAGTTT
aggtttaggacctggtcctt

SEQ ID NO: 43865 - DNA, 20 bp, Artificial Sequence
  Description of Artificial Sequence: Synthetic oligonucleotide
  Target: LAMA2; (+) strand; PAM type: NNNNGHTT; PAM sequence: GGCAGCTT
ccaaccatgtaggaacacag

SEQ ID NO: 43866 - DNA, 20 bp, Artificial Sequence
  Description of Artificial Sequence: Synthetic oligonucleotide
  Target: LAMA2; (+) strand; PAM type: NNNNGHTT; PAM sequence: CCATGCTT
atgacaactggaattgaagt

SEQ ID NO: 43867 - DNA, 20 bp, Artificial Sequence
  Description of Artificial Sequence: Synthetic oligonucleotide
  Target: LAMA2; (+) strand; PAM type: NNNNGHTT; PAM sequence: ACCTGTTT
attgagtacctttcaattga

SEQ ID NO: 43868 - DNA, 20 bp, Artificial Sequence
  Description of Artificial Sequence: Synthetic oligonucleotide
  Target: LAMA2; (+) strand; PAM type: NNNNGHTT; PAM sequence: TCTTGATT
ttttgtgtgaaaaactatct

SEQ ID NO: 43869 - DNA, 20 bp, Artificial Sequence
  Description of Artificial Sequence: Synthetic oligonucleotide
  Target: LAMA2; (+) strand; PAM type: NNNNGHTT; PAM sequence: ATTAGCTT
cattttctgctcacaaaaaa

SEQ ID NO: 43870 - DNA, 20 bp, Artificial Sequence
  Description of Artificial Sequence: Synthetic oligonucleotide
  Target: LAMA2; (+) strand; PAM type: NNNNGHTT; PAM sequence: CATAGTTT
cagtctttaaggaagaaaaa

SEQ ID NO: 43871 - DNA, 20 bp, Artificial Sequence
  Description of Artificial Sequence: Synthetic oligonucleotide
  Target: LAMA2; (+) strand; PAM type: NNNNGHTT; PAM sequence: CCTGGATT
ccctttactatgtaatgtct

SEQ ID NO: 43872 - DNA, 20 bp, Artificial Sequence
  Description of Artificial Sequence: Synthetic oligonucleotide
  Target: LAMA2; (+) strand; PAM type: NNNNGHTT; PAM sequence: GTCTGCTT
aataattggtgggctgtgtg

SEQ ID NO: 43873 - DNA, 20 bp, Artificial Sequence
  Description of Artificial Sequence: Synthetic oligonucleotide
  Target: LAMA2; (+) strand; PAM type: NNNNGHTT; PAM sequence: AAATGTTT
gtatgtatatttgtgcattt

SEQ ID NO: 43874 - DNA, 20 bp, Artificial Sequence
  Description of Artificial Sequence: Synthetic oligonucleotide
  Target: LAMA2; (+) strand; PAM type: NNNNGHTT; PAM sequence: TGGTGTTT
tatgtctatatatatatgta

SEQ ID NO: 43875 - DNA, 20 bp, Artificial Sequence
  Description of Artificial Sequence: Synthetic oligonucleotide
  Target: LAMA2; (+) strand; PAM type: NNNNGHTT; PAM sequence: GTTAGCTT
agaagagaaaaaagaatgac

SEQ ID NO: 43876 - DNA, 20 bp, Artificial Sequence
  Description of Artificial Sequence: Synthetic oligonucleotide
  Target: LAMA2; (+) strand; PAM type: NNNNGHTT; PAM sequence: ACTAGTTT
attataataaaattgtgttg

SEQ ID NO: 43877 - DNA, 20 bp, Artificial Sequence
  Description of Artificial Sequence: Synthetic oligonucleotide
  Target: LAMA2; (+) strand; PAM type: NNNNGHTT; PAM sequence: TGCGGTTT
taaaaggacaatttttggtg

SEQ ID NO: 43878 - DNA, 20 bp, Artificial Sequence
  Description of Artificial Sequence: Synthetic oligonucleotide
  Target: LAMA2; (+) strand; PAM type: NNNNGHTT; PAM sequence: GGTAGTTT
tgagggcaattttaaaagaa

SEQ ID NO: 43879 - DNA, 20 bp, Artificial Sequence
  Description of Artificial Sequence: Synthetic oligonucleotide
  Target: LAMA2; (+) strand; PAM type: NNNNGHTT; PAM sequence: AGGTGTTT
ttaaaagaaggtagtttctc

SEQ ID NO: 43880 - DNA, 20 bp, Artificial Sequence
  Description of Artificial Sequence: Synthetic oligonucleotide
  Target: LAMA2; (+) strand; PAM type: NNNNGHTT; PAM sequence: AAAAGTTT
ctaatttttcttaatcttca

SEQ ID NO: 43881 - DNA, 20 bp, Artificial Sequence
  Description of Artificial Sequence: Synthetic oligonucleotide
  Target: LAMA2; (+) strand; PAM type: NNNNGHTT; PAM sequence: TGCAGATT
ttagggatcaaattgtatcc

SEQ ID NO: 43882 - DNA, 20 bp, Artificial Sequence
  Description of Artificial Sequence: Synthetic oligonucleotide
  Target: LAMA2; (+) strand; PAM type: NNNNGHTT; PAM sequence: TCAAGATT
agttctacagagaagttagg

SEQ ID NO: 43883 - DNA, 20 bp, Artificial Sequence
  Description of Artificial Sequence: Synthetic oligonucleotide
  Target: LAMA2; (+) strand; PAM type: NNNNGHTT; PAM sequence: GATTGTTT
ctacagagaagttaggtcaa

SEQ ID NO: 43884 - DNA, 20 bp, Artificial Sequence
  Description of Artificial Sequence: Synthetic oligonucleotide
  Target: LAMA2; (+) strand; PAM type: NNNNGHTT; PAM sequence: AGTGGATT
agaaacttgtctcttcgacc

SEQ ID NO: 43885 - DNA, 20 bp, Artificial Sequence
  Description of Artificial Sequence: Synthetic oligonucleotide
  Target: LAMA2; (+) strand; PAM type: NNNNGHTT; PAM sequence: ATTAGATT
aggaaggaacatcatggagc

SEQ ID NO: 43886 - DNA, 20 bp, Artificial Sequence
  Description of Artificial Sequence: Synthetic oligonucleotide
  Target: LAMA2; (+) strand; PAM type: NNNNGHTT; PAM sequence: ATTTGTTT
gtatgaatatttaaattaga

SEQ ID NO: 43887 - DNA, 20 bp, Artificial Sequence
  Description of Artificial Sequence: Synthetic oligonucleotide
  Target: LAMA2; (+) strand; PAM type: NNNNGHTT; PAM sequence: ATGAGATT
attctttgtgtcttaggaaa

SEQ ID NO: 43888 - DNA, 20 bp, Artificial Sequence
  Description of Artificial Sequence: Synthetic oligonucleotide
  Target: LAMA2; (+) strand; PAM type: NNNNGHTT; PAM sequence: AGTTGTTT
gcatttctcaaaaacatggc

SEQ ID NO: 43889 - DNA, 20 bp, Artificial Sequence
  Description of Artificial Sequence: Synthetic oligonucleotide
  Target: LAMA2; (+) strand; PAM type: NNNNGHTT; PAM sequence: TATCGATT
gcatgttggcatttttacat

SEQ ID NO: 43890 - DNA, 20 bp, Artificial Sequence
  Description of Artificial Sequence: Synthetic oligonucleotide
  Target: LAMA2; (+) strand; PAM type: NNNNGHTT; PAM sequence: CCTTGATT
gcatttttacattatcgatt

SEQ ID NO: 43891 - DNA, 20 bp, Artificial Sequence
  Description of Artificial Sequence: Synthetic oligonucleotide
  Target: LAMA2; (+) strand; PAM type: NNNNGHTT; PAM sequence: AAGAGCTT
tcatagagggggatcttttt

SEQ ID NO: 43892 - DNA, 20 bp, Artificial Sequence
  Description of Artificial Sequence: Synthetic oligonucleotide
  Target: LAMA2; (+) strand; PAM type: NNNNGHTT; PAM sequence: TTTGGTTT
aagagcttttaaaacaatct

SEQ ID NO: 43893 - DNA, 20 bp, Artificial Sequence
  Description of Artificial Sequence: Synthetic oligonucleotide
  Target: LAMA2; (+) strand; PAM type: NNNNGHTT; PAM sequence: ACTAGATT
gaagtattctacaatgaaac

SEQ ID NO: 43894 - DNA, 20 bp, Artificial Sequence
  Description of Artificial Sequence: Synthetic oligonucleotide
  Target: LAMA2; (+) strand; PAM type: NNNNGHTT; PAM sequence: ATGGGCTT
tgtaaatttcagcagtgtta

SEQ ID NO: 43895 - DNA, 20 bp, Artificial Sequence
  Description of Artificial Sequence: Synthetic oligonucleotide
  Target: LAMA2; (+) strand; PAM type: NNNNGHTT; PAM sequence: AGATGTTT
ctaaataacaattattattg

SEQ ID NO: 43896 - DNA, 20 bp, Artificial Sequence
  Description of Artificial Sequence: Synthetic oligonucleotide
  Target: LAMA2; (+) strand; PAM type: NNNNGHTT; PAM sequence: TTCAGTTT
attaaatgtagtgataaatc

SEQ ID NO: 43897 - DNA, 20 bp, Artificial Sequence
  Description of Artificial Sequence: Synthetic oligonucleotide
  Target: LAMA2; (+) strand; PAM type: NNNNGHTT; PAM sequence: AAAGGCTT
atctgagggataatcaaagc

SEQ ID NO: 43898 - DNA, 20 bp, Artificial Sequence
  Description of Artificial Sequence: Synthetic oligonucleotide
  Target: LAMA2; (+) strand; PAM type: NNNNGHTT; PAM sequence: ACATGATT
aaatgtcctgaactctttac

SEQ ID NO: 43899 - DNA, 20 bp, Artificial Sequence
  Description of Artificial Sequence: Synthetic oligonucleotide
  Target: LAMA2; (+) strand; PAM type: NNNNGHTT; PAM sequence: CCAGGATT
acagctaggaattggcagaa

SEQ ID NO: 43900 - DNA, 20 bp, Artificial Sequence
  Description of Artificial Sequence: Synthetic oligonucleotide
  Target: LAMA2; (+) strand; PAM type: NNNNGHTT; PAM sequence: ATCTGTTT
accaggatttaggcactaaa

SEQ ID NO: 43901 - DNA, 20 bp, Artificial Sequence
  Description of Artificial Sequence: Synthetic oligonucleotide
  Target: LAMA2; (+) strand; PAM type: NNNNGHTT; PAM sequence: AAAAGTTT
aaatgaattatacagagatg

SEQ ID NO: 43902 - DNA, 20 bp, Artificial Sequence
  Description of Artificial Sequence: Synthetic oligonucleotide
  Target: LAMA2; (+) strand; PAM type: NNNNGHTT; PAM sequence: TATAGATT
cagagatgaaaagttttcgt

SEQ ID NO: 43903 - DNA, 20 bp, Artificial Sequence
  Description of Artificial Sequence: Synthetic oligonucleotide
  Target: LAMA2; (+) strand; PAM type: NNNNGHTT; PAM sequence: AAGAGTTT
catagaaaaaaatcacattt

SEQ ID NO: 43904 - DNA, 20 bp, Artificial Sequence
  Description of Artificial Sequence: Synthetic oligonucleotide
  Target: LAMA2; (+) strand; PAM type: NNNNGHTT; PAM sequence: GGGCGTTT
acttttaccattgcagttat

SEQ ID NO: 43905 - DNA, 20 bp, Artificial Sequence
  Description of Artificial Sequence: Synthetic oligonucleotide
  Target: LAMA2; (+) strand; PAM type: NNNNGHTT; PAM sequence: TACAGTTT
tgcagttatgggcgtttgga

SEQ ID NO: 43906 - DNA, 20 bp, Artificial Sequence
  Description of Artificial Sequence: Synthetic oligonucleotide
  Target: LAMA2; (+) strand; PAM type: NNNNGHTT; PAM sequence: TTGGGTTT
tatgggcgtttggatacagt

SEQ ID NO: 43907 - DNA, 20 bp, Artificial Sequence
  Description of Artificial Sequence: Synthetic oligonucleotide
  Target: LAMA2; (+) strand; PAM type: NNNNGHTT; PAM sequence: CCAAGTTT
gtttgggtttaataaaaccc

SEQ ID NO: 43908 - DNA, 20 bp, Artificial Sequence
  Description of Artificial Sequence: Synthetic oligonucleotide
  Target: LAMA2; (+) strand; PAM type: NNNNGHTT; PAM sequence: TTTGGTTT
ggtttaataaaacccccaag

SEQ ID NO: 43909 - DNA, 20 bp, Artificial Sequence
  Description of Artificial Sequence: Synthetic oligonucleotide
  Target: LAMA2; (+) strand; PAM type: NNNNGHTT; PAM sequence: CAAAGATT
tatagctactatacaaaaat

SEQ ID NO: 43910 - DNA, 20 bp, Artificial Sequence
  Description of Artificial Sequence: Synthetic oligonucleotide
  Target: LAMA2; (+) strand; PAM type: NNNNGHTT; PAM sequence: AAAAGTTT
tatacaaaaatcaaagattt

SEQ ID NO: 43911 - DNA, 20 bp, Artificial Sequence
  Description of Artificial Sequence: Synthetic oligonucleotide
  Target: LAMA2; (+) strand; PAM type: NNNNGHTT; PAM sequence: GCAGGTTT
ggagccacaggatgaagatg

SEQ ID NO: 43912 - DNA, 20 bp, Artificial Sequence
  Description of Artificial Sequence: Synthetic oligonucleotide
  Target: LAMA2; (+) strand; PAM type: NNNNGHTT; PAM sequence: TTCTGTTT
taatgcagccttcatagtta

SEQ ID NO: 43913 - DNA, 20 bp, Artificial Sequence
  Description of Artificial Sequence: Synthetic oligonucleotide
  Target: LAMA2; (+) strand; PAM type: NNNNGHTT; PAM sequence: TGTAGATT
gccttcatagttattctgtt

SEQ ID NO: 43914 - DNA, 20 bp, Artificial Sequence
  Description of Artificial Sequence: Synthetic oligonucleotide
  Target: LAMA2; (+) strand; PAM type: NNNNGHTT; PAM sequence: TATTGCTT
atttttttctccttcgcaat

SEQ ID NO: 43915 - DNA, 20 bp, Artificial Sequence
  Description of Artificial Sequence: Synthetic oligonucleotide
  Target: LAMA2; (+) strand; PAM type: NNNNGHTT; PAM sequence: ATAGGCTT
tcgcaattattgctttcttc

SEQ ID NO: 43916 - DNA, 20 bp, Artificial Sequence
  Description of Artificial Sequence: Synthetic oligonucleotide
  Target: LAMA2; (+) strand; PAM type: NNNNGHTT; PAM sequence: GTCTGTTT
ttctctgtcaagacactgca

SEQ ID NO: 43917 - DNA, 20 bp, Artificial Sequence
  Description of Artificial Sequence: Synthetic oligonucleotide
  Target: LAMA2; (+) strand; PAM type: NNNNGHTT; PAM sequence: TACTGCTT
ctgttttaatcattatcatc

SEQ ID NO: 43918 - DNA, 20 bp, Artificial Sequence
  Description of Artificial Sequence: Synthetic oligonucleotide
  Target: LAMA2; (+) strand; PAM type: NNNNGHTT; PAM sequence: TCATGTTT
acttgttatgtcatacaaat

SEQ ID NO: 43919 - DNA, 20 bp, Artificial Sequence
  Description of Artificial Sequence: Synthetic oligonucleotide
  Target: LAMA2; (+) strand; PAM type: NNNNGHTT; PAM sequence: TACTGTTT
catgtttggttctccactaa

SEQ ID NO: 43920 - DNA, 20 bp, Artificial Sequence
  Description of Artificial Sequence: Synthetic oligonucleotide
  Target: LAMA2; (+) strand; PAM type: NNNNGHTT; PAM sequence: GATGGATT
ccaaaatcgaatgatggtat

SEQ ID NO: 43921 - DNA, 20 bp, Artificial Sequence
  Description of Artificial Sequence: Synthetic oligonucleotide
  Target: LAMA2; (+) strand; PAM type: NNNNGHTT; PAM sequence: CTGAGCTT
atgatggattttatgtgtga

SEQ ID NO: 43922 - DNA, 20 bp, Artificial Sequence
  Description of Artificial Sequence: Synthetic oligonucleotide
  Target: LAMA2; (+) strand; PAM type: NNNNGHTT; PAM sequence: TTCTGTTT
aattaaaggttatactctca

SEQ ID NO: 43923 - DNA, 20 bp, Artificial Sequence
  Description of Artificial Sequence: Synthetic oligonucleotide
  Target: LAMA2; (+) strand; PAM type: NNNNGHTT; PAM sequence: TAATGTTT
tgggtccatccagaagatga

SEQ ID NO: 43924 - DNA, 20 bp, Artificial Sequence
  Description of Artificial Sequence: Synthetic oligonucleotide
  Target: LAMA2; (+) strand; PAM type: NNNNGHTT; PAM sequence: AGCAGTTT
gatgataatgtttcgagagc

SEQ ID NO: 43925 - DNA, 20 bp, Artificial Sequence
  Description of Artificial Sequence: Synthetic oligonucleotide
  Target: LAMA2; (+) strand; PAM type: NNNNGHTT; PAM sequence: CTGTGTTT
cagtttctcaggacactctt

SEQ ID NO: 43926 - DNA, 20 bp, Artificial Sequence
  Description of Artificial Sequence: Synthetic oligonucleotide
  Target: LAMA2; (+) strand; PAM type: NNNNGHTT; PAM sequence: AAATGATT
aagaaatttgccagggaaag

SEQ ID NO: 43927 - DNA, 20 bp, Artificial Sequence
  Description of Artificial Sequence: Synthetic oligonucleotide
  Target: LAMA2; (+) strand; PAM type: NNNNGHTT; PAM sequence: GAATGTTT
tgtcaatattatcaaattaa

SEQ ID NO: 43928 - DNA, 20 bp, Artificial Sequence
  Description of Artificial Sequence: Synthetic oligonucleotide
  Target: LAMA2; (+) strand; PAM type: NNNNGHTT; PAM sequence: GAGTGTTT
aaaaattcttttaaattatt

SEQ ID NO: 43929 - DNA, 20 bp, Artificial Sequence
  Description of Artificial Sequence: Synthetic oligonucleotide
  Target: LAMA2; (+) strand; PAM type: NNNNGHTT; PAM sequence: ACAGGTTT
tttataaaccactaaatctt

SEQ ID NO: 43930 - DNA, 20 bp, Artificial Sequence
  Description of Artificial Sequence: Synthetic oligonucleotide
  Target: LAMA2; (+) strand; PAM type: NNNNGHTT; PAM sequence: AAGGGATT
atatacctaccatagactgt

SEQ ID NO: 43931 - DNA, 20 bp, Artificial Sequence
  Description of Artificial Sequence: Synthetic oligonucleotide
  Target: LAMA2; (+) strand; PAM type: NNNNGHTT; PAM sequence: TGGGGTTT
gattatttcgagtagtcagt

SEQ ID NO: 43932 - DNA, 20 bp, Artificial Sequence
  Description of Artificial Sequence: Synthetic oligonucleotide
  Target: LAMA2; (+) strand; PAM type: NNNNGHTT; PAM sequence: TTTAGCTT
gctccaccccagtcattgcc

SEQ ID NO: 43933 - DNA, 20 bp, Artificial Sequence
  Description of Artificial Sequence: Synthetic oligonucleotide
  Target: LAMA2; (+) strand; PAM type: NNNNGHTT; PAM sequence: TCTAGATT
agtcattgcctttagctttc

SEQ ID NO: 43934 - DNA, 20 bp, Artificial Sequence
  Description of Artificial Sequence: Synthetic oligonucleotide
  Target: LAMA2; (+) strand; PAM type: NNNNGHTT; PAM sequence: TCGTGCTT
gccattaggccttcttgaag

SEQ ID NO: 43935 - DNA, 20 bp, Artificial Sequence
  Description of Artificial Sequence: Synthetic oligonucleotide
  Target: LAMA2; (+) strand; PAM type: NNNNGHTT; PAM sequence: GAGTGCTT
gcttattacagatatgtgag

SEQ ID NO: 43936 - DNA, 20 bp, Artificial Sequence
  Description of Artificial Sequence: Synthetic oligonucleotide
  Target: LAMA2; (+) strand; PAM type: NNNNGHTT; PAM sequence: TGTTGTTT
gtagaataatccttttttgt

SEQ ID NO: 43937 - DNA, 20 bp, Artificial Sequence
  Description of Artificial Sequence: Synthetic oligonucleotide
  Target: LAMA2; (+) strand; PAM type: NNNNGHTT; PAM sequence: CAGTGTTT
acacccttttctatgatggc

SEQ ID NO: 43938 - DNA, 20 bp, Artificial Sequence
  Description of Artificial Sequence: Synthetic oligonucleotide
  Target: LAMA2; (+) strand; PAM type: NNNNGHTT; PAM sequence: AGCAGTTT
ctggatgagttgtctcgaag

SEQ ID NO: 43939 - DNA, 20 bp, Artificial Sequence
  Description of Artificial Sequence: Synthetic oligonucleotide
  Target: LAMA2; (+) strand; PAM type: NNNNGHTT; PAM sequence: TATAGTTT
ttagctcatcatcctttaag

SEQ ID NO: 43940 - DNA, 20 bp, Artificial Sequence
  Description of Artificial Sequence: Synthetic oligonucleotide
  Target: LAMA2; (+) strand; PAM type: NNNNGHTT; PAM sequence: TAGAGTTT
ttttttttgcctattgtatt

SEQ ID NO: 43941 - DNA, 20 bp, Artificial Sequence
  Description of Artificial Sequence: Synthetic oligonucleotide
  Target: LAMA2; (+) strand; PAM type: NNNNGHTT; PAM sequence: GCAAGTTT
caagaagagttgtatcatct

SEQ ID NO: 43942 - DNA, 20 bp, Artificial Sequence
  Description of Artificial Sequence: Synthetic oligonucleotide
  Target: LAMA2; (+) strand; PAM type: NNNNGHTT; PAM sequence: TGAGGTTT
agttgtatcatctgcaagtt

SEQ ID NO: 43943 - DNA, 20 bp, Artificial Sequence
  Description of Artificial Sequence: Synthetic oligonucleotide
  Target: LAMA2; (+) strand; PAM type: NNNNGHTT; PAM sequence: CCCTGTTT
cttaatagcccttccctgtt

SEQ ID NO: 43944 - DNA, 20 bp, Artificial Sequence
  Description of Artificial Sequence: Synthetic oligonucleotide
  Target: LAMA2; (+) strand; PAM type: NNNNGHTT; PAM sequence: TAAAGATT
ctaatccatttattgctctt

SEQ ID NO: 43945 - DNA, 20 bp, Artificial Sequence
  Description of Artificial Sequence: Synthetic oligonucleotide
  Target: LAMA2; (+) strand; PAM type: NNNNGHTT; PAM sequence: TAGTGTTT
gaatcaaaaacaatgtcaag

SEQ ID NO: 43946 - DNA, 20 bp, Artificial Sequence
  Description of Artificial Sequence: Synthetic oligonucleotide
  Target: LAMA2; (+) strand; PAM type: NNNNGHTT; PAM sequence: TTTGGTTT
cattacaattatttatgaat

SEQ ID NO: 43947 - DNA, 20 bp, Artificial Sequence
  Description of Artificial Sequence: Synthetic oligonucleotide
  Target: LAMA2; (+) strand; PAM type: NNNNGHTT; PAM sequence: CTGGGCTT
acagtgttattgtaaagtct

SEQ ID NO: 43948 - DNA, 20 bp, Artificial Sequence
  Description of Artificial Sequence: Synthetic oligonucleotide
  Target: LAMA2; (+) strand; PAM type: NNNNGHTT; PAM sequence: AAAAGTTT
gtctctgggcttcttagagc

SEQ ID NO: 43949 - DNA, 20 bp, Artificial Sequence
  Description of Artificial Sequence: Synthetic oligonucleotide
  Target: LAMA2; (+) strand; PAM type: NNNNGHTT; PAM sequence: ATATGTTT
aagttttaaaaccatcattt

SEQ ID NO: 43950 - DNA, 20 bp, Artificial Sequence
  Description of Artificial Sequence: Synthetic oligonucleotide
  Target: LAMA2; (+) strand; PAM type: NNNNGHTT; PAM sequence: TCTAGATT
ttaatatatttttatctatt

SEQ ID NO: 43951 - DNA, 20 bp, Artificial Sequence
  Description of Artificial Sequence: Synthetic oligonucleotide
  Target: LAMA2; (+) strand; PAM type: NNNNGHTT; PAM sequence: TGGTGTTT
aacaggctcctgggtaccca

SEQ ID NO: 43952 - DNA, 20 bp, Artificial Sequence
  Description of Artificial Sequence: Synthetic oligonucleotide
  Target: LAMA2; (+) strand; PAM type: NNNNGHTT; PAM sequence: GTGTGATT
cagagggaacctattataat

SEQ ID NO: 43953 - DNA, 20 bp, Artificial Sequence
  Description of Artificial Sequence: Synthetic oligonucleotide
  Target: LAMA2; (+) strand; PAM type: NNNNGHTT; PAM sequence: GAATGATT
aatgtgtgatttgtgatcat

SEQ ID NO: 43954 - DNA, 20 bp, Artificial Sequence
  Description of Artificial Sequence: Synthetic oligonucleotide
  Target: LAMA2; (+) strand; PAM type: NNNNGHTT; PAM sequence: ACTAGTTT
tgtgatcatgaatgatttca

SEQ ID NO: 43955 - DNA, 20 bp, Artificial Sequence
  Description of Artificial Sequence: Synthetic oligonucleotide
  Target: LAMA2; (+) strand; PAM type: NNNNGHTT; PAM sequence: ATAGGCTT
ccctcatcatcatccttaca

SEQ ID NO: 43956 - DNA, 20 bp, Artificial Sequence
  Description of Artificial Sequence: Synthetic oligonucleotide
  Target: LAMA2; (+) strand; PAM type: NNNNGHTT; PAM sequence: TCTGGTTT
tacatataatattgatgtgc

SEQ ID NO: 43957 - DNA, 20 bp, Artificial Sequence
  Description of Artificial Sequence: Synthetic oligonucleotide
  Target: LAMA2; (+) strand; PAM type: NNNNGHTT; PAM sequence: AGGAGATT
agctctaggttgtattttaa

SEQ ID NO: 43958 - DNA, 20 bp, Artificial Sequence
  Description of Artificial Sequence: Synthetic oligonucleotide
  Target: LAMA2; (+) strand; PAM type: NNNNGHTT; PAM sequence: AGCTGTTT
agacatgactgatctatctc

SEQ ID NO: 43959 - DNA, 20 bp, Artificial Sequence
  Description of Artificial Sequence: Synthetic oligonucleotide
  Target: LAMA2; (+) strand; PAM type: NNNNGHTT; PAM sequence: CCCGGATT
tgtttcttctagcatttacc

SEQ ID NO: 43960 - DNA, 20 bp, Artificial Sequence
  Description of Artificial Sequence: Synthetic oligonucleotide
  Target: LAMA2; (+) strand; PAM type: NNNNGHTT; PAM sequence: CAAAGATT
tcctttcctagtatggaaga

SEQ ID NO: 43961 - DNA, 20 bp, Artificial Sequence
  Description of Artificial Sequence: Synthetic oligonucleotide
  Target: LAMA2; (+) strand; PAM type: NNNNGHTT; PAM sequence: AATTGCTT
catcgttgcctggcattaat

SEQ ID NO: 43962 - DNA, 20 bp, Artificial Sequence
  Description of Artificial Sequence: Synthetic oligonucleotide
  Target: LAMA2; (+) strand; PAM type: NNNNGHTT; PAM sequence: CTTTGTTT
ttgcctggcattaataattg

SEQ ID NO: 43963 - DNA, 20 bp, Artificial Sequence
  Description of Artificial Sequence: Synthetic oligonucleotide
  Target: LAMA2; (+) strand; PAM type: NNNNGHTT; PAM sequence: CTTAGTTT
ctttgttttgaaaaattagt

SEQ ID NO: 43964 - DNA, 20 bp, Artificial Sequence
  Description of Artificial Sequence: Synthetic oligonucleotide
  Target: LAMA2; (+) strand; PAM type: NNNNGHTT; PAM sequence: GTATGTTT
gaattattaaactcccttca

SEQ ID NO: 43965 - DNA, 20 bp, Artificial Sequence
  Description of Artificial Sequence: Synthetic oligonucleotide
  Target: LAMA2; (+) strand; PAM type: NNNNGHTT; PAM sequence: TGATGATT
acatttggaaatctattaat

SEQ ID NO: 43966 - DNA, 20 bp, Artificial Sequence
  Description of Artificial Sequence: Synthetic oligonucleotide
  Target: LAMA2; (+) strand; PAM type: NNNNGHTT; PAM sequence: TTGTGTTT
ttgatgatttttgttattat

SEQ ID NO: 43967 - DNA, 20 bp, Artificial Sequence
  Description of Artificial Sequence: Synthetic oligonucleotide
  Target: LAMA2; (+) strand; PAM type: NNNNGHTT; PAM sequence: TGATGCTT
cattgttaagaaaaccatcc

SEQ ID NO: 43968 - DNA, 20 bp, Artificial Sequence
  Description of Artificial Sequence: Synthetic oligonucleotide
  Target: LAMA2; (+) strand; PAM type: NNNNGHTT; PAM sequence: TGTAGCTT
gcttttctctcccacatttt

SEQ ID NO: 43969 - DNA, 20 bp, Artificial Sequence
  Description of Artificial Sequence: Synthetic oligonucleotide
  Target: LAMA2; (+) strand; PAM type: NNNNGHTT; PAM sequence: AAATGTTT
agaaagagtgaagaaaaggt

SEQ ID NO: 43970 - DNA, 20 bp, Artificial Sequence
  Description of Artificial Sequence: Synthetic oligonucleotide
  Target: LAMA2; (+) strand; PAM type: NNNNGHTT; PAM sequence: TATTGCTT
tcttctcagaattttgaaga

SEQ ID NO: 43971 - DNA, 20 bp, Artificial Sequence
  Description of Artificial Sequence: Synthetic oligonucleotide
  Target: LAMA2; (+) strand; PAM type: NNNNGHTT; PAM sequence: GTGTGTTT
tacatcccttgaggactgaa

SEQ ID NO: 43972 - DNA, 20 bp, Artificial Sequence
  Description of Artificial Sequence: Synthetic oligonucleotide
  Target: LAMA2; (+) strand; PAM type: NNNNGHTT; PAM sequence: AGGTGCTT
ctgaagtgtgtttccacttc

SEQ ID NO: 43973 - DNA, 20 bp, Artificial Sequence
  Description of Artificial Sequence: Synthetic oligonucleotide
  Target: LAMA2; (+) strand; PAM type: NNNNGHTT; PAM sequence: GAATGCTT
actggctggtcttctatctg

SEQ ID NO: 43974 - DNA, 20 bp, Artificial Sequence
  Description of Artificial Sequence: Synthetic oligonucleotide
  Target: LAMA2; (+) strand; PAM type: NNNNGHTT; PAM sequence: CTAAGATT
cttttcttcttagaaaactg

SEQ ID NO: 43975 - DNA, 20 bp, Artificial Sequence
  Description of Artificial Sequence: Synthetic oligonucleotide
  Target: LAMA2; (+) strand; PAM type: NNNNGHTT; PAM sequence: TATAGTTT
tttcatgttgaaatacacta

SEQ ID NO: 43976 - DNA, 20 bp, Artificial Sequence
  Description of Artificial Sequence: Synthetic oligonucleotide
  Target: LAMA2; (+) strand; PAM type: NNNNGHTT; PAM sequence: TGTAGATT
cttcttgacccttgaaaaaa

SEQ ID NO: 43977 - DNA, 20 bp, Artificial Sequence
  Description of Artificial Sequence: Synthetic oligonucleotide
  Target: LAMA2; (+) strand; PAM type: NNNNGHTT; PAM sequence: AACAGTTT
attagaaagtatttcttatg

SEQ ID NO: 43978 - DNA, 20 bp, Artificial Sequence
  Description of Artificial Sequence: Synthetic oligonucleotide
  Target: LAMA2; (+) strand; PAM type: NNNNGHTT; PAM sequence: TTATGATT
agtatttcttatgaacagtt

SEQ ID NO: 43979 - DNA, 20 bp, Artificial Sequence
  Description of Artificial Sequence: Synthetic oligonucleotide
  Target: LAMA2; (+) strand; PAM type: NNNNGHTT; PAM sequence: ATCAGATT
tcccctatcttatatatgtg

SEQ ID NO: 43980 - DNA, 20 bp, Artificial Sequence
  Description of Artificial Sequence: Synthetic oligonucleotide
  Target: LAMA2; (+) strand; PAM type: NNNNGHTT; PAM sequence: TTAGGATT
atttttgcctctgtaaactt

SEQ ID NO: 43981 - DNA, 20 bp, Artificial Sequence
  Description of Artificial Sequence: Synthetic oligonucleotide
  Target: LAMA2; (+) strand; PAM type: NNNNGHTT; PAM sequence: TGTAGTTT
tatcttgaccccaaatgttc

SEQ ID NO: 43982 - DNA, 20 bp, Artificial Sequence
  Description of Artificial Sequence: Synthetic oligonucleotide
  Target: LAMA2; (+) strand; PAM type: NNNNGHTT; PAM sequence: TAAGGATT
ggaaattcatacacctaact

SEQ ID NO: 43983 - DNA, 20 bp, Artificial Sequence
  Description of Artificial Sequence: Synthetic oligonucleotide
  Target: LAMA2; (+) strand; PAM type: NNNNGHTT; PAM sequence: CATGGATT
ctttgttagatattgaattt

SEQ ID NO: 43984 - DNA, 20 bp, Artificial Sequence
  Description of Artificial Sequence: Synthetic oligonucleotide
  Target: LAMA2; (+) strand; PAM type: NNNNGHTT; PAM sequence: CCTAGCTT
tgaatttcatggattaatcc

SEQ ID NO: 43985 - DNA, 20 bp, Artificial Sequence
  Description of Artificial Sequence: Synthetic oligonucleotide
  Target: LAMA2; (+) strand; PAM type: NNNNGHTT; PAM sequence: TTTGGTTT
taatcccctagctttttgtc

SEQ ID NO: 43986 - DNA, 20 bp, Artificial Sequence
  Description of Artificial Sequence: Synthetic oligonucleotide
  Target: LAMA2; (+) strand; PAM type: NNNNGHTT; PAM sequence: TTTTGATT
agctttttgtctttggttta

SEQ ID NO: 43987 - DNA, 20 bp, Artificial Sequence
  Description of Artificial Sequence: Synthetic oligonucleotide
  Target: LAMA2; (+) strand; PAM type: NNNNGHTT; PAM sequence: CAGCGATT
agcctctgcctcccaggttc

SEQ ID NO: 43988 - DNA, 20 bp, Artificial Sequence
  Description of Artificial Sequence: Synthetic oligonucleotide
  Target: LAMA2; (+) strand; PAM type: NNNNGHTT; PAM sequence: CTGGGATT
ccgccgacccccatgagtag

SEQ ID NO: 43989 - DNA, 20 bp, Artificial Sequence
  Description of Artificial Sequence: Synthetic oligonucleotide
  Target: LAMA2; (+) strand; PAM type: NNNNGHTT; PAM sequence: TGGGGTTT
ttttgtatttttagtagaga

SEQ ID NO: 43990 - DNA, 20 bp, Artificial Sequence
  Description of Artificial Sequence: Synthetic oligonucleotide
  Target: LAMA2; (+) strand; PAM type: NNNNGHTT; PAM sequence: CTGGGATT
cgcctggtcctcccaaagtg

SEQ ID NO: 43991 - DNA, 20 bp, Artificial Sequence
  Description of Artificial Sequence: Synthetic oligonucleotide
  Target: LAMA2; (+) strand; PAM type: NNNNGHTT; PAM sequence: AGCCGATT
aggcgtgagccaccacgccc

SEQ ID NO: 43992 - DNA, 20 bp, Artificial Sequence
  Description of Artificial Sequence: Synthetic oligonucleotide
  Target: LAMA2; (+) strand; PAM type: NNNNGHTT; PAM sequence: TATTGTTT
atttccttttctttatattc

SEQ ID NO: 43993 - DNA, 20 bp, Artificial Sequence
  Description of Artificial Sequence: Synthetic oligonucleotide
  Target: LAMA2; (+) strand; PAM type: NNNNGHTT; PAM sequence: TTGTGCTT
accataatttaataattctt

SEQ ID NO: 43994 - DNA, 20 bp, Artificial Sequence
  Description of Artificial Sequence: Synthetic oligonucleotide
  Target: LAMA2; (+) strand; PAM type: NNNNGHTT; PAM sequence: TCTTGTTT
aaattaatatctcatcctgt

SEQ ID NO: 43995 - DNA, 20 bp, Artificial Sequence
  Description of Artificial Sequence: Synthetic oligonucleotide
  Target: LAMA2; (+) strand; PAM type: NNNNGHTT; PAM sequence: ATATGTTT
gttcttgttttgtgcatgcc

SEQ ID NO: 43996 - DNA, 20 bp, Artificial Sequence
  Description of Artificial Sequence: Synthetic oligonucleotide
  Target: LAMA2; (+) strand; PAM type: NNNNGHTT; PAM sequence: TGAAGTTT
cgagaatattgactcatttt

SEQ ID NO: 43997 - DNA, 20 bp, Artificial Sequence
  Description of Artificial Sequence: Synthetic oligonucleotide
  Target: LAMA2; (+) strand; PAM type: NNNNGHTT; PAM sequence: CTTTGTTT
gtttttaatattatttttgc

SEQ ID NO: 43998 - DNA, 20 bp, Artificial Sequence
  Description of Artificial Sequence: Synthetic oligonucleotide
  Target: LAMA2; (+) strand; PAM type: NNNNGHTT; PAM sequence: CTCTGTTT
attatttttgcctttgtttc

SEQ ID NO: 43999 - DNA, 20 bp, Artificial Sequence
  Description of Artificial Sequence: Synthetic oligonucleotide
  Target: LAMA2; (+) strand; PAM type: NNNNGHTT; PAM sequence: TTTTGTTT
ttttgcctttgtttcctctg

SEQ ID NO: 44000 - DNA, 20 bp, Artificial Sequence
  Description of Artificial Sequence: Synthetic oligonucleotide
  Target: LAMA2; (+) strand; PAM type: NNNNGHTT; PAM sequence: TAATGTTT
gggaaaattttgctgtccaa

SEQ ID NO: 44001 - DNA, 20 bp, Artificial Sequence
  Description of Artificial Sequence: Synthetic oligonucleotide
  Target: LAMA2; (+) strand; PAM type: NNNNGHTT; PAM sequence: TGTAGATT
aataatcacactctacaata

SEQ ID NO: 44002 - DNA, 20 bp, Artificial Sequence
  Description of Artificial Sequence: Synthetic oligonucleotide
  Target: LAMA2; (+) strand; PAM type: NNNNGHTT; PAM sequence: ATTAGTTT
atatatatatatatatatat

SEQ ID NO: 44003 - DNA, 20 bp, Artificial Sequence
  Description of Artificial Sequence: Synthetic oligonucleotide
  Target: LAMA2; (+) strand; PAM type: NNNNGHTT; PAM sequence: GGGAGTTT
tatatatatgtatatatcat

SEQ ID NO: 44004 - DNA, 20 bp, Artificial Sequence
  Description of Artificial Sequence: Synthetic oligonucleotide
  Target: LAMA2; (+) strand; PAM type: NNNNGHTT; PAM sequence: TGATGTTT
aaactgaagaacttggagtc

SEQ ID NO: 44005 - DNA, 20 bp, Artificial Sequence
  Description of Artificial Sequence: Synthetic oligonucleotide
  Target: LAMA2; (+) strand; PAM type: NNNNGHTT; PAM sequence: GCCTGCTT
ctctccttttcacattttct

SEQ ID NO: 44006 - DNA, 20 bp, Artificial Sequence
  Description of Artificial Sequence: Synthetic oligonucleotide
  Target: LAMA2; (+) strand; PAM type: NNNNGHTT; PAM sequence: GGCTGATT
cctgctttatatttgctggc

SEQ ID NO: 44007 - DNA, 20 bp, Artificial Sequence
  Description of Artificial Sequence: Synthetic oligonucleotide
  Target: LAMA2; (+) strand; PAM type: NNNNGHTT; PAM sequence: ATTAGATT
tttatatttgctggcggctg

SEQ ID NO: 44008 - DNA, 20 bp, Artificial Sequence
  Description of Artificial Sequence: Synthetic oligonucleotide
  Target: LAMA2; (+) strand; PAM type: NNNNGHTT; PAM sequence: ACCAGATT
cggctgattagattgtgccc

SEQ ID NO: 44009 - DNA, 20 bp, Artificial Sequence
  Description of Artificial Sequence: Synthetic oligonucleotide
  Target: LAMA2; (+) strand; PAM type: NNNNGHTT; PAM sequence: CGAGGTTT
ggtcagcaatgggatagtaa

SEQ ID NO: 44010 - DNA, 20 bp, Artificial Sequence
  Description of Artificial Sequence: Synthetic oligonucleotide
  Target: LAMA2; (+) strand; PAM type: NNNNGHTT; PAM sequence: CTAAGATT
agggggatctggatacctaa

SEQ ID NO: 44011 - DNA, 20 bp, Artificial Sequence
  Description of Artificial Sequence: Synthetic oligonucleotide
  Target: LAMA2; (+) strand; PAM type: NNNNGHTT; PAM sequence: TGTGGTTT
gctcaaataacacttcttgc

SEQ ID NO: 44012 - DNA, 20 bp, Artificial Sequence
  Description of Artificial Sequence: Synthetic oligonucleotide
  Target: LAMA2; (+) strand; PAM type: NNNNGHTT; PAM sequence: CCCAGCTT
cttggcagacacatcctatc

SEQ ID NO: 44013 - DNA, 20 bp, Artificial Sequence
  Description of Artificial Sequence: Synthetic oligonucleotide
  Target: LAMA2; (+) strand; PAM type: NNNNGHTT; PAM sequence: AGAAGATT
tatgacttaactcttatttt

SEQ ID NO: 44014 - DNA, 20 bp, Artificial Sequence
  Description of Artificial Sequence: Synthetic oligonucleotide
  Target: LAMA2; (+) strand; PAM type: NNNNGHTT; PAM sequence: TCAGGTTT
ttaagtgtgtgtgttcatgg

SEQ ID NO: 44015 - DNA, 20 bp, Artificial Sequence
  Description of Artificial Sequence: Synthetic oligonucleotide
  Target: LAMA2; (+) strand; PAM type: NNNNGHTT; PAM sequence: CTGTGATT
atacctctatttttgatagt

SEQ ID NO: 44016 - DNA, 20 bp, Artificial Sequence
  Description of Artificial Sequence: Synthetic oligonucleotide
  Target: LAMA2; (+) strand; PAM type: NNNNGHTT; PAM sequence: CTATGCTT
tctgtgattctgagccctat

SEQ ID NO: 44017 - DNA, 20 bp, Artificial Sequence
  Description of Artificial Sequence: Synthetic oligonucleotide
  Target: LAMA2; (+) strand; PAM type: NNNNGHTT; PAM sequence: TCACGTTT
actctttaattttgtgtgtc

SEQ ID NO: 44018 - DNA, 20 bp, Artificial Sequence
  Description of Artificial Sequence: Synthetic oligonucleotide
  Target: LAMA2; (+) strand; PAM type: NNNNGHTT; PAM sequence: GGTAGCTT
tgtgtgtctcacgtttagag

SEQ ID NO: 44019 - DNA, 20 bp, Artificial Sequence
  Description of Artificial Sequence: Synthetic oligonucleotide
  Target: LAMA2; (+) strand; PAM type: NNNNGHTT; PAM sequence: ATGTGCTT
aataacattgctcattaggc

SEQ ID NO: 44020 - DNA, 20 bp, Artificial Sequence
  Description of Artificial Sequence: Synthetic oligonucleotide
  Target: LAMA2; (+) strand; PAM type: NNNNGHTT; PAM sequence: GCCTGATT
gtgcttatgaagacaaaaag

SEQ ID NO: 44021 - DNA, 20 bp, Artificial Sequence
  Description of Artificial Sequence: Synthetic oligonucleotide
  Target: LAMA2; (+) strand; PAM type: NNNNGHTT; PAM sequence: TACTGATT
gaagacaaaaaggcctgatt

SEQ ID NO: 44022 - DNA, 20 bp, Artificial Sequence
  Description of Artificial Sequence: Synthetic oligonucleotide
  Target: LAMA2; (+) strand; PAM type: NNNNGHTT; PAM sequence: TAGTGATT
aaaggcctgatttactgatt

SEQ ID NO: 44023 - DNA, 20 bp, Artificial Sequence
  Description of Artificial Sequence: Synthetic oligonucleotide
  Target: LAMA2; (+) strand; PAM type: NNNNGHTT; PAM sequence: CAAGGCTT
actgatttagtgatttagtc

SEQ ID NO: 44024 - DNA, 20 bp, Artificial Sequence
  Description of Artificial Sequence: Synthetic oligonucleotide
  Target: LAMA2; (+) strand; PAM type: NNNNGHTT; PAM sequence: CTGTGATT
tctataaatcccaatcacaa

SEQ ID NO: 44025 - DNA, 20 bp, Artificial Sequence
  Description of Artificial Sequence: Synthetic oligonucleotide
  Target: LAMA2; (+) strand; PAM type: NNNNGHTT; PAM sequence: CCAAGTTT
agaatcaaataaaaattact

SEQ ID NO: 44026 - DNA, 20 bp, Artificial Sequence
  Description of Artificial Sequence: Synthetic oligonucleotide
  Target: LAMA2; (+) strand; PAM type: NNNNGHTT; PAM sequence: AAAAGTTT
attttctcaaaaggcaaagg

SEQ ID NO: 44027 - DNA, 20 bp, Artificial Sequence
  Description of Artificial Sequence: Synthetic oligonucleotide
  Target: LAMA2; (+) strand; PAM type: NNNNGHTT; PAM sequence: ACATGATT
ttttggaaaagcaaaacaag

SEQ ID NO: 44028 - DNA, 20 bp, Artificial Sequence
  Description of Artificial Sequence: Synthetic oligonucleotide
  Target: LAMA2; (+) strand; PAM type: NNNNGHTT; PAM sequence: AGTTGTTT
tcactgagtattttccacag

SEQ ID NO: 44029 - DNA, 20 bp, Artificial Sequence
  Description of Artificial Sequence: Synthetic oligonucleotide
  Target: LAMA2; (+) strand; PAM type: NNNNGHTT; PAM sequence: GTCTGTTT
aacaaccaaacactccactt

SEQ ID NO: 44030 - DNA, 20 bp, Artificial Sequence
  Description of Artificial Sequence: Synthetic oligonucleotide
  Target: LAMA2; (+) strand; PAM type: NNNNGHTT; PAM sequence: CCCAGCTT
agcaaaagcagctctgttat

SEQ ID NO: 44031 - DNA, 20 bp, Artificial Sequence
  Description of Artificial Sequence: Synthetic oligonucleotide
  Target: LAMA2; (+) strand; PAM type: NNNNGHTT; PAM sequence: GTATGCTT
tcatcattttggcctttcat

SEQ ID NO: 44032 - DNA, 20 bp, Artificial Sequence
  Description of Artificial Sequence: Synthetic oligonucleotide
  Target: LAMA2; (+) strand; PAM type: NNNNGHTT; PAM sequence: AAATGTTT
gttaatttaaaccaacatgt

SEQ ID NO: 44033 - DNA, 20 bp, Artificial Sequence
  Description of Artificial Sequence: Synthetic oligonucleotide
  Target: LAMA2; (+) strand; PAM type: NNNNGHTT; PAM sequence: GTATGCTT
aaaccaacatgtaaatgttt

SEQ ID NO: 44034 - DNA, 20 bp, Artificial Sequence
  Description of Artificial Sequence: Synthetic oligonucleotide
  Target: LAMA2; (+) strand; PAM type: NNNNGHTT; PAM sequence: TTGTGTTT
atgtgtggtatcccaaaagg

SEQ ID NO: 44035 - DNA, 20 bp, Artificial Sequence
  Description of Artificial Sequence: Synthetic oligonucleotide
  Target: LAMA2; (+) strand; PAM type: NNNNGHTT; PAM sequence: GGATGCTT
tgatatctgacatgggaaag

SEQ ID NO: 44036 - DNA, 20 bp, Artificial Sequence
  Description of Artificial Sequence: Synthetic oligonucleotide
  Target: LAMA2; (+) strand; PAM type: NNNNGHTT; PAM sequence: ACTTGTTT
ctggctgtattttccgactg

SEQ ID NO: 44037 - DNA, 20 bp, Artificial Sequence
  Description of Artificial Sequence: Synthetic oligonucleotide
  Target: LAMA2; (+) strand; PAM type: NNNNGHTT; PAM sequence: TTGTGTTT
aaggcagcattttagtaaaa

SEQ ID NO: 44038 - DNA, 20 bp, Artificial Sequence
  Description of Artificial Sequence: Synthetic oligonucleotide
  Target: LAMA2; (+) strand; PAM type: NNNNGHTT; PAM sequence: TGAAGTTT
tctttctgataggctctaat

SEQ ID NO: 44039 - DNA, 20 bp, Artificial Sequence
  Description of Artificial Sequence: Synthetic oligonucleotide
  Target: LAMA2; (+) strand; PAM type: NNNNGHTT; PAM sequence: GCATGATT
ctctcccacagtgaatattg

SEQ ID NO: 44040 - DNA, 20 bp, Artificial Sequence
  Description of Artificial Sequence: Synthetic oligonucleotide
  Target: LAMA2; (+) strand; PAM type: NNNNGHTT; PAM sequence: CAATGTTT
cataatggacagaatatcta

SEQ ID NO: 44041 - DNA, 20 bp, Artificial Sequence
  Description of Artificial Sequence: Synthetic oligonucleotide
  Target: LAMA2; (+) strand; PAM type: NNNNGHTT; PAM sequence: ATGGGTTT
actggaacaaatattaaaga

SEQ ID NO: 44042 - DNA, 20 bp, Artificial Sequence
  Description of Artificial Sequence: Synthetic oligonucleotide
  Target: LAMA2; (+) strand; PAM type: NNNNGHTT; PAM sequence: TGTTGTTT
gcaacatgttatagcctaaa

SEQ ID NO: 44043 - DNA, 20 bp, Artificial Sequence
  Description of Artificial Sequence: Synthetic oligonucleotide
  Target: LAMA2; (+) strand; PAM type: NNNNGHTT; PAM sequence: TTATGTTT
ctaaatgttgtttccttcaa

SEQ ID NO: 44044 - DNA, 20 bp, Artificial Sequence
  Description of Artificial Sequence: Synthetic oligonucleotide
  Target: LAMA2; (+) strand; PAM type: NNNNGHTT; PAM sequence: AAATGTTT
tgtttaaacaatgtaacctt

SEQ ID NO: 44045 - DNA, 20 bp, Artificial Sequence
  Description of Artificial Sequence: Synthetic oligonucleotide
  Target: LAMA2; (+) strand; PAM type: NNNNGHTT; PAM sequence: TTAAGCTT
ctcatcaaagtcatctttat

SEQ ID NO: 44046 - DNA, 20 bp, Artificial Sequence
  Description of Artificial Sequence: Synthetic oligonucleotide
  Target: LAMA2; (+) strand; PAM type: NNNNGHTT; PAM sequence: AAATGTTT
ggaagaaaaatagaaatctg

SEQ ID NO: 44047 - DNA, 20 bp, Artificial Sequence
  Description of Artificial Sequence: Synthetic oligonucleotide
  Target: LAMA2; (+) strand; PAM type: NNNNGHTT; PAM sequence: GTAGGTTT
ggaaattgaatatatgtcag

SEQ ID NO: 44048 - DNA, 20 bp, Artificial Sequence
  Description of Artificial Sequence: Synthetic oligonucleotide
  Target: LAMA2; (+) strand; PAM type: NNNNGHTT; PAM sequence: GACTGTTT
tgagtgtacttcagtgtcag

SEQ ID NO: 44049 - DNA, 20 bp, Artificial Sequence
  Description of Artificial Sequence: Synthetic oligonucleotide
  Target: LAMA2; (+) strand; PAM type: NNNNGHTT; PAM sequence: AACAGATT
gtgtcaggactgtttttatt

SEQ ID NO: 44050 - DNA, 20 bp, Artificial Sequence
  Description of Artificial Sequence: Synthetic oligonucleotide
  Target: LAMA2; (+) strand; PAM type: NNNNGHTT; PAM sequence: ACTGGCTT
tttattaacagattttataa

SEQ ID NO: 44051 - DNA, 20 bp, Artificial Sequence
  Description of Artificial Sequence: Synthetic oligonucleotide
  Target: LAMA2; (+) strand; PAM type: NNNNGHTT; PAM sequence: GGTAGTTT
cagattttataaactggctt

SEQ ID NO: 44052 - DNA, 20 bp, Artificial Sequence
  Description of Artificial Sequence: Synthetic oligonucleotide
  Target: LAMA2; (+) strand; PAM type: NNNNGHTT; PAM sequence: TCCTGTTT
cataaaagtacagaatacat

SEQ ID NO: 44053 - DNA, 20 bp, Artificial Sequence
  Description of Artificial Sequence: Synthetic oligonucleotide
  Target: LAMA2; (+) strand; PAM type: NNNNGHTT; PAM sequence: AACAGTTT
gtaagaggagtcccctcatg

SEQ ID NO: 44054 - DNA, 20 bp, Artificial Sequence
  Description of Artificial Sequence: Synthetic oligonucleotide
  Target: LAMA2; (+) strand; PAM type: NNNNGHTT; PAM sequence: AGAGGATT
cctcatgaacagtttatatg

SEQ ID NO: 44055 - DNA, 20 bp, Artificial Sequence
  Description of Artificial Sequence: Synthetic oligonucleotide
  Target: LAMA2; (+) strand; PAM type: NNNNGHTT; PAM sequence: CAAGGATT
tcatgaaaaaaatatacttt

SEQ ID NO: 44056 - DNA, 20 bp, Artificial Sequence
  Description of Artificial Sequence: Synthetic oligonucleotide
  Target: LAMA2; (+) strand; PAM type: NNNNGHTT; PAM sequence: AAGGGTTT
ggtaaatagcaattggaaag

SEQ ID NO: 44057 - DNA, 20 bp, Artificial Sequence
  Description of Artificial Sequence: Synthetic oligonucleotide
  Target: LAMA2; (+) strand; PAM type: NNNNGHTT; PAM sequence: CTCTGTTT
attctgagtgaaatattttg

SEQ ID NO: 44058 - DNA, 20 bp, Artificial Sequence
  Description of Artificial Sequence: Synthetic oligonucleotide
  Target: LAMA2; (+) strand; PAM type: NNNNGHTT; PAM sequence: GCAAGTTT
tcactttatttttctcttgt

SEQ ID NO: 44059 - DNA, 20 bp, Artificial Sequence
  Description of Artificial Sequence: Synthetic oligonucleotide
  Target: LAMA2; (+) strand; PAM type: NNNNGHTT; PAM sequence: ATCAGATT
gaaattgccttaggatatga

SEQ ID NO: 44060 - DNA, 20 bp, Artificial Sequence
  Description of Artificial Sequence: Synthetic oligonucleotide
  Target: LAMA2; (+) strand; PAM type: NNNNGHTT; PAM sequence: TTGGGATT
gaaaacatcatgaaagataa

SEQ ID NO: 44061 - DNA, 20 bp, Artificial Sequence
  Description of Artificial Sequence: Synthetic oligonucleotide
  Target: LAMA2; (+) strand; PAM type: NNNNGHTT; PAM sequence: TCTTGTTT
tttttccatttttattttcc

SEQ ID NO: 44062 - DNA, 20 bp, Artificial Sequence
  Description of Artificial Sequence: Synthetic oligonucleotide
  Target: LAMA2; (+) strand; PAM type: NNNNGHTT; PAM sequence: TCTTGCTT
atttttattttcctcttgtt

SEQ ID NO: 44063 - DNA, 20 bp, Artificial Sequence
  Description of Artificial Sequence: Synthetic oligonucleotide
  Target: LAMA2; (+) strand; PAM type: NNNNGHTT; PAM sequence: ATTCGTTT
gtttcttgcttatttgaatc

SEQ ID NO: 44064 - DNA, 20 bp, Artificial Sequence
  Description of Artificial Sequence: Synthetic oligonucleotide
  Target: LAMA2; (+) strand; PAM type: NNNNGHTT; PAM sequence: GTAAGTTT
ggagatgtaattcaatgtat

SEQ ID NO: 44065 - DNA, 20 bp, Artificial Sequence
  Description of Artificial Sequence: Synthetic oligonucleotide
  Target: LAMA2; (+) strand; PAM type: NNNNGHTT; PAM sequence: CTGTGTTT
ttacttatgtcacataaaaa

SEQ ID NO: 44066 - DNA, 20 bp, Artificial Sequence
  Description of Artificial Sequence: Synthetic oligonucleotide
  Target: LAMA2; (+) strand; PAM type: NNNNGHTT; PAM sequence: AACAGATT
tcacataaaaactgtgttta

SEQ ID NO: 44067 - DNA, 20 bp, Artificial Sequence
  Description of Artificial Sequence: Synthetic oligonucleotide
  Target: LAMA2; (+) strand; PAM type: NNNNGHTT; PAM sequence: GAGAGTTT
cagattaaaaatattttctg

SEQ ID NO: 44068 - DNA, 20 bp, Artificial Sequence
  Description of Artificial Sequence: Synthetic oligonucleotide
  Target: LAMA2; (+) strand; PAM type: NNNNGHTT; PAM sequence: CAATGTTT
ggagagttttatttatttta

SEQ ID NO: 44069 - DNA, 20 bp, Artificial Sequence
  Description of Artificial Sequence: Synthetic oligonucleotide
  Target: LAMA2; (+) strand; PAM type: NNNNGHTT; PAM sequence: TCCTGCTT
tccagacagcaatctttaaa

SEQ ID NO: 44070 - DNA, 20 bp, Artificial Sequence
  Description of Artificial Sequence: Synthetic oligonucleotide
  Target: LAMA2; (+) strand; PAM type: NNNNGHTT; PAM sequence: TCCAGTTT
ctgcttgagtcatcttttat

SEQ ID NO: 44071 - DNA, 20 bp, Artificial Sequence
  Description of Artificial Sequence: Synthetic oligonucleotide
  Target: LAMA2; (+) strand; PAM type: NNNNGHTT; PAM sequence: CATAGTTT
aagacttatactctttgtcc

SEQ ID NO: 44072 - DNA, 20 bp, Artificial Sequence
  Description of Artificial Sequence: Synthetic oligonucleotide
  Target: LAMA2; (+) strand; PAM type: NNNNGHTT; PAM sequence: TATAGCTT
gtttctcttttctgttgaaa

SEQ ID NO: 44073 - DNA, 20 bp, Artificial Sequence
  Description of Artificial Sequence: Synthetic oligonucleotide
  Target: LAMA2; (+) strand; PAM type: NNNNGHTT; PAM sequence: AGAGGTTT
ggaatattaacatgtaaacc

SEQ ID NO: 44074 - DNA, 20 bp, Artificial Sequence
  Description of Artificial Sequence: Synthetic oligonucleotide
  Target: LAMA2; (+) strand; PAM type: NNNNGHTT; PAM sequence: AATTGTTT
taaacttatcaggaacagaa

SEQ ID NO: 44075 - DNA, 20 bp, Artificial Sequence
  Description of Artificial Sequence: Synthetic oligonucleotide
  Target: LAMA2; (+) strand; PAM type: NNNNGHTT; PAM sequence: TAAAGATT
atcaaaactaaatttttttt

SEQ ID NO: 44076 - DNA, 20 bp, Artificial Sequence
  Description of Artificial Sequence: Synthetic oligonucleotide
  Target: LAMA2; (+) strand; PAM type: NNNNGHTT; PAM sequence: ATTGGATT
ttgaataggtaggacttcac

SEQ ID NO: 44077 - DNA, 20 bp, Artificial Sequence
  Description of Artificial Sequence: Synthetic oligonucleotide
  Target: LAMA2; (+) strand; PAM type: NNNNGHTT; PAM sequence: TTTTGATT
gtatttaaaatgcaaatact

SEQ ID NO: 44078 - DNA, 20 bp, Artificial Sequence
  Description of Artificial Sequence: Synthetic oligonucleotide
  Target: LAMA2; (+) strand; PAM type: NNNNGHTT; PAM sequence: AAGAGATT
tttttgctaagtaatattct

SEQ ID NO: 44079 - DNA, 20 bp, Artificial Sequence
  Description of Artificial Sequence: Synthetic oligonucleotide
  Target: LAMA2; (+) strand; PAM type: NNNNGHTT; PAM sequence: GACTGTTT
catacattttaaaatgttgt

SEQ ID NO: 44080 - DNA, 20 bp, Artificial Sequence
  Description of Artificial Sequence: Synthetic oligonucleotide
  Target: LAMA2; (+) strand; PAM type: NNNNGHTT; PAM sequence: TTGTGTTT
ttaaaatgttgtgactgttt

SEQ ID NO: 44081 - DNA, 20 bp, Artificial Sequence
  Description of Artificial Sequence: Synthetic oligonucleotide
  Target: LAMA2; (+) strand; PAM type: NNNNGHTT; PAM sequence: TCATGTTT
gttgtgactgtttttgtgtt

SEQ ID NO: 44082 - DNA, 20 bp, Artificial Sequence
  Description of Artificial Sequence: Synthetic oligonucleotide
  Target: LAMA2; (+) strand; PAM type: NNNNGHTT; PAM sequence: TAGAGATT
gtttcatgtttgtataaatg

SEQ ID NO: 44083 - DNA, 20 bp, Artificial Sequence
  Description of Artificial Sequence: Synthetic oligonucleotide
  Target: LAMA2; (+) strand; PAM type: NNNNGHTT; PAM sequence: ACTTGTTT
tataaatgtagagattagac

SEQ ID NO: 44084 - DNA, 20 bp, Artificial Sequence
  Description of Artificial Sequence: Synthetic oligonucleotide
  Target: LAMA2; (+) strand; PAM type: NNNNGHTT; PAM sequence: CTTGGTTT
ttgaagactgttctgttgct

SEQ ID NO: 44085 - DNA, 20 bp, Artificial Sequence
  Description of Artificial Sequence: Synthetic oligonucleotide
  Target: LAMA2; (+) strand; PAM type: NNNNGHTT; PAM sequence: AAGGGATT
aagaaaaataatttaaactc

SEQ ID NO: 44086 - DNA, 20 bp, Artificial Sequence
  Description of Artificial Sequence: Synthetic oligonucleotide
  Target: LAMA2; (+) strand; PAM type: NNNNGHTT; PAM sequence: AAATGATT
aaaaattcttattatttgag

SEQ ID NO: 44087 - DNA, 20 bp, Artificial Sequence
  Description of Artificial Sequence: Synthetic oligonucleotide
  Target: LAMA2; (+) strand; PAM type: NNNNGHTT; PAM sequence: ATGGGCTT
gcaggtcaatgtgcaaagaa

SEQ ID NO: 44088 - DNA, 20 bp, Artificial Sequence
  Description of Artificial Sequence: Synthetic oligonucleotide
  Target: LAMA2; (+) strand; PAM type: NNNNGHTT; PAM sequence: ACTGGCTT
aaagtactatatgcaggaat

SEQ ID NO: 44089 - DNA, 20 bp, Artificial Sequence
  Description of Artificial Sequence: Synthetic oligonucleotide
  Target: LAMA2; (+) strand; PAM type: NNNNGHTT; PAM sequence: TTTTGTTT
tatatgcaggaatactggct

SEQ ID NO: 44090 - DNA, 20 bp, Artificial Sequence
  Description of Artificial Sequence: Synthetic oligonucleotide
  Target: LAMA2; (+) strand; PAM type: NNNNGHTT; PAM sequence: AAAAGCTT
aactttacgcaaattgttag

SEQ ID NO: 44091 - DNA, 20 bp, Artificial Sequence
  Description of Artificial Sequence: Synthetic oligonucleotide
  Target: LAMA2; (+) strand; PAM type: NNNNGHTT; PAM sequence: CAATGCTT
gttcaattcacttgctgcca

SEQ ID NO: 44092 - DNA, 20 bp, Artificial Sequence
  Description of Artificial Sequence: Synthetic oligonucleotide
  Target: LAMA2; (+) strand; PAM type: NNNNGHTT; PAM sequence: GAATGATT
agacagagagcagcatcagg

SEQ ID NO: 44093 - DNA, 20 bp, Artificial Sequence
  Description of Artificial Sequence: Synthetic oligonucleotide
  Target: LAMA2; (+) strand; PAM type: NNNNGHTT; PAM sequence: CAGGGTTT
tgattattacctgtgcccag

SEQ ID NO: 44094 - DNA, 20 bp, Artificial Sequence
  Description of Artificial Sequence: Synthetic oligonucleotide
  Target: LAMA2; (+) strand; PAM type: NNNNGHTT; PAM sequence: GGTAGATT
gttcaactgctaatggtcaa

SEQ ID NO: 44095 - DNA, 20 bp, Artificial Sequence
  Description of Artificial Sequence: Synthetic oligonucleotide
  Target: LAMA2; (+) strand; PAM type: NNNNGHTT; PAM sequence: TATAGATT
aagacacaagggaacattca

SEQ ID NO: 44096 - DNA, 20 bp, Artificial Sequence
  Description of Artificial Sequence: Synthetic oligonucleotide
  Target: LAMA2; (+) strand; PAM type: NNNNGHTT; PAM sequence: GTTAGATT
aaatatttgtgccaggcact

SEQ ID NO: 44097 - DNA, 20 bp, Artificial Sequence
  Description of Artificial Sequence: Synthetic oligonucleotide
  Target: LAMA2; (+) strand; PAM type: NNNNGHTT; PAM sequence: ATGAGCTT
ggcactgttagattggcctc

SEQ ID NO: 44098 - DNA, 20 bp, Artificial Sequence
  Description of Artificial Sequence: Synthetic oligonucleotide
  Target: LAMA2; (+) strand; PAM type: NNNNGHTT; PAM sequence: TCAGGCTT
gggcacccacttgctataca

SEQ ID NO: 44099 - DNA, 20 bp, Artificial Sequence
  Description of Artificial Sequence: Synthetic oligonucleotide
  Target: LAMA2; (+) strand; PAM type: NNNNGHTT; PAM sequence: ACATGATT
ctgaccagcatttatgctag

SEQ ID NO: 44100 - DNA, 20 bp, Artificial Sequence
  Description of Artificial Sequence: Synthetic oligonucleotide
  Target: LAMA2; (+) strand; PAM type: NNNNGHTT; PAM sequence: AGATGTTT
acttgatgagtatatttgac

SEQ ID NO: 44101 - DNA, 20 bp, Artificial Sequence
  Description of Artificial Sequence: Synthetic oligonucleotide
  Target: LAMA2; (+) strand; PAM type: NNNNGHTT; PAM sequence: ATAGGTTT
gatctttactaatcaggatc

SEQ ID NO: 44102 - DNA, 20 bp, Artificial Sequence
  Description of Artificial Sequence: Synthetic oligonucleotide
  Target: LAMA2; (+) strand; PAM type: NNNNGHTT; PAM sequence: ACCAGTTT
ggaggaaaagaatgagtggg

SEQ ID NO: 44103 - DNA, 20 bp, Artificial Sequence
  Description of Artificial Sequence: Synthetic oligonucleotide
  Target: LAMA2; (+) strand; PAM type: NNNNGHTT; PAM sequence: CACGGATT
ccattctcaccctagggaaa

SEQ ID NO: 44104 - DNA, 20 bp, Artificial Sequence
  Description of Artificial Sequence: Synthetic oligonucleotide
  Target: LAMA2; (+) strand; PAM type: NNNNGHTT; PAM sequence: ATTGGATT
ctgctcaggggatgatgaaa

SEQ ID NO: 44105 - DNA, 20 bp, Artificial Sequence
  Description of Artificial Sequence: Synthetic oligonucleotide
  Target: LAMA2; (+) strand; PAM type: NNNNGHTT; PAM sequence: CTCAGATT
ttggattccgacttttacac

SEQ ID NO: 44106 - DNA, 20 bp, Artificial Sequence
  Description of Artificial Sequence: Synthetic oligonucleotide
  Target: LAMA2; (+) strand; PAM type: NNNNGHTT; PAM sequence: CTCAGATT
attatttctattaattacac

SEQ ID NO: 44107 - DNA, 20 bp, Artificial Sequence
  Description of Artificial Sequence: Synthetic oligonucleotide
  Target: LAMA2; (+) strand; PAM type: NNNNGHTT; PAM sequence: CTCAGATT
tcagattatttctattacac

SEQ ID NO: 44108 - DNA, 20 bp, Artificial Sequence
  Description of Artificial Sequence: Synthetic oligonucleotide
  Target: LAMA2; (+) strand; PAM type: NNNNGHTT; PAM sequence: CTCAGATT
attacacctcagattattat

SEQ ID NO: 44109 - DNA, 20 bp, Artificial Sequence
  Description of Artificial Sequence: Synthetic oligonucleotide
  Target: LAMA2; (+) strand; PAM type: NNNNGHTT; PAM sequence: CTCAGATT
cagattattatctattacac

SEQ ID NO: 44110 - DNA, 20 bp, Artificial Sequence
  Description of Artificial Sequence: Synthetic oligonucleotide
  Target: LAMA2; (+) strand; PAM type: NNNNGHTT; PAM sequence: CGAAGATT
ttctattattcagtcttagc

SEQ ID NO: 44111 - DNA, 20 bp, Artificial Sequence
  Description of Artificial Sequence: Synthetic oligonucleotide
  Target: LAMA2; (+) strand; PAM type: NNNNGHTT; PAM sequence: ACTAGATT
ttgcattaaacagaccaatc

SEQ ID NO: 44112 - DNA, 20 bp, Artificial Sequence
  Description of Artificial Sequence: Synthetic oligonucleotide
  Target: LAMA2; (+) strand; PAM type: NNNNGHTT; PAM sequence: AAGGGCTT
tccatgtgaggcaactaagg

SEQ ID NO: 44113 - DNA, 20 bp, Artificial Sequence
  Description of Artificial Sequence: Synthetic oligonucleotide
  Target: LAMA2; (+) strand; PAM type: NNNNGHTT; PAM sequence: TATGGCTT
taaccatccgttctggggaa

SEQ ID NO: 44114 - DNA, 20 bp, Artificial Sequence
  Description of Artificial Sequence: Synthetic oligonucleotide
  Target: LAMA2; (+) strand; PAM type: NNNNGHTT; PAM sequence: TGATGTTT
taaacaagtccccattctta

SEQ ID NO: 44115 - DNA, 20 bp, Artificial Sequence
  Description of Artificial Sequence: Synthetic oligonucleotide
  Target: LAMA2; (+) strand; PAM type: NNNNGHTT; PAM sequence: AGATGCTT
aagggacttttcagctctgg

SEQ ID NO: 44116 - DNA, 20 bp, Artificial Sequence
  Description of Artificial Sequence: Synthetic oligonucleotide
  Target: LAMA2; (+) strand; PAM type: NNNNGHTT; PAM sequence: TATAGCTT
aatgaacatctcatgtaggg

SEQ ID NO: 44117 - DNA, 20 bp, Artificial Sequence
  Description of Artificial Sequence: Synthetic oligonucleotide
  Target: LAMA2; (+) strand; PAM type: NNNNGHTT; PAM sequence: TCATGTTT
ctcatgtagggtatagcttc

SEQ ID NO: 44118 - DNA, 20 bp, Artificial Sequence
  Description of Artificial Sequence: Synthetic oligonucleotide
  Target: LAMA2; (+) strand; PAM type: NNNNGHTT; PAM sequence: TTGTGCTT
gagtcagatcacgtgggacc

SEQ ID NO: 44119 - DNA, 20 bp, Artificial Sequence
  Description of Artificial Sequence: Synthetic oligonucleotide
  Target: LAMA2; (+) strand; PAM type: NNNNGHTT; PAM sequence: CTTCGTTT
agatcacgtgggaccttgtg

SEQ ID NO: 44120 - DNA, 20 bp, Artificial Sequence
  Description of Artificial Sequence: Synthetic oligonucleotide
  Target: LAMA2; (+) strand; PAM type: NNNNGHTT; PAM sequence: AATTGATT
attttattctaaatgttggg

SEQ ID NO: 44121 - DNA, 20 bp, Artificial Sequence
  Description of Artificial Sequence: Synthetic oligonucleotide
  Target: LAMA2; (+) strand; PAM type: NNNNGHTT; PAM sequence: AGATGATT
ctaaatgttgggaattgatt

SEQ ID NO: 44122 - DNA, 20 bp, Artificial Sequence
  Description of Artificial Sequence: Synthetic oligonucleotide
  Target: LAMA2; (+) strand; PAM type: NNNNGHTT; PAM sequence: CAATGCTT
agacaagggttggaggcaag

SEQ ID NO: 44123 - DNA, 20 bp, Artificial Sequence
  Description of Artificial Sequence: Synthetic oligonucleotide
  Target: LAMA2; (+) strand; PAM type: NNNNGHTT; PAM sequence: TTCGGTTT
ctacagaagactttggtagg

SEQ ID NO: 44124 - DNA, 20 bp, Artificial Sequence
  Description of Artificial Sequence: Synthetic oligonucleotide
  Target: LAMA2; (+) strand; PAM type: NNNNGHTT; PAM sequence: TACAGCTT
caagctctgcaggagaccac

SEQ ID NO: 44125 - DNA, 20 bp, Artificial Sequence
  Description of Artificial Sequence: Synthetic oligonucleotide
  Target: LAMA2; (+) strand; PAM type: NNNNGHTT; PAM sequence: AGAAGTTT
tcacatgtatgcaatttacc

SEQ ID NO: 44126 - DNA, 20 bp, Artificial Sequence
  Description of Artificial Sequence: Synthetic oligonucleotide
  Target: LAMA2; (+) strand; PAM type: NNNNGHTT; PAM sequence: CTTAGATT
tttaccagaagttttgaaat

SEQ ID NO: 44127 - DNA, 20 bp, Artificial Sequence
  Description of Artificial Sequence: Synthetic oligonucleotide
  Target: LAMA2; (+) strand; PAM type: NNNNGHTT; PAM sequence: AATAGATT
aattcctgcagctctctgag

SEQ ID NO: 44128 - DNA, 20 bp, Artificial Sequence
  Description of Artificial Sequence: Synthetic oligonucleotide
  Target: LAMA2; (+) strand; PAM type: NNNNGHTT; PAM sequence: TAATGATT
atagttgtaaaaatttaggt

SEQ ID NO: 44129 - DNA, 20 bp, Artificial Sequence
  Description of Artificial Sequence: Synthetic oligonucleotide
  Target: LAMA2; (+) strand; PAM type: NNNNGHTT; PAM sequence: CTGGGATT
tgcctcagccacgagagtag

SEQ ID NO: 44130 - DNA, 20 bp, Artificial Sequence
  Description of Artificial Sequence: Synthetic oligonucleotide
  Target: LAMA2; (+) strand; PAM type: NNNNGHTT; PAM sequence: TACAGATT
gccacgagagtagctgggat

SEQ ID NO: 44131 - DNA, 20 bp, Artificial Sequence
  Description of Artificial Sequence: Synthetic oligonucleotide
  Target: LAMA2; (+) strand; PAM type: NNNNGHTT; PAM sequence: TGAGGTTT
ttttgtatttttagtagata

SEQ ID NO: 44132 - DNA, 20 bp, Artificial Sequence
  Description of Artificial Sequence: Synthetic oligonucleotide
  Target: LAMA2; (+) strand; PAM type: NNNNGHTT; PAM sequence: AAATGCTT
gtacacagaagttacaataa

SEQ ID NO: 44133 - DNA, 20 bp, Artificial Sequence
  Description of Artificial Sequence: Synthetic oligonucleotide
  Target: LAMA2; (+) strand; PAM type: NNNNGHTT; PAM sequence: CCCAGTTT
atcattatgttgatgaatta

SEQ ID NO: 44134 - DNA, 20 bp, Artificial Sequence
  Description of Artificial Sequence: Synthetic oligonucleotide
  Target: LAMA2; (+) strand; PAM type: NNNNGHTT; PAM sequence: TTTTGTTT
tattttagccacaggtattt

SEQ ID NO: 44135 - DNA, 20 bp, Artificial Sequence
  Description of Artificial Sequence: Synthetic oligonucleotide
  Target: LAMA2; (+) strand; PAM type: NNNNGHTT; PAM sequence: TTTTGTTT
tagccacaggtatttttttg

SEQ ID NO: 44136 - DNA, 20 bp, Artificial Sequence
  Description of Artificial Sequence: Synthetic oligonucleotide
  Target: LAMA2; (+) strand; PAM type: NNNNGHTT; PAM sequence: CAAGGTTT
attcgacttttattacgtga

SEQ ID NO: 44137 - DNA, 20 bp, Artificial Sequence
  Description of Artificial Sequence: Synthetic oligonucleotide
  Target: LAMA2; (+) strand; PAM type: NNNNGHTT; PAM sequence: ATTTGCTT
acgtgacaaggtttaaaaaa

SEQ ID NO: 44138 - DNA, 20 bp, Artificial Sequence
  Description of Artificial Sequence: Synthetic oligonucleotide
  Target: LAMA2; (+) strand; PAM type: NNNNGHTT; PAM sequence: AAGAGTTT
tacgaatgttaagagtctgt

SEQ ID NO: 44139 - DNA, 20 bp, Artificial Sequence
  Description of Artificial Sequence: Synthetic oligonucleotide
  Target: LAMA2; (+) strand; PAM type: NNNNGHTT; PAM sequence: ATTTGATT
gtaagagtttcttcagctgc

SEQ ID NO: 44140 - DNA, 20 bp, Artificial Sequence
  Description of Artificial Sequence: Synthetic oligonucleotide
  Target: LAMA2; (+) strand; PAM type: NNNNGHTT; PAM sequence: TGAGGCTT
agttaagaagatgacttatt

SEQ ID NO: 44141 - DNA, 20 bp, Artificial Sequence
  Description of Artificial Sequence: Synthetic oligonucleotide
  Target: LAMA2; (+) strand; PAM type: NNNNGHTT; PAM sequence: ATAAGATT
aattaagaataaatattttt

SEQ ID NO: 44142 - DNA, 20 bp, Artificial Sequence
  Description of Artificial Sequence: Synthetic oligonucleotide
  Target: LAMA2; (+) strand; PAM type: NNNNGHTT; PAM sequence: GGAAGCTT
atgaagtagttcccttgtca

SEQ ID NO: 44143 - DNA, 20 bp, Artificial Sequence
  Description of Artificial Sequence: Synthetic oligonucleotide
  Target: LAMA2; (+) strand; PAM type: NNNNGHTT; PAM sequence: GTGTGTTT
tcaggaagctttttcttaaa

SEQ ID NO: 44144 - DNA, 20 bp, Artificial Sequence
  Description of Artificial Sequence: Synthetic oligonucleotide
  Target: LAMA2; (+) strand; PAM type: NNNNGHTT; PAM sequence: TTATGATT
gctttttcttaaagtgtgtt

SEQ ID NO: 44145 - DNA, 20 bp, Artificial Sequence
  Description of Artificial Sequence: Synthetic oligonucleotide
  Target: LAMA2; (+) strand; PAM type: NNNNGHTT; PAM sequence: GATGGTTT
cggaatttatttggggtagt

SEQ ID NO: 44146 - DNA, 20 bp, Artificial Sequence
  Description of Artificial Sequence: Synthetic oligonucleotide
  Target: LAMA2; (+) strand; PAM type: NNNNGHTT; PAM sequence: ACTTGATT
ctgctccatgccagtctctc

SEQ ID NO: 44147 - DNA, 20 bp, Artificial Sequence
  Description of Artificial Sequence: Synthetic oligonucleotide
  Target: LAMA2; (+) strand; PAM type: NNNNGHTT; PAM sequence: GAAAGATT
ccagtctctcacttgattta

SEQ ID NO: 44148 - DNA, 20 bp, Artificial Sequence
  Description of Artificial Sequence: Synthetic oligonucleotide
  Target: LAMA2; (+) strand; PAM type: NNNNGHTT; PAM sequence: CTTAGCTT
tttagaaagatttgtgcgtc

SEQ ID NO: 44149 - DNA, 20 bp, Artificial Sequence
  Description of Artificial Sequence: Synthetic oligonucleotide
  Target: LAMA2; (+) strand; PAM type: NNNNGHTT; PAM sequence: AAAAGTTT
gacctagtgaagactgaaag

SEQ ID NO: 44150 - DNA, 20 bp, Artificial Sequence
  Description of Artificial Sequence: Synthetic oligonucleotide
  Target: LAMA2; (+) strand; PAM type: NNNNGHTT; PAM sequence: AGGGGTTT
agaaaaggtggtacctgtac

SEQ ID NO: 44151 - DNA, 20 bp, Artificial Sequence
  Description of Artificial Sequence: Synthetic oligonucleotide
  Target: LAMA2; (+) strand; PAM type: NNNNGHTT; PAM sequence: AGCAGATT
tgtctagaagcagagccagc

SEQ ID NO: 44152 - DNA, 20 bp, Artificial Sequence
  Description of Artificial Sequence: Synthetic oligonucleotide
  Target: LAMA2; (+) strand; PAM type: NNNNGHTT; PAM sequence: CCAGGATT
accccttaaggaacaggatg

SEQ ID NO: 44153 - DNA, 20 bp, Artificial Sequence
  Description of Artificial Sequence: Synthetic oligonucleotide
  Target: LAMA2; (+) strand; PAM type: NNNNGHTT; PAM sequence: ATGTGCTT
acattagatattgctatttt

SEQ ID NO: 44154 - DNA, 20 bp, Artificial Sequence
  Description of Artificial Sequence: Synthetic oligonucleotide
  Target: LAMA2; (+) strand; PAM type: NNNNGHTT; PAM sequence: CACTGTTT
tatgtgctttgaagcaatta

SEQ ID NO: 44155 - DNA, 20 bp, Artificial Sequence
  Description of Artificial Sequence: Synthetic oligonucleotide
  Target: LAMA2; (+) strand; PAM type: NNNNGHTT; PAM sequence: CACAGATT
atctgttctattcactgtct

SEQ ID NO: 44156 - DNA, 20 bp, Artificial Sequence
  Description of Artificial Sequence: Synthetic oligonucleotide
  Target: LAMA2; (+) strand; PAM type: NNNNGHTT; PAM sequence: GACAGTTT
tcactgtctcacagatttag

SEQ ID NO: 44157 - DNA, 20 bp, Artificial Sequence
  Description of Artificial Sequence: Synthetic oligonucleotide
  Target: LAMA2; (+) strand; PAM type: NNNNGHTT; PAM sequence: ACTAGATT
acagtttattaattaagaac

SEQ ID NO: 44158 - DNA, 20 bp, Artificial Sequence
  Description of Artificial Sequence: Synthetic oligonucleotide
  Target: LAMA2; (+) strand; PAM type: NNNNGHTT; PAM sequence: AATGGTTT
accttgttctttgctgtata

SEQ ID NO: 44159 - DNA, 20 bp, Artificial Sequence
  Description of Artificial Sequence: Synthetic oligonucleotide
  Target: LAMA2; (+) strand; PAM type: NNNNGHTT; PAM sequence: TGTGGATT
tcaaattcccatcagttata

SEQ ID NO: 44160 - DNA, 20 bp, Artificial Sequence
  Description of Artificial Sequence: Synthetic oligonucleotide
  Target: LAMA2; (+) strand; PAM type: NNNNGHTT; PAM sequence: TCATGCTT
tgtggattataatgtctgcc

SEQ ID NO: 44161 - DNA, 20 bp, Artificial Sequence
  Description of Artificial Sequence: Synthetic oligonucleotide
  Target: LAMA2; (+) strand; PAM type: NNNNGHTT; PAM sequence: TGATGCTT
cttctggatgagcaaaacct

SEQ ID NO: 44162 - DNA, 20 bp, Artificial Sequence
  Description of Artificial Sequence: Synthetic oligonucleotide
  Target: LAMA2; (+) strand; PAM type: NNNNGHTT; PAM sequence: GCCAGATT
ccacattgaaaaaaatacat

SEQ ID NO: 44163 - DNA, 20 bp, Artificial Sequence
  Description of Artificial Sequence: Synthetic oligonucleotide
  Target: LAMA2; (+) strand; PAM type: NNNNGHTT; PAM sequence: GATGGTTT
aaaaaaatgaaattggaaag

SEQ ID NO: 44164 - DNA, 20 bp, Artificial Sequence
  Description of Artificial Sequence: Synthetic oligonucleotide
  Target: LAMA2; (+) strand; PAM type: NNNNGHTT; PAM sequence: AAATGATT
agtaaaatatattagtaata

SEQ ID NO: 44165 - DNA, 20 bp, Artificial Sequence
  Description of Artificial Sequence: Synthetic oligonucleotide
  Target: LAMA2; (+) strand; PAM type: NNNNGHTT; PAM sequence: AATGGCTT
atcatctctctgtctcttgt

SEQ ID NO: 44166 - DNA, 20 bp, Artificial Sequence
  Description of Artificial Sequence: Synthetic oligonucleotide
  Target: LAMA2; (+) strand; PAM type: NNNNGHTT; PAM sequence: CTTTGATT
ttttagttatgatattggta

SEQ ID NO: 44167 - DNA, 20 bp, Artificial Sequence
  Description of Artificial Sequence: Synthetic oligonucleotide
  Target: LAMA2; (+) strand; PAM type: NNNNGHTT; PAM sequence: TTTGGTTT
ttatgatattggtactttga

SEQ ID NO: 44168 - DNA, 20 bp, Artificial Sequence
  Description of Artificial Sequence: Synthetic oligonucleotide
  Target: LAMA2; (+) strand; PAM type: NNNNGHTT; PAM sequence: TATAGATT
aaatgtacagaaaaataaat

SEQ ID NO: 44169 - DNA, 20 bp, Artificial Sequence
  Description of Artificial Sequence: Synthetic oligonucleotide
  Target: LAMA2; (+) strand; PAM type: NNNNGHTT; PAM sequence: AATAGCTT
taagatgctgcagacctctt

SEQ ID NO: 44170 - DNA, 20 bp, Artificial Sequence
  Description of Artificial Sequence: Synthetic oligonucleotide
  Target: LAMA2; (+) strand; PAM type: NNNNGHTT; PAM sequence: GCAGGATT
acattagagctcatttgaga

SEQ ID NO: 44171 - DNA, 20 bp, Artificial Sequence
  Description of Artificial Sequence: Synthetic oligonucleotide
  Target: LAMA2; (+) strand; PAM type: NNNNGHTT; PAM sequence: TCTGGCTT
tactgtgcaattttcctacc

SEQ ID NO: 44172 - DNA, 20 bp, Artificial Sequence
  Description of Artificial Sequence: Synthetic oligonucleotide
  Target: LAMA2; (+) strand; PAM type: NNNNGHTT; PAM sequence: GAGAGTTT
gagaaggacactgataataa

SEQ ID NO: 44173 - DNA, 20 bp, Artificial Sequence
  Description of Artificial Sequence: Synthetic oligonucleotide
  Target: LAMA2; (+) strand; PAM type: NNNNGHTT; PAM sequence: AAATGATT
tccttataatccttgaatca

SEQ ID NO: 44174 - DNA, 20 bp, Artificial Sequence
  Description of Artificial Sequence: Synthetic oligonucleotide
  Target: LAMA2; (+) strand; PAM type: NNNNGHTT; PAM sequence: GCTAGATT
agttatttttaaaaatagaa

SEQ ID NO: 44175 - DNA, 20 bp, Artificial Sequence
  Description of Artificial Sequence: Synthetic oligonucleotide
  Target: LAMA2; (+) strand; PAM type: NNNNGHTT; PAM sequence: TTTTGTTT
ttgtgcctcttttgacatta

SEQ ID NO: 44176 - DNA, 20 bp, Artificial Sequence
  Description of Artificial Sequence: Synthetic oligonucleotide
  Target: LAMA2; (+) strand; PAM type: NNNNGHTT; PAM sequence: TGGTGATT
agcacctttaaaaactctac

SEQ ID NO: 44177 - DNA, 20 bp, Artificial Sequence
  Description of Artificial Sequence: Synthetic oligonucleotide
  Target: LAMA2; (+) strand; PAM type: NNNNGHTT; PAM sequence: GCATGATT
aaactataacagtatttttg

SEQ ID NO: 44178 - DNA, 20 bp, Artificial Sequence
  Description of Artificial Sequence: Synthetic oligonucleotide
  Target: LAMA2; (+) strand; PAM type: NNNNGHTT; PAM sequence: ATTGGCTT
gctatatacttctctaactt

SEQ ID NO: 44179 - DNA, 20 bp, Artificial Sequence
  Description of Artificial Sequence: Synthetic oligonucleotide
  Target: LAMA2; (+) strand; PAM type: NNNNGHTT; PAM sequence: ATTTGATT
ctctaacttattggcttatt

SEQ ID NO: 44180 - DNA, 20 bp, Artificial Sequence
  Description of Artificial Sequence: Synthetic oligonucleotide
  Target: LAMA2; (+) strand; PAM type: NNNNGHTT; PAM sequence: GAGAGTTT
ccttaggcagtgttaattat

SEQ ID NO: 44181 - DNA, 20 bp, Artificial Sequence
  Description of Artificial Sequence: Synthetic oligonucleotide
  Target: LAMA2; (+) strand; PAM type: NNNNGHTT; PAM sequence: CCGAGTTT
gtgttaattatgagagtttg

SEQ ID NO: 44182 - DNA, 20 bp, Artificial Sequence
  Description of Artificial Sequence: Synthetic oligonucleotide
  Target: LAMA2; (+) strand; PAM type: NNNNGHTT; PAM sequence: AACTGTTT
gtgggtggaggatggatata

SEQ ID NO: 44183 - DNA, 20 bp, Artificial Sequence
  Description of Artificial Sequence: Synthetic oligonucleotide
  Target: LAMA2; (+) strand; PAM type: NNNNGHTT; PAM sequence: TTCAGATT
tttcaatgtactgaaggcat

SEQ ID NO: 44184 - DNA, 20 bp, Artificial Sequence
  Description of Artificial Sequence: Synthetic oligonucleotide
  Target: LAMA2; (+) strand; PAM type: NNNNGHTT; PAM sequence: AAGTGCTT
taactatggcaactcactga

SEQ ID NO: 44185 - DNA, 20 bp, Artificial Sequence
  Description of Artificial Sequence: Synthetic oligonucleotide
  Target: LAMA2; (+) strand; PAM type: NNNNGHTT; PAM sequence: TCGTGCTT
accatgggagtggatggagt

SEQ ID NO: 44186 - DNA, 20 bp, Artificial Sequence
  Description of Artificial Sequence: Synthetic oligonucleotide
  Target: LAMA2; (+) strand; PAM type: NNNNGHTT; PAM sequence: AACTGCTT
ataagtatttttccctcctc

SEQ ID NO: 44187 - DNA, 20 bp, Artificial Sequence
  Description of Artificial Sequence: Synthetic oligonucleotide
  Target: LAMA2; (+) strand; PAM type: NNNNGHTT; PAM sequence: CTAAGCTT
ttccctcctcaactgctttt

SEQ ID NO: 44188 - DNA, 20 bp, Artificial Sequence
  Description of Artificial Sequence: Synthetic oligonucleotide
  Target: LAMA2; (+) strand; PAM type: NNNNGHTT; PAM sequence: AGTTGCTT
agttaaccaggtgaccctct

SEQ ID NO: 44189 - DNA, 20 bp, Artificial Sequence
  Description of Artificial Sequence: Synthetic oligonucleotide
  Target: LAMA2; (+) strand; PAM type: NNNNGHTT; PAM sequence: ACAGGCTT
ctctagttgctttattaagc

SEQ ID NO: 44190 - DNA, 20 bp, Artificial Sequence
  Description of Artificial Sequence: Synthetic oligonucleotide
  Target: LAMA2; (+) strand; PAM type: NNNNGHTT; PAM sequence: AGTTGCTT
tccttgcatcgtatgaaaag

SEQ ID NO: 44191 - DNA, 20 bp, Artificial Sequence
  Description of Artificial Sequence: Synthetic oligonucleotide
  Target: LAMA2; (+) strand; PAM type: NNNNGHTT; PAM sequence: AAAGGTTT
gtggaatataaatttcagtt

SEQ ID NO: 44192 - DNA, 20 bp, Artificial Sequence
  Description of Artificial Sequence: Synthetic oligonucleotide
  Target: LAMA2; (+) strand; PAM type: NNNNGHTT; PAM sequence: CATTGTTT
ggagtatataataaggaaag

SEQ ID NO: 44193 - DNA, 20 bp, Artificial Sequence
  Description of Artificial Sequence: Synthetic oligonucleotide
  Target: LAMA2; (+) strand; PAM type: NNNNGHTT; PAM sequence: TGCAGTTT
gatggaactgaaagttcaca

SEQ ID NO: 44194 - DNA, 20 bp, Artificial Sequence
  Description of Artificial Sequence: Synthetic oligonucleotide
  Target: LAMA2; (+) strand; PAM type: NNNNGHTT; PAM sequence: TAATGCTT
cactcttctgccaatagtat

SEQ ID NO: 44195 - DNA, 20 bp, Artificial Sequence
  Description of Artificial Sequence: Synthetic oligonucleotide
  Target: LAMA2; (+) strand; PAM type: NNNNGHTT; PAM sequence: AAATGTTT
aatagtattaatgctttggg

SEQ ID NO: 44196 - DNA, 20 bp, Artificial Sequence
  Description of Artificial Sequence: Synthetic oligonucleotide
  Target: LAMA2; (+) strand; PAM type: NNNNGHTT; PAM sequence: CACTGATT
tggaaatgagcctgtgggtt

SEQ ID NO: 44197 - DNA, 20 bp, Artificial Sequence
  Description of Artificial Sequence: Synthetic oligonucleotide
  Target: LAMA2; (+) strand; PAM type: NNNNGHTT; PAM sequence: TATAGCTT
atttattccttcatacagta

SEQ ID NO: 44198 - DNA, 20 bp, Artificial Sequence
  Description of Artificial Sequence: Synthetic oligonucleotide
  Target: LAMA2; (+) strand; PAM type: NNNNGHTT; PAM sequence: GTCTGCTT
accaataaaatagactttgt

SEQ ID NO: 44199 - DNA, 20 bp, Artificial Sequence
  Description of Artificial Sequence: Synthetic oligonucleotide
  Target: LAMA2; (+) strand; PAM type: NNNNGHTT; PAM sequence: CGAGGTTT
ttttgtatttttagtagaga

SEQ ID NO: 44200 - DNA, 20 bp, Artificial Sequence
  Description of Artificial Sequence: Synthetic oligonucleotide
  Target: LAMA2; (+) strand; PAM type: NNNNGHTT; PAM sequence: CTGGGATT
tgcctctgcctcccaaagtg

SEQ ID NO: 44201 - DNA, 20 bp, Artificial Sequence
  Description of Artificial Sequence: Synthetic oligonucleotide
  Target: LAMA2; (+) strand; PAM type: NNNNGHTT; PAM sequence: CTGAGATT
caaaggaagtggcaattaac

SEQ ID NO: 44202 - DNA, 20 bp, Artificial Sequence
  Description of Artificial Sequence: Synthetic oligonucleotide
  Target: LAMA2; (+) strand; PAM type: NNNNGHTT; PAM sequence: TTTAGCTT
ccaggtgaataattgagcac

SEQ ID NO: 44203 - DNA, 20 bp, Artificial Sequence
  Description of Artificial Sequence: Synthetic oligonucleotide
  Target: LAMA2; (+) strand; PAM type: NNNNGHTT; PAM sequence: GAATGCTT
caggaactgaaagaaatttg

SEQ ID NO: 44204 - DNA, 20 bp, Artificial Sequence
  Description of Artificial Sequence: Synthetic oligonucleotide
  Target: LAMA2; (+) strand; PAM type: NNNNGHTT; PAM sequence: TATAGTTT
caaagaggcagcagggataa

SEQ ID NO: 44205 - DNA, 20 bp, Artificial Sequence
  Description of Artificial Sequence: Synthetic oligonucleotide
  Target: LAMA2; (+) strand; PAM type: NNNNGHTT; PAM sequence: CCATGCTT
atcataggggcaggtctttc

SEQ ID NO: 44206 - DNA, 20 bp, Artificial Sequence
  Description of Artificial Sequence: Synthetic oligonucleotide
  Target: LAMA2; (+) strand; PAM type: NNNNGHTT; PAM sequence: TGATGATT
tgaataagtctcacgagatc

SEQ ID NO: 44207 - DNA, 20 bp, Artificial Sequence
  Description of Artificial Sequence: Synthetic oligonucleotide
  Target: LAMA2; (+) strand; PAM type: NNNNGHTT; PAM sequence: CCATGATT
tgctcttcaagtactttctg

SEQ ID NO: 44208 - DNA, 20 bp, Artificial Sequence
  Description of Artificial Sequence: Synthetic oligonucleotide
  Target: LAMA2; (+) strand; PAM type: NNNNGHTT; PAM sequence: AATGGATT
ttctttattagcagcatgag

SEQ ID NO: 44209 - DNA, 20 bp, Artificial Sequence
  Description of Artificial Sequence: Synthetic oligonucleotide
  Target: LAMA2; (+) strand; PAM type: NNNNGHTT; PAM sequence: AAACGCTT
caagcaagaagcagatcatg

SEQ ID NO: 44210 - DNA, 20 bp, Artificial Sequence
  Description of Artificial Sequence: Synthetic oligonucleotide
  Target: LAMA2; (+) strand; PAM type: NNNNGHTT; PAM sequence: GTGAGTTT
acgctttgtgagccttgtta

SEQ ID NO: 44211 - DNA, 20 bp, Artificial Sequence
  Description of Artificial Sequence: Synthetic oligonucleotide
  Target: LAMA2; (+) strand; PAM type: NNNNGHTT; PAM sequence: AAGGGATT
aaaaggatgtgaagtaatta

SEQ ID NO: 44212 - DNA, 20 bp, Artificial Sequence
  Description of Artificial Sequence: Synthetic oligonucleotide
  Target: LAMA2; (+) strand; PAM type: NNNNGHTT; PAM sequence: ACAGGATT
tgaataatatgaatggactg

SEQ ID NO: 44213 - DNA, 20 bp, Artificial Sequence
  Description of Artificial Sequence: Synthetic oligonucleotide
  Target: LAMA2; (+) strand; PAM type: NNNNGHTT; PAM sequence: CTCAGATT
agaaggctctaggcatgatg

SEQ ID NO: 44214 - DNA, 20 bp, Artificial Sequence
  Description of Artificial Sequence: Synthetic oligonucleotide
  Target: LAMA2; (+) strand; PAM type: NNNNGHTT; PAM sequence: TGCTGATT
tctaggcatgatgctcagat

SEQ ID NO: 44215 - DNA, 20 bp, Artificial Sequence
  Description of Artificial Sequence: Synthetic oligonucleotide
  Target: LAMA2; (+) strand; PAM type: NNNNGHTT; PAM sequence: TTTTGTTT
aggaaacaagaatccccact

SEQ ID NO: 44216 - DNA, 20 bp, Artificial Sequence
  Description of Artificial Sequence: Synthetic oligonucleotide
  Target: LAMA2; (+) strand; PAM type: NNNNGHTT; PAM sequence: TTTTGTTT
acaagaatccccactttttg

SEQ ID NO: 44217 - DNA, 20 bp, Artificial Sequence
  Description of Artificial Sequence: Synthetic oligonucleotide
  Target: LAMA2; (+) strand; PAM type: NNNNGHTT; PAM sequence: TAATGATT
gggagaactctagctggtga

SEQ ID NO: 44218 - DNA, 20 bp, Artificial Sequence
  Description of Artificial Sequence: Synthetic oligonucleotide
  Target: LAMA2; (+) strand; PAM type: NNNNGHTT; PAM sequence: ATAAGCTT
aatgggaggtaacatccagg

SEQ ID NO: 44219 - DNA, 20 bp, Artificial Sequence
  Description of Artificial Sequence: Synthetic oligonucleotide
  Target: LAMA2; (+) strand; PAM type: NNNNGHTT; PAM sequence: AGATGCTT
tatcaacaccagagaggaag

SEQ ID NO: 44220 - DNA, 20 bp, Artificial Sequence
  Description of Artificial Sequence: Synthetic oligonucleotide
  Target: LAMA2; (+) strand; PAM type: NNNNGHTT; PAM sequence: CTTTGCTT
acaccagagaggaagagatg

SEQ ID NO: 44221 - DNA, 20 bp, Artificial Sequence
  Description of Artificial Sequence: Synthetic oligonucleotide
  Target: LAMA2; (+) strand; PAM type: NNNNGHTT; PAM sequence: ATTTGATT
aagaatcatgacaataagaa

SEQ ID NO: 44222 - DNA, 20 bp, Artificial Sequence
  Description of Artificial Sequence: Synthetic oligonucleotide
  Target: LAMA2; (+) strand; PAM type: NNNNGHTT; PAM sequence: TTCAGATT
aaatttgatttattccatat

SEQ ID NO: 44223 - DNA, 20 bp, Artificial Sequence
  Description of Artificial Sequence: Synthetic oligonucleotide
  Target: LAMA2; (+) strand; PAM type: NNNNGHTT; PAM sequence: GATTGTTT
ttgatttattccatatttca

SEQ ID NO: 44224 - DNA, 20 bp, Artificial Sequence
  Description of Artificial Sequence: Synthetic oligonucleotide
  Target: LAMA2; (+) strand; PAM type: NNNNGHTT; PAM sequence: CTGGGATT
catacgaatcctaagaaatt

SEQ ID NO: 44225 - DNA, 20 bp, Artificial Sequence
  Description of Artificial Sequence: Synthetic oligonucleotide
  Target: LAMA2; (+) strand; PAM type: NNNNGHTT; PAM sequence: AAATGATT
caggaccatagcactgatga

SEQ ID NO: 44226 - DNA, 20 bp, Artificial Sequence
  Description of Artificial Sequence: Synthetic oligonucleotide
  Target: LAMA2; (+) strand; PAM type: NNNNGHTT; PAM sequence: ATGTGTTT
gaccatattttcctcgttgg

SEQ ID NO: 44227 - DNA, 20 bp, Artificial Sequence
  Description of Artificial Sequence: Synthetic oligonucleotide
  Target: LAMA2; (+) strand; PAM type: NNNNGHTT; PAM sequence: TTCTGCTT
gtgtttatggatatatttta

SEQ ID NO: 44228 - DNA, 20 bp, Artificial Sequence
  Description of Artificial Sequence: Synthetic oligonucleotide
  Target: LAMA2; (+) strand; PAM type: NNNNGHTT; PAM sequence: CTGAGATT
tttattctgcttttatcttt

SEQ ID NO: 44229 - DNA, 20 bp, Artificial Sequence
  Description of Artificial Sequence: Synthetic oligonucleotide
  Target: LAMA2; (+) strand; PAM type: NNNNGHTT; PAM sequence: CTCTGTTT
cttccttcgttcctccccct

SEQ ID NO: 44230 - DNA, 20 bp, Artificial Sequence
  Description of Artificial Sequence: Synthetic oligonucleotide
  Target: LAMA2; (+) strand; PAM type: NNNNGHTT; PAM sequence: TCTTGCTT
ttcttccttcctcctttctt

SEQ ID NO: 44231 - DNA, 20 bp, Artificial Sequence
  Description of Artificial Sequence: Synthetic oligonucleotide
  Target: LAMA2; (+) strand; PAM type: NNNNGHTT; PAM sequence: TTTTGTTT
accatgcccaactaatttat

SEQ ID NO: 44232 - DNA, 20 bp, Artificial Sequence
  Description of Artificial Sequence: Synthetic oligonucleotide
  Target: LAMA2; (+) strand; PAM type: NNNNGHTT; PAM sequence: CTGGGATT
tgcctcagcctttcaaagtg

SEQ ID NO: 44233 - DNA, 20 bp, Artificial Sequence
  Description of Artificial Sequence: Synthetic oligonucleotide
  Target: LAMA2; (+) strand; PAM type: NNNNGHTT; PAM sequence: GAGAGATT
ccaaacttttcttttttttt

SEQ ID NO: 44234 - DNA, 20 bp, Artificial Sequence
  Description of Artificial Sequence: Synthetic oligonucleotide
  Target: LAMA2; (+) strand; PAM type: NNNNGHTT; PAM sequence: ACTAGATT
tttttttgagagattcttaa

SEQ ID NO: 44235 - DNA, 20 bp, Artificial Sequence
  Description of Artificial Sequence: Synthetic oligonucleotide
  Target: LAMA2; (+) strand; PAM type: NNNNGHTT; PAM sequence: GACTGATT
ttgtacttacgataaatgtt

SEQ ID NO: 44236 - DNA, 20 bp, Artificial Sequence
  Description of Artificial Sequence: Synthetic oligonucleotide
  Target: LAMA2; (+) strand; PAM type: NNNNGHTT; PAM sequence: CAGTGCTT
gactgattcattaccttcaa

SEQ ID NO: 44237 - DNA, 20 bp, Artificial Sequence
  Description of Artificial Sequence: Synthetic oligonucleotide
  Target: LAMA2; (+) strand; PAM type: NNNNGHTT; PAM sequence: AAATGATT
cagcctctgatggttcagag

SEQ ID NO: 44238 - DNA, 20 bp, Artificial Sequence
  Description of Artificial Sequence: Synthetic oligonucleotide
  Target: LAMA2; (+) strand; PAM type: NNNNGHTT; PAM sequence: TCAGGTTT
tactttatatttcacctgaa

SEQ ID NO: 44239 - DNA, 20 bp, Artificial Sequence
  Description of Artificial Sequence: Synthetic oligonucleotide
  Target: LAMA2; (+) strand; PAM type: NNNNGHTT; PAM sequence: TCTAGTTT
taatttattttcaacttttc

SEQ ID NO: 44240 - DNA, 20 bp, Artificial Sequence
  Description of Artificial Sequence: Synthetic oligonucleotide
  Target: LAMA2; (+) strand; PAM type: NNNNGHTT; PAM sequence: CACTGTTT
caacttttctctagttttac

SEQ ID NO: 44241 - DNA, 20 bp, Artificial Sequence
  Description of Artificial Sequence: Synthetic oligonucleotide
  Target: LAMA2; (+) strand; PAM type: NNNNGHTT; PAM sequence: TCTTGTTT
aatttcatcacttttttttc

SEQ ID NO: 44242 - DNA, 20 bp, Artificial Sequence
  Description of Artificial Sequence: Synthetic oligonucleotide
  Target: LAMA2; (+) strand; PAM type: NNNNGHTT; PAM sequence: GGTTGATT
tcttgtttgcctcagagtat

SEQ ID NO: 44243 - DNA, 20 bp, Artificial Sequence
  Description of Artificial Sequence: Synthetic oligonucleotide
  Target: LAMA2; (+) strand; PAM type: NNNNGHTT; PAM sequence: CCATGATT
atcattaaaaacaagccatt

SEQ ID NO: 44244 - DNA, 20 bp, Artificial Sequence
  Description of Artificial Sequence: Synthetic oligonucleotide
  Target: LAMA2; (+) strand; PAM type: NNNNGHTT; PAM sequence: ATGAGTTT
ctggatatccaccttcactg

SEQ ID NO: 44245 - DNA, 20 bp, Artificial Sequence
  Description of Artificial Sequence: Synthetic oligonucleotide
  Target: LAMA2; (+) strand; PAM type: NNNNGHTT; PAM sequence: AAATGCTT
ctcattcttacctgttaacc

SEQ ID NO: 44246 - DNA, 20 bp, Artificial Sequence
  Description of Artificial Sequence: Synthetic oligonucleotide
  Target: LAMA2; (+) strand; PAM type: NNNNGHTT; PAM sequence: GGTCGCTT
tatttgtaatgaatcattga

SEQ ID NO: 44247 - DNA, 20 bp, Artificial Sequence
  Description of Artificial Sequence: Synthetic oligonucleotide
  Target: LAMA2; (+) strand; PAM type: NNNNGHTT; PAM sequence: AAGCGATT
aacattcgcctcccgggttc

SEQ ID NO: 44248 - DNA, 20 bp, Artificial Sequence
  Description of Artificial Sequence: Synthetic oligonucleotide
  Target: LAMA2; (+) strand; PAM type: NNNNGHTT; PAM sequence: CTGGGATT
tgcctcagcctcctgagtag

SEQ ID NO: 44249 - DNA, 20 bp, Artificial Sequence
  Description of Artificial Sequence: Synthetic oligonucleotide
  Target: LAMA2; (+) strand; PAM type: NNNNGHTT; PAM sequence: CAAGGTTT
ttttgtatttttagtagaga

SEQ ID NO: 44250 - DNA, 20 bp, Artificial Sequence
  Description of Artificial Sequence: Synthetic oligonucleotide
  Target: LAMA2; (+) strand; PAM type: NNNNGHTT; PAM sequence: CTGGGATT
tgcctgagcctcccaaagtg

SEQ ID NO: 44251 - DNA, 20 bp, Artificial Sequence
  Description of Artificial Sequence: Synthetic oligonucleotide
  Target: LAMA2; (+) strand; PAM type: NNNNGHTT; PAM sequence: ACTTGCTT
acctgcccttctctaaaggc

SEQ ID NO: 44252 - DNA, 20 bp, Artificial Sequence
  Description of Artificial Sequence: Synthetic oligonucleotide
  Target: LAMA2; (+) strand; PAM type: NNNNGHTT; PAM sequence: ATAAGCTT
gcttgcagtctttggaggag

SEQ ID NO: 44253 - DNA, 20 bp, Artificial Sequence
  Description of Artificial Sequence: Synthetic oligonucleotide
  Target: LAMA2; (+) strand; PAM type: NNNNGHTT; PAM sequence: AGACGCTT
caagatagacagcagtcagt

SEQ ID NO: 44254 - DNA, 20 bp, Artificial Sequence
  Description of Artificial Sequence: Synthetic oligonucleotide
  Target: LAMA2; (+) strand; PAM type: NNNNGHTT; PAM sequence: GCTTGCTT
atagacagcagtcagtagac

SEQ ID NO: 44255 - DNA, 20 bp, Artificial Sequence
  Description of Artificial Sequence: Synthetic oligonucleotide
  Target: LAMA2; (+) strand; PAM type: NNNNGHTT; PAM sequence: AGATGTTT
gtaagacagaaggttgagaa

SEQ ID NO: 44256 - DNA, 20 bp, Artificial Sequence
  Description of Artificial Sequence: Synthetic oligonucleotide
  Target: LAMA2; (+) strand; PAM type: NNNNGHTT; PAM sequence: AAGAGTTT
ggaatgcaaagatgaaggga

SEQ ID NO: 44257 - DNA, 20 bp, Artificial Sequence
  Description of Artificial Sequence: Synthetic oligonucleotide
  Target: LAMA2; (+) strand; PAM type: NNNNGHTT; PAM sequence: CAAGGATT
gaggaagggatcagagcatg

SEQ ID NO: 44258 - DNA, 20 bp, Artificial Sequence
  Description of Artificial Sequence: Synthetic oligonucleotide
  Target: LAMA2; (+) strand; PAM type: NNNNGHTT; PAM sequence: TAAAGATT
gatcagagcatgcaaggatt

SEQ ID NO: 44259 - DNA, 20 bp, Artificial Sequence
  Description of Artificial Sequence: Synthetic oligonucleotide
  Target: LAMA2; (+) strand; PAM type: NNNNGHTT; PAM sequence: TGATGTTT
ggtgcattatactcattaaa

SEQ ID NO: 44260 - DNA, 20 bp, Artificial Sequence
  Description of Artificial Sequence: Synthetic oligonucleotide
  Target: LAMA2; (+) strand; PAM type: NNNNGHTT; PAM sequence: AAAGGCTT
tgggtcaacaaacattctgt

SEQ ID NO: 44261 - DNA, 20 bp, Artificial Sequence
  Description of Artificial Sequence: Synthetic oligonucleotide
  Target: LAMA2; (+) strand; PAM type: NNNNGHTT; PAM sequence: AGATGTTT
aacaatatgtatgtgtgagt

SEQ ID NO: 44262 - DNA, 20 bp, Artificial Sequence
  Description of Artificial Sequence: Synthetic oligonucleotide
  Target: LAMA2; (+) strand; PAM type: NNNNGHTT; PAM sequence: TAAAGCTT
tgtgtgagtagatgtttcca

SEQ ID NO: 44263 - DNA, 20 bp, Artificial Sequence
  Description of Artificial Sequence: Synthetic oligonucleotide
  Target: LAMA2; (+) strand; PAM type: NNNNGHTT; PAM sequence: CTCCGTTT
gctgccttatttcccaatgt

SEQ ID NO: 44264 - DNA, 20 bp, Artificial Sequence
  Description of Artificial Sequence: Synthetic oligonucleotide
  Target: LAMA2; (+) strand; PAM type: NNNNGHTT; PAM sequence: GACTGCTT
gttaggaaaaaaaaaatatg

SEQ ID NO: 44265 - DNA, 20 bp, Artificial Sequence
  Description of Artificial Sequence: Synthetic oligonucleotide
  Target: LAMA2; (+) strand; PAM type: NNNNGHTT; PAM sequence: CTTTGATT
gaaaaaaaaaatatggactg

SEQ ID NO: 44266 - DNA, 20 bp, Artificial Sequence
  Description of Artificial Sequence: Synthetic oligonucleotide
  Target: LAMA2; (+) strand; PAM type: NNNNGHTT; PAM sequence: TTGAGTTT
gactctgtagttgcaaagta

SEQ ID NO: 44267 - DNA, 20 bp, Artificial Sequence
  Description of Artificial Sequence: Synthetic oligonucleotide
  Target: LAMA2; (+) strand; PAM type: NNNNGHTT; PAM sequence: CAAAGCTT
attgttcagatgaaacccag

SEQ ID NO: 44268 - DNA, 20 bp, Artificial Sequence
  Description of Artificial Sequence: Synthetic oligonucleotide
  Target: LAMA2; (+) strand; PAM type: NNNNGHTT; PAM sequence: GGTGGATT
agcaaagcttaacagactaa

SEQ ID NO: 44269 - DNA, 20 bp, Artificial Sequence
  Description of Artificial Sequence: Synthetic oligonucleotide
  Target: LAMA2; (+) strand; PAM type: NNNNGHTT; PAM sequence: AAGTGATT
cagaaaacttttttatgcta

SEQ ID NO: 44270 - DNA, 20 bp, Artificial Sequence
  Description of Artificial Sequence: Synthetic oligonucleotide
  Target: LAMA2; (+) strand; PAM type: NNNNGHTT; PAM sequence: TGGTGATT
agaacaatgcaagagaaata

SEQ ID NO: 44271 - DNA, 20 bp, Artificial Sequence
  Description of Artificial Sequence: Synthetic oligonucleotide
  Target: LAMA2; (+) strand; PAM type: NNNNGHTT; PAM sequence: TACCGCTT
tgtcaactttttgcactata

SEQ ID NO: 44272 - DNA, 20 bp, Artificial Sequence
  Description of Artificial Sequence: Synthetic oligonucleotide
  Target: LAMA2; (+) strand; PAM type: NNNNGHTT; PAM sequence: TATTGATT
tgccaggttctagacttcca

SEQ ID NO: 44273 - DNA, 20 bp, Artificial Sequence
  Description of Artificial Sequence: Synthetic oligonucleotide
  Target: LAMA2; (+) strand; PAM type: NNNNGHTT; PAM sequence: TTAAGTTT
gaataatgggtcatattagg

SEQ ID NO: 44274 - DNA, 20 bp, Artificial Sequence
  Description of Artificial Sequence: Synthetic oligonucleotide
  Target: LAMA2; (+) strand; PAM type: NNNNGHTT; PAM sequence: TGATGTTT
ttaggttaagtttaggaaac

SEQ ID NO: 44275 - DNA, 20 bp, Artificial Sequence
  Description of Artificial Sequence: Synthetic oligonucleotide
  Target: LAMA2; (+) strand; PAM type: NNNNGHTT; PAM sequence: ATAAGCTT
aatttcacatctataaataa

SEQ ID NO: 44276 - DNA, 20 bp, Artificial Sequence
  Description of Artificial Sequence: Synthetic oligonucleotide
  Target: LAMA2; (+) strand; PAM type: NNNNGHTT; PAM sequence: TCATGATT
tatttttgccagctgaaata

SEQ ID NO: 44277 - DNA, 20 bp, Artificial Sequence
  Description of Artificial Sequence: Synthetic oligonucleotide
  Target: LAMA2; (+) strand; PAM type: NNNNGHTT; PAM sequence: TCTTGCTT
gagtagatattttaattttt

SEQ ID NO: 44278 - DNA, 20 bp, Artificial Sequence
  Description of Artificial Sequence: Synthetic oligonucleotide
  Target: LAMA2; (+) strand; PAM type: NNNNGHTT; PAM sequence: AAAAGCTT
gaactactatcaacaataaa

SEQ ID NO: 44279 - DNA, 20 bp, Artificial Sequence
  Description of Artificial Sequence: Synthetic oligonucleotide
  Target: LAMA2; (+) strand; PAM type: NNNNGHTT; PAM sequence: CTTTGATT
actatcaacaataaaaaaag

SEQ ID NO: 44280 - DNA, 20 bp, Artificial Sequence
  Description of Artificial Sequence: Synthetic oligonucleotide
  Target: LAMA2; (+) strand; PAM type: NNNNGHTT; PAM sequence: TTAAGATT
ttgattttaacgtgtatatc

SEQ ID NO: 44281 - DNA, 20 bp, Artificial Sequence
  Description of Artificial Sequence: Synthetic oligonucleotide
  Target: LAMA2; (+) strand; PAM type: NNNNGHTT; PAM sequence: GTGAGATT
acgcgaatcattggacaaat

SEQ ID NO: 44282 - DNA, 20 bp, Artificial Sequence
  Description of Artificial Sequence: Synthetic oligonucleotide
  Target: LAMA2; (+) strand; PAM type: NNNNGHTT; PAM sequence: GAAAGTTT
ttgatgtaagatagtattta

SEQ ID NO: 44283 - DNA, 20 bp, Artificial Sequence
  Description of Artificial Sequence: Synthetic oligonucleotide
  Target: LAMA2; (+) strand; PAM type: NNNNGHTT; PAM sequence: GAACGATT
acagtcacacttaattaatt

SEQ ID NO: 44284 - DNA, 20 bp, Artificial Sequence
  Description of Artificial Sequence: Synthetic oligonucleotide
  Target: LAMA2; (+) strand; PAM type: NNNNGHTT; PAM sequence: TCCTGATT
attttcggtccctacatact

SEQ ID NO: 44285 - DNA, 20 bp, Artificial Sequence
  Description of Artificial Sequence: Synthetic oligonucleotide
  Target: LAMA2; (+) strand; PAM type: NNNNGHTT; PAM sequence: TACTGCTT
tgatttcctcccctgtgccc

SEQ ID NO: 44286 - DNA, 20 bp, Artificial Sequence
  Description of Artificial Sequence: Synthetic oligonucleotide
  Target: LAMA2; (+) strand; PAM type: NNNNGHTT; PAM sequence: TAATGATT
gcttctctccctaactcaga

SEQ ID NO: 44287 - DNA, 20 bp, Artificial Sequence
  Description of Artificial Sequence: Synthetic oligonucleotide
  Target: LAMA2; (+) strand; PAM type: NNNNGHTT; PAM sequence: GTCGGCTT
gccctaatgaaaagtctttg

SEQ ID NO: 44288 - DNA, 20 bp, Artificial Sequence
  Description of Artificial Sequence: Synthetic oligonucleotide
  Target: LAMA2; (+) strand; PAM type: NNNNGHTT; PAM sequence: CAGGGCTT
gagacattaaaaatgccttc

SEQ ID NO: 44289 - DNA, 20 bp, Artificial Sequence
  Description of Artificial Sequence: Synthetic oligonucleotide
  Target: LAMA2; (+) strand; PAM type: NNNNGHTT; PAM sequence: CTGGGCTT
aaaaaaaaaaaaaaaaattg

SEQ ID NO: 44290 - DNA, 20 bp, Artificial Sequence
  Description of Artificial Sequence: Synthetic oligonucleotide
  Target: LAMA2; (+) strand; PAM type: NNNNGHTT; PAM sequence: CAGAGATT
aagttcaaggctgcagtgag

SEQ ID NO: 44291 - DNA, 20 bp, Artificial Sequence
  Description of Artificial Sequence: Synthetic oligonucleotide
  Target: LAMA2; (+) strand; PAM type: NNNNGHTT; PAM sequence: TACTGCTT
tccttggtaaatactcttct

SEQ ID NO: 44292 - DNA, 20 bp, Artificial Sequence
  Description of Artificial Sequence: Synthetic oligonucleotide
  Target: LAMA2; (+) strand; PAM type: NNNNGHTT; PAM sequence: ACACGCTT
cctctaacatagcatgagtc

SEQ ID NO: 44293 - DNA, 20 bp, Artificial Sequence
  Description of Artificial Sequence: Synthetic oligonucleotide
  Target: LAMA2; (+) strand; PAM type: NNNNGHTT; PAM sequence: TGGTGTTT
gagtcacacgctttccaaac

SEQ ID NO: 44294 - DNA, 20 bp, Artificial Sequence
  Description of Artificial Sequence: Synthetic oligonucleotide
  Target: LAMA2; (+) strand; PAM type: NNNNGHTT; PAM sequence: ACCTGCTT
cgctttccaaactggtgttt

SEQ ID NO: 44295 - DNA, 20 bp, Artificial Sequence
  Description of Artificial Sequence: Synthetic oligonucleotide
  Target: LAMA2; (+) strand; PAM type: NNNNGHTT; PAM sequence: ATTAGCTT
gtagcaaggatgtcttcttt

SEQ ID NO: 44296 - DNA, 20 bp, Artificial Sequence
  Description of Artificial Sequence: Synthetic oligonucleotide
  Target: LAMA2; (+) strand; PAM type: NNNNGHTT; PAM sequence: TCATGTTT
aaataactgttgacattttg

SEQ ID NO: 44297 - DNA, 20 bp, Artificial Sequence
  Description of Artificial Sequence: Synthetic oligonucleotide
  Target: LAMA2; (+) strand; PAM type: NNNNGHTT; PAM sequence: ACAGGTTT
tcttagaggcaaacaccaac

SEQ ID NO: 44298 - DNA, 20 bp, Artificial Sequence
  Description of Artificial Sequence: Synthetic oligonucleotide
  Target: LAMA2; (+) strand; PAM type: NNNNGHTT; PAM sequence: TGGTGTTT
caacagatcttatatttatg

SEQ ID NO: 44299 - DNA, 20 bp, Artificial Sequence
  Description of Artificial Sequence: Synthetic oligonucleotide
  Target: LAMA2; (+) strand; PAM type: NNNNGHTT; PAM sequence: TTGCGTTT
atcttatatttatgtggtgt

SEQ ID NO: 44300 - DNA, 20 bp, Artificial Sequence
  Description of Artificial Sequence: Synthetic oligonucleotide
  Target: LAMA2; (+) strand; PAM type: NNNNGHTT; PAM sequence: AATGGTTT
tgcgtttttccaattttaga

SEQ ID NO: 44301 - DNA, 20 bp, Artificial Sequence
  Description of Artificial Sequence: Synthetic oligonucleotide
  Target: LAMA2; (+) strand; PAM type: NNNNGHTT; PAM sequence: TAAAGTTT
ccaataggtagaatgtcatg

SEQ ID NO: 44302 - DNA, 20 bp, Artificial Sequence
  Description of Artificial Sequence: Synthetic oligonucleotide
  Target: LAMA2; (+) strand; PAM type: NNNNGHTT; PAM sequence: TGTTGTTT
gagtgaaaattgtatatcac

SEQ ID NO: 44303 - DNA, 20 bp, Artificial Sequence
  Description of Artificial Sequence: Synthetic oligonucleotide
  Target: LAMA2; (+) strand; PAM type: NNNNGHTT; PAM sequence: ACCAGTTT
gtttttatttaccttttttt

SEQ ID NO: 44304 - DNA, 20 bp, Artificial Sequence
  Description of Artificial Sequence: Synthetic oligonucleotide
  Target: LAMA2; (+) strand; PAM type: NNNNGHTT; PAM sequence: TCCAGTTT
cctttttttaccagtttttt

SEQ ID NO: 44305 - DNA, 20 bp, Artificial Sequence
  Description of Artificial Sequence: Synthetic oligonucleotide
  Target: LAMA2; (+) strand; PAM type: NNNNGHTT; PAM sequence: TTTTGTTT
ttttaccagtttttttccag

SEQ ID NO: 44306 - DNA, 20 bp, Artificial Sequence
  Description of Artificial Sequence: Synthetic oligonucleotide
  Target: LAMA2; (+) strand; PAM type: NNNNGHTT; PAM sequence: TTAAGTTT
ttattttattttattatact

SEQ ID NO: 44307 - DNA, 20 bp, Artificial Sequence
  Description of Artificial Sequence: Synthetic oligonucleotide
  Target: LAMA2; (+) strand; PAM type: NNNNGHTT; PAM sequence: CGGTGTTT
cacctatgagtgagaacatg

SEQ ID NO: 44308 - DNA, 20 bp, Artificial Sequence
  Description of Artificial Sequence: Synthetic oligonucleotide
  Target: LAMA2; (+) strand; PAM type: NNNNGHTT; PAM sequence: TTTGGTTT
atgagtgagaacatgcggtg

SEQ ID NO: 44309 - DNA, 20 bp, Artificial Sequence
  Description of Artificial Sequence: Synthetic oligonucleotide
  Target: LAMA2; (+) strand; PAM type: NNNNGHTT; PAM sequence: GATAGTTT
gtttggttttttgtccttgt

SEQ ID NO: 44310 - DNA, 20 bp, Artificial Sequence
  Description of Artificial Sequence: Synthetic oligonucleotide
  Target: LAMA2; (+) strand; PAM type: NNNNGHTT; PAM sequence: TGATGATT
ttgtgatagtttactgagaa

SEQ ID NO: 44311 - DNA, 20 bp, Artificial Sequence
  Description of Artificial Sequence: Synthetic oligonucleotide
  Target: LAMA2; (+) strand; PAM type: NNNNGHTT; PAM sequence: GCATGATT
gtgcatgtgtctttatagca

SEQ ID NO: 44312 - DNA, 20 bp, Artificial Sequence
  Description of Artificial Sequence: Synthetic oligonucleotide
  Target: LAMA2; (+) strand; PAM type: NNNNGHTT; PAM sequence: ACTAGTTT
ctgacttccacaatggttga

SEQ ID NO: 44313 - DNA, 20 bp, Artificial Sequence
  Description of Artificial Sequence: Synthetic oligonucleotide
  Target: LAMA2; (+) strand; PAM type: NNNNGHTT; PAM sequence: TGTTGTTT
tccatatcctctccagcccc

SEQ ID NO: 44314 - DNA, 20 bp, Artificial Sequence
  Description of Artificial Sequence: Synthetic oligonucleotide
  Target: LAMA2; (+) strand; PAM type: NNNNGHTT; PAM sequence: TAATGATT
cctgttgtttcctgactttt

SEQ ID NO: 44315 - DNA, 20 bp, Artificial Sequence
  Description of Artificial Sequence: Synthetic oligonucleotide
  Target: LAMA2; (+) strand; PAM type: NNNNGHTT; PAM sequence: TGTGGTTT
ggtgtgagatggtatctcat

SEQ ID NO: 44316 - DNA, 20 bp, Artificial Sequence
  Description of Artificial Sequence: Synthetic oligonucleotide
  Target: LAMA2; (+) strand; PAM type: NNNNGHTT; PAM sequence: TTTGGTTT
agatggtatctcattgtggt

SEQ ID NO: 44317 - DNA, 20 bp, Artificial Sequence
  Description of Artificial Sequence: Synthetic oligonucleotide
  Target: LAMA2; (+) strand; PAM type: NNNNGHTT; PAM sequence: ATGTGTTT
gtgatggtgagcattttttc

SEQ ID NO: 44318 - DNA, 20 bp, Artificial Sequence
  Description of Artificial Sequence: Synthetic oligonucleotide
  Target: LAMA2; (+) strand; PAM type: NNNNGHTT; PAM sequence: ATGAGATT
aatgtcttctttgatgaata

SEQ ID NO: 44319 - DNA, 20 bp, Artificial Sequence
  Description of Artificial Sequence: Synthetic oligonucleotide
  Target: LAMA2; (+) strand; PAM type: NNNNGHTT; PAM sequence: TCATGTTT
actctgaatttctagtaaat

SEQ ID NO: 44320 - DNA, 20 bp, Artificial Sequence
  Description of Artificial Sequence: Synthetic oligonucleotide
  Target: LAMA2; (+) strand; PAM type: NNNNGHTT; PAM sequence: GTGTGATT
tctagatgcatagtcaggca

SEQ ID NO: 44321 - DNA, 20 bp, Artificial Sequence
  Description of Artificial Sequence: Synthetic oligonucleotide
  Target: LAMA2; (+) strand; PAM type: NNNNGHTT; PAM sequence: AAAAGTTT
aatgggaaaacaccttgcta

SEQ ID NO: 44322 - DNA, 20 bp, Artificial Sequence
  Description of Artificial Sequence: Synthetic oligonucleotide
  Target: LAMA2; (+) strand; PAM type: NNNNGHTT; PAM sequence: TTTGGATT
gaaaacaccttgctaaaaag

SEQ ID NO: 44323 - DNA, 20 bp, Artificial Sequence
  Description of Artificial Sequence: Synthetic oligonucleotide
  Target: LAMA2; (+) strand; PAM type: NNNNGHTT; PAM sequence: AGCTGCTT
tggtccctgacatgggtaac

SEQ ID NO: 44324 - DNA, 20 bp, Artificial Sequence
  Description of Artificial Sequence: Synthetic oligonucleotide
  Target: LAMA2; (+) strand; PAM type: NNNNGHTT; PAM sequence: ATCAGCTT
tttagagctgaatttcaaga

SEQ ID NO: 44325 - DNA, 20 bp, Artificial Sequence
  Description of Artificial Sequence: Synthetic oligonucleotide
  Target: LAMA2; (+) strand; PAM type: NNNNGHTT; PAM sequence: CAATGCTT
ttcaagaatcagcttgtgaa

SEQ ID NO: 44326 - DNA, 20 bp, Artificial Sequence
  Description of Artificial Sequence: Synthetic oligonucleotide
  Target: LAMA2; (+) strand; PAM type: NNNNGHTT; PAM sequence: TGGAGATT
tcagcttgtgaacaatgctt

SEQ ID NO: 44327 - DNA, 20 bp, Artificial Sequence
  Description of Artificial Sequence: Synthetic oligonucleotide
  Target: LAMA2; (+) strand; PAM type: NNNNGHTT; PAM sequence: AGAAGATT
agattaagacagtaggaagg

SEQ ID NO: 44328 - DNA, 20 bp, Artificial Sequence
  Description of Artificial Sequence: Synthetic oligonucleotide
  Target: LAMA2; (+) strand; PAM type: NNNNGHTT; PAM sequence: AAGTGATT
ggagaagatttgaagcagta

SEQ ID NO: 44329 - DNA, 20 bp, Artificial Sequence
  Description of Artificial Sequence: Synthetic oligonucleotide
  Target: LAMA2; (+) strand; PAM type: NNNNGHTT; PAM sequence: CAGGGATT
ttattggagaaactgaattt

SEQ ID NO: 44330 - DNA, 20 bp, Artificial Sequence
  Description of Artificial Sequence: Synthetic oligonucleotide
  Target: LAMA2; (+) strand; PAM type: NNNNGHTT; PAM sequence: ATTTGTTT
atttagtgtgcaccagtgat

SEQ ID NO: 44331 - DNA, 20 bp, Artificial Sequence
  Description of Artificial Sequence: Synthetic oligonucleotide
  Target: LAMA2; (+) strand; PAM type: NNNNGHTT; PAM sequence: TGAAGATT
tgttttttccttcgctaaac

SEQ ID NO: 44332 - DNA, 20 bp, Artificial Sequence
  Description of Artificial Sequence: Synthetic oligonucleotide
  Target: LAMA2; (+) strand; PAM type: NNNNGHTT; PAM sequence: TCTTGTTT
tttcccttcctttcagtcat

SEQ ID NO: 44333 - DNA, 20 bp, Artificial Sequence
  Description of Artificial Sequence: Synthetic oligonucleotide
  Target: LAMA2; (+) strand; PAM type: NNNNGHTT; PAM sequence: TTTTGTTT
caccacatctttttgtgtta

SEQ ID NO: 44334 - DNA, 20 bp, Artificial Sequence
  Description of Artificial Sequence: Synthetic oligonucleotide
  Target: LAMA2; (+) strand; PAM type: NNNNGHTT; PAM sequence: TCTAGCTT
actactagcaaaatctcatc

SEQ ID NO: 44335 - DNA, 20 bp, Artificial Sequence
  Description of Artificial Sequence: Synthetic oligonucleotide
  Target: LAMA2; (+) strand; PAM type: NNNNGHTT; PAM sequence: TCCTGCTT
tctagcttcatgtgatattt

SEQ ID NO: 44336 - DNA, 20 bp, Artificial Sequence
  Description of Artificial Sequence: Synthetic oligonucleotide
  Target: LAMA2; (+) strand; PAM type: NNNNGHTT; PAM sequence: AGATGTTT
gaggcctcctcattcattgc

SEQ ID NO: 44337 - DNA, 20 bp, Artificial Sequence
  Description of Artificial Sequence: Synthetic oligonucleotide
  Target: LAMA2; (+) strand; PAM type: NNNNGHTT; PAM sequence: ACAAGTTT
caattttgcagaattgaatt

SEQ ID NO: 44338 - DNA, 20 bp, Artificial Sequence
  Description of Artificial Sequence: Synthetic oligonucleotide
  Target: LAMA2; (+) strand; PAM type: NNNNGHTT; PAM sequence: AAATGATT
ttttgtagagatgagaattt

SEQ ID NO: 44339 - DNA, 20 bp, Artificial Sequence
  Description of Artificial Sequence: Synthetic oligonucleotide
  Target: LAMA2; (+) strand; PAM type: NNNNGHTT; PAM sequence: GAGAGATT
ttttttttttgcaatgggaa

SEQ ID NO: 44340 - DNA, 20 bp, Artificial Sequence
  Description of Artificial Sequence: Synthetic oligonucleotide
  Target: LAMA2; (+) strand; PAM type: NNNNGHTT; PAM sequence: ACTGGTTT
agagatttctcactagtctt

SEQ ID NO: 44341 - DNA, 20 bp, Artificial Sequence
  Description of Artificial Sequence: Synthetic oligonucleotide
  Target: LAMA2; (+) strand; PAM type: NNNNGHTT; PAM sequence: TATAGTTT
tactggttttcatctgactt

SEQ ID NO: 44342 - DNA, 20 bp, Artificial Sequence
  Description of Artificial Sequence: Synthetic oligonucleotide
  Target: LAMA2; (+) strand; PAM type: NNNNGHTT; PAM sequence: CATGGTTT
gccattttgatggcaacaca

SEQ ID NO: 44343 - DNA, 20 bp, Artificial Sequence
  Description of Artificial Sequence: Synthetic oligonucleotide
  Target: LAMA2; (+) strand; PAM type: NNNNGHTT; PAM sequence: CTCAGTTT
tagttaaattttactccgtc

SEQ ID NO: 44344 - DNA, 20 bp, Artificial Sequence
  Description of Artificial Sequence: Synthetic oligonucleotide
  Target: LAMA2; (+) strand; PAM type: NNNNGHTT; PAM sequence: CTGTGTTT
tcctgagggagtgtcagcta

SEQ ID NO: 44345 - DNA, 20 bp, Artificial Sequence
  Description of Artificial Sequence: Synthetic oligonucleotide
  Target: LAMA2; (+) strand; PAM type: NNNNGHTT; PAM sequence: TAAAGATT
cgttgaatctggataggaaa

SEQ ID NO: 44346 - DNA, 20 bp, Artificial Sequence
  Description of Artificial Sequence: Synthetic oligonucleotide
  Target: LAMA2; (+) strand; PAM type: NNNNGHTT; PAM sequence: TGTGGATT
atcactttcttgctcttccg

SEQ ID NO: 44347 - DNA, 20 bp, Artificial Sequence
  Description of Artificial Sequence: Synthetic oligonucleotide
  Target: LAMA2; (+) strand; PAM type: NNNNGHTT; PAM sequence: TACAGCTT
ataatacagtgtctgataag

SEQ ID NO: 44348 - DNA, 20 bp, Artificial Sequence
  Description of Artificial Sequence: Synthetic oligonucleotide
  Target: LAMA2; (+) strand; PAM type: NNNNGHTT; PAM sequence: TTTAGATT
tcatagactgtcttattctt

SEQ ID NO: 44349 - DNA, 20 bp, Artificial Sequence
  Description of Artificial Sequence: Synthetic oligonucleotide
  Target: LAMA2; (+) strand; PAM type: NNNNGHTT; PAM sequence: GGTTGCTT
tgaagaaaagtgggtcagat

SEQ ID NO: 44350 - DNA, 20 bp, Artificial Sequence
  Description of Artificial Sequence: Synthetic oligonucleotide
  Target: LAMA2; (+) strand; PAM type: NNNNGHTT; PAM sequence: GATAGCTT
gtgcatattggaaagaaact

SEQ ID NO: 44351 - DNA, 20 bp, Artificial Sequence
  Description of Artificial Sequence: Synthetic oligonucleotide
  Target: LAMA2; (+) strand; PAM type: NNNNGHTT; PAM sequence: TACAGATT
tgaagggtgctgttgtaaaa

SEQ ID NO: 44352 - DNA, 20 bp, Artificial Sequence
  Description of Artificial Sequence: Synthetic oligonucleotide
  Target: LAMA2; (+) strand; PAM type: NNNNGHTT; PAM sequence: CAAGGTTT
gttgtaaaatacagattagt

SEQ ID NO: 44353 - DNA, 20 bp, Artificial Sequence
  Description of Artificial Sequence: Synthetic oligonucleotide
  Target: LAMA2; (+) strand; PAM type: NNNNGHTT; PAM sequence: TGCAGTTT
ctgaacacttcaaaccacca

SEQ ID NO: 44354 - DNA, 20 bp, Artificial Sequence
  Description of Artificial Sequence: Synthetic oligonucleotide
  Target: LAMA2; (+) strand; PAM type: NNNNGHTT; PAM sequence: CAGTGCTT
ccatgcagtttaaaactatt

SEQ ID NO: 44355 - DNA, 20 bp, Artificial Sequence
  Description of Artificial Sequence: Synthetic oligonucleotide
  Target: LAMA2; (+) strand; PAM type: NNNNGHTT; PAM sequence: GGGGGATT
acattgaatcatttttggtg

SEQ ID NO: 44356 - DNA, 20 bp, Artificial Sequence
  Description of Artificial Sequence: Synthetic oligonucleotide
  Target: LAMA2; (+) strand; PAM type: NNNNGHTT; PAM sequence: TTCAGTTT
agaacaaaacaaaagaaaaa

SEQ ID NO: 44357 - DNA, 20 bp, Artificial Sequence
  Description of Artificial Sequence: Synthetic oligonucleotide
  Target: LAMA2; (+) strand; PAM type: NNNNGHTT; PAM sequence: GCCTGCTT
aaagaaaaattcagtttaga

SEQ ID NO: 44358 - DNA, 20 bp, Artificial Sequence
  Description of Artificial Sequence: Synthetic oligonucleotide
  Target: LAMA2; (+) strand; PAM type: NNNNGHTT; PAM sequence: AAATGTTT
ttgatcttccaatgccttaa

SEQ ID NO: 44359 - DNA, 20 bp, Artificial Sequence
  Description of Artificial Sequence: Synthetic oligonucleotide
  Target: LAMA2; (+) strand; PAM type: NNNNGHTT; PAM sequence: ACTTGCTT
ggaaccctcaagtacacatt

SEQ ID NO: 44360 - DNA, 20 bp, Artificial Sequence
  Description of Artificial Sequence: Synthetic oligonucleotide
  Target: LAMA2; (+) strand; PAM type: NNNNGHTT; PAM sequence: AAAAGCTT
ggctagaattttatgtaaag

SEQ ID NO: 44361 - DNA, 20 bp, Artificial Sequence
  Description of Artificial Sequence: Synthetic oligonucleotide
  Target: LAMA2; (+) strand; PAM type: NNNNGHTT; PAM sequence: ACTTGATT
aacaggaaagcagatcaaat

SEQ ID NO: 44362 - DNA, 20 bp, Artificial Sequence
  Description of Artificial Sequence: Synthetic oligonucleotide
  Target: LAMA2; (+) strand; PAM type: NNNNGHTT; PAM sequence: CCCAGTTT
ttgattctttctttttattt

SEQ ID NO: 44363 - DNA, 20 bp, Artificial Sequence
  Description of Artificial Sequence: Synthetic oligonucleotide
  Target: LAMA2; (+) strand; PAM type: NNNNGHTT; PAM sequence: GTTGGTTT
ccagtttttagaaaaaatga

SEQ ID NO: 44364 - DNA, 20 bp, Artificial Sequence
  Description of Artificial Sequence: Synthetic oligonucleotide
  Target: LAMA2; (+) strand; PAM type: NNNNGHTT; PAM sequence: ACCAGTTT
actagtatcctttaatgata

SEQ ID NO: 44365 - DNA, 20 bp, Artificial Sequence
  Description of Artificial Sequence: Synthetic oligonucleotide
  Target: LAMA2; (+) strand; PAM type: NNNNGHTT; PAM sequence: GTTTGCTT
gtatcctttaatgataacca

SEQ ID NO: 44366 - DNA, 20 bp, Artificial Sequence
  Description of Artificial Sequence: Synthetic oligonucleotide
  Target: LAMA2; (+) strand; PAM type: NNNNGHTT; PAM sequence: CATAGATT
tttttgtatctctatgaact

SEQ ID NO: 44367 - DNA, 20 bp, Artificial Sequence
  Description of Artificial Sequence: Synthetic oligonucleotide
  Target: LAMA2; (+) strand; PAM type: NNNNGHTT; PAM sequence: ATATGTTT
atagattttaaatatatttg

SEQ ID NO: 44368 - DNA, 20 bp, Artificial Sequence
  Description of Artificial Sequence: Synthetic oligonucleotide
  Target: LAMA2; (+) strand; PAM type: NNNNGHTT; PAM sequence: TTTCGATT
ttttaaatatatttgatatg

SEQ ID NO: 44369 - DNA, 20 bp, Artificial Sequence
  Description of Artificial Sequence: Synthetic oligonucleotide
  Target: LAMA2; (+) strand; PAM type: NNNNGHTT; PAM sequence: TTATGATT
tatgtttcgattcattgcag

SEQ ID NO: 44370 - DNA, 20 bp, Artificial Sequence
  Description of Artificial Sequence: Synthetic oligonucleotide
  Target: LAMA2; (+) strand; PAM type: NNNNGHTT; PAM sequence: CTTGGCTT
gttggtaagagtgtcttcaa

SEQ ID NO: 44371 - DNA, 20 bp, Artificial Sequence
  Description of Artificial Sequence: Synthetic oligonucleotide
  Target: LAMA2; (+) strand; PAM type: NNNNGHTT; PAM sequence: CTCAGTTT
tggctttctagtcctttaaa

SEQ ID NO: 44372 - DNA, 20 bp, Artificial Sequence
  Description of Artificial Sequence: Synthetic oligonucleotide
  Target: LAMA2; (+) strand; PAM type: NNNNGHTT; PAM sequence: TAATGATT
cctttaaactcagttttcct

SEQ ID NO: 44373 - DNA, 20 bp, Artificial Sequence
  Description of Artificial Sequence: Synthetic oligonucleotide
  Target: LAMA2; (+) strand; PAM type: NNNNGHTT; PAM sequence: TCATGCTT
tcagttttccttaatgattc

SEQ ID NO: 44374 - DNA, 20 bp, Artificial Sequence
  Description of Artificial Sequence: Synthetic oligonucleotide
  Target: LAMA2; (+) strand; PAM type: NNNNGHTT; PAM sequence: GTAGGATT
cttttcagtgttaagatgtg

SEQ ID NO: 44375 - DNA, 20 bp, Artificial Sequence
  Description of Artificial Sequence: Synthetic oligonucleotide
  Target: LAMA2; (+) strand; PAM type: NNNNGHTT; PAM sequence: GATTGTTT
tcagtgttaagatgtggtag

SEQ ID NO: 44376 - DNA, 20 bp, Artificial Sequence
  Description of Artificial Sequence: Synthetic oligonucleotide
  Target: LAMA2; (+) strand; PAM type: NNNNGHTT; PAM sequence: CCTGGTTT
ttgttttgcatatttcctgt

SEQ ID NO: 44377 - DNA, 20 bp, Artificial Sequence
  Description of Artificial Sequence: Synthetic oligonucleotide
  Target: LAMA2; (+) strand; PAM type: NNNNGHTT; PAM sequence: GGTTGTTT
ctgttcactgttaatatgta

SEQ ID NO: 44378 - DNA, 20 bp, Artificial Sequence
  Description of Artificial Sequence: Synthetic oligonucleotide
  Target: LAMA2; (+) strand; PAM type: NNNNGHTT; PAM sequence: TATAGTTT
ttcaaatagagaaaatacat

SEQ ID NO: 44379 - DNA, 20 bp, Artificial Sequence
  Description of Artificial Sequence: Synthetic oligonucleotide
  Target: LAMA2; (+) strand; PAM type: NNNNGHTT; PAM sequence: TGAGGCTT
gacatgcccatttaggaata

SEQ ID NO: 44380 - DNA, 20 bp, Artificial Sequence
  Description of Artificial Sequence: Synthetic oligonucleotide
  Target: LAMA2; (+) strand; PAM type: NNNNGHTT; PAM sequence: GAAAGTTT
tatcttttttctcatccact

SEQ ID NO: 44381 - DNA, 20 bp, Artificial Sequence
  Description of Artificial Sequence: Synthetic oligonucleotide
  Target: LAMA2; (+) strand; PAM type: NNNNGHTT; PAM sequence: TTTTGATT
tttttctcatccactgaaag

SEQ ID NO: 44382 - DNA, 20 bp, Artificial Sequence
  Description of Artificial Sequence: Synthetic oligonucleotide
  Target: LAMA2; (+) strand; PAM type: NNNNGHTT; PAM sequence: GAAAGATT
atagtggctgaaatgacttt

SEQ ID NO: 44383 - DNA, 20 bp, Artificial Sequence
  Description of Artificial Sequence: Synthetic oligonucleotide
  Target: LAMA2; (+) strand; PAM type: NNNNGHTT; PAM sequence: CCACGATT
gactttgaaagatttcttag

SEQ ID NO: 44384 - DNA, 20 bp, Artificial Sequence
  Description of Artificial Sequence: Synthetic oligonucleotide
  Target: LAMA2; (+) strand; PAM type: NNNNGHTT; PAM sequence: ATTTGCTT
ttaagccaccaaacaacttc

SEQ ID NO: 44385 - DNA, 20 bp, Artificial Sequence
  Description of Artificial Sequence: Synthetic oligonucleotide
  Target: LAMA2; (+) strand; PAM type: NNNNGHTT; PAM sequence: ATTTGTTT
tgcctgaaagtattttaaat

SEQ ID NO: 44386 - DNA, 20 bp, Artificial Sequence
  Description of Artificial Sequence: Synthetic oligonucleotide
  Target: LAMA2; (+) strand; PAM type: NNNNGHTT; PAM sequence: CATAGTTT
taatgatgtaaaaactttta

SEQ ID NO: 44387 - DNA, 20 bp, Artificial Sequence
  Description of Artificial Sequence: Synthetic oligonucleotide
  Target: LAMA2; (+) strand; PAM type: NNNNGHTT; PAM sequence: TCCTGTTT
agactctctagatccattca

SEQ ID NO: 44388 - DNA, 20 bp, Artificial Sequence
  Description of Artificial Sequence: Synthetic oligonucleotide
  Target: LAMA2; (+) strand; PAM type: NNNNGHTT; PAM sequence: AATAGTTT
ttagaaatattatatatata

SEQ ID NO: 44389 - DNA, 20 bp, Artificial Sequence
  Description of Artificial Sequence: Synthetic oligonucleotide
  Target: LAMA2; (+) strand; PAM type: NNNNGHTT; PAM sequence: GTTTGTTT
aaatattatatatataaata

SEQ ID NO: 44390 - DNA, 20 bp, Artificial Sequence
  Description of Artificial Sequence: Synthetic oligonucleotide
  Target: LAMA2; (+) strand; PAM type: NNNNGHTT; PAM sequence: GTCCGCTT
ataaatagtttgtttaaaca

SEQ ID NO: 44391 - DNA, 20 bp, Artificial Sequence
  Description of Artificial Sequence: Synthetic oligonucleotide
  Target: LAMA2; (+) strand; PAM type: NNNNGHTT; PAM sequence: AGTTGTTT
ctacaaataatcttgcaatc

SEQ ID NO: 44392 - DNA, 20 bp, Artificial Sequence
  Description of Artificial Sequence: Synthetic oligonucleotide
  Target: LAMA2; (+) strand; PAM type: NNNNGHTT; PAM sequence: TTTTGCTT
agttgttttgtgcacgtgtc

SEQ ID NO: 44393 - DNA, 20 bp, Artificial Sequence
  Description of Artificial Sequence: Synthetic oligonucleotide
  Target: LAMA2; (+) strand; PAM type: NNNNGHTT; PAM sequence: GATAGTTT
ttttgtcattgcatctttag

SEQ ID NO: 44394 - DNA, 20 bp, Artificial Sequence
  Description of Artificial Sequence: Synthetic oligonucleotide
  Target: LAMA2; (+) strand; PAM type: NNNNGHTT; PAM sequence: GTTTGTTT
gtcattgcatctttaggata

SEQ ID NO: 44395 - DNA, 20 bp, Artificial Sequence
  Description of Artificial Sequence: Synthetic oligonucleotide
  Target: LAMA2; (+) strand; PAM type: NNNNGHTT; PAM sequence: TTTTGTTT
aggatagtttgttttttttt

SEQ ID NO: 44396 - DNA, 20 bp, Artificial Sequence
  Description of Artificial Sequence: Synthetic oligonucleotide
  Target: LAMA2; (+) strand; PAM type: NNNNGHTT; PAM sequence: TCTTGCTT
gatctcagctcactgtaaac

SEQ ID NO: 44397 - DNA, 20 bp, Artificial Sequence
  Description of Artificial Sequence: Synthetic oligonucleotide
  Target: LAMA2; (+) strand; PAM type: NNNNGHTT; PAM sequence: TTCTGCTT
ttcccaggttcaagtgagtc

SEQ ID NO: 44398 - DNA, 20 bp, Artificial Sequence
  Description of Artificial Sequence: Synthetic oligonucleotide
  Target: LAMA2; (+) strand; PAM type: NNNNGHTT; PAM sequence: CCTGGCTT
ctacaggcgtgtgccccaca

SEQ ID NO: 44399 - DNA, 20 bp, Artificial Sequence
  Description of Artificial Sequence: Synthetic oligonucleotide
  Target: LAMA2; (+) strand; PAM type: NNNNGHTT; PAM sequence: ACGGGTTT
ttttcgcatttttggtagag

SEQ ID NO: 44400 - DNA, 20 bp, Artificial Sequence
  Description of Artificial Sequence: Synthetic oligonucleotide
  Target: LAMA2; (+) strand; PAM type: NNNNGHTT; PAM sequence: CTGGGATT
cgcctcggcctcccaaactg

SEQ ID NO: 44401 - DNA, 20 bp, Artificial Sequence
  Description of Artificial Sequence: Synthetic oligonucleotide
  Target: LAMA2; (+) strand; PAM type: NNNNGHTT; PAM sequence: GATAGATT
gagctaccgtgccctgccag

SEQ ID NO: 44402 - DNA, 20 bp, Artificial Sequence
  Description of Artificial Sequence: Synthetic oligonucleotide
  Target: LAMA2; (+) strand; PAM type: NNNNGHTT; PAM sequence: GTGTGATT
gccaggatagatttctaaaa

SEQ ID NO: 44403 - DNA, 20 bp, Artificial Sequence
  Description of Artificial Sequence: Synthetic oligonucleotide
  Target: LAMA2; (+) strand; PAM type: NNNNGHTT; PAM sequence: TTCTGTTT
gatcagcatgtgagaatgtg

SEQ ID NO: 44404 - DNA, 20 bp, Artificial Sequence
  Description of Artificial Sequence: Synthetic oligonucleotide
  Target: LAMA2; (+) strand; PAM type: NNNNGHTT; PAM sequence: CAAAGCTT
tattgccaaactttatgttc

SEQ ID NO: 44405 - DNA, 20 bp, Artificial Sequence
  Description of Artificial Sequence: Synthetic oligonucleotide
  Target: LAMA2; (+) strand; PAM type: NNNNGHTT; PAM sequence: AGTTGATT
tttgtggggatatgtctggt

SEQ ID NO: 44406 - DNA, 20 bp, Artificial Sequence
  Description of Artificial Sequence: Synthetic oligonucleotide
  Target: LAMA2; (+) strand; PAM type: NNNNGHTT; PAM sequence: TTAGGCTT
ttagtatgaagaaaagagtc

SEQ ID NO: 44407 - DNA, 20 bp, Artificial Sequence
  Description of Artificial Sequence: Synthetic oligonucleotide
  Target: LAMA2; (+) strand; PAM type: NNNNGHTT; PAM sequence: ACAGGTTT
cttaggcttgaaattaagac

SEQ ID NO: 44408 - DNA, 20 bp, Artificial Sequence
  Description of Artificial Sequence: Synthetic oligonucleotide
  Target: LAMA2; (+) strand; PAM type: NNNNGHTT; PAM sequence: ACTTGTTT
attcttgaccattgctgatc

SEQ ID NO: 44409 - DNA, 20 bp, Artificial Sequence
  Description of Artificial Sequence: Synthetic oligonucleotide
  Target: LAMA2; (+) strand; PAM type: NNNNGHTT; PAM sequence: TAAGGATT
tctgctccacagatctgtgg

SEQ ID NO: 44410 - DNA, 20 bp, Artificial Sequence
  Description of Artificial Sequence: Synthetic oligonucleotide
  Target: LAMA2; (+) strand; PAM type: NNNNGHTT; PAM sequence: GTAAGTTT
ccatagtggctactcagcat

SEQ ID NO: 44411 - DNA, 20 bp, Artificial Sequence
  Description of Artificial Sequence: Synthetic oligonucleotide
  Target: LAMA2; (+) strand; PAM type: NNNNGHTT; PAM sequence: TTTTGTTT
ggctactcagcatgtaagtt

SEQ ID NO: 44412 - DNA, 20 bp, Artificial Sequence
  Description of Artificial Sequence: Synthetic oligonucleotide
  Target: LAMA2; (+) strand; PAM type: NNNNGHTT; PAM sequence: GTTTGTTT
actcagcatgtaagtttttt

SEQ ID NO: 44413 - DNA, 20 bp, Artificial Sequence
  Description of Artificial Sequence: Synthetic oligonucleotide
  Target: LAMA2; (+) strand; PAM type: NNNNGHTT; PAM sequence: GCTGGATT
gctcactgcaacctctgcct

SEQ ID NO: 44414 - DNA, 20 bp, Artificial Sequence
  Description of Artificial Sequence: Synthetic oligonucleotide
  Target: LAMA2; (+) strand; PAM type: NNNNGHTT; PAM sequence: AAGTGATT
aacctctgcctgctggattc

SEQ ID NO: 44415 - DNA, 20 bp, Artificial Sequence
  Description of Artificial Sequence: Synthetic oligonucleotide
  Target: LAMA2; (+) strand; PAM type: NNNNGHTT; PAM sequence: CTGGGATT
gtgattctcctcccaaatag

SEQ ID NO: 44416 - DNA, 20 bp, Artificial Sequence
  Description of Artificial Sequence: Synthetic oligonucleotide
  Target: LAMA2; (+) strand; PAM type: NNNNGHTT; PAM sequence: CGGGGTTT
ttttgtatttttagtagaga

SEQ ID NO: 44417 - DNA, 20 bp, Artificial Sequence
  Description of Artificial Sequence: Synthetic oligonucleotide
  Target: LAMA2; (+) strand; PAM type: NNNNGHTT; PAM sequence: CTGGGATT
cgtcttggcctcccaaagtg

SEQ ID NO: 44418 - DNA, 20 bp, Artificial Sequence
  Description of Artificial Sequence: Synthetic oligonucleotide
  Target: LAMA2; (+) strand; PAM type: NNNNGHTT; PAM sequence: TGTAGTTT
ccactgtgcccggcctagca

SEQ ID NO: 44419 - DNA, 20 bp, Artificial Sequence
  Description of Artificial Sequence: Synthetic oligonucleotide
  Target: LAMA2; (+) strand; PAM type: NNNNGHTT; PAM sequence: TTAGGATT
tctcttatggactggtaatt

SEQ ID NO: 44420 - DNA, 20 bp, Artificial Sequence
  Description of Artificial Sequence: Synthetic oligonucleotide
  Target: LAMA2; (+) strand; PAM type: NNNNGHTT; PAM sequence: ATTTGATT
gatgctggactaaaaaaaaa

SEQ ID NO: 44421 - DNA, 20 bp, Artificial Sequence
  Description of Artificial Sequence: Synthetic oligonucleotide
  Target: LAMA2; (+) strand; PAM type: NNNNGHTT; PAM sequence: AAATGTTT
tataaaatatttgtatgggc

SEQ ID NO: 44422 - DNA, 20 bp, Artificial Sequence
  Description of Artificial Sequence: Synthetic oligonucleotide
  Target: LAMA2; (+) strand; PAM type: NNNNGHTT; PAM sequence: GGGTGTTT
atgggcaaatgttttactaa

SEQ ID NO: 44423 - DNA, 20 bp, Artificial Sequence
  Description of Artificial Sequence: Synthetic oligonucleotide
  Target: LAMA2; (+) strand; PAM type: NNNNGHTT; PAM sequence: GAAGGATT
agatgctactgtcagcaaga

SEQ ID NO: 44424 - DNA, 20 bp, Artificial Sequence
  Description of Artificial Sequence: Synthetic oligonucleotide
  Target: LAMA2; (+) strand; PAM type: NNNNGHTT; PAM sequence: TTGGGATT
gacaattaaacagtcagtta

SEQ ID NO: 44425 - DNA, 20 bp, Artificial Sequence
  Description of Artificial Sequence: Synthetic oligonucleotide
  Target: LAMA2; (+) strand; PAM type: NNNNGHTT; PAM sequence: CTTAGCTT
ttattgggattttcacaatt

SEQ ID NO: 44426 - DNA, 20 bp, Artificial Sequence
  Description of Artificial Sequence: Synthetic oligonucleotide
  Target: LAMA2; (+) strand; PAM type: NNNNGHTT; PAM sequence: CTTAGCTT
cttttttaactttcacaatt

SEQ ID NO: 44427 - DNA, 20 bp, Artificial Sequence
  Description of Artificial Sequence: Synthetic oligonucleotide
  Target: LAMA2; (+) strand; PAM type: NNNNGHTT; PAM sequence: TTGAGTTT
aattcttagcttttttaact

SEQ ID NO: 44428 - DNA, 20 bp, Artificial Sequence
  Description of Artificial Sequence: Synthetic oligonucleotide
  Target: LAMA2; (+) strand; PAM type: NNNNGHTT; PAM sequence: CTGGGCTT
tagttcttaacttttatttt

SEQ ID NO: 44429 - DNA, 20 bp, Artificial Sequence
  Description of Artificial Sequence: Synthetic oligonucleotide
  Target: LAMA2; (+) strand; PAM type: NNNNGHTT; PAM sequence: TGAAGATT
cttttattttctgggcttga

SEQ ID NO: 44430 - DNA, 20 bp, Artificial Sequence
  Description of Artificial Sequence: Synthetic oligonucleotide
  Target: LAMA2; (+) strand; PAM type: NNNNGHTT; PAM sequence: ACAAGTTT
gcctaaaattgttcatttaa

SEQ ID NO: 44431 - DNA, 20 bp, Artificial Sequence
  Description of Artificial Sequence: Synthetic oligonucleotide
  Target: LAMA2; (+) strand; PAM type: NNNNGHTT; PAM sequence: GTTAGATT
ttgttcatttaaacaagttt

SEQ ID NO: 44432 - DNA, 20 bp, Artificial Sequence
  Description of Artificial Sequence: Synthetic oligonucleotide
  Target: LAMA2; (+) strand; PAM type: NNNNGHTT; PAM sequence: AAAGGATT
atattaagtcaagaaatagt

SEQ ID NO: 44433 - DNA, 20 bp, Artificial Sequence
  Description of Artificial Sequence: Synthetic oligonucleotide
  Target: LAMA2; (+) strand; PAM type: NNNNGHTT; PAM sequence: AAATGCTT
gttggtggtatatagatgta

SEQ ID NO: 44434 - DNA, 20 bp, Artificial Sequence
  Description of Artificial Sequence: Synthetic oligonucleotide
  Target: LAMA2; (+) strand; PAM type: NNNNGHTT; PAM sequence: GAATGATT
agatgtaaaatgcttaaaaa

SEQ ID NO: 44435 - DNA, 20 bp, Artificial Sequence
  Description of Artificial Sequence: Synthetic oligonucleotide
  Target: LAMA2; (+) strand; PAM type: NNNNGHTT; PAM sequence: GACTGATT
gttaaagaggagaaaggggt

SEQ ID NO: 44436 - DNA, 20 bp, Artificial Sequence
  Description of Artificial Sequence: Synthetic oligonucleotide
  Target: LAMA2; (+) strand; PAM type: NNNNGHTT; PAM sequence: GTGAGTTT
ggtgactgattctgaatcaa

SEQ ID NO: 44437 - DNA, 20 bp, Artificial Sequence
  Description of Artificial Sequence: Synthetic oligonucleotide
  Target: LAMA2; (+) strand; PAM type: NNNNGHTT; PAM sequence: TTTAGCTT
tgattctgaatcaagtgagt

SEQ ID NO: 44438 - DNA, 20 bp, Artificial Sequence
  Description of Artificial Sequence: Synthetic oligonucleotide
  Target: LAMA2; (+) strand; PAM type: NNNNGHTT; PAM sequence: CTAGGCTT
atagtatttgaattacctgc

SEQ ID NO: 44439 - DNA, 20 bp, Artificial Sequence
  Description of Artificial Sequence: Synthetic oligonucleotide
  Target: LAMA2; (+) strand; PAM type: NNNNGHTT; PAM sequence: TAAGGATT
tctgccttgcaccgctgtcc

SEQ ID NO: 44440 - DNA, 20 bp, Artificial Sequence
  Description of Artificial Sequence: Synthetic oligonucleotide
  Target: LAMA2; (+) strand; PAM type: NNNNGHTT; PAM sequence: AAGGGCTT
gatttgagataaagcataca

SEQ ID NO: 44441 - DNA, 20 bp, Artificial Sequence
  Description of Artificial Sequence: Synthetic oligonucleotide
  Target: LAMA2; (+) strand; PAM type: NNNNGHTT; PAM sequence: TCAGGCTT
tggtaactttattcttcaca

SEQ ID NO: 44442 - DNA, 20 bp, Artificial Sequence
  Description of Artificial Sequence: Synthetic oligonucleotide
  Target: LAMA2; (+) strand; PAM type: NNNNGHTT; PAM sequence: CTTTGCTT
actttattcttcacatcagg

SEQ ID NO: 44443 - DNA, 20 bp, Artificial Sequence
  Description of Artificial Sequence: Synthetic oligonucleotide
  Target: LAMA2; (+) strand; PAM type: NNNNGHTT; PAM sequence: GCCAGTTT
ctttgcttatacttataaaa

SEQ ID NO: 44444 - DNA, 20 bp, Artificial Sequence
  Description of Artificial Sequence: Synthetic oligonucleotide
  Target: LAMA2; (+) strand; PAM type: NNNNGHTT; PAM sequence: GTTAGTTT
agaatagttataaatattgg

SEQ ID NO: 44445 - DNA, 20 bp, Artificial Sequence
  Description of Artificial Sequence: Synthetic oligonucleotide
  Target: LAMA2; (+) strand; PAM type: NNNNGHTT; PAM sequence: GATGGATT
tgataacataccataaactg

SEQ ID NO: 44446 - DNA, 20 bp, Artificial Sequence
  Description of Artificial Sequence: Synthetic oligonucleotide
  Target: LAMA2; (+) strand; PAM type: NNNNGHTT; PAM sequence: ACCTGCTT
aaattcagtgtccagtgagt

SEQ ID NO: 44447 - DNA, 20 bp, Artificial Sequence
  Description of Artificial Sequence: Synthetic oligonucleotide
  Target: LAMA2; (+) strand; PAM type: NNNNGHTT; PAM sequence: TCCTGTTT
tgtccagtgagtacctgctt

SEQ ID NO: 44448 - DNA, 20 bp, Artificial Sequence
  Description of Artificial Sequence: Synthetic oligonucleotide
  Target: LAMA2; (+) strand; PAM type: NNNNGHTT; PAM sequence: GCACGTTT
tgctttcctgtttatagaca

SEQ ID NO: 44449 - DNA, 20 bp, Artificial Sequence
  Description of Artificial Sequence: Synthetic oligonucleotide
  Target: LAMA2; (+) strand; PAM type: NNNNGHTT; PAM sequence: TGGAGATT
acctcctgatatcctcacat

SEQ ID NO: 44450 - DNA, 20 bp, Artificial Sequence
  Description of Artificial Sequence: Synthetic oligonucleotide
  Target: LAMA2; (+) strand; PAM type: NNNNGHTT; PAM sequence: TTAGGTTT
tgatatcctcacattggaga

SEQ ID NO: 44451 - DNA, 20 bp, Artificial Sequence
  Description of Artificial Sequence: Synthetic oligonucleotide
  Target: LAMA2; (+) strand; PAM type: NNNNGHTT; PAM sequence: AAATGCTT
agaaaatacatattatttta

SEQ ID NO: 44452 - DNA, 20 bp, Artificial Sequence
  Description of Artificial Sequence: Synthetic oligonucleotide
  Target: LAMA2; (+) strand; PAM type: NNNNGHTT; PAM sequence: ATATGTTT
agccaaggtatcttacagag

SEQ ID NO: 44453 - DNA, 20 bp, Artificial Sequence
  Description of Artificial Sequence: Synthetic oligonucleotide
  Target: LAMA2; (+) strand; PAM type: NNNNGHTT; PAM sequence: GAGTGTTT
tacagagatatgtttcagag

SEQ ID NO: 44454 - DNA, 20 bp, Artificial Sequence
  Description of Artificial Sequence: Synthetic oligonucleotide
  Target: LAMA2; (+) strand; PAM type: NNNNGHTT; PAM sequence: ATTAGATT
tatgtttcagaggagtgttt

SEQ ID NO: 44455 - DNA, 20 bp, Artificial Sequence
  Description of Artificial Sequence: Synthetic oligonucleotide
  Target: LAMA2; (+) strand; PAM type: NNNNGHTT; PAM sequence: ATTTGTTT
tagattctgttgtatacact

SEQ ID NO: 44456 - DNA, 20 bp, Artificial Sequence
  Description of Artificial Sequence: Synthetic oligonucleotide
  Target: LAMA2; (+) strand; PAM type: NNNNGHTT; PAM sequence: TTTAGCTT
tctgttgtatacactatttg

SEQ ID NO: 44457 - DNA, 20 bp, Artificial Sequence
  Description of Artificial Sequence: Synthetic oligonucleotide
  Target: LAMA2; (+) strand; PAM type: NNNNGHTT; PAM sequence: TTCTGTTT
tacactatttgtttagcttt

SEQ ID NO: 44458 - DNA, 20 bp, Artificial Sequence
  Description of Artificial Sequence: Synthetic oligonucleotide
  Target: LAMA2; (+) strand; PAM type: NNNNGHTT; PAM sequence: ATTGGTTT
tactctcttttgtatttact

SEQ ID NO: 44459 - DNA, 20 bp, Artificial Sequence
  Description of Artificial Sequence: Synthetic oligonucleotide
  Target: LAMA2; (+) strand; PAM type: NNNNGHTT; PAM sequence: TATTGATT
agggaagcaattattttaat

SEQ ID NO: 44460 - DNA, 20 bp, Artificial Sequence
  Description of Artificial Sequence: Synthetic oligonucleotide
  Target: LAMA2; (+) strand; PAM type: NNNNGHTT; PAM sequence: TATGGTTT
tattttaattattgattatt

SEQ ID NO: 44461 - DNA, 20 bp, Artificial Sequence
  Description of Artificial Sequence: Synthetic oligonucleotide
  Target: LAMA2; (+) strand; PAM type: NNNNGHTT; PAM sequence: CCTGGCTT
atacgaatatgcatttagag

SEQ ID NO: 44462 - DNA, 20 bp, Artificial Sequence
  Description of Artificial Sequence: Synthetic oligonucleotide
  Target: LAMA2; (+) strand; PAM type: NNNNGHTT; PAM sequence: CTGTGCTT
gtctgaggtcttaacttgtt

SEQ ID NO: 44463 - DNA, 20 bp, Artificial Sequence
  Description of Artificial Sequence: Synthetic oligonucleotide
  Target: LAMA2; (+) strand; PAM type: NNNNGHTT; PAM sequence: TAGAGTTT
ttggaggtaatagcgcccta

SEQ ID NO: 44464 - DNA, 20 bp, Artificial Sequence
  Description of Artificial Sequence: Synthetic oligonucleotide
  Target: LAMA2; (+) strand; PAM type: NNNNGHTT; PAM sequence: AGGCGATT
aagaagtggactttgtagtt

SEQ ID NO: 44465 - DNA, 20 bp, Artificial Sequence
  Description of Artificial Sequence: Synthetic oligonucleotide
  Target: LAMA2; (+) strand; PAM type: NNNNGHTT; PAM sequence: ACCAGCTT
agttaggcgattaaatattt

SEQ ID NO: 44466 - DNA, 20 bp, Artificial Sequence
  Description of Artificial Sequence: Synthetic oligonucleotide
  Target: LAMA2; (+) strand; PAM type: NNNNGHTT; PAM sequence: TTTTGTTT
aggactattttgtattatta

SEQ ID NO: 44467 - DNA, 20 bp, Artificial Sequence
  Description of Artificial Sequence: Synthetic oligonucleotide
  Target: LAMA2; (+) strand; PAM type: NNNNGHTT; PAM sequence: GGGAGTTT
tatttatcttgccttaatta

SEQ ID NO: 44468 - DNA, 20 bp, Artificial Sequence
  Description of Artificial Sequence: Synthetic oligonucleotide
  Target: LAMA2; (+) strand; PAM type: NNNNGHTT; PAM sequence: TATTGTTT
cttgccttaattagggagtt

SEQ ID NO: 44469 - DNA, 20 bp, Artificial Sequence
  Description of Artificial Sequence: Synthetic oligonucleotide
  Target: LAMA2; (+) strand; PAM type: NNNNGHTT; PAM sequence: AAAAGCTT
agggagtttattgtttatta

SEQ ID NO: 44470 - DNA, 20 bp, Artificial Sequence
  Description of Artificial Sequence: Synthetic oligonucleotide
  Target: LAMA2; (+) strand; PAM type: NNNNGHTT; PAM sequence: TGCTGTTT
attgtgtgggtgtgtgtgtg

SEQ ID NO: 44471 - DNA, 20 bp, Artificial Sequence
  Description of Artificial Sequence: Synthetic oligonucleotide
  Target: LAMA2; (+) strand; PAM type: NNNNGHTT; PAM sequence: AAATGTTT
gtttgaaacaaatgaactaa

SEQ ID NO: 44472 - DNA, 20 bp, Artificial Sequence
  Description of Artificial Sequence: Synthetic oligonucleotide
  Target: LAMA2; (+) strand; PAM type: NNNNGHTT; PAM sequence: AAATGATT
tacaggtattttaatttttt

SEQ ID NO: 44473 - DNA, 20 bp, Artificial Sequence
  Description of Artificial Sequence: Synthetic oligonucleotide
  Target: LAMA2; (+) strand; PAM type: NNNNGHTT; PAM sequence: TGTTGTTT
tataacgggggaaattccac

SEQ ID NO: 44474 - DNA, 20 bp, Artificial Sequence
  Description of Artificial Sequence: Synthetic oligonucleotide
  Target: LAMA2; (+) strand; PAM type: NNNNGHTT; PAM sequence: TAGTGTTT
aaattccactgttgtttctt

SEQ ID NO: 44475 - DNA, 20 bp, Artificial Sequence
  Description of Artificial Sequence: Synthetic oligonucleotide
  Target: LAMA2; (+) strand; PAM type: NNNNGHTT; PAM sequence: GAGGGATT
ttgtttctttagtgtttgat

SEQ ID NO: 44476 - DNA, 20 bp, Artificial Sequence
  Description of Artificial Sequence: Synthetic oligonucleotide
  Target: LAMA2; (+) strand; PAM type: NNNNGHTT; PAM sequence: ATCAGTTT
tgatgagggattgtaatcta

SEQ ID NO: 44477 - DNA, 20 bp, Artificial Sequence
  Description of Artificial Sequence: Synthetic oligonucleotide
  Target: LAMA2; (+) strand; PAM type: NNNNGHTT; PAM sequence: GTTGGATT
acacagcgatgatcatttaa

SEQ ID NO: 44478 - DNA, 20 bp, Artificial Sequence
  Description of Artificial Sequence: Synthetic oligonucleotide
  Target: LAMA2; (+) strand; PAM type: NNNNGHTT; PAM sequence: TTTTGATT
cgatgatcatttaagttgga

SEQ ID NO: 44479 - DNA, 20 bp, Artificial Sequence
  Description of Artificial Sequence: Synthetic oligonucleotide
  Target: LAMA2; (+) strand; PAM type: NNNNGHTT; PAM sequence: TTGTGATT
gggaaaaaaaaatcacctac

SEQ ID NO: 44480 - DNA, 20 bp, Artificial Sequence
  Description of Artificial Sequence: Synthetic oligonucleotide
  Target: LAMA2; (+) strand; PAM type: NNNNGHTT; PAM sequence: GGAAGCTT
gtgagaatagaatcctgctg

SEQ ID NO: 44481 - DNA, 20 bp, Artificial Sequence
  Description of Artificial Sequence: Synthetic oligonucleotide
  Target: LAMA2; (+) strand; PAM type: NNNNGHTT; PAM sequence: CTTAGATT
tgggaagcttattttattct

SEQ ID NO: 44482 - DNA, 20 bp, Artificial Sequence
  Description of Artificial Sequence: Synthetic oligonucleotide
  Target: LAMA2; (+) strand; PAM type: NNNNGHTT; PAM sequence: ATTTGCTT
agcttattttattctcttag

SEQ ID NO: 44483 - DNA, 20 bp, Artificial Sequence
  Description of Artificial Sequence: Synthetic oligonucleotide
  Target: LAMA2; (+) strand; PAM type: NNNNGHTT; PAM sequence: ACTGGTTT
tccccctccggagaacgatg

SEQ ID NO: 44484 - DNA, 20 bp, Artificial Sequence
  Description of Artificial Sequence: Synthetic oligonucleotide
  Target: LAMA2; (+) strand; PAM type: NNNNGHTT; PAM sequence: AAGCGATT
taaaaaatgtaaatggatga

SEQ ID NO: 44485 - DNA, 20 bp, Artificial Sequence
  Description of Artificial Sequence: Synthetic oligonucleotide
  Target: LAMA2; (+) strand; PAM type: NNNNGHTT; PAM sequence: ATTTGCTT
ggaagcagaaacatcttcct

SEQ ID NO: 44486 - DNA, 20 bp, Artificial Sequence
  Description of Artificial Sequence: Synthetic oligonucleotide
  Target: LAMA2; (+) strand; PAM type: NNNNGHTT; PAM sequence: TCAGGTTT
tttttccgagtaaaatgcag

SEQ ID NO: 44487 - DNA, 20 bp, Artificial Sequence
  Description of Artificial Sequence: Synthetic oligonucleotide
  Target: LAMA2; (+) strand; PAM type: NNNNGHTT; PAM sequence: ACTTGTTT
gtttgtaacattgcataaaa

SEQ ID NO: 44488 - DNA, 20 bp, Artificial Sequence
  Description of Artificial Sequence: Synthetic oligonucleotide
  Target: LAMA2; (+) strand; PAM type: NNNNGHTT; PAM sequence: ATCTGCTT
aaattaaagatgataaagca

SEQ ID NO: 44489 - DNA, 20 bp, Artificial Sequence
  Description of Artificial Sequence: Synthetic oligonucleotide
  Target: LAMA2; (+) strand; PAM type: NNNNGHTT; PAM sequence: TTCTGTTT
gcattattttaaagaaatat

SEQ ID NO: 44490 - DNA, 20 bp, Artificial Sequence
  Description of Artificial Sequence: Synthetic oligonucleotide
  Target: LAMA2; (+) strand; PAM type: NNNNGHTT; PAM sequence: TTATGATT
ggaacctttttaggtgaaac

SEQ ID NO: 44491 - DNA, 20 bp, Artificial Sequence
  Description of Artificial Sequence: Synthetic oligonucleotide
  Target: LAMA2; (+) strand; PAM type: NNNNGHTT; PAM sequence: TCAAGTTT
tatctaggcaaactaaccat

SEQ ID NO: 44492 - DNA, 20 bp, Artificial Sequence
  Description of Artificial Sequence: Synthetic oligonucleotide
  Target: LAMA2; (+) strand; PAM type: NNNNGHTT; PAM sequence: ATGTGTTT
tgtgcccctgacatctgtac

SEQ ID NO: 44493 - DNA, 20 bp, Artificial Sequence
  Description of Artificial Sequence: Synthetic oligonucleotide
  Target: LAMA2; (+) strand; PAM type: NNNNGHTT; PAM sequence: CATAGATT
tacattattttaaatcatag

SEQ ID NO: 44494 - DNA, 20 bp, Artificial Sequence
  Description of Artificial Sequence: Synthetic oligonucleotide
  Target: LAMA2; (+) strand; PAM type: NNNNGHTT; PAM sequence: CTGTGCTT
atcatagcatagattttcca

SEQ ID NO: 44495 - DNA, 20 bp, Artificial Sequence
  Description of Artificial Sequence: Synthetic oligonucleotide
  Target: LAMA2; (+) strand; PAM type: NNNNGHTT; PAM sequence: AACTGTTT
ataggacaattgatacggtc

SEQ ID NO: 44496 - DNA, 20 bp, Artificial Sequence
  Description of Artificial Sequence: Synthetic oligonucleotide
  Target: LAMA2; (+) strand; PAM type: NNNNGHTT; PAM sequence: TTCAGTTT
gcattcacagttgcaactct

SEQ ID NO: 44497 - DNA, 20 bp, Artificial Sequence
  Description of Artificial Sequence: Synthetic oligonucleotide
  Target: LAMA2; (+) strand; PAM type: NNNNGHTT; PAM sequence: TATGGTTT
ggaatctcataggtgtgtaa

SEQ ID NO: 44498 - DNA, 20 bp, Artificial Sequence
  Description of Artificial Sequence: Synthetic oligonucleotide
  Target: LAMA2; (+) strand; PAM type: NNNNGHTT; PAM sequence: TGTGGTTT
acccagtatcaacttcacaa

SEQ ID NO: 44499 - DNA, 20 bp, Artificial Sequence
  Description of Artificial Sequence: Synthetic oligonucleotide
  Target: LAMA2; (+) strand; PAM type: NNNNGHTT; PAM sequence: TACAGTTT
tagttaaatggctaatcctt

SEQ ID NO: 44500 - DNA, 20 bp, Artificial Sequence
  Description of Artificial Sequence: Synthetic oligonucleotide
  Target: LAMA2; (+) strand; PAM type: NNNNGHTT; PAM sequence: TTATGTTT
tggctaatcctttacagttt

SEQ ID NO: 44501 - DNA, 20 bp, Artificial Sequence
  Description of Artificial Sequence: Synthetic oligonucleotide
  Target: LAMA2; (+) strand; PAM type: NNNNGHTT; PAM sequence: CAAGGTTT
agactatccctcaagaatgt

SEQ ID NO: 44502 - DNA, 20 bp, Artificial Sequence
  Description of Artificial Sequence: Synthetic oligonucleotide
  Target: LAMA2; (+) strand; PAM type: NNNNGHTT; PAM sequence: GTCAGATT
aagacatttgttattctgtg

SEQ ID NO: 44503 - DNA, 20 bp, Artificial Sequence
  Description of Artificial Sequence: Synthetic oligonucleotide
  Target: LAMA2; (+) strand; PAM type: NNNNGHTT; PAM sequence: AATGGTTT
ggagaaatctgcaaactaga

SEQ ID NO: 44504 - DNA, 20 bp, Artificial Sequence
  Description of Artificial Sequence: Synthetic oligonucleotide
  Target: LAMA2; (+) strand; PAM type: NNNNGHTT; PAM sequence: TTGGGTTT
acatgtgataaaaatctctt

SEQ ID NO: 44505 - DNA, 20 bp, Artificial Sequence
  Description of Artificial Sequence: Synthetic oligonucleotide
  Target: LAMA2; (+) strand; PAM type: NNNNGHTT; PAM sequence: CTTTGTTT
agggtaggaagacaccagct

SEQ ID NO: 44506 - DNA, 20 bp, Artificial Sequence
  Description of Artificial Sequence: Synthetic oligonucleotide
  Target: LAMA2; (+) strand; PAM type: NNNNGHTT; PAM sequence: GTTTGTTT
taggaagacaccagctcttt

SEQ ID NO: 44507 - DNA, 20 bp, Artificial Sequence
  Description of Artificial Sequence: Synthetic oligonucleotide
  Target: LAMA2; (+) strand; PAM type: NNNNGHTT; PAM sequence: TTGTGCTT
acaccagctctttgtttgtt

SEQ ID NO: 44508 - DNA, 20 bp, Artificial Sequence
  Description of Artificial Sequence: Synthetic oligonucleotide
  Target: LAMA2; (+) strand; PAM type: NNNNGHTT; PAM sequence: TCCCGCTT
gtgctttgacatttcaattt

SEQ ID NO: 44509 - DNA, 20 bp, Artificial Sequence
  Description of Artificial Sequence: Synthetic oligonucleotide
  Target: LAMA2; (+) strand; PAM type: NNNNGHTT; PAM sequence: CTTGGCTT
ttgacatttcaattttcccg

SEQ ID NO: 44510 - DNA, 20 bp, Artificial Sequence
  Description of Artificial Sequence: Synthetic oligonucleotide
  Target: LAMA2; (+) strand; PAM type: NNNNGHTT; PAM sequence: TGATGATT
cttctgtcttcccttgacat

SEQ ID NO: 44511 - DNA, 20 bp, Artificial Sequence
  Description of Artificial Sequence: Synthetic oligonucleotide
  Target: LAMA2; (+) strand; PAM type: NNNNGHTT; PAM sequence: CACTGATT
tcacttaaccccagcaacgc

SEQ ID NO: 44512 - DNA, 20 bp, Artificial Sequence
  Description of Artificial Sequence: Synthetic oligonucleotide
  Target: LAMA2; (+) strand; PAM type: NNNNGHTT; PAM sequence: TAATGTTT
aaagtggaaaaatgtataca

SEQ ID NO: 44513 - DNA, 20 bp, Artificial Sequence
  Description of Artificial Sequence: Synthetic oligonucleotide
  Target: LAMA2; (+) strand; PAM type: NNNNGHTT; PAM sequence: TGGTGCTT
gttgtcttgacagtggatca

SEQ ID NO: 44514 - DNA, 20 bp, Artificial Sequence
  Description of Artificial Sequence: Synthetic oligonucleotide
  Target: LAMA2; (+) strand; PAM type: NNNNGHTT; PAM sequence: GTTAGATT
actcaaatttacttatgtat

SEQ ID NO: 44515 - DNA, 20 bp, Artificial Sequence
  Description of Artificial Sequence: Synthetic oligonucleotide
  Target: LAMA2; (+) strand; PAM type: NNNNGHTT; PAM sequence: GTGAGTTT
atttctattctgtcttttat

SEQ ID NO: 44516 - DNA, 20 bp, Artificial Sequence
  Description of Artificial Sequence: Synthetic oligonucleotide
  Target: LAMA2; (+) strand; PAM type: NNNNGHTT; PAM sequence: AAAAGATT
aatatgtagcctttgatgta

SEQ ID NO: 44517 - DNA, 20 bp, Artificial Sequence
  Description of Artificial Sequence: Synthetic oligonucleotide
  Target: LAMA2; (+) strand; PAM type: NNNNGHTT; PAM sequence: GATTGTTT
tgtagcctttgatgtaaaaa

SEQ ID NO: 44518 - DNA, 20 bp, Artificial Sequence
  Description of Artificial Sequence: Synthetic oligonucleotide
  Target: LAMA2; (+) strand; PAM type: NNNNGHTT; PAM sequence: ATATGCTT
aaaaacataaactttacaat

SEQ ID NO: 44519 - DNA, 20 bp, Artificial Sequence
  Description of Artificial Sequence: Synthetic oligonucleotide
  Target: LAMA2; (+) strand; PAM type: NNNNGHTT; PAM sequence: CAGTGTTT
gagggggaggtggagagagg

SEQ ID NO: 44520 - DNA, 20 bp, Artificial Sequence
  Description of Artificial Sequence: Synthetic oligonucleotide
  Target: LAMA2; (+) strand; PAM type: NNNNGHTT; PAM sequence: GAGAGTTT
gtagcatattaatttcaagt

SEQ ID NO: 44521 - DNA, 20 bp, Artificial Sequence
  Description of Artificial Sequence: Synthetic oligonucleotide
  Target: LAMA2; (+) strand; PAM type: NNNNGHTT; PAM sequence: AGTGGTTT
gttttaaacttgataactgc

SEQ ID NO: 44522 - DNA, 20 bp, Artificial Sequence
  Description of Artificial Sequence: Synthetic oligonucleotide
  Target: LAMA2; (+) strand; PAM type: NNNNGHTT; PAM sequence: GATGGATT
ttgatggtctaaatcaaaag

SEQ ID NO: 44523 - DNA, 20 bp, Artificial Sequence
  Description of Artificial Sequence: Synthetic oligonucleotide
  Target: LAMA2; (+) strand; PAM type: NNNNGHTT; PAM sequence: TGTAGTTT
ttgcggaattattacagacc

SEQ ID NO: 44524 - DNA, 20 bp, Artificial Sequence
  Description of Artificial Sequence: Synthetic oligonucleotide
  Target: LAMA2; (+) strand; PAM type: NNNNGHTT; PAM sequence: GGAGGATT
gtcaaggtcttttacttcaa

SEQ ID NO: 44525 - DNA, 20 bp, Artificial Sequence
  Description of Artificial Sequence: Synthetic oligonucleotide
  Target: LAMA2; (+) strand; PAM type: NNNNGHTT; PAM sequence: ATTAGCTT
ttgggggtatacattattgc

SEQ ID NO: 44526 - DNA, 20 bp, Artificial Sequence
  Description of Artificial Sequence: Synthetic oligonucleotide
  Target: LAMA2; (+) strand; PAM type: NNNNGHTT; PAM sequence: GTCAGTTT
tacattattgcattagctta

SEQ ID NO: 44527 - DNA, 20 bp, Artificial Sequence
  Description of Artificial Sequence: Synthetic oligonucleotide
  Target: LAMA2; (+) strand; PAM type: NNNNGHTT; PAM sequence: GGATGTTT
cagtgcaaacttgtgaagga

SEQ ID NO: 44528 - DNA, 20 bp, Artificial Sequence
  Description of Artificial Sequence: Synthetic oligonucleotide
  Target: LAMA2; (+) strand; PAM type: NNNNGHTT; PAM sequence: CTTTGATT
cactacgagttcttatggta

SEQ ID NO: 44529 - DNA, 20 bp, Artificial Sequence
  Description of Artificial Sequence: Synthetic oligonucleotide
  Target: LAMA2; (+) strand; PAM type: NNNNGHTT; PAM sequence: ATTAGATT
cacttatttgtattatcctc

SEQ ID NO: 44530 - DNA, 20 bp, Artificial Sequence
  Description of Artificial Sequence: Synthetic oligonucleotide
  Target: LAMA2; (+) strand; PAM type: NNNNGHTT; PAM sequence: ATAGGTTT
cctcattagattgaacctgt

SEQ ID NO: 44531 - DNA, 20 bp, Artificial Sequence
  Description of Artificial Sequence: Synthetic oligonucleotide
  Target: LAMA2; (+) strand; PAM type: NNNNGHTT; PAM sequence: TAAAGATT
tataggtttatctttgaaac

SEQ ID NO: 44532 - DNA, 20 bp, Artificial Sequence
  Description of Artificial Sequence: Synthetic oligonucleotide
  Target: LAMA2; (+) strand; PAM type: NNNNGHTT; PAM sequence: TCAAGATT
aagttctactgtatttttta

SEQ ID NO: 44533 - DNA, 20 bp, Artificial Sequence
  Description of Artificial Sequence: Synthetic oligonucleotide
  Target: LAMA2; (+) strand; PAM type: NNNNGHTT; PAM sequence: AATAGCTT
tttatcaagattatttttaa

SEQ ID NO: 44534 - DNA, 20 bp, Artificial Sequence
  Description of Artificial Sequence: Synthetic oligonucleotide
  Target: LAMA2; (+) strand; PAM type: NNNNGHTT; PAM sequence: CCTGGATT
taataatgaaaaagtatact

SEQ ID NO: 44535 - DNA, 20 bp, Artificial Sequence
  Description of Artificial Sequence: Synthetic oligonucleotide
  Target: LAMA2; (+) strand; PAM type: NNNNGHTT; PAM sequence: TTTGGTTT
tgaaaaagtatactcctgga

SEQ ID NO: 44536 - DNA, 20 bp, Artificial Sequence
  Description of Artificial Sequence: Synthetic oligonucleotide
  Target: LAMA2; (+) strand; PAM type: NNNNGHTT; PAM sequence: AGAAGATT
ctatatacctcggtgaataa

SEQ ID NO: 44537 - DNA, 20 bp, Artificial Sequence
  Description of Artificial Sequence: Synthetic oligonucleotide
  Target: LAMA2; (+) strand; PAM type: NNNNGHTT; PAM sequence: ATGAGTTT
ataaagaagatttctaaagg

SEQ ID NO: 44538 - DNA, 20 bp, Artificial Sequence
  Description of Artificial Sequence: Synthetic oligonucleotide
  Target: LAMA2; (+) strand; PAM type: NNNNGHTT; PAM sequence: CCATGATT
agatatttagtaaagaaatc

SEQ ID NO: 44539 - DNA, 20 bp, Artificial Sequence
  Description of Artificial Sequence: Synthetic oligonucleotide
  Target: LAMA2; (+) strand; PAM type: NNNNGHTT; PAM sequence: CCTAGATT
gtaaagaaatcccatgattc

SEQ ID NO: 44540 - DNA, 20 bp, Artificial Sequence
  Description of Artificial Sequence: Synthetic oligonucleotide
  Target: LAMA2; (+) strand; PAM type: NNNNGHTT; PAM sequence: TAATGCTT
cagtgacacatttaattagt

SEQ ID NO: 44541 - DNA, 20 bp, Artificial Sequence
  Description of Artificial Sequence: Synthetic oligonucleotide
  Target: LAMA2; (+) strand; PAM type: NNNNGHTT; PAM sequence: TTCTGATT
tcatagtaacaacaatttaa

SEQ ID NO: 44542 - DNA, 20 bp, Artificial Sequence
  Description of Artificial Sequence: Synthetic oligonucleotide
  Target: LAMA2; (+) strand; PAM type: NNNNGHTT; PAM sequence: TTCGGTTT
atctttcatgctactttgaa

SEQ ID NO: 44543 - DNA, 20 bp, Artificial Sequence
  Description of Artificial Sequence: Synthetic oligonucleotide
  Target: LAMA2; (+) strand; PAM type: NNNNGHTT; PAM sequence: GACTGTTT
catatgatattcaacaacct

SEQ ID NO: 44544 - DNA, 20 bp, Artificial Sequence
  Description of Artificial Sequence: Synthetic oligonucleotide
  Target: LAMA2; (+) strand; PAM type: NNNNGHTT; PAM sequence: TGAGGTTT
caagatatattgtgtgatgc

SEQ ID NO: 44545 - DNA, 20 bp, Artificial Sequence
  Description of Artificial Sequence: Synthetic oligonucleotide
  Target: LAMA2; (+) strand; PAM type: NNNNGHTT; PAM sequence: GGCAGTTT
agtgggtatagtacctgata

SEQ ID NO: 44546 - DNA, 20 bp, Artificial Sequence
  Description of Artificial Sequence: Synthetic oligonucleotide
  Target: LAMA2; (+) strand; PAM type: NNNNGHTT; PAM sequence: TTTTGTTT
gtatagtacctgataggcag

SEQ ID NO: 44547 - DNA, 20 bp, Artificial Sequence
  Description of Artificial Sequence: Synthetic oligonucleotide
  Target: LAMA2; (+) strand; PAM type: NNNNGHTT; PAM sequence: TCCTGCTT
ctcctgggttcaagcacttc

SEQ ID NO: 44548 - DNA, 20 bp, Artificial Sequence
  Description of Artificial Sequence: Synthetic oligonucleotide
  Target: LAMA2; (+) strand; PAM type: NNNNGHTT; PAM sequence: CTGGGATT
tgcttcagcctccatagtag

SEQ ID NO: 44549 - DNA, 20 bp, Artificial Sequence
  Description of Artificial Sequence: Synthetic oligonucleotide
  Target: LAMA2; (+) strand; PAM type: NNNNGHTT; PAM sequence: CAGGGTTT
ttttgtatttttagtagaga

SEQ ID NO: 44550 - DNA, 20 bp, Artificial Sequence
  Description of Artificial Sequence: Synthetic oligonucleotide
  Target: LAMA2; (+) strand; PAM type: NNNNGHTT; PAM sequence: CTGGGATT
tgccttggccttccaaagtg

SEQ ID NO: 44551 - DNA, 20 bp, Artificial Sequence
  Description of Artificial Sequence: Synthetic oligonucleotide
  Target: LAMA2; (+) strand; PAM type: NNNNGHTT; PAM sequence: GGTGGTTT
caccgcacctggccccagta

SEQ ID NO: 44552 - DNA, 20 bp, Artificial Sequence
  Description of Artificial Sequence: Synthetic oligonucleotide
  Target: LAMA2; (+) strand; PAM type: NNNNGHTT; PAM sequence: CAGAGATT
gttgttaaaatcaatttttg

SEQ ID NO: 44553 - DNA, 20 bp, Artificial Sequence
  Description of Artificial Sequence: Synthetic oligonucleotide
  Target: LAMA2; (+) strand; PAM type: NNNNGHTT; PAM sequence: TACTGATT
taatttatagacttgacata

SEQ ID NO: 44554 - DNA, 20 bp, Artificial Sequence
  Description of Artificial Sequence: Synthetic oligonucleotide
  Target: LAMA2; (+) strand; PAM type: NNNNGHTT; PAM sequence: GGACGTTT
gtactgaacttttttcttta

SEQ ID NO: 44555 - DNA, 20 bp, Artificial Sequence
  Description of Artificial Sequence: Synthetic oligonucleotide
  Target: LAMA2; (+) strand; PAM type: NNNNGHTT; PAM sequence: TAGAGTTT
acttttttctttaggacgtt

SEQ ID NO: 44556 - DNA, 20 bp, Artificial Sequence
  Description of Artificial Sequence: Synthetic oligonucleotide
  Target: LAMA2; (+) strand; PAM type: NNNNGHTT; PAM sequence: TGATGATT
tacttcctttttattctctc

SEQ ID NO: 44557 - DNA, 20 bp, Artificial Sequence
  Description of Artificial Sequence: Synthetic oligonucleotide
  Target: LAMA2; (+) strand; PAM type: NNNNGHTT; PAM sequence: AAGAGTTT
ccagagacaggagaatgaga

SEQ ID NO: 44558 - DNA, 20 bp, Artificial Sequence
  Description of Artificial Sequence: Synthetic oligonucleotide
  Target: LAMA2; (+) strand; PAM type: NNNNGHTT; PAM sequence: GAGTGTTT
tgaaaaggcatgatggtggg

SEQ ID NO: 44559 - DNA, 20 bp, Artificial Sequence
  Description of Artificial Sequence: Synthetic oligonucleotide
  Target: LAMA2; (+) strand; PAM type: NNNNGHTT; PAM sequence: GAATGCTT
gagaggatgtggagaaatag

SEQ ID NO: 44560 - DNA, 20 bp, Artificial Sequence
  Description of Artificial Sequence: Synthetic oligonucleotide
  Target: LAMA2; (+) strand; PAM type: NNNNGHTT; PAM sequence: TGGTGATT
agacattctggaagacagtg

SEQ ID NO: 44561 - DNA, 20 bp, Artificial Sequence
  Description of Artificial Sequence: Synthetic oligonucleotide
  Target: LAMA2; (+) strand; PAM type: NNNNGHTT; PAM sequence: AAAGGATT
ccattactgggtatttatcc

SEQ ID NO: 44562 - DNA, 20 bp, Artificial Sequence
  Description of Artificial Sequence: Synthetic oligonucleotide
  Target: LAMA2; (+) strand; PAM type: NNNNGHTT; PAM sequence: GTATGTTT
ctataaagacacatgcacac

SEQ ID NO: 44563 - DNA, 20 bp, Artificial Sequence
  Description of Artificial Sequence: Synthetic oligonucleotide
  Target: LAMA2; (+) strand; PAM type: NNNNGHTT; PAM sequence: CCAAGATT
aaggcagaggctgcagtgag

SEQ ID NO: 44564 - DNA, 20 bp, Artificial Sequence
  Description of Artificial Sequence: Synthetic oligonucleotide
  Target: LAMA2; (+) strand; PAM type: NNNNGHTT; PAM sequence: AAAAGTTT
actctgtctcaaaagaaaaa

SEQ ID NO: 44565 - DNA, 20 bp, Artificial Sequence
  Description of Artificial Sequence: Synthetic oligonucleotide
  Target: LAMA2; (+) strand; PAM type: NNNNGHTT; PAM sequence: TTCAGATT
acctgtaatgagatgagaag

SEQ ID NO: 44566 - DNA, 20 bp, Artificial Sequence
  Description of Artificial Sequence: Synthetic oligonucleotide
  Target: LAMA2; (+) strand; PAM type: NNNNGHTT; PAM sequence: AGGTGATT
aggagttgaggttcgtaacg

SEQ ID NO: 44567 - DNA, 20 bp, Artificial Sequence
  Description of Artificial Sequence: Synthetic oligonucleotide
  Target: LAMA2; (+) strand; PAM type: NNNNGHTT; PAM sequence: GGTAGATT
agcctgggcacagtcatgtt

SEQ ID NO: 44568 - DNA, 20 bp, Artificial Sequence
  Description of Artificial Sequence: Synthetic oligonucleotide
  Target: LAMA2; (+) strand; PAM type: NNNNGHTT; PAM sequence: GGTGGTTT
gtcattaataatggctggaa

SEQ ID NO: 44569 - DNA, 20 bp, Artificial Sequence
  Description of Artificial Sequence: Synthetic oligonucleotide
  Target: LAMA2; (+) strand; PAM type: NNNNGHTT; PAM sequence: TGTGGATT
gaaggtggttttatgaggga

SEQ ID NO: 44570 - DNA, 20 bp, Artificial Sequence
  Description of Artificial Sequence: Synthetic oligonucleotide
  Target: LAMA2; (+) strand; PAM type: NNNNGHTT; PAM sequence: AACTGATT
attttcagagagaaagagaa

SEQ ID NO: 44571 - DNA, 20 bp, Artificial Sequence
  Description of Artificial Sequence: Synthetic oligonucleotide
  Target: LAMA2; (+) strand; PAM type: NNNNGHTT; PAM sequence: TATTGTTT
atcttgaaggtcttatagaa

SEQ ID NO: 44572 - DNA, 20 bp, Artificial Sequence
  Description of Artificial Sequence: Synthetic oligonucleotide
  Target: LAMA2; (+) strand; PAM type: NNNNGHTT; PAM sequence: CGGTGATT
agtgtgagcgacgcagaaga

SEQ ID NO: 44573 - DNA, 20 bp, Artificial Sequence
  Description of Artificial Sequence: Synthetic oligonucleotide
  Target: LAMA2; (+) strand; PAM type: NNNNGHTT; PAM sequence: TTGCGCTT
gggtcactcccacccgaata

SEQ ID NO: 44574 - DNA, 20 bp, Artificial Sequence
  Description of Artificial Sequence: Synthetic oligonucleotide
  Target: LAMA2; (+) strand; PAM type: NNNNGHTT; PAM sequence: ACCGGCTT
ccgaatattgcgcttttcag

SEQ ID NO: 44575 - DNA, 20 bp, Artificial Sequence
  Description of Artificial Sequence: Synthetic oligonucleotide
  Target: LAMA2; (+) strand; PAM type: NNNNGHTT; PAM sequence: CGCTGATT
gtcctacgcccacggaatct

SEQ ID NO: 44576 - DNA, 20 bp, Artificial Sequence
  Description of Artificial Sequence: Synthetic oligonucleotide
  Target: LAMA2; (+) strand; PAM type: NNNNGHTT; PAM sequence: CCAGGCTT
ggaggggcgcccgccattgc

SEQ ID NO: 44577 - DNA, 20 bp, Artificial Sequence
  Description of Artificial Sequence: Synthetic oligonucleotide
  Target: LAMA2; (+) strand; PAM type: NNNNGHTT; PAM sequence: GCTTGCTT
gggcgcccgccattgcccag

SEQ ID NO: 44578 - DNA, 20 bp, Artificial Sequence
  Description of Artificial Sequence: Synthetic oligonucleotide
  Target: LAMA2; (+) strand; PAM type: NNNNGHTT; PAM sequence: GACAGCTT
agacttaagtgtccctgtct

SEQ ID NO: 44579 - DNA, 20 bp, Artificial Sequence
  Description of Artificial Sequence: Synthetic oligonucleotide
  Target: LAMA2; (+) strand; PAM type: NNNNGHTT; PAM sequence: GAATGATT
acagaacaaagctggatgga

SEQ ID NO: 44580 - DNA, 20 bp, Artificial Sequence
  Description of Artificial Sequence: Synthetic oligonucleotide
  Target: LAMA2; (+) strand; PAM type: NNNNGHTT; PAM sequence: GAAGGCTT
attttgacgagctgagagaa

SEQ ID NO: 44581 - DNA, 20 bp, Artificial Sequence
  Description of Artificial Sequence: Synthetic oligonucleotide
  Target: LAMA2; (+) strand; PAM type: NNNNGHTT; PAM sequence: AAGTGCTT
ctagaataaccaatacagag

SEQ ID NO: 44582 - DNA, 20 bp, Artificial Sequence
  Description of Artificial Sequence: Synthetic oligonucleotide
  Target: LAMA2; (+) strand; PAM type: NNNNGHTT; PAM sequence: GGAAGTTT
gaatgaaatgaagcgagaag

SEQ ID NO: 44583 - DNA, 20 bp, Artificial Sequence
  Description of Artificial Sequence: Synthetic oligonucleotide
  Target: LAMA2; (+) strand; PAM type: NNNNGHTT; PAM sequence: GTCTGATT
tgtgaaaagaccaaatctac

SEQ ID NO: 44584 - DNA, 20 bp, Artificial Sequence
  Description of Artificial Sequence: Synthetic oligonucleotide
  Target: LAMA2; (+) strand; PAM type: NNNNGHTT; PAM sequence: TTCAGATT
tctagcaaggcaggccaacg

SEQ ID NO: 44585 - DNA, 20 bp, Artificial Sequence
  Description of Artificial Sequence: Synthetic oligonucleotide
  Target: LAMA2; (+) strand; PAM type: NNNNGHTT; PAM sequence: GTCAGATT
caactccaagacacataatt

SEQ ID NO: 44586 - DNA, 20 bp, Artificial Sequence
  Description of Artificial Sequence: Synthetic oligonucleotide
  Target: LAMA2; (+) strand; PAM type: NNNNGHTT; PAM sequence: CTAAGCTT
gaatttcatatccagccaaa

SEQ ID NO: 44587 - DNA, 20 bp, Artificial Sequence
  Description of Artificial Sequence: Synthetic oligonucleotide
  Target: LAMA2; (+) strand; PAM type: NNNNGHTT; PAM sequence: GAGAGATT
tttatagacaagcaaatgtt

SEQ ID NO: 44588 - DNA, 20 bp, Artificial Sequence
  Description of Artificial Sequence: Synthetic oligonucleotide
  Target: LAMA2; (+) strand; PAM type: NNNNGHTT; PAM sequence: CCCAGATT
atgcacccaatacaggagca

SEQ ID NO: 44589 - DNA, 20 bp, Artificial Sequence
  Description of Artificial Sequence: Synthetic oligonucleotide
  Target: LAMA2; (+) strand; PAM type: NNNNGHTT; PAM sequence: TCAGGATT
cagtgcaatcaaactagaac

SEQ ID NO: 44590 - DNA, 20 bp, Artificial Sequence
  Description of Artificial Sequence: Synthetic oligonucleotide
  Target: LAMA2; (+) strand; PAM type: NNNNGHTT; PAM sequence: GCTGGTTT
aaaaatcaatgaatccagga

SEQ ID NO: 44591 - DNA, 20 bp, Artificial Sequence
  Description of Artificial Sequence: Synthetic oligonucleotide
  Target: LAMA2; (+) strand; PAM type: NNNNGHTT; PAM sequence: AATAGTTT
ctgaaattgtggcaataatc

SEQ ID NO: 44592 - DNA, 20 bp, Artificial Sequence
  Description of Artificial Sequence: Synthetic oligonucleotide
  Target: LAMA2; (+) strand; PAM type: NNNNGHTT; PAM sequence: GATGGATT
ccaaaaagagtccaggacca

SEQ ID NO: 44593 - DNA, 20 bp, Artificial Sequence
  Description of Artificial Sequence: Synthetic oligonucleotide
  Target: LAMA2; (+) strand; PAM type: NNNNGHTT; PAM sequence: AAAAGCTT
ccgaatccagcagcacatca

SEQ ID NO: 44594 - DNA, 20 bp, Artificial Sequence
  Description of Artificial Sequence: Synthetic oligonucleotide
  Target: LAMA2; (+) strand; PAM type: NNNNGHTT; PAM sequence: GTGGGCTT
agcttatccaccatgatcaa

SEQ ID NO: 44595 - DNA, 20 bp, Artificial Sequence
  Description of Artificial Sequence: Synthetic oligonucleotide
  Target: LAMA2; (+) strand; PAM type: NNNNGHTT; PAM sequence: ACATGATT
cagagccaaagacaaaaacc

SEQ ID NO: 44596 - DNA, 20 bp, Artificial Sequence
  Description of Artificial Sequence: Synthetic oligonucleotide
  Target: LAMA2; (+) strand; PAM type: NNNNGHTT; PAM sequence: CCCTGTTT
aaaagaggaagtcaaattgt

SEQ ID NO: 44597 - DNA, 20 bp, Artificial Sequence
  Description of Artificial Sequence: Synthetic oligonucleotide
  Target: LAMA2; (+) strand; PAM type: NNNNGHTT; PAM sequence: ACATGATT
attgtccctgtttgcagacg

SEQ ID NO: 44598 - DNA, 20 bp, Artificial Sequence
  Description of Artificial Sequence: Synthetic oligonucleotide
  Target: LAMA2; (+) strand; PAM type: NNNNGHTT; PAM sequence: GATTGTTT
tccctgtttgcagacgacat

SEQ ID NO: 44599 - DNA, 20 bp, Artificial Sequence
  Description of Artificial Sequence: Synthetic oligonucleotide
  Target: LAMA2; (+) strand; PAM type: NNNNGHTT; PAM sequence: AATTGCTT
atgggtgaactcccattcac

SEQ ID NO: 44600 - DNA, 20 bp, Artificial Sequence
  Description of Artificial Sequence: Synthetic oligonucleotide
  Target: LAMA2; (+) strand; PAM type: NNNNGHTT; PAM sequence: TACAGATT
ccatactgcccaaggtaatt

SEQ ID NO: 44601 - DNA, 20 bp, Artificial Sequence
  Description of Artificial Sequence: Synthetic oligonucleotide
  Target: LAMA2; (+) strand; PAM type: NNNNGHTT; PAM sequence: AAAGGATT
gagaaaaacaagcaatgggg

SEQ ID NO: 44602 - DNA, 20 bp, Artificial Sequence
  Description of Artificial Sequence: Synthetic oligonucleotide
  Target: LAMA2; (+) strand; PAM type: NNNNGHTT; PAM sequence: GATGGATT
ttatacaaaaatcaattcaa

SEQ ID NO: 44603 - DNA, 20 bp, Artificial Sequence
  Description of Artificial Sequence: Synthetic oligonucleotide
  Target: LAMA2; (+) strand; PAM type: NNNNGHTT; PAM sequence: TAAAGATT
aaaatcaattcaagatggat

SEQ ID NO: 44604 - DNA, 20 bp, Artificial Sequence
  Description of Artificial Sequence: Synthetic oligonucleotide
  Target: LAMA2; (+) strand; PAM type: NNNNGHTT; PAM sequence: AAGAGCTT
aatgggatctaattaaacta

SEQ ID NO: 44605 - DNA, 20 bp, Artificial Sequence
  Description of Artificial Sequence: Synthetic oligonucleotide
  Target: LAMA2; (+) strand; PAM type: NNNNGHTT; PAM sequence: TGGCGATT
aaccattgtggaagtcagtg

SEQ ID NO: 44606 - DNA, 20 bp, Artificial Sequence
  Description of Artificial Sequence: Synthetic oligonucleotide
  Target: LAMA2; (+) strand; PAM type: NNNNGHTT; PAM sequence: GTATGTTT
ctataaagacacatgcacac

SEQ ID NO: 44607 - DNA, 20 bp, Artificial Sequence
  Description of Artificial Sequence: Synthetic oligonucleotide
  Target: LAMA2; (+) strand; PAM type: NNNNGHTT; PAM sequence: ACTGGATT
caaatgtccaacaatgatag

SEQ ID NO: 44608 - DNA, 20 bp, Artificial Sequence
  Description of Artificial Sequence: Synthetic oligonucleotide
  Target: LAMA2; (+) strand; PAM type: NNNNGHTT; PAM sequence: GATAGTTT
atgtatttccacaatacagg

SEQ ID NO: 44609 - DNA, 20 bp, Artificial Sequence
  Description of Artificial Sequence: Synthetic oligonucleotide
  Target: LAMA2; (+) strand; PAM type: NNNNGHTT; PAM sequence: TTTAGTTT
actcaattccttactttgac

SEQ ID NO: 44610 - DNA, 20 bp, Artificial Sequence
  Description of Artificial Sequence: Synthetic oligonucleotide
  Target: LAMA2; (+) strand; PAM type: NNNNGHTT; PAM sequence: TACAGCTT
aatgctatacactattatgt

SEQ ID NO: 44611 - DNA, 20 bp, Artificial Sequence
  Description of Artificial Sequence: Synthetic oligonucleotide
  Target: LAMA2; (+) strand; PAM type: NNNNGHTT; PAM sequence: CCTTGATT
aatactactaattaatatat

SEQ ID NO: 44612 - DNA, 20 bp, Artificial Sequence
  Description of Artificial Sequence: Synthetic oligonucleotide
  Target: LAMA2; (+) strand; PAM type: NNNNGHTT; PAM sequence: TAGGGCTT
tttcaggatatatatatagt

SEQ ID NO: 44613 - DNA, 20 bp, Artificial Sequence
  Description of Artificial Sequence: Synthetic oligonucleotide
  Target: LAMA2; (+) strand; PAM type: NNNNGHTT; PAM sequence: TCTTGATT
ggcttgttgacactatttca

SEQ ID NO: 44614 - DNA, 20 bp, Artificial Sequence
  Description of Artificial Sequence: Synthetic oligonucleotide
  Target: LAMA2; (+) strand; PAM type: NNNNGHTT; PAM sequence: ATCAGATT
aagtaaaacctcatggaatt

SEQ ID NO: 44615 - DNA, 20 bp, Artificial Sequence
  Description of Artificial Sequence: Synthetic oligonucleotide
  Target: LAMA2; (+) strand; PAM type: NNNNGHTT; PAM sequence: CTGAGTTT
aaacttttataacacatctg

SEQ ID NO: 44616 - DNA, 20 bp, Artificial Sequence
  Description of Artificial Sequence: Synthetic oligonucleotide
  Target: LAMA2; (+) strand; PAM type: NNNNGHTT; PAM sequence: ATGTGTTT
gaaaaattttacttactcta

SEQ ID NO: 44617 - DNA, 20 bp, Artificial Sequence
  Description of Artificial Sequence: Synthetic oligonucleotide
  Target: LAMA2; (+) strand; PAM type: NNNNGHTT; PAM sequence: TTATGATT
taaataaaaagtcctatagg

SEQ ID NO: 44618 - DNA, 20 bp, Artificial Sequence
  Description of Artificial Sequence: Synthetic oligonucleotide
  Target: LAMA2; (+) strand; PAM type: NNNNGHTT; PAM sequence: TAAGGTTT
tttttttttctgaaaaacat

SEQ ID NO: 44619 - DNA, 20 bp, Artificial Sequence
  Description of Artificial Sequence: Synthetic oligonucleotide
  Target: LAMA2; (+) strand; PAM type: NNNNGHTT; PAM sequence: CAAAGCTT
aaacattaaggtttctttcc

SEQ ID NO: 44620 - DNA, 20 bp, Artificial Sequence
  Description of Artificial Sequence: Synthetic oligonucleotide
  Target: LAMA2; (+) strand; PAM type: NNNNGHTT; PAM sequence: GTCAGTTT
ccaaagcttattagttaatt

SEQ ID NO: 44621 - DNA, 20 bp, Artificial Sequence
  Description of Artificial Sequence: Synthetic oligonucleotide
  Target: LAMA2; (+) strand; PAM type: NNNNGHTT; PAM sequence: ATTAGTTT
tattttcttccttcttcttt

SEQ ID NO: 44622 - DNA, 20 bp, Artificial Sequence
  Description of Artificial Sequence: Synthetic oligonucleotide
  Target: LAMA2; (+) strand; PAM type: NNNNGHTT; PAM sequence: TAATGATT
tttataggagaaaggatgga

SEQ ID NO: 44623 - DNA, 20 bp, Artificial Sequence
  Description of Artificial Sequence: Synthetic oligonucleotide
  Target: LAMA2; (+) strand; PAM type: NNNNGHTT; PAM sequence: AAATGATT
ctcaccctagaaattttaat

SEQ ID NO: 44624 - DNA, 20 bp, Artificial Sequence
  Description of Artificial Sequence: Synthetic oligonucleotide
  Target: LAMA2; (+) strand; PAM type: NNNNGHTT; PAM sequence: TCAGGCTT
atgatttactaacattctca

SEQ ID NO: 44625 - DNA, 20 bp, Artificial Sequence
  Description of Artificial Sequence: Synthetic oligonucleotide
  Target: LAMA2; (+) strand; PAM type: NNNNGHTT; PAM sequence: ACCTGCTT
ataaaataatatcaaagaaa

SEQ ID NO: 44626 - DNA, 20 bp, Artificial Sequence
  Description of Artificial Sequence: Synthetic oligonucleotide
  Target: LAMA2; (+) strand; PAM type: NNNNGHTT; PAM sequence: TTTTGATT
attcatgggtatagataact

SEQ ID NO: 44627 - DNA, 20 bp, Artificial Sequence
  Description of Artificial Sequence: Synthetic oligonucleotide
  Target: LAMA2; (+) strand; PAM type: NNNNGHTT; PAM sequence: CCATGCTT
ttttaatcaaatttcagatc

SEQ ID NO: 44628 - DNA, 20 bp, Artificial Sequence
  Description of Artificial Sequence: Synthetic oligonucleotide
  Target: LAMA2; (+) strand; PAM type: NNNNGHTT; PAM sequence: ACAAGTTT
atgaggatgactgccttatt

SEQ ID NO: 44629 - DNA, 20 bp, Artificial Sequence
  Description of Artificial Sequence: Synthetic oligonucleotide
  Target: LAMA2; (+) strand; PAM type: NNNNGHTT; PAM sequence: TATGGATT
gtttcagtacaatttatata

SEQ ID NO: 44630 - DNA, 20 bp, Artificial Sequence
  Description of Artificial Sequence: Synthetic oligonucleotide
  Target: LAMA2; (+) strand; PAM type: NNNNGHTT; PAM sequence: AAACGCTT
atatatatttttatatatat

SEQ ID NO: 44631 - DNA, 20 bp, Artificial Sequence
  Description of Artificial Sequence: Synthetic oligonucleotide
  Target: LAMA2; (+) strand; PAM type: NNNNGHTT; PAM sequence: TTTTGTTT
tacctataaacttcagcatt

SEQ ID NO: 44632 - DNA, 20 bp, Artificial Sequence
  Description of Artificial Sequence: Synthetic oligonucleotide
  Target: LAMA2; (+) strand; PAM type: NNNNGHTT; PAM sequence: TGAAGTTT
tgtttgggtaattaatattt

SEQ ID NO: 44633 - DNA, 20 bp, Artificial Sequence
  Description of Artificial Sequence: Synthetic oligonucleotide
  Target: LAMA2; (+) strand; PAM type: NNNNGHTT; PAM sequence: TCTTGTTT
taatattttgaagttttctc

SEQ ID NO: 44634 - DNA, 20 bp, Artificial Sequence
  Description of Artificial Sequence: Synthetic oligonucleotide
  Target: LAMA2; (+) strand; PAM type: NNNNGHTT; PAM sequence: TCTTGTTT
gttttctctcttgttttcct

SEQ ID NO: 44635 - DNA, 20 bp, Artificial Sequence
  Description of Artificial Sequence: Synthetic oligonucleotide
  Target: LAMA2; (+) strand; PAM type: NNNNGHTT; PAM sequence: ATCTGTTT
tttccttcttgtttggaatg

SEQ ID NO: 44636 - DNA, 20 bp, Artificial Sequence
  Description of Artificial Sequence: Synthetic oligonucleotide
  Target: LAMA2; (+) strand; PAM type: NNNNGHTT; PAM sequence: CTGTGTTT
ttggaatgatctgtttgaga

SEQ ID NO: 44637 - DNA, 20 bp, Artificial Sequence
  Description of Artificial Sequence: Synthetic oligonucleotide
  Target: LAMA2; (+) strand; PAM type: NNNNGHTT; PAM sequence: GTAAGTTT
tgtttttaacaaaagtatat

SEQ ID NO: 44638 - DNA, 20 bp, Artificial Sequence
  Description of Artificial Sequence: Synthetic oligonucleotide
  Target: LAMA2; (+) strand; PAM type: NNNNGHTT; PAM sequence: CACTGTTT
tgaaaagtgtccatcaatat

SEQ ID NO: 44639 - DNA, 20 bp, Artificial Sequence
  Description of Artificial Sequence: Synthetic oligonucleotide
  Target: LAMA2; (+) strand; PAM type: NNNNGHTT; PAM sequence: GGCAGTTT
gtccatcaatatcactgttt

SEQ ID NO: 44640 - DNA, 20 bp, Artificial Sequence
  Description of Artificial Sequence: Synthetic oligonucleotide
  Target: LAMA2; (+) strand; PAM type: NNNNGHTT; PAM sequence: TAAAGATT
cactgtttggcagtttatca

SEQ ID NO: 44641 - DNA, 20 bp, Artificial Sequence
  Description of Artificial Sequence: Synthetic oligonucleotide
  Target: LAMA2; (+) strand; PAM type: NNNNGHTT; PAM sequence: ATCAGCTT
agcaaatatcacaggctagg

SEQ ID NO: 44642 - DNA, 20 bp, Artificial Sequence
  Description of Artificial Sequence: Synthetic oligonucleotide
  Target: LAMA2; (+) strand; PAM type: NNNNGHTT; PAM sequence: CAGTGTTT
taaaaatggtattatatttt

SEQ ID NO: 44643 - DNA, 20 bp, Artificial Sequence
  Description of Artificial Sequence: Synthetic oligonucleotide
  Target: LAMA2; (+) strand; PAM type: NNNNGHTT; PAM sequence: ACATGCTT
gtgttttaatggaaatttta

SEQ ID NO: 44644 - DNA, 20 bp, Artificial Sequence
  Description of Artificial Sequence: Synthetic oligonucleotide
  Target: LAMA2; (+) strand; PAM type: NNNNGHTT; PAM sequence: GATAGTTT
gaaattttaacatgctttct

SEQ ID NO: 44645 - DNA, 20 bp, Artificial Sequence
  Description of Artificial Sequence: Synthetic oligonucleotide
  Target: LAMA2; (+) strand; PAM type: NNNNGHTT; PAM sequence: AATAGATT
aatatcttttaacttgtgcc

SEQ ID NO: 44646 - DNA, 20 bp, Artificial Sequence
  Description of Artificial Sequence: Synthetic oligonucleotide
  Target: LAMA2; (+) strand; PAM type: NNNNGHTT; PAM sequence: GATTGTTT
tcttttaacttgtgccaata

SEQ ID NO: 44647 - DNA, 20 bp, Artificial Sequence
  Description of Artificial Sequence: Synthetic oligonucleotide
  Target: LAMA2; (+) strand; PAM type: NNNNGHTT; PAM sequence: ACCCGATT
tcttaattttattttctttt

SEQ ID NO: 44648 - DNA, 20 bp, Artificial Sequence
  Description of Artificial Sequence: Synthetic oligonucleotide
  Target: LAMA2; (+) strand; PAM type: NNNNGHTT; PAM sequence: CCTTGATT
cagaatctaaatatttctgc

SEQ ID NO: 44649 - DNA, 20 bp, Artificial Sequence
  Description of Artificial Sequence: Synthetic oligonucleotide
  Target: LAMA2; (+) strand; PAM type: NNNNGHTT; PAM sequence: TCCTGCTT
tcattcctttcatctgtcat

SEQ ID NO: 44650 - DNA, 20 bp, Artificial Sequence
  Description of Artificial Sequence: Synthetic oligonucleotide
  Target: LAMA2; (+) strand; PAM type: NNNNGHTT; PAM sequence: GCATGCTT
agttgctgggcagtgtaccc

SEQ ID NO: 44651 - DNA, 20 bp, Artificial Sequence
  Description of Artificial Sequence: Synthetic oligonucleotide
  Target: LAMA2; (+) strand; PAM type: NNNNGHTT; PAM sequence: TCCTGATT
tcctgaagctctccctgaca

SEQ ID NO: 44652 - DNA, 20 bp, Artificial Sequence
  Description of Artificial Sequence: Synthetic oligonucleotide
  Target: LAMA2; (+) strand; PAM type: NNNNGHTT; PAM sequence: CAGTGTTT
tagttacattatttatcata

SEQ ID NO: 44653 - DNA, 20 bp, Artificial Sequence
  Description of Artificial Sequence: Synthetic oligonucleotide
  Target: LAMA2; (+) strand; PAM type: NNNNGHTT; PAM sequence: GAAAGTTT
tatcatacagtgtttccact

SEQ ID NO: 44654 - DNA, 20 bp, Artificial Sequence
  Description of Artificial Sequence: Synthetic oligonucleotide
  Target: LAMA2; (+) strand; PAM type: NNNNGHTT; PAM sequence: CAATGTTT
tctaagctacattggcagag

SEQ ID NO: 44655 - DNA, 20 bp, Artificial Sequence
  Description of Artificial Sequence: Synthetic oligonucleotide
  Target: LAMA2; (+) strand; PAM type: NNNNGHTT; PAM sequence: CTTAGATT
attggcagagcaatgtttta

SEQ ID NO: 44656 - DNA, 20 bp, Artificial Sequence
  Description of Artificial Sequence: Synthetic oligonucleotide
  Target: LAMA2; (+) strand; PAM type: NNNNGHTT; PAM sequence: GATGGATT
cttagattatatctatttaa

SEQ ID NO: 44657 - DNA, 20 bp, Artificial Sequence
  Description of Artificial Sequence: Synthetic oligonucleotide
  Target: LAMA2; (+) strand; PAM type: NNNNGHTT; PAM sequence: GGGAGATT
gatggatttagggaggctca

SEQ ID NO: 44658 - DNA, 20 bp, Artificial Sequence
  Description of Artificial Sequence: Synthetic oligonucleotide
  Target: LAMA2; (+) strand; PAM type: NNNNGHTT; PAM sequence: CTGTGTTT
agcacctcttggcagcactg

SEQ ID NO: 44659 - DNA, 20 bp, Artificial Sequence
  Description of Artificial Sequence: Synthetic oligonucleotide
  Target: LAMA2; (+) strand; PAM type: NNNNGHTT; PAM sequence: GTGTGTTT
agggactctgtctgtcatct

SEQ ID NO: 44660 - DNA, 20 bp, Artificial Sequence
  Description of Artificial Sequence: Synthetic oligonucleotide
  Target: LAMA2; (+) strand; PAM type: NNNNGHTT; PAM sequence: GATAGATT
gcaccacatagtgtgtgcca

SEQ ID NO: 44661 - DNA, 20 bp, Artificial Sequence
  Description of Artificial Sequence: Synthetic oligonucleotide
  Target: LAMA2; (+) strand; PAM type: NNNNGHTT; PAM sequence: TGAGGATT
ttaataaataagaagtgaat

SEQ ID NO: 44662 - DNA, 20 bp, Artificial Sequence
  Description of Artificial Sequence: Synthetic oligonucleotide
  Target: LAMA2; (+) strand; PAM type: NNNNGHTT; PAM sequence: AATTGCTT
ctattcatcttcccatatta

SEQ ID NO: 44663 - DNA, 20 bp, Artificial Sequence
  Description of Artificial Sequence: Synthetic oligonucleotide
  Target: LAMA2; (+) strand; PAM type: NNNNGHTT; PAM sequence: AGGTGATT
ccaaataaaatgtctcctcc

SEQ ID NO: 44664 - DNA, 20 bp, Artificial Sequence
  Description of Artificial Sequence: Synthetic oligonucleotide
  Target: LAMA2; (+) strand; PAM type: NNNNGHTT; PAM sequence: ATAAGATT
aggaagacatgtgggctcaa

SEQ ID NO: 44665 - DNA, 20 bp, Artificial Sequence
  Description of Artificial Sequence: Synthetic oligonucleotide
  Target: LAMA2; (+) strand; PAM type: NNNNGHTT; PAM sequence: TGGGGATT
tcttacattttcttcactaa

SEQ ID NO: 44666 - DNA, 20 bp, Artificial Sequence
  Description of Artificial Sequence: Synthetic oligonucleotide
  Target: LAMA2; (+) strand; PAM type: NNNNGHTT; PAM sequence: TGTTGATT
attgtcagtaaaatggtctg

SEQ ID NO: 44667 - DNA, 20 bp, Artificial Sequence
  Description of Artificial Sequence: Synthetic oligonucleotide
  Target: LAMA2; (+) strand; PAM type: NNNNGHTT; PAM sequence: ATTAGTTT
cagtaaaatggtctgtgttg

SEQ ID NO: 44668 - DNA, 20 bp, Artificial Sequence
  Description of Artificial Sequence: Synthetic oligonucleotide
  Target: LAMA2; (+) strand; PAM type: NNNNGHTT; PAM sequence: ACTTGATT
ttagtttgtctttggggtgt

SEQ ID NO: 44669 - DNA, 20 bp, Artificial Sequence
  Description of Artificial Sequence: Synthetic oligonucleotide
  Target: LAMA2; (+) strand; PAM type: NNNNGHTT; PAM sequence: TGGCGTTT
tcagatgatggagatcctgc

SEQ ID NO: 44670 - DNA, 20 bp, Artificial Sequence
  Description of Artificial Sequence: Synthetic oligonucleotide
  Target: LAMA2; (+) strand; PAM type: NNNNGHTT; PAM sequence: GTGGGCTT
catgcaacctgctatggtat

SEQ ID NO: 44671 - DNA, 20 bp, Artificial Sequence
  Description of Artificial Sequence: Synthetic oligonucleotide
  Target: LAMA2; (+) strand; PAM type: NNNNGHTT; PAM sequence: ATTGGCTT
tgctatggtatgtgggcttt

SEQ ID NO: 44672 - DNA, 20 bp, Artificial Sequence
  Description of Artificial Sequence: Synthetic oligonucleotide
  Target: LAMA2; (+) strand; PAM type: NNNNGHTT; PAM sequence: GTCAGATT
cagcgacactgacacaaatt

SEQ ID NO: 44673 - DNA, 20 bp, Artificial Sequence
  Description of Artificial Sequence: Synthetic oligonucleotide
  Target: LAMA2; (+) strand; PAM type: NNNNGHTT; PAM sequence: GGCAGTTT
acaaattgtcagattttatg

SEQ ID NO: 44674 - DNA, 20 bp, Artificial Sequence
  Description of Artificial Sequence: Synthetic oligonucleotide
  Target: LAMA2; (+) strand; PAM type: NNNNGHTT; PAM sequence: AGAAGCTT
cctaatgaaatacatccttg

SEQ ID NO: 44675 - DNA, 20 bp, Artificial Sequence
  Description of Artificial Sequence: Synthetic oligonucleotide
  Target: LAMA2; (+) strand; PAM type: NNNNGHTT; PAM sequence: ACACGCTT
aatcatggaggacaatgaca

SEQ ID NO: 44676 - DNA, 20 bp, Artificial Sequence
  Description of Artificial Sequence: Synthetic oligonucleotide
  Target: LAMA2; (+) strand; PAM type: NNNNGHTT; PAM sequence: TTAAGATT
tgctctccatctctttgatc

SEQ ID NO: 44677 - DNA, 20 bp, Artificial Sequence
  Description of Artificial Sequence: Synthetic oligonucleotide
  Target: LAMA2; (+) strand; PAM type: NNNNGHTT; PAM sequence: AAGTGATT
tattttactagtgagagact

SEQ ID NO: 44678 - DNA, 20 bp, Artificial Sequence
  Description of Artificial Sequence: Synthetic oligonucleotide
  Target: LAMA2; (+) strand; PAM type: NNNNGHTT; PAM sequence: GCTGGTTT
agtgagagactaagtgattt

SEQ ID NO: 44679 - DNA, 20 bp, Artificial Sequence
  Description of Artificial Sequence: Synthetic oligonucleotide
  Target: LAMA2; (+) strand; PAM type: NNNNGHTT; PAM sequence: CAGTGTTT
ttaatgttcaagaatccttt

SEQ ID NO: 44680 - DNA, 20 bp, Artificial Sequence
  Description of Artificial Sequence: Synthetic oligonucleotide
  Target: LAMA2; (+) strand; PAM type: NNNNGHTT; PAM sequence: GAGAGATT
gccaggaactttggcaggac

SEQ ID NO: 44681 - DNA, 20 bp, Artificial Sequence
  Description of Artificial Sequence: Synthetic oligonucleotide
  Target: LAMA2; (+) strand; PAM type: NNNNGHTT; PAM sequence: AAACGATT
atcagttgcaggaattttcc

SEQ ID NO: 44682 - DNA, 20 bp, Artificial Sequence
  Description of Artificial Sequence: Synthetic oligonucleotide
  Target: LAMA2; (+) strand; PAM type: NNNNGHTT; PAM sequence: CTATGATT
tgtacttactgcagtgtggt

SEQ ID NO: 44683 - DNA, 20 bp, Artificial Sequence
  Description of Artificial Sequence: Synthetic oligonucleotide
  Target: LAMA2; (+) strand; PAM type: NNNNGHTT; PAM sequence: GACTGATT
tcaaagacccagatagaaat

SEQ ID NO: 44684 - DNA, 20 bp, Artificial Sequence
  Description of Artificial Sequence: Synthetic oligonucleotide
  Target: LAMA2; (+) strand; PAM type: NNNNGHTT; PAM sequence: TTTAGATT
caaacactttggaattataa

SEQ ID NO: 44685 - DNA, 20 bp, Artificial Sequence
  Description of Artificial Sequence: Synthetic oligonucleotide
  Target: LAMA2; (+) strand; PAM type: NNNNGHTT; PAM sequence: CTGAGTTT
taatttagattctttaaaaa

SEQ ID NO: 44686 - DNA, 20 bp, Artificial Sequence
  Description of Artificial Sequence: Synthetic oligonucleotide
  Target: LAMA2; (+) strand; PAM type: NNNNGHTT; PAM sequence: GACTGTTT
ctttaaaaactgagttttat

SEQ ID NO: 44687 - DNA, 20 bp, Artificial Sequence
  Description of Artificial Sequence: Synthetic oligonucleotide
  Target: LAMA2; (+) strand; PAM type: NNNNGHTT; PAM sequence: AAAAGCTT
ttttatgactgttttttcaa

SEQ ID NO: 44688 - DNA, 20 bp, Artificial Sequence
  Description of Artificial Sequence: Synthetic oligonucleotide
  Target: LAMA2; (+) strand; PAM type: NNNNGHTT; PAM sequence: ACATGCTT
aagtaattcaaaaagtcaca

SEQ ID NO: 44689 - DNA, 20 bp, Artificial Sequence
  Description of Artificial Sequence: Synthetic oligonucleotide
  Target: LAMA2; (+) strand; PAM type: NNNNGHTT; PAM sequence: AAGTGTTT
aaagtgtggagtcattaatt

SEQ ID NO: 44690 - DNA, 20 bp, Artificial Sequence
  Description of Artificial Sequence: Synthetic oligonucleotide
  Target: LAMA2; (+) strand; PAM type: NNNNGHTT; PAM sequence: TATAGATT
aactgttgaaattgccttga

SEQ ID NO: 44691 - DNA, 20 bp, Artificial Sequence
  Description of Artificial Sequence: Synthetic oligonucleotide
  Target: LAMA2; (+) strand; PAM type: NNNNGHTT; PAM sequence: CATAGATT
aaattgccttgatatagatt

SEQ ID NO: 44692 - DNA, 20 bp, Artificial Sequence
  Description of Artificial Sequence: Synthetic oligonucleotide
  Target: LAMA2; (+) strand; PAM type: NNNNGHTT; PAM sequence: ATGTGATT
gagttctttatatatacaaa

SEQ ID NO: 44693 - DNA, 20 bp, Artificial Sequence
  Description of Artificial Sequence: Synthetic oligonucleotide
  Target: LAMA2; (+) strand; PAM type: NNNNGHTT; PAM sequence: TTCCGATT
cttaccgcctaccagctgtc

SEQ ID NO: 44694 - DNA, 20 bp, Artificial Sequence
  Description of Artificial Sequence: Synthetic oligonucleotide
  Target: LAMA2; (+) strand; PAM type: NNNNGHTT; PAM sequence: ATAAGTTT
ttcaccagatgaccttccct

SEQ ID NO: 44695 - DNA, 20 bp, Artificial Sequence
  Description of Artificial Sequence: Synthetic oligonucleotide
  Target: LAMA2; (+) strand; PAM type: NNNNGHTT; PAM sequence: GTATGCTT
gaacaattatcatgacggga

SEQ ID NO: 44696 - DNA, 20 bp, Artificial Sequence
  Description of Artificial Sequence: Synthetic oligonucleotide
  Target: LAMA2; (+) strand; PAM type: NNNNGHTT; PAM sequence: TCTTGATT
atcatgacgggagtatgctt

SEQ ID NO: 44697 - DNA, 20 bp, Artificial Sequence
  Description of Artificial Sequence: Synthetic oligonucleotide
  Target: LAMA2; (+) strand; PAM type: NNNNGHTT; PAM sequence: CTCTGCTT
ggcaggatcctctttcccac

SEQ ID NO: 44698 - DNA, 20 bp, Artificial Sequence
  Description of Artificial Sequence: Synthetic oligonucleotide
  Target: LAMA2; (+) strand; PAM type: NNNNGHTT; PAM sequence: GTGAGATT
gcttttgaaggatattaaag

SEQ ID NO: 44699 - DNA, 20 bp, Artificial Sequence
  Description of Artificial Sequence: Synthetic oligonucleotide
  Target: LAMA2; (+) strand; PAM type: NNNNGHTT; PAM sequence: TTCTGCTT
gattaaaaatgctccagttg

SEQ ID NO: 44700 - DNA, 20 bp, Artificial Sequence
  Description of Artificial Sequence: Synthetic oligonucleotide
  Target: LAMA2; (+) strand; PAM type: NNNNGHTT; PAM sequence: GTCTGATT
atgctccagttgttctgctt

SEQ ID NO: 44701 - DNA, 20 bp, Artificial Sequence
  Description of Artificial Sequence: Synthetic oligonucleotide
  Target: LAMA2; (+) strand; PAM type: NNNNGHTT; PAM sequence: AATTGATT
tgtaacagtgaaggagacaa

SEQ ID NO: 44702 - DNA, 20 bp, Artificial Sequence
  Description of Artificial Sequence: Synthetic oligonucleotide
  Target: LAMA2; (+) strand; PAM type: NNNNGHTT; PAM sequence: TCTAGCTT
gtgaaggagacaaaattgat

SEQ ID NO: 44703 - DNA, 20 bp, Artificial Sequence
  Description of Artificial Sequence: Synthetic oligonucleotide
  Target: LAMA2; (+) strand; PAM type: NNNNGHTT; PAM sequence: CAGTGTTT
attgattctagcttatggct

SEQ ID NO: 44704 - DNA, 20 bp, Artificial Sequence
  Description of Artificial Sequence: Synthetic oligonucleotide
  Target: LAMA2; (+) strand; PAM type: NNNNGHTT; PAM sequence: ACTTGTTT
tttcaatgttattctgcagc

SEQ ID NO: 44705 - DNA, 20 bp, Artificial Sequence
  Description of Artificial Sequence: Synthetic oligonucleotide
  Target: LAMA2; (+) strand; PAM type: NNNNGHTT; PAM sequence: TAGGGATT
acttgtttgccagcagctgt

SEQ ID NO: 44706 - DNA, 20 bp, Artificial Sequence
  Description of Artificial Sequence: Synthetic oligonucleotide
  Target: LAMA2; (+) strand; PAM type: NNNNGHTT; PAM sequence: GCAGGTTT
agcagctgttagggattatt

SEQ ID NO: 44707 - DNA, 20 bp, Artificial Sequence
  Description of Artificial Sequence: Synthetic oligonucleotide
  Target: LAMA2; (+) strand; PAM type: NNNNGHTT; PAM sequence: ATCAGATT
cagtgtggcaacaataataa

SEQ ID NO: 44708 - DNA, 20 bp, Artificial Sequence
  Description of Artificial Sequence: Synthetic oligonucleotide
  Target: LAMA2; (+) strand; PAM type: NNNNGHTT; PAM sequence: AGGGGTTT
agatttagactggctactga

SEQ ID NO: 44709 - DNA, 20 bp, Artificial Sequence
  Description of Artificial Sequence: Synthetic oligonucleotide
  Target: LAMA2; (+) strand; PAM type: NNNNGHTT; PAM sequence: GTTTGTTT
ttagactggctactgaaggg

SEQ ID NO: 44710 - DNA, 20 bp, Artificial Sequence
  Description of Artificial Sequence: Synthetic oligonucleotide
  Target: LAMA2; (+) strand; PAM type: NNNNGHTT; PAM sequence: AAAAGATT
gctactgaaggggtttgttt

SEQ ID NO: 44711 - DNA, 20 bp, Artificial Sequence
  Description of Artificial Sequence: Synthetic oligonucleotide
  Target: LAMA2; (+) strand; PAM type: NNNNGHTT; PAM sequence: GAAAGATT
tcccagaaatatacaacact

SEQ ID NO: 44712 - DNA, 20 bp, Artificial Sequence
  Description of Artificial Sequence: Synthetic oligonucleotide
  Target: LAMA2; (+) strand; PAM type: NNNNGHTT; PAM sequence: ATTTGTTT
aaaggtacaatatttcttta

SEQ ID NO: 44713 - DNA, 20 bp, Artificial Sequence
  Description of Artificial Sequence: Synthetic oligonucleotide
  Target: LAMA2; (+) strand; PAM type: NNNNGHTT; PAM sequence: TTTCGTTT
tttaatttgtttctttcctc

SEQ ID NO: 44714 - DNA, 20 bp, Artificial Sequence
  Description of Artificial Sequence: Synthetic oligonucleotide
  Target: LAMA2; (+) strand; PAM type: NNNNGHTT; PAM sequence: AGTGGATT
tggcaaacgctcacacacat

SEQ ID NO: 44715 - DNA, 20 bp, Artificial Sequence
  Description of Artificial Sequence: Synthetic oligonucleotide
  Target: LAMA2; (+) strand; PAM type: NNNNGHTT; PAM sequence: AAGGGATT
aaattctctcctcaagagaa

SEQ ID NO: 44716 - DNA, 20 bp, Artificial Sequence
  Description of Artificial Sequence: Synthetic oligonucleotide
  Target: LAMA2; (+) strand; PAM type: NNNNGHTT; PAM sequence: ATGTGTTT
tcactcctacttgtccaaat

SEQ ID NO: 44717 - DNA, 20 bp, Artificial Sequence
  Description of Artificial Sequence: Synthetic oligonucleotide
  Target: LAMA2; (+) strand; PAM type: NNNNGHTT; PAM sequence: TGATGTTT
aaaatttcaaaaattctaga

SEQ ID NO: 44718 - DNA, 20 bp, Artificial Sequence
  Description of Artificial Sequence: Synthetic oligonucleotide
  Target: LAMA2; (+) strand; PAM type: NNNNGHTT; PAM sequence: GTATGATT
atagagctaaagcaaatctt

SEQ ID NO: 44719 - DNA, 20 bp, Artificial Sequence
  Description of Artificial Sequence: Synthetic oligonucleotide
  Target: LAMA2; (+) strand; PAM type: NNNNGHTT; PAM sequence: ATATGTTT
ttgtatgatttttttattta

SEQ ID NO: 44720 - DNA, 20 bp, Artificial Sequence
  Description of Artificial Sequence: Synthetic oligonucleotide
  Target: LAMA2; (+) strand; PAM type: NNNNGHTT; PAM sequence: TTTTGATT
ctatatattcgcgtgttcac

SEQ ID NO: 44721 - DNA, 20 bp, Artificial Sequence
  Description of Artificial Sequence: Synthetic oligonucleotide
  Target: LAMA2; (+) strand; PAM type: NNNNGHTT; PAM sequence: AGCAGATT
caaattttatttgtgaaaaa

SEQ ID NO: 44722 - DNA, 20 bp, Artificial Sequence
  Description of Artificial Sequence: Synthetic oligonucleotide
  Target: LAMA2; (+) strand; PAM type: NNNNGHTT; PAM sequence: AGTGGCTT
tcaccccctggctggagtgc

SEQ ID NO: 44723 - DNA, 20 bp, Artificial Sequence
  Description of Artificial Sequence: Synthetic oligonucleotide
  Target: LAMA2; (+) strand; PAM type: NNNNGHTT; PAM sequence: ACTAGATT
cagcctcccgagtagctggg

SEQ ID NO: 44724 - DNA, 20 bp, Artificial Sequence
  Description of Artificial Sequence: Synthetic oligonucleotide
  Target: LAMA2; (+) strand; PAM type: NNNNGHTT; PAM sequence: TAGAGCTT
tctttttgctctgtcactaa

SEQ ID NO: 44725 - DNA, 20 bp, Artificial Sequence
  Description of Artificial Sequence: Synthetic oligonucleotide
  Target: LAMA2; (+) strand; PAM type: NNNNGHTT; PAM sequence: TTATGTTT
aaataaccgtgacttgtcct

SEQ ID NO: 44726 - DNA, 20 bp, Artificial Sequence
  Description of Artificial Sequence: Synthetic oligonucleotide
  Target: LAMA2; (+) strand; PAM type: NNNNGHTT; PAM sequence: AAGAGATT
ggcaaggctctgcctaatgg

SEQ ID NO: 44727 - DNA, 20 bp, Artificial Sequence
  Description of Artificial Sequence: Synthetic oligonucleotide
  Target: LAMA2; (+) strand; PAM type: NNNNGHTT; PAM sequence: GTGTGCTT
aagcattggaggtggcaata

SEQ ID NO: 44728 - DNA, 20 bp, Artificial Sequence
  Description of Artificial Sequence: Synthetic oligonucleotide
  Target: LAMA2; (+) strand; PAM type: NNNNGHTT; PAM sequence: CAGAGATT
gagcaaagaaatgaactttc

SEQ ID NO: 44729 - DNA, 20 bp, Artificial Sequence
  Description of Artificial Sequence: Synthetic oligonucleotide
  Target: LAMA2; (+) strand; PAM type: NNNNGHTT; PAM sequence: ACATGTTT
aaatatcccattctgagagc

SEQ ID NO: 44730 - DNA, 20 bp, Artificial Sequence
  Description of Artificial Sequence: Synthetic oligonucleotide
  Target: LAMA2; (+) strand; PAM type: NNNNGHTT; PAM sequence: TACTGTTT
agagcacatgtttctcttag

SEQ ID NO: 44731 - DNA, 20 bp, Artificial Sequence
  Description of Artificial Sequence: Synthetic oligonucleotide
  Target: LAMA2; (+) strand; PAM type: NNNNGHTT; PAM sequence: GCAAGCTT
cggactttcagggtcagtag

SEQ ID NO: 44732 - DNA, 20 bp, Artificial Sequence
  Description of Artificial Sequence: Synthetic oligonucleotide
  Target: LAMA2; (+) strand; PAM type: NNNNGHTT; PAM sequence: TTTGGTTT
taggcaagcttttcaacaaa

SEQ ID NO: 44733 - DNA, 20 bp, Artificial Sequence
  Description of Artificial Sequence: Synthetic oligonucleotide
  Target: LAMA2; (+) strand; PAM type: NNNNGHTT; PAM sequence: GGTAGTTT
ttcttttaaaaactattttt

SEQ ID NO: 44734 - DNA, 20 bp, Artificial Sequence
  Description of Artificial Sequence: Synthetic oligonucleotide
  Target: LAMA2; (+) strand; PAM type: NNNNGHTT; PAM sequence: CTATGTTT
cctaagcctcttttatcatc

SEQ ID NO: 44735 - DNA, 20 bp, Artificial Sequence
  Description of Artificial Sequence: Synthetic oligonucleotide
  Target: LAMA2; (+) strand; PAM type: NNNNGHTT; PAM sequence: ATAAGTTT
tttatcatcctatgtttttg

SEQ ID NO: 44736 - DNA, 20 bp, Artificial Sequence
  Description of Artificial Sequence: Synthetic oligonucleotide
  Target: LAMA2; (+) strand; PAM type: NNNNGHTT; PAM sequence: AGGGGTTT
caaacattgtagaagcaaga

SEQ ID NO: 44737 - DNA, 20 bp, Artificial Sequence
  Description of Artificial Sequence: Synthetic oligonucleotide
  Target: LAMA2; (+) strand; PAM type: NNNNGHTT; PAM sequence: TCTTGTTT
gaggcactgggctcttctac

SEQ ID NO: 44738 - DNA, 20 bp, Artificial Sequence
  Description of Artificial Sequence: Synthetic oligonucleotide
  Target: LAMA2; (+) strand; PAM type: NNNNGHTT; PAM sequence: TCAGGATT
caggactccattgtaaatgc

SEQ ID NO: 44739 - DNA, 20 bp, Artificial Sequence
  Description of Artificial Sequence: Synthetic oligonucleotide
  Target: LAMA2; (+) strand; PAM type: NNNNGHTT; PAM sequence: TGTAGTTT
ctgcaaagcaaagataatat

SEQ ID NO: 44740 - DNA, 20 bp, Artificial Sequence
  Description of Artificial Sequence: Synthetic oligonucleotide
  Target: LAMA2; (+) strand; PAM type: NNNNGHTT; PAM sequence: ATATGCTT
ctatccaccaccatgaggga

SEQ ID NO: 44741 - DNA, 20 bp, Artificial Sequence
  Description of Artificial Sequence: Synthetic oligonucleotide
  Target: LAMA2; (+) strand; PAM type: NNNNGHTT; PAM sequence: TTATGCTT
ttatttttctaatttgaata

SEQ ID NO: 44742 - DNA, 20 bp, Artificial Sequence
  Description of Artificial Sequence: Synthetic oligonucleotide
  Target: LAMA2; (+) strand; PAM type: NNNNGHTT; PAM sequence: CTTTGTTT
aactcctatactgtcatcac

SEQ ID NO: 44743 - DNA, 20 bp, Artificial Sequence
  Description of Artificial Sequence: Synthetic oligonucleotide
  Target: LAMA2; (+) strand; PAM type: NNNNGHTT; PAM sequence: TTTTGTTT
ttttggatatttagaataat

SEQ ID NO: 44744 - DNA, 20 bp, Artificial Sequence
  Description of Artificial Sequence: Synthetic oligonucleotide
  Target: LAMA2; (+) strand; PAM type: NNNNGHTT; PAM sequence: GTTTGTTT
ggatatttagaataattttt

SEQ ID NO: 44745 - DNA, 20 bp, Artificial Sequence
  Description of Artificial Sequence: Synthetic oligonucleotide
  Target: LAMA2; (+) strand; PAM type: NNNNGHTT; PAM sequence: ATAGGTTT
tttacaggaaatagctagtt

SEQ ID NO: 44746 - DNA, 20 bp, Artificial Sequence
  Description of Artificial Sequence: Synthetic oligonucleotide
  Target: LAMA2; (+) strand; PAM type: NNNNGHTT; PAM sequence: AATGGATT
acctaagtctcattcaagct

SEQ ID NO: 44747 - DNA, 20 bp, Artificial Sequence
  Description of Artificial Sequence: Synthetic oligonucleotide
  Target: LAMA2; (+) strand; PAM type: NNNNGHTT; PAM sequence: TAAAGTTT
aagctaatggattatgcaaa

SEQ ID NO: 44748 - DNA, 20 bp, Artificial Sequence
  Description of Artificial Sequence: Synthetic oligonucleotide
  Target: LAMA2; (+) strand; PAM type: NNNNGHTT; PAM sequence: TTATGTTT
tgttccattgacaaagttag

SEQ ID NO: 44749 - DNA, 20 bp, Artificial Sequence
  Description of Artificial Sequence: Synthetic oligonucleotide
  Target: LAMA2; (+) strand; PAM type: NNNNGHTT; PAM sequence: TTTAGCTT
tgacaaagttagttatgttt

SEQ ID NO: 44750 - DNA, 20 bp, Artificial Sequence
  Description of Artificial Sequence: Synthetic oligonucleotide
  Target: LAMA2; (+) strand; PAM type: NNNNGHTT; PAM sequence: CTGTGCTT
gaaaataattttcaaaccca

SEQ ID NO: 44751 - DNA, 20 bp, Artificial Sequence
  Description of Artificial Sequence: Synthetic oligonucleotide
  Target: LAMA2; (+) strand; PAM type: NNNNGHTT; PAM sequence: TTATGTTT
ctgtgcttggccctcactaa

SEQ ID NO: 44752 - DNA, 20 bp, Artificial Sequence
  Description of Artificial Sequence: Synthetic oligonucleotide
  Target: LAMA2; (+) strand; PAM type: NNNNGHTT; PAM sequence: TACGGATT
ttatgtttttgcctgtgaga

SEQ ID NO: 44753 - DNA, 20 bp, Artificial Sequence
  Description of Artificial Sequence: Synthetic oligonucleotide
  Target: LAMA2; (+) strand; PAM type: NNNNGHTT; PAM sequence: CAGTGATT
ctcttcaacgtatcatatta

SEQ ID NO: 44754 - DNA, 20 bp, Artificial Sequence
  Description of Artificial Sequence: Synthetic oligonucleotide
  Target: LAMA2; (+) strand; PAM type: NNNNGHTT; PAM sequence: ACAGGTTT
ttgaatctaaatgtgggcat

SEQ ID NO: 44755 - DNA, 20 bp, Artificial Sequence
  Description of Artificial Sequence: Synthetic oligonucleotide
  Target: LAMA2; (+) strand; PAM type: NNNNGHTT; PAM sequence: TTCAGCTT
ggttttatttgaagcagtct

SEQ ID NO: 44756 - DNA, 20 bp, Artificial Sequence
  Description of Artificial Sequence: Synthetic oligonucleotide
  Target: LAMA2; (+) strand; PAM type: NNNNGHTT; PAM sequence: ATATGATT
agcagtctttcagcttttct

SEQ ID NO: 44757 - DNA, 20 bp, Artificial Sequence
  Description of Artificial Sequence: Synthetic oligonucleotide
  Target: LAMA2; (+) strand; PAM type: NNNNGHTT; PAM sequence: TGTAGATT
aggcattttcattttattct

SEQ ID NO: 44758 - DNA, 20 bp, Artificial Sequence
  Description of Artificial Sequence: Synthetic oligonucleotide
  Target: LAMA2; (+) strand; PAM type: NNNNGHTT; PAM sequence: TGCAGCTT
ttgtagattttaagtagaga

SEQ ID NO: 44759 - DNA, 20 bp, Artificial Sequence
  Description of Artificial Sequence: Synthetic oligonucleotide
  Target: LAMA2; (+) strand; PAM type: NNNNGHTT; PAM sequence: GGCAGCTT
tgttggatccccattataat

SEQ ID NO: 44760 - DNA, 20 bp, Artificial Sequence
  Description of Artificial Sequence: Synthetic oligonucleotide
  Target: LAMA2; (+) strand; PAM type: NNNNGHTT; PAM sequence: ATAGGTTT
ataatggcagcttggatgag

SEQ ID NO: 44761 - DNA, 20 bp, Artificial Sequence
  Description of Artificial Sequence: Synthetic oligonucleotide
  Target: LAMA2; (+) strand; PAM type: NNNNGHTT; PAM sequence: GGATGTTT
ggaaaaagcagacatgtgtg

SEQ ID NO: 44762 - DNA, 20 bp, Artificial Sequence
  Description of Artificial Sequence: Synthetic oligonucleotide
  Target: LAMA2; (+) strand; PAM type: NNNNGHTT; PAM sequence: GATAGATT
gttagagaaggaaaatcaag

SEQ ID NO: 44763 - DNA, 20 bp, Artificial Sequence
  Description of Artificial Sequence: Synthetic oligonucleotide
  Target: LAMA2; (+) strand; PAM type: NNNNGHTT; PAM sequence: TCTAGATT
aaggaaaatcaaggatagat

SEQ ID NO: 44764 - DNA, 20 bp, Artificial Sequence
  Description of Artificial Sequence: Synthetic oligonucleotide
  Target: LAMA2; (+) strand; PAM type: NNNNGHTT; PAM sequence: GCAAGATT
tggaatagatcgggaggggt

SEQ ID NO: 44765 - DNA, 20 bp, Artificial Sequence
  Description of Artificial Sequence: Synthetic oligonucleotide
  Target: LAMA2; (+) strand; PAM type: NNNNGHTT; PAM sequence: TATTGATT
tttagacatctaaatagaac

SEQ ID NO: 44766 - DNA, 20 bp, Artificial Sequence
  Description of Artificial Sequence: Synthetic oligonucleotide
  Target: LAMA2; (+) strand; PAM type: NNNNGHTT; PAM sequence: CTGCGTTT
tagaactgcatttgtcccct

SEQ ID NO: 44767 - DNA, 20 bp, Artificial Sequence
  Description of Artificial Sequence: Synthetic oligonucleotide
  Target: LAMA2; (+) strand; PAM type: NNNNGHTT; PAM sequence: AATTGATT
tttaagttccaccttttcat

SEQ ID NO: 44768 - DNA, 20 bp, Artificial Sequence
  Description of Artificial Sequence: Synthetic oligonucleotide
  Target: LAMA2; (+) strand; PAM type: NNNNGHTT; PAM sequence: TCAAGCTT
agaaatagcatttagtcatt

SEQ ID NO: 44769 - DNA, 20 bp, Artificial Sequence
  Description of Artificial Sequence: Synthetic oligonucleotide
  Target: LAMA2; (+) strand; PAM type: NNNNGHTT; PAM sequence: TTTAGTTT
agcatttagtcatttcaagc

SEQ ID NO: 44770 - DNA, 20 bp, Artificial Sequence
  Description of Artificial Sequence: Synthetic oligonucleotide
  Target: LAMA2; (+) strand; PAM type: NNNNGHTT; PAM sequence: TCCAGATT
agtttttcatcatcctattc

SEQ ID NO: 44771 - DNA, 20 bp, Artificial Sequence
  Description of Artificial Sequence: Synthetic oligonucleotide
  Target: LAMA2; (+) strand; PAM type: NNNNGHTT; PAM sequence: TGTGGTTT
ctgtacacagtgtgctacac

SEQ ID NO: 44772 - DNA, 20 bp, Artificial Sequence
  Description of Artificial Sequence: Synthetic oligonucleotide
  Target: LAMA2; (+) strand; PAM type: NNNNGHTT; PAM sequence: TTTAGTTT
cacagtgtgctacactgtgg

SEQ ID NO: 44773 - DNA, 20 bp, Artificial Sequence
  Description of Artificial Sequence: Synthetic oligonucleotide
  Target: LAMA2; (+) strand; PAM type: NNNNGHTT; PAM sequence: TTAGGTTT
taaaagaaaaaatatgctat

SEQ ID NO: 44774 - DNA, 20 bp, Artificial Sequence
  Description of Artificial Sequence: Synthetic oligonucleotide
  Target: LAMA2; (+) strand; PAM type: NNNNGHTT; PAM sequence: TTTGGATT
gaaaaaatatgctatttagg

SEQ ID NO: 44775 - DNA, 20 bp, Artificial Sequence
  Description of Artificial Sequence: Synthetic oligonucleotide
  Target: LAMA2; (+) strand; PAM type: NNNNGHTT; PAM sequence: TTAAGTTT
ttaggtttggattactaatt

SEQ ID NO: 44776 - DNA, 20 bp, Artificial Sequence
  Description of Artificial Sequence: Synthetic oligonucleotide
  Target: LAMA2; (+) strand; PAM type: NNNNGHTT; PAM sequence: ACATGATT
aaaatctaatagagtggata

SEQ ID NO: 44777 - DNA, 20 bp, Artificial Sequence
  Description of Artificial Sequence: Synthetic oligonucleotide
  Target: LAMA2; (+) strand; PAM type: NNNNGHTT; PAM sequence: TAAAGATT
acatgattataataaagata

SEQ ID NO: 44778 - DNA, 20 bp, Artificial Sequence
  Description of Artificial Sequence: Synthetic oligonucleotide
  Target: LAMA2; (+) strand; PAM type: NNNNGHTT; PAM sequence: TAGAGCTT
catgaagaactatttagcct

SEQ ID NO: 44779 - DNA, 20 bp, Artificial Sequence
  Description of Artificial Sequence: Synthetic oligonucleotide
  Target: LAMA2; (+) strand; PAM type: NNNNGHTT; PAM sequence: TAATGTTT
agaatatattccaaagtaac

SEQ ID NO: 44780 - DNA, 20 bp, Artificial Sequence
  Description of Artificial Sequence: Synthetic oligonucleotide
  Target: LAMA2; (+) strand; PAM type: NNNNGHTT; PAM sequence: TAGAGTTT
atcatttatagatacaagca

SEQ ID NO: 44781 - DNA, 20 bp, Artificial Sequence
  Description of Artificial Sequence: Synthetic oligonucleotide
  Target: LAMA2; (+) strand; PAM type: NNNNGHTT; PAM sequence: ACAGGTTT
tcctcttcctaaaaacacat

SEQ ID NO: 44782 - DNA, 20 bp, Artificial Sequence
  Description of Artificial Sequence: Synthetic oligonucleotide
  Target: LAMA2; (+) strand; PAM type: NNNNGHTT; PAM sequence: TCCAGTTT
tacagcatcaacctctcctc

SEQ ID NO: 44783 - DNA, 20 bp, Artificial Sequence
  Description of Artificial Sequence: Synthetic oligonucleotide
  Target: LAMA2; (+) strand; PAM type: NNNNGHTT; PAM sequence: TATGGATT
cctctccagtttatctgtgt

SEQ ID NO: 44784 - DNA, 20 bp, Artificial Sequence
  Description of Artificial Sequence: Synthetic oligonucleotide
  Target: LAMA2; (+) strand; PAM type: NNNNGHTT; PAM sequence: GAGTGTTT
atctgtgttatggattgtaa

SEQ ID NO: 44785 - DNA, 20 bp, Artificial Sequence
  Description of Artificial Sequence: Synthetic oligonucleotide
  Target: LAMA2; (+) strand; PAM type: NNNNGHTT; PAM sequence: TGATGATT
aatatgaaatataccatctc

SEQ ID NO: 44786 - DNA, 20 bp, Artificial Sequence
  Description of Artificial Sequence: Synthetic oligonucleotide
  Target: LAMA2; (+) strand; PAM type: NNNNGHTT; PAM sequence: TACAGCTT
tggaaatgatgcacataaaa

SEQ ID NO: 44787 - DNA, 20 bp, Artificial Sequence
  Description of Artificial Sequence: Synthetic oligonucleotide
  Target: LAMA2; (+) strand; PAM type: NNNNGHTT; PAM sequence: GTGAGATT
aaaatacagctttttaatct

SEQ ID NO: 44788 - DNA, 20 bp, Artificial Sequence
  Description of Artificial Sequence: Synthetic oligonucleotide
  Target: LAMA2; (+) strand; PAM type: NNNNGHTT; PAM sequence: GATTGTTT
tacagctttttaatctgtga

SEQ ID NO: 44789 - DNA, 20 bp, Artificial Sequence
  Description of Artificial Sequence: Synthetic oligonucleotide
  Target: LAMA2; (+) strand; PAM type: NNNNGHTT; PAM sequence: TTAGGTTT
tgtgagattgtttatgcatc

SEQ ID NO: 44790 - DNA, 20 bp, Artificial Sequence
  Description of Artificial Sequence: Synthetic oligonucleotide
  Target: LAMA2; (+) strand; PAM type: NNNNGHTT; PAM sequence: GTTTGCTT
agattgtttatgcatcttag

SEQ ID NO: 44791 - DNA, 20 bp, Artificial Sequence
  Description of Artificial Sequence: Synthetic oligonucleotide
  Target: LAMA2; (+) strand; PAM type: NNNNGHTT; PAM sequence: CTTAGTTT
gtttatgcatcttaggtttg

SEQ ID NO: 44792 - DNA, 20 bp, Artificial Sequence
  Description of Artificial Sequence: Synthetic oligonucleotide
  Target: LAMA2; (+) strand; PAM type: NNNNGHTT; PAM sequence: TCTGGCTT
ccatttgtattttgaactct

SEQ ID NO: 44793 - DNA, 20 bp, Artificial Sequence
  Description of Artificial Sequence: Synthetic oligonucleotide
  Target: LAMA2; (+) strand; PAM type: NNNNGHTT; PAM sequence: TTTGGATT
gcttttaactgtagtggaaa

SEQ ID NO: 44794 - DNA, 20 bp, Artificial Sequence
  Description of Artificial Sequence: Synthetic oligonucleotide
  Target: LAMA2; (+) strand; PAM type: NNNNGHTT; PAM sequence: TTCAGTTT
caatcagcaggaggttcttt

SEQ ID NO: 44795 - DNA, 20 bp, Artificial Sequence
  Description of Artificial Sequence: Synthetic oligonucleotide
  Target: LAMA2; (+) strand; PAM type: NNNNGHTT; PAM sequence: GTTTGTTT
cagcaggaggttctttttca

SEQ ID NO: 44796 - DNA, 20 bp, Artificial Sequence
  Description of Artificial Sequence: Synthetic oligonucleotide
  Target: LAMA2; (+) strand; PAM type: NNNNGHTT; PAM sequence: TTGTGTTT
aagaaattttcttttgccct

SEQ ID NO: 44797 - DNA, 20 bp, Artificial Sequence
  Description of Artificial Sequence: Synthetic oligonucleotide
  Target: LAMA2; (+) strand; PAM type: NNNNGHTT; PAM sequence: AACAGTTT
aaacttctgtctaactgcaa

SEQ ID NO: 44798 - DNA, 20 bp, Artificial Sequence
  Description of Artificial Sequence: Synthetic oligonucleotide
  Target: LAMA2; (+) strand; PAM type: NNNNGHTT; PAM sequence: CAAAGTTT
tgttaaaagtaaaacccaat

SEQ ID NO: 44799 - DNA, 20 bp, Artificial Sequence
  Description of Artificial Sequence: Synthetic oligonucleotide
  Target: LAMA2; (+) strand; PAM type: NNNNGHTT; PAM sequence: CTATGATT
aaacggggccaaataattct

SEQ ID NO: 44800 - DNA, 20 bp, Artificial Sequence
  Description of Artificial Sequence: Synthetic oligonucleotide
  Target: LAMA2; (+) strand; PAM type: NNNNGHTT; PAM sequence: AAGTGCTT
atgattcagatgagacataa

SEQ ID NO: 44801 - DNA, 20 bp, Artificial Sequence
  Description of Artificial Sequence: Synthetic oligonucleotide
  Target: LAMA2; (+) strand; PAM type: NNNNGHTT; PAM sequence: GCCTGATT
gacataaaagagtatacagt

SEQ ID NO: 44802 - DNA, 20 bp, Artificial Sequence
  Description of Artificial Sequence: Synthetic oligonucleotide
  Target: LAMA2; (+) strand; PAM type: NNNNGHTT; PAM sequence: GGAGGATT
tttggaaagggtagagatag

SEQ ID NO: 44803 - DNA, 20 bp, Artificial Sequence
  Description of Artificial Sequence: Synthetic oligonucleotide
  Target: LAMA2; (+) strand; PAM type: NNNNGHTT; PAM sequence: ATAGGTTT
ttgatctatatgatggttac

SEQ ID NO: 44804 - DNA, 20 bp, Artificial Sequence
  Description of Artificial Sequence: Synthetic oligonucleotide
  Target: LAMA2; (+) strand; PAM type: NNNNGHTT; PAM sequence: TGAGGTTT
ctgataatatgatcatacat

SEQ ID NO: 44805 - DNA, 20 bp, Artificial Sequence
  Description of Artificial Sequence: Synthetic oligonucleotide
  Target: LAMA2; (+) strand; PAM type: NNNNGHTT; PAM sequence: TTGAGATT
tttttatttattacaataag

SEQ ID NO: 44806 - DNA, 20 bp, Artificial Sequence
  Description of Artificial Sequence: Synthetic oligonucleotide
  Target: LAMA2; (+) strand; PAM type: NNNNGHTT; PAM sequence: AACCGTTT
taatatgagtcaattatttt

SEQ ID NO: 44807 - DNA, 20 bp, Artificial Sequence
  Description of Artificial Sequence: Synthetic oligonucleotide
  Target: LAMA2; (+) strand; PAM type: NNNNGHTT; PAM sequence: GTTGGATT
cgttttgtaactcaatgtct

SEQ ID NO: 44808 - DNA, 20 bp, Artificial Sequence
  Description of Artificial Sequence: Synthetic oligonucleotide
  Target: LAMA2; (+) strand; PAM type: NNNNGHTT; PAM sequence: TCTTGATT
ctcaatgtctgttggattta

SEQ ID NO: 44809 - DNA, 20 bp, Artificial Sequence
  Description of Artificial Sequence: Synthetic oligonucleotide
  Target: LAMA2; (+) strand; PAM type: NNNNGHTT; PAM sequence: TTTTGTTT
aattcaatttccacattttc

SEQ ID NO: 44810 - DNA, 20 bp, Artificial Sequence
  Description of Artificial Sequence: Synthetic oligonucleotide
  Target: LAMA2; (+) strand; PAM type: NNNNGHTT; PAM sequence: TATAGTTT
tttctatttttgtgaggcac

SEQ ID NO: 44811 - DNA, 20 bp, Artificial Sequence
  Description of Artificial Sequence: Synthetic oligonucleotide
  Target: LAMA2; (+) strand; PAM type: NNNNGHTT; PAM sequence: TATTGATT
aaatgttattcatgagagta

SEQ ID NO: 44812 - DNA, 20 bp, Artificial Sequence
  Description of Artificial Sequence: Synthetic oligonucleotide
  Target: LAMA2; (+) strand; PAM type: NNNNGHTT; PAM sequence: ACAGGTTT
atatttacatatgtacatcc

SEQ ID NO: 44813 - DNA, 20 bp, Artificial Sequence
  Description of Artificial Sequence: Synthetic oligonucleotide
  Target: LAMA2; (+) strand; PAM type: NNNNGHTT; PAM sequence: TATAGATT
caggtttgcatatgtaaaaa

SEQ ID NO: 44814 - DNA, 20 bp, Artificial Sequence
  Description of Artificial Sequence: Synthetic oligonucleotide
  Target: LAMA2; (+) strand; PAM type: NNNNGHTT; PAM sequence: AAAGGTTT
aaagtgtattatggaagata

SEQ ID NO: 44815 - DNA, 20 bp, Artificial Sequence
  Description of Artificial Sequence: Synthetic oligonucleotide
  Target: LAMA2; (+) strand; PAM type: NNNNGHTT; PAM sequence: CAAAGTTT
tttggtaacataaggcctag

SEQ ID NO: 44816 - DNA, 20 bp, Artificial Sequence
  Description of Artificial Sequence: Synthetic oligonucleotide
  Target: LAMA2; (+) strand; PAM type: NNNNGHTT; PAM sequence: AATGGTTT
ttacatatatatatatataa

SEQ ID NO: 44817 - DNA, 20 bp, Artificial Sequence
  Description of Artificial Sequence: Synthetic oligonucleotide
  Target: LAMA2; (+) strand; PAM type: NNNNGHTT; PAM sequence: AGGTGTTT
ggctgatgataacatgtgat

SEQ ID NO: 44818 - DNA, 20 bp, Artificial Sequence
  Description of Artificial Sequence: Synthetic oligonucleotide
  Target: LAMA2; (+) strand; PAM type: NNNNGHTT; PAM sequence: CAAGGTTT
cccaagagagtccctttaaa

SEQ ID NO: 44819 - DNA, 20 bp, Artificial Sequence
  Description of Artificial Sequence: Synthetic oligonucleotide
  Target: LAMA2; (+) strand; PAM type: NNNNGHTT; PAM sequence: AAGTGTTT
ttcctgtcttcatattgatg

SEQ ID NO: 44820 - DNA, 20 bp, Artificial Sequence
  Description of Artificial Sequence: Synthetic oligonucleotide
  Target: LAMA2; (+) strand; PAM type: NNNNGHTT; PAM sequence: AAAGGATT
acctgtcatctgagataccc

SEQ ID NO: 44821 - DNA, 20 bp, Artificial Sequence
  Description of Artificial Sequence: Synthetic oligonucleotide
  Target: LAMA2; (+) strand; PAM type: NNNNGHTT; PAM sequence: TTTTGTTT
taacatcctgaaatcagaaa

SEQ ID NO: 44822 - DNA, 20 bp, Artificial Sequence
  Description of Artificial Sequence: Synthetic oligonucleotide
  Target: LAMA2; (+) strand; PAM type: NNNNGHTT; PAM sequence: ATGTGATT
tgatggcatctctttccatt

SEQ ID NO: 44823 - DNA, 20 bp, Artificial Sequence
  Description of Artificial Sequence: Synthetic oligonucleotide
  Target: LAMA2; (+) strand; PAM type: NNNNGHTT; PAM sequence: TCAAGTTT
tacaaaatatttttgctatt

SEQ ID NO: 44824 - DNA, 20 bp, Artificial Sequence
  Description of Artificial Sequence: Synthetic oligonucleotide
  Target: LAMA2; (+) strand; PAM type: NNNNGHTT; PAM sequence: AATTGATT
tttttgctatttcaagtttg

SEQ ID NO: 44825 - DNA, 20 bp, Artificial Sequence
  Description of Artificial Sequence: Synthetic oligonucleotide
  Target: LAMA2; (+) strand; PAM type: NNNNGHTT; PAM sequence: AATAGTTT
gtttgaattgattttgaaat

SEQ ID NO: 44826 - DNA, 20 bp, Artificial Sequence
  Description of Artificial Sequence: Synthetic oligonucleotide
  Target: LAMA2; (+) strand; PAM type: NNNNGHTT; PAM sequence: TCTTGTTT
taaaatagaggacatgatga

SEQ ID NO: 44827 - DNA, 20 bp, Artificial Sequence
  Description of Artificial Sequence: Synthetic oligonucleotide
  Target: LAMA2; (+) strand; PAM type: NNNNGHTT; PAM sequence: TGTTGCTT
gaggacatgatgatcttgtt

SEQ ID NO: 44828 - DNA, 20 bp, Artificial Sequence
  Description of Artificial Sequence: Synthetic oligonucleotide
  Target: LAMA2; (+) strand; PAM type: NNNNGHTT; PAM sequence: AGCAGTTT
tgatcttgtttgttgcttta

SEQ ID NO: 44829 - DNA, 20 bp, Artificial Sequence
  Description of Artificial Sequence: Synthetic oligonucleotide
  Target: LAMA2; (+) strand; PAM type: NNNNGHTT; PAM sequence: GAAAGATT
aagtgatacgaaagtcaaag

SEQ ID NO: 44830 - DNA, 20 bp, Artificial Sequence
  Description of Artificial Sequence: Synthetic oligonucleotide
  Target: LAMA2; (+) strand; PAM type: NNNNGHTT; PAM sequence: TGAGGTTT
tgagacttattaatatgaaa

SEQ ID NO: 44831 - DNA, 20 bp, Artificial Sequence
  Description of Artificial Sequence: Synthetic oligonucleotide
  Target: LAMA2; (+) strand; PAM type: NNNNGHTT; PAM sequence: TTGAGATT
gttaaattgtattaagaaac

SEQ ID NO: 44832 - DNA, 20 bp, Artificial Sequence
  Description of Artificial Sequence: Synthetic oligonucleotide
  Target: LAMA2; (+) strand; PAM type: NNNNGHTT; PAM sequence: CAGTGCTT
agctacttatactccatctt

SEQ ID NO: 44833 - DNA, 20 bp, Artificial Sequence
  Description of Artificial Sequence: Synthetic oligonucleotide
  Target: LAMA2; (+) strand; PAM type: NNNNGHTT; PAM sequence: CCATGTTT
atactaaaacatctactatt

SEQ ID NO: 44834 - DNA, 20 bp, Artificial Sequence
  Description of Artificial Sequence: Synthetic oligonucleotide
  Target: LAMA2; (+) strand; PAM type: NNNNGHTT; PAM sequence: CTGTGTTT
acatctactattccatgttt

SEQ ID NO: 44835 - DNA, 20 bp, Artificial Sequence
  Description of Artificial Sequence: Synthetic oligonucleotide
  Target: LAMA2; (+) strand; PAM type: NNNNGHTT; PAM sequence: ATTTGTTT
tatcttaagaggttaatttt

SEQ ID NO: 44836 - DNA, 20 bp, Artificial Sequence
  Description of Artificial Sequence: Synthetic oligonucleotide
  Target: LAMA2; (+) strand; PAM type: NNNNGHTT; PAM sequence: TTTAGCTT
ttgtttatttttcctgggtc

SEQ ID NO: 44837 - DNA, 20 bp, Artificial Sequence
  Description of Artificial Sequence: Synthetic oligonucleotide
  Target: LAMA2; (+) strand; PAM type: NNNNGHTT; PAM sequence: TTAGGATT
tcctctatgttctgcctgaa

SEQ ID NO: 44838 - DNA, 20 bp, Artificial Sequence
  Description of Artificial Sequence: Synthetic oligonucleotide
  Target: LAMA2; (+) strand; PAM type: NNNNGHTT; PAM sequence: GATTGATT
ctatgttctgcctgaattag

SEQ ID NO: 44839 - DNA, 20 bp, Artificial Sequence
  Description of Artificial Sequence: Synthetic oligonucleotide
  Target: LAMA2; (+) strand; PAM type: NNNNGHTT; PAM sequence: TACTGTTT
attattccctatgcccactg

SEQ ID NO: 44840 - DNA, 20 bp, Artificial Sequence
  Description of Artificial Sequence: Synthetic oligonucleotide
  Target: LAMA2; (+) strand; PAM type: NNNNGHTT; PAM sequence: CTTGGTTT
ggatccacaccttcctcttt

SEQ ID NO: 44841 - DNA, 20 bp, Artificial Sequence
  Description of Artificial Sequence: Synthetic oligonucleotide
  Target: LAMA2; (+) strand; PAM type: NNNNGHTT; PAM sequence: AATGGCTT
tttgctggagcacatcctca

SEQ ID NO: 44842 - DNA, 20 bp, Artificial Sequence
  Description of Artificial Sequence: Synthetic oligonucleotide
  Target: LAMA2; (+) strand; PAM type: NNNNGHTT; PAM sequence: TCCAGTTT
cagtgaattttctgagtcct

SEQ ID NO: 44843 - DNA, 20 bp, Artificial Sequence
  Description of Artificial Sequence: Synthetic oligonucleotide
  Target: LAMA2; (+) strand; PAM type: NNNNGHTT; PAM sequence: TCAAGTTT
caatttatatacttattcct

SEQ ID NO: 44844 - DNA, 20 bp, Artificial Sequence
  Description of Artificial Sequence: Synthetic oligonucleotide
  Target: LAMA2; (+) strand; PAM type: NNNNGHTT; PAM sequence: TGGTGATT
aaatttttaccttgttgtat

SEQ ID NO: 44845 - DNA, 20 bp, Artificial Sequence
  Description of Artificial Sequence: Synthetic oligonucleotide
  Target: LAMA2; (+) strand; PAM type: NNNNGHTT; PAM sequence: TTTTGTTT
ctctcatattttcagtattt

SEQ ID NO: 44846 - DNA, 20 bp, Artificial Sequence
  Description of Artificial Sequence: Synthetic oligonucleotide
  Target: LAMA2; (+) strand; PAM type: NNNNGHTT; PAM sequence: AAAAGATT
tcatattaaaactttatttt

SEQ ID NO: 44847 - DNA, 20 bp, Artificial Sequence
  Description of Artificial Sequence: Synthetic oligonucleotide
  Target: LAMA2; (+) strand; PAM type: NNNNGHTT; PAM sequence: AGCAGTTT
tctcttcaaaaatattaatt

SEQ ID NO: 44848 - DNA, 20 bp, Artificial Sequence
  Description of Artificial Sequence: Synthetic oligonucleotide
  Target: LAMA2; (+) strand; PAM type: NNNNGHTT; PAM sequence: GTTTGCTT
ttcaaaaatattaattagca

SEQ ID NO: 44849 - DNA, 20 bp, Artificial Sequence
  Description of Artificial Sequence: Synthetic oligonucleotide
  Target: LAMA2; (+) strand; PAM type: NNNNGHTT; PAM sequence: ATCAGTTT
agtttgcttttaaaaatatt

SEQ ID NO: 44850 - DNA, 20 bp, Artificial Sequence
  Description of Artificial Sequence: Synthetic oligonucleotide
  Target: LAMA2; (+) strand; PAM type: NNNNGHTT; PAM sequence: TCCAGATT
ttttaaataagcatttgtcc

SEQ ID NO: 44851 - DNA, 20 bp, Artificial Sequence
  Description of Artificial Sequence: Synthetic oligonucleotide
  Target: LAMA2; (+) strand; PAM type: NNNNGHTT; PAM sequence: CCCTGTTT
tttgtcctccagattttttc

SEQ ID NO: 44852 - DNA, 20 bp, Artificial Sequence
  Description of Artificial Sequence: Synthetic oligonucleotide
  Target: LAMA2; (+) strand; PAM type: NNNNGHTT; PAM sequence: TGTTGATT
agattttttcccctgtttaa

SEQ ID NO: 44853 - DNA, 20 bp, Artificial Sequence
  Description of Artificial Sequence: Synthetic oligonucleotide
  Target: LAMA2; (+) strand; PAM type: NNNNGHTT; PAM sequence: GCCTGATT
aactgtgatatcctaaaatg

SEQ ID NO: 44854 - DNA, 20 bp, Artificial Sequence
  Description of Artificial Sequence: Synthetic oligonucleotide
  Target: LAMA2; (+) strand; PAM type: NNNNGHTT; PAM sequence: AACTGATT
ctaaaatggcctgattgagg

SEQ ID NO: 44855 - DNA, 20 bp, Artificial Sequence
  Description of Artificial Sequence: Synthetic oligonucleotide
  Target: LAMA2; (+) strand; PAM type: NNNNGHTT; PAM sequence: AGATGATT
cctgattgaggaactgattg

SEQ ID NO: 44856 - DNA, 20 bp, Artificial Sequence
  Description of Artificial Sequence: Synthetic oligonucleotide
  Target: LAMA2; (+) strand; PAM type: NNNNGHTT; PAM sequence: AGGTGATT
tgtgtatagggcaggacgaa

SEQ ID NO: 44857 - DNA, 20 bp, Artificial Sequence
  Description of Artificial Sequence: Synthetic oligonucleotide
  Target: LAMA2; (+) strand; PAM type: NNNNGHTT; PAM sequence: AGCTGTTT
aggtgatttggtagaaagct

SEQ ID NO: 44858 - DNA, 20 bp, Artificial Sequence
  Description of Artificial Sequence: Synthetic oligonucleotide
  Target: LAMA2; (+) strand; PAM type: NNNNGHTT; PAM sequence: TGCAGATT
cagcattaaatgtaagaatg

SEQ ID NO: 44859 - DNA, 20 bp, Artificial Sequence
  Description of Artificial Sequence: Synthetic oligonucleotide
  Target: LAMA2; (+) strand; PAM type: NNNNGHTT; PAM sequence: TGAAGTTT
cttggccttttgtctacccc

SEQ ID NO: 44860 - DNA, 20 bp, Artificial Sequence
  Description of Artificial Sequence: Synthetic oligonucleotide
  Target: LAMA2; (+) strand; PAM type: NNNNGHTT; PAM sequence: GACAGATT
tggaataaactggacagtta

SEQ ID NO: 44861 - DNA, 20 bp, Artificial Sequence
  Description of Artificial Sequence: Synthetic oligonucleotide
  Target: LAMA2; (+) strand; PAM type: NNNNGHTT; PAM sequence: GGGAGTTT
tgtcccaggcgtggtgtccc

SEQ ID NO: 44862 - DNA, 20 bp, Artificial Sequence
  Description of Artificial Sequence: Synthetic oligonucleotide
  Target: LAMA2; (+) strand; PAM type: NNNNGHTT; PAM sequence: ATAGGATT
cgggagtttcctctcctgag

SEQ ID NO: 44863 - DNA, 20 bp, Artificial Sequence
  Description of Artificial Sequence: Synthetic oligonucleotide
  Target: LAMA2; (+) strand; PAM type: NNNNGHTT; PAM sequence: TGTAGATT
atttaatcttctctagttca

SEQ ID NO: 44864 - DNA, 20 bp, Artificial Sequence
  Description of Artificial Sequence: Synthetic oligonucleotide
  Target: LAMA2; (+) strand; PAM type: NNNNGHTT; PAM sequence: CTGTGCTT
acttcagagaaagcctctcc

SEQ ID NO: 44865 - DNA, 20 bp, Artificial Sequence
  Description of Artificial Sequence: Synthetic oligonucleotide
  Target: LAMA2; (+) strand; PAM type: NNNNGHTT; PAM sequence: GGTGGCTT
cagagagaacttggttctaa

SEQ ID NO: 44866 - DNA, 20 bp, Artificial Sequence
  Description of Artificial Sequence: Synthetic oligonucleotide
  Target: LAMA2; (+) strand; PAM type: NNNNGHTT; PAM sequence: AAAAGTTT
agaagtattcccctgtacag

SEQ ID NO: 44867 - DNA, 20 bp, Artificial Sequence
  Description of Artificial Sequence: Synthetic oligonucleotide
  Target: LAMA2; (+) strand; PAM type: NNNNGHTT; PAM sequence: GTCAGATT
gaaaagtttgcattactttt

SEQ ID NO: 44868 - DNA, 20 bp, Artificial Sequence
  Description of Artificial Sequence: Synthetic oligonucleotide
  Target: LAMA2; (+) strand; PAM type: NNNNGHTT; PAM sequence: ATAAGTTT
aatataatcacattttatga

SEQ ID NO: 44869 - DNA, 20 bp, Artificial Sequence
  Description of Artificial Sequence: Synthetic oligonucleotide
  Target: LAMA2; (+) strand; PAM type: NNNNGHTT; PAM sequence: AACAGATT
gaataagttttatttcactt

SEQ ID NO: 44870 - DNA, 20 bp, Artificial Sequence
  Description of Artificial Sequence: Synthetic oligonucleotide
  Target: LAMA2; (+) strand; PAM type: NNNNGHTT; PAM sequence: AGAAGTTT
ttaattcccaagtaactctt

SEQ ID NO: 44871 - DNA, 20 bp, Artificial Sequence
  Description of Artificial Sequence: Synthetic oligonucleotide
  Target: LAMA2; (+) strand; PAM type: NNNNGHTT; PAM sequence: TTTGGATT
actcttagaagtttctcctt

SEQ ID NO: 44872 - DNA, 20 bp, Artificial Sequence
  Description of Artificial Sequence: Synthetic oligonucleotide
  Target: LAMA2; (+) strand; PAM type: NNNNGHTT; PAM sequence: TGATGTTT
tcctttttggattttcattt

SEQ ID NO: 44873 - DNA, 20 bp, Artificial Sequence
  Description of Artificial Sequence: Synthetic oligonucleotide
  Target: LAMA2; (+) strand; PAM type: NNNNGHTT; PAM sequence: GTAGGCTT
gattttcattttgatgttta

SEQ ID NO: 44874 - DNA, 20 bp, Artificial Sequence
  Description of Artificial Sequence: Synthetic oligonucleotide
  Target: LAMA2; (+) strand; PAM type: NNNNGHTT; PAM sequence: CAGTGTTT
tgtttagtaggcttaaattc

SEQ ID NO: 44875 - DNA, 20 bp, Artificial Sequence
  Description of Artificial Sequence: Synthetic oligonucleotide
  Target: LAMA2; (+) strand; PAM type: NNNNGHTT; PAM sequence: CCCAGCTT
ttccagtgtttaacacaacc

SEQ ID NO: 44876 - DNA, 20 bp, Artificial Sequence
  Description of Artificial Sequence: Synthetic oligonucleotide
  Target: LAMA2; (+) strand; PAM type: NNNNGHTT; PAM sequence: CACAGTTT
acaacccccagcttttgagt

SEQ ID NO: 44877 - DNA, 20 bp, Artificial Sequence
  Description of Artificial Sequence: Synthetic oligonucleotide
  Target: LAMA2; (+) strand; PAM type: NNNNGHTT; PAM sequence: CCCTGATT
tttatttcattatagtagac

SEQ ID NO: 44878 - DNA, 20 bp, Artificial Sequence
  Description of Artificial Sequence: Synthetic oligonucleotide
  Target: LAMA2; (+) strand; PAM type: NNNNGHTT; PAM sequence: CATTGATT
tgatgctaaaattagccttt

SEQ ID NO: 44879 - DNA, 20 bp, Artificial Sequence
  Description of Artificial Sequence: Synthetic oligonucleotide
  Target: LAMA2; (+) strand; PAM type: NNNNGHTT; PAM sequence: AGTAGATT
ttagcctttcattgatttca

SEQ ID NO: 44880 - DNA, 20 bp, Artificial Sequence
  Description of Artificial Sequence: Synthetic oligonucleotide
  Target: LAMA2; (+) strand; PAM type: NNNNGHTT; PAM sequence: ACATGCTT
gtaattggctaggatcaaat

SEQ ID NO: 44881 - DNA, 20 bp, Artificial Sequence
  Description of Artificial Sequence: Synthetic oligonucleotide
  Target: LAMA2; (+) strand; PAM type: NNNNGHTT; PAM sequence: TACAGTTT
caaatacatgctttatgtaa

SEQ ID NO: 44882 - DNA, 20 bp, Artificial Sequence
  Description of Artificial Sequence: Synthetic oligonucleotide
  Target: LAMA2; (+) strand; PAM type: NNNNGHTT; PAM sequence: AGAAGCTT
ttctagccataagaattagc

SEQ ID NO: 44883 - DNA, 20 bp, Artificial Sequence
  Description of Artificial Sequence: Synthetic oligonucleotide
  Target: LAMA2; (+) strand; PAM type: NNNNGHTT; PAM sequence: TGACGTTT
tcccaggaggagactgtaag

SEQ ID NO: 44884 - DNA, 20 bp, Artificial Sequence
  Description of Artificial Sequence: Synthetic oligonucleotide
  Target: LAMA2; (+) strand; PAM type: NNNNGHTT; PAM sequence: AAAAGCTT
gccaaagggaagaaagtcag

SEQ ID NO: 44885 - DNA, 20 bp, Artificial Sequence
  Description of Artificial Sequence: Synthetic oligonucleotide
  Target: LAMA2; (+) strand; PAM type: NNNNGHTT; PAM sequence: GCAGGTTT
atgttatttctttagggact

SEQ ID NO: 44886 - DNA, 20 bp, Artificial Sequence
  Description of Artificial Sequence: Synthetic oligonucleotide
  Target: LAMA2; (+) strand; PAM type: NNNNGHTT; PAM sequence: CTCTGTTT
taattcggaatgctacttac

SEQ ID NO: 44887 - DNA, 20 bp, Artificial Sequence
  Description of Artificial Sequence: Synthetic oligonucleotide
  Target: LAMA2; (+) strand; PAM type: NNNNGHTT; PAM sequence: TGTGGTTT
agaaaaagactcctccagaa

SEQ ID NO: 44888 - DNA, 20 bp, Artificial Sequence
  Description of Artificial Sequence: Synthetic oligonucleotide
  Target: LAMA2; (+) strand; PAM type: NNNNGHTT; PAM sequence: GGCAGCTT
gtaggccacaaggcatggca

SEQ ID NO: 44889 - DNA, 20 bp, Artificial Sequence
  Description of Artificial Sequence: Synthetic oligonucleotide
  Target: LAMA2; (+) strand; PAM type: NNNNGHTT; PAM sequence: CAGTGCTT
tcatccattggagagttctc

SEQ ID NO: 44890 - DNA, 20 bp, Artificial Sequence
  Description of Artificial Sequence: Synthetic oligonucleotide
  Target: LAMA2; (+) strand; PAM type: NNNNGHTT; PAM sequence: AGTGGTTT
ttactgagtggtgaagacta

SEQ ID NO: 44891 - DNA, 20 bp, Artificial Sequence
  Description of Artificial Sequence: Synthetic oligonucleotide
  Target: LAMA2; (+) strand; PAM type: NNNNGHTT; PAM sequence: GATGGTTT
tgttgttgtattgttggttg

SEQ ID NO: 44892 - DNA, 20 bp, Artificial Sequence
  Description of Artificial Sequence: Synthetic oligonucleotide
  Target: LAMA2; (+) strand; PAM type: NNNNGHTT; PAM sequence: ATTTGCTT
ttggatggtttgccttggat

SEQ ID NO: 44893 - DNA, 20 bp, Artificial Sequence
  Description of Artificial Sequence: Synthetic oligonucleotide
  Target: LAMA2; (+) strand; PAM type: NNNNGHTT; PAM sequence: GCTTGCTT
atggtttgccttggatattt

SEQ ID NO: 44894 - DNA, 20 bp, Artificial Sequence
  Description of Artificial Sequence: Synthetic oligonucleotide
  Target: LAMA2; (+) strand; PAM type: NNNNGHTT; PAM sequence: TGTTGATT
atatttgcttgcttcttttt

SEQ ID NO: 44895 - DNA, 20 bp, Artificial Sequence
  Description of Artificial Sequence: Synthetic oligonucleotide
  Target: LAMA2; (+) strand; PAM type: NNNNGHTT; PAM sequence: AGAGGCTT
gaaaagaaagcaatctttca

SEQ ID NO: 44896 - DNA, 20 bp, Artificial Sequence
  Description of Artificial Sequence: Synthetic oligonucleotide
  Target: LAMA2; (+) strand; PAM type: NNNNGHTT; PAM sequence: CGAGGTTT
aagataacatcatacatttt

SEQ ID NO: 44897 - DNA, 20 bp, Artificial Sequence
  Description of Artificial Sequence: Synthetic oligonucleotide
  Target: LAMA2; (+) strand; PAM type: NNNNGHTT; PAM sequence: CTGAGATT
cattttcgaggtttttaagg

SEQ ID NO: 44898 - DNA, 20 bp, Artificial Sequence
  Description of Artificial Sequence: Synthetic oligonucleotide
  Target: LAMA2; (+) strand; PAM type: NNNNGHTT; PAM sequence: TTTTGTTT
tttttaaggctgagattcta

SEQ ID NO: 44899 - DNA, 20 bp, Artificial Sequence
  Description of Artificial Sequence: Synthetic oligonucleotide
  Target: LAMA2; (+) strand; PAM type: NNNNGHTT; PAM sequence: TAACGTTT
aaggaatgttacaatgctgt

SEQ ID NO: 44900 - DNA, 20 bp, Artificial Sequence
  Description of Artificial Sequence: Synthetic oligonucleotide
  Target: LAMA2; (+) strand; PAM type: NNNNGHTT; PAM sequence: TTTTGCTT
tgttacaatgctgttaacgt

SEQ ID NO: 44901 - DNA, 20 bp, Artificial Sequence
  Description of Artificial Sequence: Synthetic oligonucleotide
  Target: LAMA2; (+) strand; PAM type: NNNNGHTT; PAM sequence: TTTTGCTT
cgtttttgcttattctacat

SEQ ID NO: 44902 - DNA, 20 bp, Artificial Sequence
  Description of Artificial Sequence: Synthetic oligonucleotide
  Target: LAMA2; (+) strand; PAM type: NNNNGHTT; PAM sequence: TGGTGCTT
tctcagttgcaaaattttct

SEQ ID NO: 44903 - DNA, 20 bp, Artificial Sequence
  Description of Artificial Sequence: Synthetic oligonucleotide
  Target: LAMA2; (+) strand; PAM type: NNNNGHTT; PAM sequence: AATCGCTT
tgcttaagaaattgtacttt

SEQ ID NO: 44904 - DNA, 20 bp, Artificial Sequence
  Description of Artificial Sequence: Synthetic oligonucleotide
  Target: LAMA2; (+) strand; PAM type: NNNNGHTT; PAM sequence: AAAAGTTT
actttaatcgcttttagcca

SEQ ID NO: 44905 - DNA, 20 bp, Artificial Sequence
  Description of Artificial Sequence: Synthetic oligonucleotide
  Target: LAMA2; (+) strand; PAM type: NNNNGHTT; PAM sequence: CTGTGCTT
tttgacatagtactgacagc

SEQ ID NO: 44906 - DNA, 20 bp, Artificial Sequence
  Description of Artificial Sequence: Synthetic oligonucleotide
  Target: LAMA2; (+) strand; PAM type: NNNNGHTT; PAM sequence: CTTAGATT
catagtactgacagcctgtg

SEQ ID NO: 44907 - DNA, 20 bp, Artificial Sequence
  Description of Artificial Sequence: Synthetic oligonucleotide
  Target: LAMA2; (+) strand; PAM type: NNNNGHTT; PAM sequence: AAAAGCTT
agataaaatcatcatacttc

SEQ ID NO: 44908 - DNA, 20 bp, Artificial Sequence
  Description of Artificial Sequence: Synthetic oligonucleotide
  Target: LAMA2; (+) strand; PAM type: NNNNGHTT; PAM sequence: TAGTGTTT
tgggaattttaaaaattatt

SEQ ID NO: 44909 - DNA, 20 bp, Artificial Sequence
  Description of Artificial Sequence: Synthetic oligonucleotide
  Target: LAMA2; (+) strand; PAM type: NNNNGHTT; PAM sequence: TCCAGTTT
tttaaaaattatttagtgtt

SEQ ID NO: 44910 - DNA, 20 bp, Artificial Sequence
  Description of Artificial Sequence: Synthetic oligonucleotide
  Target: LAMA2; (+) strand; PAM type: NNNNGHTT; PAM sequence: ATTAGTTT
atatcttgatatgtcaccct

SEQ ID NO: 44911 - DNA, 20 bp, Artificial Sequence
  Description of Artificial Sequence: Synthetic oligonucleotide
  Target: LAMA2; (+) strand; PAM type: NNNNGHTT; PAM sequence: ACTTGCTT
ttttttccttgcagcatttc

SEQ ID NO: 44912 - DNA, 20 bp, Artificial Sequence
  Description of Artificial Sequence: Synthetic oligonucleotide
  Target: LAMA2; (+) strand; PAM type: NNNNGHTT; PAM sequence: TCTTGCTT
cttgcagcatttcacttgct

SEQ ID NO: 44913 - DNA, 20 bp, Artificial Sequence
  Description of Artificial Sequence: Synthetic oligonucleotide
  Target: LAMA2; (+) strand; PAM type: NNNNGHTT; PAM sequence: TTCAGTTT
tcagctggtggcaatcagca

SEQ ID NO: 44914 - DNA, 20 bp, Artificial Sequence
  Description of Artificial Sequence: Synthetic oligonucleotide
  Target: LAMA2; (+) strand; PAM type: NNNNGHTT; PAM sequence: TGAAGATT
cctttcatttctgaatcaag

SEQ ID NO: 44915 - DNA, 20 bp, Artificial Sequence
  Description of Artificial Sequence: Synthetic oligonucleotide
  Target: LAMA2; (+) strand; PAM type: NNNNGHTT; PAM sequence: TTAGGTTT
tttaattctcttccaccatt

SEQ ID NO: 44916 - DNA, 20 bp, Artificial Sequence
  Description of Artificial Sequence: Synthetic oligonucleotide
  Target: LAMA2; (+) strand; PAM type: NNNNGHTT; PAM sequence: TATAGATT
ttgtctttgtaggtaacctt

SEQ ID NO: 44917 - DNA, 20 bp, Artificial Sequence
  Description of Artificial Sequence: Synthetic oligonucleotide
  Target: LAMA2; (+) strand; PAM type: NNNNGHTT; PAM sequence: GTCTGATT
ctctttttccattccataga

SEQ ID NO: 44918 - DNA, 20 bp, Artificial Sequence
  Description of Artificial Sequence: Synthetic oligonucleotide
  Target: LAMA2; (+) strand; PAM type: NNNNGHTT; PAM sequence: CTAGGCTT
tattttgaaaagtctaacat

SEQ ID NO: 44919 - DNA, 20 bp, Artificial Sequence
  Description of Artificial Sequence: Synthetic oligonucleotide
  Target: LAMA2; (+) strand; PAM type: NNNNGHTT; PAM sequence: AATGGATT
tctctcttacctccatattt

SEQ ID NO: 44920 - DNA, 20 bp, Artificial Sequence
  Description of Artificial Sequence: Synthetic oligonucleotide
  Target: LAMA2; (+) strand; PAM type: NNNNGHTT; PAM sequence: CATTGATT
atttaatggattaccattct

SEQ ID NO: 44921 - DNA, 20 bp, Artificial Sequence
  Description of Artificial Sequence: Synthetic oligonucleotide
  Target: LAMA2; (+) strand; PAM type: NNNNGHTT; PAM sequence: AATTGATT
taccttcttaatttctctta

SEQ ID NO: 44922 - DNA, 20 bp, Artificial Sequence
  Description of Artificial Sequence: Synthetic oligonucleotide
  Target: LAMA2; (+) strand; PAM type: NNNNGHTT; PAM sequence: CCATGTTT
ctaatgttagtacctttccg

SEQ ID NO: 44923 - DNA, 20 bp, Artificial Sequence
  Description of Artificial Sequence: Synthetic oligonucleotide
  Target: LAMA2; (+) strand; PAM type: NNNNGHTT; PAM sequence: TCTGGTTT
acctttccgccatgtttcta

SEQ ID NO: 44924 - DNA, 20 bp, Artificial Sequence
  Description of Artificial Sequence: Synthetic oligonucleotide
  Target: LAMA2; (+) strand; PAM type: NNNNGHTT; PAM sequence: ACCTGATT
gtttacattgctggaacagc

SEQ ID NO: 44925 - DNA, 20 bp, Artificial Sequence
  Description of Artificial Sequence: Synthetic oligonucleotide
  Target: LAMA2; (+) strand; PAM type: NNNNGHTT; PAM sequence: ATCTGATT
tttatcaatttgcattatat

SEQ ID NO: 44926 - DNA, 20 bp, Artificial Sequence
  Description of Artificial Sequence: Synthetic oligonucleotide
  Target: LAMA2; (+) strand; PAM type: NNNNGHTT; PAM sequence: TTCTGTTT
attttatatcaatattattt

SEQ ID NO: 44927 - DNA, 20 bp, Artificial Sequence
  Description of Artificial Sequence: Synthetic oligonucleotide
  Target: LAMA2; (+) strand; PAM type: NNNNGHTT; PAM sequence: TGTTGTTT
attcagtccatttttgttgt

SEQ ID NO: 44928 - DNA, 20 bp, Artificial Sequence
  Description of Artificial Sequence: Synthetic oligonucleotide
  Target: LAMA2; (+) strand; PAM type: NNNNGHTT; PAM sequence: TTTGGTTT
tccatttttgttgttgttgt

SEQ ID NO: 44929 - DNA, 20 bp, Artificial Sequence
  Description of Artificial Sequence: Synthetic oligonucleotide
  Target: LAMA2; (+) strand; PAM type: NNNNGHTT; PAM sequence: TTTGGTTT
ttttgttgttgttgttttgg

SEQ ID NO: 44930 - DNA, 20 bp, Artificial Sequence
  Description of Artificial Sequence: Synthetic oligonucleotide
  Target: LAMA2; (+) strand; PAM type: NNNNGHTT; PAM sequence: AAATGATT
taagctagatgataatgacc

SEQ ID NO: 44931 - DNA, 20 bp, Artificial Sequence
  Description of Artificial Sequence: Synthetic oligonucleotide
  Target: LAMA2; (+) strand; PAM type: NNNNGHTT; PAM sequence: AGCTGCTT
aattgaaaggatattttagc

SEQ ID NO: 44932 - DNA, 20 bp, Artificial Sequence
  Description of Artificial Sequence: Synthetic oligonucleotide
  Target: LAMA2; (+) strand; PAM type: NNNNGHTT; PAM sequence: TGTAGCTT
caacccaatcactgtacagc

SEQ ID NO: 44933 - DNA, 20 bp, Artificial Sequence
  Description of Artificial Sequence: Synthetic oligonucleotide
  Target: LAMA2; (+) strand; PAM type: NNNNGHTT; PAM sequence: CTGGGATT
tgcctcagcctcccaagtag

SEQ ID NO: 44934 - DNA, 20 bp, Artificial Sequence
  Description of Artificial Sequence: Synthetic oligonucleotide
  Target: LAMA2; (+) strand; PAM type: NNNNGHTT; PAM sequence: CTGGGATT
caccttggcctcccaaagtg

SEQ ID NO: 44935 - DNA, 20 bp, Artificial Sequence
  Description of Artificial Sequence: Synthetic oligonucleotide
  Target: LAMA2; (+) strand; PAM type: NNNNGHTT; PAM sequence: CCCAGTTT
atggtatatccaaatagcta

SEQ ID NO: 44936 - DNA, 20 bp, Artificial Sequence
  Description of Artificial Sequence: Synthetic oligonucleotide
  Target: LAMA2; (+) strand; PAM type: NNNNGHTT; PAM sequence: TTTTGATT
tatccaaatagctacccagt

SEQ ID NO: 44937 - DNA, 20 bp, Artificial Sequence
  Description of Artificial Sequence: Synthetic oligonucleotide
  Target: LAMA2; (+) strand; PAM type: NNNNGHTT; PAM sequence: GTATGCTT
cagtttttgattaggcagaa

SEQ ID NO: 44938 - DNA, 20 bp, Artificial Sequence
  Description of Artificial Sequence: Synthetic oligonucleotide
  Target: LAMA2; (+) strand; PAM type: NNNNGHTT; PAM sequence: TTGAGCTT
ggcggagacaggaggaccct

SEQ ID NO: 44939 - DNA, 20 bp, Artificial Sequence
  Description of Artificial Sequence: Synthetic oligonucleotide
  Target: LAMA2; (+) strand; PAM type: NNNNGHTT; PAM sequence: CTATGATT
gagtctgaggttatagcaca

SEQ ID NO: 44940 - DNA, 20 bp, Artificial Sequence
  Description of Artificial Sequence: Synthetic oligonucleotide
  Target: LAMA2; (+) strand; PAM type: NNNNGHTT; PAM sequence: AATAGTTT
taaaaattaacttagagcta

SEQ ID NO: 44941 - DNA, 20 bp, Artificial Sequence
  Description of Artificial Sequence: Synthetic oligonucleotide
  Target: LAMA2; (+) strand; PAM type: NNNNGHTT; PAM sequence: TTGGGTTT
ttaacttagagctaaatagt

SEQ ID NO: 44942 - DNA, 20 bp, Artificial Sequence
  Description of Artificial Sequence: Synthetic oligonucleotide
  Target: LAMA2; (+) strand; PAM type: NNNNGHTT; PAM sequence: AACAGTTT
gaaatgaatcttgcaacagt

SEQ ID NO: 44943 - DNA, 20 bp, Artificial Sequence
  Description of Artificial Sequence: Synthetic oligonucleotide
  Target: LAMA2; (+) strand; PAM type: NNNNGHTT; PAM sequence: GTCTGTTT
tcccattacacattataagt

SEQ ID NO: 44944 - DNA, 20 bp, Artificial Sequence
  Description of Artificial Sequence: Synthetic oligonucleotide
  Target: LAMA2; (+) strand; PAM type: NNNNGHTT; PAM sequence: TTTAGTTT
aaatttgttgaggagtctaa

SEQ ID NO: 44945 - DNA, 20 bp, Artificial Sequence
  Description of Artificial Sequence: Synthetic oligonucleotide
  Target: LAMA2; (+) strand; PAM type: NNNNGHTT; PAM sequence: TGAGGTTT
tcactgggaaaagacacaat

SEQ ID NO: 44946 - DNA, 20 bp, Artificial Sequence
  Description of Artificial Sequence: Synthetic oligonucleotide
  Target: LAMA2; (+) strand; PAM type: NNNNGHTT; PAM sequence: AGTCGTTT
aattttttttttctcacttg

SEQ ID NO: 44947 - DNA, 20 bp, Artificial Sequence
  Description of Artificial Sequence: Synthetic oligonucleotide
  Target: LAMA2; (+) strand; PAM type: NNNNGHTT; PAM sequence: CATTGTTT
aaagtgcaagtattcatata

SEQ ID NO: 44948 - DNA, 20 bp, Artificial Sequence
  Description of Artificial Sequence: Synthetic oligonucleotide
  Target: LAMA2; (+) strand; PAM type: NNNNGHTT; PAM sequence: TTCTGTTT
tcaaaagctcaaatcatgaa

SEQ ID NO: 44949 - DNA, 20 bp, Artificial Sequence
  Description of Artificial Sequence: Synthetic oligonucleotide
  Target: LAMA2; (+) strand; PAM type: NNNNGHTT; PAM sequence: TAAGGATT
atcatgaattctgtttgtgt

SEQ ID NO: 44950 - DNA, 20 bp, Artificial Sequence
  Description of Artificial Sequence: Synthetic oligonucleotide
  Target: LAMA2; (+) strand; PAM type: NNNNGHTT; PAM sequence: CCACGTTT
cttcaataaagatagagata

SEQ ID NO: 44951 - DNA, 20 bp, Artificial Sequence
  Description of Artificial Sequence: Synthetic oligonucleotide
  Target: LAMA2; (+) strand; PAM type: NNNNGHTT; PAM sequence: TTTTGCTT
ataaagatagagataccacg

SEQ ID NO: 44952 - DNA, 20 bp, Artificial Sequence
  Description of Artificial Sequence: Synthetic oligonucleotide
  Target: LAMA2; (+) strand; PAM type: NNNNGHTT; PAM sequence: GATAGCTT
ctagaggcaactttttcatc

SEQ ID NO: 44953 - DNA, 20 bp, Artificial Sequence
  Description of Artificial Sequence: Synthetic oligonucleotide
  Target: LAMA2; (+) strand; PAM type: NNNNGHTT; PAM sequence: CATAGCTT
aaatgggaaatgggaaattt

SEQ ID NO: 44954 - DNA, 20 bp, Artificial Sequence
  Description of Artificial Sequence: Synthetic oligonucleotide
  Target: LAMA2; (+) strand; PAM type: NNNNGHTT; PAM sequence: GGGTGCTT
tgggtggatgcagggcatgt

SEQ ID NO: 44955 - DNA, 20 bp, Artificial Sequence
  Description of Artificial Sequence: Synthetic oligonucleotide
  Target: LAMA2; (+) strand; PAM type: NNNNGHTT; PAM sequence: TAGTGATT
tgtagccacaagaaaattta

SEQ ID NO: 44956 - DNA, 20 bp, Artificial Sequence
  Description of Artificial Sequence: Synthetic oligonucleotide
  Target: LAMA2; (+) strand; PAM type: NNNNGHTT; PAM sequence: CAAGGTTT
tgcacaaacacacacacatg

SEQ ID NO: 44957 - DNA, 20 bp, Artificial Sequence
  Description of Artificial Sequence: Synthetic oligonucleotide
  Target: LAMA2; (+) strand; PAM type: NNNNGHTT; PAM sequence: TTGTGTTT
acttagccatcaactggaat

SEQ ID NO: 44958 - DNA, 20 bp, Artificial Sequence
  Description of Artificial Sequence: Synthetic oligonucleotide
  Target: LAMA2; (+) strand; PAM type: NNNNGHTT; PAM sequence: TTTAGTTT
ccatcaactggaatttgtgt

SEQ ID NO: 44959 - DNA, 20 bp, Artificial Sequence
  Description of Artificial Sequence: Synthetic oligonucleotide
  Target: LAMA2; (+) strand; PAM type: NNNNGHTT; PAM sequence: TGCTGATT
aatttgtgttttagtttgga

SEQ ID NO: 44960 - DNA, 20 bp, Artificial Sequence
  Description of Artificial Sequence: Synthetic oligonucleotide
  Target: LAMA2; (+) strand; PAM type: NNNNGHTT; PAM sequence: TAGTGATT
ctattttccgtaaaatatgt

SEQ ID NO: 44961 - DNA, 20 bp, Artificial Sequence
  Description of Artificial Sequence: Synthetic oligonucleotide
  Target: LAMA2; (+) strand; PAM type: NNNNGHTT; PAM sequence: AAGTGTTT
tctgtcatgcagaataaaat

SEQ ID NO: 44962 - DNA, 20 bp, Artificial Sequence
  Description of Artificial Sequence: Synthetic oligonucleotide
  Target: LAMA2; (+) strand; PAM type: NNNNGHTT; PAM sequence: TATTGATT
tatcagctaaatttgtagaa

SEQ ID NO: 44963 - DNA, 20 bp, Artificial Sequence
  Description of Artificial Sequence: Synthetic oligonucleotide
  Target: LAMA2; (+) strand; PAM type: NNNNGHTT; PAM sequence: AGCAGTTT
gaaagaagttctaagaataa

SEQ ID NO: 44964 - DNA, 20 bp, Artificial Sequence
  Description of Artificial Sequence: Synthetic oligonucleotide
  Target: LAMA2; (+) strand; PAM type: NNNNGHTT; PAM sequence: ATATGCTT
caaatagtatatatacatgt

SEQ ID NO: 44965 - DNA, 20 bp, Artificial Sequence
  Description of Artificial Sequence: Synthetic oligonucleotide
  Target: LAMA2; (+) strand; PAM type: NNNNGHTT; PAM sequence: TAAGGATT
actttaactctttcagatgt

SEQ ID NO: 44966 - DNA, 20 bp, Artificial Sequence
  Description of Artificial Sequence: Synthetic oligonucleotide
  Target: LAMA2; (+) strand; PAM type: NNNNGHTT; PAM sequence: TCAGGTTT
agaagtatatttcatgtgag

SEQ ID NO: 44967 - DNA, 20 bp, Artificial Sequence
  Description of Artificial Sequence: Synthetic oligonucleotide
  Target: LAMA2; (+) strand; PAM type: NNNNGHTT; PAM sequence: AGGTGTTT
tgagtcaggttttattctct

SEQ ID NO: 44968 - DNA, 20 bp, Artificial Sequence
  Description of Artificial Sequence: Synthetic oligonucleotide
  Target: LAMA2; (+) strand; PAM type: NNNNGHTT; PAM sequence: AAGGGTTT
aatgtgggaaagtgaaatac

SEQ ID NO: 44969 - DNA, 20 bp, Artificial Sequence
  Description of Artificial Sequence: Synthetic oligonucleotide
  Target: LAMA2; (+) strand; PAM type: NNNNGHTT; PAM sequence: GTCAGATT
ctggggatgcagtctttcct

SEQ ID NO: 44970 - DNA, 20 bp, Artificial Sequence
  Description of Artificial Sequence: Synthetic oligonucleotide
  Target: LAMA2; (+) strand; PAM type: NNNNGHTT; PAM sequence: AATTGATT
gcaaatatagaatagcatca

SEQ ID NO: 44971 - DNA, 20 bp, Artificial Sequence
  Description of Artificial Sequence: Synthetic oligonucleotide
  Target: LAMA2; (+) strand; PAM type: NNNNGHTT; PAM sequence: CAGAGTTT
atagcatcaaattgattttg

SEQ ID NO: 44972 - DNA, 20 bp, Artificial Sequence
  Description of Artificial Sequence: Synthetic oligonucleotide
  Target: LAMA2; (+) strand; PAM type: NNNNGHTT; PAM sequence: TGGTGTTT
cagccatggtatgtagtcat

SEQ ID NO: 44973 - DNA, 20 bp, Artificial Sequence
  Description of Artificial Sequence: Synthetic oligonucleotide
  Target: LAMA2; (+) strand; PAM type: NNNNGHTT; PAM sequence: GGTAGTTT
aacatttttcaaatgttcca

SEQ ID NO: 44974 - DNA, 20 bp, Artificial Sequence
  Description of Artificial Sequence: Synthetic oligonucleotide
  Target: LAMA2; (+) strand; PAM type: NNNNGHTT; PAM sequence: TTTGGCTT
gaaaaaaagcaatacctatc

SEQ ID NO: 44975 - DNA, 20 bp, Artificial Sequence
  Description of Artificial Sequence: Synthetic oligonucleotide
  Target: LAMA2; (+) strand; PAM type: NNNNGHTT; PAM sequence: ATGAGTTT
aggcctcaccttattatcaa

SEQ ID NO: 44976 - DNA, 20 bp, Artificial Sequence
  Description of Artificial Sequence: Synthetic oligonucleotide
  Target: LAMA2; (+) strand; PAM type: NNNNGHTT; PAM sequence: GTTTGTTT
ctcaccttattatcaaatga

SEQ ID NO: 44977 - DNA, 20 bp, Artificial Sequence
  Description of Artificial Sequence: Synthetic oligonucleotide
  Target: LAMA2; (+) strand; PAM type: NNNNGHTT; PAM sequence: AATAGCTT
gtatgttagaatccatatgt

SEQ ID NO: 44978 - DNA, 20 bp, Artificial Sequence
  Description of Artificial Sequence: Synthetic oligonucleotide
  Target: LAMA2; (+) strand; PAM type: NNNNGHTT; PAM sequence: GATAGTTT
gcacatattttcaccccact

SEQ ID NO: 44979 - DNA, 20 bp, Artificial Sequence
  Description of Artificial Sequence: Synthetic oligonucleotide
  Target: LAMA2; (+) strand; PAM type: NNNNGHTT; PAM sequence: CTGTGTTT
ggaggtacacatacatatct

SEQ ID NO: 44980 - DNA, 20 bp, Artificial Sequence
  Description of Artificial Sequence: Synthetic oligonucleotide
  Target: LAMA2; (+) strand; PAM type: NNNNGHTT; PAM sequence: CTGTGTTT
catgtcgtaagtgaatgaaa

SEQ ID NO: 44981 - DNA, 20 bp, Artificial Sequence
  Description of Artificial Sequence: Synthetic oligonucleotide
  Target: LAMA2; (+) strand; PAM type: NNNNGHTT; PAM sequence: TGAAGATT
tattggtgtgctagacattc

SEQ ID NO: 44982 - DNA, 20 bp, Artificial Sequence
  Description of Artificial Sequence: Synthetic oligonucleotide
  Target: LAMA2; (+) strand; PAM type: NNNNGHTT; PAM sequence: TTATGATT
atacaacattatttctaatg

SEQ ID NO: 44983 - DNA, 20 bp, Artificial Sequence
  Description of Artificial Sequence: Synthetic oligonucleotide
  Target: LAMA2; (+) strand; PAM type: NNNNGHTT; PAM sequence: CAATGATT
tctacagacaaagaatcaaa

SEQ ID NO: 44984 - DNA, 20 bp, Artificial Sequence
  Description of Artificial Sequence: Synthetic oligonucleotide
  Target: LAMA2; (+) strand; PAM type: NNNNGHTT; PAM sequence: TTGTGTTT
tgattctttttaatggtaac

SEQ ID NO: 44985 - DNA, 20 bp, Artificial Sequence
  Description of Artificial Sequence: Synthetic oligonucleotide
  Target: LAMA2; (+) strand; PAM type: NNNNGHTT; PAM sequence: ATGAGTTT
atgataaagaacaggaaaag

SEQ ID NO: 44986 - DNA, 20 bp, Artificial Sequence
  Description of Artificial Sequence: Synthetic oligonucleotide
  Target: LAMA2; (+) strand; PAM type: NNNNGHTT; PAM sequence: GATAGATT
gtttttttctctatcagaag

SEQ ID NO: 44987 - DNA, 20 bp, Artificial Sequence
  Description of Artificial Sequence: Synthetic oligonucleotide
  Target: LAMA2; (+) strand; PAM type: NNNNGHTT; PAM sequence: ATGGGATT
ggaaataatttgaccagagc

SEQ ID NO: 44988 - DNA, 20 bp, Artificial Sequence
  Description of Artificial Sequence: Synthetic oligonucleotide
  Target: LAMA2; (+) strand; PAM type: NNNNGHTT; PAM sequence: GTGAGATT
tgtagggaaggtgtatcaga

SEQ ID NO: 44989 - DNA, 20 bp, Artificial Sequence
  Description of Artificial Sequence: Synthetic oligonucleotide
  Target: LAMA2; (+) strand; PAM type: NNNNGHTT; PAM sequence: TTATGTTT
gaaatatctaaatgaagtat

SEQ ID NO: 44990 - DNA, 20 bp, Artificial Sequence
  Description of Artificial Sequence: Synthetic oligonucleotide
  Target: LAMA2; (+) strand; PAM type: NNNNGHTT; PAM sequence: GAGAGATT
ttactctaaaagtcaagtga

SEQ ID NO: 44991 - DNA, 20 bp, Artificial Sequence
  Description of Artificial Sequence: Synthetic oligonucleotide
  Target: LAMA2; (+) strand; PAM type: NNNNGHTT; PAM sequence: TGGAGTTT
gtgaggaatggggacttctg

SEQ ID NO: 44992 - DNA, 20 bp, Artificial Sequence
  Description of Artificial Sequence: Synthetic oligonucleotide
  Target: LAMA2; (+) strand; PAM type: NNNNGHTT; PAM sequence: CTTTGCTT
atctgataaattattataat

SEQ ID NO: 44993 - DNA, 20 bp, Artificial Sequence
  Description of Artificial Sequence: Synthetic oligonucleotide
  Target: LAMA2; (+) strand; PAM type: NNNNGHTT; PAM sequence: TGGGGATT
atctttgcttttagtagaaa

SEQ ID NO: 44994 - DNA, 20 bp, Artificial Sequence
  Description of Artificial Sequence: Synthetic oligonucleotide
  Target: LAMA2; (+) strand; PAM type: NNNNGHTT; PAM sequence: TAGTGTTT
tgaaaaacaaggataagaat

SEQ ID NO: 44995 - DNA, 20 bp, Artificial Sequence
  Description of Artificial Sequence: Synthetic oligonucleotide
  Target: LAMA2; (+) strand; PAM type: NNNNGHTT; PAM sequence: GTAAGTTT
attttatcacactctgctgt

SEQ ID NO: 44996 - DNA, 20 bp, Artificial Sequence
  Description of Artificial Sequence: Synthetic oligonucleotide
  Target: LAMA2; (+) strand; PAM type: NNNNGHTT; PAM sequence: GCAAGTTT
ttaggcagatatattattca

SEQ ID NO: 44997 - DNA, 20 bp, Artificial Sequence
  Description of Artificial Sequence: Synthetic oligonucleotide
  Target: LAMA2; (+) strand; PAM type: NNNNGHTT; PAM sequence: GAGTGTTT
gggatgataaatattattat

SEQ ID NO: 44998 - DNA, 20 bp, Artificial Sequence
  Description of Artificial Sequence: Synthetic oligonucleotide
  Target: LAMA2; (+) strand; PAM type: NNNNGHTT; PAM sequence: ATCAGTTT
ttaagaacccgaatccattt

SEQ ID NO: 44999 - DNA, 20 bp, Artificial Sequence
  Description of Artificial Sequence: Synthetic oligonucleotide
  Target: LAMA2; (+) strand; PAM type: NNNNGHTT; PAM sequence: CAATGATT
tccatttatcagtttcataa

SEQ ID NO: 45000 - DNA, 20 bp, Artificial Sequence
  Description of Artificial Sequence: Synthetic oligonucleotide
  Target: LAMA2; (+) strand; PAM type: NNNNGHTT; PAM sequence: TCAAGCTT
cagtttcataacaatgattt

SEQ ID NO: 45001 - DNA, 20 bp, Artificial Sequence
  Description of Artificial Sequence: Synthetic oligonucleotide
  Target: LAMA2; (+) strand; PAM type: NNNNGHTT; PAM sequence: GCTTGTTT
ttcataacaatgattttcaa

SEQ ID NO: 45002 - DNA, 20 bp, Artificial Sequence
  Description of Artificial Sequence: Synthetic oligonucleotide
  Target: LAMA2; (+) strand; PAM type: NNNNGHTT; PAM sequence: GCATGTTT
taaaagtaataatctaccag

SEQ ID NO: 45003 - DNA, 20 bp, Artificial Sequence
  Description of Artificial Sequence: Synthetic oligonucleotide
  Target: LAMA2; (+) strand; PAM type: NNNNGHTT; PAM sequence: TATTGTTT
aatatatagaattctaaaaa

SEQ ID NO: 45004 - DNA, 20 bp, Artificial Sequence
  Description of Artificial Sequence: Synthetic oligonucleotide
  Target: LAMA2; (+) strand; PAM type: NNNNGHTT; PAM sequence: TCTTGTTT
ctaaaaatattgtttatagc

SEQ ID NO: 45005 - DNA, 20 bp, Artificial Sequence
  Description of Artificial Sequence: Synthetic oligonucleotide
  Target: LAMA2; (+) strand; PAM type: NNNNGHTT; PAM sequence: ACATGCTT
tgtttatagctcttgtttca

SEQ ID NO: 45006 - DNA, 20 bp, Artificial Sequence
  Description of Artificial Sequence: Synthetic oligonucleotide
  Target: LAMA2; (+) strand; PAM type: NNNNGHTT; PAM sequence: TAATGTTT
tcaacatgcttgggacaagt

SEQ ID NO: 45007 - DNA, 20 bp, Artificial Sequence
  Description of Artificial Sequence: Synthetic oligonucleotide
  Target: LAMA2; (+) strand; PAM type: NNNNGHTT; PAM sequence: TACAGTTT
gcttgggacaagttaatgtt

SEQ ID NO: 45008 - DNA, 20 bp, Artificial Sequence
  Description of Artificial Sequence: Synthetic oligonucleotide
  Target: LAMA2; (+) strand; PAM type: NNNNGHTT; PAM sequence: TGAGGTTT
attcaataagttgaccttct

SEQ ID NO: 45009 - DNA, 20 bp, Artificial Sequence
  Description of Artificial Sequence: Synthetic oligonucleotide
  Target: LAMA2; (+) strand; PAM type: NNNNGHTT; PAM sequence: TATGGTTT
ttggagcctgagggaatcaa

SEQ ID NO: 45010 - DNA, 20 bp, Artificial Sequence
  Description of Artificial Sequence: Synthetic oligonucleotide
  Target: LAMA2; (+) strand; PAM type: NNNNGHTT; PAM sequence: CTAAGTTT
agttgatctcctaggtatgt

SEQ ID NO: 45011 - DNA, 20 bp, Artificial Sequence
  Description of Artificial Sequence: Synthetic oligonucleotide
  Target: LAMA2; (+) strand; PAM type: NNNNGHTT; PAM sequence: ATATGTTT
acttccaaaatagtctcagg

SEQ ID NO: 45012 - DNA, 20 bp, Artificial Sequence
  Description of Artificial Sequence: Synthetic oligonucleotide
  Target: LAMA2; (+) strand; PAM type: NNNNGHTT; PAM sequence: AATAGCTT
tgtgtgcaagtgtggagaaa

SEQ ID NO: 45013 - DNA, 20 bp, Artificial Sequence
  Description of Artificial Sequence: Synthetic oligonucleotide
  Target: LAMA2; (+) strand; PAM type: NNNNGHTT; PAM sequence: AAGAGCTT
ctcattatacatcagcaatg

SEQ ID NO: 45014 - DNA, 20 bp, Artificial Sequence
  Description of Artificial Sequence: Synthetic oligonucleotide
  Target: LAMA2; (+) strand; PAM type: NNNNGHTT; PAM sequence: ATAAGATT
taaaatactagagagtataa

SEQ ID NO: 45015 - DNA, 20 bp, Artificial Sequence
  Description of Artificial Sequence: Synthetic oligonucleotide
  Target: LAMA2; (+) strand; PAM type: NNNNGHTT; PAM sequence: AACGGATT
gtgttactcttgaaaaagca

SEQ ID NO: 45016 - DNA, 20 bp, Artificial Sequence
  Description of Artificial Sequence: Synthetic oligonucleotide
  Target: LAMA2; (+) strand; PAM type: NNNNGHTT; PAM sequence: GTCAGATT
ttttggacatcttacttata

SEQ ID NO: 45017 - DNA, 20 bp, Artificial Sequence
  Description of Artificial Sequence: Synthetic oligonucleotide
  Target: LAMA2; (+) strand; PAM type: NNNNGHTT; PAM sequence: GATTGATT
ggacatcttacttatagtca

SEQ ID NO: 45018 - DNA, 20 bp, Artificial Sequence
  Description of Artificial Sequence: Synthetic oligonucleotide
  Target: LAMA2; (+) strand; PAM type: NNNNGHTT; PAM sequence: AAATGATT
gaaattgagggaaactatgg

SEQ ID NO: 45019 - DNA, 20 bp, Artificial Sequence
  Description of Artificial Sequence: Synthetic oligonucleotide
  Target: LAMA2; (+) strand; PAM type: NNNNGHTT; PAM sequence: TTTTGTTT
agcaagtggtagcaagctat

SEQ ID NO: 45020 - DNA, 20 bp, Artificial Sequence
  Description of Artificial Sequence: Synthetic oligonucleotide
  Target: LAMA2; (+) strand; PAM type: NNNNGHTT; PAM sequence: AGCAGTTT
atttttgtttgcattttgaa

SEQ ID NO: 45021 - DNA, 20 bp, Artificial Sequence
  Description of Artificial Sequence: Synthetic oligonucleotide
  Target: LAMA2; (+) strand; PAM type: NNNNGHTT; PAM sequence: AATTGATT
ttctaattttgaaaatctta

SEQ ID NO: 45022 - DNA, 20 bp, Artificial Sequence
  Description of Artificial Sequence: Synthetic oligonucleotide
  Target: LAMA2; (+) strand; PAM type: NNNNGHTT; PAM sequence: ATCTGCTT
ccttctgttaattgactcag

SEQ ID NO: 45023 - DNA, 20 bp, Artificial Sequence
  Description of Artificial Sequence: Synthetic oligonucleotide
  Target: LAMA2; (+) strand; PAM type: NNNNGHTT; PAM sequence: TAAAGATT
ctttgcctaggaatttaaag

SEQ ID NO: 45024 - DNA, 20 bp, Artificial Sequence
  Description of Artificial Sequence: Synthetic oligonucleotide
  Target: LAMA2; (+) strand; PAM type: NNNNGHTT; PAM sequence: CTTTGATT
tccttattgtcaacccctta

SEQ ID NO: 45025 - DNA, 20 bp, Artificial Sequence
  Description of Artificial Sequence: Synthetic oligonucleotide
  Target: LAMA2; (+) strand; PAM type: NNNNGHTT; PAM sequence: TAATGTTT
tttgattattttttttaatt

SEQ ID NO: 45026 - DNA, 20 bp, Artificial Sequence
  Description of Artificial Sequence: Synthetic oligonucleotide
  Target: LAMA2; (+) strand; PAM type: NNNNGHTT; PAM sequence: GAGTGATT
gatgagtacttggaaaggtg

SEQ ID NO: 45027 - DNA, 20 bp, Artificial Sequence
  Description of Artificial Sequence: Synthetic oligonucleotide
  Target: LAMA2; (+) strand; PAM type: NNNNGHTT; PAM sequence: TATAGTTT
ttcaatgaatatgtgttgca

SEQ ID NO: 45028 - DNA, 20 bp, Artificial Sequence
  Description of Artificial Sequence: Synthetic oligonucleotide
  Target: LAMA2; (+) strand; PAM type: NNNNGHTT; PAM sequence: TATAGCTT
aatgcctatcccatctatat

SEQ ID NO: 45029 - DNA, 20 bp, Artificial Sequence
  Description of Artificial Sequence: Synthetic oligonucleotide
  Target: LAMA2; (+) strand; PAM type: NNNNGHTT; PAM sequence: AAATGCTT
agactcaagggataaagtga

SEQ ID NO: 45030 - DNA, 20 bp, Artificial Sequence
  Description of Artificial Sequence: Synthetic oligonucleotide
  Target: LAMA2; (+) strand; PAM type: NNNNGHTT; PAM sequence: AAAGGCTT
gtacataacatgtgacaaag

SEQ ID NO: 45031 - DNA, 20 bp, Artificial Sequence
  Description of Artificial Sequence: Synthetic oligonucleotide
  Target: LAMA2; (+) strand; PAM type: NNNNGHTT; PAM sequence: TATGGTTT
acatgtgacaaagaaaggct

SEQ ID NO: 45032 - DNA, 20 bp, Artificial Sequence
  Description of Artificial Sequence: Synthetic oligonucleotide
  Target: LAMA2; (+) strand; PAM type: NNNNGHTT; PAM sequence: TGGAGTTT
caaagaaaggcttatggttt

SEQ ID NO: 45033 - DNA, 20 bp, Artificial Sequence
  Description of Artificial Sequence: Synthetic oligonucleotide
  Target: LAMA2; (+) strand; PAM type: NNNNGHTT; PAM sequence: GTTTGTTT
gaaaggcttatggttttgga

SEQ ID NO: 45034 - DNA, 20 bp, Artificial Sequence
  Description of Artificial Sequence: Synthetic oligonucleotide
  Target: LAMA2; (+) strand; PAM type: NNNNGHTT; PAM sequence: AGAAGTTT
agaacaaatattttccatga

SEQ ID NO: 45035 - DNA, 20 bp, Artificial Sequence
  Description of Artificial Sequence: Synthetic oligonucleotide
  Target: LAMA2; (+) strand; PAM type: NNNNGHTT; PAM sequence: ATGTGATT
tttttttcgtgttagaactc

SEQ ID NO: 45036 - DNA, 20 bp, Artificial Sequence
  Description of Artificial Sequence: Synthetic oligonucleotide
  Target: LAMA2; (+) strand; PAM type: NNNNGHTT; PAM sequence: AATTGATT
tgttagaactcatgtgatta

SEQ ID NO: 45037 - DNA, 20 bp, Artificial Sequence
  Description of Artificial Sequence: Synthetic oligonucleotide
  Target: LAMA2; (+) strand; PAM type: NNNNGHTT; PAM sequence: AAAAGATT
tctaattgtctctgaaaata

SEQ ID NO: 45038 - DNA, 20 bp, Artificial Sequence
  Description of Artificial Sequence: Synthetic oligonucleotide
  Target: LAMA2; (+) strand; PAM type: NNNNGHTT; PAM sequence: CATGGCTT
aaataaaaagattaataaat

SEQ ID NO: 45039 - DNA, 20 bp, Artificial Sequence
  Description of Artificial Sequence: Synthetic oligonucleotide
  Target: LAMA2; (+) strand; PAM type: NNNNGHTT; PAM sequence: TAGAGTTT
gcttctgccttcaaggaact

SEQ ID NO: 45040 - DNA, 20 bp, Artificial Sequence
  Description of Artificial Sequence: Synthetic oligonucleotide
  Target: LAMA2; (+) strand; PAM type: NNNNGHTT; PAM sequence: GTTGGTTT
gagtttagtggttatagaat

SEQ ID NO: 45041 - DNA, 20 bp, Artificial Sequence
  Description of Artificial Sequence: Synthetic oligonucleotide
  Target: LAMA2; (+) strand; PAM type: NNNNGHTT; PAM sequence: GAGAGTTT
gacaaaaactcataatatct

SEQ ID NO: 45042 - DNA, 20 bp, Artificial Sequence
  Description of Artificial Sequence: Synthetic oligonucleotide
  Target: LAMA2; (+) strand; PAM type: NNNNGHTT; PAM sequence: ATGTGCTT
cataatatctgagagtttat

SEQ ID NO: 45043 - DNA, 20 bp, Artificial Sequence
  Description of Artificial Sequence: Synthetic oligonucleotide
  Target: LAMA2; (+) strand; PAM type: NNNNGHTT; PAM sequence: GTGGGTTT
caagaggaaacagaatattt

SEQ ID NO: 45044 - DNA, 20 bp, Artificial Sequence
  Description of Artificial Sequence: Synthetic oligonucleotide
  Target: LAMA2; (+) strand; PAM type: NNNNGHTT; PAM sequence: AAGTGTTT
caaacagctgctagagaaca

SEQ ID NO: 45045 - DNA, 20 bp, Artificial Sequence
  Description of Artificial Sequence: Synthetic oligonucleotide
  Target: LAMA2; (+) strand; PAM type: NNNNGHTT; PAM sequence: ATTTGCTT
atatactaaagctgcataga

SEQ ID NO: 45046 - DNA, 20 bp, Artificial Sequence
  Description of Artificial Sequence: Synthetic oligonucleotide
  Target: LAMA2; (+) strand; PAM type: NNNNGHTT; PAM sequence: AGATGCTT
ttatagcataaaacagaatt

SEQ ID NO: 45047 - DNA, 20 bp, Artificial Sequence
  Description of Artificial Sequence: Synthetic oligonucleotide
  Target: LAMA2; (+) strand; PAM type: NNNNGHTT; PAM sequence: AAATGTTT
gaaaagacacacaaaagaag

SEQ ID NO: 45048 - DNA, 20 bp, Artificial Sequence
  Description of Artificial Sequence: Synthetic oligonucleotide
  Target: LAMA2; (+) strand; PAM type: NNNNGHTT; PAM sequence: TTTTGTTT
gacacacaaaagaagaaatg

SEQ ID NO: 45049 - DNA, 20 bp, Artificial Sequence
  Description of Artificial Sequence: Synthetic oligonucleotide
  Target: LAMA2; (+) strand; PAM type: NNNNGHTT; PAM sequence: ATGGGTTT
actatccagaggacagtggt

SEQ ID NO: 45050 - DNA, 20 bp, Artificial Sequence
  Description of Artificial Sequence: Synthetic oligonucleotide
  Target: LAMA2; (+) strand; PAM type: NNNNGHTT; PAM sequence: AATGGTTT
acaataaattttaaggaaat

SEQ ID NO: 45051 - DNA, 20 bp, Artificial Sequence
  Description of Artificial Sequence: Synthetic oligonucleotide
  Target: LAMA2; (+) strand; PAM type: NNNNGHTT; PAM sequence: CTGGGCTT
ctttgatgctaacattattt

SEQ ID NO: 45052 - DNA, 20 bp, Artificial Sequence
  Description of Artificial Sequence: Synthetic oligonucleotide
  Target: LAMA2; (+) strand; PAM type: NNNNGHTT; PAM sequence: TGTTGTTT
ttaaaatgttatttttgttg

SEQ ID NO: 45053 - DNA, 20 bp, Artificial Sequence
  Description of Artificial Sequence: Synthetic oligonucleotide
  Target: LAMA2; (+) strand; PAM type: NNNNGHTT; PAM sequence: TTTGGTTT
atgttatttttgttgtgttg

SEQ ID NO: 45054 - DNA, 20 bp, Artificial Sequence
  Description of Artificial Sequence: Synthetic oligonucleotide
  Target: LAMA2; (+) strand; PAM type: NNNNGHTT; PAM sequence: TTGTGTTT
ttttgttgtgttgtttggtt

SEQ ID NO: 45055 - DNA, 20 bp, Artificial Sequence
  Description of Artificial Sequence: Synthetic oligonucleotide
  Target: LAMA2; (+) strand; PAM type: NNNNGHTT; PAM sequence: GAAAGTTT
ctttttattttctgacaaaa

SEQ ID NO: 45056 - DNA, 20 bp, Artificial Sequence
  Description of Artificial Sequence: Synthetic oligonucleotide
  Target: LAMA2; (+) strand; PAM type: NNNNGHTT; PAM sequence: AAATGATT
acctctacctcctgggttca

SEQ ID NO: 45057 - DNA, 20 bp, Artificial Sequence
  Description of Artificial Sequence: Synthetic oligonucleotide
  Target: LAMA2; (+) strand; PAM type: NNNNGHTT; PAM sequence: CTGGGATT
tgccttatcctcccgagtag

SEQ ID NO: 45058 - DNA, 20 bp, Artificial Sequence
  Description of Artificial Sequence: Synthetic oligonucleotide
  Target: LAMA2; (+) strand; PAM type: NNNNGHTT; PAM sequence: CAGGGTTT
ttttgtatttttagtagaga

SEQ ID NO: 45059 - DNA, 20 bp, Artificial Sequence
  Description of Artificial Sequence: Synthetic oligonucleotide
  Target: LAMA2; (+) strand; PAM type: NNNNGHTT; PAM sequence: CTGGGATT
tgcctcggcctcccaaagtg

SEQ ID NO: 45060 - DNA, 20 bp, Artificial Sequence
  Description of Artificial Sequence: Synthetic oligonucleotide
  Target: LAMA2; (+) strand; PAM type: NNNNGHTT; PAM sequence: TGAAGCTT
atacatagtctctcccatca

SEQ ID NO: 45061 - DNA, 20 bp, Artificial Sequence
  Description of Artificial Sequence: Synthetic oligonucleotide
  Target: LAMA2; (+) strand; PAM type: NNNNGHTT; PAM sequence: ACCTGTTT
attaggggctgtaatgaagg

SEQ ID NO: 45062 - DNA, 20 bp, Artificial Sequence
  Description of Artificial Sequence: Synthetic oligonucleotide
  Target: LAMA2; (+) strand; PAM type: NNNNGHTT; PAM sequence: CAGAGATT
agtgaaggagcgttaaggaa

SEQ ID NO: 45063 - DNA, 20 bp, Artificial Sequence
  Description of Artificial Sequence: Synthetic oligonucleotide
  Target: LAMA2; (+) strand; PAM type: NNNNGHTT; PAM sequence: CAGAGCTT
agccctaagcaaggaaaaag

SEQ ID NO: 45064 - DNA, 20 bp, Artificial Sequence
  Description of Artificial Sequence: Synthetic oligonucleotide
  Target: LAMA2; (+) strand; PAM type: NNNNGHTT; PAM sequence: ATCAGATT
tttttaagaagactgacttg

SEQ ID NO: 45065 - DNA, 20 bp, Artificial Sequence
  Description of Artificial Sequence: Synthetic oligonucleotide
  Target: LAMA2; (+) strand; PAM type: NNNNGHTT; PAM sequence: AAATGCTT
tgcagatgtccagatgttac

SEQ ID NO: 45066 - DNA, 20 bp, Artificial Sequence
  Description of Artificial Sequence: Synthetic oligonucleotide
  Target: LAMA2; (+) strand; PAM type: NNNNGHTT; PAM sequence: CCCGGTTT
caatggcatcaataacgact

SEQ ID NO: 45067 - DNA, 20 bp, Artificial Sequence
  Description of Artificial Sequence: Synthetic oligonucleotide
  Target: LAMA2; (+) strand; PAM type: NNNNGHTT; PAM sequence: TTGAGCTT
ggtgggtaaactaagatgtg

SEQ ID NO: 45068 - DNA, 20 bp, Artificial Sequence
  Description of Artificial Sequence: Synthetic oligonucleotide
  Target: LAMA2; (+) strand; PAM type: NNNNGHTT; PAM sequence: TGGGGATT
aatctgggtgtcccttcggg

SEQ ID NO: 45069 - DNA, 20 bp, Artificial Sequence
  Description of Artificial Sequence: Synthetic oligonucleotide
  Target: LAMA2; (+) strand; PAM type: NNNNGHTT; PAM sequence: TGGAGATT
tcctgagacgtctaaaaaaa

SEQ ID NO: 45070 - DNA, 20 bp, Artificial Sequence
  Description of Artificial Sequence: Synthetic oligonucleotide
  Target: LAMA2; (+) strand; PAM type: NNNNGHTT; PAM sequence: GTAAGATT
tgtaaatgggttggaagtgg

SEQ ID NO: 45071 - DNA, 20 bp, Artificial Sequence
  Description of Artificial Sequence: Synthetic oligonucleotide
  Target: LAMA2; (+) strand; PAM type: NNNNGHTT; PAM sequence: CCAGGATT
gaatgaaataagaaaatgat

SEQ ID NO: 45072 - DNA, 20 bp, Artificial Sequence
  Description of Artificial Sequence: Synthetic oligonucleotide
  Target: LAMA2; (+) strand; PAM type: NNNNGHTT; PAM sequence: TTCTGTTT
gaagtaaatgaatgtgactt

SEQ ID NO: 45073 - DNA, 20 bp, Artificial Sequence
  Description of Artificial Sequence: Synthetic oligonucleotide
  Target: LAMA2; (+) strand; PAM type: NNNNGHTT; PAM sequence: CAGTGTTT
agagaaaacataatgtggaa

SEQ ID NO: 45074 - DNA, 20 bp, Artificial Sequence
  Description of Artificial Sequence: Synthetic oligonucleotide
  Target: LAMA2; (+) strand; PAM type: NNNNGHTT; PAM sequence: GTGTGTTT
atgtggaacagtgtttttat

SEQ ID NO: 45075 - DNA, 20 bp, Artificial Sequence
  Description of Artificial Sequence: Synthetic oligonucleotide
  Target: LAMA2; (+) strand; PAM type: NNNNGHTT; PAM sequence: TTTTGTTT
agatgagtctcttctgatat

SEQ ID NO: 45076 - DNA, 20 bp, Artificial Sequence
  Description of Artificial Sequence: Synthetic oligonucleotide
  Target: LAMA2; (+) strand; PAM type: NNNNGHTT; PAM sequence: ATTAGTTT
ctcatgctcctagcatagca

SEQ ID NO: 45077 - DNA, 20 bp, Artificial Sequence
  Description of Artificial Sequence: Synthetic oligonucleotide
  Target: LAMA2; (+) strand; PAM type: NNNNGHTT; PAM sequence: TAGAGATT
tcctagcatagcaattagtt

SEQ ID NO: 45078 - DNA, 20 bp, Artificial Sequence
  Description of Artificial Sequence: Synthetic oligonucleotide
  Target: LAMA2; (+) strand; PAM type: NNNNGHTT; PAM sequence: CATTGTTT
caattagtttagagatttat

SEQ ID NO: 45079 - DNA, 20 bp, Artificial Sequence
  Description of Artificial Sequence: Synthetic oligonucleotide
  Target: LAMA2; (+) strand; PAM type: NNNNGHTT; PAM sequence: TTTTGTTT
cagacaaagccctaaatttt

SEQ ID NO: 45080 - DNA, 20 bp, Artificial Sequence
  Description of Artificial Sequence: Synthetic oligonucleotide
  Target: LAMA2; (+) strand; PAM type: NNNNGHTT; PAM sequence: TTTGGTTT
ctatatcacaagtacctttt

SEQ ID NO: 45081 - DNA, 20 bp, Artificial Sequence
  Description of Artificial Sequence: Synthetic oligonucleotide
  Target: LAMA2; (+) strand; PAM type: NNNNGHTT; PAM sequence: AACTGTTT
tttcattttccgtgacttga

SEQ ID NO: 45082 - DNA, 20 bp, Artificial Sequence
  Description of Artificial Sequence: Synthetic oligonucleotide
  Target: LAMA2; (+) strand; PAM type: NNNNGHTT; PAM sequence: CCTTGCTT
aactgttttgcacttcctct

SEQ ID NO: 45083 - DNA, 20 bp, Artificial Sequence
  Description of Artificial Sequence: Synthetic oligonucleotide
  Target: LAMA2; (+) strand; PAM type: NNNNGHTT; PAM sequence: TTGAGTTT
tcctctccttgctttatatt

SEQ ID NO: 45084 - DNA, 20 bp, Artificial Sequence
  Description of Artificial Sequence: Synthetic oligonucleotide
  Target: LAMA2; (+) strand; PAM type: NNNNGHTT; PAM sequence: TCTAGTTT
actaacctgccaaagagaca

SEQ ID NO: 45085 - DNA, 20 bp, Artificial Sequence
  Description of Artificial Sequence: Synthetic oligonucleotide
  Target: LAMA2; (+) strand; PAM type: NNNNGHTT; PAM sequence: ATAGGCTT
gccaaagagacatctagttt

SEQ ID NO: 45086 - DNA, 20 bp, Artificial Sequence
  Description of Artificial Sequence: Synthetic oligonucleotide
  Target: LAMA2; (+) strand; PAM type: NNNNGHTT; PAM sequence: GCTTGATT
aagagacatctagtttatag

SEQ ID NO: 45087 - DNA, 20 bp, Artificial Sequence
  Description of Artificial Sequence: Synthetic oligonucleotide
  Target: LAMA2; (+) strand; PAM type: NNNNGHTT; PAM sequence: AGAAGCTT
attgatgaagtgaggttgga

SEQ ID NO: 45088 - DNA, 20 bp, Artificial Sequence
  Description of Artificial Sequence: Synthetic oligonucleotide
  Target: LAMA2; (+) strand; PAM type: NNNNGHTT; PAM sequence: ATGGGTTT
tccaaataagtgccccagct

SEQ ID NO: 45089 - DNA, 20 bp, Artificial Sequence
  Description of Artificial Sequence: Synthetic oligonucleotide
  Target: LAMA2; (+) strand; PAM type: NNNNGHTT; PAM sequence: TAATGATT
tgggttttttttttttctca

SEQ ID NO: 45090 - DNA, 20 bp, Artificial Sequence
  Description of Artificial Sequence: Synthetic oligonucleotide
  Target: LAMA2; (+) strand; PAM type: NNNNGHTT; PAM sequence: GGATGATT
aatgattctgaaagcctttg

SEQ ID NO: 45091 - DNA, 20 bp, Artificial Sequence
  Description of Artificial Sequence: Synthetic oligonucleotide
  Target: LAMA2; (+) strand; PAM type: NNNNGHTT; PAM sequence: TTAGGATT
ctgaaagcctttgggatgat

SEQ ID NO: 45092 - DNA, 20 bp, Artificial Sequence
  Description of Artificial Sequence: Synthetic oligonucleotide
  Target: LAMA2; (+) strand; PAM type: NNNNGHTT; PAM sequence: ATGAGATT
taattttaaatgggtgatgg

SEQ ID NO: 45093 - DNA, 20 bp, Artificial Sequence
  Description of Artificial Sequence: Synthetic oligonucleotide
  Target: LAMA2; (+) strand; PAM type: NNNNGHTT; PAM sequence: ACCTGTTT
agaagcagggtatagtatga

SEQ ID NO: 45094 - DNA, 20 bp, Artificial Sequence
  Description of Artificial Sequence: Synthetic oligonucleotide
  Target: LAMA2; (+) strand; PAM type: NNNNGHTT; PAM sequence: TGATGTTT
atttaatcaaactctagata

SEQ ID NO: 45095 - DNA, 20 bp, Artificial Sequence
  Description of Artificial Sequence: Synthetic oligonucleotide
  Target: LAMA2; (+) strand; PAM type: NNNNGHTT; PAM sequence: TTTTGTTT
agatatgatgttttgctaac

SEQ ID NO: 45096 - DNA, 20 bp, Artificial Sequence
  Description of Artificial Sequence: Synthetic oligonucleotide
  Target: LAMA2; (+) strand; PAM type: NNNNGHTT; PAM sequence: TGTTGCTT
ttttgctaacttttgttttt

SEQ ID NO: 45097 - DNA, 20 bp, Artificial Sequence
  Description of Artificial Sequence: Synthetic oligonucleotide
  Target: LAMA2; (+) strand; PAM type: NNNNGHTT; PAM sequence: TTTGGTTT
taacttttgttttttgttgc

SEQ ID NO: 45098 - DNA, 20 bp, Artificial Sequence
  Description of Artificial Sequence: Synthetic oligonucleotide
  Target: LAMA2; (+) strand; PAM type: NNNNGHTT; PAM sequence: TGGAGTTT
tttttgttgctttggttttt

SEQ ID NO: 45099 - DNA, 20 bp, Artificial Sequence
  Description of Artificial Sequence: Synthetic oligonucleotide
  Target: LAMA2; (+) strand; PAM type: NNNNGHTT; PAM sequence: AAGTGATT
actctaatttattaagcatg

SEQ ID NO: 45100 - DNA, 20 bp, Artificial Sequence
  Description of Artificial Sequence: Synthetic oligonucleotide
  Target: LAMA2; (+) strand; PAM type: NNNNGHTT; PAM sequence: AGGAGTTT
gtattttaacaagtatttgg

SEQ ID NO: 45101 - DNA, 20 bp, Artificial Sequence
  Description of Artificial Sequence: Synthetic oligonucleotide
  Target: LAMA2; (+) strand; PAM type: NNNNGHTT; PAM sequence: TCTGGATT
attagtgttcctacaagaaa

SEQ ID NO: 45102 - DNA, 20 bp, Artificial Sequence
  Description of Artificial Sequence: Synthetic oligonucleotide
  Target: LAMA2; (+) strand; PAM type: NNNNGHTT; PAM sequence: GACAGTTT
caagaaatctggattatcat

SEQ ID NO: 45103 - DNA, 20 bp, Artificial Sequence
  Description of Artificial Sequence: Synthetic oligonucleotide
  Target: LAMA2; (+) strand; PAM type: NNNNGHTT; PAM sequence: TTTAGATT
ttcctttttctttttttaat

SEQ ID NO: 45104 - DNA, 20 bp, Artificial Sequence
  Description of Artificial Sequence: Synthetic oligonucleotide
  Target: LAMA2; (+) strand; PAM type: NNNNGHTT; PAM sequence: GTGGGTTT
tagatttaggggatacatgt

SEQ ID NO: 45105 - DNA, 20 bp, Artificial Sequence
  Description of Artificial Sequence: Synthetic oligonucleotide
  Target: LAMA2; (+) strand; PAM type: NNNNGHTT; PAM sequence: TGAGGTTT
atgggtatattgtgtaatgg

SEQ ID NO: 45106 - DNA, 20 bp, Artificial Sequence
  Description of Artificial Sequence: Synthetic oligonucleotide
  Target: LAMA2; (+) strand; PAM type: NNNNGHTT; PAM sequence: TTGGGCTT
atattgtgtaatggtgaggt

SEQ ID NO: 45107 - DNA, 20 bp, Artificial Sequence
  Description of Artificial Sequence: Synthetic oligonucleotide
  Target: LAMA2; (+) strand; PAM type: NNNNGHTT; PAM sequence: CTTTGTTT
tgggtgtctattatttccat

SEQ ID NO: 45108 - DNA, 20 bp, Artificial Sequence
  Description of Artificial Sequence: Synthetic oligonucleotide
  Target: LAMA2; (+) strand; PAM type: NNNNGHTT; PAM sequence: CATTGTTT
tctttgtttccatgtgtatc

SEQ ID NO: 45109 - DNA, 20 bp, Artificial Sequence
  Description of Artificial Sequence: Synthetic oligonucleotide
  Target: LAMA2; (+) strand; PAM type: NNNNGHTT; PAM sequence: TTCTGCTT
tgaaaatgtcatattcaatt

SEQ ID NO: 45110 - DNA, 20 bp, Artificial Sequence
  Description of Artificial Sequence: Synthetic oligonucleotide
  Target: LAMA2; (+) strand; PAM type: NNNNGHTT; PAM sequence: ACATGATT
catccatgttgctgcaaagg

SEQ ID NO: 45111 - DNA, 20 bp, Artificial Sequence
  Description of Artificial Sequence: Synthetic oligonucleotide
  Target: LAMA2; (+) strand; PAM type: NNNNGHTT; PAM sequence: CATAGATT
ttttctttgtccaaccaaca

SEQ ID NO: 45112 - DNA, 20 bp, Artificial Sequence
  Description of Artificial Sequence: Synthetic oligonucleotide
  Target: LAMA2; (+) strand; PAM type: NNNNGHTT; PAM sequence: CATAGATT
aacacatagattgttgagca

SEQ ID NO: 45113 - DNA, 20 bp, Artificial Sequence
  Description of Artificial Sequence: Synthetic oligonucleotide
  Target: LAMA2; (+) strand; PAM type: NNNNGHTT; PAM sequence: ATGGGATT
ctttgggtagatacccagta

SEQ ID NO: 45114 - DNA, 20 bp, Artificial Sequence
  Description of Artificial Sequence: Synthetic oligonucleotide
  Target: LAMA2; (+) strand; PAM type: NNNNGHTT; PAM sequence: TATTGATT
tgttctttaagaactctcca

SEQ ID NO: 45115 - DNA, 20 bp, Artificial Sequence
  Description of Artificial Sequence: Synthetic oligonucleotide
  Target: LAMA2; (+) strand; PAM type: NNNNGHTT; PAM sequence: TGTGGTTT
tgtatgacttggtatctcat

SEQ ID NO: 45116 - DNA, 20 bp, Artificial Sequence
  Description of Artificial Sequence: Synthetic oligonucleotide
  Target: LAMA2; (+) strand; PAM type: NNNNGHTT; PAM sequence: TGATGATT
ggttttaatttgcatctccc

SEQ ID NO: 45117 - DNA, 20 bp, Artificial Sequence
  Description of Artificial Sequence: Synthetic oligonucleotide
  Target: LAMA2; (+) strand; PAM type: NNNNGHTT; PAM sequence: ATTTGCTT
gtgatactgagcattttttc

SEQ ID NO: 45118 - DNA, 20 bp, Artificial Sequence
  Description of Artificial Sequence: Synthetic oligonucleotide
  Target: LAMA2; (+) strand; PAM type: NNNNGHTT; PAM sequence: ATTTGTTT
tgcccacttttaatggagct

SEQ ID NO: 45119 - DNA, 20 bp, Artificial Sequence
  Description of Artificial Sequence: Synthetic oligonucleotide
  Target: LAMA2; (+) strand; PAM type: NNNNGHTT; PAM sequence: TGTTGATT
ggagctatttgtttttttct

SEQ ID NO: 45120 - DNA, 20 bp, Artificial Sequence
  Description of Artificial Sequence: Synthetic oligonucleotide
  Target: LAMA2; (+) strand; PAM type: NNNNGHTT; PAM sequence: TTAAGTTT
tttgtttttttcttgttgat

SEQ ID NO: 45121 - DNA, 20 bp, Artificial Sequence
  Description of Artificial Sequence: Synthetic oligonucleotide
  Target: LAMA2; (+) strand; PAM type: NNNNGHTT; PAM sequence: TATAGTTT
tcttgttgatttaagtttct

SEQ ID NO: 45122 - DNA, 20 bp, Artificial Sequence
  Description of Artificial Sequence: Synthetic oligonucleotide
  Target: LAMA2; (+) strand; PAM type: NNNNGHTT; PAM sequence: GTCTGTTT
ttttctgtcattctgcagtt

SEQ ID NO: 45123 - DNA, 20 bp, Artificial Sequence
  Description of Artificial Sequence: Synthetic oligonucleotide
  Target: LAMA2; (+) strand; PAM type: NNNNGHTT; PAM sequence: AATTGTTT
agttgtctgtttattttgtt

SEQ ID NO: 45124 - DNA, 20 bp, Artificial Sequence
  Description of Artificial Sequence: Synthetic oligonucleotide
  Target: LAMA2; (+) strand; PAM type: NNNNGHTT; PAM sequence: CGCCGTTT
tgtttattttgctgtgcaaa

SEQ ID NO: 45125 - DNA, 20 bp, Artificial Sequence
  Description of Artificial Sequence: Synthetic oligonucleotide
  Target: LAMA2; (+) strand; PAM type: NNNNGHTT; PAM sequence: TTTAGTTT
attttgctgtgcaaacgccg

SEQ ID NO: 45126 - DNA, 20 bp, Artificial Sequence
  Description of Artificial Sequence: Synthetic oligonucleotide
  Target: LAMA2; (+) strand; PAM type: NNNNGHTT; PAM sequence: ATTTGCTT
tcatttttttttttttttgc

SEQ ID NO: 45127 - DNA, 20 bp, Artificial Sequence
  Description of Artificial Sequence: Synthetic oligonucleotide
  Target: LAMA2; (+) strand; PAM type: NNNNGHTT; PAM sequence: CTAGGTTT
aatgtcgagaataatttttc

SEQ ID NO: 45128 - DNA, 20 bp, Artificial Sequence
  Description of Artificial Sequence: Synthetic oligonucleotide
  Target: LAMA2; (+) strand; PAM type: NNNNGHTT; PAM sequence: TATGGTTT
tttttcctaggttttctttt

SEQ ID NO: 45129 - DNA, 20 bp, Artificial Sequence
  Description of Artificial Sequence: Synthetic oligonucleotide
  Target: LAMA2; (+) strand; PAM type: NNNNGHTT; PAM sequence: TCCAGTTT
gtatatggtgacacataggg

SEQ ID NO: 45130 - DNA, 20 bp, Artificial Sequence
  Description of Artificial Sequence: Synthetic oligonucleotide
  Target: LAMA2; (+) strand; PAM type: NNNNGHTT; PAM sequence: CATTGCTT
taaatagggtgtcctttccc

SEQ ID NO: 45131 - DNA, 20 bp, Artificial Sequence
  Description of Artificial Sequence: Synthetic oligonucleotide
  Target: LAMA2; (+) strand; PAM type: NNNNGHTT; PAM sequence: CGAAGATT
cttatttttattgactttgt

SEQ ID NO: 45132 - DNA, 20 bp, Artificial Sequence
  Description of Artificial Sequence: Synthetic oligonucleotide
  Target: LAMA2; (+) strand; PAM type: NNNNGHTT; PAM sequence: TATGGATT
tcgaagattagttgtaggaa

SEQ ID NO: 45133 - DNA, 20 bp, Artificial Sequence
  Description of Artificial Sequence: Synthetic oligonucleotide
  Target: LAMA2; (+) strand; PAM type: NNNNGHTT; PAM sequence: TGCTGTTT
ccatttttataccattacca

SEQ ID NO: 45134 - DNA, 20 bp, Artificial Sequence
  Description of Artificial Sequence: Synthetic oligonucleotide
  Target: LAMA2; (+) strand; PAM type: NNNNGHTT; PAM sequence: TTTTGCTT
gatgcccccagcgttgatct

SEQ ID NO: 45135 - DNA, 20 bp, Artificial Sequence
  Description of Artificial Sequence: Synthetic oligonucleotide
  Target: LAMA2; (+) strand; PAM type: NNNNGHTT; PAM sequence: AATTGCTT
gcgttgatctttttgcttag

SEQ ID NO: 45136 - DNA, 20 bp, Artificial Sequence
  Description of Artificial Sequence: Synthetic oligonucleotide
  Target: LAMA2; (+) strand; PAM type: NNNNGHTT; PAM sequence: TTTTGTTT
ctttggttatttgggctcct

SEQ ID NO: 45137 - DNA, 20 bp, Artificial Sequence
  Description of Artificial Sequence: Synthetic oligonucleotide
  Target: LAMA2; (+) strand; PAM type: NNNNGHTT; PAM sequence: AATTGTTT
tgtttccatattaattttag

SEQ ID NO: 45138 - DNA, 20 bp, Artificial Sequence
  Description of Artificial Sequence: Synthetic oligonucleotide
  Target: LAMA2; (+) strand; PAM type: NNNNGHTT; PAM sequence: TAGGGATT
aaatgacattggtaatttga

SEQ ID NO: 45139 - DNA, 20 bp, Artificial Sequence
  Description of Artificial Sequence: Synthetic oligonucleotide
  Target: LAMA2; (+) strand; PAM type: NNNNGHTT; PAM sequence: TGTAGATT
gatagggattgcactgaatc

SEQ ID NO: 45140 - DNA, 20 bp, Artificial Sequence
  Description of Artificial Sequence: Synthetic oligonucleotide
  Target: LAMA2; (+) strand; PAM type: NNNNGHTT; PAM sequence: GATTGTTT
gggattgcactgaatctgta

SEQ ID NO: 45141 - DNA, 20 bp, Artificial Sequence
  Description of Artificial Sequence: Synthetic oligonucleotide
  Target: LAMA2; (+) strand; PAM type: NNNNGHTT; PAM sequence: TATTGATT
tagcatagtcattttaatga

SEQ ID NO: 45142 - DNA, 20 bp, Artificial Sequence
  Description of Artificial Sequence: Synthetic oligonucleotide
  Target: LAMA2; (+) strand; PAM type: NNNNGHTT; PAM sequence: GAATGTTT
tctttctatccatgagcatg

SEQ ID NO: 45143 - DNA, 20 bp, Artificial Sequence
  Description of Artificial Sequence: Synthetic oligonucleotide
  Target: LAMA2; (+) strand; PAM type: NNNNGHTT; PAM sequence: TTATGATT
tttccatttgtccatgtcat

SEQ ID NO: 45144 - DNA, 20 bp, Artificial Sequence
  Description of Artificial Sequence: Synthetic oligonucleotide
  Target: LAMA2; (+) strand; PAM type: NNNNGHTT; PAM sequence: CAGTGTTT
tcatttatgatttctttcct

SEQ ID NO: 45145 - DNA, 20 bp, Artificial Sequence
  Description of Artificial Sequence: Synthetic oligonucleotide
  Target: LAMA2; (+) strand; PAM type: NNNNGHTT; PAM sequence: TACTGCTT
gggaatttaataaaatctaa

SEQ ID NO: 45146 - DNA, 20 bp, Artificial Sequence
  Description of Artificial Sequence: Synthetic oligonucleotide
  Target: LAMA2; (+) strand; PAM type: NNNNGHTT; PAM sequence: CTCTGTTT
attggagtatgtatggttag

SEQ ID NO: 45147 - DNA, 20 bp, Artificial Sequence
  Description of Artificial Sequence: Synthetic oligonucleotide
  Target: LAMA2; (+) strand; PAM type: NNNNGHTT; PAM sequence: ACCTGTTT
tacttaacattttcactgta

SEQ ID NO: 45148 - DNA, 20 bp, Artificial Sequence
  Description of Artificial Sequence: Synthetic oligonucleotide
  Target: LAMA2; (+) strand; PAM type: NNNNGHTT; PAM sequence: TTCTGATT
agagaaacatgtactacttt

SEQ ID NO: 45149 - DNA, 20 bp, Artificial Sequence
  Description of Artificial Sequence: Synthetic oligonucleotide
  Target: LAMA2; (+) strand; PAM type: NNNNGHTT; PAM sequence: TTTGGTTT
ggaatagaatacttactctc

SEQ ID NO: 45150 - DNA, 20 bp, Artificial Sequence
  Description of Artificial Sequence: Synthetic oligonucleotide
  Target: LAMA2; (+) strand; PAM type: NNNNGHTT; PAM sequence: TTTTGTTT
agaatacttactctctttgg

SEQ ID NO: 45151 - DNA, 20 bp, Artificial Sequence
  Description of Artificial Sequence: Synthetic oligonucleotide
  Target: LAMA2; (+) strand; PAM type: NNNNGHTT; PAM sequence: GTTTGCTT
tacttactctctttggtttt

SEQ ID NO: 45152 - DNA, 20 bp, Artificial Sequence
  Description of Artificial Sequence: Synthetic oligonucleotide
  Target: LAMA2; (+) strand; PAM type: NNNNGHTT; PAM sequence: ACTGGATT
gttttgtttgcttctgaaca

SEQ ID NO: 45153 - DNA, 20 bp, Artificial Sequence
  Description of Artificial Sequence: Synthetic oligonucleotide
  Target: LAMA2; (+) strand; PAM type: NNNNGHTT; PAM sequence: GGCTGATT
gacagctatggttcaaattg

SEQ ID NO: 45154 - DNA, 20 bp, Artificial Sequence
  Description of Artificial Sequence: Synthetic oligonucleotide
  Target: LAMA2; (+) strand; PAM type: NNNNGHTT; PAM sequence: TTTTGCTT
ggaaatcattctcttccaca

SEQ ID NO: 45155 - DNA, 20 bp, Artificial Sequence
  Description of Artificial Sequence: Synthetic oligonucleotide
  Target: LAMA2; (+) strand; PAM type: NNNNGHTT; PAM sequence: TTTTGTTT
cacattttgctttgtgccat

SEQ ID NO: 45156 - DNA, 20 bp, Artificial Sequence
  Description of Artificial Sequence: Synthetic oligonucleotide
  Target: LAMA2; (+) strand; PAM type: NNNNGHTT; PAM sequence: TCAGGATT
ctctgacacacccacatagc

SEQ ID NO: 45157 - DNA, 20 bp, Artificial Sequence
  Description of Artificial Sequence: Synthetic oligonucleotide
  Target: LAMA2; (+) strand; PAM type: NNNNGHTT; PAM sequence: CTCTGCTT
attgaatcacttgcaaacat

SEQ ID NO: 45158 - DNA, 20 bp, Artificial Sequence
  Description of Artificial Sequence: Synthetic oligonucleotide
  Target: LAMA2; (+) strand; PAM type: NNNNGHTT; PAM sequence: TTTTGATT
tagaatcattcaaacacaaa

SEQ ID NO: 45159 - DNA, 20 bp, Artificial Sequence
  Description of Artificial Sequence: Synthetic oligonucleotide
  Target: LAMA2; (+) strand; PAM type: NNNNGHTT; PAM sequence: AGGTGATT
ttattcctttgagagatggt

SEQ ID NO: 45160 - DNA, 20 bp, Artificial Sequence
  Description of Artificial Sequence: Synthetic oligonucleotide
  Target: LAMA2; (+) strand; PAM type: NNNNGHTT; PAM sequence: TAGAGATT
gtaaacagtatatgatatct

SEQ ID NO: 45161 - DNA, 20 bp, Artificial Sequence
  Description of Artificial Sequence: Synthetic oligonucleotide
  Target: LAMA2; (+) strand; PAM type: NNNNGHTT; PAM sequence: AATGGCTT
gtgaattgttgcattgactg

SEQ ID NO: 45162 - DNA, 20 bp, Artificial Sequence
  Description of Artificial Sequence: Synthetic oligonucleotide
  Target: LAMA2; (+) strand; PAM type: NNNNGHTT; PAM sequence: AGGTGCTT
tcccgagtagctgcaactac

SEQ ID NO: 45163 - DNA, 20 bp, Artificial Sequence
  Description of Artificial Sequence: Synthetic oligonucleotide
  Target: LAMA2; (+) strand; PAM type: NNNNGHTT; PAM sequence: CAGGGTTT
ttttgtatttttagtagaga

SEQ ID NO: 45164 - DNA, 20 bp, Artificial Sequence
  Description of Artificial Sequence: Synthetic oligonucleotide
  Target: LAMA2; (+) strand; PAM type: NNNNGHTT; PAM sequence: TGTAGTTT
cccaccttggcctcccaaag

SEQ ID NO: 45165 - DNA, 20 bp, Artificial Sequence
  Description of Artificial Sequence: Synthetic oligonucleotide
  Target: LAMA2; (+) strand; PAM type: NNNNGHTT; PAM sequence: GAAAGATT
atttttgctagactacatta

SEQ ID NO: 45166 - DNA, 20 bp, Artificial Sequence
  Description of Artificial Sequence: Synthetic oligonucleotide
  Target: LAMA2; (+) strand; PAM type: NNNNGHTT; PAM sequence: TGATGATT
agatagaggtcattttaaaa

SEQ ID NO: 45167 - DNA, 20 bp, Artificial Sequence
  Description of Artificial Sequence: Synthetic oligonucleotide
  Target: LAMA2; (+) strand; PAM type: NNNNGHTT; PAM sequence: CTAGGTTT
ggcagacatcaaggtcatcc

SEQ ID NO: 45168 - DNA, 20 bp, Artificial Sequence
  Description of Artificial Sequence: Synthetic oligonucleotide
  Target: LAMA2; (+) strand; PAM type: NNNNGHTT; PAM sequence: CATTGCTT
tgatacctgtacagaatagt

SEQ ID NO: 45169 - DNA, 20 bp, Artificial Sequence
  Description of Artificial Sequence: Synthetic oligonucleotide
  Target: LAMA2; (+) strand; PAM type: NNNNGHTT; PAM sequence: ATCTGATT
ctatctctactcctatcatt

SEQ ID NO: 45170 - DNA, 20 bp, Artificial Sequence
  Description of Artificial Sequence: Synthetic oligonucleotide
  Target: LAMA2; (+) strand; PAM type: NNNNGHTT; PAM sequence: CTGTGCTT
attttccttatctctctagt

SEQ ID NO: 45171 - DNA, 20 bp, Artificial Sequence
  Description of Artificial Sequence: Synthetic oligonucleotide
  Target: LAMA2; (+) strand; PAM type: NNNNGHTT; PAM sequence: ACATGCTT
atctctctagtctgtgcttc

SEQ ID NO: 45172 - DNA, 20 bp, Artificial Sequence
  Description of Artificial Sequence: Synthetic oligonucleotide
  Target: LAMA2; (+) strand; PAM type: NNNNGHTT; PAM sequence: GTTGGCTT
ctgccacatttttcatatag

SEQ ID NO: 45173 - DNA, 20 bp, Artificial Sequence
  Description of Artificial Sequence: Synthetic oligonucleotide
  Target: LAMA2; (+) strand; PAM type: NNNNGHTT; PAM sequence: GAATGTTT
tataggttggctttttcttt

SEQ ID NO: 45174 - DNA, 20 bp, Artificial Sequence
  Description of Artificial Sequence: Synthetic oligonucleotide
  Target: LAMA2; (+) strand; PAM type: NNNNGHTT; PAM sequence: GTCTGATT
acatttccaccaaattaaag

SEQ ID NO: 45175 - DNA, 20 bp, Artificial Sequence
  Description of Artificial Sequence: Synthetic oligonucleotide
  Target: LAMA2; (+) strand; PAM type: NNNNGHTT; PAM sequence: ATTAGTTT
tccaccaaattaaaggtctg

SEQ ID NO: 45176 - DNA, 20 bp, Artificial Sequence
  Description of Artificial Sequence: Synthetic oligonucleotide
  Target: LAMA2; (+) strand; PAM type: NNNNGHTT; PAM sequence: GAAAGATT
atttgccatatttttctcaa

SEQ ID NO: 45177 - DNA, 20 bp, Artificial Sequence
  Description of Artificial Sequence: Synthetic oligonucleotide
  Target: LAMA2; (+) strand; PAM type: NNNNGHTT; PAM sequence: GCCTGATT
ttcagacaggtagaaagcag

SEQ ID NO: 45178 - DNA, 20 bp, Artificial Sequence
  Description of Artificial Sequence: Synthetic oligonucleotide
  Target: LAMA2; (+) strand; PAM type: NNNNGHTT; PAM sequence: AAATGTTT
tagaaagcaggcctgattat

SEQ ID NO: 45179 - DNA, 20 bp, Artificial Sequence
  Description of Artificial Sequence: Synthetic oligonucleotide
  Target: LAMA2; (+) strand; PAM type: NNNNGHTT; PAM sequence: AGGAGTTT
tataaatgtttagatcacca

SEQ ID NO: 45180 - DNA, 20 bp, Artificial Sequence
  Description of Artificial Sequence: Synthetic oligonucleotide
  Target: LAMA2; (+) strand; PAM type: NNNNGHTT; PAM sequence: GTGAGTTT
aaaagtctttaaaaaagaaa

SEQ ID NO: 45181 - DNA, 20 bp, Artificial Sequence
  Description of Artificial Sequence: Synthetic oligonucleotide
  Target: LAMA2; (+) strand; PAM type: NNNNGHTT; PAM sequence: GGAAGATT
gataatttcaacaacaatgg

SEQ ID NO: 45182 - DNA, 20 bp, Artificial Sequence
  Description of Artificial Sequence: Synthetic oligonucleotide
  Target: LAMA2; (+) strand; PAM type: NNNNGHTT; PAM sequence: ACCTGTTT
aggaagggcagtggtgctca

SEQ ID NO: 45183 - DNA, 20 bp, Artificial Sequence
  Description of Artificial Sequence: Synthetic oligonucleotide
  Target: LAMA2; (+) strand; PAM type: NNNNGHTT; PAM sequence: ACCAGTTT
caacctgtttggcaccaggg

SEQ ID NO: 45184 - DNA, 20 bp, Artificial Sequence
  Description of Artificial Sequence: Synthetic oligonucleotide
  Target: LAMA2; (+) strand; PAM type: NNNNGHTT; PAM sequence: GATGGTTT
cattgacagggataggggtg

SEQ ID NO: 45185 - DNA, 20 bp, Artificial Sequence
  Description of Artificial Sequence: Synthetic oligonucleotide
  Target: LAMA2; (+) strand; PAM type: NNNNGHTT; PAM sequence: ATTAGATT
tccacctcagatcatcagcc

SEQ ID NO: 45186 - DNA, 20 bp, Artificial Sequence
  Description of Artificial Sequence: Synthetic oligonucleotide
  Target: LAMA2; (+) strand; PAM type: NNNNGHTT; PAM sequence: TGTTGCTT
ttcctgtgagagtctaatgc

SEQ ID NO: 45187 - DNA, 20 bp, Artificial Sequence
  Description of Artificial Sequence: Synthetic oligonucleotide
  Target: LAMA2; (+) strand; PAM type: NNNNGHTT; PAM sequence: TAATGCTT
aggaggcagagctcaggtgg

SEQ ID NO: 45188 - DNA, 20 bp, Artificial Sequence
  Description of Artificial Sequence: Synthetic oligonucleotide
  Target: LAMA2; (+) strand; PAM type: NNNNGHTT; PAM sequence: GCTTGTTT
ggcagagctcaggtggtaat

SEQ ID NO: 45189 - DNA, 20 bp, Artificial Sequence
  Description of Artificial Sequence: Synthetic oligonucleotide
  Target: LAMA2; (+) strand; PAM type: NNNNGHTT; PAM sequence: ATGTGTTT
atatctgaatataaatgttg

SEQ ID NO: 45190 - DNA, 20 bp, Artificial Sequence
  Description of Artificial Sequence: Synthetic oligonucleotide
  Target: LAMA2; (+) strand; PAM type: NNNNGHTT; PAM sequence: TCTGGTTT
caaagtatcttttaacattt

SEQ ID NO: 45191 - DNA, 20 bp, Artificial Sequence
  Description of Artificial Sequence: Synthetic oligonucleotide
  Target: LAMA2; (+) strand; PAM type: NNNNGHTT; PAM sequence: GATGGATT
ggagatgagtatgtggaaag

SEQ ID NO: 45192 - DNA, 20 bp, Artificial Sequence
  Description of Artificial Sequence: Synthetic oligonucleotide
  Target: LAMA2; (+) strand; PAM type: NNNNGHTT; PAM sequence: AACAGTTT
tggctcatgcctgtaatctc

SEQ ID NO: 45193 - DNA, 20 bp, Artificial Sequence
  Description of Artificial Sequence: Synthetic oligonucleotide
  Target: LAMA2; (+) strand; PAM type: NNNNGHTT; PAM sequence: AGGAGTTT
tgggaggatcacttgaggcc

SEQ ID NO: 45194 - DNA, 20 bp, Artificial Sequence
  Description of Artificial Sequence: Synthetic oligonucleotide
  Target: LAMA2; (+) strand; PAM type: NNNNGHTT; PAM sequence: GATGGCTT
aatagaaattagctgtatgt

SEQ ID NO: 45195 - DNA, 20 bp, Artificial Sequence
  Description of Artificial Sequence: Synthetic oligonucleotide
  Target: LAMA2; (+) strand; PAM type: NNNNGHTT; PAM sequence: AGAGGCTT
atcacttgagcctaggaggc

SEQ ID NO: 45196 - DNA, 20 bp, Artificial Sequence
  Description of Artificial Sequence: Synthetic oligonucleotide
  Target: LAMA2; (+) strand; PAM type: NNNNGHTT; PAM sequence: AACTGATT
tattgagtgacagttaaaga

SEQ ID NO: 45197 - DNA, 20 bp, Artificial Sequence
  Description of Artificial Sequence: Synthetic oligonucleotide
  Target: LAMA2; (+) strand; PAM type: NNNNGHTT; PAM sequence: CAGTGATT
gaaggctacttgtctttccc

SEQ ID NO: 45198 - DNA, 20 bp, Artificial Sequence
  Description of Artificial Sequence: Synthetic oligonucleotide
  Target: LAMA2; (+) strand; PAM type: NNNNGHTT; PAM sequence: CAAGGCTT
ttgtcactgctggagaaaac

SEQ ID NO: 45199 - DNA, 20 bp, Artificial Sequence
  Description of Artificial Sequence: Synthetic oligonucleotide
  Target: LAMA2; (+) strand; PAM type: NNNNGHTT; PAM sequence: GTGTGTTT
tgatggaagttagcccatga

SEQ ID NO: 45200 - DNA, 20 bp, Artificial Sequence
  Description of Artificial Sequence: Synthetic oligonucleotide
  Target: LAMA2; (+) strand; PAM type: NNNNGHTT; PAM sequence: TTTTGTTT
atgcaggaggtgataaatat

SEQ ID NO: 45201 - DNA, 20 bp, Artificial Sequence
  Description of Artificial Sequence: Synthetic oligonucleotide
  Target: LAMA2; (+) strand; PAM type: NNNNGHTT; PAM sequence: TTGTGTTT
ctcatttggaattatgaaaa

SEQ ID NO: 45202 - DNA, 20 bp, Artificial Sequence
  Description of Artificial Sequence: Synthetic oligonucleotide
  Target: LAMA2; (+) strand; PAM type: NNNNGHTT; PAM sequence: ATATGTTT
gtgccatttaaattctgggt

SEQ ID NO: 45203 - DNA, 20 bp, Artificial Sequence
  Description of Artificial Sequence: Synthetic oligonucleotide
  Target: LAMA2; (+) strand; PAM type: NNNNGHTT; PAM sequence: TCAAGTTT
tgtttcttcatttgtaaaat

SEQ ID NO: 45204 - DNA, 20 bp, Artificial Sequence
  Description of Artificial Sequence: Synthetic oligonucleotide
  Target: LAMA2; (+) strand; PAM type: NNNNGHTT; PAM sequence: CTAGGCTT
ttgtaaaattcaagtttgaa

SEQ ID NO: 45205 - DNA, 20 bp, Artificial Sequence
  Description of Artificial Sequence: Synthetic oligonucleotide
  Target: LAMA2; (+) strand; PAM type: NNNNGHTT; PAM sequence: TAGTGCTT
gaatttctcattgacttgtg

SEQ ID NO: 45206 - DNA, 20 bp, Artificial Sequence
  Description of Artificial Sequence: Synthetic oligonucleotide
  Target: LAMA2; (+) strand; PAM type: NNNNGHTT; PAM sequence: ACATGATT
agaaaacacttacacatcaa

SEQ ID NO: 45207 - DNA, 20 bp, Artificial Sequence
  Description of Artificial Sequence: Synthetic oligonucleotide
  Target: LAMA2; (+) strand; PAM type: NNNNGHTT; PAM sequence: ATGAGATT
agtcaaagttcttcatttat

SEQ ID NO: 45208 - DNA, 20 bp, Artificial Sequence
  Description of Artificial Sequence: Synthetic oligonucleotide
  Target: LAMA2; (+) strand; PAM type: NNNNGHTT; PAM sequence: TGCTGATT
gtacaagagaaatagtcacc

SEQ ID NO: 45209 - DNA, 20 bp, Artificial Sequence
  Description of Artificial Sequence: Synthetic oligonucleotide
  Target: LAMA2; (+) strand; PAM type: NNNNGHTT; PAM sequence: GTGGGTTT
cacctgctgattgcaggcct

SEQ ID NO: 45210 - DNA, 20 bp, Artificial Sequence
  Description of Artificial Sequence: Synthetic oligonucleotide
  Target: LAMA2; (+) strand; PAM type: NNNNGHTT; PAM sequence: TTTTGCTT
ttcttggaaaaactcagcaa

SEQ ID NO: 45211 - DNA, 20 bp, Artificial Sequence
  Description of Artificial Sequence: Synthetic oligonucleotide
  Target: LAMA2; (+) strand; PAM type: NNNNGHTT; PAM sequence: CTCTGATT
actatctttttgcccagttc

SEQ ID NO: 45212 - DNA, 20 bp, Artificial Sequence
  Description of Artificial Sequence: Synthetic oligonucleotide
  Target: LAMA2; (+) strand; PAM type: NNNNGHTT; PAM sequence: GATAGTTT
attctgaaggaagttgaaaa

SEQ ID NO: 45213 - DNA, 20 bp, Artificial Sequence
  Description of Artificial Sequence: Synthetic oligonucleotide
  Target: LAMA2; (+) strand; PAM type: NNNNGHTT; PAM sequence: ATTTGATT
tatccaacatccttttctac

SEQ ID NO: 45214 - DNA, 20 bp, Artificial Sequence
  Description of Artificial Sequence: Synthetic oligonucleotide
  Target: LAMA2; (+) strand; PAM type: NNNNGHTT; PAM sequence: TATAGATT
ttacatatgtgtcatatttc

SEQ ID NO: 45215 - DNA, 20 bp, Artificial Sequence
  Description of Artificial Sequence: Synthetic oligonucleotide
  Target: LAMA2; (+) strand; PAM type: NNNNGHTT; PAM sequence: TCTAGATT
tgaacactatgtactcgaaa

SEQ ID NO: 45216 - DNA, 20 bp, Artificial Sequence
  Description of Artificial Sequence: Synthetic oligonucleotide
  Target: LAMA2; (+) strand; PAM type: NNNNGHTT; PAM sequence: CAGGGATT
gtggctgatgcctgtaatcc

SEQ ID NO: 45217 - DNA, 20 bp, Artificial Sequence
  Description of Artificial Sequence: Synthetic oligonucleotide
  Target: LAMA2; (+) strand; PAM type: NNNNGHTT; PAM sequence: GCAGGATT
ggtgggagcattgcctgagg

SEQ ID NO: 45218 - DNA, 20 bp, Artificial Sequence
  Description of Artificial Sequence: Synthetic oligonucleotide
  Target: LAMA2; (+) strand; PAM type: NNNNGHTT; PAM sequence: GGAGGATT
ctactcaggaagctgaggca

SEQ ID NO: 45219 - DNA, 20 bp, Artificial Sequence
  Description of Artificial Sequence: Synthetic oligonucleotide
  Target: LAMA2; (+) strand; PAM type: NNNNGHTT; PAM sequence: GATTGCTT
tcaggaagctgaggcaggag

SEQ ID NO: 45220 - DNA, 20 bp, Artificial Sequence
  Description of Artificial Sequence: Synthetic oligonucleotide
  Target: LAMA2; (+) strand; PAM type: NNNNGHTT; PAM sequence: ACATGTTT
aataatgataaattaattta

SEQ ID NO: 45221 - DNA, 20 bp, Artificial Sequence
  Description of Artificial Sequence: Synthetic oligonucleotide
  Target: LAMA2; (+) strand; PAM type: NNNNGHTT; PAM sequence: ATGTGCTT
tgtttgagtagggaggagat

SEQ ID NO: 45222 - DNA, 20 bp, Artificial Sequence
  Description of Artificial Sequence: Synthetic oligonucleotide
  Target: LAMA2; (+) strand; PAM type: NNNNGHTT; PAM sequence: TCCTGTTT
ctcccaaaggcaaccatttt

SEQ ID NO: 45223 - DNA, 20 bp, Artificial Sequence
  Description of Artificial Sequence: Synthetic oligonucleotide
  Target: LAMA2; (+) strand; PAM type: NNNNGHTT; PAM sequence: AAAAGATT
ttttcctgttttattttcct

SEQ ID NO: 45224 - DNA, 20 bp, Artificial Sequence
  Description of Artificial Sequence: Synthetic oligonucleotide
  Target: LAMA2; (+) strand; PAM type: NNNNGHTT; PAM sequence: GTATGTTT
ttattttcctaaaagattag

SEQ ID NO: 45225 - DNA, 20 bp, Artificial Sequence
  Description of Artificial Sequence: Synthetic oligonucleotide
  Target: LAMA2; (+) strand; PAM type: NNNNGHTT; PAM sequence: CATTGTTT
ttttatgttgaatagtattt

SEQ ID NO: 45226 - DNA, 20 bp, Artificial Sequence
  Description of Artificial Sequence: Synthetic oligonucleotide
  Target: LAMA2; (+) strand; PAM type: NNNNGHTT; PAM sequence: CACAGTTT
atttcattgtttaaatacac

SEQ ID NO: 45227 - DNA, 20 bp, Artificial Sequence
  Description of Artificial Sequence: Synthetic oligonucleotide
  Target: LAMA2; (+) strand; PAM type: NNNNGHTT; PAM sequence: AGGTGTTT
cccccattcatggaaaccta

SEQ ID NO: 45228 - DNA, 20 bp, Artificial Sequence
  Description of Artificial Sequence: Synthetic oligonucleotide
  Target: LAMA2; (+) strand; PAM type: NNNNGHTT; PAM sequence: CCAGGTTT
catggaaacctaaggtgttt

SEQ ID NO: 45229 - DNA, 20 bp, Artificial Sequence
  Description of Artificial Sequence: Synthetic oligonucleotide
  Target: LAMA2; (+) strand; PAM type: NNNNGHTT; PAM sequence: TTTTGTTT
ataaaaacttctatgaacat

SEQ ID NO: 45230 - DNA, 20 bp, Artificial Sequence
  Description of Artificial Sequence: Synthetic oligonucleotide
  Target: LAMA2; (+) strand; PAM type: NNNNGHTT; PAM sequence: ACCTGTTT
ttttatatttattaaaaact

SEQ ID NO: 45231 - DNA, 20 bp, Artificial Sequence
  Description of Artificial Sequence: Synthetic oligonucleotide
  Target: LAMA2; (+) strand; PAM type: NNNNGHTT; PAM sequence: TTTTGATT
ccaacagcaatgcagcagac

SEQ ID NO: 45232 - DNA, 20 bp, Artificial Sequence
  Description of Artificial Sequence: Synthetic oligonucleotide
  Target: LAMA2; (+) strand; PAM type: NNNNGHTT; PAM sequence: ATGTGATT
atttacaaacatatgcaatg

SEQ ID NO: 45233 - DNA, 20 bp, Artificial Sequence
  Description of Artificial Sequence: Synthetic oligonucleotide
  Target: LAMA2; (+) strand; PAM type: NNNNGHTT; PAM sequence: AGTGGATT
attttctattaatcacatgt

SEQ ID NO: 45234 - DNA, 20 bp, Artificial Sequence
  Description of Artificial Sequence: Synthetic oligonucleotide
  Target: LAMA2; (+) strand; PAM type: NNNNGHTT; PAM sequence: TATAGTTT
tatgtgtgtatgtccttgag

SEQ ID NO: 45235 - DNA, 20 bp, Artificial Sequence
  Description of Artificial Sequence: Synthetic oligonucleotide
  Target: LAMA2; (+) strand; PAM type: NNNNGHTT; PAM sequence: AGCTGCTT
gtccttgagtatagtttaaa

SEQ ID NO: 45236 - DNA, 20 bp, Artificial Sequence
  Description of Artificial Sequence: Synthetic oligonucleotide
  Target: LAMA2; (+) strand; PAM type: NNNNGHTT; PAM sequence: AGATGCTT
atagtttaaaagctgcttga

SEQ ID NO: 45237 - DNA, 20 bp, Artificial Sequence
  Description of Artificial Sequence: Synthetic oligonucleotide
  Target: LAMA2; (+) strand; PAM type: NNNNGHTT; PAM sequence: GCTTGTTT
tttaaaagctgcttgaagat

SEQ ID NO: 45238 - DNA, 20 bp, Artificial Sequence
  Description of Artificial Sequence: Synthetic oligonucleotide
  Target: LAMA2; (+) strand; PAM type: NNNNGHTT; PAM sequence: GTTTGCTT
aaagctgcttgaagatgctt

SEQ ID NO: 45239 - DNA, 20 bp, Artificial Sequence
  Description of Artificial Sequence: Synthetic oligonucleotide
  Target: LAMA2; (+) strand; PAM type: NNNNGHTT; PAM sequence: CGTTGATT
gttgatctcagtacaatctc

SEQ ID NO: 45240 - DNA, 20 bp, Artificial Sequence
  Description of Artificial Sequence: Synthetic oligonucleotide
  Target: LAMA2; (+) strand; PAM type: NNNNGHTT; PAM sequence: GATTGCTT
atctcagtacaatctccgtt

SEQ ID NO: 45241 - DNA, 20 bp, Artificial Sequence
  Description of Artificial Sequence: Synthetic oligonucleotide
  Target: LAMA2; (+) strand; PAM type: NNNNGHTT; PAM sequence: TATTGCTT
cataagtatgagttactttt

SEQ ID NO: 45242 - DNA, 20 bp, Artificial Sequence
  Description of Artificial Sequence: Synthetic oligonucleotide
  Target: LAMA2; (+) strand; PAM type: NNNNGHTT; PAM sequence: CTGGGTTT
aatagcacattgtagaaact

SEQ ID NO: 45243 - DNA, 20 bp, Artificial Sequence
  Description of Artificial Sequence: Synthetic oligonucleotide
  Target: LAMA2; (+) strand; PAM type: NNNNGHTT; PAM sequence: TTCAGTTT
tgcagaacctaaaatctctg

SEQ ID NO: 45244 - DNA, 20 bp, Artificial Sequence
  Description of Artificial Sequence: Synthetic oligonucleotide
  Target: LAMA2; (+) strand; PAM type: NNNNGHTT; PAM sequence: CAGAGTTT
gcatcagtgagcaatttgga

SEQ ID NO: 45245 - DNA, 20 bp, Artificial Sequence
  Description of Artificial Sequence: Synthetic oligonucleotide
  Target: LAMA2; (+) strand; PAM type: NNNNGHTT; PAM sequence: CACAGATT
caatttggacagagtttatg

SEQ ID NO: 45246 - DNA, 20 bp, Artificial Sequence
  Description of Artificial Sequence: Synthetic oligonucleotide
  Target: LAMA2; (+) strand; PAM type: NNNNGHTT; PAM sequence: TTTAGTTT
ttacacctgctgtggctatt

SEQ ID NO: 45247 - DNA, 20 bp, Artificial Sequence
  Description of Artificial Sequence: Synthetic oligonucleotide
  Target: LAMA2; (+) strand; PAM type: NNNNGHTT; PAM sequence: GTGGGTTT
ttcttcaagccagtaaaact

SEQ ID NO: 45248 - DNA, 20 bp, Artificial Sequence
  Description of Artificial Sequence: Synthetic oligonucleotide
  Target: LAMA2; (+) strand; PAM type: NNNNGHTT; PAM sequence: TTGAGTTT
gtaaaactgtgggtttctat

SEQ ID NO: 45249 - DNA, 20 bp, Artificial Sequence
  Description of Artificial Sequence: Synthetic oligonucleotide
  Target: LAMA2; (+) strand; PAM type: NNNNGHTT; PAM sequence: CCTGGCTT
ttctaagtattcatagtctt

SEQ ID NO: 45250 - DNA, 20 bp, Artificial Sequence
  Description of Artificial Sequence: Synthetic oligonucleotide
  Target: LAMA2; (+) strand; PAM type: NNNNGHTT; PAM sequence: TGGTGTTT
ttaggtgcactccagatatc

SEQ ID NO: 45251 - DNA, 20 bp, Artificial Sequence
  Description of Artificial Sequence: Synthetic oligonucleotide
  Target: LAMA2; (+) strand; PAM type: NNNNGHTT; PAM sequence: GGGAGCTT
aatttatagctgttatctct

SEQ ID NO: 45252 - DNA, 20 bp, Artificial Sequence
  Description of Artificial Sequence: Synthetic oligonucleotide
  Target: LAMA2; (+) strand; PAM type: NNNNGHTT; PAM sequence: AGTAGATT
ttaaaaatagaacctccata

SEQ ID NO: 45253 - DNA, 20 bp, Artificial Sequence
  Description of Artificial Sequence: Synthetic oligonucleotide
  Target: LAMA2; (+) strand; PAM type: NNNNGHTT; PAM sequence: AAATGTTT
acctccataagtagatttta

SEQ ID NO: 45254 - DNA, 20 bp, Artificial Sequence
  Description of Artificial Sequence: Synthetic oligonucleotide
  Target: LAMA2; (+) strand; PAM type: NNNNGHTT; PAM sequence: GTGGGATT
ctgccatttgaaaccaaaaa

SEQ ID NO: 45255 - DNA, 20 bp, Artificial Sequence
  Description of Artificial Sequence: Synthetic oligonucleotide
  Target: LAMA2; (+) strand; PAM type: NNNNGHTT; PAM sequence: AGGTGATT
aaataaaaacagtggaagtt

SEQ ID NO: 45256 - DNA, 20 bp, Artificial Sequence
  Description of Artificial Sequence: Synthetic oligonucleotide
  Target: LAMA2; (+) strand; PAM type: NNNNGHTT; PAM sequence: AAATGTTT
gaagttaggtgatttttttc

SEQ ID NO: 45257 - DNA, 20 bp, Artificial Sequence
  Description of Artificial Sequence: Synthetic oligonucleotide
  Target: LAMA2; (+) strand; PAM type: NNNNGHTT; PAM sequence: TTCAGTTT
ttgccatattgtagcagaat

SEQ ID NO: 45258 - DNA, 20 bp, Artificial Sequence
  Description of Artificial Sequence: Synthetic oligonucleotide
  Target: LAMA2; (+) strand; PAM type: NNNNGHTT; PAM sequence: TATTGTTT
aatacatagtataaacagaa

SEQ ID NO: 45259 - DNA, 20 bp, Artificial Sequence
  Description of Artificial Sequence: Synthetic oligonucleotide
  Target: LAMA2; (+) strand; PAM type: NNNNGHTT; PAM sequence: GTTTGATT
catagtataaacagaatatt

SEQ ID NO: 45260 - DNA, 20 bp, Artificial Sequence
  Description of Artificial Sequence: Synthetic oligonucleotide
  Target: LAMA2; (+) strand; PAM type: NNNNGHTT; PAM sequence: ACTGGCTT
tagttgtatggataatgatc

SEQ ID NO: 45261 - DNA, 20 bp, Artificial Sequence
  Description of Artificial Sequence: Synthetic oligonucleotide
  Target: LAMA2; (+) strand; PAM type: NNNNGHTT; PAM sequence: TAATGTTT
ttatagttaatttacactcc

SEQ ID NO: 45262 - DNA, 20 bp, Artificial Sequence
  Description of Artificial Sequence: Synthetic oligonucleotide
  Target: LAMA2; (+) strand; PAM type: NNNNGHTT; PAM sequence: TGGTGCTT
tatggaaataaatattgccc

SEQ ID NO: 45263 - DNA, 20 bp, Artificial Sequence
  Description of Artificial Sequence: Synthetic oligonucleotide
  Target: LAMA2; (+) strand; PAM type: NNNNGHTT; PAM sequence: AATAGATT
ggaataagtaggcacagcat

SEQ ID NO: 45264 - DNA, 20 bp, Artificial Sequence
  Description of Artificial Sequence: Synthetic oligonucleotide
  Target: LAMA2; (+) strand; PAM type: NNNNGHTT; PAM sequence: TGAAGATT
caatctataataagacatgc

SEQ ID NO: 45265 - DNA, 20 bp, Artificial Sequence
  Description of Artificial Sequence: Synthetic oligonucleotide
  Target: LAMA2; (+) strand; PAM type: NNNNGHTT; PAM sequence: TATTGATT
agattcaataaaagctcaga

SEQ ID NO: 45266 - DNA, 20 bp, Artificial Sequence
  Description of Artificial Sequence: Synthetic oligonucleotide
  Target: LAMA2; (+) strand; PAM type: NNNNGHTT; PAM sequence: ATATGCTT
ttggagacctttgctgacca

SEQ ID NO: 45267 - DNA, 20 bp, Artificial Sequence
  Description of Artificial Sequence: Synthetic oligonucleotide
  Target: LAMA2; (+) strand; PAM type: NNNNGHTT; PAM sequence: AACCGATT
ctttgctgaccaatatgctt

SEQ ID NO: 45268 - DNA, 20 bp, Artificial Sequence
  Description of Artificial Sequence: Synthetic oligonucleotide
  Target: LAMA2; (+) strand; PAM type: NNNNGHTT; PAM sequence: TTTAGTTT
atgtaaattttattagtgtc

SEQ ID NO: 45269 - DNA, 20 bp, Artificial Sequence
  Description of Artificial Sequence: Synthetic oligonucleotide
  Target: LAMA2; (+) strand; PAM type: NNNNGHTT; PAM sequence: ATTTGTTT
ggcatggtgagggataagtt

SEQ ID NO: 45270 - DNA, 20 bp, Artificial Sequence
  Description of Artificial Sequence: Synthetic oligonucleotide
  Target: LAMA2; (+) strand; PAM type: NNNNGHTT; PAM sequence: TAAAGATT
ggataagttatttgttttat

SEQ ID NO: 45271 - DNA, 20 bp, Artificial Sequence
  Description of Artificial Sequence: Synthetic oligonucleotide
  Target: LAMA2; (+) strand; PAM type: NNNNGHTT; PAM sequence: ATAAGCTT
ttgttttattaaagatttaa

SEQ ID NO: 45272 - DNA, 20 bp, Artificial Sequence
  Description of Artificial Sequence: Synthetic oligonucleotide
  Target: LAMA2; (+) strand; PAM type: NNNNGHTT; PAM sequence: ACCAGATT
ttaaataagctttaccaagg

SEQ ID NO: 45273 - DNA, 20 bp, Artificial Sequence
  Description of Artificial Sequence: Synthetic oligonucleotide
  Target: LAMA2; (+) strand; PAM type: NNNNGHTT; PAM sequence: GTAAGCTT
aggccctgacaagaagtctt

SEQ ID NO: 45274 - DNA, 20 bp, Artificial Sequence
  Description of Artificial Sequence: Synthetic oligonucleotide
  Target: LAMA2; (+) strand; PAM type: NNNNGHTT; PAM sequence: AATAGCTT
aaataatatgaagaatatag

SEQ ID NO: 45275 - DNA, 20 bp, Artificial Sequence
  Description of Artificial Sequence: Synthetic oligonucleotide
  Target: LAMA2; (+) strand; PAM type: NNNNGHTT; PAM sequence: CAATGTTT
atatagaatagcttcagaat

SEQ ID NO: 45276 - DNA, 20 bp, Artificial Sequence
  Description of Artificial Sequence: Synthetic oligonucleotide
  Target: LAMA2; (+) strand; PAM type: NNNNGHTT; PAM sequence: GTATGCTT
tctgtaatccctttgtagct

SEQ ID NO: 45277 - DNA, 20 bp, Artificial Sequence
  Description of Artificial Sequence: Synthetic oligonucleotide
  Target: LAMA2; (+) strand; PAM type: NNNNGHTT; PAM sequence: CTTGGCTT
ctttatccctggtctctttt

SEQ ID NO: 45278 - DNA, 20 bp, Artificial Sequence
  Description of Artificial Sequence: Synthetic oligonucleotide
  Target: LAMA2; (+) strand; PAM type: NNNNGHTT; PAM sequence: CCATGATT
tctcttttcttggcttcctc

SEQ ID NO: 45279 - DNA, 20 bp, Artificial Sequence
  Description of Artificial Sequence: Synthetic oligonucleotide
  Target: LAMA2; (+) strand; PAM type: NNNNGHTT; PAM sequence: TGAAGTTT
aaaaagtgacaatgccctgg

SEQ ID NO: 45280 - DNA, 20 bp, Artificial Sequence
  Description of Artificial Sequence: Synthetic oligonucleotide
  Target: LAMA2; (+) strand; PAM type: NNNNGHTT; PAM sequence: GATGGCTT
aaatgttagcacctgcctga

SEQ ID NO: 45281 - DNA, 20 bp, Artificial Sequence
  Description of Artificial Sequence: Synthetic oligonucleotide
  Target: LAMA2; (+) strand; PAM type: NNNNGHTT; PAM sequence: GACTGCTT
gaagggggcagatggagcta

SEQ ID NO: 45282 - DNA, 20 bp, Artificial Sequence
  Description of Artificial Sequence: Synthetic oligonucleotide
  Target: LAMA2; (+) strand; PAM type: NNNNGHTT; PAM sequence: CAGTGCTT
tactaacagtgacaaataag

SEQ ID NO: 45283 - DNA, 20 bp, Artificial Sequence
  Description of Artificial Sequence: Synthetic oligonucleotide
  Target: LAMA2; (+) strand; PAM type: NNNNGHTT; PAM sequence: ATAGGTTT
tggataatttatagagaaaa

SEQ ID NO: 45284 - DNA, 20 bp, Artificial Sequence
  Description of Artificial Sequence: Synthetic oligonucleotide
  Target: LAMA2; (+) strand; PAM type: NNNNGHTT; PAM sequence: TCATGATT
agcatgagaaaaacctgccc

SEQ ID NO: 45285 - DNA, 20 bp, Artificial Sequence
  Description of Artificial Sequence: Synthetic oligonucleotide
  Target: LAMA2; (+) strand; PAM type: NNNNGHTT; PAM sequence: TGGGGATT
cgtgtccctcccacaacaca

SEQ ID NO: 45286 - DNA, 20 bp, Artificial Sequence
  Description of Artificial Sequence: Synthetic oligonucleotide
  Target: LAMA2; (+) strand; PAM type: NNNNGHTT; PAM sequence: ATGAGATT
tacaggcgctacaattcaag

SEQ ID NO: 45287 - DNA, 20 bp, Artificial Sequence
  Description of Artificial Sequence: Synthetic oligonucleotide
  Target: LAMA2; (+) strand; PAM type: NNNNGHTT; PAM sequence: TTATGTTT
cagccaaaccatatccacca

SEQ ID NO: 45288 - DNA, 20 bp, Artificial Sequence
  Description of Artificial Sequence: Synthetic oligonucleotide
  Target: LAMA2; (+) strand; PAM type: NNNNGHTT; PAM sequence: TACAGATT
atcttatatgttgaaacaat

SEQ ID NO: 45289 - DNA, 20 bp, Artificial Sequence
  Description of Artificial Sequence: Synthetic oligonucleotide
  Target: LAMA2; (+) strand; PAM type: NNNNGHTT; PAM sequence: ATAAGCTT
ctgactcactcatcatttac

SEQ ID NO: 45290 - DNA, 20 bp, Artificial Sequence
  Description of Artificial Sequence: Synthetic oligonucleotide
  Target: LAMA2; (+) strand; PAM type: NNNNGHTT; PAM sequence: ATATGTTT
tatgccattccctctgcctg

SEQ ID NO: 45291 - DNA, 20 bp, Artificial Sequence
  Description of Artificial Sequence: Synthetic oligonucleotide
  Target: LAMA2; (+) strand; PAM type: NNNNGHTT; PAM sequence: GTTTGTTT
ccattccctctgcctgatat

SEQ ID NO: 45292 - DNA, 20 bp, Artificial Sequence
  Description of Artificial Sequence: Synthetic oligonucleotide
  Target: LAMA2; (+) strand; PAM type: NNNNGHTT; PAM sequence: TCAAGATT
tttctccttgaaaattcagc

SEQ ID NO: 45293 - DNA, 20 bp, Artificial Sequence
  Description of Artificial Sequence: Synthetic oligonucleotide
  Target: LAMA2; (+) strand; PAM type: NNNNGHTT; PAM sequence: GGAAGTTT
caaacgtcacaaaattgtta

SEQ ID NO: 45294 - DNA, 20 bp, Artificial Sequence
  Description of Artificial Sequence: Synthetic oligonucleotide
  Target: LAMA2; (+) strand; PAM type: NNNNGHTT; PAM sequence: TAAGGCTT
aattgttaggaagttttcac

SEQ ID NO: 45295 - DNA, 20 bp, Artificial Sequence
  Description of Artificial Sequence: Synthetic oligonucleotide
  Target: LAMA2; (+) strand; PAM type: NNNNGHTT; PAM sequence: GAATGTTT
tgaaataaataatactttat

SEQ ID NO: 45296 - DNA, 20 bp, Artificial Sequence
  Description of Artificial Sequence: Synthetic oligonucleotide
  Target: LAMA2; (+) strand; PAM type: NNNNGHTT; PAM sequence: ATTAGCTT
tttctctaaccaacaattac

SEQ ID NO: 45297 - DNA, 20 bp, Artificial Sequence
  Description of Artificial Sequence: Synthetic oligonucleotide
  Target: LAMA2; (+) strand; PAM type: NNNNGHTT; PAM sequence: TAGTGATT
atcaggaacaataaatgaga

SEQ ID NO: 45298 - DNA, 20 bp, Artificial Sequence
  Description of Artificial Sequence: Synthetic oligonucleotide
  Target: LAMA2; (+) strand; PAM type: NNNNGHTT; PAM sequence: ACAGGATT
ggggtcactattttggagga

SEQ ID NO: 45299 - DNA, 20 bp, Artificial Sequence
  Description of Artificial Sequence: Synthetic oligonucleotide
  Target: LAMA2; (+) strand; PAM type: NNNNGHTT; PAM sequence: AAGGGATT
tattttggaggaacaggatt

SEQ ID NO: 45300 - DNA, 20 bp, Artificial Sequence
  Description of Artificial Sequence: Synthetic oligonucleotide
  Target: LAMA2; (+) strand; PAM type: NNNNGHTT; PAM sequence: AAAAGATT
taaggagggagaaaagaaag

SEQ ID NO: 45301 - DNA, 20 bp, Artificial Sequence
  Description of Artificial Sequence: Synthetic oligonucleotide
  Target: LAMA2; (+) strand; PAM type: NNNNGHTT; PAM sequence: GAGTGATT
tttacctgtggaattttttg

SEQ ID NO: 45302 - DNA, 20 bp, Artificial Sequence
  Description of Artificial Sequence: Synthetic oligonucleotide
  Target: LAMA2; (+) strand; PAM type: NNNNGHTT; PAM sequence: TAAAGATT
attttttggagtgattacaa

SEQ ID NO: 45303 - DNA, 20 bp, Artificial Sequence
  Description of Artificial Sequence: Synthetic oligonucleotide
  Target: LAMA2; (+) strand; PAM type: NNNNGHTT; PAM sequence: TTTTGTTT
atttactttcttttttaatt

SEQ ID NO: 45304 - DNA, 20 bp, Artificial Sequence
  Description of Artificial Sequence: Synthetic oligonucleotide
  Target: LAMA2; (+) strand; PAM type: NNNNGHTT; PAM sequence: GCTGGTTT
caaggtagcactagatctat

SEQ ID NO: 45305 - DNA, 20 bp, Artificial Sequence
  Description of Artificial Sequence: Synthetic oligonucleotide
  Target: LAMA2; (+) strand; PAM type: NNNNGHTT; PAM sequence: GAGTGATT
attgtagatgccattcagta

SEQ ID NO: 45306 - DNA, 20 bp, Artificial Sequence
  Description of Artificial Sequence: Synthetic oligonucleotide
  Target: LAMA2; (+) strand; PAM type: NNNNGHTT; PAM sequence: GCCAGATT
ttaagaggatagactctgga

SEQ ID NO: 45307 - DNA, 20 bp, Artificial Sequence
  Description of Artificial Sequence: Synthetic oligonucleotide
  Target: LAMA2; (+) strand; PAM type: NNNNGHTT; PAM sequence: GATTGCTT
gaggatagactctggagcca

SEQ ID NO: 45308 - DNA, 20 bp, Artificial Sequence
  Description of Artificial Sequence: Synthetic oligonucleotide
  Target: LAMA2; (+) strand; PAM type: NNNNGHTT; PAM sequence: GGATGTTT
tagtggtatgaagctcatgt

SEQ ID NO: 45309 - DNA, 20 bp, Artificial Sequence
  Description of Artificial Sequence: Synthetic oligonucleotide
  Target: LAMA2; (+) strand; PAM type: NNNNGHTT; PAM sequence: TAGTGCTT
gtaggaacagtgtctgacaa

SEQ ID NO: 45310 - DNA, 20 bp, Artificial Sequence
  Description of Artificial Sequence: Synthetic oligonucleotide
  Target: LAMA2; (+) strand; PAM type: NNNNGHTT; PAM sequence: TTATGATT
acattcaacgatgctggcta

SEQ ID NO: 45311 - DNA, 20 bp, Artificial Sequence
  Description of Artificial Sequence: Synthetic oligonucleotide
  Target: LAMA2; (+) strand; PAM type: NNNNGHTT; PAM sequence: ATTCGTTT
ccaatatttataatctaatt

SEQ ID NO: 45312 - DNA, 20 bp, Artificial Sequence
  Description of Artificial Sequence: Synthetic oligonucleotide
  Target: LAMA2; (+) strand; PAM type: NNNNGHTT; PAM sequence: CCAAGCTT
tactctgtccctactatgtg

SEQ ID NO: 45313 - DNA, 20 bp, Artificial Sequence
  Description of Artificial Sequence: Synthetic oligonucleotide
  Target: LAMA2; (+) strand; PAM type: NNNNGHTT; PAM sequence: ATGAGATT
tctcagtaaaatatcaagcc

SEQ ID NO: 45314 - DNA, 20 bp, Artificial Sequence
  Description of Artificial Sequence: Synthetic oligonucleotide
  Target: LAMA2; (+) strand; PAM type: NNNNGHTT; PAM sequence: GAAGGTTT
aagccatgagatttagtcag

SEQ ID NO: 45315 - DNA, 20 bp, Artificial Sequence
  Description of Artificial Sequence: Synthetic oligonucleotide
  Target: LAMA2; (+) strand; PAM type: NNNNGHTT; PAM sequence: CTTTGCTT
ctctttctttctccttcctt

SEQ ID NO: 45316 - DNA, 20 bp, Artificial Sequence
  Description of Artificial Sequence: Synthetic oligonucleotide
  Target: LAMA2; (+) strand; PAM type: NNNNGHTT; PAM sequence: TCAGGTTT
gctcaagcaattctcctgcc

SEQ ID NO: 45317 - DNA, 20 bp, Artificial Sequence
  Description of Artificial Sequence: Synthetic oligonucleotide
  Target: LAMA2; (+) strand; PAM type: NNNNGHTT; PAM sequence: CTGGGATT
tgcctcaggtttccaagtag

SEQ ID NO: 45318 - DNA, 20 bp, Artificial Sequence
  Description of Artificial Sequence: Synthetic oligonucleotide
  Target: LAMA2; (+) strand; PAM type: NNNNGHTT; PAM sequence: CAGGGTTT
ttttgtatttttagtagaga

SEQ ID NO: 45319 - DNA, 20 bp, Artificial Sequence
  Description of Artificial Sequence: Synthetic oligonucleotide
  Target: LAMA2; (+) strand; PAM type: NNNNGHTT; PAM sequence: CTGGGATT
cacctcagcctcccaaagtg

SEQ ID NO: 45320 - DNA, 20 bp, Artificial Sequence
  Description of Artificial Sequence: Synthetic oligonucleotide
  Target: LAMA2; (+) strand; PAM type: NNNNGHTT; PAM sequence: AACAGATT
tcaaatgtactttctccaag

SEQ ID NO: 45321 - DNA, 20 bp, Artificial Sequence
  Description of Artificial Sequence: Synthetic oligonucleotide
  Target: LAMA2; (+) strand; PAM type: NNNNGHTT; PAM sequence: AGTGGCTT
aacagatttttcagttaaag

SEQ ID NO: 45322 - DNA, 20 bp, Artificial Sequence
  Description of Artificial Sequence: Synthetic oligonucleotide
  Target: LAMA2; (+) strand; PAM type: NNNNGHTT; PAM sequence: AATGGCTT
gtatgatcatggaccactat

SEQ ID NO: 45323 - DNA, 20 bp, Artificial Sequence
  Description of Artificial Sequence: Synthetic oligonucleotide
  Target: LAMA2; (+) strand; PAM type: NNNNGHTT; PAM sequence: GCTTGTTT
gatcatggaccactataatg

SEQ ID NO: 45324 - DNA, 20 bp, Artificial Sequence
  Description of Artificial Sequence: Synthetic oligonucleotide
  Target: LAMA2; (+) strand; PAM type: NNNNGHTT; PAM sequence: TATTGCTT
atggcttgtttctggcaata

SEQ ID NO: 45325 - DNA, 20 bp, Artificial Sequence
  Description of Artificial Sequence: Synthetic oligonucleotide
  Target: LAMA2; (+) strand; PAM type: NNNNGHTT; PAM sequence: AGAAGTTT
tcttctctagtctgggataa

SEQ ID NO: 45326 - DNA, 20 bp, Artificial Sequence
  Description of Artificial Sequence: Synthetic oligonucleotide
  Target: LAMA2; (+) strand; PAM type: NNNNGHTT; PAM sequence: GGAAGATT
aaatatctgaaatggaagat

SEQ ID NO: 45327 - DNA, 20 bp, Artificial Sequence
  Description of Artificial Sequence: Synthetic oligonucleotide
  Target: LAMA2; (+) strand; PAM type: NNNNGHTT; PAM sequence: AGAAGATT
cttttaccaataacttcaac

SEQ ID NO: 45328 - DNA, 20 bp, Artificial Sequence
  Description of Artificial Sequence: Synthetic oligonucleotide
  Target: LAMA2; (+) strand; PAM type: NNNNGHTT; PAM sequence: TTGTGTTT
caataacttcaacagaagat

SEQ ID NO: 45329 - DNA, 20 bp, Artificial Sequence
  Description of Artificial Sequence: Synthetic oligonucleotide
  Target: LAMA2; (+) strand; PAM type: NNNNGHTT; PAM sequence: AGAGGCTT
ttagagataaaaaattaaaa

SEQ ID NO: 45330 - DNA, 20 bp, Artificial Sequence
  Description of Artificial Sequence: Synthetic oligonucleotide
  Target: LAMA2; (+) strand; PAM type: NNNNGHTT; PAM sequence: AATTGCTT
tccgaaaaatattttatctc

SEQ ID NO: 45331 - DNA, 20 bp, Artificial Sequence
  Description of Artificial Sequence: Synthetic oligonucleotide
  Target: LAMA2; (+) strand; PAM type: NNNNGHTT; PAM sequence: CTTTGTTT
aaaatgtatcaaaatcctaa

SEQ ID NO: 45332 - DNA, 20 bp, Artificial Sequence
  Description of Artificial Sequence: Synthetic oligonucleotide
  Target: LAMA2; (+) strand; PAM type: NNNNGHTT; PAM sequence: TCAGGTTT
ccttcatttgtccatctttt

SEQ ID NO: 45333 - DNA, 20 bp, Artificial Sequence
  Description of Artificial Sequence: Synthetic oligonucleotide
  Target: LAMA2; (+) strand; PAM type: NNNNGHTT; PAM sequence: TCTTGCTT
ttattccctgctgtcctgaa

SEQ ID NO: 45334 - DNA, 20 bp, Artificial Sequence
  Description of Artificial Sequence: Synthetic oligonucleotide
  Target: LAMA2; (+) strand; PAM type: NNNNGHTT; PAM sequence: AAGGGTTT
ggccaagttgcattaaattc

SEQ ID NO: 45335 - DNA, 20 bp, Artificial Sequence
  Description of Artificial Sequence: Synthetic oligonucleotide
  Target: LAMA2; (+) strand; PAM type: NNNNGHTT; PAM sequence: AAGAGCTT
ctagaattctttttaccatt

SEQ ID NO: 45336 - DNA, 20 bp, Artificial Sequence
  Description of Artificial Sequence: Synthetic oligonucleotide
  Target: LAMA2; (+) strand; PAM type: NNNNGHTT; PAM sequence: CAGTGATT
ttcctgctatgtgctaagta

SEQ ID NO: 45337 - DNA, 20 bp, Artificial Sequence
  Description of Artificial Sequence: Synthetic oligonucleotide
  Target: LAMA2; (+) strand; PAM type: NNNNGHTT; PAM sequence: AGATGATT
gtgctaagtacagtgattgg

SEQ ID NO: 45338 - DNA, 20 bp, Artificial Sequence
  Description of Artificial Sequence: Synthetic oligonucleotide
  Target: LAMA2; (+) strand; PAM type: NNNNGHTT; PAM sequence: TTGGGTTT
ctgaaggcctgtggcagtca

SEQ ID NO: 45339 - DNA, 20 bp, Artificial Sequence
  Description of Artificial Sequence: Synthetic oligonucleotide
  Target: LAMA2; (+) strand; PAM type: NNNNGHTT; PAM sequence: AGTGGTTT
ttactaactccagataccaa

SEQ ID NO: 45340 - DNA, 20 bp, Artificial Sequence
  Description of Artificial Sequence: Synthetic oligonucleotide
  Target: LAMA2; (+) strand; PAM type: NNNNGHTT; PAM sequence: AAAGGCTT
agaagagagaggatggccac

SEQ ID NO: 45341 - DNA, 20 bp, Artificial Sequence
  Description of Artificial Sequence: Synthetic oligonucleotide
  Target: LAMA2; (+) strand; PAM type: NNNNGHTT; PAM sequence: AAAGGCTT
cacaaaggcttggtgtaagt

SEQ ID NO: 45342 - DNA, 20 bp, Artificial Sequence
  Description of Artificial Sequence: Synthetic oligonucleotide
  Target: LAMA2; (+) strand; PAM type: NNNNGHTT; PAM sequence: GCCAGATT
gactagagcaaaaggctgga

SEQ ID NO: 45343 - DNA, 20 bp, Artificial Sequence
  Description of Artificial Sequence: Synthetic oligonucleotide
  Target: LAMA2; (+) strand; PAM type: NNNNGHTT; PAM sequence: AAGTGATT
gcatttaacaaccacaggag

SEQ ID NO: 45344 - DNA, 20 bp, Artificial Sequence
  Description of Artificial Sequence: Synthetic oligonucleotide
  Target: LAMA2; (+) strand; PAM type: NNNNGHTT; PAM sequence: CCCTGATT
aatgttaaattacacataac

SEQ ID NO: 45345 - DNA, 20 bp, Artificial Sequence
  Description of Artificial Sequence: Synthetic oligonucleotide
  Target: LAMA2; (+) strand; PAM type: NNNNGHTT; PAM sequence: TAAAGATT
atgtagatgctaaagtcatc

SEQ ID NO: 45346 - DNA, 20 bp, Artificial Sequence
  Description of Artificial Sequence: Synthetic oligonucleotide
  Target: LAMA2; (+) strand; PAM type: NNNNGHTT; PAM sequence: CCTCGCTT
gacatgccttcttctcttct

SEQ ID NO: 45347 - DNA, 20 bp, Artificial Sequence
  Description of Artificial Sequence: Synthetic oligonucleotide
  Target: LAMA2; (+) strand; PAM type: NNNNGHTT; PAM sequence: TTTTGTTT
gatatattattttattttta

SEQ ID NO: 45348 - DNA, 20 bp, Artificial Sequence
  Description of Artificial Sequence: Synthetic oligonucleotide
  Target: LAMA2; (+) strand; PAM type: NNNNGHTT; PAM sequence: GCTGGATT
ctgcctcagcctcccgagta

SEQ ID NO: 45349 - DNA, 20 bp, Artificial Sequence
  Description of Artificial Sequence: Synthetic oligonucleotide
  Target: LAMA2; (+) strand; PAM type: NNNNGHTT; PAM sequence: TGGGGTTT
ttttgtatttcaagtagaaa

SEQ ID NO: 45350 - DNA, 20 bp, Artificial Sequence
  Description of Artificial Sequence: Synthetic oligonucleotide
  Target: LAMA2; (+) strand; PAM type: NNNNGHTT; PAM sequence: ACCCGCTT
actcctgacctcaagtgatc

SEQ ID NO: 45351 - DNA, 20 bp, Artificial Sequence
  Description of Artificial Sequence: Synthetic oligonucleotide
  Target: LAMA2; (+) strand; PAM type: NNNNGHTT; PAM sequence: GATGGATT
ggccagaaagtaaatgaatt

SEQ ID NO: 45352 - DNA, 20 bp, Artificial Sequence
  Description of Artificial Sequence: Synthetic oligonucleotide
  Target: LAMA2; (+) strand; PAM type: NNNNGHTT; PAM sequence: ATTAGTTT
agtaaatgaattgatggatt

SEQ ID NO: 45353 - DNA, 20 bp, Artificial Sequence
  Description of Artificial Sequence: Synthetic oligonucleotide
  Target: LAMA2; (+) strand; PAM type: NNNNGHTT; PAM sequence: GTGTGTTT
ggaggtgcgagtgtgtagat

SEQ ID NO: 45354 - DNA, 20 bp, Artificial Sequence
  Description of Artificial Sequence: Synthetic oligonucleotide
  Target: LAMA2; (+) strand; PAM type: NNNNGHTT; PAM sequence: TAAAGCTT
gaggtgaactatgatggggg

SEQ ID NO: 45355 - DNA, 20 bp, Artificial Sequence
  Description of Artificial Sequence: Synthetic oligonucleotide
  Target: LAMA2; (+) strand; PAM type: NNNNGHTT; PAM sequence: ATTTGCTT
cacaattatattattttaaa

SEQ ID NO: 45356 - DNA, 20 bp, Artificial Sequence
  Description of Artificial Sequence: Synthetic oligonucleotide
  Target: LAMA2; (+) strand; PAM type: NNNNGHTT; PAM sequence: CAGAGTTT
tttttttttttttttttagg

SEQ ID NO: 45357 - DNA, 20 bp, Artificial Sequence
  Description of Artificial Sequence: Synthetic oligonucleotide
  Target: LAMA2; (+) strand; PAM type: NNNNGHTT; PAM sequence: CGGGGTTT
ttttgtatttttagttgaga

SEQ ID NO: 45358 - DNA, 20 bp, Artificial Sequence
  Description of Artificial Sequence: Synthetic oligonucleotide
  Target: LAMA2; (+) strand; PAM type: NNNNGHTT; PAM sequence: CTGGGATT
cgcctcggcctcccaaagtg

SEQ ID NO: 45359 - DNA, 20 bp, Artificial Sequence
  Description of Artificial Sequence: Synthetic oligonucleotide
  Target: LAMA2; (+) strand; PAM type: NNNNGHTT; PAM sequence: AGCAGTTT
taaatagaccttatttttag

SEQ ID NO: 45360 - DNA, 20 bp, Artificial Sequence
  Description of Artificial Sequence: Synthetic oligonucleotide
  Target: LAMA2; (+) strand; PAM type: NNNNGHTT; PAM sequence: TAGGGTTT
ccaaacttcatagactgcat

SEQ ID NO: 45361 - DNA, 20 bp, Artificial Sequence
  Description of Artificial Sequence: Synthetic oligonucleotide
  Target: LAMA2; (+) strand; PAM type: NNNNGHTT; PAM sequence: ATGGGTTT
cttttggtggtgtacctttt

SEQ ID NO: 45362 - DNA, 20 bp, Artificial Sequence
  Description of Artificial Sequence: Synthetic oligonucleotide
  Target: LAMA2; (+) strand; PAM type: NNNNGHTT; PAM sequence: AGTAGTTT
accattagagtatcacgcaa

SEQ ID NO: 45363 - DNA, 20 bp, Artificial Sequence
  Description of Artificial Sequence: Synthetic oligonucleotide
  Target: LAMA2; (+) strand; PAM type: NNNNGHTT; PAM sequence: GAGAGCTT
aattataaaatgtataaaat

SEQ ID NO: 45364 - DNA, 20 bp, Artificial Sequence
  Description of Artificial Sequence: Synthetic oligonucleotide
  Target: LAMA2; (+) strand; PAM type: NNNNGHTT; PAM sequence: ACTTGTTT
actatatttcagcaattgac

SEQ ID NO: 45365 - DNA, 20 bp, Artificial Sequence
  Description of Artificial Sequence: Synthetic oligonucleotide
  Target: LAMA2; (+) strand; PAM type: NNNNGHTT; PAM sequence: GTTTGATT
tatttcagcaattgacactt

SEQ ID NO: 45366 - DNA, 20 bp, Artificial Sequence
  Description of Artificial Sequence: Synthetic oligonucleotide
  Target: LAMA2; (+) strand; PAM type: NNNNGHTT; PAM sequence: TTTTGTTT
ctctggttaatttctttctt

SEQ ID NO: 45367 - DNA, 20 bp, Artificial Sequence
  Description of Artificial Sequence: Synthetic oligonucleotide
  Target: LAMA2; (+) strand; PAM type: NNNNGHTT; PAM sequence: TTTTGTTT
gttaatttctttcttttttg

SEQ ID NO: 45368 - DNA, 20 bp, Artificial Sequence
  Description of Artificial Sequence: Synthetic oligonucleotide
  Target: LAMA2; (+) strand; PAM type: NNNNGHTT; PAM sequence: TTTTGTTT
tttctttcttttttgttttg

SEQ ID NO: 45369 - DNA, 20 bp, Artificial Sequence
  Description of Artificial Sequence: Synthetic oligonucleotide
  Target: LAMA2; (+) strand; PAM type: NNNNGHTT; PAM sequence: TTTTGTTT
ttcttttttgttttgttttg

SEQ ID NO: 45370 - DNA, 20 bp, Artificial Sequence
  Description of Artificial Sequence: Synthetic oligonucleotide
  Target: LAMA2; (+) strand; PAM type: NNNNGHTT; PAM sequence: CGGAGTTT
tgttttgttttattttgaga

SEQ ID NO: 45371 - DNA, 20 bp, Artificial Sequence
  Description of Artificial Sequence: Synthetic oligonucleotide
  Target: LAMA2; (+) strand; PAM type: NNNNGHTT; PAM sequence: AAGAGATT
aacctccgcctcccgggttc

SEQ ID NO: 45372 - DNA, 20 bp, Artificial Sequence
  Description of Artificial Sequence: Synthetic oligonucleotide
  Target: LAMA2; (+) strand; PAM type: NNNNGHTT; PAM sequence: CGAGGTTT
ttttgtatttttagtagaga

SEQ ID NO: 45373 - DNA, 20 bp, Artificial Sequence
  Description of Artificial Sequence: Synthetic oligonucleotide
  Target: LAMA2; (+) strand; PAM type: NNNNGHTT; PAM sequence: CTGGGATT
tgcctcggcctcccaaagtg

SEQ ID NO: 45374 - DNA, 20 bp, Artificial Sequence
  Description of Artificial Sequence: Synthetic oligonucleotide
  Target: LAMA2; (+) strand; PAM type: NNNNGHTT; PAM sequence: ATGTGTTT
gggagtatagttgcataccc

SEQ ID NO: 45375 - DNA, 20 bp, Artificial Sequence
  Description of Artificial Sequence: Synthetic oligonucleotide
  Target: LAMA2; (+) strand; PAM type: NNNNGHTT; PAM sequence: CTTTGCTT
aaaggacatatgtcagagcc

SEQ ID NO: 45376 - DNA, 20 bp, Artificial Sequence
  Description of Artificial Sequence: Synthetic oligonucleotide
  Target: LAMA2; (+) strand; PAM type: NNNNGHTT; PAM sequence: AACAGATT
gagtcaaggcaataaaggga

SEQ ID NO: 45377 - DNA, 20 bp, Artificial Sequence
  Description of Artificial Sequence: Synthetic oligonucleotide
  Target: LAMA2; (+) strand; PAM type: NNNNGHTT; PAM sequence: AACAGTTT
aatttttaggaagaaaaagt

SEQ ID NO: 45378 - DNA, 20 bp, Artificial Sequence
  Description of Artificial Sequence: Synthetic oligonucleotide
  Target: LAMA2; (+) strand; PAM type: NNNNGHTT; PAM sequence: AAATGCTT
gaagaaaaagtaacagtttt

SEQ ID NO: 45379 - DNA, 20 bp, Artificial Sequence
  Description of Artificial Sequence: Synthetic oligonucleotide
  Target: LAMA2; (+) strand; PAM type: NNNNGHTT; PAM sequence: ATAGGTTT
ttgagtaagaaaagcataaa

SEQ ID NO: 45380 - DNA, 20 bp, Artificial Sequence
  Description of Artificial Sequence: Synthetic oligonucleotide
  Target: LAMA2; (+) strand; PAM type: NNNNGHTT; PAM sequence: CCTTGCTT
aaaagcataaaataggtttc

SEQ ID NO: 45381 - DNA, 20 bp, Artificial Sequence
  Description of Artificial Sequence: Synthetic oligonucleotide
  Target: LAMA2; (+) strand; PAM type: NNNNGHTT; PAM sequence: AGCAGATT
aacacctttctaaagtactc

SEQ ID NO: 45382 - DNA, 20 bp, Artificial Sequence
  Description of Artificial Sequence: Synthetic oligonucleotide
  Target: LAMA2; (+) strand; PAM type: NNNNGHTT; PAM sequence: AAAGGTTT
agaggaggttgtggagttgc

SEQ ID NO: 45383 - DNA, 20 bp, Artificial Sequence
  Description of Artificial Sequence: Synthetic oligonucleotide
  Target: LAMA2; (+) strand; PAM type: NNNNGHTT; PAM sequence: GTTGGTTT
caaagataagagacatttga

SEQ ID NO: 45384 - DNA, 20 bp, Artificial Sequence
  Description of Artificial Sequence: Synthetic oligonucleotide
  Target: LAMA2; (+) strand; PAM type: NNNNGHTT; PAM sequence: AGATGCTT
agagacatttgagttggttt

SEQ ID NO: 45385 - DNA, 20 bp, Artificial Sequence
  Description of Artificial Sequence: Synthetic oligonucleotide
  Target: LAMA2; (+) strand; PAM type: NNNNGHTT; PAM sequence: TCTTGATT
agaaatttcttatttgatga

SEQ ID NO: 45386 - DNA, 20 bp, Artificial Sequence
  Description of Artificial Sequence: Synthetic oligonucleotide
  Target: LAMA2; (+) strand; PAM type: NNNNGHTT; PAM sequence: TTTAGATT
gctgaggaaagaagcaaaca

SEQ ID NO: 45387 - DNA, 20 bp, Artificial Sequence
  Description of Artificial Sequence: Synthetic oligonucleotide
  Target: LAMA2; (+) strand; PAM type: NNNNGHTT; PAM sequence: GATGGATT
ggtcagaaagtaaatgaatt

SEQ ID NO: 45388 - DNA, 20 bp, Artificial Sequence
  Description of Artificial Sequence: Synthetic oligonucleotide
  Target: LAMA2; (+) strand; PAM type: NNNNGHTT; PAM sequence: ATTAGTTT
agtaaatgaattgatggatt

SEQ ID NO: 45389 - DNA, 20 bp, Artificial Sequence
  Description of Artificial Sequence: Synthetic oligonucleotide
  Target: LAMA2; (+) strand; PAM type: NNNNGHTT; PAM sequence: CAAAGATT
aatgggatggaggaatgatg

SEQ ID NO: 45390 - DNA, 20 bp, Artificial Sequence
  Description of Artificial Sequence: Synthetic oligonucleotide
  Target: LAMA2; (+) strand; PAM type: NNNNGHTT; PAM sequence: GTCAGATT
aaaaatggatgagatgcatt

SEQ ID NO: 45391 - DNA, 20 bp, Artificial Sequence
  Description of Artificial Sequence: Synthetic oligonucleotide
  Target: LAMA2; (+) strand; PAM type: NNNNGHTT; PAM sequence: CCATGTTT
atatattcagccaatactat

SEQ ID NO: 45392 - DNA, 20 bp, Artificial Sequence
  Description of Artificial Sequence: Synthetic oligonucleotide
  Target: LAMA2; (+) strand; PAM type: NNNNGHTT; PAM sequence: TTATGATT
taaagcaaggtgtatataag

SEQ ID NO: 45393 - DNA, 20 bp, Artificial Sequence
  Description of Artificial Sequence: Synthetic oligonucleotide
  Target: LAMA2; (+) strand; PAM type: NNNNGHTT; PAM sequence: TAGTGTTT
tccccatttttatttacctg

SEQ ID NO: 45394 - DNA, 20 bp, Artificial Sequence
  Description of Artificial Sequence: Synthetic oligonucleotide
  Target: LAMA2; (+) strand; PAM type: NNNNGHTT; PAM sequence: TCTGGATT
gttttctaaaccagtcacag

SEQ ID NO: 45395 - DNA, 20 bp, Artificial Sequence
  Description of Artificial Sequence: Synthetic oligonucleotide
  Target: LAMA2; (+) strand; PAM type: NNNNGHTT; PAM sequence: AAGCGATT
aaccttcgcctcccaggttc

SEQ ID NO: 45396 - DNA, 20 bp, Artificial Sequence
  Description of Artificial Sequence: Synthetic oligonucleotide
  Target: LAMA2; (+) strand; PAM type: NNNNGHTT; PAM sequence: TGGAGTTT
ttttgtatttttagtagaga

SEQ ID NO: 45397 - DNA, 20 bp, Artificial Sequence
  Description of Artificial Sequence: Synthetic oligonucleotide
  Target: LAMA2; (+) strand; PAM type: NNNNGHTT; PAM sequence: CTGGGATT
tgccttggcctcccaaagtg

SEQ ID NO: 45398 - DNA, 20 bp, Artificial Sequence
  Description of Artificial Sequence: Synthetic oligonucleotide
  Target: LAMA2; (+) strand; PAM type: NNNNGHTT; PAM sequence: GCATGATT
tgagccaccgcgcctggcct

SEQ ID NO: 45399 - DNA, 20 bp, Artificial Sequence
  Description of Artificial Sequence: Synthetic oligonucleotide
  Target: LAMA2; (+) strand; PAM type: NNNNGHTT; PAM sequence: ACCAGATT
tgcatgattatttttaaatg

SEQ ID NO: 45400 - DNA, 20 bp, Artificial Sequence
  Description of Artificial Sequence: Synthetic oligonucleotide
  Target: LAMA2; (+) strand; PAM type: NNNNGHTT; PAM sequence: TCCAGATT
gaccagattcattccacatt

SEQ ID NO: 45401 - DNA, 20 bp, Artificial Sequence
  Description of Artificial Sequence: Synthetic oligonucleotide
  Target: LAMA2; (+) strand; PAM type: NNNNGHTT; PAM sequence: TTATGCTT
attcattccacatttccaga

SEQ ID NO: 45402 - DNA, 20 bp, Artificial Sequence
  Description of Artificial Sequence: Synthetic oligonucleotide
  Target: LAMA2; (+) strand; PAM type: NNNNGHTT; PAM sequence: CTTTGCTT
ttgaactttctgttaataga

SEQ ID NO: 45403 - DNA, 20 bp, Artificial Sequence
  Description of Artificial Sequence: Synthetic oligonucleotide
  Target: LAMA2; (+) strand; PAM type: NNNNGHTT; PAM sequence: AGCAGTTT
ttgcttcccaattaaaagct

SEQ ID NO: 45404 - DNA, 20 bp, Artificial Sequence
  Description of Artificial Sequence: Synthetic oligonucleotide
  Target: LAMA2; (+) strand; PAM type: NNNNGHTT; PAM sequence: AAAGGTTT
aattaaaagctagcagtttg

SEQ ID NO: 45405 - DNA, 20 bp, Artificial Sequence
  Description of Artificial Sequence: Synthetic oligonucleotide
  Target: LAMA2; (+) strand; PAM type: NNNNGHTT; PAM sequence: CAGCGATT
gtttgaaaggtttacctcat

SEQ ID NO: 45406 - DNA, 20 bp, Artificial Sequence
  Description of Artificial Sequence: Synthetic oligonucleotide
  Target: LAMA2; (+) strand; PAM type: NNNNGHTT; PAM sequence: TCCAGTTT
acctcatcagcgattcccta

SEQ ID NO: 45407 - DNA, 20 bp, Artificial Sequence
  Description of Artificial Sequence: Synthetic oligonucleotide
  Target: LAMA2; (+) strand; PAM type: NNNNGHTT; PAM sequence: CTTGGATT
gttttcagatgcagttagcc

SEQ ID NO: 45408 - DNA, 20 bp, Artificial Sequence
  Description of Artificial Sequence: Synthetic oligonucleotide
  Target: LAMA2; (+) strand; PAM type: NNNNGHTT; PAM sequence: ATACGTTT
ttatccctgttgaggatgtt

SEQ ID NO: 45409 - DNA, 20 bp, Artificial Sequence
  Description of Artificial Sequence: Synthetic oligonucleotide
  Target: LAMA2; (+) strand; PAM type: NNNNGHTT; PAM sequence: TTATGATT
cgtcagtatttgcaaattaa

SEQ ID NO: 45410 - DNA, 20 bp, Artificial Sequence
  Description of Artificial Sequence: Synthetic oligonucleotide
  Target: LAMA2; (+) strand; PAM type: NNNNGHTT; PAM sequence: TAGGGATT
ttatgattaaactttcataa

SEQ ID NO: 45411 - DNA, 20 bp, Artificial Sequence
  Description of Artificial Sequence: Synthetic oligonucleotide
  Target: LAMA2; (+) strand; PAM type: NNNNGHTT; PAM sequence: TGTTGATT
taatagggattatggttaat

SEQ ID NO: 45412 - DNA, 20 bp, Artificial Sequence
  Description of Artificial Sequence: Synthetic oligonucleotide
  Target: LAMA2; (+) strand; PAM type: NNNNGHTT; PAM sequence: ATCAGTTT
tttttgtgactaattctctt

SEQ ID NO: 45413 - DNA, 20 bp, Artificial Sequence
  Description of Artificial Sequence: Synthetic oligonucleotide
  Target: LAMA2; (+) strand; PAM type: NNNNGHTT; PAM sequence: ATTTGATT
caattacctaagagccatga

SEQ ID NO: 45414 - DNA, 20 bp, Artificial Sequence
  Description of Artificial Sequence: Synthetic oligonucleotide
  Target: LAMA2; (+) strand; PAM type: NNNNGHTT; PAM sequence: GTGTGTTT
ttagaaatggggttgtatgt

SEQ ID NO: 45415 - DNA, 20 bp, Artificial Sequence
  Description of Artificial Sequence: Synthetic oligonucleotide
  Target: LAMA2; (+) strand; PAM type: NNNNGHTT; PAM sequence: AAAAGATT
attaaacgcacaatctgtaa

SEQ ID NO: 45416 - DNA, 20 bp, Artificial Sequence
  Description of Artificial Sequence: Synthetic oligonucleotide
  Target: LAMA2; (+) strand; PAM type: NNNNGHTT; PAM sequence: GGATGTTT
tctgtaaaaaagattcagga

SEQ ID NO: 45417 - DNA, 20 bp, Artificial Sequence
  Description of Artificial Sequence: Synthetic oligonucleotide
  Target: LAMA2; (+) strand; PAM type: NNNNGHTT; PAM sequence: AAATGTTT
gattcaggaggatgtttggg

SEQ ID NO: 45418 - DNA, 20 bp, Artificial Sequence
  Description of Artificial Sequence: Synthetic oligonucleotide
  Target: LAMA2; (+) strand; PAM type: NNNNGHTT; PAM sequence: TATGGTTT
agtgccaacaatatttcatt

SEQ ID NO: 45419 - DNA, 20 bp, Artificial Sequence
  Description of Artificial Sequence: Synthetic oligonucleotide
  Target: LAMA2; (+) strand; PAM type: NNNNGHTT; PAM sequence: TTTTGATT
caacaatatttcatttatgg

SEQ ID NO: 45420 - DNA, 20 bp, Artificial Sequence
  Description of Artificial Sequence: Synthetic oligonucleotide
  Target: LAMA2; (+) strand; PAM type: NNNNGHTT; PAM sequence: TTATGCTT
gtcatttatttggtatttag

SEQ ID NO: 45421 - DNA, 20 bp, Artificial Sequence
  Description of Artificial Sequence: Synthetic oligonucleotide
  Target: LAMA2; (+) strand; PAM type: NNNNGHTT; PAM sequence: CCTAGCTT
cataaagacctgacatcttc

SEQ ID NO: 45422 - DNA, 20 bp, Artificial Sequence
  Description of Artificial Sequence: Synthetic oligonucleotide
  Target: LAMA2; (+) strand; PAM type: NNNNGHTT; PAM sequence: TGATGATT
atctctatggactgctaaca

SEQ ID NO: 45423 - DNA, 20 bp, Artificial Sequence
  Description of Artificial Sequence: Synthetic oligonucleotide
  Target: LAMA2; (+) strand; PAM type: NNNNGHTT; PAM sequence: TTAAGATT
ccctgtcttgtacagtcata

SEQ ID NO: 45424 - DNA, 20 bp, Artificial Sequence
  Description of Artificial Sequence: Synthetic oligonucleotide
  Target: LAMA2; (+) strand; PAM type: NNNNGHTT; PAM sequence: AATAGCTT
aataggactataataccata

SEQ ID NO: 45425 - DNA, 20 bp, Artificial Sequence
  Description of Artificial Sequence: Synthetic oligonucleotide
  Target: LAMA2; (+) strand; PAM type: NNNNGHTT; PAM sequence: TCATGTTT
aatagcttaaaacatagtct

SEQ ID NO: 45426 - DNA, 20 bp, Artificial Sequence
  Description of Artificial Sequence: Synthetic oligonucleotide
  Target: LAMA2; (+) strand; PAM type: NNNNGHTT; PAM sequence: TTCAGCTT
aatgccaaatttagtgaata

SEQ ID NO: 45427 - DNA, 20 bp, Artificial Sequence
  Description of Artificial Sequence: Synthetic oligonucleotide
  Target: LAMA2; (+) strand; PAM type: NNNNGHTT; PAM sequence: AAGTGATT
aacctctacctcctgggttc

SEQ ID NO: 45428 - DNA, 20 bp, Artificial Sequence
  Description of Artificial Sequence: Synthetic oligonucleotide
  Target: LAMA2; (+) strand; PAM type: NNNNGHTT; PAM sequence: TGGGGTTT
ttttttttttttcatagaga

SEQ ID NO: 45429 - DNA, 20 bp, Artificial Sequence
  Description of Artificial Sequence: Synthetic oligonucleotide
  Target: LAMA2; (+) strand; PAM type: NNNNGHTT; PAM sequence: CTGGGATT
cacctcagcctcccaaagtg

SEQ ID NO: 45430 - DNA, 20 bp, Artificial Sequence
  Description of Artificial Sequence: Synthetic oligonucleotide
  Target: LAMA2; (+) strand; PAM type: NNNNGHTT; PAM sequence: TTCAGCTT
gccactgcacctggccaata

SEQ ID NO: 45431 - DNA, 20 bp, Artificial Sequence
  Description of Artificial Sequence: Synthetic oligonucleotide
  Target: LAMA2; (+) strand; PAM type: NNNNGHTT; PAM sequence: AGATGATT
taataaaatttttcttttaa

SEQ ID NO: 45432 - DNA, 20 bp, Artificial Sequence
  Description of Artificial Sequence: Synthetic oligonucleotide
  Target: LAMA2; (+) strand; PAM type: NNNNGHTT; PAM sequence: ATCAGATT
taaagatgattttactttct

SEQ ID NO: 45433 - DNA, 20 bp, Artificial Sequence
  Description of Artificial Sequence: Synthetic oligonucleotide
  Target: LAMA2; (+) strand; PAM type: NNNNGHTT; PAM sequence: CTTAGTTT
gattcctattgcattgagga

SEQ ID NO: 45434 - DNA, 20 bp, Artificial Sequence
  Description of Artificial Sequence: Synthetic oligonucleotide
  Target: LAMA2; (+) strand; PAM type: NNNNGHTT; PAM sequence: TTTTGCTT
ctattgcattgaggacttag

SEQ ID NO: 45435 - DNA, 20 bp, Artificial Sequence
  Description of Artificial Sequence: Synthetic oligonucleotide
  Target: LAMA2; (+) strand; PAM type: NNNNGHTT; PAM sequence: TATTGTTT
acttagttttgctttatttt

SEQ ID NO: 45436 - DNA, 20 bp, Artificial Sequence
  Description of Artificial Sequence: Synthetic oligonucleotide
  Target: LAMA2; (+) strand; PAM type: NNNNGHTT; PAM sequence: AAATGTTT
tttatttttattgttttttc

SEQ ID NO: 45437 - DNA, 20 bp, Artificial Sequence
  Description of Artificial Sequence: Synthetic oligonucleotide
  Target: LAMA2; (+) strand; PAM type: NNNNGHTT; PAM sequence: CTAAGATT
ttaccaagtacaacttgtct

SEQ ID NO: 45438 - DNA, 20 bp, Artificial Sequence
  Description of Artificial Sequence: Synthetic oligonucleotide
  Target: LAMA2; (+) strand; PAM type: NNNNGHTT; PAM sequence: ATGGGTTT
ttgtcctccattttgatatt

SEQ ID NO: 45439 - DNA, 20 bp, Artificial Sequence
  Description of Artificial Sequence: Synthetic oligonucleotide
  Target: LAMA2; (+) strand; PAM type: NNNNGHTT; PAM sequence: GATGGTTT
tatgggttttaaaaactaat

SEQ ID NO: 45440 - DNA, 20 bp, Artificial Sequence
  Description of Artificial Sequence: Synthetic oligonucleotide
  Target: LAMA2; (+) strand; PAM type: NNNNGHTT; PAM sequence: CTTTGTTT
aatgatggtttttaaatgcc

SEQ ID NO: 45441 - DNA, 20 bp, Artificial Sequence
  Description of Artificial Sequence: Synthetic oligonucleotide
  Target: LAMA2; (+) strand; PAM type: NNNNGHTT; PAM sequence: TGATGCTT
tttgtttcatgaaataataa

SEQ ID NO: 45442 - DNA, 20 bp, Artificial Sequence
  Description of Artificial Sequence: Synthetic oligonucleotide
  Target: LAMA2; (+) strand; PAM type: NNNNGHTT; PAM sequence: GAATGATT
cagagatgacacataatgtt

SEQ ID NO: 45443 - DNA, 20 bp, Artificial Sequence
  Description of Artificial Sequence: Synthetic oligonucleotide
  Target: LAMA2; (+) strand; PAM type: NNNNGHTT; PAM sequence: GCTAGATT
cattattattagaatacatg

SEQ ID NO: 45444 - DNA, 20 bp, Artificial Sequence
  Description of Artificial Sequence: Synthetic oligonucleotide
  Target: LAMA2; (+) strand; PAM type: NNNNGHTT; PAM sequence: CCATGTTT
taggtaggcaaattgagagt

SEQ ID NO: 45445 - DNA, 20 bp, Artificial Sequence
  Description of Artificial Sequence: Synthetic oligonucleotide
  Target: LAMA2; (+) strand; PAM type: NNNNGHTT; PAM sequence: ATGTGATT
catgtttgttcctcatagca

SEQ ID NO: 45446 - DNA, 20 bp, Artificial Sequence
  Description of Artificial Sequence: Synthetic oligonucleotide
  Target: LAMA2; (+) strand; PAM type: NNNNGHTT; PAM sequence: AAAGGATT
aggtattccttcaaatttaa

SEQ ID NO: 45447 - DNA, 20 bp, Artificial Sequence
  Description of Artificial Sequence: Synthetic oligonucleotide
  Target: LAMA2; (+) strand; PAM type: NNNNGHTT; PAM sequence: CTTAGTTT
tcgaaacatcttcccagata

SEQ ID NO: 45448 - DNA, 20 bp, Artificial Sequence
  Description of Artificial Sequence: Synthetic oligonucleotide
  Target: LAMA2; (+) strand; PAM type: NNNNGHTT; PAM sequence: CTTTGTTT
tacagggaagctcacctcca

SEQ ID NO: 45449 - DNA, 20 bp, Artificial Sequence
  Description of Artificial Sequence: Synthetic oligonucleotide
  Target: LAMA2; (+) strand; PAM type: NNNNGHTT; PAM sequence: GCCTGTTT
ctcacccatgcatgagcaag

SEQ ID NO: 45450 - DNA, 20 bp, Artificial Sequence
  Description of Artificial Sequence: Synthetic oligonucleotide
  Target: LAMA2; (+) strand; PAM type: NNNNGHTT; PAM sequence: CAAAGATT
attacttggaaaatgagaag

SEQ ID NO: 45451 - DNA, 20 bp, Artificial Sequence
  Description of Artificial Sequence: Synthetic oligonucleotide
  Target: LAMA2; (+) strand; PAM type: NNNNGHTT; PAM sequence: GAGGGCTT
actgggaaccaaaatgcaat

SEQ ID NO: 45452 - DNA, 20 bp, Artificial Sequence
  Description of Artificial Sequence: Synthetic oligonucleotide
  Target: LAMA2; (+) strand; PAM type: NNNNGHTT; PAM sequence: GTGAGCTT
aatgggagagatgagaaact

SEQ ID NO: 45453 - DNA, 20 bp, Artificial Sequence
  Description of Artificial Sequence: Synthetic oligonucleotide
  Target: LAMA2; (+) strand; PAM type: NNNNGHTT; PAM sequence: TGAGGATT
agatgagaaactgtgagctt

SEQ ID NO: 45454 - DNA, 20 bp, Artificial Sequence
  Description of Artificial Sequence: Synthetic oligonucleotide
  Target: LAMA2; (+) strand; PAM type: NNNNGHTT; PAM sequence: TTTTGATT
ttttctatctctaatctccc

SEQ ID NO: 45455 - DNA, 20 bp, Artificial Sequence
  Description of Artificial Sequence: Synthetic oligonucleotide
  Target: LAMA2; (+) strand; PAM type: NNNNGHTT; PAM sequence: TGTGGTTT
ggtgaaagtaagggaagatc

SEQ ID NO: 45456 - DNA, 20 bp, Artificial Sequence
  Description of Artificial Sequence: Synthetic oligonucleotide
  Target: LAMA2; (+) strand; PAM type: NNNNGHTT; PAM sequence: TAGAGTTT
atctgtggtttttggtagga

SEQ ID NO: 45457 - DNA, 20 bp, Artificial Sequence
  Description of Artificial Sequence: Synthetic oligonucleotide
  Target: LAMA2; (+) strand; PAM type: NNNNGHTT; PAM sequence: TAAAGATT
ctccttccttgccattattg

SEQ ID NO: 45458 - DNA, 20 bp, Artificial Sequence
  Description of Artificial Sequence: Synthetic oligonucleotide
  Target: LAMA2; (+) strand; PAM type: NNNNGHTT; PAM sequence: AGAGGTTT
caacagacaaatgccggatg

SEQ ID NO: 45459 - DNA, 20 bp, Artificial Sequence
  Description of Artificial Sequence: Synthetic oligonucleotide
  Target: LAMA2; (+) strand; PAM type: NNNNGHTT; PAM sequence: AAAAGCTT
caagttaaagactggccgca

SEQ ID NO: 45460 - DNA, 20 bp, Artificial Sequence
  Description of Artificial Sequence: Synthetic oligonucleotide
  Target: LAMA2; (+) strand; PAM type: NNNNGHTT; PAM sequence: GAAGGTTT
aaacttctcttttgccctct

SEQ ID NO: 45461 - DNA, 20 bp, Artificial Sequence
  Description of Artificial Sequence: Synthetic oligonucleotide
  Target: LAMA2; (+) strand; PAM type: NNNNGHTT; PAM sequence: GTTAGCTT
tgaaaaatcaactgaaaaaa

SEQ ID NO: 45462 - DNA, 20 bp, Artificial Sequence
  Description of Artificial Sequence: Synthetic oligonucleotide
  Target: LAMA2; (+) strand; PAM type: NNNNGHTT; PAM sequence: GGATGATT
agcatggaagaatcacagga

SEQ ID NO: 45463 - DNA, 20 bp, Artificial Sequence
  Description of Artificial Sequence: Synthetic oligonucleotide
  Target: LAMA2; (+) strand; PAM type: NNNNGHTT; PAM sequence: AAATGATT
atggcaatttggaaaatagt

SEQ ID NO: 45464 - DNA, 20 bp, Artificial Sequence
  Description of Artificial Sequence: Synthetic oligonucleotide
  Target: LAMA2; (+) strand; PAM type: NNNNGHTT; PAM sequence: AGTGGTTT
gttgggcccacagagcagat

SEQ ID NO: 45465 - DNA, 20 bp, Artificial Sequence
  Description of Artificial Sequence: Synthetic oligonucleotide
  Target: LAMA2; (+) strand; PAM type: NNNNGHTT; PAM sequence: ATTGGTTT
agcatgctatattttcgggt

SEQ ID NO: 45466 - DNA, 20 bp, Artificial Sequence
  Description of Artificial Sequence: Synthetic oligonucleotide
  Target: LAMA2; (+) strand; PAM type: NNNNGHTT; PAM sequence: TCAGGATT
aagtgtatttcaaccacaag

SEQ ID NO: 45467 - DNA, 20 bp, Artificial Sequence
  Description of Artificial Sequence: Synthetic oligonucleotide
  Target: LAMA2; (+) strand; PAM type: NNNNGHTT; PAM sequence: TTATGTTT
ttcaaccacaagtcaggatt

SEQ ID NO: 45468 - DNA, 20 bp, Artificial Sequence
  Description of Artificial Sequence: Synthetic oligonucleotide
  Target: LAMA2; (+) strand; PAM type: NNNNGHTT; PAM sequence: TGTTGCTT
gagctgtctcaatagttagt

SEQ ID NO: 45469 - DNA, 20 bp, Artificial Sequence
  Description of Artificial Sequence: Synthetic oligonucleotide
  Target: LAMA2; (+) strand; PAM type: NNNNGHTT; PAM sequence: GAATGATT
tagttagttgttgctttttt

SEQ ID NO: 45470 - DNA, 20 bp, Artificial Sequence
  Description of Artificial Sequence: Synthetic oligonucleotide
  Target: LAMA2; (+) strand; PAM type: NNNNGHTT; PAM sequence: ATTAGATT
tttgaatgattgacaagtca

SEQ ID NO: 45471 - DNA, 20 bp, Artificial Sequence
  Description of Artificial Sequence: Synthetic oligonucleotide
  Target: LAMA2; (+) strand; PAM type: NNNNGHTT; PAM sequence: TAATGTTT
actctccttctgtattattt

SEQ ID NO: 45472 - DNA, 20 bp, Artificial Sequence
  Description of Artificial Sequence: Synthetic oligonucleotide
  Target: LAMA2; (+) strand; PAM type: NNNNGHTT; PAM sequence: GGTTGTTT
atgtttgatattcacatgat

SEQ ID NO: 45473 - DNA, 20 bp, Artificial Sequence
  Description of Artificial Sequence: Synthetic oligonucleotide
  Target: LAMA2; (+) strand; PAM type: NNNNGHTT; PAM sequence: ACCCGATT
tgctaactcaatagagagac

SEQ ID NO: 45474 - DNA, 20 bp, Artificial Sequence
  Description of Artificial Sequence: Synthetic oligonucleotide
  Target: LAMA2; (+) strand; PAM type: NNNNGHTT; PAM sequence: CCTGGATT
taccattatgtgacaattac

SEQ ID NO: 45475 - DNA, 20 bp, Artificial Sequence
  Description of Artificial Sequence: Synthetic oligonucleotide
  Target: LAMA2; (+) strand; PAM type: NNNNGHTT; PAM sequence: ATTTGTTT
aattgcattttacatttgct

SEQ ID NO: 45476 - DNA, 20 bp, Artificial Sequence
  Description of Artificial Sequence: Synthetic oligonucleotide
  Target: LAMA2; (+) strand; PAM type: NNNNGHTT; PAM sequence: AGTGGTTT
catttgctatttgtttagtt

SEQ ID NO: 45477 - DNA, 20 bp, Artificial Sequence
  Description of Artificial Sequence: Synthetic oligonucleotide
  Target: LAMA2; (+) strand; PAM type: NNNNGHTT; PAM sequence: CATTGTTT
tactctttcttatcactctc

SEQ ID NO: 45478 - DNA, 20 bp, Artificial Sequence
  Description of Artificial Sequence: Synthetic oligonucleotide
  Target: LAMA2; (+) strand; PAM type: NNNNGHTT; PAM sequence: AAGAGCTT
aattcaaatggaagcacgtg

SEQ ID NO: 45479 - DNA, 20 bp, Artificial Sequence
  Description of Artificial Sequence: Synthetic oligonucleotide
  Target: LAMA2; (+) strand; PAM type: NNNNGHTT; PAM sequence: CTCTGTTT
agaaatgaattaggtgctaa

SEQ ID NO: 45480 - DNA, 20 bp, Artificial Sequence
  Description of Artificial Sequence: Synthetic oligonucleotide
  Target: LAMA2; (+) strand; PAM type: NNNNGHTT; PAM sequence: GAAAGTTT
ctctcattactgagagctga

SEQ ID NO: 45481 - DNA, 20 bp, Artificial Sequence
  Description of Artificial Sequence: Synthetic oligonucleotide
  Target: LAMA2; (+) strand; PAM type: NNNNGHTT; PAM sequence: AGTTGCTT
agagctgagaaagttttgac

SEQ ID NO: 45482 - DNA, 20 bp, Artificial Sequence
  Description of Artificial Sequence: Synthetic oligonucleotide
  Target: LAMA2; (+) strand; PAM type: NNNNGHTT; PAM sequence: ACAAGCTT
ttgggtgactaaatgaagta

SEQ ID NO: 45483 - DNA, 20 bp, Artificial Sequence
  Description of Artificial Sequence: Synthetic oligonucleotide
  Target: LAMA2; (+) strand; PAM type: NNNNGHTT; PAM sequence: TCAAGTTT
aaattgatgccggaagttgt

SEQ ID NO: 45484 - DNA, 20 bp, Artificial Sequence
  Description of Artificial Sequence: Synthetic oligonucleotide
  Target: LAMA2; (+) strand; PAM type: NNNNGHTT; PAM sequence: CTATGCTT
tgcataggcctgggtgcctt

SEQ ID NO: 45485 - DNA, 20 bp, Artificial Sequence
  Description of Artificial Sequence: Synthetic oligonucleotide
  Target: LAMA2; (+) strand; PAM type: NNNNGHTT; PAM sequence: TTAGGCTT
tcgccagcacctcaaattat

SEQ ID NO: 45486 - DNA, 20 bp, Artificial Sequence
  Description of Artificial Sequence: Synthetic oligonucleotide
  Target: LAMA2; (+) strand; PAM type: NNNNGHTT; PAM sequence: CATGGTTT
acaccatacactgtaaaggt

SEQ ID NO: 45487 - DNA, 20 bp, Artificial Sequence
  Description of Artificial Sequence: Synthetic oligonucleotide
  Target: LAMA2; (+) strand; PAM type: NNNNGHTT; PAM sequence: GGTGGATT
ctggctggagcaaacaagct

SEQ ID NO: 45488 - DNA, 20 bp, Artificial Sequence
  Description of Artificial Sequence: Synthetic oligonucleotide
  Target: LAMA2; (+) strand; PAM type: NNNNGHTT; PAM sequence: TGCAGCTT
tggcggcaggggctcagtgc

SEQ ID NO: 45489 - DNA, 20 bp, Artificial Sequence
  Description of Artificial Sequence: Synthetic oligonucleotide
  Target: LAMA2; (+) strand; PAM type: NNNNGHTT; PAM sequence: TCATGCTT
caagctaccacactgatcaa

SEQ ID NO: 45490 - DNA, 20 bp, Artificial Sequence
  Description of Artificial Sequence: Synthetic oligonucleotide
  Target: LAMA2; (+) strand; PAM type: NNNNGHTT; PAM sequence: TGATGCTT
gacaggcaatcaataaataa

SEQ ID NO: 45491 - DNA, 20 bp, Artificial Sequence
  Description of Artificial Sequence: Synthetic oligonucleotide
  Target: LAMA2; (+) strand; PAM type: NNNNGHTT; PAM sequence: TCTGGTTT
aaataatgatgctttattgt

SEQ ID NO: 45492 - DNA, 20 bp, Artificial Sequence
  Description of Artificial Sequence: Synthetic oligonucleotide
  Target: LAMA2; (+) strand; PAM type: NNNNGHTT; PAM sequence: TTTAGATT
gtttattctccatttattct

SEQ ID NO: 45493 - DNA, 20 bp, Artificial Sequence
  Description of Artificial Sequence: Synthetic oligonucleotide
  Target: LAMA2; (+) strand; PAM type: NNNNGHTT; PAM sequence: ACAAGTTT
tacaactggatggcgcaacc

SEQ ID NO: 45494 - DNA, 20 bp, Artificial Sequence
  Description of Artificial Sequence: Synthetic oligonucleotide
  Target: LAMA2; (+) strand; PAM type: NNNNGHTT; PAM sequence: GCCTGTTT
tactaaatcatttctaactt

SEQ ID NO: 45495 - DNA, 20 bp, Artificial Sequence
  Description of Artificial Sequence: Synthetic oligonucleotide
  Target: LAMA2; (+) strand; PAM type: NNNNGHTT; PAM sequence: AAGAGTTT
tttatcaattcagcaagtca

SEQ ID NO: 45496 - DNA, 20 bp, Artificial Sequence
  Description of Artificial Sequence: Synthetic oligonucleotide
  Target: LAMA2; (+) strand; PAM type: NNNNGHTT; PAM sequence: TGTGGATT
acacagtatcttaagaatta

SEQ ID NO: 45497 - DNA, 20 bp, Artificial Sequence
  Description of Artificial Sequence: Synthetic oligonucleotide
  Target: LAMA2; (+) strand; PAM type: NNNNGHTT; PAM sequence: TTCTGTTT
agaattatgtggatttgtcg

SEQ ID NO: 45498 - DNA, 20 bp, Artificial Sequence
  Description of Artificial Sequence: Synthetic oligonucleotide
  Target: LAMA2; (+) strand; PAM type: NNNNGHTT; PAM sequence: TTTAGTTT
tctgttttctcttcctccca

SEQ ID NO: 45499 - DNA, 20 bp, Artificial Sequence
  Description of Artificial Sequence: Synthetic oligonucleotide
  Target: LAMA2; (+) strand; PAM type: NNNNGHTT; PAM sequence: TTATGCTT
tgaatatgccaagacatatt

SEQ ID NO: 45500 - DNA, 20 bp, Artificial Sequence
  Description of Artificial Sequence: Synthetic oligonucleotide
  Target: LAMA2; (+) strand; PAM type: NNNNGHTT; PAM sequence: TCCAGCTT
ccatccatatccttatttat

SEQ ID NO: 45501 - DNA, 20 bp, Artificial Sequence
  Description of Artificial Sequence: Synthetic oligonucleotide
  Target: LAMA2; (+) strand; PAM type: NNNNGHTT; PAM sequence: TCAAGATT
aatccttatttctacttgac

SEQ ID NO: 45502 - DNA, 20 bp, Artificial Sequence
  Description of Artificial Sequence: Synthetic oligonucleotide
  Target: LAMA2; (+) strand; PAM type: NNNNGHTT; PAM sequence: ACAGGTTT
ttagtgatgtgaaaagttaa

SEQ ID NO: 45503 - DNA, 20 bp, Artificial Sequence
  Description of Artificial Sequence: Synthetic oligonucleotide
  Target: LAMA2; (+) strand; PAM type: NNNNGHTT; PAM sequence: TCAAGTTT
aagttaaacaggttttgtaa

SEQ ID NO: 45504 - DNA, 20 bp, Artificial Sequence
  Description of Artificial Sequence: Synthetic oligonucleotide
  Target: LAMA2; (+) strand; PAM type: NNNNGHTT; PAM sequence: AAGAGCTT
atggaacttctcagacaaga

SEQ ID NO: 45505 - DNA, 20 bp, Artificial Sequence
  Description of Artificial Sequence: Synthetic oligonucleotide
  Target: LAMA2; (+) strand; PAM type: NNNNGHTT; PAM sequence: TCAGGCTT
ttcagacttccaatttggcc

SEQ ID NO: 45506 - DNA, 20 bp, Artificial Sequence
  Description of Artificial Sequence: Synthetic oligonucleotide
  Target: LAMA2; (+) strand; PAM type: NNNNGHTT; PAM sequence: ACATGTTT
ttggaataacaaactgtgag

SEQ ID NO: 45507 - DNA, 20 bp, Artificial Sequence
  Description of Artificial Sequence: Synthetic oligonucleotide
  Target: LAMA2; (+) strand; PAM type: NNNNGHTT; PAM sequence: CTGTGCTT
tattgcatagttgaagaaca

SEQ ID NO: 45508 - DNA, 20 bp, Artificial Sequence
  Description of Artificial Sequence: Synthetic oligonucleotide
  Target: LAMA2; (+) strand; PAM type: NNNNGHTT; PAM sequence: TAAAGCTT
cagtgacttggccttctttc

SEQ ID NO: 45509 - DNA, 20 bp, Artificial Sequence
  Description of Artificial Sequence: Synthetic oligonucleotide
  Target: LAMA2; (+) strand; PAM type: NNNNGHTT; PAM sequence: CCTGGCTT
gaaatattgcactatcttct

SEQ ID NO: 45510 - DNA, 20 bp, Artificial Sequence
  Description of Artificial Sequence: Synthetic oligonucleotide
  Target: LAMA2; (+) strand; PAM type: NNNNGHTT; PAM sequence: ACCTGTTT
atgggataatatagccaaca

SEQ ID NO: 45511 - DNA, 20 bp, Artificial Sequence
  Description of Artificial Sequence: Synthetic oligonucleotide
  Target: LAMA2; (+) strand; PAM type: NNNNGHTT; PAM sequence: CAAAGCTT
ctagtgtgcctctaaaatgg

SEQ ID NO: 45512 - DNA, 20 bp, Artificial Sequence
  Description of Artificial Sequence: Synthetic oligonucleotide
  Target: LAMA2; (+) strand; PAM type: NNNNGHTT; PAM sequence: GAAGGATT
gtcttttctacctaccgcat

SEQ ID NO: 45513 - DNA, 20 bp, Artificial Sequence
  Description of Artificial Sequence: Synthetic oligonucleotide
  Target: LAMA2; (+) strand; PAM type: NNNNGHTT; PAM sequence: CTGGGATT
taagatgagctattatccaa

SEQ ID NO: 45514 - DNA, 20 bp, Artificial Sequence
  Description of Artificial Sequence: Synthetic oligonucleotide
  Target: LAMA2; (+) strand; PAM type: NNNNGHTT; PAM sequence: AAATGTTT
atgaataggtaaatatcact

SEQ ID NO: 45515 - DNA, 20 bp, Artificial Sequence
  Description of Artificial Sequence: Synthetic oligonucleotide
  Target: LAMA2; (+) strand; PAM type: NNNNGHTT; PAM sequence: GTTTGTTT
ataggtaaatatcactaaat

SEQ ID NO: 45516 - DNA, 20 bp, Artificial Sequence
  Description of Artificial Sequence: Synthetic oligonucleotide
  Target: LAMA2; (+) strand; PAM type: NNNNGHTT; PAM sequence: AAATGCTT
gtgccagtattgttgttgat

SEQ ID NO: 45517 - DNA, 20 bp, Artificial Sequence
  Description of Artificial Sequence: Synthetic oligonucleotide
  Target: LAMA2; (+) strand; PAM type: NNNNGHTT; PAM sequence: AAACGATT
tagtatcttaaacataacag

SEQ ID NO: 45518 - DNA, 20 bp, Artificial Sequence
  Description of Artificial Sequence: Synthetic oligonucleotide
  Target: LAMA2; (+) strand; PAM type: NNNNGHTT; PAM sequence: ATTTGATT
taacagaaacgattgcattt

SEQ ID NO: 45519 - DNA, 20 bp, Artificial Sequence
  Description of Artificial Sequence: Synthetic oligonucleotide
  Target: LAMA2; (+) strand; PAM type: NNNNGHTT; PAM sequence: TATAGATT
catttatttgattaaatcac

SEQ ID NO: 45520 - DNA, 20 bp, Artificial Sequence
  Description of Artificial Sequence: Synthetic oligonucleotide
  Target: LAMA2; (+) strand; PAM type: NNNNGHTT; PAM sequence: GTGGGTTT
ttaaatcactatagattaca

SEQ ID NO: 45521 - DNA, 20 bp, Artificial Sequence
  Description of Artificial Sequence: Synthetic oligonucleotide
  Target: LAMA2; (+) strand; PAM type: NNNNGHTT; PAM sequence: ATTTGTTT
aagcactagaaaaaatagca

SEQ ID NO: 45522 - DNA, 20 bp, Artificial Sequence
  Description of Artificial Sequence: Synthetic oligonucleotide
  Target: LAMA2; (+) strand; PAM type: NNNNGHTT; PAM sequence: AGTAGATT
aagtagctacttattttata

SEQ ID NO: 45523 - DNA, 20 bp, Artificial Sequence
  Description of Artificial Sequence: Synthetic oligonucleotide
  Target: LAMA2; (+) strand; PAM type: NNNNGHTT; PAM sequence: AAGGGATT
gttcttagatacgtattact

SEQ ID NO: 45524 - DNA, 20 bp, Artificial Sequence
  Description of Artificial Sequence: Synthetic oligonucleotide
  Target: LAMA2; (+) strand; PAM type: NNNNGHTT; PAM sequence: AAGTGATT
actcatagcatattttgagc

SEQ ID NO: 45525 - DNA, 20 bp, Artificial Sequence
  Description of Artificial Sequence: Synthetic oligonucleotide
  Target: LAMA2; (+) strand; PAM type: NNNNGHTT; PAM sequence: TCTAGATT
aatcatgctgtgcctcaact

SEQ ID NO: 45526 - DNA, 20 bp, Artificial Sequence
  Description of Artificial Sequence: Synthetic oligonucleotide
  Target: LAMA2; (+) strand; PAM type: NNNNGHTT; PAM sequence: AAAAGCTT
gagtcagcatgaacttaaag

SEQ ID NO: 45527 - DNA, 20 bp, Artificial Sequence
  Description of Artificial Sequence: Synthetic oligonucleotide
  Target: LAMA2; (+) strand; PAM type: NNNNGHTT; PAM sequence: ACCAGATT
tctattttagtctttttcct

SEQ ID NO: 45528 - DNA, 20 bp, Artificial Sequence
  Description of Artificial Sequence: Synthetic oligonucleotide
  Target: LAMA2; (+) strand; PAM type: NNNNGHTT; PAM sequence: GTCTGATT
tcaccagaatatgtcattat

SEQ ID NO: 45529 - DNA, 20 bp, Artificial Sequence
  Description of Artificial Sequence: Synthetic oligonucleotide
  Target: LAMA2; (+) strand; PAM type: NNNNGHTT; PAM sequence: CTTTGATT
gccattatctccgtcatgcc

SEQ ID NO: 45530 - DNA, 20 bp, Artificial Sequence
  Description of Artificial Sequence: Synthetic oligonucleotide
  Target: LAMA2; (+) strand; PAM type: NNNNGHTT; PAM sequence: ATTTGTTT
tatctccgtcatgccctttg

SEQ ID NO: 45531 - DNA, 20 bp, Artificial Sequence
  Description of Artificial Sequence: Synthetic oligonucleotide
  Target: LAMA2; (+) strand; PAM type: NNNNGHTT; PAM sequence: AGCTGATT
tttgatttgtttcagaagaa

SEQ ID NO: 45532 - DNA, 20 bp, Artificial Sequence
  Description of Artificial Sequence: Synthetic oligonucleotide
  Target: LAMA2; (+) strand; PAM type: NNNNGHTT; PAM sequence: GGCAGCTT
ggcggggtaaaacagaggga

SEQ ID NO: 45533 - DNA, 20 bp, Artificial Sequence
  Description of Artificial Sequence: Synthetic oligonucleotide
  Target: LAMA2; (+) strand; PAM type: NNNNGHTT; PAM sequence: ATGCGTTT
tctatccctcaaaactaaga

SEQ ID NO: 45534 - DNA, 20 bp, Artificial Sequence
  Description of Artificial Sequence: Synthetic oligonucleotide
  Target: LAMA2; (+) strand; PAM type: NNNNGHTT; PAM sequence: ACAAGATT
actaagaatgcgtttaccaa

SEQ ID NO: 45535 - DNA, 20 bp, Artificial Sequence
  Description of Artificial Sequence: Synthetic oligonucleotide
  Target: LAMA2; (+) strand; PAM type: NNNNGHTT; PAM sequence: ATTTGTTT
cactgatcttgcagagaaaa

SEQ ID NO: 45536 - DNA, 20 bp, Artificial Sequence
  Description of Artificial Sequence: Synthetic oligonucleotide
  Target: LAMA2; (+) strand; PAM type: NNNNGHTT; PAM sequence: AACAGTTT
aaaatttgtttggacaagtt

SEQ ID NO: 45537 - DNA, 20 bp, Artificial Sequence
  Description of Artificial Sequence: Synthetic oligonucleotide
  Target: LAMA2; (+) strand; PAM type: NNNNGHTT; PAM sequence: TTATGTTT
ttaacagttttaactggaat

SEQ ID NO: 45538 - DNA, 20 bp, Artificial Sequence
  Description of Artificial Sequence: Synthetic oligonucleotide
  Target: LAMA2; (+) strand; PAM type: NNNNGHTT; PAM sequence: AAATGATT
gaatccatgtgaatagtata

SEQ ID NO: 45539 - DNA, 20 bp, Artificial Sequence
  Description of Artificial Sequence: Synthetic oligonucleotide
  Target: LAMA2; (+) strand; PAM type: NNNNGHTT; PAM sequence: TCAAGTTT
cgtggaaatactttatatat

SEQ ID NO: 45540 - DNA, 20 bp, Artificial Sequence
  Description of Artificial Sequence: Synthetic oligonucleotide
  Target: LAMA2; (+) strand; PAM type: NNNNGHTT; PAM sequence: TACTGATT
ttctttcctcatgctcttct

SEQ ID NO: 45541 - DNA, 20 bp, Artificial Sequence
  Description of Artificial Sequence: Synthetic oligonucleotide
  Target: LAMA2; (+) strand; PAM type: NNNNGHTT; PAM sequence: TCCTGATT
ctcatgctcttcttactgat

SEQ ID NO: 45542 - DNA, 20 bp, Artificial Sequence
  Description of Artificial Sequence: Synthetic oligonucleotide
  Target: LAMA2; (+) strand; PAM type: NNNNGHTT; PAM sequence: TACTGATT
tcttcttactgattcctgat

SEQ ID NO: 45543 - DNA, 20 bp, Artificial Sequence
  Description of Artificial Sequence: Synthetic oligonucleotide
  Target: LAMA2; (+) strand; PAM type: NNNNGHTT; PAM sequence: AAGAGATT
agagactagggaaacaatgg

SEQ ID NO: 45544 - DNA, 20 bp, Artificial Sequence
  Description of Artificial Sequence: Synthetic oligonucleotide
  Target: LAMA2; (+) strand; PAM type: NNNNGHTT; PAM sequence: TTGGGTTT
gagattagcaaaactgtcac

SEQ ID NO: 45545 - DNA, 20 bp, Artificial Sequence
  Description of Artificial Sequence: Synthetic oligonucleotide
  Target: LAMA2; (+) strand; PAM type: NNNNGHTT; PAM sequence: AAAAGTTT
aaaatataagctaaattgac

SEQ ID NO: 45546 - DNA, 20 bp, Artificial Sequence
  Description of Artificial Sequence: Synthetic oligonucleotide
  Target: LAMA2; (+) strand; PAM type: NNNNGHTT; PAM sequence: AGGAGATT
gagcagatcaatgaagagta

SEQ ID NO: 45547 - DNA, 20 bp, Artificial Sequence
  Description of Artificial Sequence: Synthetic oligonucleotide
  Target: LAMA2; (+) strand; PAM type: NNNNGHTT; PAM sequence: GATGGTTT
caaagaaaagcccagaacct

SEQ ID NO: 45548 - DNA, 20 bp, Artificial Sequence
  Description of Artificial Sequence: Synthetic oligonucleotide
  Target: LAMA2; (+) strand; PAM type: NNNNGHTT; PAM sequence: CATGGTTT
gggatcactaccagggatgc

SEQ ID NO: 45549 - DNA, 20 bp, Artificial Sequence
  Description of Artificial Sequence: Synthetic oligonucleotide
  Target: LAMA2; (+) strand; PAM type: NNNNGHTT; PAM sequence: CATTGTTT
aagcatttgacaaaattcaa

SEQ ID NO: 45550 - DNA, 20 bp, Artificial Sequence
  Description of Artificial Sequence: Synthetic oligonucleotide
  Target: LAMA2; (+) strand; PAM type: NNNNGHTT; PAM sequence: AAAGGTTT
tactcaatagtgaaaagctg

SEQ ID NO: 45551 - DNA, 20 bp, Artificial Sequence
  Description of Artificial Sequence: Synthetic oligonucleotide
  Target: LAMA2; (+) strand; PAM type: NNNNGHTT; PAM sequence: AGAGGATT
tttggtaataaatttaacca

SEQ ID NO: 45552 - DNA, 20 bp, Artificial Sequence
  Description of Artificial Sequence: Synthetic oligonucleotide
  Target: LAMA2; (+) strand; PAM type: NNNNGHTT; PAM sequence: CTATGATT
aaatttaaccaagaggattg

SEQ ID NO: 45553 - DNA, 20 bp, Artificial Sequence
  Description of Artificial Sequence: Synthetic oligonucleotide
  Target: LAMA2; (+) strand; PAM type: NNNNGHTT; PAM sequence: GAGTGTTT
gggagatggctgaatcatgg

SEQ ID NO: 45554 - DNA, 20 bp, Artificial Sequence
  Description of Artificial Sequence: Synthetic oligonucleotide
  Target: LAMA2; (+) strand; PAM type: NNNNGHTT; PAM sequence: GGTAGTTT
tgaaaagtctcatgagatct

SEQ ID NO: 45555 - DNA, 20 bp, Artificial Sequence
  Description of Artificial Sequence: Synthetic oligonucleotide
  Target: LAMA2; (+) strand; PAM type: NNNNGHTT; PAM sequence: AGGGGTTT
tgagatctggtagttttatc

SEQ ID NO: 45556 - DNA, 20 bp, Artificial Sequence
  Description of Artificial Sequence: Synthetic oligonucleotide
  Target: LAMA2; (+) strand; PAM type: NNNNGHTT; PAM sequence: TTCCGCTT
ctggtagttttatcaggggt

SEQ ID NO: 45557 - DNA, 20 bp, Artificial Sequence
  Description of Artificial Sequence: Synthetic oligonucleotide
  Target: LAMA2; (+) strand; PAM type: NNNNGHTT; PAM sequence: CCATGATT
ggactcctccttaccttcca

SEQ ID NO: 45558 - DNA, 20 bp, Artificial Sequence
  Description of Artificial Sequence: Synthetic oligonucleotide
  Target: LAMA2; (+) strand; PAM type: NNNNGHTT; PAM sequence: TGAGGCTT
cttaccttccaccatgattg

SEQ ID NO: 45559 - DNA, 20 bp, Artificial Sequence
  Description of Artificial Sequence: Synthetic oligonucleotide
  Target: LAMA2; (+) strand; PAM type: NNNNGHTT; PAM sequence: TCAGGTTT
cttttgtaaattgcccagtc

SEQ ID NO: 45560 - DNA, 20 bp, Artificial Sequence
  Description of Artificial Sequence: Synthetic oligonucleotide
  Target: LAMA2; (+) strand; PAM type: NNNNGHTT; PAM sequence: CGGGGTTT
ttttgtatttttagtagaga

SEQ ID NO: 45561 - DNA, 20 bp, Artificial Sequence
  Description of Artificial Sequence: Synthetic oligonucleotide
  Target: LAMA2; (+) strand; PAM type: NNNNGHTT; PAM sequence: CACCGTTT
ttttagtagagacggggttt

SEQ ID NO: 45562 - DNA, 20 bp, Artificial Sequence
  Description of Artificial Sequence: Synthetic oligonucleotide
  Target: LAMA2; (+) strand; PAM type: NNNNGHTT; PAM sequence: CTGGGATT
cgcctcggcctcccaaagtg

SEQ ID NO: 45563 - DNA, 20 bp, Artificial Sequence
  Description of Artificial Sequence: Synthetic oligonucleotide
  Target: LAMA2; (+) strand; PAM type: NNNNGHTT; PAM sequence: CTGTGTTT
caaataaatgggaaaacatc

SEQ ID NO: 45564 - DNA, 20 bp, Artificial Sequence
  Description of Artificial Sequence: Synthetic oligonucleotide
  Target: LAMA2; (+) strand; PAM type: NNNNGHTT; PAM sequence: CACAGATT
ccatactactcaatgtgatc

SEQ ID NO: 45565 - DNA, 20 bp, Artificial Sequence
  Description of Artificial Sequence: Synthetic oligonucleotide
  Target: LAMA2; (+) strand; PAM type: NNNNGHTT; PAM sequence: TGACGTTT
aattcttgtcaaaattccaa

SEQ ID NO: 45566 - DNA, 20 bp, Artificial Sequence
  Description of Artificial Sequence: Synthetic oligonucleotide
  Target: LAMA2; (+) strand; PAM type: NNNNGHTT; PAM sequence: AATTGATT
aaatctaagcatttatggtc

SEQ ID NO: 45567 - DNA, 20 bp, Artificial Sequence
  Description of Artificial Sequence: Synthetic oligonucleotide
  Target: LAMA2; (+) strand; PAM type: NNNNGHTT; PAM sequence: ATGGGATT
aaagatgccaagaacacaca

SEQ ID NO: 45568 - DNA, 20 bp, Artificial Sequence
  Description of Artificial Sequence: Synthetic oligonucleotide
  Target: LAMA2; (+) strand; PAM type: NNNNGHTT; PAM sequence: GGGTGTTT
tgaactgtctgtccagtgaa

SEQ ID NO: 45569 - DNA, 20 bp, Artificial Sequence
  Description of Artificial Sequence: Synthetic oligonucleotide
  Target: LAMA2; (+) strand; PAM type: NNNNGHTT; PAM sequence: CAATGATT
ttccatgacattggtctggg

SEQ ID NO: 45570 - DNA, 20 bp, Artificial Sequence
  Description of Artificial Sequence: Synthetic oligonucleotide
  Target: LAMA2; (+) strand; PAM type: NNNNGHTT; PAM sequence: ATGAGATT
acacaataaaacatagacaa

SEQ ID NO: 45571 - DNA, 20 bp, Artificial Sequence
  Description of Artificial Sequence: Synthetic oligonucleotide
  Target: LAMA2; (+) strand; PAM type: NNNNGHTT; PAM sequence: AAGAGATT
tgaataccaaactaacacag

SEQ ID NO: 45572 - DNA, 20 bp, Artificial Sequence
  Description of Artificial Sequence: Synthetic oligonucleotide
  Target: LAMA2; (+) strand; PAM type: NNNNGHTT; PAM sequence: TGTAGATT
tataatatacatgttccaaa

SEQ ID NO: 45573 - DNA, 20 bp, Artificial Sequence
  Description of Artificial Sequence: Synthetic oligonucleotide
  Target: LAMA2; (+) strand; PAM type: NNNNGHTT; PAM sequence: ACCTGTTT
agttaaaatcacagttcttt

SEQ ID NO: 45574 - DNA, 20 bp, Artificial Sequence
  Description of Artificial Sequence: Synthetic oligonucleotide
  Target: LAMA2; (+) strand; PAM type: NNNNGHTT; PAM sequence: TATAGATT
ctttacctgttttaattgta

SEQ ID NO: 45575 - DNA, 20 bp, Artificial Sequence
  Description of Artificial Sequence: Synthetic oligonucleotide
  Target: LAMA2; (+) strand; PAM type: NNNNGHTT; PAM sequence: GCTAGCTT
aattattaataaaggtgaca

SEQ ID NO: 45576 - DNA, 20 bp, Artificial Sequence
  Description of Artificial Sequence: Synthetic oligonucleotide
  Target: LAMA2; (+) strand; PAM type: NNNNGHTT; PAM sequence: ATTGGTTT
tgaagaaaatgttcatccta

SEQ ID NO: 45577 - DNA, 20 bp, Artificial Sequence
  Description of Artificial Sequence: Synthetic oligonucleotide
  Target: LAMA2; (+) strand; PAM type: NNNNGHTT; PAM sequence: TTCCGTTT
aaatgttcatcctaattggt

SEQ ID NO: 45578 - DNA, 20 bp, Artificial Sequence
  Description of Artificial Sequence: Synthetic oligonucleotide
  Target: LAMA2; (+) strand; PAM type: NNNNGHTT; PAM sequence: GTCTGCTT
ttccgtttgtctaccctttg

SEQ ID NO: 45579 - DNA, 20 bp, Artificial Sequence
  Description of Artificial Sequence: Synthetic oligonucleotide
  Target: LAMA2; (+) strand; PAM type: NNNNGHTT; PAM sequence: ACTGGTTT
actttccactaaaagtctct

SEQ ID NO: 45580 - DNA, 20 bp, Artificial Sequence
  Description of Artificial Sequence: Synthetic oligonucleotide
  Target: LAMA2; (+) strand; PAM type: NNNNGHTT; PAM sequence: TGTAGCTT
attattttcttcaatttcaa

SEQ ID NO: 45581 - DNA, 20 bp, Artificial Sequence
  Description of Artificial Sequence: Synthetic oligonucleotide
  Target: LAMA2; (+) strand; PAM type: NNNNGHTT; PAM sequence: GCTTGTTT
ttttcttcaatttcaatgta

SEQ ID NO: 45582 - DNA, 20 bp, Artificial Sequence
  Description of Artificial Sequence: Synthetic oligonucleotide
  Target: LAMA2; (+) strand; PAM type: NNNNGHTT; PAM sequence: TTTGGTTT
agcttgtttcctcacctcct

SEQ ID NO: 45583 - DNA, 20 bp, Artificial Sequence
  Description of Artificial Sequence: Synthetic oligonucleotide
  Target: LAMA2; (+) strand; PAM type: NNNNGHTT; PAM sequence: TCCTGCTT
gtccacttcctaaaccactt

SEQ ID NO: 45584 - DNA, 20 bp, Artificial Sequence
  Description of Artificial Sequence: Synthetic oligonucleotide
  Target: LAMA2; (+) strand; PAM type: NNNNGHTT; PAM sequence: CATTGCTT
gagctatttgttgttgtaat

SEQ ID NO: 45585 - DNA, 20 bp, Artificial Sequence
  Description of Artificial Sequence: Synthetic oligonucleotide
  Target: LAMA2; (+) strand; PAM type: NNNNGHTT; PAM sequence: ATGTGTTT
caacatataggaagcattca

SEQ ID NO: 45586 - DNA, 20 bp, Artificial Sequence
  Description of Artificial Sequence: Synthetic oligonucleotide
  Target: LAMA2; (+) strand; PAM type: NNNNGHTT; PAM sequence: AAAGGATT
tcttattgaatctgagaatt

SEQ ID NO: 45587 - DNA, 20 bp, Artificial Sequence
  Description of Artificial Sequence: Synthetic oligonucleotide
  Target: LAMA2; (+) strand; PAM type: NNNNGHTT; PAM sequence: AAGTGATT
aatctgagaattaaaggatt

SEQ ID NO: 45588 - DNA, 20 bp, Artificial Sequence
  Description of Artificial Sequence: Synthetic oligonucleotide
  Target: LAMA2; (+) strand; PAM type: NNNNGHTT; PAM sequence: CTGTGCTT
taaaggattaagtgatttca

SEQ ID NO: 45589 - DNA, 20 bp, Artificial Sequence
  Description of Artificial Sequence: Synthetic oligonucleotide
  Target: LAMA2; (+) strand; PAM type: NNNNGHTT; PAM sequence: CATTGTTT
tttcctttaaggttgaatgg

SEQ ID NO: 45590 - DNA, 20 bp, Artificial Sequence
  Description of Artificial Sequence: Synthetic oligonucleotide
  Target: LAMA2; (+) strand; PAM type: NNNNGHTT; PAM sequence: GGTGGCTT
tataacaaagtaccagatga

SEQ ID NO: 45591 - DNA, 20 bp, Artificial Sequence
  Description of Artificial Sequence: Synthetic oligonucleotide
  Target: LAMA2; (+) strand; PAM type: NNNNGHTT; PAM sequence: GGAGGCTT
aatttatttctcatagttct

SEQ ID NO: 45592 - DNA, 20 bp, Artificial Sequence
  Description of Artificial Sequence: Synthetic oligonucleotide
  Target: LAMA2; (+) strand; PAM type: NNNNGHTT; PAM sequence: GGCAGATT
acgtccaagatcaaagcact

SEQ ID NO: 45593 - DNA, 20 bp, Artificial Sequence
  Description of Artificial Sequence: Synthetic oligonucleotide
  Target: LAMA2; (+) strand; PAM type: NNNNGHTT; PAM sequence: GTCTGCTT
agattcaatgtctggtgagg

SEQ ID NO: 45594 - DNA, 20 bp, Artificial Sequence
  Description of Artificial Sequence: Synthetic oligonucleotide
  Target: LAMA2; (+) strand; PAM type: NNNNGHTT; PAM sequence: ATAAGCTT
tcacatggcagaaggggcaa

SEQ ID NO: 45595 - DNA, 20 bp, Artificial Sequence
  Description of Artificial Sequence: Synthetic oligonucleotide
  Target: LAMA2; (+) strand; PAM type: NNNNGHTT; PAM sequence: TGGGGTTT
gaaggggcaaataagctttc

SEQ ID NO: 45596 - DNA, 20 bp, Artificial Sequence
  Description of Artificial Sequence: Synthetic oligonucleotide
  Target: LAMA2; (+) strand; PAM type: NNNNGHTT; PAM sequence: TTAGGATT
taataccatcacattagggg

SEQ ID NO: 45597 - DNA, 20 bp, Artificial Sequence
  Description of Artificial Sequence: Synthetic oligonucleotide
  Target: LAMA2; (+) strand; PAM type: NNNNGHTT; PAM sequence: CTCTGCTT
agttcctatgcatgttctta

SEQ ID NO: 45598 - DNA, 20 bp, Artificial Sequence
  Description of Artificial Sequence: Synthetic oligonucleotide
  Target: LAMA2; (+) strand; PAM type: NNNNGHTT; PAM sequence: TACAGCTT
ctatgtgactttaccacact

SEQ ID NO: 45599 - DNA, 20 bp, Artificial Sequence
  Description of Artificial Sequence: Synthetic oligonucleotide
  Target: LAMA2; (+) strand; PAM type: NNNNGHTT; PAM sequence: TTTTGTTT
agaagtctgggactgtcatt

SEQ ID NO: 45600 - DNA, 20 bp, Artificial Sequence
  Description of Artificial Sequence: Synthetic oligonucleotide
  Target: LAMA2; (+) strand; PAM type: NNNNGHTT; PAM sequence: TTTTGCTT
tgggactgtcattttttgtt

SEQ ID NO: 45601 - DNA, 20 bp, Artificial Sequence
  Description of Artificial Sequence: Synthetic oligonucleotide
  Target: LAMA2; (+) strand; PAM type: NNNNGHTT; PAM sequence: TGCTGTTT
gaaaaaaggccatacaatga

SEQ ID NO: 45602 - DNA, 20 bp, Artificial Sequence
  Description of Artificial Sequence: Synthetic oligonucleotide
  Target: LAMA2; (+) strand; PAM type: NNNNGHTT; PAM sequence: AAATGCTT
gtcaagatgactgccctaga

SEQ ID NO: 45603 - DNA, 20 bp, Artificial Sequence
  Description of Artificial Sequence: Synthetic oligonucleotide
  Target: LAMA2; (+) strand; PAM type: NNNNGHTT; PAM sequence: AGATGATT
ttgaagtcatggaataaatt

SEQ ID NO: 45604 - DNA, 20 bp, Artificial Sequence
  Description of Artificial Sequence: Synthetic oligonucleotide
  Target: LAMA2; (+) strand; PAM type: NNNNGHTT; PAM sequence: GATTGTTT
agtcatggaataaattagat

SEQ ID NO: 45605 - DNA, 20 bp, Artificial Sequence
  Description of Artificial Sequence: Synthetic oligonucleotide
  Target: LAMA2; (+) strand; PAM type: NNNNGHTT; PAM sequence: AATAGATT
gtctgaacaagactttctaa

SEQ ID NO: 45606 - DNA, 20 bp, Artificial Sequence
  Description of Artificial Sequence: Synthetic oligonucleotide
  Target: LAMA2; (+) strand; PAM type: NNNNGHTT; PAM sequence: GGCAGTTT
tctaaaatagattgaatgtg

SEQ ID NO: 45607 - DNA, 20 bp, Artificial Sequence
  Description of Artificial Sequence: Synthetic oligonucleotide
  Target: LAMA2; (+) strand; PAM type: NNNNGHTT; PAM sequence: TAGAGTTT
gtattttccaattttattct

SEQ ID NO: 45608 - DNA, 20 bp, Artificial Sequence
  Description of Artificial Sequence: Synthetic oligonucleotide
  Target: LAMA2; (+) strand; PAM type: NNNNGHTT; PAM sequence: TTATGCTT
tttaattttttacttacata

SEQ ID NO: 45609 - DNA, 20 bp, Artificial Sequence
  Description of Artificial Sequence: Synthetic oligonucleotide
  Target: LAMA2; (+) strand; PAM type: NNNNGHTT; PAM sequence: ATTTGTTT
gaattaaaaacaattatatt

SEQ ID NO: 45610 - DNA, 20 bp, Artificial Sequence
  Description of Artificial Sequence: Synthetic oligonucleotide
  Target: LAMA2; (+) strand; PAM type: NNNNGHTT; PAM sequence: AATGGCTT
cagagaaaattcttgagtca

SEQ ID NO: 45611 - DNA, 20 bp, Artificial Sequence
  Description of Artificial Sequence: Synthetic oligonucleotide
  Target: LAMA2; (+) strand; PAM type: NNNNGHTT; PAM sequence: GAAAGTTT
tgactgggagagggtatgag

SEQ ID NO: 45612 - DNA, 20 bp, Artificial Sequence
  Description of Artificial Sequence: Synthetic oligonucleotide
  Target: LAMA2; (+) strand; PAM type: NNNNGHTT; PAM sequence: TTTTGATT
aggaaagtttcatttcttat

SEQ ID NO: 45613 - DNA, 20 bp, Artificial Sequence
  Description of Artificial Sequence: Synthetic oligonucleotide
  Target: LAMA2; (+) strand; PAM type: NNNNGHTT; PAM sequence: GTGTGTTT
actaatataattgtaaataa

SEQ ID NO: 45614 - DNA, 20 bp, Artificial Sequence
  Description of Artificial Sequence: Synthetic oligonucleotide
  Target: LAMA2; (+) strand; PAM type: NNNNGHTT; PAM sequence: GTATGTTT
tttgaattgtgagacagcat

SEQ ID NO: 45615 - DNA, 20 bp, Artificial Sequence
  Description of Artificial Sequence: Synthetic oligonucleotide
  Target: LAMA2; (+) strand; PAM type: NNNNGHTT; PAM sequence: TTTTGATT
attgtgagacagcatgtatg

SEQ ID NO: 45616 - DNA, 20 bp, Artificial Sequence
  Description of Artificial Sequence: Synthetic oligonucleotide
  Target: LAMA2; (+) strand; PAM type: NNNNGHTT; PAM sequence: ATATGTTT
tgttttgattcatagataag

SEQ ID NO: 45617 - DNA, 20 bp, Artificial Sequence
  Description of Artificial Sequence: Synthetic oligonucleotide
  Target: LAMA2; (+) strand; PAM type: NNNNGHTT; PAM sequence: CCCAGATT
aaggaggagctataagtgtg

SEQ ID NO: 45618 - DNA, 20 bp, Artificial Sequence
  Description of Artificial Sequence: Synthetic oligonucleotide
  Target: LAMA2; (+) strand; PAM type: NNNNGHTT; PAM sequence: AAATGCTT
ataacaaaacaaaagctcaa

SEQ ID NO: 45619 - DNA, 20 bp, Artificial Sequence
  Description of Artificial Sequence: Synthetic oligonucleotide
  Target: LAMA2; (+) strand; PAM type: NNNNGHTT; PAM sequence: GAAAGCTT
gacattaatatttctatgga

SEQ ID NO: 45620 - DNA, 20 bp, Artificial Sequence
  Description of Artificial Sequence: Synthetic oligonucleotide
  Target: LAMA2; (+) strand; PAM type: NNNNGHTT; PAM sequence: AACAGCTT
gtgcattgaaactcttttgt

SEQ ID NO: 45621 - DNA, 20 bp, Artificial Sequence
  Description of Artificial Sequence: Synthetic oligonucleotide
  Target: LAMA2; (+) strand; PAM type: NNNNGHTT; PAM sequence: TCCAGATT
ctgttgttgtcatgatatcc

SEQ ID NO: 45622 - DNA, 20 bp, Artificial Sequence
  Description of Artificial Sequence: Synthetic oligonucleotide
  Target: LAMA2; (+) strand; PAM type: NNNNGHTT; PAM sequence: AAAAGCTT
tactagtatgctctttcctt

SEQ ID NO: 45623 - DNA, 20 bp, Artificial Sequence
  Description of Artificial Sequence: Synthetic oligonucleotide
  Target: LAMA2; (+) strand; PAM type: NNNNGHTT; PAM sequence: TTCTGATT
tgctctttccttaaaagctt

SEQ ID NO: 45624 - DNA, 20 bp, Artificial Sequence
  Description of Artificial Sequence: Synthetic oligonucleotide
  Target: LAMA2; (+) strand; PAM type: NNNNGHTT; PAM sequence: TACAGTTT
atatcaatcttgttattatg

SEQ ID NO: 45625 - DNA, 20 bp, Artificial Sequence
  Description of Artificial Sequence: Synthetic oligonucleotide
  Target: LAMA2; (+) strand; PAM type: NNNNGHTT; PAM sequence: TGAAGTTT
gtctcattaatggcatatag

SEQ ID NO: 45626 - DNA, 20 bp, Artificial Sequence
  Description of Artificial Sequence: Synthetic oligonucleotide
  Target: LAMA2; (+) strand; PAM type: NNNNGHTT; PAM sequence: TGACGTTT
aatggcatatagtgaagttt

SEQ ID NO: 45627 - DNA, 20 bp, Artificial Sequence
  Description of Artificial Sequence: Synthetic oligonucleotide
  Target: LAMA2; (+) strand; PAM type: NNNNGHTT; PAM sequence: TCTAGTTT
agtgaagttttgacgttttg

SEQ ID NO: 45628 - DNA, 20 bp, Artificial Sequence
  Description of Artificial Sequence: Synthetic oligonucleotide
  Target: LAMA2; (+) strand; PAM type: NNNNGHTT; PAM sequence: AGGAGTTT
ccagtgaagccatttgatct

SEQ ID NO: 45629 - DNA, 20 bp, Artificial Sequence
  Description of Artificial Sequence: Synthetic oligonucleotide
  Target: LAMA2; (+) strand; PAM type: NNNNGHTT; PAM sequence: ATGGGTTT
tctaggagttttctctgtgc

SEQ ID NO: 45630 - DNA, 20 bp, Artificial Sequence
  Description of Artificial Sequence: Synthetic oligonucleotide
  Target: LAMA2; (+) strand; PAM type: NNNNGHTT; PAM sequence: CACAGATT
ctctgtgcatgggttttagt

SEQ ID NO: 45631 - DNA, 20 bp, Artificial Sequence
  Description of Artificial Sequence: Synthetic oligonucleotide
  Target: LAMA2; (+) strand; PAM type: NNNNGHTT; PAM sequence: TGGAGTTT
ataataaatgtgggactcac

SEQ ID NO: 45632 - DNA, 20 bp, Artificial Sequence
  Description of Artificial Sequence: Synthetic oligonucleotide
  Target: LAMA2; (+) strand; PAM type: NNNNGHTT; PAM sequence: TTCAGTTT
gagttttcatttcttatatt

SEQ ID NO: 45633 - DNA, 20 bp, Artificial Sequence
  Description of Artificial Sequence: Synthetic oligonucleotide
  Target: LAMA2; (+) strand; PAM type: NNNNGHTT; PAM sequence: TTGGGCTT
atattttcagtttagttgag

SEQ ID NO: 45634 - DNA, 20 bp, Artificial Sequence
  Description of Artificial Sequence: Synthetic oligonucleotide
  Target: LAMA2; (+) strand; PAM type: NNNNGHTT; PAM sequence: CTTTGTTT
tccagatattgttgtgtaac

SEQ ID NO: 45635 - DNA, 20 bp, Artificial Sequence
  Description of Artificial Sequence: Synthetic oligonucleotide
  Target: LAMA2; (+) strand; PAM type: NNNNGHTT; PAM sequence: TACAGCTT
tgtaacctttgtttttcctt

SEQ ID NO: 45636 - DNA, 20 bp, Artificial Sequence
  Description of Artificial Sequence: Synthetic oligonucleotide
  Target: LAMA2; (+) strand; PAM type: NNNNGHTT; PAM sequence: GCCAGTTT
tcattagtctttttcaaata

SEQ ID NO: 45637 - DNA, 20 bp, Artificial Sequence
  Description of Artificial Sequence: Synthetic oligonucleotide
  Target: LAMA2; (+) strand; PAM type: NNNNGHTT; PAM sequence: TTGGGCTT
tctttttcaaatagccagtt

SEQ ID NO: 45638 - DNA, 20 bp, Artificial Sequence
  Description of Artificial Sequence: Synthetic oligonucleotide
  Target: LAMA2; (+) strand; PAM type: NNNNGHTT; PAM sequence: GCTTGATT
tttcaaatagccagttttgg

SEQ ID NO: 45639 - DNA, 20 bp, Artificial Sequence
  Description of Artificial Sequence: Synthetic oligonucleotide
  Target: LAMA2; (+) strand; PAM type: NNNNGHTT; PAM sequence: GATTGATT
aaatagccagttttgggctt

SEQ ID NO: 45640 - DNA, 20 bp, Artificial Sequence
  Description of Artificial Sequence: Synthetic oligonucleotide
  Target: LAMA2; (+) strand; PAM type: NNNNGHTT; PAM sequence: TCTTGTTT
ttgaatcctgctcttatatg

SEQ ID NO: 45641 - DNA, 20 bp, Artificial Sequence
  Description of Artificial Sequence: Synthetic oligonucleotide
  Target: LAMA2; (+) strand; PAM type: NNNNGHTT; PAM sequence: TTTAGTTT
tacttctcgttattttttat

SEQ ID NO: 45642 - DNA, 20 bp, Artificial Sequence
  Description of Artificial Sequence: Synthetic oligonucleotide
  Target: LAMA2; (+) strand; PAM type: NNNNGHTT; PAM sequence: CTTAGCTT
attttagtttactacatttt

SEQ ID NO: 45643 - DNA, 20 bp, Artificial Sequence
  Description of Artificial Sequence: Synthetic oligonucleotide
  Target: LAMA2; (+) strand; PAM type: NNNNGHTT; PAM sequence: TAGGGCTT
gcctacaatttgcctctaca

SEQ ID NO: 45644 - DNA, 20 bp, Artificial Sequence
  Description of Artificial Sequence: Synthetic oligonucleotide
  Target: LAMA2; (+) strand; PAM type: NNNNGHTT; PAM sequence: ACAAGTTT
tagggctttagttgcctcct

SEQ ID NO: 45645 - DNA, 20 bp, Artificial Sequence
  Description of Artificial Sequence: Synthetic oligonucleotide
  Target: LAMA2; (+) strand; PAM type: NNNNGHTT; PAM sequence: AAGTGCTT
ctctgagttatatagaagtg

SEQ ID NO: 45646 - DNA, 20 bp, Artificial Sequence
  Description of Artificial Sequence: Synthetic oligonucleotide
  Target: LAMA2; (+) strand; PAM type: NNNNGHTT; PAM sequence: AATCGTTT
gaacaattgagtatttttct

SEQ ID NO: 45647 - DNA, 20 bp, Artificial Sequence
  Description of Artificial Sequence: Synthetic oligonucleotide
  Target: LAMA2; (+) strand; PAM type: NNNNGHTT; PAM sequence: TTTTGTTT
attgagtatttttctaatcg

SEQ ID NO: 45648 - DNA, 20 bp, Artificial Sequence
  Description of Artificial Sequence: Synthetic oligonucleotide
  Target: LAMA2; (+) strand; PAM type: NNNNGHTT; PAM sequence: ACTTGTTT
ttgagactaaactttttgag

SEQ ID NO: 45649 - DNA, 20 bp, Artificial Sequence
  Description of Artificial Sequence: Synthetic oligonucleotide
  Target: LAMA2; (+) strand; PAM type: NNNNGHTT; PAM sequence: GATGGCTT
ttgggaggccaaggcaggcg

SEQ ID NO: 45650 - DNA, 20 bp, Artificial Sequence
  Description of Artificial Sequence: Synthetic oligonucleotide
  Target: LAMA2; (+) strand; PAM type: NNNNGHTT; PAM sequence: CCGAGATT
gaggtagaggttgtggtgag

SEQ ID NO: 45651 - DNA, 20 bp, Artificial Sequence
  Description of Artificial Sequence: Synthetic oligonucleotide
  Target: LAMA2; (+) strand; PAM type: NNNNGHTT; PAM sequence: TGCAGATT
aaaaaaagcaaagaaaagaa

SEQ ID NO: 45652 - DNA, 20 bp, Artificial Sequence
  Description of Artificial Sequence: Synthetic oligonucleotide
  Target: LAMA2; (+) strand; PAM type: NNNNGHTT; PAM sequence: TTAGGATT
taaattagagacatacaaat

SEQ ID NO: 45653 - DNA, 20 bp, Artificial Sequence
  Description of Artificial Sequence: Synthetic oligonucleotide
  Target: LAMA2; (+) strand; PAM type: NNNNGHTT; PAM sequence: TGTAGATT
ctttagagtgtacttttgta

SEQ ID NO: 45654 - DNA, 20 bp, Artificial Sequence
  Description of Artificial Sequence: Synthetic oligonucleotide
  Target: LAMA2; (+) strand; PAM type: NNNNGHTT; PAM sequence: ACTAGCTT
gtacttttgtatgtagattc

SEQ ID NO: 45655 - DNA, 20 bp, Artificial Sequence
  Description of Artificial Sequence: Synthetic oligonucleotide
  Target: LAMA2; (+) strand; PAM type: NNNNGHTT; PAM sequence: CTGTGTTT
tcactagcttccttttttct

SEQ ID NO: 45656 - DNA, 20 bp, Artificial Sequence
  Description of Artificial Sequence: Synthetic oligonucleotide
  Target: LAMA2; (+) strand; PAM type: NNNNGHTT; PAM sequence: ATAGGTTT
tttctctgtgtttgcgtgat

SEQ ID NO: 45657 - DNA, 20 bp, Artificial Sequence
  Description of Artificial Sequence: Synthetic oligonucleotide
  Target: LAMA2; (+) strand; PAM type: NNNNGHTT; PAM sequence: AATTGTTT
ctgtgagcagcataaatttg

SEQ ID NO: 45658 - DNA, 20 bp, Artificial Sequence
  Description of Artificial Sequence: Synthetic oligonucleotide
  Target: LAMA2; (+) strand; PAM type: NNNNGHTT; PAM sequence: ATCTGTTT
gttcaaattaccatattctc

SEQ ID NO: 45659 - DNA, 20 bp, Artificial Sequence
  Description of Artificial Sequence: Synthetic oligonucleotide
  Target: LAMA2; (+) strand; PAM type: NNNNGHTT; PAM sequence: TTCTGTTT
ttaccatattctcatctgtt

SEQ ID NO: 45660 - DNA, 20 bp, Artificial Sequence
  Description of Artificial Sequence: Synthetic oligonucleotide
  Target: LAMA2; (+) strand; PAM type: NNNNGHTT; PAM sequence: GAAGGTTT
tttcttacttttggaatact

SEQ ID NO: 45661 - DNA, 20 bp, Artificial Sequence
  Description of Artificial Sequence: Synthetic oligonucleotide
  Target: LAMA2; (+) strand; PAM type: NNNNGHTT; PAM sequence: ATTAGCTT
attattccatttcttctttc

SEQ ID NO: 45662 - DNA, 20 bp, Artificial Sequence
  Description of Artificial Sequence: Synthetic oligonucleotide
  Target: LAMA2; (+) strand; PAM type: NNNNGHTT; PAM sequence: ATCAGATT
tacctcagtcccacctcccc

SEQ ID NO: 45663 - DNA, 20 bp, Artificial Sequence
  Description of Artificial Sequence: Synthetic oligonucleotide
  Target: LAMA2; (+) strand; PAM type: NNNNGHTT; PAM sequence: ATATGTTT
gatttaattctatagttctc

SEQ ID NO: 45664 - DNA, 20 bp, Artificial Sequence
  Description of Artificial Sequence: Synthetic oligonucleotide
  Target: LAMA2; (+) strand; PAM type: NNNNGHTT; PAM sequence: TGCAGTTT
aattgttaccatcataaaca

SEQ ID NO: 45665 - DNA, 20 bp, Artificial Sequence
  Description of Artificial Sequence: Synthetic oligonucleotide
  Target: LAMA2; (+) strand; PAM type: NNNNGHTT; PAM sequence: TTTTGTTT
attttaaacacctttaactt

SEQ ID NO: 45666 - DNA, 20 bp, Artificial Sequence
  Description of Artificial Sequence: Synthetic oligonucleotide
  Target: LAMA2; (+) strand; PAM type: NNNNGHTT; PAM sequence: CTTTGTTT
gtttattttttgttagtata

SEQ ID NO: 45667 - DNA, 20 bp, Artificial Sequence
  Description of Artificial Sequence: Synthetic oligonucleotide
  Target: LAMA2; (+) strand; PAM type: NNNNGHTT; PAM sequence: TTTTGTTT
ctagtgataaatctctcatc

SEQ ID NO: 45668 - DNA, 20 bp, Artificial Sequence
  Description of Artificial Sequence: Synthetic oligonucleotide
  Target: LAMA2; (+) strand; PAM type: NNNNGHTT; PAM sequence: GTTTGTTT
tgataaatctctcatctttt

SEQ ID NO: 45669 - DNA, 20 bp, Artificial Sequence
  Description of Artificial Sequence: Synthetic oligonucleotide
  Target: LAMA2; (+) strand; PAM type: NNNNGHTT; PAM sequence: TTTTGTTT
aatttcttgcctggttggaa

SEQ ID NO: 45670 - DNA, 20 bp, Artificial Sequence
  Description of Artificial Sequence: Synthetic oligonucleotide
  Target: LAMA2; (+) strand; PAM type: NNNNGHTT; PAM sequence: TTTTGTTT
cttgcctggttggaattttg

SEQ ID NO: 45671 - DNA, 20 bp, Artificial Sequence
  Description of Artificial Sequence: Synthetic oligonucleotide
  Target: LAMA2; (+) strand; PAM type: NNNNGHTT; PAM sequence: TTTTGTTT
ctggttggaattttgttttg

SEQ ID NO: 45672 - DNA, 20 bp, Artificial Sequence
  Description of Artificial Sequence: Synthetic oligonucleotide
  Target: LAMA2; (+) strand; PAM type: NNNNGHTT; PAM sequence: ACTTGTTT
aaatatatcctatcattatt

SEQ ID NO: 45673 - DNA, 20 bp, Artificial Sequence
  Description of Artificial Sequence: Synthetic oligonucleotide
  Target: LAMA2; (+) strand; PAM type: NNNNGHTT; PAM sequence: TTTTGCTT
ttgaaggctattttttttaa

SEQ ID NO: 45674 - DNA, 20 bp, Artificial Sequence
  Description of Artificial Sequence: Synthetic oligonucleotide
  Target: LAMA2; (+) strand; PAM type: NNNNGHTT; PAM sequence: AGGGGTTT
taattttgcttttggtgttc

SEQ ID NO: 45675 - DNA, 20 bp, Artificial Sequence
  Description of Artificial Sequence: Synthetic oligonucleotide
  Target: LAMA2; (+) strand; PAM type: NNNNGHTT; PAM sequence: GAATGATT
gtttaccacaatgtacttag

SEQ ID NO: 45676 - DNA, 20 bp, Artificial Sequence
  Description of Artificial Sequence: Synthetic oligonucleotide
  Target: LAMA2; (+) strand; PAM type: NNNNGHTT; PAM sequence: TTGGGATT
tttattggtattaatactat

SEQ ID NO: 45677 - DNA, 20 bp, Artificial Sequence
  Description of Artificial Sequence: Synthetic oligonucleotide
  Target: LAMA2; (+) strand; PAM type: NNNNGHTT; PAM sequence: AAAAGCTT
attaatactatttgggattc

SEQ ID NO: 45678 - DNA, 20 bp, Artificial Sequence
  Description of Artificial Sequence: Synthetic oligonucleotide
  Target: LAMA2; (+) strand; PAM type: NNNNGHTT; PAM sequence: TCTAGATT
ctatttgggattcaaaagct

SEQ ID NO: 45679 - DNA, 20 bp, Artificial Sequence
  Description of Artificial Sequence: Synthetic oligonucleotide
  Target: LAMA2; (+) strand; PAM type: NNNNGHTT; PAM sequence: GACCGTTT
cttcagtcacatccctgcta

SEQ ID NO: 45680 - DNA, 20 bp, Artificial Sequence
  Description of Artificial Sequence: Synthetic oligonucleotide
  Target: LAMA2; (+) strand; PAM type: NNNNGHTT; PAM sequence: TATGGCTT
gccgtgctcattatgtattc

SEQ ID NO: 45681 - DNA, 20 bp, Artificial Sequence
  Description of Artificial Sequence: Synthetic oligonucleotide
  Target: LAMA2; (+) strand; PAM type: NNNNGHTT; PAM sequence: TGAGGTTT
tcatttgtcttctcttcttt

SEQ ID NO: 45682 - DNA, 20 bp, Artificial Sequence
  Description of Artificial Sequence: Synthetic oligonucleotide
  Target: LAMA2; (+) strand; PAM type: NNNNGHTT; PAM sequence: TGTTGTTT
tgtacattttctgggtgacc

SEQ ID NO: 45683 - DNA, 20 bp, Artificial Sequence
  Description of Artificial Sequence: Synthetic oligonucleotide
  Target: LAMA2; (+) strand; PAM type: NNNNGHTT; PAM sequence: GCTGGATT
ataaataatcccttttttct

SEQ ID NO: 45684 - DNA, 20 bp, Artificial Sequence
  Description of Artificial Sequence: Synthetic oligonucleotide
  Target: LAMA2; (+) strand; PAM type: NNNNGHTT; PAM sequence: ACTGGATT
atcttctattacatacattt

SEQ ID NO: 45685 - DNA, 20 bp, Artificial Sequence
  Description of Artificial Sequence: Synthetic oligonucleotide
  Target: LAMA2; (+) strand; PAM type: NNNNGHTT; PAM sequence: TTTAGTTT
taatttttgtatttttattt

SEQ ID NO: 45686 - DNA, 20 bp, Artificial Sequence
  Description of Artificial Sequence: Synthetic oligonucleotide
  Target: LAMA2; (+) strand; PAM type: NNNNGHTT; PAM sequence: GTCTGTTT
gacgttggaaacaactggga

SEQ ID NO: 45687 - DNA, 20 bp, Artificial Sequence
  Description of Artificial Sequence: Synthetic oligonucleotide
  Target: LAMA2; (+) strand; PAM type: NNNNGHTT; PAM sequence: TCCTGTTT
tctattgtcttttcatgcat

SEQ ID NO: 45688 - DNA, 20 bp, Artificial Sequence
  Description of Artificial Sequence: Synthetic oligonucleotide
  Target: LAMA2; (+) strand; PAM type: NNNNGHTT; PAM sequence: ACAAGCTT
tcatgcattcctgttttatg

SEQ ID NO: 45689 - DNA, 20 bp, Artificial Sequence
  Description of Artificial Sequence: Synthetic oligonucleotide
  Target: LAMA2; (+) strand; PAM type: NNNNGHTT; PAM sequence: GGTCGTTT
tcctgttttatgacaagctt

SEQ ID NO: 45690 - DNA, 20 bp, Artificial Sequence
  Description of Artificial Sequence: Synthetic oligonucleotide
  Target: LAMA2; (+) strand; PAM type: NNNNGHTT; PAM sequence: TTTTGATT
tttatgacaagcttggtcgt

SEQ ID NO: 45691 - DNA, 20 bp, Artificial Sequence
  Description of Artificial Sequence: Synthetic oligonucleotide
  Target: LAMA2; (+) strand; PAM type: NNNNGHTT; PAM sequence: AAATGATT
aagatgttatttttctctta

SEQ ID NO: 45692 - DNA, 20 bp, Artificial Sequence
  Description of Artificial Sequence: Synthetic oligonucleotide
  Target: LAMA2; (+) strand; PAM type: NNNNGHTT; PAM sequence: AGTTGCTT
caagagttagtgtagaggca

SEQ ID NO: 45693 - DNA, 20 bp, Artificial Sequence
  Description of Artificial Sequence: Synthetic oligonucleotide
  Target: LAMA2; (+) strand; PAM type: NNNNGHTT; PAM sequence: CTTTGCTT
gttagtgtagaggcaagttg

SEQ ID NO: 45694 - DNA, 20 bp, Artificial Sequence
  Description of Artificial Sequence: Synthetic oligonucleotide
  Target: LAMA2; (+) strand; PAM type: NNNNGHTT; PAM sequence: AAATGTTT
tttgcttcagtcagcaactc

SEQ ID NO: 45695 - DNA, 20 bp, Artificial Sequence
  Description of Artificial Sequence: Synthetic oligonucleotide
  Target: LAMA2; (+) strand; PAM type: NNNNGHTT; PAM sequence: TGTAGCTT
agtcagcaactcaaatgttt

SEQ ID NO: 45696 - DNA, 20 bp, Artificial Sequence
  Description of Artificial Sequence: Synthetic oligonucleotide
  Target: LAMA2; (+) strand; PAM type: NNNNGHTT; PAM sequence: TAGAGATT
caaatgttttgtagcttagt

SEQ ID NO: 45697 - DNA, 20 bp, Artificial Sequence
  Description of Artificial Sequence: Synthetic oligonucleotide
  Target: LAMA2; (+) strand; PAM type: NNNNGHTT; PAM sequence: GGTTGTTT
gcttagttagagattctgat

SEQ ID NO: 45698 - DNA, 20 bp, Artificial Sequence
  Description of Artificial Sequence: Synthetic oligonucleotide
  Target: LAMA2; (+) strand; PAM type: NNNNGHTT; PAM sequence: TCTAGTTT
tagagattctgatggttgtt

SEQ ID NO: 45699 - DNA, 20 bp, Artificial Sequence
  Description of Artificial Sequence: Synthetic oligonucleotide
  Target: LAMA2; (+) strand; PAM type: NNNNGHTT; PAM sequence: ACTTGTTT
ggactccagtggaaaccccg

SEQ ID NO: 45700 - DNA, 20 bp, Artificial Sequence
  Description of Artificial Sequence: Synthetic oligonucleotide
  Target: LAMA2; (+) strand; PAM type: NNNNGHTT; PAM sequence: CAAAGTTT
tcttggctgactcttaactc

SEQ ID NO: 45701 - DNA, 20 bp, Artificial Sequence
  Description of Artificial Sequence: Synthetic oligonucleotide
  Target: LAMA2; (+) strand; PAM type: NNNNGHTT; PAM sequence: CTTAGTTT
ggagacttcccaaggatctt

SEQ ID NO: 45702 - DNA, 20 bp, Artificial Sequence
  Description of Artificial Sequence: Synthetic oligonucleotide
  Target: LAMA2; (+) strand; PAM type: NNNNGHTT; PAM sequence: TGATGTTT
ctcatgagttcatttttgca

SEQ ID NO: 45703 - DNA, 20 bp, Artificial Sequence
  Description of Artificial Sequence: Synthetic oligonucleotide
  Target: LAMA2; (+) strand; PAM type: NNNNGHTT; PAM sequence: TAATGTTT
gacttcatagccctgaattc

SEQ ID NO: 45704 - DNA, 20 bp, Artificial Sequence
  Description of Artificial Sequence: Synthetic oligonucleotide
  Target: LAMA2; (+) strand; PAM type: NNNNGHTT; PAM sequence: GTGAGATT
aatgtttatcttcttatcct

SEQ ID NO: 45705 - DNA, 20 bp, Artificial Sequence
  Description of Artificial Sequence: Synthetic oligonucleotide
  Target: LAMA2; (+) strand; PAM type: NNNNGHTT; PAM sequence: TGTAGCTT
gattgctgaacacactaaga

SEQ ID NO: 45706 - DNA, 20 bp, Artificial Sequence
  Description of Artificial Sequence: Synthetic oligonucleotide
  Target: LAMA2; (+) strand; PAM type: NNNNGHTT; PAM sequence: GCTAGCTT
agtaccctgagaggaaaatg

SEQ ID NO: 45707 - DNA, 20 bp, Artificial Sequence
  Description of Artificial Sequence: Synthetic oligonucleotide
  Target: LAMA2; (+) strand; PAM type: NNNNGHTT; PAM sequence: ATTTGCTT
aaaatggctagcttacctta

SEQ ID NO: 45708 - DNA, 20 bp, Artificial Sequence
  Description of Artificial Sequence: Synthetic oligonucleotide
  Target: LAMA2; (+) strand; PAM type: NNNNGHTT; PAM sequence: GGTTGCTT
tacttaagtctggctgcctt

SEQ ID NO: 45709 - DNA, 20 bp, Artificial Sequence
  Description of Artificial Sequence: Synthetic oligonucleotide
  Target: LAMA2; (+) strand; PAM type: NNNNGHTT; PAM sequence: TGCTGTTT
gcttgctgatgccttcaaac

SEQ ID NO: 45710 - DNA, 20 bp, Artificial Sequence
  Description of Artificial Sequence: Synthetic oligonucleotide
  Target: LAMA2; (+) strand; PAM type: NNNNGHTT; PAM sequence: TCCAGCTT
ctgctgtttttagtatttta

SEQ ID NO: 45711 - DNA, 20 bp, Artificial Sequence
  Description of Artificial Sequence: Synthetic oligonucleotide
  Target: LAMA2; (+) strand; PAM type: NNNNGHTT; PAM sequence: TACAGTTT
gaaaaaatatttattttatt

SEQ ID NO: 45712 - DNA, 20 bp, Artificial Sequence
  Description of Artificial Sequence: Synthetic oligonucleotide
  Target: LAMA2; (+) strand; PAM type: NNNNGHTT; PAM sequence: TATTGCTT
atattatctgataaaattat

SEQ ID NO: 45713 - DNA, 20 bp, Artificial Sequence
  Description of Artificial Sequence: Synthetic oligonucleotide
  Target: LAMA2; (+) strand; PAM type: NNNNGHTT; PAM sequence: TATTGCTT
atttaaggaatgttctgaat

SEQ ID NO: 45714 - DNA, 20 bp, Artificial Sequence
  Description of Artificial Sequence: Synthetic oligonucleotide
  Target: LAMA2; (+) strand; PAM type: NNNNGHTT; PAM sequence: GATGGATT
aataattattggaacatttt

SEQ ID NO: 45715 - DNA, 20 bp, Artificial Sequence
  Description of Artificial Sequence: Synthetic oligonucleotide
  Target: LAMA2; (+) strand; PAM type: NNNNGHTT; PAM sequence: AGAAGCTT
agcaggtgctattcttagta

SEQ ID NO: 45716 - DNA, 20 bp, Artificial Sequence
  Description of Artificial Sequence: Synthetic oligonucleotide
  Target: LAMA2; (+) strand; PAM type: NNNNGHTT; PAM sequence: ATGCGTTT
aaagaaaataatttaacaat

SEQ ID NO: 45717 - DNA, 20 bp, Artificial Sequence
  Description of Artificial Sequence: Synthetic oligonucleotide
  Target: LAMA2; (+) strand; PAM type: NNNNGHTT; PAM sequence: TACTGTTT
aaaaatatttgttgagcaac

SEQ ID NO: 45718 - DNA, 20 bp, Artificial Sequence
  Description of Artificial Sequence: Synthetic oligonucleotide
  Target: LAMA2; (+) strand; PAM type: NNNNGHTT; PAM sequence: CAGGGTTT
agacaggagtccttgcattc

SEQ ID NO: 45719 - DNA, 20 bp, Artificial Sequence
  Description of Artificial Sequence: Synthetic oligonucleotide
  Target: LAMA2; (+) strand; PAM type: NNNNGHTT; PAM sequence: ATAAGATT
aagttcatgaaaaaaaaagc

SEQ ID NO: 45720 - DNA, 20 bp, Artificial Sequence
  Description of Artificial Sequence: Synthetic oligonucleotide
  Target: LAMA2; (+) strand; PAM type: NNNNGHTT; PAM sequence: ATAAGATT
aaaaaaagcataagattata

SEQ ID NO: 45721 - DNA, 20 bp, Artificial Sequence
  Description of Artificial Sequence: Synthetic oligonucleotide
  Target: LAMA2; (+) strand; PAM type: NNNNGHTT; PAM sequence: TAGAGTTT
cagtcatagaaaaatctggg

SEQ ID NO: 45722 - DNA, 20 bp, Artificial Sequence
  Description of Artificial Sequence: Synthetic oligonucleotide
  Target: LAMA2; (+) strand; PAM type: NNNNGHTT; PAM sequence: AACAGTTT
gggagtagtcagtcatgata

SEQ ID NO: 45723 - DNA, 20 bp, Artificial Sequence
  Description of Artificial Sequence: Synthetic oligonucleotide
  Target: LAMA2; (+) strand; PAM type: NNNNGHTT; PAM sequence: ACATGATT
gtggtatttaagcaggtgta

SEQ ID NO: 45724 - DNA, 20 bp, Artificial Sequence
  Description of Artificial Sequence: Synthetic oligonucleotide
  Target: LAMA2; (+) strand; PAM type: NNNNGHTT; PAM sequence: GAATGATT
gtaacattctgctaaatgga

SEQ ID NO: 45725 - DNA, 20 bp, Artificial Sequence
  Description of Artificial Sequence: Synthetic oligonucleotide
  Target: LAMA2; (+) strand; PAM type: NNNNGHTT; PAM sequence: CTGAGATT
tagcagagagaagtggcagg

SEQ ID NO: 45726 - DNA, 20 bp, Artificial Sequence
  Description of Artificial Sequence: Synthetic oligonucleotide
  Target: LAMA2; (+) strand; PAM type: NNNNGHTT; PAM sequence: AGGAGTTT
gggccaaaatgttgactcct

SEQ ID NO: 45727 - DNA, 20 bp, Artificial Sequence
  Description of Artificial Sequence: Synthetic oligonucleotide
  Target: LAMA2; (+) strand; PAM type: NNNNGHTT; PAM sequence: TATGGATT
aagaaattttcctgaaatag

SEQ ID NO: 45728 - DNA, 20 bp, Artificial Sequence
  Description of Artificial Sequence: Synthetic oligonucleotide
  Target: LAMA2; (+) strand; PAM type: NNNNGHTT; PAM sequence: GTCTGTTT
atactgggtggcaattaagg

SEQ ID NO: 45729 - DNA, 20 bp, Artificial Sequence
  Description of Artificial Sequence: Synthetic oligonucleotide
  Target: LAMA2; (+) strand; PAM type: NNNNGHTT; PAM sequence: GGAGGATT
cactttgggaggttgaggtg

SEQ ID NO: 45730 - DNA, 20 bp, Artificial Sequence
  Description of Artificial Sequence: Synthetic oligonucleotide
  Target: LAMA2; (+) strand; PAM type: NNNNGHTT; PAM sequence: GATTGCTT
ttgggaggttgaggtgggag

SEQ ID NO: 45731 - DNA, 20 bp, Artificial Sequence
  Description of Artificial Sequence: Synthetic oligonucleotide
  Target: LAMA2; (+) strand; PAM type: NNNNGHTT; PAM sequence: ATTGGATT
gtggaaatattaaagggaca

SEQ ID NO: 45732 - DNA, 20 bp, Artificial Sequence
  Description of Artificial Sequence: Synthetic oligonucleotide
  Target: LAMA2; (+) strand; PAM type: NNNNGHTT; PAM sequence: GCCTGTTT
gactgtacttaacagtaaag

SEQ ID NO: 45733 - DNA, 20 bp, Artificial Sequence
  Description of Artificial Sequence: Synthetic oligonucleotide
  Target: LAMA2; (+) strand; PAM type: NNNNGHTT; PAM sequence: CACAGATT
aagaggtgaatggctccaaa

SEQ ID NO: 45734 - DNA, 20 bp, Artificial Sequence
  Description of Artificial Sequence: Synthetic oligonucleotide
  Target: LAMA2; (+) strand; PAM type: NNNNGHTT; PAM sequence: AAGAGATT
ataacatcttttacttacta

SEQ ID NO: 45735 - DNA, 20 bp, Artificial Sequence
  Description of Artificial Sequence: Synthetic oligonucleotide
  Target: LAMA2; (+) strand; PAM type: NNNNGHTT; PAM sequence: TTTTGTTT
cccttgtcaaaacacttcat

SEQ ID NO: 45736 - DNA, 20 bp, Artificial Sequence
  Description of Artificial Sequence: Synthetic oligonucleotide
  Target: LAMA2; (+) strand; PAM type: NNNNGHTT; PAM sequence: GTTTGTTT
tgtcaaaacacttcattttt

SEQ ID NO: 45737 - DNA, 20 bp, Artificial Sequence
  Description of Artificial Sequence: Synthetic oligonucleotide
  Target: LAMA2; (+) strand; PAM type: NNNNGHTT; PAM sequence: TGTGGATT
tgttttcacaaatattttaa

SEQ ID NO: 45738 - DNA, 20 bp, Artificial Sequence
  Description of Artificial Sequence: Synthetic oligonucleotide
  Target: LAMA2; (+) strand; PAM type: NNNNGHTT; PAM sequence: GGTAGATT
attttctgtaggaaggtcat

SEQ ID NO: 45739 - DNA, 20 bp, Artificial Sequence
  Description of Artificial Sequence: Synthetic oligonucleotide
  Target: LAMA2; (+) strand; PAM type: NNNNGHTT; PAM sequence: ATCAGTTT
aagacagtacaactaaggag

SEQ ID NO: 45740 - DNA, 20 bp, Artificial Sequence
  Description of Artificial Sequence: Synthetic oligonucleotide
  Target: LAMA2; (+) strand; PAM type: NNNNGHTT; PAM sequence: TTATGATT
tgcctctcagcactgggtca

SEQ ID NO: 45741 - DNA, 20 bp, Artificial Sequence
  Description of Artificial Sequence: Synthetic oligonucleotide
  Target: LAMA2; (+) strand; PAM type: NNNNGHTT; PAM sequence: AAAAGCTT
atatttactatttccatact

SEQ ID NO: 45742 - DNA, 20 bp, Artificial Sequence
  Description of Artificial Sequence: Synthetic oligonucleotide
  Target: LAMA2; (+) strand; PAM type: NNNNGHTT; PAM sequence: TTTTGCTT
atttaaattgaatttcattt

SEQ ID NO: 45743 - DNA, 20 bp, Artificial Sequence
  Description of Artificial Sequence: Synthetic oligonucleotide
  Target: LAMA2; (+) strand; PAM type: NNNNGHTT; PAM sequence: ATAAGATT
caataaattcatctcaaatg

SEQ ID NO: 45744 - DNA, 20 bp, Artificial Sequence
  Description of Artificial Sequence: Synthetic oligonucleotide
  Target: LAMA2; (+) strand; PAM type: NNNNGHTT; PAM sequence: TAATGATT
tgaagaataatttatttact

SEQ ID NO: 45745 - DNA, 20 bp, Artificial Sequence
  Description of Artificial Sequence: Synthetic oligonucleotide
  Target: LAMA2; (+) strand; PAM type: NNNNGHTT; PAM sequence: GAATGTTT
taatgattctggaaatatgg

SEQ ID NO: 45746 - DNA, 20 bp, Artificial Sequence
  Description of Artificial Sequence: Synthetic oligonucleotide
  Target: LAMA2; (+) strand; PAM type: NNNNGHTT; PAM sequence: CACTGATT
caagtaaaaagacattttcc

SEQ ID NO: 45747 - DNA, 20 bp, Artificial Sequence
  Description of Artificial Sequence: Synthetic oligonucleotide
  Target: LAMA2; (+) strand; PAM type: NNNNGHTT; PAM sequence: AATAGATT
gaaaattaaactagtgacaa

SEQ ID NO: 45748 - DNA, 20 bp, Artificial Sequence
  Description of Artificial Sequence: Synthetic oligonucleotide
  Target: LAMA2; (+) strand; PAM type: NNNNGHTT; PAM sequence: TGCAGATT
agtatacataactgagactt

SEQ ID NO: 45749 - DNA, 20 bp, Artificial Sequence
  Description of Artificial Sequence: Synthetic oligonucleotide
  Target: LAMA2; (+) strand; PAM type: NNNNGHTT; PAM sequence: ATTAGATT
aacagatctccatcagctgc

SEQ ID NO: 45750 - DNA, 20 bp, Artificial Sequence
  Description of Artificial Sequence: Synthetic oligonucleotide
  Target: LAMA2; (+) strand; PAM type: NNNNGHTT; PAM sequence: AGTTGTTT
acacagatgagaagatataa

SEQ ID NO: 45751 - DNA, 20 bp, Artificial Sequence
  Description of Artificial Sequence: Synthetic oligonucleotide
  Target: LAMA2; (+) strand; PAM type: NNNNGHTT; PAM sequence: GAAAGATT
tattacctttcgatatgtca

SEQ ID NO: 45752 - DNA, 20 bp, Artificial Sequence
  Description of Artificial Sequence: Synthetic oligonucleotide
  Target: LAMA2; (+) strand; PAM type: NNNNGHTT; PAM sequence: TCAGGATT
tcactttctttaaaactaaa

SEQ ID NO: 45753 - DNA, 20 bp, Artificial Sequence
  Description of Artificial Sequence: Synthetic oligonucleotide
  Target: LAMA2; (+) strand; PAM type: NNNNGHTT; PAM sequence: AAAGGATT
agggatgactaggcagagca

SEQ ID NO: 45754 - DNA, 20 bp, Artificial Sequence
  Description of Artificial Sequence: Synthetic oligonucleotide
  Target: LAMA2; (+) strand; PAM type: NNNNGHTT; PAM sequence: ATAGGCTT
agtgaagccgaatgtaaact

SEQ ID NO: 45755 - DNA, 20 bp, Artificial Sequence
  Description of Artificial Sequence: Synthetic oligonucleotide
  Target: LAMA2; (+) strand; PAM type: NNNNGHTT; PAM sequence: ATATGTTT
tagtgataataggggaggtt

SEQ ID NO: 45756 - DNA, 20 bp, Artificial Sequence
  Description of Artificial Sequence: Synthetic oligonucleotide
  Target: LAMA2; (+) strand; PAM type: NNNNGHTT; PAM sequence: AAGCGATT
agcctccgcctctagcattc

SEQ ID NO: 45757 - DNA, 20 bp, Artificial Sequence
  Description of Artificial Sequence: Synthetic oligonucleotide
  Target: LAMA2; (+) strand; PAM type: NNNNGHTT; PAM sequence: CTCGGCTT
cattcaagcgattctcctgc

SEQ ID NO: 45758 - DNA, 20 bp, Artificial Sequence
  Description of Artificial Sequence: Synthetic oligonucleotide
  Target: LAMA2; (+) strand; PAM type: NNNNGHTT; PAM sequence: TTGTGTTT
ccactataccccgctaattt

SEQ ID NO: 45759 - DNA, 20 bp, Artificial Sequence
  Description of Artificial Sequence: Synthetic oligonucleotide
  Target: LAMA2; (+) strand; PAM type: NNNNGHTT; PAM sequence: CAAGGTTT
ttttgtgtttttagtagaga

SEQ ID NO: 45760 - DNA, 20 bp, Artificial Sequence
  Description of Artificial Sequence: Synthetic oligonucleotide
  Target: LAMA2; (+) strand; PAM type: NNNNGHTT; PAM sequence: CTAGGATT
catgtcagcctcccaaagtg

SEQ ID NO: 45761 - DNA, 20 bp, Artificial Sequence
  Description of Artificial Sequence: Synthetic oligonucleotide
  Target: LAMA2; (+) strand; PAM type: NNNNGHTT; PAM sequence: TTTTGCTT
tctctgtatcttcctttcaa

SEQ ID NO: 45762 - DNA, 20 bp, Artificial Sequence
  Description of Artificial Sequence: Synthetic oligonucleotide
  Target: LAMA2; (+) strand; PAM type: NNNNGHTT; PAM sequence: CAAAGATT
gtaccctactgactctttgt

SEQ ID NO: 45763 - DNA, 20 bp, Artificial Sequence
  Description of Artificial Sequence: Synthetic oligonucleotide
  Target: LAMA2; (+) strand; PAM type: NNNNGHTT; PAM sequence: CAATGTTT
attttttttctcaactcatg

SEQ ID NO: 45764 - DNA, 20 bp, Artificial Sequence
  Description of Artificial Sequence: Synthetic oligonucleotide
  Target: LAMA2; (+) strand; PAM type: NNNNGHTT; PAM sequence: CAATGCTT
atcatcaccattcagctcta

SEQ ID NO: 45765 - DNA, 20 bp, Artificial Sequence
  Description of Artificial Sequence: Synthetic oligonucleotide
  Target: LAMA2; (+) strand; PAM type: NNNNGHTT; PAM sequence: ACTGGCTT
acagtatttgtccttttgta

SEQ ID NO: 45766 - DNA, 20 bp, Artificial Sequence
  Description of Artificial Sequence: Synthetic oligonucleotide
  Target: LAMA2; (+) strand; PAM type: NNNNGHTT; PAM sequence: TCGAGATT
tttcattcaacatagtgtct

SEQ ID NO: 45767 - DNA, 20 bp, Artificial Sequence
  Description of Artificial Sequence: Synthetic oligonucleotide
  Target: LAMA2; (+) strand; PAM type: NNNNGHTT; PAM sequence: CAGAGTTT
ttccacgttgtagcatatat

SEQ ID NO: 45768 - DNA, 20 bp, Artificial Sequence
  Description of Artificial Sequence: Synthetic oligonucleotide
  Target: LAMA2; (+) strand; PAM type: NNNNGHTT; PAM sequence: ATGGGCTT
aatgctatgaacatgggcat

SEQ ID NO: 45769 - DNA, 20 bp, Artificial Sequence
  Description of Artificial Sequence: Synthetic oligonucleotide
  Target: LAMA2; (+) strand; PAM type: NNNNGHTT; PAM sequence: TAAGGTTT
ggcatatgggcttcaatctt

SEQ ID NO: 45770 - DNA, 20 bp, Artificial Sequence
  Description of Artificial Sequence: Synthetic oligonucleotide
  Target: LAMA2; (+) strand; PAM type: NNNNGHTT; PAM sequence: ATGGGCTT
tagaaaaatacattgtatat

SEQ ID NO: 45771 - DNA, 20 bp, Artificial Sequence
  Description of Artificial Sequence: Synthetic oligonucleotide
  Target: LAMA2; (+) strand; PAM type: NNNNGHTT; PAM sequence: TATTGTTT
aattctttgaggaaccacta

SEQ ID NO: 45772 - DNA, 20 bp, Artificial Sequence
  Description of Artificial Sequence: Synthetic oligonucleotide
  Target: LAMA2; (+) strand; PAM type: NNNNGHTT; PAM sequence: CAAGGATT
acattcccatcggccataca

SEQ ID NO: 45773 - DNA, 20 bp, Artificial Sequence
  Description of Artificial Sequence: Synthetic oligonucleotide
  Target: LAMA2; (+) strand; PAM type: NNNNGHTT; PAM sequence: TTCTGTTT
acccttgccaacacttcttt

SEQ ID NO: 45774 - DNA, 20 bp, Artificial Sequence
  Description of Artificial Sequence: Synthetic oligonucleotide
  Target: LAMA2; (+) strand; PAM type: NNNNGHTT; PAM sequence: CATCGTTT
tggtggttcatattttcagt

SEQ ID NO: 45775 - DNA, 20 bp, Artificial Sequence
  Description of Artificial Sequence: Synthetic oligonucleotide
  Target: LAMA2; (+) strand; PAM type: NNNNGHTT; PAM sequence: TTTTGCTT
ggaaattaaatcctggacaa

SEQ ID NO: 45776 - DNA, 20 bp, Artificial Sequence
  Description of Artificial Sequence: Synthetic oligonucleotide
  Target: LAMA2; (+) strand; PAM type: NNNNGHTT; PAM sequence: CTTAGCTT
ttaaatcctggacaattttg

SEQ ID NO: 45777 - DNA, 20 bp, Artificial Sequence
  Description of Artificial Sequence: Synthetic oligonucleotide
  Target: LAMA2; (+) strand; PAM type: NNNNGHTT; PAM sequence: TATAGTTT
cttttattatttgtataaat

SEQ ID NO: 45778 - DNA, 20 bp, Artificial Sequence
  Description of Artificial Sequence: Synthetic oligonucleotide
  Target: LAMA2; (+) strand; PAM type: NNNNGHTT; PAM sequence: TCCTGTTT
actactggcactttttgaaa

SEQ ID NO: 45779 - DNA, 20 bp, Artificial Sequence
  Description of Artificial Sequence: Synthetic oligonucleotide
  Target: LAMA2; (+) strand; PAM type: NNNNGHTT; PAM sequence: CAGGGCTT
cttagagtaactaaaagcat

SEQ ID NO: 45780 - DNA, 20 bp, Artificial Sequence
  Description of Artificial Sequence: Synthetic oligonucleotide
  Target: LAMA2; (+) strand; PAM type: NNNNGHTT; PAM sequence: ACAAGATT
ttgtgagaatctcactaaaa

SEQ ID NO: 45781 - DNA, 20 bp, Artificial Sequence
  Description of Artificial Sequence: Synthetic oligonucleotide
  Target: LAMA2; (+) strand; PAM type: NNNNGHTT; PAM sequence: TTAGGATT
aaaactctaaaaagtgaaac

SEQ ID NO: 45782 - DNA, 20 bp, Artificial Sequence
  Description of Artificial Sequence: Synthetic oligonucleotide
  Target: LAMA2; (+) strand; PAM type: NNNNGHTT; PAM sequence: AAATGTTT
tgaaacttaggatttaccaa

SEQ ID NO: 45783 - DNA, 20 bp, Artificial Sequence
  Description of Artificial Sequence: Synthetic oligonucleotide
  Target: LAMA2; (+) strand; PAM type: NNNNGHTT; PAM sequence: GGTTGATT
ggatgtaacctgaaatgctg

SEQ ID NO: 45784 - DNA, 20 bp, Artificial Sequence
  Description of Artificial Sequence: Synthetic oligonucleotide
  Target: LAMA2; (+) strand; PAM type: NNNNGHTT; PAM sequence: GAATGCTT
gagaggatgtggagaaatag

SEQ ID NO: 45785 - DNA, 20 bp, Artificial Sequence
  Description of Artificial Sequence: Synthetic oligonucleotide
  Target: LAMA2; (+) strand; PAM type: NNNNGHTT; PAM sequence: TGGCGATT
aaccattgtggaagacagtg

SEQ ID NO: 45786 - DNA, 20 bp, Artificial Sequence
  Description of Artificial Sequence: Synthetic oligonucleotide
  Target: LAMA2; (+) strand; PAM type: NNNNGHTT; PAM sequence: AAAGGATT
ccattactgggtatataccc

SEQ ID NO: 45787 - DNA, 20 bp, Artificial Sequence
  Description of Artificial Sequence: Synthetic oligonucleotide
  Target: LAMA2; (+) strand; PAM type: NNNNGHTT; PAM sequence: ATATGTTT
ctataaagacacatgcacac

SEQ ID NO: 45788 - DNA, 20 bp, Artificial Sequence
  Description of Artificial Sequence: Synthetic oligonucleotide
  Target: LAMA2; (+) strand; PAM type: NNNNGHTT; PAM sequence: ACTGGTTT
caaatgtccatcaatgatag

SEQ ID NO: 45789 - DNA, 20 bp, Artificial Sequence
  Description of Artificial Sequence: Synthetic oligonucleotide
  Target: LAMA2; (+) strand; PAM type: NNNNGHTT; PAM sequence: TCTTGATT
aatgaaatgtccgtatattt

SEQ ID NO: 45790 - DNA, 20 bp, Artificial Sequence
  Description of Artificial Sequence: Synthetic oligonucleotide
  Target: LAMA2; (+) strand; PAM type: NNNNGHTT; PAM sequence: AAATGTTT
atattttcttgattttttcc

SEQ ID NO: 45791 - DNA, 20 bp, Artificial Sequence
  Description of Artificial Sequence: Synthetic oligonucleotide
  Target: LAMA2; (+) strand; PAM type: NNNNGHTT; PAM sequence: GAAAGTTT
ttttttccaaatgttttgaa

SEQ ID NO: 45792 - DNA, 20 bp, Artificial Sequence
  Description of Artificial Sequence: Synthetic oligonucleotide
  Target: LAMA2; (+) strand; PAM type: NNNNGHTT; PAM sequence: GGAAGATT
aataggttaaacactgtgct

SEQ ID NO: 45793 - DNA, 20 bp, Artificial Sequence
  Description of Artificial Sequence: Synthetic oligonucleotide
  Target: LAMA2; (+) strand; PAM type: NNNNGHTT; PAM sequence: GAAAGATT
cactgtgctggaagatttga

SEQ ID NO: 45794 - DNA, 20 bp, Artificial Sequence
  Description of Artificial Sequence: Synthetic oligonucleotide
  Target: LAMA2; (+) strand; PAM type: NNNNGHTT; PAM sequence: AGAAGTTT
attttgtcaaaatcatttcc

SEQ ID NO: 45795 - DNA, 20 bp, Artificial Sequence
  Description of Artificial Sequence: Synthetic oligonucleotide
  Target: LAMA2; (+) strand; PAM type: NNNNGHTT; PAM sequence: GTGTGATT
tccttttttcttcattttta

SEQ ID NO: 45796 - DNA, 20 bp, Artificial Sequence
  Description of Artificial Sequence: Synthetic oligonucleotide
  Target: LAMA2; (+) strand; PAM type: NNNNGHTT; PAM sequence: CATTGATT
tcttcatttttagtgtgatt

SEQ ID NO: 45797 - DNA, 20 bp, Artificial Sequence
  Description of Artificial Sequence: Synthetic oligonucleotide
  Target: LAMA2; (+) strand; PAM type: NNNNGHTT; PAM sequence: ACCTGCTT
tctcagtattcacaaggaat

SEQ ID NO: 45798 - DNA, 20 bp, Artificial Sequence
  Description of Artificial Sequence: Synthetic oligonucleotide
  Target: LAMA2; (+) strand; PAM type: NNNNGHTT; PAM sequence: GAATGTTT
ttcacaaggaatacctgctt

SEQ ID NO: 45799 - DNA, 20 bp, Artificial Sequence
  Description of Artificial Sequence: Synthetic oligonucleotide
  Target: LAMA2; (+) strand; PAM type: NNNNGHTT; PAM sequence: AGAGGATT
ttgaatgtttaagtaccaac

SEQ ID NO: 45800 - DNA, 20 bp, Artificial Sequence
  Description of Artificial Sequence: Synthetic oligonucleotide
  Target: LAMA2; (+) strand; PAM type: NNNNGHTT; PAM sequence: ACATGCTT
atttttaaacacaagaaatc

SEQ ID NO: 45801 - DNA, 20 bp, Artificial Sequence
  Description of Artificial Sequence: Synthetic oligonucleotide
  Target: LAMA2; (+) strand; PAM type: NNNNGHTT; PAM sequence: ACTTGTTT
ttaaaaaccatttatcagaa

SEQ ID NO: 45802 - DNA, 20 bp, Artificial Sequence
  Description of Artificial Sequence: Synthetic oligonucleotide
  Target: LAMA2; (+) strand; PAM type: NNNNGHTT; PAM sequence: CTGGGTTT
ttaattaatatgtcaaatat

SEQ ID NO: 45803 - DNA, 20 bp, Artificial Sequence
  Description of Artificial Sequence: Synthetic oligonucleotide
  Target: LAMA2; (+) strand; PAM type: NNNNGHTT; PAM sequence: GGATGATT
gttggaatgaaattagtact

SEQ ID NO: 45804 - DNA, 20 bp, Artificial Sequence
  Description of Artificial Sequence: Synthetic oligonucleotide
  Target: LAMA2; (+) strand; PAM type: NNNNGHTT; PAM sequence: ATTGGATT
aatgaaattagtactggatg

SEQ ID NO: 45805 - DNA, 20 bp, Artificial Sequence
  Description of Artificial Sequence: Synthetic oligonucleotide
  Target: LAMA2; (+) strand; PAM type: NNNNGHTT; PAM sequence: CATTGCTT
tgaatagatattgaataatg

SEQ ID NO: 45806 - DNA, 20 bp, Artificial Sequence
  Description of Artificial Sequence: Synthetic oligonucleotide
  Target: LAMA2; (+) strand; PAM type: NNNNGHTT; PAM sequence: CTGAGCTT
tttgctcaattttctcatct

SEQ ID NO: 45807 - DNA, 20 bp, Artificial Sequence
  Description of Artificial Sequence: Synthetic oligonucleotide
  Target: LAMA2; (+) strand; PAM type: NNNNGHTT; PAM sequence: CCCTGATT
ataatattacagatgttatt

SEQ ID NO: 45808 - DNA, 20 bp, Artificial Sequence
  Description of Artificial Sequence: Synthetic oligonucleotide
  Target: LAMA2; (+) strand; PAM type: NNNNGHTT; PAM sequence: AAACGTTT
atgaaattttttggtgatcc

SEQ ID NO: 45809 - DNA, 20 bp, Artificial Sequence
  Description of Artificial Sequence: Synthetic oligonucleotide
  Target: LAMA2; (+) strand; PAM type: NNNNGHTT; PAM sequence: CCAGGTTT
tctctagtaggcacccattt

SEQ ID NO: 45810 - DNA, 20 bp, Artificial Sequence
  Description of Artificial Sequence: Synthetic oligonucleotide
  Target: LAMA2; (+) strand; PAM type: NNNNGHTT; PAM sequence: AAACGTTT
gcacccatttccaggtttcc

SEQ ID NO: 45811 - DNA, 20 bp, Artificial Sequence
  Description of Artificial Sequence: Synthetic oligonucleotide
  Target: LAMA2; (+) strand; PAM type: NNNNGHTT; PAM sequence: TATTGATT
aaaacatttatatatttctc

SEQ ID NO: 45812 - DNA, 20 bp, Artificial Sequence
  Description of Artificial Sequence: Synthetic oligonucleotide
  Target: LAMA2; (+) strand; PAM type: NNNNGHTT; PAM sequence: TGGAGATT
tctctattgattgcataatg

SEQ ID NO: 45813 - DNA, 20 bp, Artificial Sequence
  Description of Artificial Sequence: Synthetic oligonucleotide
  Target: LAMA2; (+) strand; PAM type: NNNNGHTT; PAM sequence: TTCTGTTT
ttgattgcataatgtggaga

SEQ ID NO: 45814 - DNA, 20 bp, Artificial Sequence
  Description of Artificial Sequence: Synthetic oligonucleotide
  Target: LAMA2; (+) strand; PAM type: NNNNGHTT; PAM sequence: TTTTGTTT
ctttttaaatttgtctgtat

SEQ ID NO: 45815 - DNA, 20 bp, Artificial Sequence
  Description of Artificial Sequence: Synthetic oligonucleotide
  Target: LAMA2; (+) strand; PAM type: NNNNGHTT; PAM sequence: ACTAGCTT
tggatattgaatatcttgag

SEQ ID NO: 45816 - DNA, 20 bp, Artificial Sequence
  Description of Artificial Sequence: Synthetic oligonucleotide
  Target: LAMA2; (+) strand; PAM type: NNNNGHTT; PAM sequence: TCTTGATT
cttgagactagctttaattc

SEQ ID NO: 45817 - DNA, 20 bp, Artificial Sequence
  Description of Artificial Sequence: Synthetic oligonucleotide
  Target: LAMA2; (+) strand; PAM type: NNNNGHTT; PAM sequence: ACATGCTT
tccaactttattcgtgaact

SEQ ID NO: 45818 - DNA, 20 bp, Artificial Sequence
  Description of Artificial Sequence: Synthetic oligonucleotide
  Target: LAMA2; (+) strand; PAM type: NNNNGHTT; PAM sequence: GTACGTTT
aactacatgcttatataaaa

SEQ ID NO: 45819 - DNA, 20 bp, Artificial Sequence
  Description of Artificial Sequence: Synthetic oligonucleotide
  Target: LAMA2; (+) strand; PAM type: NNNNGHTT; PAM sequence: AACAGCTT
tataaaagtacgtttcatca

SEQ ID NO: 45820 - DNA, 20 bp, Artificial Sequence
  Description of Artificial Sequence: Synthetic oligonucleotide
  Target: LAMA2; (+) strand; PAM type: NNNNGHTT; PAM sequence: GTATGCTT
attaccttttattattttca

SEQ ID NO: 45821 - DNA, 20 bp, Artificial Sequence
  Description of Artificial Sequence: Synthetic oligonucleotide
  Target: LAMA2; (+) strand; PAM type: NNNNGHTT; PAM sequence: TAATGCTT
ttattattttcagtatgctt

SEQ ID NO: 45822 - DNA, 20 bp, Artificial Sequence
  Description of Artificial Sequence: Synthetic oligonucleotide
  Target: LAMA2; (+) strand; PAM type: NNNNGHTT; PAM sequence: TTTGGTTT
aaaattttattcttgaaaca

SEQ ID NO: 45823 - DNA, 20 bp, Artificial Sequence
  Description of Artificial Sequence: Synthetic oligonucleotide
  Target: LAMA2; (+) strand; PAM type: NNNNGHTT; PAM sequence: TATTGATT
tttttccattgctactttcc

SEQ ID NO: 45824 - DNA, 20 bp, Artificial Sequence
  Description of Artificial Sequence: Synthetic oligonucleotide
  Target: LAMA2; (+) strand; PAM type: NNNNGHTT; PAM sequence: GATTGTTT
tccattgctactttcctatt

SEQ ID NO: 45825 - DNA, 20 bp, Artificial Sequence
  Description of Artificial Sequence: Synthetic oligonucleotide
  Target: LAMA2; (+) strand; PAM type: NNNNGHTT; PAM sequence: TTGAGATT
ttgttttcctcatatgtatc

SEQ ID NO: 45826 - DNA, 20 bp, Artificial Sequence
  Description of Artificial Sequence: Synthetic oligonucleotide
  Target: LAMA2; (+) strand; PAM type: NNNNGHTT; PAM sequence: CTAGGTTT
atgtatcttgagattttagt

SEQ ID NO: 45827 - DNA, 20 bp, Artificial Sequence
  Description of Artificial Sequence: Synthetic oligonucleotide
  Target: LAMA2; (+) strand; PAM type: NNNNGHTT; PAM sequence: TAAAGTTT
atttacagatattttttcta

SEQ ID NO: 45828 - DNA, 20 bp, Artificial Sequence
  Description of Artificial Sequence: Synthetic oligonucleotide
  Target: LAMA2; (+) strand; PAM type: NNNNGHTT; PAM sequence: TATAGATT
tttttctataaagttttcaa

SEQ ID NO: 45829 - DNA, 20 bp, Artificial Sequence
  Description of Artificial Sequence: Synthetic oligonucleotide
  Target: LAMA2; (+) strand; PAM type: NNNNGHTT; PAM sequence: TTCTGATT
tataaagttttcaatataga

SEQ ID NO: 45830 - DNA, 20 bp, Artificial Sequence
  Description of Artificial Sequence: Synthetic oligonucleotide
  Target: LAMA2; (+) strand; PAM type: NNNNGHTT; PAM sequence: TAACGTTT
taaaaaatagttaacaccat

SEQ ID NO: 45831 - DNA, 20 bp, Artificial Sequence
  Description of Artificial Sequence: Synthetic oligonucleotide
  Target: LAMA2; (+) strand; PAM type: NNNNGHTT; PAM sequence: TTTGGATT
aatagttaacaccattaacg

SEQ ID NO: 45832 - DNA, 20 bp, Artificial Sequence
  Description of Artificial Sequence: Synthetic oligonucleotide
  Target: LAMA2; (+) strand; PAM type: NNNNGHTT; PAM sequence: TAAAGTTT
aaagataaaaataaacttta

SEQ ID NO: 45833 - DNA, 20 bp, Artificial Sequence
  Description of Artificial Sequence: Synthetic oligonucleotide
  Target: LAMA2; (+) strand; PAM type: NNNNGHTT; PAM sequence: TCCTGCTT
tatgatcttatagactattt

SEQ ID NO: 45834 - DNA, 20 bp, Artificial Sequence
  Description of Artificial Sequence: Synthetic oligonucleotide
  Target: LAMA2; (+) strand; PAM type: NNNNGHTT; PAM sequence: CAAAGATT
agctgactttacctccaact

SEQ ID NO: 45835 - DNA, 20 bp, Artificial Sequence
  Description of Artificial Sequence: Synthetic oligonucleotide
  Target: LAMA2; (+) strand; PAM type: NNNNGHTT; PAM sequence: CTGTGTTT
aatctaatttctctttctct

SEQ ID NO: 45836 - DNA, 20 bp, Artificial Sequence
  Description of Artificial Sequence: Synthetic oligonucleotide
  Target: LAMA2; (+) strand; PAM type: NNNNGHTT; PAM sequence: AAAAGTTT
tctttctctctgtgtttgtt

SEQ ID NO: 45837 - DNA, 20 bp, Artificial Sequence
  Description of Artificial Sequence: Synthetic oligonucleotide
  Target: LAMA2; (+) strand; PAM type: NNNNGHTT; PAM sequence: TCAAGATT
atactcgtgttctttccttt

SEQ ID NO: 45838 - DNA, 20 bp, Artificial Sequence
  Description of Artificial Sequence: Synthetic oligonucleotide
  Target: LAMA2; (+) strand; PAM type: NNNNGHTT; PAM sequence: TATAGCTT
tttcaagattacataaaaag

SEQ ID NO: 45839 - DNA, 20 bp, Artificial Sequence
  Description of Artificial Sequence: Synthetic oligonucleotide
  Target: LAMA2; (+) strand; PAM type: NNNNGHTT; PAM sequence: TATTGATT
ggaataggtgaaaatatcac

SEQ ID NO: 45840 - DNA, 20 bp, Artificial Sequence
  Description of Artificial Sequence: Synthetic oligonucleotide
  Target: LAMA2; (+) strand; PAM type: NNNNGHTT; PAM sequence: CGAGGCTT
tgattataactagtatttaa

SEQ ID NO: 45841 - DNA, 20 bp, Artificial Sequence
  Description of Artificial Sequence: Synthetic oligonucleotide
  Target: LAMA2; (+) strand; PAM type: NNNNGHTT; PAM sequence: TTATGTTT
atctaggtatttcacatgta

SEQ ID NO: 45842 - DNA, 20 bp, Artificial Sequence
  Description of Artificial Sequence: Synthetic oligonucleotide
  Target: LAMA2; (+) strand; PAM type: NNNNGHTT; PAM sequence: ACACGATT
atatgtgtgagaaaagatac

SEQ ID NO: 45843 - DNA, 20 bp, Artificial Sequence
  Description of Artificial Sequence: Synthetic oligonucleotide
  Target: LAMA2; (+) strand; PAM type: NNNNGHTT; PAM sequence: ATTAGATT
tgtgagaaaagatacacacg

SEQ ID NO: 45844 - DNA, 20 bp, Artificial Sequence
  Description of Artificial Sequence: Synthetic oligonucleotide
  Target: LAMA2; (+) strand; PAM type: NNNNGHTT; PAM sequence: TGTTGCTT
ggccggcacaataagcaatg

SEQ ID NO: 45845 - DNA, 20 bp, Artificial Sequence
  Description of Artificial Sequence: Synthetic oligonucleotide
  Target: LAMA2; (+) strand; PAM type: NNNNGHTT; PAM sequence: AATGGATT
ttgataatatttgtaaaaca

SEQ ID NO: 45846 - DNA, 20 bp, Artificial Sequence
  Description of Artificial Sequence: Synthetic oligonucleotide
  Target: LAMA2; (+) strand; PAM type: NNNNGHTT; PAM sequence: GCAGGTTT
tgagagtaatgctagccaaa

SEQ ID NO: 45847 - DNA, 20 bp, Artificial Sequence
  Description of Artificial Sequence: Synthetic oligonucleotide
  Target: LAMA2; (+) strand; PAM type: NNNNGHTT; PAM sequence: AAAAGATT
gttctcttttcaacctccta

SEQ ID NO: 45848 - DNA, 20 bp, Artificial Sequence
  Description of Artificial Sequence: Synthetic oligonucleotide
  Target: LAMA2; (+) strand; PAM type: NNNNGHTT; PAM sequence: TTATGTTT
tcatctttaaataatttcat

SEQ ID NO: 45849 - DNA, 20 bp, Artificial Sequence
  Description of Artificial Sequence: Synthetic oligonucleotide
  Target: LAMA2; (+) strand; PAM type: NNNNGHTT; PAM sequence: TTTGGCTT
aattcaaatcatgaccttct

SEQ ID NO: 45850 - DNA, 20 bp, Artificial Sequence
  Description of Artificial Sequence: Synthetic oligonucleotide
  Target: LAMA2; (+) strand; PAM type: NNNNGHTT; PAM sequence: TGAAGTTT
tttggcttgtattctaattt

SEQ ID NO: 45851 - DNA, 20 bp, Artificial Sequence
  Description of Artificial Sequence: Synthetic oligonucleotide
  Target: LAMA2; (+) strand; PAM type: NNNNGHTT; PAM sequence: AAATGATT
agtttctgacctagacacaa

SEQ ID NO: 45852 - DNA, 20 bp, Artificial Sequence
  Description of Artificial Sequence: Synthetic oligonucleotide
  Target: LAMA2; (+) strand; PAM type: NNNNGHTT; PAM sequence: ATCAGCTT
ccatgcaaaatgtatgtaaa

SEQ ID NO: 45853 - DNA, 20 bp, Artificial Sequence
  Description of Artificial Sequence: Synthetic oligonucleotide
  Target: LAMA2; (+) strand; PAM type: NNNNGHTT; PAM sequence: TAAGGCTT
tccattcttcatacctctaa

SEQ ID NO: 45854 - DNA, 20 bp, Artificial Sequence
  Description of Artificial Sequence: Synthetic oligonucleotide
  Target: LAMA2; (+) strand; PAM type: NNNNGHTT; PAM sequence: TTATGTTT
atcattttacaaccatccac

SEQ ID NO: 45855 - DNA, 20 bp, Artificial Sequence
  Description of Artificial Sequence: Synthetic oligonucleotide
  Target: LAMA2; (+) strand; PAM type: NNNNGHTT; PAM sequence: TTAGGTTT
ttacaaccatccacttatgt

SEQ ID NO: 45856 - DNA, 20 bp, Artificial Sequence
  Description of Artificial Sequence: Synthetic oligonucleotide
  Target: LAMA2; (+) strand; PAM type: NNNNGHTT; PAM sequence: CTTGGCTT
atgtttaggtttaacagagt

SEQ ID NO: 45857 - DNA, 20 bp, Artificial Sequence
  Description of Artificial Sequence: Synthetic oligonucleotide
  Target: LAMA2; (+) strand; PAM type: NNNNGHTT; PAM sequence: ATCTGTTT
cattaaagtatttttatgat

SEQ ID NO: 45858 - DNA, 20 bp, Artificial Sequence
  Description of Artificial Sequence: Synthetic oligonucleotide
  Target: LAMA2; (+) strand; PAM type: NNNNGHTT; PAM sequence: CTCAGTTT
gtctttgccattcacatgga

SEQ ID NO: 45859 - DNA, 20 bp, Artificial Sequence
  Description of Artificial Sequence: Synthetic oligonucleotide
  Target: LAMA2; (+) strand; PAM type: NNNNGHTT; PAM sequence: TCCTGCTT
ggttatgctactgaagatct

SEQ ID NO: 45860 - DNA, 20 bp, Artificial Sequence
  Description of Artificial Sequence: Synthetic oligonucleotide
  Target: LAMA2; (+) strand; PAM type: NNNNGHTT; PAM sequence: CTCAGTTT
tgcccaggaagccccatgga

SEQ ID NO: 45861 - DNA, 20 bp, Artificial Sequence
  Description of Artificial Sequence: Synthetic oligonucleotide
  Target: LAMA2; (+) strand; PAM type: NNNNGHTT; PAM sequence: AAGAGTTT
cttgggtatcacaaatgagg

SEQ ID NO: 45862 - DNA, 20 bp, Artificial Sequence
  Description of Artificial Sequence: Synthetic oligonucleotide
  Target: LAMA2; (+) strand; PAM type: NNNNGHTT; PAM sequence: GTTTGATT
ggtatcacaaatgaggaaga

SEQ ID NO: 45863 - DNA, 20 bp, Artificial Sequence
  Description of Artificial Sequence: Synthetic oligonucleotide
  Target: LAMA2; (+) strand; PAM type: NNNNGHTT; PAM sequence: TTCTGTTT
ccatattggtgaaatactac

SEQ ID NO: 45864 - DNA, 20 bp, Artificial Sequence
  Description of Artificial Sequence: Synthetic oligonucleotide
  Target: LAMA2; (+) strand; PAM type: NNNNGHTT; PAM sequence: TGTTGTTT
acttctgtttcctaaagata

SEQ ID NO: 45865 - DNA, 20 bp, Artificial Sequence
  Description of Artificial Sequence: Synthetic oligonucleotide
  Target: LAMA2; (+) strand; PAM type: NNNNGHTT; PAM sequence: CTAAGATT
tcctaaagatatgttgtttt

SEQ ID NO: 45866 - DNA, 20 bp, Artificial Sequence
  Description of Artificial Sequence: Synthetic oligonucleotide
  Target: LAMA2; (+) strand; PAM type: NNNNGHTT; PAM sequence: ATTTGCTT
aagatatgttgttttctaag

SEQ ID NO: 45867 - DNA, 20 bp, Artificial Sequence
  Description of Artificial Sequence: Synthetic oligonucleotide
  Target: LAMA2; (+) strand; PAM type: NNNNGHTT; PAM sequence: TCTAGATT
gttgttttctaagatttgct

SEQ ID NO: 45868 - DNA, 20 bp, Artificial Sequence
  Description of Artificial Sequence: Synthetic oligonucleotide
  Target: LAMA2; (+) strand; PAM type: NNNNGHTT; PAM sequence: TTGTGATT
ctaagatttgcttctagatt

SEQ ID NO: 45869 - DNA, 20 bp, Artificial Sequence
  Description of Artificial Sequence: Synthetic oligonucleotide
  Target: LAMA2; (+) strand; PAM type: NNNNGHTT; PAM sequence: AAATGTTT
tgcttctagattttgtgatt

SEQ ID NO: 45870 - DNA, 20 bp, Artificial Sequence
  Description of Artificial Sequence: Synthetic oligonucleotide
  Target: LAMA2; (+) strand; PAM type: NNNNGHTT; PAM sequence: CAGGGATT
tgattaaatgttttattgga

SEQ ID NO: 45871 - DNA, 20 bp, Artificial Sequence
  Description of Artificial Sequence: Synthetic oligonucleotide
  Target: LAMA2; (+) strand; PAM type: NNNNGHTT; PAM sequence: GAAGGCTT
tgtctatagacttttctagt

SEQ ID NO: 45872 - DNA, 20 bp, Artificial Sequence
  Description of Artificial Sequence: Synthetic oligonucleotide
  Target: LAMA2; (+) strand; PAM type: NNNNGHTT; PAM sequence: GGATGATT
aggcttttacaaatgttaag

SEQ ID NO: 45873 - DNA, 20 bp, Artificial Sequence
  Description of Artificial Sequence: Synthetic oligonucleotide
  Target: LAMA2; (+) strand; PAM type: NNNNGHTT; PAM sequence: CCATGATT
ccttttggggacaactataa

SEQ ID NO: 45874 - DNA, 20 bp, Artificial Sequence
  Description of Artificial Sequence: Synthetic oligonucleotide
  Target: LAMA2; (+) strand; PAM type: NNNNGHTT; PAM sequence: CCTAGTTT
ttgcctcctgtagcatgagt

SEQ ID NO: 45875 - DNA, 20 bp, Artificial Sequence
  Description of Artificial Sequence: Synthetic oligonucleotide
  Target: LAMA2; (+) strand; PAM type: NNNNGHTT; PAM sequence: GTTTGATT
ctcctgtagcatgagtccta

SEQ ID NO: 45876 - DNA, 20 bp, Artificial Sequence
  Description of Artificial Sequence: Synthetic oligonucleotide
  Target: LAMA2; (+) strand; PAM type: NNNNGHTT; PAM sequence: ACTTGATT
ctagtttgattaaactagac

SEQ ID NO: 45877 - DNA, 20 bp, Artificial Sequence
  Description of Artificial Sequence: Synthetic oligonucleotide
  Target: LAMA2; (+) strand; PAM type: NNNNGHTT; PAM sequence: ACATGTTT
cttgattttctccaatggta

SEQ ID NO: 45878 - DNA, 20 bp, Artificial Sequence
  Description of Artificial Sequence: Synthetic oligonucleotide
  Target: LAMA2; (+) strand; PAM type: NNNNGHTT; PAM sequence: TTGAGCTT
tgtgagttccacgggtcctt

SEQ ID NO: 45879 - DNA, 20 bp, Artificial Sequence
  Description of Artificial Sequence: Synthetic oligonucleotide
  Target: LAMA2; (+) strand; PAM type: NNNNGHTT; PAM sequence: GGGTGATT
tacaaggagaagaatttgca

SEQ ID NO: 45880 - DNA, 20 bp, Artificial Sequence
  Description of Artificial Sequence: Synthetic oligonucleotide
  Target: LAMA2; (+) strand; PAM type: NNNNGHTT; PAM sequence: GTAAGATT
gaatttgcagggtgattgtt

SEQ ID NO: 45881 - DNA, 20 bp, Artificial Sequence
  Description of Artificial Sequence: Synthetic oligonucleotide
  Target: LAMA2; (+) strand; PAM type: NNNNGHTT; PAM sequence: GGTAGCTT
tatcatgtcctcttaaaaat

SEQ ID NO: 45882 - DNA, 20 bp, Artificial Sequence
  Description of Artificial Sequence: Synthetic oligonucleotide
  Target: LAMA2; (+) strand; PAM type: NNNNGHTT; PAM sequence: AACTGCTT
gcttttcagaaacttttgtt

SEQ ID NO: 45883 - DNA, 20 bp, Artificial Sequence
  Description of Artificial Sequence: Synthetic oligonucleotide
  Target: LAMA2; (+) strand; PAM type: NNNNGHTT; PAM sequence: CCTTGTTT
agatgagcatcatctcctct

SEQ ID NO: 45884 - DNA, 20 bp, Artificial Sequence
  Description of Artificial Sequence: Synthetic oligonucleotide
  Target: LAMA2; (+) strand; PAM type: NNNNGHTT; PAM sequence: TCAGGCTT
aaatcacatccaaaatgaca

SEQ ID NO: 45885 - DNA, 20 bp, Artificial Sequence
  Description of Artificial Sequence: Synthetic oligonucleotide
  Target: LAMA2; (+) strand; PAM type: NNNNGHTT; PAM sequence: ACCAGCTT
atttagggtgaaggctaaag

SEQ ID NO: 45886 - DNA, 20 bp, Artificial Sequence
  Description of Artificial Sequence: Synthetic oligonucleotide
  Target: LAMA2; (+) strand; PAM type: NNNNGHTT; PAM sequence: CTTCGTTT
gaatgctctcttttgcaagt

SEQ ID NO: 45887 - DNA, 20 bp, Artificial Sequence
  Description of Artificial Sequence: Synthetic oligonucleotide
  Target: LAMA2; (+) strand; PAM type: NNNNGHTT; PAM sequence: GTGTGATT
cttcgttttgaagaaagaat

SEQ ID NO: 45888 - DNA, 20 bp, Artificial Sequence
  Description of Artificial Sequence: Synthetic oligonucleotide
  Target: LAMA2; (+) strand; PAM type: NNNNGHTT; PAM sequence: TTAAGATT
aatgtgtgatttagaaatat

SEQ ID NO: 45889 - DNA, 20 bp, Artificial Sequence
  Description of Artificial Sequence: Synthetic oligonucleotide
  Target: LAMA2; (+) strand; PAM type: NNNNGHTT; PAM sequence: AACAGTTT
atctactgctagcaacttat

SEQ ID NO: 45890 - DNA, 20 bp, Artificial Sequence
  Description of Artificial Sequence: Synthetic oligonucleotide
  Target: LAMA2; (+) strand; PAM type: NNNNGHTT; PAM sequence: ACTTGCTT
tggtggtaaaataaaggcaa

SEQ ID NO: 45891 - DNA, 20 bp, Artificial Sequence
  Description of Artificial Sequence: Synthetic oligonucleotide
  Target: LAMA2; (+) strand; PAM type: NNNNGHTT; PAM sequence: ATCAGTTT
tagcacaaattacctagtgt

SEQ ID NO: 45892 - DNA, 20 bp, Artificial Sequence
  Description of Artificial Sequence: Synthetic oligonucleotide
  Target: LAMA2; (+) strand; PAM type: NNNNGHTT; PAM sequence: AATGGCTT
caacatattaccacaaactt

SEQ ID NO: 45893 - DNA, 20 bp, Artificial Sequence
  Description of Artificial Sequence: Synthetic oligonucleotide
  Target: LAMA2; (+) strand; PAM type: NNNNGHTT; PAM sequence: CACAGTTT
aaaacctcacaaatttatct

SEQ ID NO: 45894 - DNA, 20 bp, Artificial Sequence
  Description of Artificial Sequence: Synthetic oligonucleotide
  Target: LAMA2; (+) strand; PAM type: NNNNGHTT; PAM sequence: ATCAGTTT
ttaggatagaagctgaaaga

SEQ ID NO: 45895 - DNA, 20 bp, Artificial Sequence
  Description of Artificial Sequence: Synthetic oligonucleotide
  Target: LAMA2; (+) strand; PAM type: NNNNGHTT; PAM sequence: TTATGATT
tcttatacttttcaggaccc

SEQ ID NO: 45896 - DNA, 20 bp, Artificial Sequence
  Description of Artificial Sequence: Synthetic oligonucleotide
  Target: LAMA2; (+) strand; PAM type: NNNNGHTT; PAM sequence: AGTGGATT
cttatgattacattgagccc

SEQ ID NO: 45897 - DNA, 20 bp, Artificial Sequence
  Description of Artificial Sequence: Synthetic oligonucleotide
  Target: LAMA2; (+) strand; PAM type: NNNNGHTT; PAM sequence: CACTGTTT
tatagacgtctttgagggac

SEQ ID NO: 45898 - DNA, 20 bp, Artificial Sequence
  Description of Artificial Sequence: Synthetic oligonucleotide
  Target: LAMA2; (+) strand; PAM type: NNNNGHTT; PAM sequence: GAAAGATT
aaatgttattttccccaagg

SEQ ID NO: 45899 - DNA, 20 bp, Artificial Sequence
  Description of Artificial Sequence: Synthetic oligonucleotide
  Target: LAMA2; (+) strand; PAM type: NNNNGHTT; PAM sequence: CTTTGTTT
attataacattgggacacac

SEQ ID NO: 45900 - DNA, 20 bp, Artificial Sequence
  Description of Artificial Sequence: Synthetic oligonucleotide
  Target: LAMA2; (+) strand; PAM type: NNNNGHTT; PAM sequence: TGTGGTTT
aaggagctgtattaggaaaa

SEQ ID NO: 45901 - DNA, 20 bp, Artificial Sequence
  Description of Artificial Sequence: Synthetic oligonucleotide
  Target: LAMA2; (+) strand; PAM type: NNNNGHTT; PAM sequence: GAGTGATT
caggttataataactcctga

SEQ ID NO: 45902 - DNA, 20 bp, Artificial Sequence
  Description of Artificial Sequence: Synthetic oligonucleotide
  Target: LAMA2; (+) strand; PAM type: NNNNGHTT; PAM sequence: GGGTGATT
tcctgagagtgattgtaata

SEQ ID NO: 45903 - DNA, 20 bp, Artificial Sequence
  Description of Artificial Sequence: Synthetic oligonucleotide
  Target: LAMA2; (+) strand; PAM type: NNNNGHTT; PAM sequence: ATAAGCTT
ataagaaaatggggcaatac

SEQ ID NO: 45904 - DNA, 20 bp, Artificial Sequence
  Description of Artificial Sequence: Synthetic oligonucleotide
  Target: LAMA2; (+) strand; PAM type: NNNNGHTT; PAM sequence: GGGTGTTT
tttttttattaatcattctt

SEQ ID NO: 45905 - DNA, 20 bp, Artificial Sequence
  Description of Artificial Sequence: Synthetic oligonucleotide
  Target: LAMA2; (+) strand; PAM type: NNNNGHTT; PAM sequence: GGGGGATT
tcttgggtgtttctcacaga

SEQ ID NO: 45906 - DNA, 20 bp, Artificial Sequence
  Description of Artificial Sequence: Synthetic oligonucleotide
  Target: LAMA2; (+) strand; PAM type: NNNNGHTT; PAM sequence: TCTGGTTT
taaacaagtgaacaaaggtc

SEQ ID NO: 45907 - DNA, 20 bp, Artificial Sequence
  Description of Artificial Sequence: Synthetic oligonucleotide
  Target: LAMA2; (+) strand; PAM type: NNNNGHTT; PAM sequence: CCGTGTTT
gaggaccctgcggccttccg

SEQ ID NO: 45908 - DNA, 20 bp, Artificial Sequence
  Description of Artificial Sequence: Synthetic oligonucleotide
  Target: LAMA2; (+) strand; PAM type: NNNNGHTT; PAM sequence: ATCTGTTT
cgcgcatgctgccttaaagc

SEQ ID NO: 45909 - DNA, 20 bp, Artificial Sequence
  Description of Artificial Sequence: Synthetic oligonucleotide
  Target: LAMA2; (+) strand; PAM type: NNNNGHTT; PAM sequence: ACATGTTT
caaccctgagtggacacagc

SEQ ID NO: 45910 - DNA, 20 bp, Artificial Sequence
  Description of Artificial Sequence: Synthetic oligonucleotide
  Target: LAMA2; (+) strand; PAM type: NNNNGHTT; PAM sequence: ATCTGATT
tctacacagacacagcaaca

SEQ ID NO: 45911 - DNA, 20 bp, Artificial Sequence
  Description of Artificial Sequence: Synthetic oligonucleotide
  Target: LAMA2; (+) strand; PAM type: NNNNGHTT; PAM sequence: CTTTGATT
gatcagaaactttcttctgt

SEQ ID NO: 45912 - DNA, 20 bp, Artificial Sequence
  Description of Artificial Sequence: Synthetic oligonucleotide
  Target: LAMA2; (+) strand; PAM type: NNNNGHTT; PAM sequence: AAATGCTT
aatctttgctattagtcccc

SEQ ID NO: 45913 - DNA, 20 bp, Artificial Sequence
  Description of Artificial Sequence: Synthetic oligonucleotide
  Target: LAMA2; (+) strand; PAM type: NNNNGHTT; PAM sequence: GAGTGATT
tccccaaatgctttgaacta

SEQ ID NO: 45914 - DNA, 20 bp, Artificial Sequence
  Description of Artificial Sequence: Synthetic oligonucleotide
  Target: LAMA2; (+) strand; PAM type: NNNNGHTT; PAM sequence: TTCTGATT
gcaaatttaaactgtcatat

SEQ ID NO: 45915 - DNA, 20 bp, Artificial Sequence
  Description of Artificial Sequence: Synthetic oligonucleotide
  Target: LAMA2; (+) strand; PAM type: NNNNGHTT; PAM sequence: CTGTGATT
actgtcatatttctgattgc

SEQ ID NO: 45916 - DNA, 20 bp, Artificial Sequence
  Description of Artificial Sequence: Synthetic oligonucleotide
  Target: LAMA2; (+) strand; PAM type: NNNNGHTT; PAM sequence: GACAGTTT
acaccattgttgtactctgt

SEQ ID NO: 45917 - DNA, 20 bp, Artificial Sequence
  Description of Artificial Sequence: Synthetic oligonucleotide
  Target: LAMA2; (+) strand; PAM type: NNNNGHTT; PAM sequence: CACAGATT
gcaggtcaatcttttgaaac

SEQ ID NO: 45918 - DNA, 20 bp, Artificial Sequence
  Description of Artificial Sequence: Synthetic oligonucleotide
  Target: LAMA2; (+) strand; PAM type: NNNNGHTT; PAM sequence: GATTGTTT
gtcaatcttttgaaaccaca

SEQ ID NO: 45919 - DNA, 20 bp, Artificial Sequence
  Description of Artificial Sequence: Synthetic oligonucleotide
  Target: LAMA2; (+) strand; PAM type: NNNNGHTT; PAM sequence: AAATGCTT
ggtagtgctaaagacaagga

SEQ ID NO: 45920 - DNA, 20 bp, Artificial Sequence
  Description of Artificial Sequence: Synthetic oligonucleotide
  Target: LAMA2; (+) strand; PAM type: NNNNGHTT; PAM sequence: CTGGGTTT
aagacaaggaaaatgcttgc

SEQ ID NO: 45921 - DNA, 20 bp, Artificial Sequence
  Description of Artificial Sequence: Synthetic oligonucleotide
  Target: LAMA2; (+) strand; PAM type: NNNNGHTT; PAM sequence: ACTCGTTT
ggactctgctcactcgtgtt

SEQ ID NO: 45922 - DNA, 20 bp, Artificial Sequence
  Description of Artificial Sequence: Synthetic oligonucleotide
  Target: LAMA2; (+) strand; PAM type: NNNNGHTT; PAM sequence: AAATGTTT
gataattaagaaaatgcatt

SEQ ID NO: 45923 - DNA, 20 bp, Artificial Sequence
  Description of Artificial Sequence: Synthetic oligonucleotide
  Target: LAMA2; (+) strand; PAM type: NNNNGHTT; PAM sequence: AATAGTTT
ttattatgtgaaagggaatc

SEQ ID NO: 45924 - DNA, 20 bp, Artificial Sequence
  Description of Artificial Sequence: Synthetic oligonucleotide
  Target: LAMA2; (+) strand; PAM type: NNNNGHTT; PAM sequence: GTTTGTTT
tatgtgaaagggaatcaata

SEQ ID NO: 45925 - DNA, 20 bp, Artificial Sequence
  Description of Artificial Sequence: Synthetic oligonucleotide
  Target: LAMA2; (+) strand; PAM type: NNNNGHTT; PAM sequence: GCAAGCTT
tactaaaatgagatgcatta

SEQ ID NO: 45926 - DNA, 20 bp, Artificial Sequence
  Description of Artificial Sequence: Synthetic oligonucleotide
  Target: LAMA2; (+) strand; PAM type: NNNNGHTT; PAM sequence: ATCAGTTT
taactcaggacccctcttgt

SEQ ID NO: 45927 - DNA, 20 bp, Artificial Sequence
  Description of Artificial Sequence: Synthetic oligonucleotide
  Target: LAMA2; (+) strand; PAM type: NNNNGHTT; PAM sequence: TCCAGATT
tccacatcctactccacccc

SEQ ID NO: 45928 - DNA, 20 bp, Artificial Sequence
  Description of Artificial Sequence: Synthetic oligonucleotide
  Target: LAMA2; (+) strand; PAM type: NNNNGHTT; PAM sequence: ACTCGCTT
aagcaaattccatatgtatt

SEQ ID NO: 45929 - DNA, 20 bp, Artificial Sequence
  Description of Artificial Sequence: Synthetic oligonucleotide
  Target: LAMA2; (+) strand; PAM type: NNNNGHTT; PAM sequence: TACTGATT
tctaaaaattaatactatta

SEQ ID NO: 45930 - DNA, 20 bp, Artificial Sequence
  Description of Artificial Sequence: Synthetic oligonucleotide
  Target: LAMA2; (+) strand; PAM type: NNNNGHTT; PAM sequence: ACCTGCTT
tcagtattcaaattcatcac

SEQ ID NO: 45931 - DNA, 20 bp, Artificial Sequence
  Description of Artificial Sequence: Synthetic oligonucleotide
  Target: LAMA2; (+) strand; PAM type: NNNNGHTT; PAM sequence: CCAAGTTT
caaattcatcacacctgctt

SEQ ID NO: 45932 - DNA, 20 bp, Artificial Sequence
  Description of Artificial Sequence: Synthetic oligonucleotide
  Target: LAMA2; (+) strand; PAM type: NNNNGHTT; PAM sequence: TCAGGATT
gttttttaaaaacagttgaa

SEQ ID NO: 45933 - DNA, 20 bp, Artificial Sequence
  Description of Artificial Sequence: Synthetic oligonucleotide
  Target: LAMA2; (+) strand; PAM type: NNNNGHTT; PAM sequence: TAGTGTTT
aaaccacgttgtgtgtccag

SEQ ID NO: 45934 - DNA, 20 bp, Artificial Sequence
  Description of Artificial Sequence: Synthetic oligonucleotide
  Target: LAMA2; (+) strand; PAM type: NNNNGHTT; PAM sequence: TACTGTTT
gctacttagggttcctgtag

SEQ ID NO: 45935 - DNA, 20 bp, Artificial Sequence
  Description of Artificial Sequence: Synthetic oligonucleotide
  Target: LAMA2; (+) strand; PAM type: NNNNGHTT; PAM sequence: CTCTGATT
tagataaatttagagagtta

SEQ ID NO: 45936 - DNA, 20 bp, Artificial Sequence
  Description of Artificial Sequence: Synthetic oligonucleotide
  Target: LAMA2; (+) strand; PAM type: NNNNGHTT; PAM sequence: TATAGATT
tatttttggcacaaccactt

SEQ ID NO: 45937 - DNA, 20 bp, Artificial Sequence
  Description of Artificial Sequence: Synthetic oligonucleotide
  Target: LAMA2; (+) strand; PAM type: NNNNGHTT; PAM sequence: ATGTGCTT
accactttatagattgtgct

SEQ ID NO: 45938 - DNA, 20 bp, Artificial Sequence
  Description of Artificial Sequence: Synthetic oligonucleotide
  Target: LAMA2; (+) strand; PAM type: NNNNGHTT; PAM sequence: GGATGTTT
tctgggtgtctcttttttgg

SEQ ID NO: 45939 - DNA, 20 bp, Artificial Sequence
  Description of Artificial Sequence: Synthetic oligonucleotide
  Target: LAMA2; (+) strand; PAM type: NNNNGHTT; PAM sequence: TGTTGCTT
tactatagcaatttactcca

SEQ ID NO: 45940 - DNA, 20 bp, Artificial Sequence
  Description of Artificial Sequence: Synthetic oligonucleotide
  Target: LAMA2; (+) strand; PAM type: NNNNGHTT; PAM sequence: CAGGGTTT
cattcattgctcttccatct

SEQ ID NO: 45941 - DNA, 20 bp, Artificial Sequence
  Description of Artificial Sequence: Synthetic oligonucleotide
  Target: LAMA2; (+) strand; PAM type: NNNNGHTT; PAM sequence: TCTTGCTT
gctcttccatctcagggttt

SEQ ID NO: 45942 - DNA, 20 bp, Artificial Sequence
  Description of Artificial Sequence: Synthetic oligonucleotide
  Target: LAMA2; (+) strand; PAM type: NNNNGHTT; PAM sequence: TATTGCTT
ctcagggttttcttgcttat

SEQ ID NO: 45943 - DNA, 20 bp, Artificial Sequence
  Description of Artificial Sequence: Synthetic oligonucleotide
  Target: LAMA2; (+) strand; PAM type: NNNNGHTT; PAM sequence: TTGAGATT
ctatttttcagagctagact

SEQ ID NO: 45944 - DNA, 20 bp, Artificial Sequence
  Description of Artificial Sequence: Synthetic oligonucleotide
  Target: LAMA2; (+) strand; PAM type: NNNNGHTT; PAM sequence: ATTTGCTT
tttcagagctagactttgag

SEQ ID NO: 45945 - DNA, 20 bp, Artificial Sequence
  Description of Artificial Sequence: Synthetic oligonucleotide
  Target: LAMA2; (+) strand; PAM type: NNNNGHTT; PAM sequence: CATTGATT
ctgtcccttgaagagttagg

SEQ ID NO: 45946 - DNA, 20 bp, Artificial Sequence
  Description of Artificial Sequence: Synthetic oligonucleotide
  Target: LAMA2; (+) strand; PAM type: NNNNGHTT; PAM sequence: GTTAGATT
gtattatcattagtcatcca

SEQ ID NO: 45947 - DNA, 20 bp, Artificial Sequence
  Description of Artificial Sequence: Synthetic oligonucleotide
  Target: LAMA2; (+) strand; PAM type: NNNNGHTT; PAM sequence: ATGAGTTT
ttccaatgtgttaacttctc

SEQ ID NO: 45948 - DNA, 20 bp, Artificial Sequence
  Description of Artificial Sequence: Synthetic oligonucleotide
  Target: LAMA2; (+) strand; PAM type: NNNNGHTT; PAM sequence: GTCTGTTT
gtttaatgtgagtataaaaa

SEQ ID NO: 45949 - DNA, 20 bp, Artificial Sequence
  Description of Artificial Sequence: Synthetic oligonucleotide
  Target: LAMA2; (+) strand; PAM type: NNNNGHTT; PAM sequence: GCCTGTTT
acaacacaggaggtgaaatg

SEQ ID NO: 45950 - DNA, 20 bp, Artificial Sequence
  Description of Artificial Sequence: Synthetic oligonucleotide
  Target: LAMA2; (+) strand; PAM type: NNNNGHTT; PAM sequence: GTTTGCTT
cacaggaggtgaaatggcct

SEQ ID NO: 45951 - DNA, 20 bp, Artificial Sequence
  Description of Artificial Sequence: Synthetic oligonucleotide
  Target: LAMA2; (+) strand; PAM type: NNNNGHTT; PAM sequence: TCATGCTT
tacctgcaacttcaggaatt

SEQ ID NO: 45952 - DNA, 20 bp, Artificial Sequence
  Description of Artificial Sequence: Synthetic oligonucleotide
  Target: LAMA2; (+) strand; PAM type: NNNNGHTT; PAM sequence: AATCGTTT
ataattcagtgacaattaca

SEQ ID NO: 45953 - DNA, 20 bp, Artificial Sequence
  Description of Artificial Sequence: Synthetic oligonucleotide
  Target: LAMA2; (+) strand; PAM type: NNNNGHTT; PAM sequence: CTAGGTTT
gaactccccaccacattatt

SEQ ID NO: 45954 - DNA, 20 bp, Artificial Sequence
  Description of Artificial Sequence: Synthetic oligonucleotide
  Target: LAMA2; (+) strand; PAM type: NNNNGHTT; PAM sequence: TAATGTTT
aattagacatatttccacat

SEQ ID NO: 45955 - DNA, 20 bp, Artificial Sequence
  Description of Artificial Sequence: Synthetic oligonucleotide
  Target: LAMA2; (+) strand; PAM type: NNNNGHTT; PAM sequence: TTAAGTTT
atatttccacattaatgttt

SEQ ID NO: 45956 - DNA, 20 bp, Artificial Sequence
  Description of Artificial Sequence: Synthetic oligonucleotide
  Target: LAMA2; (+) strand; PAM type: NNNNGHTT; PAM sequence: TGATGCTT
tcatttaaaaattttatcac

SEQ ID NO: 45957 - DNA, 20 bp, Artificial Sequence
  Description of Artificial Sequence: Synthetic oligonucleotide
  Target: LAMA2; (+) strand; PAM type: NNNNGHTT; PAM sequence: CTGAGATT
agatgagagtgaacaatttt

SEQ ID NO: 45958 - DNA, 20 bp, Artificial Sequence
  Description of Artificial Sequence: Synthetic oligonucleotide
  Target: LAMA2; (+) strand; PAM type: NNNNGHTT; PAM sequence: TGTGGCTT
acagtaagagccaggttcta

SEQ ID NO: 45959 - DNA, 20 bp, Artificial Sequence
  Description of Artificial Sequence: Synthetic oligonucleotide
  Target: LAMA2; (+) strand; PAM type: NNNNGHTT; PAM sequence: TGGGGCTT
ctatgtggcttaggtgggga

SEQ ID NO: 45960 - DNA, 20 bp, Artificial Sequence
  Description of Artificial Sequence: Synthetic oligonucleotide
  Target: LAMA2; (+) strand; PAM type: NNNNGHTT; PAM sequence: CTCTGTTT
catttcagcccacttttcac

SEQ ID NO: 45961 - DNA, 20 bp, Artificial Sequence
  Description of Artificial Sequence: Synthetic oligonucleotide
  Target: LAMA2; (+) strand; PAM type: NNNNGHTT; PAM sequence: ATTGGTTT
cttctcatccttttcttgtt

SEQ ID NO: 45962 - DNA, 20 bp, Artificial Sequence
  Description of Artificial Sequence: Synthetic oligonucleotide
  Target: LAMA2; (+) strand; PAM type: NNNNGHTT; PAM sequence: TAAAGATT
agacattacctgcagttcta

SEQ ID NO: 45963 - DNA, 20 bp, Artificial Sequence
  Description of Artificial Sequence: Synthetic oligonucleotide
  Target: LAMA2; (+) strand; PAM type: NNNNGHTT; PAM sequence: CCCAGATT
cctgcagttctataaagatt

SEQ ID NO: 45964 - DNA, 20 bp, Artificial Sequence
  Description of Artificial Sequence: Synthetic oligonucleotide
  Target: LAMA2; (+) strand; PAM type: NNNNGHTT; PAM sequence: TTAAGCTT
ccagattattccaatgggta

SEQ ID NO: 45965 - DNA, 20 bp, Artificial Sequence
  Description of Artificial Sequence: Synthetic oligonucleotide
  Target: LAMA2; (+) strand; PAM type: NNNNGHTT; PAM sequence: ATGAGCTT
tattagaactgagagtacag

SEQ ID NO: 45966 - DNA, 20 bp, Artificial Sequence
  Description of Artificial Sequence: Synthetic oligonucleotide
  Target: LAMA2; (+) strand; PAM type: NNNNGHTT; PAM sequence: GAGAGATT
tagacacatgctgttctctt

SEQ ID NO: 45967 - DNA, 20 bp, Artificial Sequence
  Description of Artificial Sequence: Synthetic oligonucleotide
  Target: LAMA2; (+) strand; PAM type: NNNNGHTT; PAM sequence: TACGGCTT
tgaccttcattaatattttt

SEQ ID NO: 45968 - DNA, 20 bp, Artificial Sequence
  Description of Artificial Sequence: Synthetic oligonucleotide
  Target: LAMA2; (+) strand; PAM type: NNNNGHTT; PAM sequence: CTTAGATT
aatactctttagtagcattt

SEQ ID NO: 45969 - DNA, 20 bp, Artificial Sequence
  Description of Artificial Sequence: Synthetic oligonucleotide
  Target: LAMA2; (+) strand; PAM type: NNNNGHTT; PAM sequence: TTGTGATT
tttagtagcatttcttagat

SEQ ID NO: 45970 - DNA, 20 bp, Artificial Sequence
  Description of Artificial Sequence: Synthetic oligonucleotide
  Target: LAMA2; (+) strand; PAM type: NNNNGHTT; PAM sequence: TTCCGATT
ggctcactgcaacctccgcc

SEQ ID NO: 45971 - DNA, 20 bp, Artificial Sequence
  Description of Artificial Sequence: Synthetic oligonucleotide
  Target: LAMA2; (+) strand; PAM type: NNNNGHTT; PAM sequence: AAGCGATT
acctccgccttccgattttc

SEQ ID NO: 45972 - DNA, 20 bp, Artificial Sequence
  Description of Artificial Sequence: Synthetic oligonucleotide
  Target: LAMA2; (+) strand; PAM type: NNNNGHTT; PAM sequence: CTCAGCTT
ttttcaagcgattctcctgc

SEQ ID NO: 45973 - DNA, 20 bp, Artificial Sequence
  Description of Artificial Sequence: Synthetic oligonucleotide
  Target: LAMA2; (+) strand; PAM type: NNNNGHTT; PAM sequence: CTGGGATT
tgcctcagcttccggagtag

SEQ ID NO: 45974 - DNA, 20 bp, Artificial Sequence
  Description of Artificial Sequence: Synthetic oligonucleotide
  Target: LAMA2; (+) strand; PAM type: NNNNGHTT; PAM sequence: CGGAGTTT
tttgtattttttagtagaga

SEQ ID NO: 45975 - DNA, 20 bp, Artificial Sequence
  Description of Artificial Sequence: Synthetic oligonucleotide
  Target: LAMA2; (+) strand; PAM type: NNNNGHTT; PAM sequence: CTGGGATT
tgccccagcctcccaaagtg

SEQ ID NO: 45976 - DNA, 20 bp, Artificial Sequence
  Description of Artificial Sequence: Synthetic oligonucleotide
  Target: LAMA2; (+) strand; PAM type: NNNNGHTT; PAM sequence: CGAGGATT
cgtgagccaccgtgcccggc

SEQ ID NO: 45977 - DNA, 20 bp, Artificial Sequence
  Description of Artificial Sequence: Synthetic oligonucleotide
  Target: LAMA2; (+) strand; PAM type: NNNNGHTT; PAM sequence: AACTGATT
ttagcaatgcatgttctaga

SEQ ID NO: 45978 - DNA, 20 bp, Artificial Sequence
  Description of Artificial Sequence: Synthetic oligonucleotide
  Target: LAMA2; (+) strand; PAM type: NNNNGHTT; PAM sequence: TCTGGTTT
tgcatgttctagaaactgat

SEQ ID NO: 45979 - DNA, 20 bp, Artificial Sequence
  Description of Artificial Sequence: Synthetic oligonucleotide
  Target: LAMA2; (+) strand; PAM type: NNNNGHTT; PAM sequence: TCAAGATT
ttttatcttagccatgatgt

SEQ ID NO: 45980 - DNA, 20 bp, Artificial Sequence
  Description of Artificial Sequence: Synthetic oligonucleotide
  Target: LAMA2; (+) strand; PAM type: NNNNGHTT; PAM sequence: CGTTGCTT
tctatgtgatgatcattgtc

SEQ ID NO: 45981 - DNA, 20 bp, Artificial Sequence
  Description of Artificial Sequence: Synthetic oligonucleotide
  Target: LAMA2; (+) strand; PAM type: NNNNGHTT; PAM sequence: AAAGGATT
ttgcttattattttgagact

SEQ ID NO: 45982 - DNA, 20 bp, Artificial Sequence
  Description of Artificial Sequence: Synthetic oligonucleotide
  Target: LAMA2; (+) strand; PAM type: NNNNGHTT; PAM sequence: TATTGTTT
gtaaattgtcaaacacttga

SEQ ID NO: 45983 - DNA, 20 bp, Artificial Sequence
  Description of Artificial Sequence: Synthetic oligonucleotide
  Target: LAMA2; (+) strand; PAM type: NNNNGHTT; PAM sequence: TTGGGATT
gatattgtttttaaagttat

SEQ ID NO: 45984 - DNA, 20 bp, Artificial Sequence
  Description of Artificial Sequence: Synthetic oligonucleotide
  Target: LAMA2; (+) strand; PAM type: NNNNGHTT; PAM sequence: CCAAGTTT
tttgggatttttttaagaca

SEQ ID NO: 45985 - DNA, 20 bp, Artificial Sequence
  Description of Artificial Sequence: Synthetic oligonucleotide
  Target: LAMA2; (+) strand; PAM type: NNNNGHTT; PAM sequence: TACTGATT
tggaaatgaggtattataac

SEQ ID NO: 45986 - DNA, 20 bp, Artificial Sequence
  Description of Artificial Sequence: Synthetic oligonucleotide
  Target: LAMA2; (+) strand; PAM type: NNNNGHTT; PAM sequence: AAAAGTTT
aatgctattcactacatttt

SEQ ID NO: 45987 - DNA, 20 bp, Artificial Sequence
  Description of Artificial Sequence: Synthetic oligonucleotide
  Target: LAMA2; (+) strand; PAM type: NNNNGHTT; PAM sequence: TATTGTTT
gaaaataaatgaaagaggga

SEQ ID NO: 45988 - DNA, 20 bp, Artificial Sequence
  Description of Artificial Sequence: Synthetic oligonucleotide
  Target: LAMA2; (+) strand; PAM type: NNNNGHTT; PAM sequence: GACTGCTT
tcagtcttctgtaaggcggt

SEQ ID NO: 45989 - DNA, 20 bp, Artificial Sequence
  Description of Artificial Sequence: Synthetic oligonucleotide
  Target: LAMA2; (+) strand; PAM type: NNNNGHTT; PAM sequence: CGTGGATT
tctctagtagaacttctctt

SEQ ID NO: 45990 - DNA, 20 bp, Artificial Sequence
  Description of Artificial Sequence: Synthetic oligonucleotide
  Target: LAMA2; (+) strand; PAM type: NNNNGHTT; PAM sequence: CAGTGCTT
ttatcacatatttgcatact

SEQ ID NO: 45991 - DNA, 20 bp, Artificial Sequence
  Description of Artificial Sequence: Synthetic oligonucleotide
  Target: LAMA2; (+) strand; PAM type: NNNNGHTT; PAM sequence: ATATGCTT
gtgggtacctgtgatctcta

SEQ ID NO: 45992 - DNA, 20 bp, Artificial Sequence
  Description of Artificial Sequence: Synthetic oligonucleotide
  Target: LAMA2; (+) strand; PAM type: NNNNGHTT; PAM sequence: TTTTGTTT
atatgctttgctatctctct

SEQ ID NO: 45993 - DNA, 20 bp, Artificial Sequence
  Description of Artificial Sequence: Synthetic oligonucleotide
  Target: LAMA2; (+) strand; PAM type: NNNNGHTT; PAM sequence: CTATGTTT
ttatatctttaaaaaaatct

SEQ ID NO: 45994 - DNA, 20 bp, Artificial Sequence
  Description of Artificial Sequence: Synthetic oligonucleotide
  Target: LAMA2; (+) strand; PAM type: NNNNGHTT; PAM sequence: CCTAGATT
aggctcacttggaatattta

SEQ ID NO: 45995 - DNA, 20 bp, Artificial Sequence
  Description of Artificial Sequence: Synthetic oligonucleotide
  Target: LAMA2; (+) strand; PAM type: NNNNGHTT; PAM sequence: AAGAGTTT
caatggataacagagggtaa

SEQ ID NO: 45996 - DNA, 20 bp, Artificial Sequence
  Description of Artificial Sequence: Synthetic oligonucleotide
  Target: LAMA2; (+) strand; PAM type: NNNNGHTT; PAM sequence: CTGGGATT
cagatgacaatatatgctaa

SEQ ID NO: 45997 - DNA, 20 bp, Artificial Sequence
  Description of Artificial Sequence: Synthetic oligonucleotide
  Target: LAMA2; (+) strand; PAM type: NNNNGHTT; PAM sequence: CAGTGATT
cataacgtggaagcacatta

SEQ ID NO: 45998 - DNA, 20 bp, Artificial Sequence
  Description of Artificial Sequence: Synthetic oligonucleotide
  Target: LAMA2; (+) strand; PAM type: NNNNGHTT; PAM sequence: TGTGGCTT
gaatacttgcagacagcatt

SEQ ID NO: 45999 - DNA, 20 bp, Artificial Sequence
  Description of Artificial Sequence: Synthetic oligonucleotide
  Target: LAMA2; (+) strand; PAM type: NNNNGHTT; PAM sequence: TAATGTTT
tgcagacagcatttgtggct

SEQ ID NO: 46000 - DNA, 20 bp, Artificial Sequence
  Description of Artificial Sequence: Synthetic oligonucleotide
  Target: LAMA2; (+) strand; PAM type: NNNNGHTT; PAM sequence: TGTGGCTT
atgtttaccctgagataact

SEQ ID NO: 46001 - DNA, 20 bp, Artificial Sequence
  Description of Artificial Sequence: Synthetic oligonucleotide
  Target: LAMA2; (+) strand; PAM type: NNNNGHTT; PAM sequence: CAAAGTTT
tactgtcctaaccttatccc

SEQ ID NO: 46002 - DNA, 20 bp, Artificial Sequence
  Description of Artificial Sequence: Synthetic oligonucleotide
  Target: LAMA2; (+) strand; PAM type: NNNNGHTT; PAM sequence: CTGTGTTT
atcattctatttgtagcatt

SEQ ID NO: 46003 - DNA, 20 bp, Artificial Sequence
  Description of Artificial Sequence: Synthetic oligonucleotide
  Target: LAMA2; (+) strand; PAM type: NNNNGHTT; PAM sequence: TATTGATT
catatacaaaatatagtaat

SEQ ID NO: 46004 - DNA, 20 bp, Artificial Sequence
  Description of Artificial Sequence: Synthetic oligonucleotide
  Target: LAMA2; (+) strand; PAM type: NNNNGHTT; PAM sequence: TTAGGATT
tcatatacatttctgttaca

SEQ ID NO: 46005 - DNA, 20 bp, Artificial Sequence
  Description of Artificial Sequence: Synthetic oligonucleotide
  Target: LAMA2; (+) strand; PAM type: NNNNGHTT; PAM sequence: ATAAGTTT
ctgttacattaggattagag

SEQ ID NO: 46006 - DNA, 20 bp, Artificial Sequence
  Description of Artificial Sequence: Synthetic oligonucleotide
  Target: LAMA2; (+) strand; PAM type: NNNNGHTT; PAM sequence: AAACGTTT
tatttagaaataactctaag

SEQ ID NO: 46007 - DNA, 20 bp, Artificial Sequence
  Description of Artificial Sequence: Synthetic oligonucleotide
  Target: LAMA2; (+) strand; PAM type: NNNNGHTT; PAM sequence: GTCAGATT
tattttcacattgaaaataa

SEQ ID NO: 46008 - DNA, 20 bp, Artificial Sequence
  Description of Artificial Sequence: Synthetic oligonucleotide
  Target: LAMA2; (+) strand; PAM type: NNNNGHTT; PAM sequence: ATTTGCTT
tcacattgaaaataagtcag

SEQ ID NO: 46009 - DNA, 20 bp, Artificial Sequence
  Description of Artificial Sequence: Synthetic oligonucleotide
  Target: LAMA2; (+) strand; PAM type: NNNNGHTT; PAM sequence: ATGTGTTT
atttgcttcagcctcaaaaa

SEQ ID NO: 46010 - DNA, 20 bp, Artificial Sequence
  Description of Artificial Sequence: Synthetic oligonucleotide
  Target: LAMA2; (+) strand; PAM type: NNNNGHTT; PAM sequence: AGGAGTTT
caagtggatcacctgaggtt

SEQ ID NO: 46011 - DNA, 20 bp, Artificial Sequence
  Description of Artificial Sequence: Synthetic oligonucleotide
  Target: LAMA2; (+) strand; PAM type: NNNNGHTT; PAM sequence: AATTGCTT
ttgggaggctgaggcaggag

SEQ ID NO: 46012 - DNA, 20 bp, Artificial Sequence
  Description of Artificial Sequence: Synthetic oligonucleotide
  Target: LAMA2; (+) strand; PAM type: NNNNGHTT; PAM sequence: CCAAGCTT
gaggcagaggttgcagtgag

SEQ ID NO: 46013 - DNA, 20 bp, Artificial Sequence
  Description of Artificial Sequence: Synthetic oligonucleotide
  Target: LAMA2; (+) strand; PAM type: NNNNGHTT; PAM sequence: TTATGATT
aatttagttattcttcttct

SEQ ID NO: 46014 - DNA, 20 bp, Artificial Sequence
  Description of Artificial Sequence: Synthetic oligonucleotide
  Target: LAMA2; (+) strand; PAM type: NNNNGHTT; PAM sequence: TTGGGATT
aagaccttgtcaggaatact

SEQ ID NO: 46015 - DNA, 20 bp, Artificial Sequence
  Description of Artificial Sequence: Synthetic oligonucleotide
  Target: LAMA2; (+) strand; PAM type: NNNNGHTT; PAM sequence: ATAAGATT
caactctatctgtgcatttt

SEQ ID NO: 46016 - DNA, 20 bp, Artificial Sequence
  Description of Artificial Sequence: Synthetic oligonucleotide
  Target: LAMA2; (+) strand; PAM type: NNNNGHTT; PAM sequence: GTATGTTT
tttataagattaatccattg

SEQ ID NO: 46017 - DNA, 20 bp, Artificial Sequence
  Description of Artificial Sequence: Synthetic oligonucleotide
  Target: LAMA2; (+) strand; PAM type: NNNNGHTT; PAM sequence: GGCAGCTT
ttttcttgactcctaaaggt

SEQ ID NO: 46018 - DNA, 20 bp, Artificial Sequence
  Description of Artificial Sequence: Synthetic oligonucleotide
  Target: LAMA2; (+) strand; PAM type: NNNNGHTT; PAM sequence: CAGTGATT
gcatttgggaggttgggcag

SEQ ID NO: 46019 - DNA, 20 bp, Artificial Sequence
  Description of Artificial Sequence: Synthetic oligonucleotide
  Target: LAMA2; (+) strand; PAM type: NNNNGHTT; PAM sequence: GGGTGATT
cctactttgactcattcgat

SEQ ID NO: 46020 - DNA, 20 bp, Artificial Sequence
  Description of Artificial Sequence: Synthetic oligonucleotide
  Target: LAMA2; (+) strand; PAM type: NNNNGHTT; PAM sequence: ATTTGTTT
aaaactatgaagcagataaa

SEQ ID NO: 46021 - DNA, 20 bp, Artificial Sequence
  Description of Artificial Sequence: Synthetic oligonucleotide
  Target: LAMA2; (+) strand; PAM type: NNNNGHTT; PAM sequence: TCAGGATT
ttgtttctagagcatccctt

SEQ ID NO: 46022 - DNA, 20 bp, Artificial Sequence
  Description of Artificial Sequence: Synthetic oligonucleotide
  Target: LAMA2; (+) strand; PAM type: NNNNGHTT; PAM sequence: TAGAGCTT
caccagtgacctcatccact

SEQ ID NO: 46023 - DNA, 20 bp, Artificial Sequence
  Description of Artificial Sequence: Synthetic oligonucleotide
  Target: LAMA2; (+) strand; PAM type: NNNNGHTT; PAM sequence: TACTGTTT
tactagtcaagaacatatca

SEQ ID NO: 46024 - DNA, 20 bp, Artificial Sequence
  Description of Artificial Sequence: Synthetic oligonucleotide
  Target: LAMA2; (+) strand; PAM type: NNNNGHTT; PAM sequence: TAATGTTT
tgtacataaatgtcattcca

SEQ ID NO: 46025 - DNA, 20 bp, Artificial Sequence
  Description of Artificial Sequence: Synthetic oligonucleotide
  Target: LAMA2; (+) strand; PAM type: NNNNGHTT; PAM sequence: GCATGTTT
tttatttcaccccttttctt

SEQ ID NO: 46026 - DNA, 20 bp, Artificial Sequence
  Description of Artificial Sequence: Synthetic oligonucleotide
  Target: LAMA2; (+) strand; PAM type: NNNNGHTT; PAM sequence: ATGTGTTT
gtacagaaacccttcattta

SEQ ID NO: 46027 - DNA, 20 bp, Artificial Sequence
  Description of Artificial Sequence: Synthetic oligonucleotide
  Target: LAMA2; (+) strand; PAM type: NNNNGHTT; PAM sequence: TGAGGATT
gtaaaggaatggacatttat

SEQ ID NO: 46028 - DNA, 20 bp, Artificial Sequence
  Description of Artificial Sequence: Synthetic oligonucleotide
  Target: LAMA2; (+) strand; PAM type: NNNNGHTT; PAM sequence: ATGTGTTT
accacaatctgaacatagga

SEQ ID NO: 46029 - DNA, 20 bp, Artificial Sequence
  Description of Artificial Sequence: Synthetic oligonucleotide
  Target: LAMA2; (+) strand; PAM type: NNNNGHTT; PAM sequence: TGTTGTTT
tgaacataggaatgtgttta

SEQ ID NO: 46030 - DNA, 20 bp, Artificial Sequence
  Description of Artificial Sequence: Synthetic oligonucleotide
  Target: LAMA2; (+) strand; PAM type: NNNNGHTT; PAM sequence: TGAGGATT
gcctctaaatggcacttttt

SEQ ID NO: 46031 - DNA, 20 bp, Artificial Sequence
  Description of Artificial Sequence: Synthetic oligonucleotide
  Target: LAMA2; (+) strand; PAM type: NNNNGHTT; PAM sequence: ACAAGTTT
ggattatgtgatataagtaa

SEQ ID NO: 46032 - DNA, 20 bp, Artificial Sequence
  Description of Artificial Sequence: Synthetic oligonucleotide
  Target: LAMA2; (+) strand; PAM type: NNNNGHTT; PAM sequence: TCTAGCTT
cactattcacactgggaatt

SEQ ID NO: 46033 - DNA, 20 bp, Artificial Sequence
  Description of Artificial Sequence: Synthetic oligonucleotide
  Target: LAMA2; (+) strand; PAM type: NNNNGHTT; PAM sequence: AAATGTTT
aattggtatgtactattaat

SEQ ID NO: 46034 - DNA, 20 bp, Artificial Sequence
  Description of Artificial Sequence: Synthetic oligonucleotide
  Target: LAMA2; (+) strand; PAM type: NNNNGHTT; PAM sequence: ATAAGATT
aaatcatttcagagaacatt

SEQ ID NO: 46035 - DNA, 20 bp, Artificial Sequence
  Description of Artificial Sequence: Synthetic oligonucleotide
  Target: LAMA2; (+) strand; PAM type: NNNNGHTT; PAM sequence: ATGTGATT
ctaggtgttccagatcgcgt

SEQ ID NO: 46036 - DNA, 20 bp, Artificial Sequence
  Description of Artificial Sequence: Synthetic oligonucleotide
  Target: LAMA2; (+) strand; PAM type: NNNNGHTT; PAM sequence: ACTGGATT
taactccccccggcctggaa

SEQ ID NO: 46037 - DNA, 20 bp, Artificial Sequence
  Description of Artificial Sequence: Synthetic oligonucleotide
  Target: LAMA2; (+) strand; PAM type: NNNNGHTT; PAM sequence: TAACGCTT
tgtgacagacacggagtgcc

SEQ ID NO: 46038 - DNA, 20 bp, Artificial Sequence
  Description of Artificial Sequence: Synthetic oligonucleotide
  Target: LAMA2; (+) strand; PAM type: NNNNGHTT; PAM sequence: GGGAGATT
tatatcagtaattaatgtca

SEQ ID NO: 46039 - DNA, 20 bp, Artificial Sequence
  Description of Artificial Sequence: Synthetic oligonucleotide
  Target: LAMA2; (+) strand; PAM type: NNNNGHTT; PAM sequence: ATAGGATT
aatgtcagggagattttaaa

SEQ ID NO: 46040 - DNA, 20 bp, Artificial Sequence
  Description of Artificial Sequence: Synthetic oligonucleotide
  Target: LAMA2; (+) strand; PAM type: NNNNGHTT; PAM sequence: AGGTGATT
aaataaaaaagaaaaacctg

SEQ ID NO: 46041 - DNA, 20 bp, Artificial Sequence
  Description of Artificial Sequence: Synthetic oligonucleotide
  Target: LAMA2; (+) strand; PAM type: NNNNGHTT; PAM sequence: ATAGGTTT
taaagatcagagaagaggaa

SEQ ID NO: 46042 - DNA, 20 bp, Artificial Sequence
  Description of Artificial Sequence: Synthetic oligonucleotide
  Target: LAMA2; (+) strand; PAM type: NNNNGHTT; PAM sequence: CAATGATT
ataggtttaatctggaaagt

SEQ ID NO: 46043 - DNA, 20 bp, Artificial Sequence
  Description of Artificial Sequence: Synthetic oligonucleotide
  Target: LAMA2; (+) strand; PAM type: NNNNGHTT; PAM sequence: TGAGGATT
taaagagactttctcaacaa

SEQ ID NO: 46044 - DNA, 20 bp, Artificial Sequence
  Description of Artificial Sequence: Synthetic oligonucleotide
  Target: LAMA2; (+) strand; PAM type: NNNNGHTT; PAM sequence: TAATGATT
ttctcaacaatgaggattgc

SEQ ID NO: 46045 - DNA, 20 bp, Artificial Sequence
  Description of Artificial Sequence: Synthetic oligonucleotide
  Target: LAMA2; (+) strand; PAM type: NNNNGHTT; PAM sequence: GAAGGATT
gaggattgctaatgattaga

SEQ ID NO: 46046 - DNA, 20 bp, Artificial Sequence
  Description of Artificial Sequence: Synthetic oligonucleotide
  Target: LAMA2; (+) strand; PAM type: NNNNGHTT; PAM sequence: TGATGTTT
aagtaattctttcaatcttt

SEQ ID NO: 46047 - DNA, 20 bp, Artificial Sequence
  Description of Artificial Sequence: Synthetic oligonucleotide
  Target: LAMA2; (+) strand; PAM type: NNNNGHTT; PAM sequence: TGGGGTTT
gtcaccacatagggctacag

SEQ ID NO: 46048 - DNA, 20 bp, Artificial Sequence
  Description of Artificial Sequence: Synthetic oligonucleotide
  Target: LAMA2; (+) strand; PAM type: NNNNGHTT; PAM sequence: TCAGGCTT
agtggggtttcttccctggg

SEQ ID NO: 46049 - DNA, 20 bp, Artificial Sequence
  Description of Artificial Sequence: Synthetic oligonucleotide
  Target: LAMA2; (+) strand; PAM type: NNNNGHTT; PAM sequence: ACGTGCTT
agtgatgtgcaagctaggtt

SEQ ID NO: 46050 - DNA, 20 bp, Artificial Sequence
  Description of Artificial Sequence: Synthetic oligonucleotide
  Target: LAMA2; (+) strand; PAM type: NNNNGHTT; PAM sequence: TTAAGATT
cagtgtctgtcatcctgtgg

SEQ ID NO: 46051 - DNA, 20 bp, Artificial Sequence
  Description of Artificial Sequence: Synthetic oligonucleotide
  Target: LAMA2; (+) strand; PAM type: NNNNGHTT; PAM sequence: TTTAGATT
tgtcatcctgtggttaagat

SEQ ID NO: 46052 - DNA, 20 bp, Artificial Sequence
  Description of Artificial Sequence: Synthetic oligonucleotide
  Target: LAMA2; (+) strand; PAM type: NNNNGHTT; PAM sequence: CATTGATT
gttaagattttagattcatt

SEQ ID NO: 46053 - DNA, 20 bp, Artificial Sequence
  Description of Artificial Sequence: Synthetic oligonucleotide
  Target: LAMA2; (+) strand; PAM type: NNNNGHTT; PAM sequence: CATGGCTT
tttaagccacatattctaac

SEQ ID NO: 46054 - DNA, 20 bp, Artificial Sequence
  Description of Artificial Sequence: Synthetic oligonucleotide
  Target: LAMA2; (+) strand; PAM type: NNNNGHTT; PAM sequence: ATTAGTTT
taaccatggcttcagttgtt

SEQ ID NO: 46055 - DNA, 20 bp, Artificial Sequence
  Description of Artificial Sequence: Synthetic oligonucleotide
  Target: LAMA2; (+) strand; PAM type: NNNNGHTT; PAM sequence: GGAGGTTT
ttagttgtatgtgggggcgg

SEQ ID NO: 46056 - DNA, 20 bp, Artificial Sequence
  Description of Artificial Sequence: Synthetic oligonucleotide
  Target: LAMA2; (+) strand; PAM type: NNNNGHTT; PAM sequence: TTTTGTTT
tgggggcggggaggtttttt

SEQ ID NO: 46057 - DNA, 20 bp, Artificial Sequence
  Description of Artificial Sequence: Synthetic oligonucleotide
  Target: LAMA2; (+) strand; PAM type: NNNNGHTT; PAM sequence: TTTTGTTT
tttttttttgtttttttttt

SEQ ID NO: 46058 - DNA, 20 bp, Artificial Sequence
  Description of Artificial Sequence: Synthetic oligonucleotide
  Target: LAMA2; (+) strand; PAM type: NNNNGHTT; PAM sequence: TCTGGCTT
tgttttttttttttttgttt

SEQ ID NO: 46059 - DNA, 20 bp, Artificial Sequence
  Description of Artificial Sequence: Synthetic oligonucleotide
  Target: LAMA2; (+) strand; PAM type: NNNNGHTT; PAM sequence: CTCAGTTT
gttacttaaattctctgcac

SEQ ID NO: 46060 - DNA, 20 bp, Artificial Sequence
  Description of Artificial Sequence: Synthetic oligonucleotide
  Target: LAMA2; (+) strand; PAM type: NNNNGHTT; PAM sequence: AGAGGATT
cttacctcatataattgtca

SEQ ID NO: 46061 - DNA, 20 bp, Artificial Sequence
  Description of Artificial Sequence: Synthetic oligonucleotide
  Target: LAMA2; (+) strand; PAM type: NNNNGHTT; PAM sequence: TATTGTTT
taagtactctgtgctatttt

SEQ ID NO: 46062 - DNA, 20 bp, Artificial Sequence
  Description of Artificial Sequence: Synthetic oligonucleotide
  Target: LAMA2; (+) strand; PAM type: NNNNGHTT; PAM sequence: GTATGTTT
aattattcaatatttcttta

SEQ ID NO: 46063 - DNA, 20 bp, Artificial Sequence
  Description of Artificial Sequence: Synthetic oligonucleotide
  Target: LAMA2; (+) strand; PAM type: NNNNGHTT; PAM sequence: TAGGGTTT
tcaacacttctagggaaaat

SEQ ID NO: 46064 - DNA, 20 bp, Artificial Sequence
  Description of Artificial Sequence: Synthetic oligonucleotide
  Target: LAMA2; (+) strand; PAM type: NNNNGHTT; PAM sequence: CAGTGCTT
atttttatattaatgtatac

SEQ ID NO: 46065 - DNA, 20 bp, Artificial Sequence
  Description of Artificial Sequence: Synthetic oligonucleotide
  Target: LAMA2; (+) strand; PAM type: NNNNGHTT; PAM sequence: ACCAGTTT
taaattccatgttcaaaaat

SEQ ID NO: 46066 - DNA, 20 bp, Artificial Sequence
  Description of Artificial Sequence: Synthetic oligonucleotide
  Target: LAMA2; (+) strand; PAM type: NNNNGHTT; PAM sequence: ACCTGCTT
gtgagtcaaacagctgttca

SEQ ID NO: 46067 - DNA, 20 bp, Artificial Sequence
  Description of Artificial Sequence: Synthetic oligonucleotide
  Target: LAMA2; (+) strand; PAM type: NNNNGHTT; PAM sequence: GCCAGTTT
ctagaggcatccaattcctg

SEQ ID NO: 46068 - DNA, 20 bp, Artificial Sequence
  Description of Artificial Sequence: Synthetic oligonucleotide
  Target: LAMA2; (+) strand; PAM type: NNNNGHTT; PAM sequence: AAGAGTTT
atgggagtagggagtgcaga

SEQ ID NO: 46069 - DNA, 20 bp, Artificial Sequence
  Description of Artificial Sequence: Synthetic oligonucleotide
  Target: LAMA2; (+) strand; PAM type: NNNNGHTT; PAM sequence: CCTAGATT
gaatttttattattttttat

SEQ ID NO: 46070 - DNA, 20 bp, Artificial Sequence
  Description of Artificial Sequence: Synthetic oligonucleotide
  Target: LAMA2; (+) strand; PAM type: NNNNGHTT; PAM sequence: TTCAGTTT
ttattattttttatcctaga

SEQ ID NO: 46071 - DNA, 20 bp, Artificial Sequence
  Description of Artificial Sequence: Synthetic oligonucleotide
  Target: LAMA2; (+) strand; PAM type: NNNNGHTT; PAM sequence: AAATGATT
agactattctatacctttaa

SEQ ID NO: 46072 - DNA, 20 bp, Artificial Sequence
  Description of Artificial Sequence: Synthetic oligonucleotide
  Target: LAMA2; (+) strand; PAM type: NNNNGHTT; PAM sequence: ACATGTTT
ctgccaatatgaaacaaaag

SEQ ID NO: 46073 - DNA, 20 bp, Artificial Sequence
  Description of Artificial Sequence: Synthetic oligonucleotide
  Target: LAMA2; (+) strand; PAM type: NNNNGHTT; PAM sequence: GTTAGTTT
acatgtttattagttaatta

SEQ ID NO: 46074 - DNA, 20 bp, Artificial Sequence
  Description of Artificial Sequence: Synthetic oligonucleotide
  Target: LAMA2; (+) strand; PAM type: NNNNGHTT; PAM sequence: TATTGTTT
ttagtttctttaattggcta

SEQ ID NO: 46075 - DNA, 20 bp, Artificial Sequence
  Description of Artificial Sequence: Synthetic oligonucleotide
  Target: LAMA2; (+) strand; PAM type: NNNNGHTT; PAM sequence: AACTGCTT
cctaaacaacacttactaaa

SEQ ID NO: 46076 - DNA, 20 bp, Artificial Sequence
  Description of Artificial Sequence: Synthetic oligonucleotide
  Target: LAMA2; (+) strand; PAM type: NNNNGHTT; PAM sequence: ACATGTTT
ctgactgaactgtctctgtg

SEQ ID NO: 46077 - DNA, 20 bp, Artificial Sequence
  Description of Artificial Sequence: Synthetic oligonucleotide
  Target: LAMA2; (+) strand; PAM type: NNNNGHTT; PAM sequence: TATAGCTT
taggctatctattcatttta

SEQ ID NO: 46078 - DNA, 20 bp, Artificial Sequence
  Description of Artificial Sequence: Synthetic oligonucleotide
  Target: LAMA2; (+) strand; PAM type: NNNNGHTT; PAM sequence: CTCTGATT
actgaaataataattgaggt

SEQ ID NO: 46079 - DNA, 20 bp, Artificial Sequence
  Description of Artificial Sequence: Synthetic oligonucleotide
  Target: LAMA2; (+) strand; PAM type: NNNNGHTT; PAM sequence: TAAGGATT
atatttcatccataatctgg

SEQ ID NO: 46080 - DNA, 20 bp, Artificial Sequence
  Description of Artificial Sequence: Synthetic oligonucleotide
  Target: LAMA2; (+) strand; PAM type: NNNNGHTT; PAM sequence: CCTGGATT
agacacaaggaattagaaga

SEQ ID NO: 46081 - DNA, 20 bp, Artificial Sequence
  Description of Artificial Sequence: Synthetic oligonucleotide
  Target: LAMA2; (+) strand; PAM type: NNNNGHTT; PAM sequence: AAATGATT
ttatttgtgggaccttggtc

SEQ ID NO: 46082 - DNA, 20 bp, Artificial Sequence
  Description of Artificial Sequence: Synthetic oligonucleotide
  Target: LAMA2; (+) strand; PAM type: NNNNGHTT; PAM sequence: CTGGGATT
ggtcaaatgatttaatctct

SEQ ID NO: 46083 - DNA, 20 bp, Artificial Sequence
  Description of Artificial Sequence: Synthetic oligonucleotide
  Target: LAMA2; (+) strand; PAM type: NNNNGHTT; PAM sequence: CCCAGATT
atagatgaattagttcaatg

SEQ ID NO: 46084 - DNA, 20 bp, Artificial Sequence
  Description of Artificial Sequence: Synthetic oligonucleotide
  Target: LAMA2; (+) strand; PAM type: NNNNGHTT; PAM sequence: TATAGCTT
catggtattttctaaaataa

SEQ ID NO: 46085 - DNA, 20 bp, Artificial Sequence
  Description of Artificial Sequence: Synthetic oligonucleotide
  Target: LAMA2; (+) strand; PAM type: NNNNGHTT; PAM sequence: AAAAGTTT
acaacatttgaggatattct

SEQ ID NO: 46086 - DNA, 20 bp, Artificial Sequence
  Description of Artificial Sequence: Synthetic oligonucleotide
  Target: LAMA2; (+) strand; PAM type: NNNNGHTT; PAM sequence: GTCAGCTT
ctgtggaataaatctcactc

SEQ ID NO: 46087 - DNA, 20 bp, Artificial Sequence
  Description of Artificial Sequence: Synthetic oligonucleotide
  Target: LAMA2; (+) strand; PAM type: NNNNGHTT; PAM sequence: TTTAGTTT
aataaatctcactcgtcagc

SEQ ID NO: 46088 - DNA, 20 bp, Artificial Sequence
  Description of Artificial Sequence: Synthetic oligonucleotide
  Target: LAMA2; (+) strand; PAM type: NNNNGHTT; PAM sequence: AATTGTTT
atccctggaatacaattatt

SEQ ID NO: 46089 - DNA, 20 bp, Artificial Sequence
  Description of Artificial Sequence: Synthetic oligonucleotide
  Target: LAMA2; (+) strand; PAM type: NNNNGHTT; PAM sequence: ACATGATT
catataaaccagtaaataaa

SEQ ID NO: 46090 - DNA, 20 bp, Artificial Sequence
  Description of Artificial Sequence: Synthetic oligonucleotide
  Target: LAMA2; (+) strand; PAM type: NNNNGHTT; PAM sequence: CCCTGCTT
acagagagcaataaatctcc

SEQ ID NO: 46091 - DNA, 20 bp, Artificial Sequence
  Description of Artificial Sequence: Synthetic oligonucleotide
  Target: LAMA2; (+) strand; PAM type: NNNNGHTT; PAM sequence: CTAGGTTT
ttgttatcagatgtagaatt

SEQ ID NO: 46092 - DNA, 20 bp, Artificial Sequence
  Description of Artificial Sequence: Synthetic oligonucleotide
  Target: LAMA2; (+) strand; PAM type: NNNNGHTT; PAM sequence: TATTGTTT
tattttcttttggcacattt

SEQ ID NO: 46093 - DNA, 20 bp, Artificial Sequence
  Description of Artificial Sequence: Synthetic oligonucleotide
  Target: LAMA2; (+) strand; PAM type: NNNNGHTT; PAM sequence: TTCTGATT
ttttggcacattttattgtt

SEQ ID NO: 46094 - DNA, 20 bp, Artificial Sequence
  Description of Artificial Sequence: Synthetic oligonucleotide
  Target: LAMA2; (+) strand; PAM type: NNNNGHTT; PAM sequence: CATTGCTT
ttttattgttttctgatttc

SEQ ID NO: 46095 - DNA, 20 bp, Artificial Sequence
  Description of Artificial Sequence: Synthetic oligonucleotide
  Target: LAMA2; (+) strand; PAM type: NNNNGHTT; PAM sequence: ATCCGATT
cttatgtagagaatgcagct

SEQ ID NO: 46096 - DNA, 20 bp, Artificial Sequence
  Description of Artificial Sequence: Synthetic oligonucleotide
  Target: LAMA2; (+) strand; PAM type: NNNNGHTT; PAM sequence: CTCTGATT
tatcttttggagtgactttt

SEQ ID NO: 46097 - DNA, 20 bp, Artificial Sequence
  Description of Artificial Sequence: Synthetic oligonucleotide
  Target: LAMA2; (+) strand; PAM type: NNNNGHTT; PAM sequence: AGTAGTTT
tatttttttctttgttcttc

SEQ ID NO: 46098 - DNA, 20 bp, Artificial Sequence
  Description of Artificial Sequence: Synthetic oligonucleotide
  Target: LAMA2; (+) strand; PAM type: NNNNGHTT; PAM sequence: TGATGCTT
gttcttcagtagttttacta

SEQ ID NO: 46099 - DNA, 20 bp, Artificial Sequence
  Description of Artificial Sequence: Synthetic oligonucleotide
  Target: LAMA2; (+) strand; PAM type: NNNNGHTT; PAM sequence: ACTGGATT
atgggactagcagccaccac

SEQ ID NO: 46100 - DNA, 20 bp, Artificial Sequence
  Description of Artificial Sequence: Synthetic oligonucleotide
  Target: LAMA2; (+) strand; PAM type: NNNNGHTT; PAM sequence: TTTAGATT
gttctgttgggcaatgctac

SEQ ID NO: 46101 - DNA, 20 bp, Artificial Sequence
  Description of Artificial Sequence: Synthetic oligonucleotide
  Target: LAMA2; (+) strand; PAM type: NNNNGHTT; PAM sequence: TATTGCTT
tcagtcattacctctctaaa

SEQ ID NO: 46102 - DNA, 20 bp, Artificial Sequence
  Description of Artificial Sequence: Synthetic oligonucleotide
  Target: LAMA2; (+) strand; PAM type: NNNNGHTT; PAM sequence: CTATGATT
tcttccgcattccctctgct

SEQ ID NO: 46103 - DNA, 20 bp, Artificial Sequence
  Description of Artificial Sequence: Synthetic oligonucleotide
  Target: LAMA2; (+) strand; PAM type: NNNNGHTT; PAM sequence: TTTAGTTT
atgtattttaaactctcttc

SEQ ID NO: 46104 - DNA, 20 bp, Artificial Sequence
  Description of Artificial Sequence: Synthetic oligonucleotide
  Target: LAMA2; (+) strand; PAM type: NNNNGHTT; PAM sequence: TCTGGATT
cttcattctaggtattttct

SEQ ID NO: 46105 - DNA, 20 bp, Artificial Sequence
  Description of Artificial Sequence: Synthetic oligonucleotide
  Target: LAMA2; (+) strand; PAM type: NNNNGHTT; PAM sequence: ATAGGATT
tattgctattaaagttattc

SEQ ID NO: 46106 - DNA, 20 bp, Artificial Sequence
  Description of Artificial Sequence: Synthetic oligonucleotide
  Target: LAMA2; (+) strand; PAM type: NNNNGHTT; PAM sequence: TTCAGTTT
attcttaatttcatatattt

SEQ ID NO: 46107 - DNA, 20 bp, Artificial Sequence
  Description of Artificial Sequence: Synthetic oligonucleotide
  Target: LAMA2; (+) strand; PAM type: NNNNGHTT; PAM sequence: CTGGGATT
tgcctcagcctcctgagtag

SEQ ID NO: 46108 - DNA, 20 bp, Artificial Sequence
  Description of Artificial Sequence: Synthetic oligonucleotide
  Target: LAMA2; (+) strand; PAM type: NNNNGHTT; PAM sequence: ACTTGATT
aggcgcgtgccaccatgtcc

SEQ ID NO: 46109 - DNA, 20 bp, Artificial Sequence
  Description of Artificial Sequence: Synthetic oligonucleotide
  Target: LAMA2; (+) strand; PAM type: NNNNGHTT; PAM sequence: TTGTGTTT
ccaccatgtccacttgattt

SEQ ID NO: 46110 - DNA, 20 bp, Artificial Sequence
  Description of Artificial Sequence: Synthetic oligonucleotide
  Target: LAMA2; (+) strand; PAM type: NNNNGHTT; PAM sequence: CAGGGTTT
ttttgtgttttcagtacaga

SEQ ID NO: 46111 - DNA, 20 bp, Artificial Sequence
  Description of Artificial Sequence: Synthetic oligonucleotide
  Target: LAMA2; (+) strand; PAM type: NNNNGHTT; PAM sequence: CTAGGATT
caccttggcctcccaaagtg

SEQ ID NO: 46112 - DNA, 20 bp, Artificial Sequence
  Description of Artificial Sequence: Synthetic oligonucleotide
  Target: LAMA2; (+) strand; PAM type: NNNNGHTT; PAM sequence: AGTTGTTT
ctggttcattttcaaataga

SEQ ID NO: 46113 - DNA, 20 bp, Artificial Sequence
  Description of Artificial Sequence: Synthetic oligonucleotide
  Target: LAMA2; (+) strand; PAM type: NNNNGHTT; PAM sequence: ATATGATT
agtaaaattttaatttaata

SEQ ID NO: 46114 - DNA, 20 bp, Artificial Sequence
  Description of Artificial Sequence: Synthetic oligonucleotide
  Target: LAMA2; (+) strand; PAM type: NNNNGHTT; PAM sequence: AAAAGTTT
ataaagtaaaaattatcttt

SEQ ID NO: 46115 - DNA, 20 bp, Artificial Sequence
  Description of Artificial Sequence: Synthetic oligonucleotide
  Target: LAMA2; (+) strand; PAM type: NNNNGHTT; PAM sequence: TTCTGTTT
ctttttggatatattttatt

SEQ ID NO: 46116 - DNA, 20 bp, Artificial Sequence
  Description of Artificial Sequence: Synthetic oligonucleotide
  Target: LAMA2; (+) strand; PAM type: NNNNGHTT; PAM sequence: TGCTGATT
attttattttctgtttcatc

SEQ ID NO: 46117 - DNA, 20 bp, Artificial Sequence
  Description of Artificial Sequence: Synthetic oligonucleotide
  Target: LAMA2; (+) strand; PAM type: NNNNGHTT; PAM sequence: GCCTGATT
gctgtcttacattcttgtgt

SEQ ID NO: 46118 - DNA, 20 bp, Artificial Sequence
  Description of Artificial Sequence: Synthetic oligonucleotide
  Target: LAMA2; (+) strand; PAM type: NNNNGHTT; PAM sequence: TAGGGATT
ggatcatcttaattcaattt

SEQ ID NO: 46119 - DNA, 20 bp, Artificial Sequence
  Description of Artificial Sequence: Synthetic oligonucleotide
  Target: LAMA2; (+) strand; PAM type: NNNNGHTT; PAM sequence: AGATGATT
ttcaaatttctgggacattc

SEQ ID NO: 46120 - DNA, 20 bp, Artificial Sequence
  Description of Artificial Sequence: Synthetic oligonucleotide
  Target: LAMA2; (+) strand; PAM type: NNNNGHTT; PAM sequence: AGCTGCTT
cattgctataacccagtgac

SEQ ID NO: 46121 - DNA, 20 bp, Artificial Sequence
  Description of Artificial Sequence: Synthetic oligonucleotide
  Target: LAMA2; (+) strand; PAM type: NNNNGHTT; PAM sequence: TGCTGCTT
ccagtatacgctcattccca

SEQ ID NO: 46122 - DNA, 20 bp, Artificial Sequence
  Description of Artificial Sequence: Synthetic oligonucleotide
  Target: LAMA2; (+) strand; PAM type: NNNNGHTT; PAM sequence: CATGGCTT
cactctcttgatagctctca

SEQ ID NO: 46123 - DNA, 20 bp, Artificial Sequence
  Description of Artificial Sequence: Synthetic oligonucleotide
  Target: LAMA2; (+) strand; PAM type: NNNNGHTT; PAM sequence: ATATGTTT
gctctcacatggctttaaac

SEQ ID NO: 46124 - DNA, 20 bp, Artificial Sequence
  Description of Artificial Sequence: Synthetic oligonucleotide
  Target: LAMA2; (+) strand; PAM type: NNNNGHTT; PAM sequence: TCCAGTTT
catatgtttttgtatattta

SEQ ID NO: 46125 - DNA, 20 bp, Artificial Sequence
  Description of Artificial Sequence: Synthetic oligonucleotide
  Target: LAMA2; (+) strand; PAM type: NNNNGHTT; PAM sequence: TTAAGTTT
ttttttattttggaattatg

SEQ ID NO: 46126 - DNA, 20 bp, Artificial Sequence
  Description of Artificial Sequence: Synthetic oligonucleotide
  Target: LAMA2; (+) strand; PAM type: NNNNGHTT; PAM sequence: TGAAGATT
gttaagtttacacacatgta

SEQ ID NO: 46127 - DNA, 20 bp, Artificial Sequence
  Description of Artificial Sequence: Synthetic oligonucleotide
  Target: LAMA2; (+) strand; PAM type: NNNNGHTT; PAM sequence: TCAGGTTT
atctaaaccacagaccttat

SEQ ID NO: 46128 - DNA, 20 bp, Artificial Sequence
  Description of Artificial Sequence: Synthetic oligonucleotide
  Target: LAMA2; (+) strand; PAM type: NNNNGHTT; PAM sequence: GACAGTTT
gcatttagtcactgatctgt

SEQ ID NO: 46129 - DNA, 20 bp, Artificial Sequence
  Description of Artificial Sequence: Synthetic oligonucleotide
  Target: LAMA2; (+) strand; PAM type: NNNNGHTT; PAM sequence: TTCAGTTT
agatattttatagactatta

SEQ ID NO: 46130 - DNA, 20 bp, Artificial Sequence
  Description of Artificial Sequence: Synthetic oligonucleotide
  Target: LAMA2; (+) strand; PAM type: NNNNGHTT; PAM sequence: TTGGGTTT
tttatagactattattcagt

SEQ ID NO: 46131 - DNA, 20 bp, Artificial Sequence
  Description of Artificial Sequence: Synthetic oligonucleotide
  Target: LAMA2; (+) strand; PAM type: NNNNGHTT; PAM sequence: TGATGTTT
ttattcagtttgggtttgcc

SEQ ID NO: 46132 - DNA, 20 bp, Artificial Sequence
  Description of Artificial Sequence: Synthetic oligonucleotide
  Target: LAMA2; (+) strand; PAM type: NNNNGHTT; PAM sequence: CTGGGCTT
gatgttttttcatggttaaa

SEQ ID NO: 46133 - DNA, 20 bp, Artificial Sequence
  Description of Artificial Sequence: Synthetic oligonucleotide
  Target: LAMA2; (+) strand; PAM type: NNNNGHTT; PAM sequence: TCTGGATT
tttcatggttaaactgggct

SEQ ID NO: 46134 - DNA, 20 bp, Artificial Sequence
  Description of Artificial Sequence: Synthetic oligonucleotide
  Target: LAMA2; (+) strand; PAM type: NNNNGHTT; PAM sequence: AACAGTTT
ggaaccaatactacagagga

SEQ ID NO: 46135 - DNA, 20 bp, Artificial Sequence
  Description of Artificial Sequence: Synthetic oligonucleotide
  Target: LAMA2; (+) strand; PAM type: NNNNGHTT; PAM sequence: ATTGGTTT
tgcatatttttttctttttt

SEQ ID NO: 46136 - DNA, 20 bp, Artificial Sequence
  Description of Artificial Sequence: Synthetic oligonucleotide
  Target: LAMA2; (+) strand; PAM type: NNNNGHTT; PAM sequence: TGGGGCTT
ttttcttttttattggttta

SEQ ID NO: 46137 - DNA, 20 bp, Artificial Sequence
  Description of Artificial Sequence: Synthetic oligonucleotide
  Target: LAMA2; (+) strand; PAM type: NNNNGHTT; PAM sequence: TTGTGCTT
tttttattggtttatggggc

SEQ ID NO: 46138 - DNA, 20 bp, Artificial Sequence
  Description of Artificial Sequence: Synthetic oligonucleotide
  Target: LAMA2; (+) strand; PAM type: NNNNGHTT; PAM sequence: GGTAGATT
ggcttgtgcttctattaata

SEQ ID NO: 46139 - DNA, 20 bp, Artificial Sequence
  Description of Artificial Sequence: Synthetic oligonucleotide
  Target: LAMA2; (+) strand; PAM type: NNNNGHTT; PAM sequence: AAATGTTT
tattaataggtagattttta

SEQ ID NO: 46140 - DNA, 20 bp, Artificial Sequence
  Description of Artificial Sequence: Synthetic oligonucleotide
  Target: LAMA2; (+) strand; PAM type: NNNNGHTT; PAM sequence: GATAGATT
tagtaggtgtatatatttta

SEQ ID NO: 46141 - DNA, 20 bp, Artificial Sequence
  Description of Artificial Sequence: Synthetic oligonucleotide
  Target: LAMA2; (+) strand; PAM type: NNNNGHTT; PAM sequence: CTGTGATT
cagcagtatctaaatattta

SEQ ID NO: 46142 - DNA, 20 bp, Artificial Sequence
  Description of Artificial Sequence: Synthetic oligonucleotide
  Target: LAMA2; (+) strand; PAM type: NNNNGHTT; PAM sequence: GCATGATT
gatcaggctagagtccagtg

SEQ ID NO: 46143 - DNA, 20 bp, Artificial Sequence
  Description of Artificial Sequence: Synthetic oligonucleotide
  Target: LAMA2; (+) strand; PAM type: NNNNGHTT; PAM sequence: CTGAGATT
tcttctaaagttacagtctt

SEQ ID NO: 46144 - DNA, 20 bp, Artificial Sequence
  Description of Artificial Sequence: Synthetic oligonucleotide
  Target: LAMA2; (+) strand; PAM type: NNNNGHTT; PAM sequence: TCATGTTT
cactagttagacaacaatgt

SEQ ID NO: 46145 - DNA, 20 bp, Artificial Sequence
  Description of Artificial Sequence: Synthetic oligonucleotide
  Target: LAMA2; (+) strand; PAM type: NNNNGHTT; PAM sequence: TTAGGCTT
tagacaacaatgttcatgtt

SEQ ID NO: 46146 - DNA, 20 bp, Artificial Sequence
  Description of Artificial Sequence: Synthetic oligonucleotide
  Target: LAMA2; (+) strand; PAM type: NNNNGHTT; PAM sequence: AATAGTTT
ggcttagaacattaatagga

SEQ ID NO: 46147 - DNA, 20 bp, Artificial Sequence
  Description of Artificial Sequence: Synthetic oligonucleotide
  Target: LAMA2; (+) strand; PAM type: NNNNGHTT; PAM sequence: TAAAGTTT
aatgccaaatccactgagtc

SEQ ID NO: 46148 - DNA, 20 bp, Artificial Sequence
  Description of Artificial Sequence: Synthetic oligonucleotide
  Target: LAMA2; (+) strand; PAM type: NNNNGHTT; PAM sequence: TGATGTTT
aatcttaattgcatcatctc

SEQ ID NO: 46149 - DNA, 20 bp, Artificial Sequence
  Description of Artificial Sequence: Synthetic oligonucleotide
  Target: LAMA2; (+) strand; PAM type: NNNNGHTT; PAM sequence: TTTGGCTT
gcatcatctctgatgtttta

SEQ ID NO: 46150 - DNA, 20 bp, Artificial Sequence
  Description of Artificial Sequence: Synthetic oligonucleotide
  Target: LAMA2; (+) strand; PAM type: NNNNGHTT; PAM sequence: CTTTGTTT
atctctgatgttttatttgg

SEQ ID NO: 46151 - DNA, 20 bp, Artificial Sequence
  Description of Artificial Sequence: Synthetic oligonucleotide
  Target: LAMA2; (+) strand; PAM type: NNNNGHTT; PAM sequence: ACCTGTTT
ttgttactccagttactccc

SEQ ID NO: 46152 - DNA, 20 bp, Artificial Sequence
  Description of Artificial Sequence: Synthetic oligonucleotide
  Target: LAMA2; (+) strand; PAM type: NNNNGHTT; PAM sequence: CATGGTTT
tactcccacctgtttccctt

SEQ ID NO: 46153 - DNA, 20 bp, Artificial Sequence
  Description of Artificial Sequence: Synthetic oligonucleotide
  Target: LAMA2; (+) strand; PAM type: NNNNGHTT; PAM sequence: TTTGGTTT
ccacctgtttcccttcatgg

SEQ ID NO: 46154 - DNA, 20 bp, Artificial Sequence
  Description of Artificial Sequence: Synthetic oligonucleotide
  Target: LAMA2; (+) strand; PAM type: NNNNGHTT; PAM sequence: CATTGATT
cttctctgccctccactcca

SEQ ID NO: 46155 - DNA, 20 bp, Artificial Sequence
  Description of Artificial Sequence: Synthetic oligonucleotide
  Target: LAMA2; (+) strand; PAM type: NNNNGHTT; PAM sequence: AAGAGCTT
gggttcaactactaccaaga

SEQ ID NO: 46156 - DNA, 20 bp, Artificial Sequence
  Description of Artificial Sequence: Synthetic oligonucleotide
  Target: LAMA2; (+) strand; PAM type: NNNNGHTT; PAM sequence: AGAAGCTT
cctgcacccaaagggagaag

SEQ ID NO: 46157 - DNA, 20 bp, Artificial Sequence
  Description of Artificial Sequence: Synthetic oligonucleotide
  Target: LAMA2; (+) strand; PAM type: NNNNGHTT; PAM sequence: GGAGGCTT
tatccaggctgcaaatagaa

SEQ ID NO: 46158 - DNA, 20 bp, Artificial Sequence
  Description of Artificial Sequence: Synthetic oligonucleotide
  Target: LAMA2; (+) strand; PAM type: NNNNGHTT; PAM sequence: AACAGTTT
gctttgagcaaaagccttaa

SEQ ID NO: 46159 - DNA, 20 bp, Artificial Sequence
  Description of Artificial Sequence: Synthetic oligonucleotide
  Target: LAMA2; (+) strand; PAM type: NNNNGHTT; PAM sequence: TCCTGCTT
tcagcagggaccctactttg

SEQ ID NO: 46160 - DNA, 20 bp, Artificial Sequence
  Description of Artificial Sequence: Synthetic oligonucleotide
  Target: LAMA2; (+) strand; PAM type: NNNNGHTT; PAM sequence: AACTGCTT
gtagcccagatgctattgag

SEQ ID NO: 46161 - DNA, 20 bp, Artificial Sequence
  Description of Artificial Sequence: Synthetic oligonucleotide
  Target: LAMA2; (+) strand; PAM type: NNNNGHTT; PAM sequence: CTTGGCTT
acttggaagcaccctgagaa

SEQ ID NO: 46162 - DNA, 20 bp, Artificial Sequence
  Description of Artificial Sequence: Synthetic oligonucleotide
  Target: LAMA2; (+) strand; PAM type: NNNNGHTT; PAM sequence: TGGTGATT
atattttaaacaagtactct

SEQ ID NO: 46163 - DNA, 20 bp, Artificial Sequence
  Description of Artificial Sequence: Synthetic oligonucleotide
  Target: LAMA2; (+) strand; PAM type: NNNNGHTT; PAM sequence: CCTGGCTT
gtgattcttatgtctgtatt

SEQ ID NO: 46164 - DNA, 20 bp, Artificial Sequence
  Description of Artificial Sequence: Synthetic oligonucleotide
  Target: LAMA2; (+) strand; PAM type: NNNNGHTT; PAM sequence: ATAGGTTT
tttttctgtcaacaaatgtg

SEQ ID NO: 46165 - DNA, 20 bp, Artificial Sequence
  Description of Artificial Sequence: Synthetic oligonucleotide
  Target: LAMA2; (+) strand; PAM type: NNNNGHTT; PAM sequence: GCAGGTTT
ttggtggactgagtctcttg

SEQ ID NO: 46166 - DNA, 20 bp, Artificial Sequence
  Description of Artificial Sequence: Synthetic oligonucleotide
  Target: LAMA2; (+) strand; PAM type: NNNNGHTT; PAM sequence: CACTGCTT
aggacgaactttctagatgg

SEQ ID NO: 46167 - DNA, 20 bp, Artificial Sequence
  Description of Artificial Sequence: Synthetic oligonucleotide
  Target: LAMA2; (+) strand; PAM type: NNNNGHTT; PAM sequence: TATTGCTT
tccctttctttgactcacat

SEQ ID NO: 46168 - DNA, 20 bp, Artificial Sequence
  Description of Artificial Sequence: Synthetic oligonucleotide
  Target: LAMA2; (+) strand; PAM type: NNNNGHTT; PAM sequence: TTTGGATT
acattattgcttttaattta

SEQ ID NO: 46169 - DNA, 20 bp, Artificial Sequence
  Description of Artificial Sequence: Synthetic oligonucleotide
  Target: LAMA2; (+) strand; PAM type: NNNNGHTT; PAM sequence: TAGTGATT
ctaaatattcgtggttacca

SEQ ID NO: 46170 - DNA, 20 bp, Artificial Sequence
  Description of Artificial Sequence: Synthetic oligonucleotide
  Target: LAMA2; (+) strand; PAM type: NNNNGHTT; PAM sequence: TTTTGCTT
attcgtggttaccatagtga

SEQ ID NO: 46171 - DNA, 20 bp, Artificial Sequence
  Description of Artificial Sequence: Synthetic oligonucleotide
  Target: LAMA2; (+) strand; PAM type: NNNNGHTT; PAM sequence: ATATGATT
gaggcctttaagttatttac

SEQ ID NO: 46172 - DNA, 20 bp, Artificial Sequence
  Description of Artificial Sequence: Synthetic oligonucleotide
  Target: LAMA2; (+) strand; PAM type: NNNNGHTT; PAM sequence: CTTAGATT
tggactgcagctcaatggaa

SEQ ID NO: 46173 - DNA, 20 bp, Artificial Sequence
  Description of Artificial Sequence: Synthetic oligonucleotide
  Target: LAMA2; (+) strand; PAM type: NNNNGHTT; PAM sequence: CTTTGATT
ctcaatggaacttagattca

SEQ ID NO: 46174 - DNA, 20 bp, Artificial Sequence
  Description of Artificial Sequence: Synthetic oligonucleotide
  Target: LAMA2; (+) strand; PAM type: NNNNGHTT; PAM sequence: TTCTGCTT
ggaacttagattcactttga

SEQ ID NO: 46175 - DNA, 20 bp, Artificial Sequence
  Description of Artificial Sequence: Synthetic oligonucleotide
  Target: LAMA2; (+) strand; PAM type: NNNNGHTT; PAM sequence: GCAGGCTT
tgattctgctttgaaacatg

SEQ ID NO: 46176 - DNA, 20 bp, Artificial Sequence
  Description of Artificial Sequence: Synthetic oligonucleotide
  Target: LAMA2; (+) strand; PAM type: NNNNGHTT; PAM sequence: TAGAGCTT
ttttttttgtaaactgtatg

SEQ ID NO: 46177 - DNA, 20 bp, Artificial Sequence
  Description of Artificial Sequence: Synthetic oligonucleotide
  Target: LAMA2; (+) strand; PAM type: NNNNGHTT; PAM sequence: TTTTGATT
tatgtagagctttgatatta

SEQ ID NO: 46178 - DNA, 20 bp, Artificial Sequence
  Description of Artificial Sequence: Synthetic oligonucleotide
  Target: LAMA2; (+) strand; PAM type: NNNNGHTT; PAM sequence: AAATGTTT
aaacccaagactgtattaaa

SEQ ID NO: 46179 - DNA, 20 bp, Artificial Sequence
  Description of Artificial Sequence: Synthetic oligonucleotide
  Target: LAMA2; (+) strand; PAM type: NNNNGHTT; PAM sequence: ACATGATT
ataacattgttaaggttata

SEQ ID NO: 46180 - DNA, 20 bp, Artificial Sequence
  Description of Artificial Sequence: Synthetic oligonucleotide
  Target: LAMA2; (+) strand; PAM type: NNNNGHTT; PAM sequence: GTGAGTTT
gttataacatgattttgcat

SEQ ID NO: 46181 - DNA, 20 bp, Artificial Sequence
  Description of Artificial Sequence: Synthetic oligonucleotide
  Target: LAMA2; (+) strand; PAM type: NNNNGHTT; PAM sequence: ATTGGTTT
gcggagtattactaatttgt

SEQ ID NO: 46182 - DNA, 20 bp, Artificial Sequence
  Description of Artificial Sequence: Synthetic oligonucleotide
  Target: LAMA2; (+) strand; PAM type: NNNNGHTT; PAM sequence: TGGGGTTT
aatttaggtaaataattatt

SEQ ID NO: 46183 - DNA, 20 bp, Artificial Sequence
  Description of Artificial Sequence: Synthetic oligonucleotide
  Target: LAMA2; (+) strand; PAM type: NNNNGHTT; PAM sequence: TCAGGCTT
gtaaataattatttggggtt

SEQ ID NO: 46184 - DNA, 20 bp, Artificial Sequence
  Description of Artificial Sequence: Synthetic oligonucleotide
  Target: LAMA2; (+) strand; PAM type: NNNNGHTT; PAM sequence: TGAGGTTT
attaaagtacctccttacag

SEQ ID NO: 46185 - DNA, 20 bp, Artificial Sequence
  Description of Artificial Sequence: Synthetic oligonucleotide
  Target: LAMA2; (+) strand; PAM type: NNNNGHTT; PAM sequence: AAATGTTT
atggagtcctctaaaaaatg

SEQ ID NO: 46186 - DNA, 20 bp, Artificial Sequence
  Description of Artificial Sequence: Synthetic oligonucleotide
  Target: LAMA2; (+) strand; PAM type: NNNNGHTT; PAM sequence: AGAGGATT
ataaaataaagataaaatta

SEQ ID NO: 46187 - DNA, 20 bp, Artificial Sequence
  Description of Artificial Sequence: Synthetic oligonucleotide
  Target: LAMA2; (+) strand; PAM type: NNNNGHTT; PAM sequence: GTAAGCTT
cactgatatggaacagaagg

SEQ ID NO: 46188 - DNA, 20 bp, Artificial Sequence
  Description of Artificial Sequence: Synthetic oligonucleotide
  Target: LAMA2; (+) strand; PAM type: NNNNGHTT; PAM sequence: GGAAGCTT
gcttctgttaagctaggtaa

SEQ ID NO: 46189 - DNA, 20 bp, Artificial Sequence
  Description of Artificial Sequence: Synthetic oligonucleotide
  Target: LAMA2; (+) strand; PAM type: NNNNGHTT; PAM sequence: CCTGGATT
cactgacttttggggaatta

SEQ ID NO: 46190 - DNA, 20 bp, Artificial Sequence
  Description of Artificial Sequence: Synthetic oligonucleotide
  Target: LAMA2; (+) strand; PAM type: NNNNGHTT; PAM sequence: TTTGGCTT
cttttggggaattacctgga

SEQ ID NO: 46191 - DNA, 20 bp, Artificial Sequence
  Description of Artificial Sequence: Synthetic oligonucleotide
  Target: LAMA2; (+) strand; PAM type: NNNNGHTT; PAM sequence: CAAGGATT
tggctttcaggtagctctgc

SEQ ID NO: 46192 - DNA, 20 bp, Artificial Sequence
  Description of Artificial Sequence: Synthetic oligonucleotide
  Target: LAMA2; (+) strand; PAM type: NNNNGHTT; PAM sequence: GCCAGTTT
accatctaatatgtgcccca

SEQ ID NO: 46193 - DNA, 20 bp, Artificial Sequence
  Description of Artificial Sequence: Synthetic oligonucleotide
  Target: LAMA2; (+) strand; PAM type: NNNNGHTT; PAM sequence: ATTAGATT
gtggttataataacgatcaa

SEQ ID NO: 46194 - DNA, 20 bp, Artificial Sequence
  Description of Artificial Sequence: Synthetic oligonucleotide
  Target: LAMA2; (+) strand; PAM type: NNNNGHTT; PAM sequence: ATTGGCTT
ctcaaggttcagtagctaac

SEQ ID NO: 46195 - DNA, 20 bp, Artificial Sequence
  Description of Artificial Sequence: Synthetic oligonucleotide
  Target: LAMA2; (+) strand; PAM type: NNNNGHTT; PAM sequence: ACAAGCTT
aataagcaaagcaaaaaacc

SEQ ID NO: 46196 - DNA, 20 bp, Artificial Sequence
  Description of Artificial Sequence: Synthetic oligonucleotide
  Target: LAMA2; (+) strand; PAM type: NNNNGHTT; PAM sequence: CTGTGATT
acagctagtaatttttggag

SEQ ID NO: 46197 - DNA, 20 bp, Artificial Sequence
  Description of Artificial Sequence: Synthetic oligonucleotide
  Target: LAMA2; (+) strand; PAM type: NNNNGHTT; PAM sequence: AAAAGTTT
caccagaaaggtacaaagct

SEQ ID NO: 46198 - DNA, 20 bp, Artificial Sequence
  Description of Artificial Sequence: Synthetic oligonucleotide
  Target: LAMA2; (+) strand; PAM type: NNNNGHTT; PAM sequence: TGGGGTTT
taaaagtttccttctgtgtc

SEQ ID NO: 46199 - DNA, 20 bp, Artificial Sequence
  Description of Artificial Sequence: Synthetic oligonucleotide
  Target: LAMA2; (+) strand; PAM type: NNNNGHTT; PAM sequence: GTGAGATT
agttcctgctgaagctctat

SEQ ID NO: 46200 - DNA, 20 bp, Artificial Sequence
  Description of Artificial Sequence: Synthetic oligonucleotide
  Target: LAMA2; (+) strand; PAM type: NNNNGHTT; PAM sequence: CTGAGTTT
ctatgtgagattgcacagac

SEQ ID NO: 46201 - DNA, 20 bp, Artificial Sequence
  Description of Artificial Sequence: Synthetic oligonucleotide
  Target: LAMA2; (+) strand; PAM type: NNNNGHTT; PAM sequence: TGCTGCTT
gcacagacctgagtttgagc

SEQ ID NO: 46202 - DNA, 20 bp, Artificial Sequence
  Description of Artificial Sequence: Synthetic oligonucleotide
  Target: LAMA2; (+) strand; PAM type: NNNNGHTT; PAM sequence: TGGGGTTT
ctgctgcttattttttattt

SEQ ID NO: 46203 - DNA, 20 bp, Artificial Sequence
  Description of Artificial Sequence: Synthetic oligonucleotide
  Target: LAMA2; (+) strand; PAM type: NNNNGHTT; PAM sequence: TCATGTTT
attttggggttttagtattt

SEQ ID NO: 46204 - DNA, 20 bp, Artificial Sequence
  Description of Artificial Sequence: Synthetic oligonucleotide
  Target: LAMA2; (+) strand; PAM type: NNNNGHTT; PAM sequence: TTTAGCTT
gttaaaaaaattctttacct

SEQ ID NO: 46205 - DNA, 20 bp, Artificial Sequence
  Description of Artificial Sequence: Synthetic oligonucleotide
  Target: LAMA2; (+) strand; PAM type: NNNNGHTT; PAM sequence: ATAGGTTT
ttacttcatttttatatcta

SEQ ID NO: 46206 - DNA, 20 bp, Artificial Sequence
  Description of Artificial Sequence: Synthetic oligonucleotide
  Target: LAMA2; (+) strand; PAM type: NNNNGHTT; PAM sequence: AATTGATT
gtttttttaaccttcacttt

SEQ ID NO: 46207 - DNA, 20 bp, Artificial Sequence
  Description of Artificial Sequence: Synthetic oligonucleotide
  Target: LAMA2; (+) strand; PAM type: NNNNGHTT; PAM sequence: TAATGATT
tgctcattttttaatctttt

SEQ ID NO: 46208 - DNA, 20 bp, Artificial Sequence
  Description of Artificial Sequence: Synthetic oligonucleotide
  Target: LAMA2; (+) strand; PAM type: NNNNGHTT; PAM sequence: TGCTGATT
tctttttaatgattttaaaa

SEQ ID NO: 46209 - DNA, 20 bp, Artificial Sequence
  Description of Artificial Sequence: Synthetic oligonucleotide
  Target: LAMA2; (+) strand; PAM type: NNNNGHTT; PAM sequence: ATCAGTTT
atcttggcatatttatattt

SEQ ID NO: 46210 - DNA, 20 bp, Artificial Sequence
  Description of Artificial Sequence: Synthetic oligonucleotide
  Target: LAMA2; (+) strand; PAM type: NNNNGHTT; PAM sequence: TTCTGCTT
atatttatatttatcagttt

SEQ ID NO: 46211 - DNA, 20 bp, Artificial Sequence
  Description of Artificial Sequence: Synthetic oligonucleotide
  Target: LAMA2; (+) strand; PAM type: NNNNGHTT; PAM sequence: TCAAGCTT
tatttatcagtttttctgct

SEQ ID NO: 46212 - DNA, 20 bp, Artificial Sequence
  Description of Artificial Sequence: Synthetic oligonucleotide
  Target: LAMA2; (+) strand; PAM type: NNNNGHTT; PAM sequence: TGTTGTTT
gtatatttatatttcttttg

SEQ ID NO: 46213 - DNA, 20 bp, Artificial Sequence
  Description of Artificial Sequence: Synthetic oligonucleotide
  Target: LAMA2; (+) strand; PAM type: NNNNGHTT; PAM sequence: TTTTGTTT
gttttttaaatattttttat

SEQ ID NO: 46214 - DNA, 20 bp, Artificial Sequence
  Description of Artificial Sequence: Synthetic oligonucleotide
  Target: LAMA2; (+) strand; PAM type: NNNNGHTT; PAM sequence: TTTTGTTT
gtgcaatagacttgttagaa

SEQ ID NO: 46215 - DNA, 20 bp, Artificial Sequence
  Description of Artificial Sequence: Synthetic oligonucleotide
  Target: LAMA2; (+) strand; PAM type: NNNNGHTT; PAM sequence: GTTTGCTT
aatagacttgttagaatttt

SEQ ID NO: 46216 - DNA, 20 bp, Artificial Sequence
  Description of Artificial Sequence: Synthetic oligonucleotide
  Target: LAMA2; (+) strand; PAM type: NNNNGHTT; PAM sequence: CTTAGCTT
ttacttttgatcattttact

SEQ ID NO: 46217 - DNA, 20 bp, Artificial Sequence
  Description of Artificial Sequence: Synthetic oligonucleotide
  Target: LAMA2; (+) strand; PAM type: NNNNGHTT; PAM sequence: TTGAGCTT
cattttactcttagcttatt

SEQ ID NO: 46218 - DNA, 20 bp, Artificial Sequence
  Description of Artificial Sequence: Synthetic oligonucleotide
  Target: LAMA2; (+) strand; PAM type: NNNNGHTT; PAM sequence: CTTTGTTT
cttttgatgtctaaatataa

SEQ ID NO: 46219 - DNA, 20 bp, Artificial Sequence
  Description of Artificial Sequence: Synthetic oligonucleotide
  Target: LAMA2; (+) strand; PAM type: NNNNGHTT; PAM sequence: TAGTGTTT
taaatataactttgtttgtc

SEQ ID NO: 46220 - DNA, 20 bp, Artificial Sequence
  Description of Artificial Sequence: Synthetic oligonucleotide
  Target: LAMA2; (+) strand; PAM type: NNNNGHTT; PAM sequence: CATTGCTT
agtgttttagtgtctttagt

SEQ ID NO: 46221 - DNA, 20 bp, Artificial Sequence
  Description of Artificial Sequence: Synthetic oligonucleotide
  Target: LAMA2; (+) strand; PAM type: NNNNGHTT; PAM sequence: GAAGGCTT
gaaagtaacccacatttaga

SEQ ID NO: 46222 - DNA, 20 bp, Artificial Sequence
  Description of Artificial Sequence: Synthetic oligonucleotide
  Target: LAMA2; (+) strand; PAM type: NNNNGHTT; PAM sequence: TTAAGATT
gcataattgttaaagcaatt

SEQ ID NO: 46223 - DNA, 20 bp, Artificial Sequence
  Description of Artificial Sequence: Synthetic oligonucleotide
  Target: LAMA2; (+) strand; PAM type: NNNNGHTT; PAM sequence: TTTTGTTT
ttgttaaagcaattttaaga

SEQ ID NO: 46224 - DNA, 20 bp, Artificial Sequence
  Description of Artificial Sequence: Synthetic oligonucleotide
  Target: LAMA2; (+) strand; PAM type: NNNNGHTT; PAM sequence: TTTTGTTT
aaagcaattttaagattttg

SEQ ID NO: 46225 - DNA, 20 bp, Artificial Sequence
  Description of Artificial Sequence: Synthetic oligonucleotide
  Target: LAMA2; (+) strand; PAM type: NNNNGHTT; PAM sequence: AAAAGTTT
ctaagacatgttattcctct

SEQ ID NO: 46226 - DNA, 20 bp, Artificial Sequence
  Description of Artificial Sequence: Synthetic oligonucleotide
  Target: LAMA2; (+) strand; PAM type: NNNNGHTT; PAM sequence: AAATGATT
ctctaaaagtttactatatg

SEQ ID NO: 46227 - DNA, 20 bp, Artificial Sequence
  Description of Artificial Sequence: Synthetic oligonucleotide
  Target: LAMA2; (+) strand; PAM type: NNNNGHTT; PAM sequence: ATGGGTTT
aaacacataaggaaggtgat

SEQ ID NO: 46228 - DNA, 20 bp, Artificial Sequence
  Description of Artificial Sequence: Synthetic oligonucleotide
  Target: LAMA2; (+) strand; PAM type: NNNNGHTT; PAM sequence: AGAAGATT
gtgatatgggttttactcac

SEQ ID NO: 46229 - DNA, 20 bp, Artificial Sequence
  Description of Artificial Sequence: Synthetic oligonucleotide
  Target: LAMA2; (+) strand; PAM type: NNNNGHTT; PAM sequence: ACCTGATT
gaagattcctcaaaacgcat

SEQ ID NO: 46230 - DNA, 20 bp, Artificial Sequence
  Description of Artificial Sequence: Synthetic oligonucleotide
  Target: LAMA2; (+) strand; PAM type: NNNNGHTT; PAM sequence: TTTGGTTT
tcctcaaaacgcatacctga

SEQ ID NO: 46231 - DNA, 20 bp, Artificial Sequence
  Description of Artificial Sequence: Synthetic oligonucleotide
  Target: LAMA2; (+) strand; PAM type: NNNNGHTT; PAM sequence: AAGTGTTT
tccaatagaagctacttaaa

SEQ ID NO: 46232 - DNA, 20 bp, Artificial Sequence
  Description of Artificial Sequence: Synthetic oligonucleotide
  Target: LAMA2; (+) strand; PAM type: NNNNGHTT; PAM sequence: AAATGTTT
tacttaaaaagtgttttaga

SEQ ID NO: 46233 - DNA, 20 bp, Artificial Sequence
  Description of Artificial Sequence: Synthetic oligonucleotide
  Target: LAMA2; (+) strand; PAM type: NNNNGHTT; PAM sequence: TTGAGTTT
tatacctgtagaatgagcta

SEQ ID NO: 46234 - DNA, 20 bp, Artificial Sequence
  Description of Artificial Sequence: Synthetic oligonucleotide
  Target: LAMA2; (+) strand; PAM type: NNNNGHTT; PAM sequence: ACAAGATT
ctagtgataaaatggatagg

SEQ ID NO: 46235 - DNA, 20 bp, Artificial Sequence
  Description of Artificial Sequence: Synthetic oligonucleotide
  Target: LAMA2; (+) strand; PAM type: NNNNGHTT; PAM sequence: TGTTGATT
acatttttaaacacagaatc

SEQ ID NO: 46236 - DNA, 20 bp, Artificial Sequence
  Description of Artificial Sequence: Synthetic oligonucleotide
  Target: LAMA2; (+) strand; PAM type: NNNNGHTT; PAM sequence: ACACGTTT
cagaacttctcaagcattgt

SEQ ID NO: 46237 - DNA, 20 bp, Artificial Sequence
  Description of Artificial Sequence: Synthetic oligonucleotide
  Target: LAMA2; (+) strand; PAM type: NNNNGHTT; PAM sequence: TTCAGTTT
ttctcaagcattgtacacgt

SEQ ID NO: 46238 - DNA, 20 bp, Artificial Sequence
  Description of Artificial Sequence: Synthetic oligonucleotide
  Target: LAMA2; (+) strand; PAM type: NNNNGHTT; PAM sequence: TAGGGTTT
ataagtgaggctgtagaaac

SEQ ID NO: 46239 - DNA, 20 bp, Artificial Sequence
  Description of Artificial Sequence: Synthetic oligonucleotide
  Target: LAMA2; (+) strand; PAM type: NNNNGHTT; PAM sequence: TTATGTTT
gtcaaacaaaactttaaaaa

SEQ ID NO: 46240 - DNA, 20 bp, Artificial Sequence
  Description of Artificial Sequence: Synthetic oligonucleotide
  Target: LAMA2; (+) strand; PAM type: NNNNGHTT; PAM sequence: CAAAGCTT
taatcttctggacttttctt

SEQ ID NO: 46241 - DNA, 20 bp, Artificial Sequence
  Description of Artificial Sequence: Synthetic oligonucleotide
  Target: LAMA2; (+) strand; PAM type: NNNNGHTT; PAM sequence: GTCAGTTT
tggacttttcttcaaagctt

SEQ ID NO: 46242 - DNA, 20 bp, Artificial Sequence
  Description of Artificial Sequence: Synthetic oligonucleotide
  Target: LAMA2; (+) strand; PAM type: NNNNGHTT; PAM sequence: TTCAGATT
cagttttgatccaaaaaaac

SEQ ID NO: 46243 - DNA, 20 bp, Artificial Sequence
  Description of Artificial Sequence: Synthetic oligonucleotide
  Target: LAMA2; (+) strand; PAM type: NNNNGHTT; PAM sequence: TATGGTTT
acttcttgtgtgaaaaacag

SEQ ID NO: 46244 - DNA, 20 bp, Artificial Sequence
  Description of Artificial Sequence: Synthetic oligonucleotide
  Target: LAMA2; (+) strand; PAM type: NNNNGHTT; PAM sequence: AAATGTTT
tcattgcaatttattataga

SEQ ID NO: 46245 - DNA, 20 bp, Artificial Sequence
  Description of Artificial Sequence: Synthetic oligonucleotide
  Target: LAMA2; (+) strand; PAM type: NNNNGHTT; PAM sequence: TTGAGATT
ggtcccaattctgaagtgta

SEQ ID NO: 46246 - DNA, 20 bp, Artificial Sequence
  Description of Artificial Sequence: Synthetic oligonucleotide
  Target: LAMA2; (+) strand; PAM type: NNNNGHTT; PAM sequence: GCTAGATT
atgatggaatggcagatcat

SEQ ID NO: 46247 - DNA, 20 bp, Artificial Sequence
  Description of Artificial Sequence: Synthetic oligonucleotide
  Target: LAMA2; (+) strand; PAM type: NNNNGHTT; PAM sequence: ATCAGTTT
tgctagatttgctggttatt

SEQ ID NO: 46248 - DNA, 20 bp, Artificial Sequence
  Description of Artificial Sequence: Synthetic oligonucleotide
  Target: LAMA2; (+) strand; PAM type: NNNNGHTT; PAM sequence: AGAGGATT
atgactcccaagcaaaagga

SEQ ID NO: 46249 - DNA, 20 bp, Artificial Sequence
  Description of Artificial Sequence: Synthetic oligonucleotide
  Target: LAMA2; (+) strand; PAM type: NNNNGHTT; PAM sequence: AATGGATT
caagcaaaaggaagaggatt

SEQ ID NO: 46250 - DNA, 20 bp, Artificial Sequence
  Description of Artificial Sequence: Synthetic oligonucleotide
  Target: LAMA2; (+) strand; PAM type: NNNNGHTT; PAM sequence: TATTGTTT
aagaggattaatggattaac

SEQ ID NO: 46251 - DNA, 20 bp, Artificial Sequence
  Description of Artificial Sequence: Synthetic oligonucleotide
  Target: LAMA2; (+) strand; PAM type: NNNNGHTT; PAM sequence: AGATGCTT
gatcctcaccaaagccttgg

SEQ ID NO: 46252 - DNA, 20 bp, Artificial Sequence
  Description of Artificial Sequence: Synthetic oligonucleotide
  Target: LAMA2; (+) strand; PAM type: NNNNGHTT; PAM sequence: AACTGATT
tttacagatggaggtgaagg

SEQ ID NO: 46253 - DNA, 20 bp, Artificial Sequence
  Description of Artificial Sequence: Synthetic oligonucleotide
  Target: LAMA2; (+) strand; PAM type: NNNNGHTT; PAM sequence: AAGAGTTT
gtgtatttactgttggtcac

SEQ ID NO: 46254 - DNA, 20 bp, Artificial Sequence
  Description of Artificial Sequence: Synthetic oligonucleotide
  Target: LAMA2; (+) strand; PAM type: NNNNGHTT; PAM sequence: ATAAGCTT
aggatattgaagctattaaa

SEQ ID NO: 46255 - DNA, 20 bp, Artificial Sequence
  Description of Artificial Sequence: Synthetic oligonucleotide
  Target: LAMA2; (+) strand; PAM type: NNNNGHTT; PAM sequence: TTATGATT
gtaacccaggagtggaatgg

SEQ ID NO: 46256 - DNA, 20 bp, Artificial Sequence
  Description of Artificial Sequence: Synthetic oligonucleotide
  Target: LAMA2; (+) strand; PAM type: NNNNGHTT; PAM sequence: AGCTGCTT
aaacttaaaaagatatcagg

SEQ ID NO: 46257 - DNA, 20 bp, Artificial Sequence
  Description of Artificial Sequence: Synthetic oligonucleotide
  Target: LAMA2; (+) strand; PAM type: NNNNGHTT; PAM sequence: TTTAGCTT
ttctttgtgtaaatttgttc

SEQ ID NO: 46258 - DNA, 20 bp, Artificial Sequence
  Description of Artificial Sequence: Synthetic oligonucleotide
  Target: LAMA2; (+) strand; PAM type: NNNNGHTT; PAM sequence: TGCAGTTT
actattttagtccattaaaa

SEQ ID NO: 46259 - DNA, 20 bp, Artificial Sequence
  Description of Artificial Sequence: Synthetic oligonucleotide
  Target: LAMA2; (+) strand; PAM type: NNNNGHTT; PAM sequence: TATGGTTT
tccattaaaatgcagtttca

SEQ ID NO: 46260 - DNA, 20 bp, Artificial Sequence
  Description of Artificial Sequence: Synthetic oligonucleotide
  Target: LAMA2; (+) strand; PAM type: NNNNGHTT; PAM sequence: ATTTGTTT
ctaaacctgagtcatactac

SEQ ID NO: 46261 - DNA, 20 bp, Artificial Sequence
  Description of Artificial Sequence: Synthetic oligonucleotide
  Target: LAMA2; (+) strand; PAM type: NNNNGHTT; PAM sequence: GTAAGTTT
tggtatacaggttaccagta

SEQ ID NO: 46262 - DNA, 20 bp, Artificial Sequence
  Description of Artificial Sequence: Synthetic oligonucleotide
  Target: LAMA2; (+) strand; PAM type: NNNNGHTT; PAM sequence: TGTTGTTT
agtagtaagtttgggaactg

SEQ ID NO: 46263 - DNA, 20 bp, Artificial Sequence
  Description of Artificial Sequence: Synthetic oligonucleotide
  Target: LAMA2; (+) strand; PAM type: NNNNGHTT; PAM sequence: CTGTGTTT
taaagcgtgtatgtatatac

SEQ ID NO: 46264 - DNA, 20 bp, Artificial Sequence
  Description of Artificial Sequence: Synthetic oligonucleotide
  Target: LAMA2; (+) strand; PAM type: NNNNGHTT; PAM sequence: ACATGTTT
acaccttttaggggcatttt

SEQ ID NO: 46265 - DNA, 20 bp, Artificial Sequence
  Description of Artificial Sequence: Synthetic oligonucleotide
  Target: LAMA2; (+) strand; PAM type: NNNNGHTT; PAM sequence: CTTAGATT
caagacttttgctaaaaatt

SEQ ID NO: 46266 - DNA, 20 bp, Artificial Sequence
  Description of Artificial Sequence: Synthetic oligonucleotide
  Target: LAMA2; (+) strand; PAM type: NNNNGHTT; PAM sequence: TATTGCTT
gtcaagggaaaaaaatcctc

SEQ ID NO: 46267 - DNA, 20 bp, Artificial Sequence
  Description of Artificial Sequence: Synthetic oligonucleotide
  Target: LAMA2; (+) strand; PAM type: NNNNGHTT; PAM sequence: GAATGATT
ttttaaagaaaaaattatca

SEQ ID NO: 46268 - DNA, 20 bp, Artificial Sequence
  Description of Artificial Sequence: Synthetic oligonucleotide
  Target: LAMA2; (+) strand; PAM type: NNNNGHTT; PAM sequence: ATTAGTTT
gtgttattttttatctccac

SEQ ID NO: 46269 - DNA, 20 bp, Artificial Sequence
  Description of Artificial Sequence: Synthetic oligonucleotide
  Target: LAMA2; (+) strand; PAM type: NNNNGHTT; PAM sequence: TACAGTTT
acaacaaaaatgagctggaa

SEQ ID NO: 46270 - DNA, 20 bp, Artificial Sequence
  Description of Artificial Sequence: Synthetic oligonucleotide
  Target: LAMA2; (+) strand; PAM type: NNNNGHTT; PAM sequence: AAACGATT
acagtttcagttcaaccacc

SEQ ID NO: 46271 - DNA, 20 bp, Artificial Sequence
  Description of Artificial Sequence: Synthetic oligonucleotide
  Target: LAMA2; (+) strand; PAM type: NNNNGHTT; PAM sequence: TTATGCTT
ggtgcaggggataatggaca

SEQ ID NO: 46272 - DNA, 20 bp, Artificial Sequence
  Description of Artificial Sequence: Synthetic oligonucleotide
  Target: LAMA2; (+) strand; PAM type: NNNNGHTT; PAM sequence: GGGGGATT
ataatggacattatgctttt

SEQ ID NO: 46273 - DNA, 20 bp, Artificial Sequence
  Description of Artificial Sequence: Synthetic oligonucleotide
  Target: LAMA2; (+) strand; PAM type: NNNNGHTT; PAM sequence: ACAAGATT
tagcacagaaaagtctggtt

SEQ ID NO: 46274 - DNA, 20 bp, Artificial Sequence
  Description of Artificial Sequence: Synthetic oligonucleotide
  Target: LAMA2; (+) strand; PAM type: NNNNGHTT; PAM sequence: GGCTGCTT
ctgaataaattgagtagaga

SEQ ID NO: 46275 - DNA, 20 bp, Artificial Sequence
  Description of Artificial Sequence: Synthetic oligonucleotide
  Target: LAMA2; (+) strand; PAM type: NNNNGHTT; PAM sequence: AACAGTTT
ctgcttgtaccaaactgtaa

SEQ ID NO: 46276 - DNA, 20 bp, Artificial Sequence
  Description of Artificial Sequence: Synthetic oligonucleotide
  Target: LAMA2; (+) strand; PAM type: NNNNGHTT; PAM sequence: AACAGATT
ttgcagaaacatgtcataga

SEQ ID NO: 46277 - DNA, 20 bp, Artificial Sequence
  Description of Artificial Sequence: Synthetic oligonucleotide
  Target: LAMA2; (+) strand; PAM type: NNNNGHTT; PAM sequence: TTGTGATT
attatttccctgtacaacaa

SEQ ID NO: 46278 - DNA, 20 bp, Artificial Sequence
  Description of Artificial Sequence: Synthetic oligonucleotide
  Target: LAMA2; (+) strand; PAM type: NNNNGHTT; PAM sequence: GGATGTTT
aaatgttaaaataaaaagaa

SEQ ID NO: 46279 - DNA, 20 bp, Artificial Sequence
  Description of Artificial Sequence: Synthetic oligonucleotide
  Target: LAMA2; (+) strand; PAM type: NNNNGHTT; PAM sequence: TGGAGTTT
gcataaggaatagaaacatt

SEQ ID NO: 46280 - DNA, 20 bp, Artificial Sequence
  Description of Artificial Sequence: Synthetic oligonucleotide
  Target: LAMA2; (+) strand; PAM type: NNNNGHTT; PAM sequence: TTTAGCTT
ggaatagaaacatttggagt

SEQ ID NO: 46281 - DNA, 20 bp, Artificial Sequence
  Description of Artificial Sequence: Synthetic oligonucleotide
  Target: LAMA2; (+) strand; PAM type: NNNNGHTT; PAM sequence: TTTAGCTT
gaaacatttggagttttagc

SEQ ID NO: 46282 - DNA, 20 bp, Artificial Sequence
  Description of Artificial Sequence: Synthetic oligonucleotide
  Target: LAMA2; (+) strand; PAM type: NNNNGHTT; PAM sequence: TCCTGTTT
gctttagcttatacaatgca

SEQ ID NO: 46283 - DNA, 20 bp, Artificial Sequence
  Description of Artificial Sequence: Synthetic oligonucleotide
  Target: LAMA2; (+) strand; PAM type: NNNNGHTT; PAM sequence: AATTGTTT
tacaatgcatcctgttttat

SEQ ID NO: 46284 - DNA, 20 bp, Artificial Sequence
  Description of Artificial Sequence: Synthetic oligonucleotide
  Target: LAMA2; (+) strand; PAM type: NNNNGHTT; PAM sequence: CAATGTTT
gttttataattgttttccaa

SEQ ID NO: 46285 - DNA, 20 bp, Artificial Sequence
  Description of Artificial Sequence: Synthetic oligonucleotide
  Target: LAMA2; (+) strand; PAM type: NNNNGHTT; PAM sequence: CAGTGTTT
tgttagcccctcattttctc

SEQ ID NO: 46286 - DNA, 20 bp, Artificial Sequence
  Description of Artificial Sequence: Synthetic oligonucleotide
  Target: LAMA2; (+) strand; PAM type: NNNNGHTT; PAM sequence: ACTGGTTT
gaaacgccaaaagtcaagta

SEQ ID NO: 46287 - DNA, 20 bp, Artificial Sequence
  Description of Artificial Sequence: Synthetic oligonucleotide
  Target: LAMA2; (+) strand; PAM type: NNNNGHTT; PAM sequence: TACAGTTT
ctggttttgtctccagcact

SEQ ID NO: 46288 - DNA, 20 bp, Artificial Sequence
  Description of Artificial Sequence: Synthetic oligonucleotide
  Target: LAMA2; (+) strand; PAM type: NNNNGHTT; PAM sequence: GATAGTTT
acactaggactcagaggaga

SEQ ID NO: 46289 - DNA, 20 bp, Artificial Sequence
  Description of Artificial Sequence: Synthetic oligonucleotide
  Target: LAMA2; (+) strand; PAM type: NNNNGHTT; PAM sequence: ATGAGATT
acaggtaattttttagccaa

SEQ ID NO: 46290 - DNA, 20 bp, Artificial Sequence
  Description of Artificial Sequence: Synthetic oligonucleotide
  Target: LAMA2; (+) strand; PAM type: NNNNGHTT; PAM sequence: ATTTGTTT
gtaattccaaggatactaaa

SEQ ID NO: 46291 - DNA, 20 bp, Artificial Sequence
  Description of Artificial Sequence: Synthetic oligonucleotide
  Target: LAMA2; (+) strand; PAM type: NNNNGHTT; PAM sequence: TAAAGATT
ctgcaaggttaaagaacagc

SEQ ID NO: 46292 - DNA, 20 bp, Artificial Sequence
  Description of Artificial Sequence: Synthetic oligonucleotide
  Target: LAMA2; (+) strand; PAM type: NNNNGHTT; PAM sequence: ATACGATT
attcttgttagttcccattg

SEQ ID NO: 46293 - DNA, 20 bp, Artificial Sequence
  Description of Artificial Sequence: Synthetic oligonucleotide
  Target: LAMA2; (+) strand; PAM type: NNNNGHTT; PAM sequence: GGATGTTT
ctaaaggaaaactacaaaaa

SEQ ID NO: 46294 - DNA, 20 bp, Artificial Sequence
  Description of Artificial Sequence: Synthetic oligonucleotide
  Target: LAMA2; (+) strand; PAM type: NNNNGHTT; PAM sequence: TTTTGCTT
agataggaatacaaataaac

SEQ ID NO: 46295 - DNA, 20 bp, Artificial Sequence
  Description of Artificial Sequence: Synthetic oligonucleotide
  Target: LAMA2; (+) strand; PAM type: NNNNGHTT; PAM sequence: GCTTGTTT
aggaatacaaataaactttt

SEQ ID NO: 46296 - DNA, 20 bp, Artificial Sequence
  Description of Artificial Sequence: Synthetic oligonucleotide
  Target: LAMA2; (+) strand; PAM type: NNNNGHTT; PAM sequence: GTTTGTTT
atacaaataaacttttgctt

SEQ ID NO: 46297 - DNA, 20 bp, Artificial Sequence
  Description of Artificial Sequence: Synthetic oligonucleotide
  Target: LAMA2; (+) strand; PAM type: NNNNGHTT; PAM sequence: GTTTGTTT
aaataaacttttgcttgttt

SEQ ID NO: 46298 - DNA, 20 bp, Artificial Sequence
  Description of Artificial Sequence: Synthetic oligonucleotide
  Target: LAMA2; (+) strand; PAM type: NNNNGHTT; PAM sequence: TTTTGTTT
aacttttgcttgtttgtttg

SEQ ID NO: 46299 - DNA, 20 bp, Artificial Sequence
  Description of Artificial Sequence: Synthetic oligonucleotide
  Target: LAMA2; (+) strand; PAM type: NNNNGHTT; PAM sequence: GAATGTTT
ttaaatccagtgataagaat

SEQ ID NO: 46300 - DNA, 20 bp, Artificial Sequence
  Description of Artificial Sequence: Synthetic oligonucleotide
  Target: LAMA2; (+) strand; PAM type: NNNNGHTT; PAM sequence: ATTTGCTT
taagaatgaatgttttctgt

SEQ ID NO: 46301 - DNA, 20 bp, Artificial Sequence
  Description of Artificial Sequence: Synthetic oligonucleotide
  Target: LAMA2; (+) strand; PAM type: NNNNGHTT; PAM sequence: AGATGATT
cttttcccaatgtctttctt

SEQ ID NO: 46302 - DNA, 20 bp, Artificial Sequence
  Description of Artificial Sequence: Synthetic oligonucleotide
  Target: LAMA2; (+) strand; PAM type: NNNNGHTT; PAM sequence: TACTGTTT
attaggtagttgaaagacgc

SEQ ID NO: 46303 - DNA, 20 bp, Artificial Sequence
  Description of Artificial Sequence: Synthetic oligonucleotide
  Target: LAMA2; (+) strand; PAM type: NNNNGHTT; PAM sequence: AAAAGCTT
actgtttacgaggcattgct

SEQ ID NO: 46304 - DNA, 20 bp, Artificial Sequence
  Description of Artificial Sequence: Synthetic oligonucleotide
  Target: LAMA2; (+) strand; PAM type: NNNNGHTT; PAM sequence: CTCCGTTT
ctttgtacatttccccactc

SEQ ID NO: 46305 - DNA, 20 bp, Artificial Sequence
  Description of Artificial Sequence: Synthetic oligonucleotide
  Target: LAMA2; (+) strand; PAM type: NNNNGHTT; PAM sequence: AACTGATT
gcctaggagttgaaagtggg

SEQ ID NO: 46306 - DNA, 20 bp, Artificial Sequence
  Description of Artificial Sequence: Synthetic oligonucleotide
  Target: LAMA2; (+) strand; PAM type: NNNNGHTT; PAM sequence: TCTAGTTT
tgaaagtgggaactgatttg

SEQ ID NO: 46307 - DNA, 20 bp, Artificial Sequence
  Description of Artificial Sequence: Synthetic oligonucleotide
  Target: LAMA2; (+) strand; PAM type: NNNNGHTT; PAM sequence: TTCTGATT
tgatttgtctagtttgaata

SEQ ID NO: 46308 - DNA, 20 bp, Artificial Sequence
  Description of Artificial Sequence: Synthetic oligonucleotide
  Target: LAMA2; (+) strand; PAM type: NNNNGHTT; PAM sequence: GCTAGCTT
atattctgattagtgaacta

SEQ ID NO: 46309 - DNA, 20 bp, Artificial Sequence
  Description of Artificial Sequence: Synthetic oligonucleotide
  Target: LAMA2; (+) strand; PAM type: NNNNGHTT; PAM sequence: TCTAGATT
gtaacaaaataacctattat

SEQ ID NO: 46310 - DNA, 20 bp, Artificial Sequence
  Description of Artificial Sequence: Synthetic oligonucleotide
  Target: LAMA2; (+) strand; PAM type: NNNNGHTT; PAM sequence: TGGTGTTT
aacttagcaaaaatacaaat

SEQ ID NO: 46311 - DNA, 20 bp, Artificial Sequence
  Description of Artificial Sequence: Synthetic oligonucleotide
  Target: LAMA2; (+) strand; PAM type: NNNNGHTT; PAM sequence: CTTTGATT
aatacaaattggtgtttcca

SEQ ID NO: 46312 - DNA, 20 bp, Artificial Sequence
  Description of Artificial Sequence: Synthetic oligonucleotide
  Target: LAMA2; (+) strand; PAM type: NNNNGHTT; PAM sequence: TTCAGCTT
ttctctttttgaaataaatt

SEQ ID NO: 46313 - DNA, 20 bp, Artificial Sequence
  Description of Artificial Sequence: Synthetic oligonucleotide
  Target: LAMA2; (+) strand; PAM type: NNNNGHTT; PAM sequence: TCTGGATT
ctttcttttgcctcgggtat

SEQ ID NO: 46314 - DNA, 20 bp, Artificial Sequence
  Description of Artificial Sequence: Synthetic oligonucleotide
  Target: LAMA2; (+) strand; PAM type: NNNNGHTT; PAM sequence: TGCTGTTT
aagaaatgtattttcccagc

SEQ ID NO: 46315 - DNA, 20 bp, Artificial Sequence
  Description of Artificial Sequence: Synthetic oligonucleotide
  Target: LAMA2; (+) strand; PAM type: NNNNGHTT; PAM sequence: CCATGTTT
aattccttaggaaacacaaa

SEQ ID NO: 46316 - DNA, 20 bp, Artificial Sequence
  Description of Artificial Sequence: Synthetic oligonucleotide
  Target: LAMA2; (+) strand; PAM type: NNNNGHTT; PAM sequence: GTCTGTTT
tttaatctgaagtcctgcca

SEQ ID NO: 46317 - DNA, 20 bp, Artificial Sequence
  Description of Artificial Sequence: Synthetic oligonucleotide
  Target: LAMA2; (+) strand; PAM type: NNNNGHTT; PAM sequence: ACCAGCTT
gccagtctgttttctctcct

SEQ ID NO: 46318 - DNA, 20 bp, Artificial Sequence
  Description of Artificial Sequence: Synthetic oligonucleotide
  Target: LAMA2; (+) strand; PAM type: NNNNGHTT; PAM sequence: CCTGGTTT
caagggcctttgaaatcagg

SEQ ID NO: 46319 - DNA, 20 bp, Artificial Sequence
  Description of Artificial Sequence: Synthetic oligonucleotide
  Target: LAMA2; (+) strand; PAM type: NNNNGHTT; PAM sequence: TGAAGTTT
tgtaatcttaggtaactctt

SEQ ID NO: 46320 - DNA, 20 bp, Artificial Sequence
  Description of Artificial Sequence: Synthetic oligonucleotide
  Target: LAMA2; (+) strand; PAM type: NNNNGHTT; PAM sequence: TTTAGTTT
tcttaggtaactctttgaag

SEQ ID NO: 46321 - DNA, 20 bp, Artificial Sequence
  Description of Artificial Sequence: Synthetic oligonucleotide
  Target: LAMA2; (+) strand; PAM type: NNNNGHTT; PAM sequence: TAGGGCTT
ttcttcttttcctgacctcc

SEQ ID NO: 46322 - DNA, 20 bp, Artificial Sequence
  Description of Artificial Sequence: Synthetic oligonucleotide
  Target: LAMA2; (+) strand; PAM type: NNNNGHTT; PAM sequence: TTGGGATT
ttatgcatgcaattagcaat

SEQ ID NO: 46323 - DNA, 20 bp, Artificial Sequence
  Description of Artificial Sequence: Synthetic oligonucleotide
  Target: LAMA2; (+) strand; PAM type: NNNNGHTT; PAM sequence: CAAGGTTT
ttagcaatttgggatttgca

SEQ ID NO: 46324 - DNA, 20 bp, Artificial Sequence
  Description of Artificial Sequence: Synthetic oligonucleotide
  Target: LAMA2; (+) strand; PAM type: NNNNGHTT; PAM sequence: ACAAGATT
gcacaaggtttttccagagt

SEQ ID NO: 46325 - DNA, 20 bp, Artificial Sequence
  Description of Artificial Sequence: Synthetic oligonucleotide
  Target: LAMA2; (+) strand; PAM type: NNNNGHTT; PAM sequence: CTGAGCTT
aggtagagaatcatttcttt

SEQ ID NO: 46326 - DNA, 20 bp, Artificial Sequence
  Description of Artificial Sequence: Synthetic oligonucleotide
  Target: LAMA2; (+) strand; PAM type: NNNNGHTT; PAM sequence: CAAAGTTT
aaagtaaatacaattttaag

SEQ ID NO: 46327 - DNA, 20 bp, Artificial Sequence
  Description of Artificial Sequence: Synthetic oligonucleotide
  Target: LAMA2; (+) strand; PAM type: NNNNGHTT; PAM sequence: AAATGTTT
tgttgttcgaaagttgttca

SEQ ID NO: 46328 - DNA, 20 bp, Artificial Sequence
  Description of Artificial Sequence: Synthetic oligonucleotide
  Target: LAMA2; (+) strand; PAM type: NNNNGHTT; PAM sequence: AGTTGATT
gtttttagaatttttcttgg

SEQ ID NO: 46329 - DNA, 20 bp, Artificial Sequence
  Description of Artificial Sequence: Synthetic oligonucleotide
  Target: LAMA2; (+) strand; PAM type: NNNNGHTT; PAM sequence: GATTGCTT
ttagaatttttcttggagtt

SEQ ID NO: 46330 - DNA, 20 bp, Artificial Sequence
  Description of Artificial Sequence: Synthetic oligonucleotide
  Target: LAMA2; (+) strand; PAM type: NNNNGHTT; PAM sequence: CAGTGATT
tgacttcacgtcttgactct

SEQ ID NO: 46331 - DNA, 20 bp, Artificial Sequence
  Description of Artificial Sequence: Synthetic oligonucleotide
  Target: LAMA2; (+) strand; PAM type: NNNNGHTT; PAM sequence: TTTTGTTT
cacgtcttgactctcagtga

SEQ ID NO: 46332 - DNA, 20 bp, Artificial Sequence
  Description of Artificial Sequence: Synthetic oligonucleotide
  Target: LAMA2; (+) strand; PAM type: NNNNGHTT; PAM sequence: AGATGATT
ttgggatatgtatagaacca

SEQ ID NO: 46333 - DNA, 20 bp, Artificial Sequence
  Description of Artificial Sequence: Synthetic oligonucleotide
  Target: LAMA2; (+) strand; PAM type: NNNNGHTT; PAM sequence: AAGGGTTT
gaaccaagatgatttgtgtg

SEQ ID NO: 46334 - DNA, 20 bp, Artificial Sequence
  Description of Artificial Sequence: Synthetic oligonucleotide
  Target: LAMA2; (+) strand; PAM type: NNNNGHTT; PAM sequence: AATTGTTT
gttgtattatattttaatat

SEQ ID NO: 46335 - DNA, 20 bp, Artificial Sequence
  Description of Artificial Sequence: Synthetic oligonucleotide
  Target: LAMA2; (+) strand; PAM type: NNNNGHTT; PAM sequence: AAAAGATT
attttaatataattgtttaa

SEQ ID NO: 46336 - DNA, 20 bp, Artificial Sequence
  Description of Artificial Sequence: Synthetic oligonucleotide
  Target: LAMA2; (+) strand; PAM type: NNNNGHTT; PAM sequence: CACAGATT
aaaaagattcatgttatagt

SEQ ID NO: 46337 - DNA, 20 bp, Artificial Sequence
  Description of Artificial Sequence: Synthetic oligonucleotide
  Target: LAMA2; (+) strand; PAM type: NNNNGHTT; PAM sequence: GGCAGTTT
gttatagtcacagattaaaa

SEQ ID NO: 46338 - DNA, 20 bp, Artificial Sequence
  Description of Artificial Sequence: Synthetic oligonucleotide
  Target: LAMA2; (+) strand; PAM type: NNNNGHTT; PAM sequence: AACAGTTT
gtttttaaaggagatgaatt

SEQ ID NO: 46339 - DNA, 20 bp, Artificial Sequence
  Description of Artificial Sequence: Synthetic oligonucleotide
  Target: LAMA2; (+) strand; PAM type: NNNNGHTT; PAM sequence: TCTGGTTT
aattaaggacttgcaggttg

SEQ ID NO: 46340 - DNA, 20 bp, Artificial Sequence
  Description of Artificial Sequence: Synthetic oligonucleotide
  Target: LAMA2; (+) strand; PAM type: NNNNGHTT; PAM sequence: TTATGCTT
tgttaaagaagtgtactttt

SEQ ID NO: 46341 - DNA, 20 bp, Artificial Sequence
  Description of Artificial Sequence: Synthetic oligonucleotide
  Target: LAMA2; (+) strand; PAM type: NNNNGHTT; PAM sequence: GAAAGCTT
agctagtgtctgacaaagaa

SEQ ID NO: 46342 - DNA, 20 bp, Artificial Sequence
  Description of Artificial Sequence: Synthetic oligonucleotide
  Target: LAMA2; (+) strand; PAM type: NNNNGHTT; PAM sequence: AAAGGATT
atgtcagatagaaaaaagta

SEQ ID NO: 46343 - DNA, 20 bp, Artificial Sequence
  Description of Artificial Sequence: Synthetic oligonucleotide
  Target: LAMA2; (+) strand; PAM type: NNNNGHTT; PAM sequence: ACTTGCTT
ctagtgcaaaggacaatatt

SEQ ID NO: 46344 - DNA, 20 bp, Artificial Sequence
  Description of Artificial Sequence: Synthetic oligonucleotide
  Target: LAMA2; (+) strand; PAM type: NNNNGHTT; PAM sequence: TGATGATT
ctcttaaattttttactcaa

SEQ ID NO: 46345 - DNA, 20 bp, Artificial Sequence
  Description of Artificial Sequence: Synthetic oligonucleotide
  Target: LAMA2; (+) strand; PAM type: NNNNGHTT; PAM sequence: ATATGATT
gtctctgagaaactaagata

SEQ ID NO: 46346 - DNA, 20 bp, Artificial Sequence
  Description of Artificial Sequence: Synthetic oligonucleotide
  Target: LAMA2; (+) strand; PAM type: NNNNGHTT; PAM sequence: CTGTGCTT
taagataatatgatttaatt

SEQ ID NO: 46347 - DNA, 20 bp, Artificial Sequence
  Description of Artificial Sequence: Synthetic oligonucleotide
  Target: LAMA2; (+) strand; PAM type: NNNNGHTT; PAM sequence: GGGCGCTT
catgaaggagtacaggggat

SEQ ID NO: 46348 - DNA, 20 bp, Artificial Sequence
  Description of Artificial Sequence: Synthetic oligonucleotide
  Target: LAMA2; (+) strand; PAM type: NNNNGHTT; PAM sequence: CTTTGTTT
atgggcgctttgtgtgtcca

SEQ ID NO: 46349 - DNA, 20 bp, Artificial Sequence
  Description of Artificial Sequence: Synthetic oligonucleotide
  Target: LAMA2; (+) strand; PAM type: NNNNGHTT; PAM sequence: AAGTGTTT
ggcggcccgttgccacacaa

SEQ ID NO: 46350 - DNA, 20 bp, Artificial Sequence
  Description of Artificial Sequence: Synthetic oligonucleotide
  Target: LAMA2; (+) strand; PAM type: NNNNGHTT; PAM sequence: GATGGCTT
cacacaaaagtgttttttca

SEQ ID NO: 46351 - DNA, 20 bp, Artificial Sequence
  Description of Artificial Sequence: Synthetic oligonucleotide
  Target: LAMA2; (+) strand; PAM type: NNNNGHTT; PAM sequence: TACAGTTT
accaatatatttttctagca

SEQ ID NO: 46352 - DNA, 20 bp, Artificial Sequence
  Description of Artificial Sequence: Synthetic oligonucleotide
  Target: LAMA2; (+) strand; PAM type: NNNNGHTT; PAM sequence: CCAAGTTT
gatgggcaatattaccttgc

SEQ ID NO: 46353 - DNA, 20 bp, Artificial Sequence
  Description of Artificial Sequence: Synthetic oligonucleotide
  Target: LAMA2; (+) strand; PAM type: NNNNGHTT; PAM sequence: TCAGGATT
acagctggtaagtggcagag

SEQ ID NO: 46354 - DNA, 20 bp, Artificial Sequence
  Description of Artificial Sequence: Synthetic oligonucleotide
  Target: LAMA2; (+) strand; PAM type: NNNNGHTT; PAM sequence: CTGTGTTT
tgaacttaccctcaaactgc

SEQ ID NO: 46355 - DNA, 20 bp, Artificial Sequence
  Description of Artificial Sequence: Synthetic oligonucleotide
  Target: LAMA2; (+) strand; PAM type: NNNNGHTT; PAM sequence: GATAGATT
taatcatgtggatactacag

SEQ ID NO: 46356 - DNA, 20 bp, Artificial Sequence
  Description of Artificial Sequence: Synthetic oligonucleotide
  Target: LAMA2; (+) strand; PAM type: NNNNGHTT; PAM sequence: CTTTGCTT
taagaggagcattaactaaa

SEQ ID NO: 46357 - DNA, 20 bp, Artificial Sequence
  Description of Artificial Sequence: Synthetic oligonucleotide
  Target: LAMA2; (+) strand; PAM type: NNNNGHTT; PAM sequence: AGGTGATT
gaagaatgctcatcttacag

SEQ ID NO: 46358 - DNA, 20 bp, Artificial Sequence
  Description of Artificial Sequence: Synthetic oligonucleotide
  Target: LAMA2; (+) strand; PAM type: NNNNGHTT; PAM sequence: ACTGGATT
ttgtgtctaataaaaactgc

SEQ ID NO: 46359 - DNA, 20 bp, Artificial Sequence
  Description of Artificial Sequence: Synthetic oligonucleotide
  Target: LAMA2; (+) strand; PAM type: NNNNGHTT; PAM sequence: GTTGGTTT
ctaaattttcttatctgtga

SEQ ID NO: 46360 - DNA, 20 bp, Artificial Sequence
  Description of Artificial Sequence: Synthetic oligonucleotide
  Target: LAMA2; (+) strand; PAM type: NNNNGHTT; PAM sequence: TTACGATT
tttcttatctgtgagttggt

SEQ ID NO: 46361 - DNA, 20 bp, Artificial Sequence
  Description of Artificial Sequence: Synthetic oligonucleotide
  Target: LAMA2; (+) strand; PAM type: NNNNGHTT; PAM sequence: TGGAGATT
atagcatatgtgcatatcct

SEQ ID NO: 46362 - DNA, 20 bp, Artificial Sequence
  Description of Artificial Sequence: Synthetic oligonucleotide
  Target: LAMA2; (+) strand; PAM type: NNNNGHTT; PAM sequence: ATCTGATT
aacatagttaaaagacatgc

SEQ ID NO: 46363 - DNA, 20 bp, Artificial Sequence
  Description of Artificial Sequence: Synthetic oligonucleotide
  Target: LAMA2; (+) strand; PAM type: NNNNGHTT; PAM sequence: AGTAGCTT
gtagtccacttggaaagaca

SEQ ID NO: 46364 - DNA, 20 bp, Artificial Sequence
  Description of Artificial Sequence: Synthetic oligonucleotide
  Target: LAMA2; (+) strand; PAM type: NNNNGHTT; PAM sequence: TATTGTTT
gaaagctgtgaaaagtgtgt

SEQ ID NO: 46365 - DNA, 20 bp, Artificial Sequence
  Description of Artificial Sequence: Synthetic oligonucleotide
  Target: LAMA2; (+) strand; PAM type: NNNNGHTT; PAM sequence: AATTGCTT
aaaagtgtgttattgttttt

SEQ ID NO: 46366 - DNA, 20 bp, Artificial Sequence
  Description of Artificial Sequence: Synthetic oligonucleotide
  Target: LAMA2; (+) strand; PAM type: NNNNGHTT; PAM sequence: GAAAGTTT
aaatagcagtatagcatact

SEQ ID NO: 46367 - DNA, 20 bp, Artificial Sequence
  Description of Artificial Sequence: Synthetic oligonucleotide
  Target: LAMA2; (+) strand; PAM type: NNNNGHTT; PAM sequence: AATTGTTT
gtataacgcaattatatgag

SEQ ID NO: 46368 - DNA, 20 bp, Artificial Sequence
  Description of Artificial Sequence: Synthetic oligonucleotide
  Target: LAMA2; (+) strand; PAM type: NNNNGHTT; PAM sequence: CCTAGATT
taacatttggcatatatcct

SEQ ID NO: 46369 - DNA, 20 bp, Artificial Sequence
  Description of Artificial Sequence: Synthetic oligonucleotide
  Target: LAMA2; (+) strand; PAM type: NNNNGHTT; PAM sequence: TCTTGTTT
ttcttgttatattacatagt

SEQ ID NO: 46370 - DNA, 20 bp, Artificial Sequence
  Description of Artificial Sequence: Synthetic oligonucleotide
  Target: LAMA2; (+) strand; PAM type: NNNNGHTT; PAM sequence: TGGTGTTT
aagtggaattatcctctaca

SEQ ID NO: 46371 - DNA, 20 bp, Artificial Sequence
  Description of Artificial Sequence: Synthetic oligonucleotide
  Target: LAMA2; (+) strand; PAM type: NNNNGHTT; PAM sequence: TTATGATT
aattatcctctacatggtgt

SEQ ID NO: 46372 - DNA, 20 bp, Artificial Sequence
  Description of Artificial Sequence: Synthetic oligonucleotide
  Target: LAMA2; (+) strand; PAM type: NNNNGHTT; PAM sequence: ATTTGTTT
tcctctacatggtgtttatg

SEQ ID NO: 46373 - DNA, 20 bp, Artificial Sequence
  Description of Artificial Sequence: Synthetic oligonucleotide
  Target: LAMA2; (+) strand; PAM type: NNNNGHTT; PAM sequence: TTGTGTTT
ttgtttttgcacttatgagg

SEQ ID NO: 46374 - DNA, 20 bp, Artificial Sequence
  Description of Artificial Sequence: Synthetic oligonucleotide
  Target: LAMA2; (+) strand; PAM type: NNNNGHTT; PAM sequence: CTTTGTTT
ttttagcattggtaaattta

SEQ ID NO: 46375 - DNA, 20 bp, Artificial Sequence
  Description of Artificial Sequence: Synthetic oligonucleotide
  Target: LAMA2; (+) strand; PAM type: NNNNGHTT; PAM sequence: TCTTGATT
ttcaggttatttctaacttt

SEQ ID NO: 46376 - DNA, 20 bp, Artificial Sequence
  Description of Artificial Sequence: Synthetic oligonucleotide
  Target: LAMA2; (+) strand; PAM type: NNNNGHTT; PAM sequence: GTATGTTT
gtaatgactatcttgtacaa

SEQ ID NO: 46377 - DNA, 20 bp, Artificial Sequence
  Description of Artificial Sequence: Synthetic oligonucleotide
  Target: LAMA2; (+) strand; PAM type: NNNNGHTT; PAM sequence: CGGGGTTT
ttttgtatttttagtacaga

SEQ ID NO: 46378 - DNA, 20 bp, Artificial Sequence
  Description of Artificial Sequence: Synthetic oligonucleotide
  Target: LAMA2; (+) strand; PAM type: NNNNGHTT; PAM sequence: CTGAGATT
cacctcggcctcttaaagtg

SEQ ID NO: 46379 - DNA, 20 bp, Artificial Sequence
  Description of Artificial Sequence: Synthetic oligonucleotide
  Target: LAMA2; (+) strand; PAM type: NNNNGHTT; PAM sequence: TATAGTTT
taataaatatgtctaaggaa

SEQ ID NO: 46380 - DNA, 20 bp, Artificial Sequence
  Description of Artificial Sequence: Synthetic oligonucleotide
  Target: LAMA2; (+) strand; PAM type: NNNNGHTT; PAM sequence: CATTGTTT
tgtctaaggaatatagtttc

SEQ ID NO: 46381 - DNA, 20 bp, Artificial Sequence
  Description of Artificial Sequence: Synthetic oligonucleotide
  Target: LAMA2; (+) strand; PAM type: NNNNGHTT; PAM sequence: AGAAGTTT
tgtatactaatgcgagatag

SEQ ID NO: 46382 - DNA, 20 bp, Artificial Sequence
  Description of Artificial Sequence: Synthetic oligonucleotide
  Target: LAMA2; (+) strand; PAM type: NNNNGHTT; PAM sequence: AGCAGATT
gaacattttaaagttgccag

SEQ ID NO: 46383 - DNA, 20 bp, Artificial Sequence
  Description of Artificial Sequence: Synthetic oligonucleotide
  Target: LAMA2; (+) strand; PAM type: NNNNGHTT; PAM sequence: TGGTGATT
agtccctcagatatgtattt

SEQ ID NO: 46384 - DNA, 20 bp, Artificial Sequence
  Description of Artificial Sequence: Synthetic oligonucleotide
  Target: LAMA2; (+) strand; PAM type: NNNNGHTT; PAM sequence: TTGAGTTT
acaataagataaggctaaaa

SEQ ID NO: 46385 - DNA, 20 bp, Artificial Sequence
  Description of Artificial Sequence: Synthetic oligonucleotide
  Target: LAMA2; (+) strand; PAM type: NNNNGHTT; PAM sequence: TTGGGATT
aaaattgagtttcagatatt

SEQ ID NO: 46386 - DNA, 20 bp, Artificial Sequence
  Description of Artificial Sequence: Synthetic oligonucleotide
  Target: LAMA2; (+) strand; PAM type: NNNNGHTT; PAM sequence: TAAAGTTT
tgtaatcatttgtaaaattt

SEQ ID NO: 46387 - DNA, 20 bp, Artificial Sequence
  Description of Artificial Sequence: Synthetic oligonucleotide
  Target: LAMA2; (+) strand; PAM type: NNNNGHTT; PAM sequence: ACAAGCTT
tcaaaatcaaatgaaataaa

SEQ ID NO: 46388 - DNA, 20 bp, Artificial Sequence
  Description of Artificial Sequence: Synthetic oligonucleotide
  Target: LAMA2; (+) strand; PAM type: NNNNGHTT; PAM sequence: TTGAGCTT
tagttaggtgctaattcatt

SEQ ID NO: 46389 - DNA, 20 bp, Artificial Sequence
  Description of Artificial Sequence: Synthetic oligonucleotide
  Target: LAMA2; (+) strand; PAM type: NNNNGHTT; PAM sequence: CAGGGTTT
gctaattcattttgagctta

SEQ ID NO: 46390 - DNA, 20 bp, Artificial Sequence
  Description of Artificial Sequence: Synthetic oligonucleotide
  Target: LAMA2; (+) strand; PAM type: NNNNGHTT; PAM sequence: AAATGTTT
tataattattttataaataa

SEQ ID NO: 46391 - DNA, 20 bp, Artificial Sequence
  Description of Artificial Sequence: Synthetic oligonucleotide
  Target: LAMA2; (+) strand; PAM type: NNNNGHTT; PAM sequence: TGGGGTTT
ttttataaataaaaatgttt

SEQ ID NO: 46392 - DNA, 20 bp, Artificial Sequence
  Description of Artificial Sequence: Synthetic oligonucleotide
  Target: LAMA2; (+) strand; PAM type: NNNNGHTT; PAM sequence: TTCAGATT
aaataaaaatgttttggggt

SEQ ID NO: 46393 - DNA, 20 bp, Artificial Sequence
  Description of Artificial Sequence: Synthetic oligonucleotide
  Target: LAMA2; (+) strand; PAM type: NNNNGHTT; PAM sequence: AGAAGTTT
agatttaaaaatcaagagta

SEQ ID NO: 46394 - DNA, 20 bp, Artificial Sequence
  Description of Artificial Sequence: Synthetic oligonucleotide
  Target: LAMA2; (+) strand; PAM type: NNNNGHTT; PAM sequence: TAAAGATT
agaagttttacaatatttac

SEQ ID NO: 46395 - DNA, 20 bp, Artificial Sequence
  Description of Artificial Sequence: Synthetic oligonucleotide
  Target: LAMA2; (+) strand; PAM type: NNNNGHTT; PAM sequence: TTACGATT
tttacaatatttactaaaga

SEQ ID NO: 46396 - DNA, 20 bp, Artificial Sequence
  Description of Artificial Sequence: Synthetic oligonucleotide
  Target: LAMA2; (+) strand; PAM type: NNNNGHTT; PAM sequence: TTTTGTTT
aacttctgtctttagtgcta

SEQ ID NO: 46397 - DNA, 20 bp, Artificial Sequence
  Description of Artificial Sequence: Synthetic oligonucleotide
  Target: LAMA2; (+) strand; PAM type: NNNNGHTT; PAM sequence: GAAGGCTT
tctttagtgctattttgttt

SEQ ID NO: 46398 - DNA, 20 bp, Artificial Sequence
  Description of Artificial Sequence: Synthetic oligonucleotide
  Target: LAMA2; (+) strand; PAM type: NNNNGHTT; PAM sequence: AAGTGATT
aggcttatttatctgctatg

SEQ ID NO: 46399 - DNA, 20 bp, Artificial Sequence
  Description of Artificial Sequence: Synthetic oligonucleotide
  Target: LAMA2; (+) strand; PAM type: NNNNGHTT; PAM sequence: AATAGCTT
cttctagcctttatttaaaa

SEQ ID NO: 46400 - DNA, 20 bp, Artificial Sequence
  Description of Artificial Sequence: Synthetic oligonucleotide
  Target: LAMA2; (+) strand; PAM type: NNNNGHTT; PAM sequence: AAATGATT
caaggagcctgtgaatgctg

SEQ ID NO: 46401 - DNA, 20 bp, Artificial Sequence
  Description of Artificial Sequence: Synthetic oligonucleotide
  Target: LAMA2; (+) strand; PAM type: NNNNGHTT; PAM sequence: GTGGGCTT
tccattgtcccgcactgatg

SEQ ID NO: 46402 - DNA, 20 bp, Artificial Sequence
  Description of Artificial Sequence: Synthetic oligonucleotide
  Target: LAMA2; (+) strand; PAM type: NNNNGHTT; PAM sequence: CTGTGCTT
caaatgaatcaccctcatca

SEQ ID NO: 46403 - DNA, 20 bp, Artificial Sequence
  Description of Artificial Sequence: Synthetic oligonucleotide
  Target: LAMA2; (+) strand; PAM type: NNNNGHTT; PAM sequence: TTCCGTTT
caccctcatcactgtgcttg

SEQ ID NO: 46404 - DNA, 20 bp, Artificial Sequence
  Description of Artificial Sequence: Synthetic oligonucleotide
  Target: LAMA2; (+) strand; PAM type: NNNNGHTT; PAM sequence: GGATGTTT
actgtgcttgttccgttttg

SEQ ID NO: 46405 - DNA, 20 bp, Artificial Sequence
  Description of Artificial Sequence: Synthetic oligonucleotide
  Target: LAMA2; (+) strand; PAM type: NNNNGHTT; PAM sequence: GGGAGATT
tctactagactttctaaatt

SEQ ID NO: 46406 - DNA, 20 bp, Artificial Sequence
  Description of Artificial Sequence: Synthetic oligonucleotide
  Target: LAMA2; (+) strand; PAM type: NNNNGHTT; PAM sequence: TGTTGTTT
cagacagactctcttgatgc

SEQ ID NO: 46407 - DNA, 20 bp, Artificial Sequence
  Description of Artificial Sequence: Synthetic oligonucleotide
  Target: LAMA2; (+) strand; PAM type: NNNNGHTT; PAM sequence: CATGGATT
aatttagcatgagtcattcc

SEQ ID NO: 46408 - DNA, 20 bp, Artificial Sequence
  Description of Artificial Sequence: Synthetic oligonucleotide
  Target: LAMA2; (+) strand; PAM type: NNNNGHTT; PAM sequence: GTGTGTTT
catatctagttgtatcttct

SEQ ID NO: 46409 - DNA, 20 bp, Artificial Sequence
  Description of Artificial Sequence: Synthetic oligonucleotide
  Target: LAMA2; (+) strand; PAM type: NNNNGHTT; PAM sequence: GTAGGCTT
atacctcaaatctggaaatt

SEQ ID NO: 46410 - DNA, 20 bp, Artificial Sequence
  Description of Artificial Sequence: Synthetic oligonucleotide
  Target: LAMA2; (+) strand; PAM type: NNNNGHTT; PAM sequence: ACAGGTTT
gactttctaataccttataa

SEQ ID NO: 46411 - DNA, 20 bp, Artificial Sequence
  Description of Artificial Sequence: Synthetic oligonucleotide
  Target: LAMA2; (+) strand; PAM type: NNNNGHTT; PAM sequence: TAAAGATT
tttctgaggcattgacctat

SEQ ID NO: 46412 - DNA, 20 bp, Artificial Sequence
  Description of Artificial Sequence: Synthetic oligonucleotide
  Target: LAMA2; (+) strand; PAM type: NNNNGHTT; PAM sequence: AATAGCTT
tcccaaatcttccctgaggt

SEQ ID NO: 46413 - DNA, 20 bp, Artificial Sequence
  Description of Artificial Sequence: Synthetic oligonucleotide
  Target: LAMA2; (+) strand; PAM type: NNNNGHTT; PAM sequence: TGTCGCTT
taaagggaaggtatcttatt

SEQ ID NO: 46414 - DNA, 20 bp, Artificial Sequence
  Description of Artificial Sequence: Synthetic oligonucleotide
  Target: LAMA2; (+) strand; PAM type: NNNNGHTT; PAM sequence: TTGTGATT
actgcaggaaaaaataaaat

SEQ ID NO: 46415 - DNA, 20 bp, Artificial Sequence
  Description of Artificial Sequence: Synthetic oligonucleotide
  Target: LAMA2; (+) strand; PAM type: NNNNGHTT; PAM sequence: AAATGTTT
ttatgtgaaaaaagatcatt

SEQ ID NO: 46416 - DNA, 20 bp, Artificial Sequence
  Description of Artificial Sequence: Synthetic oligonucleotide
  Target: LAMA2; (+) strand; PAM type: NNNNGHTT; PAM sequence: TCAAGTTT
aaaacttataagcaaaactt

SEQ ID NO: 46417 - DNA, 20 bp, Artificial Sequence
  Description of Artificial Sequence: Synthetic oligonucleotide
  Target: LAMA2; (+) strand; PAM type: NNNNGHTT; PAM sequence: AACTGATT
caaaactttcaagtttttta

SEQ ID NO: 46418 - DNA, 20 bp, Artificial Sequence
  Description of Artificial Sequence: Synthetic oligonucleotide
  Target: LAMA2; (+) strand; PAM type: NNNNGHTT; PAM sequence: TGAAGCTT
gctaattgactatgaaaact

SEQ ID NO: 46419 - DNA, 20 bp, Artificial Sequence
  Description of Artificial Sequence: Synthetic oligonucleotide
  Target: LAMA2; (+) strand; PAM type: NNNNGHTT; PAM sequence: CATTGCTT
ttgtagaccttccatcatac

SEQ ID NO: 46420 - DNA, 20 bp, Artificial Sequence
  Description of Artificial Sequence: Synthetic oligonucleotide
  Target: LAMA2; (+) strand; PAM type: NNNNGHTT; PAM sequence: GGTAGTTT
tatgcaatcaatatttatta

SEQ ID NO: 46421 - DNA, 20 bp, Artificial Sequence
  Description of Artificial Sequence: Synthetic oligonucleotide
  Target: LAMA2; (+) strand; PAM type: NNNNGHTT; PAM sequence: AAATGTTT
gaacttattccttgtatacc

SEQ ID NO: 46422 - DNA, 20 bp, Artificial Sequence
  Description of Artificial Sequence: Synthetic oligonucleotide
  Target: LAMA2; (+) strand; PAM type: NNNNGHTT; PAM sequence: TTTTGTTT
aacaccaccagcatagacat

SEQ ID NO: 46423 - DNA, 20 bp, Artificial Sequence
  Description of Artificial Sequence: Synthetic oligonucleotide
  Target: LAMA2; (+) strand; PAM type: NNNNGHTT; PAM sequence: ACTGGATT
atttttgtttactctgtgca

SEQ ID NO: 46424 - DNA, 20 bp, Artificial Sequence
  Description of Artificial Sequence: Synthetic oligonucleotide
  Target: LAMA2; (+) strand; PAM type: NNNNGHTT; PAM sequence: GGGAGCTT
tgcaactggatttcgttctg

SEQ ID NO: 46425 - DNA, 20 bp, Artificial Sequence
  Description of Artificial Sequence: Synthetic oligonucleotide
  Target: LAMA2; (+) strand; PAM type: NNNNGHTT; PAM sequence: GCAAGCTT
aattcaggaactatggccca

SEQ ID NO: 46426 - DNA, 20 bp, Artificial Sequence
  Description of Artificial Sequence: Synthetic oligonucleotide
  Target: LAMA2; (+) strand; PAM type: NNNNGHTT; PAM sequence: CTTTGCTT
gcaagctttcatgtgctatt

SEQ ID NO: 46427 - DNA, 20 bp, Artificial Sequence
  Description of Artificial Sequence: Synthetic oligonucleotide
  Target: LAMA2; (+) strand; PAM type: NNNNGHTT; PAM sequence: GCAGGATT
actagacagaatactgaaaa

SEQ ID NO: 46428 - DNA, 20 bp, Artificial Sequence
  Description of Artificial Sequence: Synthetic oligonucleotide
  Target: LAMA2; (+) strand; PAM type: NNNNGHTT; PAM sequence: TGAAGTTT
ctgaaaagcaggattacata

SEQ ID NO: 46429 - DNA, 20 bp, Artificial Sequence
  Description of Artificial Sequence: Synthetic oligonucleotide
  Target: LAMA2; (+) strand; PAM type: NNNNGHTT; PAM sequence: ATCTGATT
gattacatatgaagtttacc

SEQ ID NO: 46430 - DNA, 20 bp, Artificial Sequence
  Description of Artificial Sequence: Synthetic oligonucleotide
  Target: LAMA2; (+) strand; PAM type: NNNNGHTT; PAM sequence: AAGGGTTT
taccatctgatttttttcct

SEQ ID NO: 46431 - DNA, 20 bp, Artificial Sequence
  Description of Artificial Sequence: Synthetic oligonucleotide
  Target: LAMA2; (+) strand; PAM type: NNNNGHTT; PAM sequence: GAACGTTT
tttcctaagggtttttacat

SEQ ID NO: 46432 - DNA, 20 bp, Artificial Sequence
  Description of Artificial Sequence: Synthetic oligonucleotide
  Target: LAMA2; (+) strand; PAM type: NNNNGHTT; PAM sequence: TGTGGATT
gtttattccttgtctttttg

SEQ ID NO: 46433 - DNA, 20 bp, Artificial Sequence
  Description of Artificial Sequence: Synthetic oligonucleotide
  Target: LAMA2; (+) strand; PAM type: NNNNGHTT; PAM sequence: CCAGGTTT
ttgtgtggattcagcaatct

SEQ ID NO: 46434 - DNA, 20 bp, Artificial Sequence
  Description of Artificial Sequence: Synthetic oligonucleotide
  Target: LAMA2; (+) strand; PAM type: NNNNGHTT; PAM sequence: TTGGGCTT
tgcatagctccaccacacta

SEQ ID NO: 46435 - DNA, 20 bp, Artificial Sequence
  Description of Artificial Sequence: Synthetic oligonucleotide
  Target: LAMA2; (+) strand; PAM type: NNNNGHTT; PAM sequence: GCCTGTTT
aagttctttaacctctctga

SEQ ID NO: 46436 - DNA, 20 bp, Artificial Sequence
  Description of Artificial Sequence: Synthetic oligonucleotide
  Target: LAMA2; (+) strand; PAM type: NNNNGHTT; PAM sequence: ATAAGCTT
aacactgataattaaataag

SEQ ID NO: 46437 - DNA, 20 bp, Artificial Sequence
  Description of Artificial Sequence: Synthetic oligonucleotide
  Target: LAMA2; (+) strand; PAM type: NNNNGHTT; PAM sequence: AAAAGTTT
aaagtattagtgaaaggata

SEQ ID NO: 46438 - DNA, 20 bp, Artificial Sequence
  Description of Artificial Sequence: Synthetic oligonucleotide
  Target: LAMA2; (+) strand; PAM type: NNNNGHTT; PAM sequence: GTATGCTT
agacttaacattactgtatc

SEQ ID NO: 46439 - DNA, 20 bp, Artificial Sequence
  Description of Artificial Sequence: Synthetic oligonucleotide
  Target: LAMA2; (+) strand; PAM type: NNNNGHTT; PAM sequence: GATGGTTT
tatgtggcagagacggtggt

SEQ ID NO: 46440 - DNA, 20 bp, Artificial Sequence
  Description of Artificial Sequence: Synthetic oligonucleotide
  Target: LAMA2; (+) strand; PAM type: NNNNGHTT; PAM sequence: TAAGGCTT
ggttgtatacatcaaatacg

SEQ ID NO: 46441 - DNA, 20 bp, Artificial Sequence
  Description of Artificial Sequence: Synthetic oligonucleotide
  Target: LAMA2; (+) strand; PAM type: NNNNGHTT; PAM sequence: ACATGTTT
ttgtatgtcaatcaacctca

SEQ ID NO: 46442 - DNA, 20 bp, Artificial Sequence
  Description of Artificial Sequence: Synthetic oligonucleotide
  Target: LAMA2; (+) strand; PAM type: NNNNGHTT; PAM sequence: TGGTGTTT
actgaaagccttctaacttg

SEQ ID NO: 46443 - DNA, 20 bp, Artificial Sequence
  Description of Artificial Sequence: Synthetic oligonucleotide
  Target: LAMA2; (+) strand; PAM type: NNNNGHTT; PAM sequence: AAAAGCTT
ttggttaatagttgagatct

SEQ ID NO: 46444 - DNA, 20 bp, Artificial Sequence
  Description of Artificial Sequence: Synthetic oligonucleotide
  Target: LAMA2; (+) strand; PAM type: NNNNGHTT; PAM sequence: GAAAGCTT
cttaggcctaaattcagata

SEQ ID NO: 46445 - DNA, 20 bp, Artificial Sequence
  Description of Artificial Sequence: Synthetic oligonucleotide
  Target: LAMA2; (+) strand; PAM type: NNNNGHTT; PAM sequence: GTAAGTTT
gaaagcttggcacatctgtt

SEQ ID NO: 46446 - DNA, 20 bp, Artificial Sequence
  Description of Artificial Sequence: Synthetic oligonucleotide
  Target: LAMA2; (+) strand; PAM type: NNNNGHTT; PAM sequence: GGATGTTT
gttccagacgatcttctcag

SEQ ID NO: 46447 - DNA, 20 bp, Artificial Sequence
  Description of Artificial Sequence: Synthetic oligonucleotide
  Target: LAMA2; (+) strand; PAM type: NNNNGHTT; PAM sequence: GTAGGTTT
gtccccctgggaagcaaagg

SEQ ID NO: 46448 - DNA, 20 bp, Artificial Sequence
  Description of Artificial Sequence: Synthetic oligonucleotide
  Target: LAMA2; (+) strand; PAM type: NNNNGHTT; PAM sequence: CATAGCTT
aagcaaagggtaggtttact

SEQ ID NO: 46449 - DNA, 20 bp, Artificial Sequence
  Description of Artificial Sequence: Synthetic oligonucleotide
  Target: LAMA2; (+) strand; PAM type: NNNNGHTT; PAM sequence: AAAAGATT
atatatttaccacccataag

SEQ ID NO: 46450 - DNA, 20 bp, Artificial Sequence
  Description of Artificial Sequence: Synthetic oligonucleotide
  Target: LAMA2; (+) strand; PAM type: NNNNGHTT; PAM sequence: GCCTGCTT
gtgagtggaggcatcagctg

SEQ ID NO: 46451 - DNA, 20 bp, Artificial Sequence
  Description of Artificial Sequence: Synthetic oligonucleotide
  Target: LAMA2; (+) strand; PAM type: NNNNGHTT; PAM sequence: CAAAGCTT
gcaactggcaccaaatatgc

SEQ ID NO: 46452 - DNA, 20 bp, Artificial Sequence
  Description of Artificial Sequence: Synthetic oligonucleotide
  Target: LAMA2; (+) strand; PAM type: NNNNGHTT; PAM sequence: TGCTGCTT
accaaatatgccaaagctta

SEQ ID NO: 46453 - DNA, 20 bp, Artificial Sequence
  Description of Artificial Sequence: Synthetic oligonucleotide
  Target: LAMA2; (+) strand; PAM type: NNNNGHTT; PAM sequence: ATCTGCTT
cctgtacccactccctgaaa

SEQ ID NO: 46454 - DNA, 20 bp, Artificial Sequence
  Description of Artificial Sequence: Synthetic oligonucleotide
  Target: LAMA2; (+) strand; PAM type: NNNNGHTT; PAM sequence: GTTGGATT
aatctgcttgctctagctgt

SEQ ID NO: 46455 - DNA, 20 bp, Artificial Sequence
  Description of Artificial Sequence: Synthetic oligonucleotide
  Target: LAMA2; (+) strand; PAM type: NNNNGHTT; PAM sequence: AGAGGCTT
caaatgcaagggagcaggta

SEQ ID NO: 46456 - DNA, 20 bp, Artificial Sequence
  Description of Artificial Sequence: Synthetic oligonucleotide
  Target: LAMA2; (+) strand; PAM type: NNNNGHTT; PAM sequence: AGTGGCTT
agcaactcgggacaaatgat

SEQ ID NO: 46457 - DNA, 20 bp, Artificial Sequence
  Description of Artificial Sequence: Synthetic oligonucleotide
  Target: LAMA2; (+) strand; PAM type: NNNNGHTT; PAM sequence: CATGGTTT
agatggctgagggatgagtc

SEQ ID NO: 46458 - DNA, 20 bp, Artificial Sequence
  Description of Artificial Sequence: Synthetic oligonucleotide
  Target: LAMA2; (+) strand; PAM type: NNNNGHTT; PAM sequence: GAAGGATT
ggttttggcatgagcaaagg

SEQ ID NO: 46459 - DNA, 20 bp, Artificial Sequence
  Description of Artificial Sequence: Synthetic oligonucleotide
  Target: LAMA2; (+) strand; PAM type: NNNNGHTT; PAM sequence: AGTTGCTT
atgagcaaagggaaggattg

SEQ ID NO: 46460 - DNA, 20 bp, Artificial Sequence
  Description of Artificial Sequence: Synthetic oligonucleotide
  Target: LAMA2; (+) strand; PAM type: NNNNGHTT; PAM sequence: GCAGGTTT
tggggaagactgtgggcata

SEQ ID NO: 46461 - DNA, 20 bp, Artificial Sequence
  Description of Artificial Sequence: Synthetic oligonucleotide
  Target: LAMA2; (+) strand; PAM type: NNNNGHTT; PAM sequence: TGCTGCTT
tctggaattcagatgagaaa

SEQ ID NO: 46462 - DNA, 20 bp, Artificial Sequence
  Description of Artificial Sequence: Synthetic oligonucleotide
  Target: LAMA2; (+) strand; PAM type: NNNNGHTT; PAM sequence: TAGAGCTT
tagaggtcagagagatgaag

SEQ ID NO: 46463 - DNA, 20 bp, Artificial Sequence
  Description of Artificial Sequence: Synthetic oligonucleotide
  Target: LAMA2; (+) strand; PAM type: NNNNGHTT; PAM sequence: CACAGTTT
aaaaccaaggagcaagcaca

SEQ ID NO: 46464 - DNA, 20 bp, Artificial Sequence
  Description of Artificial Sequence: Synthetic oligonucleotide
  Target: LAMA2; (+) strand; PAM type: NNNNGHTT; PAM sequence: CAGAGATT
agcacacacagttttggaca

SEQ ID NO: 46465 - DNA, 20 bp, Artificial Sequence
  Description of Artificial Sequence: Synthetic oligonucleotide
  Target: LAMA2; (+) strand; PAM type: NNNNGHTT; PAM sequence: GTGTGCTT
aaaataatcttttgggaaat

SEQ ID NO: 46466 - DNA, 20 bp, Artificial Sequence
  Description of Artificial Sequence: Synthetic oligonucleotide
  Target: LAMA2; (+) strand; PAM type: NNNNGHTT; PAM sequence: ATTTGCTT
agggacaaatttctaattct

SEQ ID NO: 46467 - DNA, 20 bp, Artificial Sequence
  Description of Artificial Sequence: Synthetic oligonucleotide
  Target: LAMA2; (+) strand; PAM type: NNNNGHTT; PAM sequence: TGCAGATT
taaaattaataatggtgtat

SEQ ID NO: 46468 - DNA, 20 bp, Artificial Sequence
  Description of Artificial Sequence: Synthetic oligonucleotide
  Target: LAMA2; (+) strand; PAM type: NNNNGHTT; PAM sequence: ACTAGCTT
tttgagggaatgggtatgtt

SEQ ID NO: 46469 - DNA, 20 bp, Artificial Sequence
  Description of Artificial Sequence: Synthetic oligonucleotide
  Target: LAMA2; (+) strand; PAM type: NNNNGHTT; PAM sequence: TGCTGTTT
aaatttataattctgcctgc

SEQ ID NO: 46470 - DNA, 20 bp, Artificial Sequence
  Description of Artificial Sequence: Synthetic oligonucleotide
  Target: LAMA2; (+) strand; PAM type: NNNNGHTT; PAM sequence: TTTTGTTT
aaatgaactacgctgacaaa

SEQ ID NO: 46471 - DNA, 20 bp, Artificial Sequence
  Description of Artificial Sequence: Synthetic oligonucleotide
  Target: LAMA2; (+) strand; PAM type: NNNNGHTT; PAM sequence: TCCAGCTT
tgggccatctaaaatgtcct

SEQ ID NO: 46472 - DNA, 20 bp, Artificial Sequence
  Description of Artificial Sequence: Synthetic oligonucleotide
  Target: LAMA2; (+) strand; PAM type: NNNNGHTT; PAM sequence: TTGTGTTT
cttccagcttgtggagtagg

SEQ ID NO: 46473 - DNA, 20 bp, Artificial Sequence
  Description of Artificial Sequence: Synthetic oligonucleotide
  Target: LAMA2; (+) strand; PAM type: NNNNGHTT; PAM sequence: GTTTGTTT
cagcttgtggagtaggttgt

SEQ ID NO: 46474 - DNA, 20 bp, Artificial Sequence
  Description of Artificial Sequence: Synthetic oligonucleotide
  Target: LAMA2; (+) strand; PAM type: NNNNGHTT; PAM sequence: ATCTGTTT
gtgtttgtttttcaatgaac

SEQ ID NO: 46475 - DNA, 20 bp, Artificial Sequence
  Description of Artificial Sequence: Synthetic oligonucleotide
  Target: LAMA2; (+) strand; PAM type: NNNNGHTT; PAM sequence: TTATGATT
ttgacaaattgaaatgctaa

SEQ ID NO: 46476 - DNA, 20 bp, Artificial Sequence
  Description of Artificial Sequence: Synthetic oligonucleotide
  Target: LAMA2; (+) strand; PAM type: NNNNGHTT; PAM sequence: TTCAGTTT
gttgatgactaactatattt

SEQ ID NO: 46477 - DNA, 20 bp, Artificial Sequence
  Description of Artificial Sequence: Synthetic oligonucleotide
  Target: LAMA2; (+) strand; PAM type: NNNNGHTT; PAM sequence: AGATGTTT
tatatttttcagtttcagcc

SEQ ID NO: 46478 - DNA, 20 bp, Artificial Sequence
  Description of Artificial Sequence: Synthetic oligonucleotide
  Target: LAMA2; (+) strand; PAM type: NNNNGHTT; PAM sequence: CTTAGTTT
ggcatcacgtaagataccac

SEQ ID NO: 46479 - DNA, 20 bp, Artificial Sequence
  Description of Artificial Sequence: Synthetic oligonucleotide
  Target: LAMA2; (+) strand; PAM type: NNNNGHTT; PAM sequence: AAATGTTT
cttagttttacataaaaata

SEQ ID NO: 46480 - DNA, 20 bp, Artificial Sequence
  Description of Artificial Sequence: Synthetic oligonucleotide
  Target: LAMA2; (+) strand; PAM type: NNNNGHTT; PAM sequence: TCTGGCTT
aaaataaaatgtttcttgag

SEQ ID NO: 46481 - DNA, 20 bp, Artificial Sequence
  Description of Artificial Sequence: Synthetic oligonucleotide
  Target: LAMA2; (+) strand; PAM type: NNNNGHTT; PAM sequence: ATAAGTTT
caatacaaattttaaaaaaa

SEQ ID NO: 46482 - DNA, 20 bp, Artificial Sequence
  Description of Artificial Sequence: Synthetic oligonucleotide
  Target: LAMA2; (+) strand; PAM type: NNNNGHTT; PAM sequence: CAGAGTTT
aaaaaataagtttgtaaatt

SEQ ID NO: 46483 - DNA, 20 bp, Artificial Sequence
  Description of Artificial Sequence: Synthetic oligonucleotide
  Target: LAMA2; (+) strand; PAM type: NNNNGHTT; PAM sequence: GATGGATT
cattttgggaggctgaggca

SEQ ID NO: 46484 - DNA, 20 bp, Artificial Sequence
  Description of Artificial Sequence: Synthetic oligonucleotide
  Target: LAMA2; (+) strand; PAM type: NNNNGHTT; PAM sequence: GATTGCTT
ttgggaggctgaggcagatg

SEQ ID NO: 46485 - DNA, 20 bp, Artificial Sequence
  Description of Artificial Sequence: Synthetic oligonucleotide
  Target: LAMA2; (+) strand; PAM type: NNNNGHTT; PAM sequence: AGGAGTTT
cagatggattgcttgagctc

SEQ ID NO: 46486 - DNA, 20 bp, Artificial Sequence
  Description of Artificial Sequence: Synthetic oligonucleotide
  Target: LAMA2; (+) strand; PAM type: NNNNGHTT; PAM sequence: GGAGGATT
cgacttcggaggttgagctg

SEQ ID NO: 46487 - DNA, 20 bp, Artificial Sequence
  Description of Artificial Sequence: Synthetic oligonucleotide
  Target: LAMA2; (+) strand; PAM type: NNNNGHTT; PAM sequence: GATTGCTT
ttcggaggttgagctgggag

SEQ ID NO: 46488 - DNA, 20 bp, Artificial Sequence
  Description of Artificial Sequence: Synthetic oligonucleotide
  Target: LAMA2; (+) strand; PAM type: NNNNGHTT; PAM sequence: GCTAGTTT
agggccataaaacagcatat

SEQ ID NO: 46489 - DNA, 20 bp, Artificial Sequence
  Description of Artificial Sequence: Synthetic oligonucleotide
  Target: LAMA2; (+) strand; PAM type: NNNNGHTT; PAM sequence: GTTGGCTT
aaaacagcatatgctagttt

SEQ ID NO: 46490 - DNA, 20 bp, Artificial Sequence
  Description of Artificial Sequence: Synthetic oligonucleotide
  Target: LAMA2; (+) strand; PAM type: NNNNGHTT; PAM sequence: CTGAGATT
agtaaagcccattcttttaa

SEQ ID NO: 46491 - DNA, 20 bp, Artificial Sequence
  Description of Artificial Sequence: Synthetic oligonucleotide
  Target: LAMA2; (+) strand; PAM type: NNNNGHTT; PAM sequence: ATTTGATT
ttcactcactccttctaaga

SEQ ID NO: 46492 - DNA, 20 bp, Artificial Sequence
  Description of Artificial Sequence: Synthetic oligonucleotide
  Target: LAMA2; (+) strand; PAM type: NNNNGHTT; PAM sequence: GATTGTTT
ctcactccttctaagaattt

SEQ ID NO: 46493 - DNA, 20 bp, Artificial Sequence
  Description of Artificial Sequence: Synthetic oligonucleotide
  Target: LAMA2; (+) strand; PAM type: NNNNGHTT; PAM sequence: CGACGTTT
tatttcatcgtgtatgtgta

SEQ ID NO: 46494 - DNA, 20 bp, Artificial Sequence
  Description of Artificial Sequence: Synthetic oligonucleotide
  Target: LAMA2; (+) strand; PAM type: NNNNGHTT; PAM sequence: GGTTGATT
cattcatctgttgatggaca

SEQ ID NO: 46495 - DNA, 20 bp, Artificial Sequence
  Description of Artificial Sequence: Synthetic oligonucleotide
  Target: LAMA2; (+) strand; PAM type: NNNNGHTT; PAM sequence: AACTGATT
tgcagatatcttttcggcaa

SEQ ID NO: 46496 - DNA, 20 bp, Artificial Sequence
  Description of Artificial Sequence: Synthetic oligonucleotide
  Target: LAMA2; (+) strand; PAM type: NNNNGHTT; PAM sequence: GTGAGATT
ttttgggtaaatacctggaa

SEQ ID NO: 46497 - DNA, 20 bp, Artificial Sequence
  Description of Artificial Sequence: Synthetic oligonucleotide
  Target: LAMA2; (+) strand; PAM type: NNNNGHTT; PAM sequence: TCGTGATT
agtgagattgctagatcgca

SEQ ID NO: 46498 - DNA, 20 bp, Artificial Sequence
  Description of Artificial Sequence: Synthetic oligonucleotide
  Target: LAMA2; (+) strand; PAM type: NNNNGHTT; PAM sequence: AGTTGTTT
cgcatcgtgattctactttt

SEQ ID NO: 46499 - DNA, 20 bp, Artificial Sequence
  Description of Artificial Sequence: Synthetic oligonucleotide
  Target: LAMA2; (+) strand; PAM type: NNNNGHTT; PAM sequence: TGTAGTTT
agttgttttggaaaactcca

SEQ ID NO: 46500 - DNA, 20 bp, Artificial Sequence
  Description of Artificial Sequence: Synthetic oligonucleotide
  Target: LAMA2; (+) strand; PAM type: NNNNGHTT; PAM sequence: CAAGGATT
acattcccaccaacagtgta

SEQ ID NO: 46501 - DNA, 20 bp, Artificial Sequence
  Description of Artificial Sequence: Synthetic oligonucleotide
  Target: LAMA2; (+) strand; PAM type: NNNNGHTT; PAM sequence: TTCTGTTT
ccaccaacagtgtacaagga

SEQ ID NO: 46502 - DNA, 20 bp, Artificial Sequence
  Description of Artificial Sequence: Synthetic oligonucleotide
  Target: LAMA2; (+) strand; PAM type: NNNNGHTT; PAM sequence: TAATGATT
aattttaatttgcatttccc

SEQ ID NO: 46503 - DNA, 20 bp, Artificial Sequence
  Description of Artificial Sequence: Synthetic oligonucleotide
  Target: LAMA2; (+) strand; PAM type: NNNNGHTT; PAM sequence: TAGTGATT
atttgcatttccctaatgat

SEQ ID NO: 46504 - DNA, 20 bp, Artificial Sequence
  Description of Artificial Sequence: Synthetic oligonucleotide
  Target: LAMA2; (+) strand; PAM type: NNNNGHTT; PAM sequence: TTCAGCTT
cttcttttgagcaatgtcta

SEQ ID NO: 46505 - DNA, 20 bp, Artificial Sequence
  Description of Artificial Sequence: Synthetic oligonucleotide
  Target: LAMA2; (+) strand; PAM type: NNNNGHTT; PAM sequence: TATGGCTT
tattaactttttattgaata

SEQ ID NO: 46506 - DNA, 20 bp, Artificial Sequence
  Description of Artificial Sequence: Synthetic oligonucleotide
  Target: LAMA2; (+) strand; PAM type: NNNNGHTT; PAM sequence: CATAGTTT
acaaatattttctccacatt

SEQ ID NO: 46507 - DNA, 20 bp, Artificial Sequence
  Description of Artificial Sequence: Synthetic oligonucleotide
  Target: LAMA2; (+) strand; PAM type: NNNNGHTT; PAM sequence: TGTTGCTT
catagtttgtctcttcacat

SEQ ID NO: 46508 - DNA, 20 bp, Artificial Sequence
  Description of Artificial Sequence: Synthetic oligonucleotide
  Target: LAMA2; (+) strand; PAM type: NNNNGHTT; PAM sequence: AGAAGCTT
tgttgcttcctttgttgtgc

SEQ ID NO: 46509 - DNA, 20 bp, Artificial Sequence
  Description of Artificial Sequence: Synthetic oligonucleotide
  Target: LAMA2; (+) strand; PAM type: NNNNGHTT; PAM sequence: TTTAGTTT
cctttgttgtgcagaagctt

SEQ ID NO: 46510 - DNA, 20 bp, Artificial Sequence
  Description of Artificial Sequence: Synthetic oligonucleotide
  Target: LAMA2; (+) strand; PAM type: NNNNGHTT; PAM sequence: ATTTGTTT
ttttagtttgatatgaccca

SEQ ID NO: 46511 - DNA, 20 bp, Artificial Sequence
  Description of Artificial Sequence: Synthetic oligonucleotide
  Target: LAMA2; (+) strand; PAM type: NNNNGHTT; PAM sequence: GTTTGTTT
agtttgatatgacccaattt

SEQ ID NO: 46512 - DNA, 20 bp, Artificial Sequence
  Description of Artificial Sequence: Synthetic oligonucleotide
  Target: LAMA2; (+) strand; PAM type: NNNNGHTT; PAM sequence: CTGTGTTT
aatgtcatatactttctccc

SEQ ID NO: 46513 - DNA, 20 bp, Artificial Sequence
  Description of Artificial Sequence: Synthetic oligonucleotide
  Target: LAMA2; (+) strand; PAM type: NNNNGHTT; PAM sequence: TAAGGCTT
ggagttgctggccttatact

SEQ ID NO: 46514 - DNA, 20 bp, Artificial Sequence
  Description of Artificial Sequence: Synthetic oligonucleotide
  Target: LAMA2; (+) strand; PAM type: NNNNGHTT; PAM sequence: TTGAGTTT
aggctttaattcatttcgaa

SEQ ID NO: 46515 - DNA, 20 bp, Artificial Sequence
  Description of Artificial Sequence: Synthetic oligonucleotide
  Target: LAMA2; (+) strand; PAM type: NNNNGHTT; PAM sequence: CCTAGTTT
tattcttctgcatgtggata

SEQ ID NO: 46516 - DNA, 20 bp, Artificial Sequence
  Description of Artificial Sequence: Synthetic oligonucleotide
  Target: LAMA2; (+) strand; PAM type: NNNNGHTT; PAM sequence: AGTTGATT
aaattggttgtacatgcata

SEQ ID NO: 46517 - DNA, 20 bp, Artificial Sequence
  Description of Artificial Sequence: Synthetic oligonucleotide
  Target: LAMA2; (+) strand; PAM type: NNNNGHTT; PAM sequence: AATAGCTT
gctattttaattaatactac

SEQ ID NO: 46518 - DNA, 20 bp, Artificial Sequence
  Description of Artificial Sequence: Synthetic oligonucleotide
  Target: LAMA2; (+) strand; PAM type: NNNNGHTT; PAM sequence: TATTGTTT
atactacaatagctttgtag

SEQ ID NO: 46519 - DNA, 20 bp, Artificial Sequence
  Description of Artificial Sequence: Synthetic oligonucleotide
  Target: LAMA2; (+) strand; PAM type: NNNNGHTT; PAM sequence: TTTTGTTT
aagtagtgtgatatctttat

SEQ ID NO: 46520 - DNA, 20 bp, Artificial Sequence
  Description of Artificial Sequence: Synthetic oligonucleotide
  Target: LAMA2; (+) strand; PAM type: NNNNGHTT; PAM sequence: TTTTGTTT
gtgtgatatctttatttttg

SEQ ID NO: 46521 - DNA, 20 bp, Artificial Sequence
  Description of Artificial Sequence: Synthetic oligonucleotide
  Target: LAMA2; (+) strand; PAM type: NNNNGHTT; PAM sequence: TGATGATT
atttttgttttgtttgctca

SEQ ID NO: 46522 - DNA, 20 bp, Artificial Sequence
  Description of Artificial Sequence: Synthetic oligonucleotide
  Target: LAMA2; (+) strand; PAM type: NNNNGHTT; PAM sequence: CTTGGTTT
tcatgatgattttgactgtt

SEQ ID NO: 46523 - DNA, 20 bp, Artificial Sequence
  Description of Artificial Sequence: Synthetic oligonucleotide
  Target: LAMA2; (+) strand; PAM type: NNNNGHTT; PAM sequence: GTGCGATT
tcttggtttgttgtggttcc

SEQ ID NO: 46524 - DNA, 20 bp, Artificial Sequence
  Description of Artificial Sequence: Synthetic oligonucleotide
  Target: LAMA2; (+) strand; PAM type: NNNNGHTT; PAM sequence: AATTGTTT
gtggttccgtgcgattttaa

SEQ ID NO: 46525 - DNA, 20 bp, Artificial Sequence
  Description of Artificial Sequence: Synthetic oligonucleotide
  Target: LAMA2; (+) strand; PAM type: NNNNGHTT; PAM sequence: TGTAGATT
atagtggttgcactgaaatc

SEQ ID NO: 46526 - DNA, 20 bp, Artificial Sequence
  Description of Artificial Sequence: Synthetic oligonucleotide
  Target: LAMA2; (+) strand; PAM type: NNNNGHTT; PAM sequence: GATTGCTT
tggttgcactgaaatctgta

SEQ ID NO: 46527 - DNA, 20 bp, Artificial Sequence
  Description of Artificial Sequence: Synthetic oligonucleotide
  Target: LAMA2; (+) strand; PAM type: NNNNGHTT; PAM sequence: TACAGTTT
aatttctttcatcaacattt

SEQ ID NO: 46528 - DNA, 20 bp, Artificial Sequence
  Description of Artificial Sequence: Synthetic oligonucleotide
  Target: LAMA2; (+) strand; PAM type: NNNNGHTT; PAM sequence: ATGGGATT
cttttttatagctattgtaa

SEQ ID NO: 46529 - DNA, 20 bp, Artificial Sequence
  Description of Artificial Sequence: Synthetic oligonucleotide
  Target: LAMA2; (+) strand; PAM type: NNNNGHTT; PAM sequence: GAATGATT
agtaaaatcttttccatggt

SEQ ID NO: 46530 - DNA, 20 bp, Artificial Sequence
  Description of Artificial Sequence: Synthetic oligonucleotide
  Target: LAMA2; (+) strand; PAM type: NNNNGHTT; PAM sequence: CAAAGATT
tattagtcttaagtgaaata

SEQ ID NO: 46531 - DNA, 20 bp, Artificial Sequence
  Description of Artificial Sequence: Synthetic oligonucleotide
  Target: LAMA2; (+) strand; PAM type: NNNNGHTT; PAM sequence: ATTTGATT
gtcttaagtgaaatacaaag

SEQ ID NO: 46532 - DNA, 20 bp, Artificial Sequence
  Description of Artificial Sequence: Synthetic oligonucleotide
  Target: LAMA2; (+) strand; PAM type: NNNNGHTT; PAM sequence: GCCAGTTT
taagtaaactatccttggct

SEQ ID NO: 46533 - DNA, 20 bp, Artificial Sequence
  Description of Artificial Sequence: Synthetic oligonucleotide
  Target: LAMA2; (+) strand; PAM type: NNNNGHTT; PAM sequence: AAAAGTTT
tggctgccagtttctttctt

SEQ ID NO: 46534 - DNA, 20 bp, Artificial Sequence
  Description of Artificial Sequence: Synthetic oligonucleotide
  Target: LAMA2; (+) strand; PAM type: NNNNGHTT; PAM sequence: ATTTGTTT
atttccttttccccaataat

SEQ ID NO: 46535 - DNA, 20 bp, Artificial Sequence
  Description of Artificial Sequence: Synthetic oligonucleotide
  Target: LAMA2; (+) strand; PAM type: NNNNGHTT; PAM sequence: GAATGCTT
atttgaatttataaactctg

SEQ ID NO: 46536 - DNA, 20 bp, Artificial Sequence
  Description of Artificial Sequence: Synthetic oligonucleotide
  Target: LAMA2; (+) strand; PAM type: NNNNGHTT; PAM sequence: ATGTGCTT
cagcattgctggtagtgcac

SEQ ID NO: 46537 - DNA, 20 bp, Artificial Sequence
  Description of Artificial Sequence: Synthetic oligonucleotide
  Target: LAMA2; (+) strand; PAM type: NNNNGHTT; PAM sequence: TACAGATT
tgcacatgtgcttctgtaca

SEQ ID NO: 46538 - DNA, 20 bp, Artificial Sequence
  Description of Artificial Sequence: Synthetic oligonucleotide
  Target: LAMA2; (+) strand; PAM type: NNNNGHTT; PAM sequence: TGATGTTT
cagattgtacacattgagga

SEQ ID NO: 46539 - DNA, 20 bp, Artificial Sequence
  Description of Artificial Sequence: Synthetic oligonucleotide
  Target: LAMA2; (+) strand; PAM type: NNNNGHTT; PAM sequence: CGGAGCTT
aatggcgtgaacccgggagg

SEQ ID NO: 46540 - DNA, 20 bp, Artificial Sequence
  Description of Artificial Sequence: Synthetic oligonucleotide
  Target: LAMA2; (+) strand; PAM type: NNNNGHTT; PAM sequence: GCGAGATT
actccagcctgggcgacaga

SEQ ID NO: 46541 - DNA, 20 bp, Artificial Sequence
  Description of Artificial Sequence: Synthetic oligonucleotide
  Target: LAMA2; (+) strand; PAM type: NNNNGHTT; PAM sequence: AAGAGCTT
agcatatggtattccagtga

SEQ ID NO: 46542 - DNA, 20 bp, Artificial Sequence
  Description of Artificial Sequence: Synthetic oligonucleotide
  Target: LAMA2; (+) strand; PAM type: NNNNGHTT; PAM sequence: AAAGGATT
gcttaattataatagagcag

SEQ ID NO: 46543 - DNA, 20 bp, Artificial Sequence
  Description of Artificial Sequence: Synthetic oligonucleotide
  Target: LAMA2; (+) strand; PAM type: NNNNGHTT; PAM sequence: GGTGGATT
ggattagaaacagaaaagaa

SEQ ID NO: 46544 - DNA, 20 bp, Artificial Sequence
  Description of Artificial Sequence: Synthetic oligonucleotide
  Target: LAMA2; (+) strand; PAM type: NNNNGHTT; PAM sequence: ATCAGATT
aaagaagggactgaatattg

SEQ ID NO: 46545 - DNA, 20 bp, Artificial Sequence
  Description of Artificial Sequence: Synthetic oligonucleotide
  Target: LAMA2; (+) strand; PAM type: NNNNGHTT; PAM sequence: CTGAGATT
tactagcactagtcatagga

SEQ ID NO: 46546 - DNA, 20 bp, Artificial Sequence
  Description of Artificial Sequence: Synthetic oligonucleotide
  Target: LAMA2; (+) strand; PAM type: NNNNGHTT; PAM sequence: AGCTGATT
tctctccacataagcaatag

SEQ ID NO: 46547 - DNA, 20 bp, Artificial Sequence
  Description of Artificial Sequence: Synthetic oligonucleotide
  Target: LAMA2; (+) strand; PAM type: NNNNGHTT; PAM sequence: ACAAGATT
gctgattgggctgcctgtaa

SEQ ID NO: 46548 - DNA, 20 bp, Artificial Sequence
  Description of Artificial Sequence: Synthetic oligonucleotide
  Target: LAMA2; (+) strand; PAM type: NNNNGHTT; PAM sequence: AGTAGATT
gagaaagggtaatttttaga

SEQ ID NO: 46549 - DNA, 20 bp, Artificial Sequence
  Description of Artificial Sequence: Synthetic oligonucleotide
  Target: LAMA2; (+) strand; PAM type: NNNNGHTT; PAM sequence: TAATGCTT
acatcaaataagcataaaaa

SEQ ID NO: 46550 - DNA, 20 bp, Artificial Sequence
  Description of Artificial Sequence: Synthetic oligonucleotide
  Target: LAMA2; (+) strand; PAM type: NNNNGHTT; PAM sequence: AAGAGATT
ttttataaactatctctata

SEQ ID NO: 46551 - DNA, 20 bp, Artificial Sequence
  Description of Artificial Sequence: Synthetic oligonucleotide
  Target: LAMA2; (+) strand; PAM type: NNNNGHTT; PAM sequence: GTTAGCTT
atctctataaagagattaat

SEQ ID NO: 46552 - DNA, 20 bp, Artificial Sequence
  Description of Artificial Sequence: Synthetic oligonucleotide
  Target: LAMA2; (+) strand; PAM type: NNNNGHTT; PAM sequence: TCTTGTTT
taaagagattaatgttagct

SEQ ID NO: 46553 - DNA, 20 bp, Artificial Sequence
  Description of Artificial Sequence: Synthetic oligonucleotide
  Target: LAMA2; (+) strand; PAM type: NNNNGHTT; PAM sequence: AACAGTTT
tgggagggaaggataaatga

SEQ ID NO: 46554 - DNA, 20 bp, Artificial Sequence
  Description of Artificial Sequence: Synthetic oligonucleotide
  Target: LAMA2; (+) strand; PAM type: NNNNGHTT; PAM sequence: GCCAGTTT
gttgccatctctcattgtga

SEQ ID NO: 46555 - DNA, 20 bp, Artificial Sequence
  Description of Artificial Sequence: Synthetic oligonucleotide
  Target: LAMA2; (+) strand; PAM type: NNNNGHTT; PAM sequence: CCCTGATT
ttacaaataattgaaaacaa

SEQ ID NO: 46556 - DNA, 20 bp, Artificial Sequence
  Description of Artificial Sequence: Synthetic oligonucleotide
  Target: LAMA2; (+) strand; PAM type: NNNNGHTT; PAM sequence: GGATGATT
gcaattcagccctggcccct

SEQ ID NO: 46557 - DNA, 20 bp, Artificial Sequence
  Description of Artificial Sequence: Synthetic oligonucleotide
  Target: LAMA2; (+) strand; PAM type: NNNNGHTT; PAM sequence: GATTGATT
ttcagccctggcccctggat

SEQ ID NO: 46558 - DNA, 20 bp, Artificial Sequence
  Description of Artificial Sequence: Synthetic oligonucleotide
  Target: LAMA2; (+) strand; PAM type: NNNNGHTT; PAM sequence: AAATGTTT
tggcccctggatgattgatt

SEQ ID NO: 46559 - DNA, 20 bp, Artificial Sequence
  Description of Artificial Sequence: Synthetic oligonucleotide
  Target: LAMA2; (+) strand; PAM type: NNNNGHTT; PAM sequence: CTGTGTTT
ctttttacctttcattcatg

SEQ ID NO: 46560 - DNA, 20 bp, Artificial Sequence
  Description of Artificial Sequence: Synthetic oligonucleotide
  Target: LAMA2; (+) strand; PAM type: NNNNGHTT; PAM sequence: AGCTGTTT
atgatcagtgacttctcatc

SEQ ID NO: 46561 - DNA, 20 bp, Artificial Sequence
  Description of Artificial Sequence: Synthetic oligonucleotide
  Target: LAMA2; (+) strand; PAM type: NNNNGHTT; PAM sequence: CTGAGTTT
acccgacagaaaataaggtc

SEQ ID NO: 46562 - DNA, 20 bp, Artificial Sequence
  Description of Artificial Sequence: Synthetic oligonucleotide
  Target: LAMA2; (+) strand; PAM type: NNNNGHTT; PAM sequence: TTTAGCTT
cagaaaataaggtcctgagt

SEQ ID NO: 46563 - DNA, 20 bp, Artificial Sequence
  Description of Artificial Sequence: Synthetic oligonucleotide
  Target: LAMA2; (+) strand; PAM type: NNNNGHTT; PAM sequence: CTGAGCTT
accatcaacacaagctgtat

SEQ ID NO: 46564 - DNA, 20 bp, Artificial Sequence
  Description of Artificial Sequence: Synthetic oligonucleotide
  Target: LAMA2; (+) strand; PAM type: NNNNGHTT; PAM sequence: GTGTGCTT
agcaaaggaacaagaacact

SEQ ID NO: 46565 - DNA, 20 bp, Artificial Sequence
  Description of Artificial Sequence: Synthetic oligonucleotide
  Target: LAMA2; (+) strand; PAM type: NNNNGHTT; PAM sequence: CTCTGTTT
aggagaggtccctttgtgta

SEQ ID NO: 46566 - DNA, 20 bp, Artificial Sequence
  Description of Artificial Sequence: Synthetic oligonucleotide
  Target: LAMA2; (+) strand; PAM type: NNNNGHTT; PAM sequence: AGATGATT
atcctacaaaactagtaaat

SEQ ID NO: 46567 - DNA, 20 bp, Artificial Sequence
  Description of Artificial Sequence: Synthetic oligonucleotide
  Target: LAMA2; (+) strand; PAM type: NNNNGHTT; PAM sequence: TACTGTTT
taggaacctaaaccttgggg

SEQ ID NO: 46568 - DNA, 20 bp, Artificial Sequence
  Description of Artificial Sequence: Synthetic oligonucleotide
  Target: LAMA2; (+) strand; PAM type: NNNNGHTT; PAM sequence: TTCTGTTT
atcccttctccatcacgttc

SEQ ID NO: 46569 - DNA, 20 bp, Artificial Sequence
  Description of Artificial Sequence: Synthetic oligonucleotide
  Target: LAMA2; (+) strand; PAM type: NNNNGHTT; PAM sequence: TCCCGCTT
acgttcttctgtttttcatt

SEQ ID NO: 46570 - DNA, 20 bp, Artificial Sequence
  Description of Artificial Sequence: Synthetic oligonucleotide
  Target: LAMA2; (+) strand; PAM type: NNNNGHTT; PAM sequence: AGGGGATT
gcacctcagcacagatctgg

SEQ ID NO: 46571 - DNA, 20 bp, Artificial Sequence
  Description of Artificial Sequence: Synthetic oligonucleotide
  Target: LAMA2; (+) strand; PAM type: NNNNGHTT; PAM sequence: CGGGGTTT
ttttgtatttttagtagaga

SEQ ID NO: 46572 - DNA, 20 bp, Artificial Sequence
  Description of Artificial Sequence: Synthetic oligonucleotide
  Target: LAMA2; (+) strand; PAM type: NNNNGHTT; PAM sequence: CTGGGATT
cgcctcggcctcccaaagtg

SEQ ID NO: 46573 - DNA, 20 bp, Artificial Sequence
  Description of Artificial Sequence: Synthetic oligonucleotide
  Target: LAMA2; (+) strand; PAM type: NNNNGHTT; PAM sequence: AATTGCTT
cagcctctgaccttactctt

SEQ ID NO: 46574 - DNA, 20 bp, Artificial Sequence
  Description of Artificial Sequence: Synthetic oligonucleotide
  Target: LAMA2; (+) strand; PAM type: NNNNGHTT; PAM sequence: TCCTGCTT
aatgcaaacccaagaacatg

SEQ ID NO: 46575 - DNA, 20 bp, Artificial Sequence
  Description of Artificial Sequence: Synthetic oligonucleotide
  Target: LAMA2; (+) strand; PAM type: NNNNGHTT; PAM sequence: AATAGTTT
caagggtaatggcaactaac

SEQ ID NO: 46576 - DNA, 20 bp, Artificial Sequence
  Description of Artificial Sequence: Synthetic oligonucleotide
  Target: LAMA2; (+) strand; PAM type: NNNNGHTT; PAM sequence: GAGAGATT
ttagagaaaactgaggtata

SEQ ID NO: 46577 - DNA, 20 bp, Artificial Sequence
  Description of Artificial Sequence: Synthetic oligonucleotide
  Target: LAMA2; (+) strand; PAM type: NNNNGHTT; PAM sequence: TCAGGTTT
ttacagttgtacacatagac

SEQ ID NO: 46578 - DNA, 20 bp, Artificial Sequence
  Description of Artificial Sequence: Synthetic oligonucleotide
  Target: LAMA2; (+) strand; PAM type: NNNNGHTT; PAM sequence: TACAGTTT
gagaaaagatcagagaggcc

SEQ ID NO: 46579 - DNA, 20 bp, Artificial Sequence
  Description of Artificial Sequence: Synthetic oligonucleotide
  Target: LAMA2; (+) strand; PAM type: NNNNGHTT; PAM sequence: ACATGATT
tgtatttagagtaattgaac

SEQ ID NO: 46580 - DNA, 20 bp, Artificial Sequence
  Description of Artificial Sequence: Synthetic oligonucleotide
  Target: LAMA2; (+) strand; PAM type: NNNNGHTT; PAM sequence: TCCAGTTT
tggtgacagtcactaggaac

SEQ ID NO: 46581 - DNA, 20 bp, Artificial Sequence
  Description of Artificial Sequence: Synthetic oligonucleotide
  Target: LAMA2; (+) strand; PAM type: NNNNGHTT; PAM sequence: AAGAGCTT
caatggaatgctcagtcttg

SEQ ID NO: 46582 - DNA, 20 bp, Artificial Sequence
  Description of Artificial Sequence: Synthetic oligonucleotide
  Target: LAMA2; (+) strand; PAM type: NNNNGHTT; PAM sequence: CTCTGCTT
cagtcttgaagagcttgtgt

SEQ ID NO: 46583 - DNA, 20 bp, Artificial Sequence
  Description of Artificial Sequence: Synthetic oligonucleotide
  Target: LAMA2; (+) strand; PAM type: NNNNGHTT; PAM sequence: GTATGATT
ttaaactcctgtatgcatta

SEQ ID NO: 46584 - DNA, 20 bp, Artificial Sequence
  Description of Artificial Sequence: Synthetic oligonucleotide
  Target: LAMA2; (+) strand; PAM type: NNNNGHTT; PAM sequence: TTGAGTTT
aatttaaagtctctgacatc

SEQ ID NO: 46585 - DNA, 20 bp, Artificial Sequence
  Description of Artificial Sequence: Synthetic oligonucleotide
  Target: LAMA2; (+) strand; PAM type: NNNNGHTT; PAM sequence: TTAAGCTT
agtctctgacatcttgagtt

SEQ ID NO: 46586 - DNA, 20 bp, Artificial Sequence
  Description of Artificial Sequence: Synthetic oligonucleotide
  Target: LAMA2; (+) strand; PAM type: NNNNGHTT; PAM sequence: TGCTGCTT
tgctagtagctatcctgaaa

SEQ ID NO: 46587 - DNA, 20 bp, Artificial Sequence
  Description of Artificial Sequence: Synthetic oligonucleotide
  Target: LAMA2; (+) strand; PAM type: NNNNGHTT; PAM sequence: TACAGCTT
aatccaaattaatgtattta

SEQ ID NO: 46588 - DNA, 20 bp, Artificial Sequence
  Description of Artificial Sequence: Synthetic oligonucleotide
  Target: LAMA2; (+) strand; PAM type: NNNNGHTT; PAM sequence: CTAGGTTT
tttctcttttaagttcctgt

SEQ ID NO: 46589 - DNA, 20 bp, Artificial Sequence
  Description of Artificial Sequence: Synthetic oligonucleotide
  Target: LAMA2; (+) strand; PAM type: NNNNGHTT; PAM sequence: CCAAGATT
ctgtatttagacctcctgct

SEQ ID NO: 46590 - DNA, 20 bp, Artificial Sequence
  Description of Artificial Sequence: Synthetic oligonucleotide
  Target: LAMA2; (+) strand; PAM type: NNNNGHTT; PAM sequence: TGTTGCTT
ctgaaaacaaaacaggaaaa

SEQ ID NO: 46591 - DNA, 20 bp, Artificial Sequence
  Description of Artificial Sequence: Synthetic oligonucleotide
  Target: LAMA2; (+) strand; PAM type: NNNNGHTT; PAM sequence: TTAAGTTT
acaaaacaggaaaatgttgc

SEQ ID NO: 46592 - DNA, 20 bp, Artificial Sequence
  Description of Artificial Sequence: Synthetic oligonucleotide
  Target: LAMA2; (+) strand; PAM type: NNNNGHTT; PAM sequence: TACTGATT
tgttatctgactttcaagtg

SEQ ID NO: 46593 - DNA, 20 bp, Artificial Sequence
  Description of Artificial Sequence: Synthetic oligonucleotide
  Target: LAMA2; (+) strand; PAM type: NNNNGHTT; PAM sequence: CTTTGTTT
ggtcattgtactctcagtta

SEQ ID NO: 46594 - DNA, 20 bp, Artificial Sequence
  Description of Artificial Sequence: Synthetic oligonucleotide
  Target: LAMA2; (+) strand; PAM type: NNNNGHTT; PAM sequence: TGAGGTTT
ttcttcatctccctataatt

SEQ ID NO: 46595 - DNA, 20 bp, Artificial Sequence
  Description of Artificial Sequence: Synthetic oligonucleotide
  Target: LAMA2; (+) strand; PAM type: NNNNGHTT; PAM sequence: AATAGCTT
cgtatttttgaaaactaggg

SEQ ID NO: 46596 - DNA, 20 bp, Artificial Sequence
  Description of Artificial Sequence: Synthetic oligonucleotide
  Target: LAMA2; (+) strand; PAM type: NNNNGHTT; PAM sequence: TAATGCTT
gttggttcttttccggagaa

SEQ ID NO: 46597 - DNA, 20 bp, Artificial Sequence
  Description of Artificial Sequence: Synthetic oligonucleotide
  Target: LAMA2; (+) strand; PAM type: NNNNGHTT; PAM sequence: CAGGGATT
gtccccaacctttttggtac

SEQ ID NO: 46598 - DNA, 20 bp, Artificial Sequence
  Description of Artificial Sequence: Synthetic oligonucleotide
  Target: LAMA2; (+) strand; PAM type: NNNNGHTT; PAM sequence: ATTGGTTT
caacctttttggtaccaggg

SEQ ID NO: 46599 - DNA, 20 bp, Artificial Sequence
  Description of Artificial Sequence: Synthetic oligonucleotide
  Target: LAMA2; (+) strand; PAM type: NNNNGHTT; PAM sequence: GACAGTTT
cagggattggttttgtggaa

SEQ ID NO: 46600 - DNA, 20 bp, Artificial Sequence
  Description of Artificial Sequence: Synthetic oligonucleotide
  Target: LAMA2; (+) strand; PAM type: NNNNGHTT; PAM sequence: ATGGGTTT
aggggggatggggagtgggg

SEQ ID NO: 46601 - DNA, 20 bp, Artificial Sequence
  Description of Artificial Sequence: Synthetic oligonucleotide
  Target: LAMA2; (+) strand; PAM type: NNNNGHTT; PAM sequence: AACTGTTT
ggggatgggtttccagatga

SEQ ID NO: 46602 - DNA, 20 bp, Artificial Sequence
  Description of Artificial Sequence: Synthetic oligonucleotide
  Target: LAMA2; (+) strand; PAM type: NNNNGHTT; PAM sequence: CACAGTTT
caagctaggtccctcacatg

SEQ ID NO: 46603 - DNA, 20 bp, Artificial Sequence
  Description of Artificial Sequence: Synthetic oligonucleotide
  Target: LAMA2; (+) strand; PAM type: NNNNGHTT; PAM sequence: TAGGGCTT
ctcacatgcacagtttacaa

SEQ ID NO: 46604 - DNA, 20 bp, Artificial Sequence
  Description of Artificial Sequence: Synthetic oligonucleotide
  Target: LAMA2; (+) strand; PAM type: NNNNGHTT; PAM sequence: CCCTGCTT
atggcccagcagttggggac

SEQ ID NO: 46605 - DNA, 20 bp, Artificial Sequence
  Description of Artificial Sequence: Synthetic oligonucleotide
  Target: LAMA2; (+) strand; PAM type: NNNNGHTT; PAM sequence: GCATGTTT
ctttagccctcaactcttag

SEQ ID NO: 46606 - DNA, 20 bp, Artificial Sequence
  Description of Artificial Sequence: Synthetic oligonucleotide
  Target: LAMA2; (+) strand; PAM type: NNNNGHTT; PAM sequence: TTCTGATT
aactcttaggcatgtttcag

SEQ ID NO: 46607 - DNA, 20 bp, Artificial Sequence
  Description of Artificial Sequence: Synthetic oligonucleotide
  Target: LAMA2; (+) strand; PAM type: NNNNGHTT; PAM sequence: TAGAGCTT
agttctgattttggtcagca

SEQ ID NO: 46608 - DNA, 20 bp, Artificial Sequence
  Description of Artificial Sequence: Synthetic oligonucleotide
  Target: LAMA2; (+) strand; PAM type: NNNNGHTT; PAM sequence: TTTGGCTT
tattgggtctggaactatcc

SEQ ID NO: 46609 - DNA, 20 bp, Artificial Sequence
  Description of Artificial Sequence: Synthetic oligonucleotide
  Target: LAMA2; (+) strand; PAM type: NNNNGHTT; PAM sequence: ACAGGATT
aaatactgggtctgtcatag

SEQ ID NO: 46610 - DNA, 20 bp, Artificial Sequence
  Description of Artificial Sequence: Synthetic oligonucleotide
  Target: LAMA2; (+) strand; PAM type: NNNNGHTT; PAM sequence: GTGAGCTT
ggaatagactctcactagtg

SEQ ID NO: 46611 - DNA, 20 bp, Artificial Sequence
  Description of Artificial Sequence: Synthetic oligonucleotide
  Target: LAMA2; (+) strand; PAM type: NNNNGHTT; PAM sequence: AAATGCTT
ccagttctttttcatccaac

SEQ ID NO: 46612 - DNA, 20 bp, Artificial Sequence
  Description of Artificial Sequence: Synthetic oligonucleotide
  Target: LAMA2; (+) strand; PAM type: NNNNGHTT; PAM sequence: GTAAGTTT
gcaagagtgtctcatatcca

SEQ ID NO: 46613 - DNA, 20 bp, Artificial Sequence
  Description of Artificial Sequence: Synthetic oligonucleotide
  Target: LAMA2; (+) strand; PAM type: NNNNGHTT; PAM sequence: TATTGTTT
aagtttgcaagaataactac

SEQ ID NO: 46614 - DNA, 20 bp, Artificial Sequence
  Description of Artificial Sequence: Synthetic oligonucleotide
  Target: LAMA2; (+) strand; PAM type: NNNNGHTT; PAM sequence: TAATGATT
atgaggttggaatacatgac

SEQ ID NO: 46615 - DNA, 20 bp, Artificial Sequence
  Description of Artificial Sequence: Synthetic oligonucleotide
  Target: LAMA2; (+) strand; PAM type: NNNNGHTT; PAM sequence: TGGTGTTT
agagtgagagaacttccttc

SEQ ID NO: 46616 - DNA, 20 bp, Artificial Sequence
  Description of Artificial Sequence: Synthetic oligonucleotide
  Target: LAMA2; (+) strand; PAM type: NNNNGHTT; PAM sequence: CTTAGATT
cttgctctgaagctactcct

SEQ ID NO: 46617 - DNA, 20 bp, Artificial Sequence
  Description of Artificial Sequence: Synthetic oligonucleotide
  Target: LAMA2; (+) strand; PAM type: NNNNGHTT; PAM sequence: CTTAGCTT
gctgtgtattcctatatagt

SEQ ID NO: 46618 - DNA, 20 bp, Artificial Sequence
  Description of Artificial Sequence: Synthetic oligonucleotide
  Target: LAMA2; (+) strand; PAM type: NNNNGHTT; PAM sequence: CAAAGATT
atagtcttagcttaacagca

SEQ ID NO: 46619 - DNA, 20 bp, Artificial Sequence
  Description of Artificial Sequence: Synthetic oligonucleotide
  Target: LAMA2; (+) strand; PAM type: NNNNGHTT; PAM sequence: AAGAGATT
tgtaaatgagaagctcccaa

SEQ ID NO: 46620 - DNA, 20 bp, Artificial Sequence
  Description of Artificial Sequence: Synthetic oligonucleotide
  Target: LAMA2; (+) strand; PAM type: NNNNGHTT; PAM sequence: TTTTGTTT
aatttgcatttagtaatttt

SEQ ID NO: 46621 - DNA, 20 bp, Artificial Sequence
  Description of Artificial Sequence: Synthetic oligonucleotide
  Target: LAMA2; (+) strand; PAM type: NNNNGHTT; PAM sequence: TGTGGATT
caggatctttcactcaattc

SEQ ID NO: 46622 - DNA, 20 bp, Artificial Sequence
  Description of Artificial Sequence: Synthetic oligonucleotide
  Target: LAMA2; (+) strand; PAM type: NNNNGHTT; PAM sequence: GCATGTTT
attacaggtcacccacctgg

SEQ ID NO: 46623 - DNA, 20 bp, Artificial Sequence
  Description of Artificial Sequence: Synthetic oligonucleotide
  Target: LAMA2; (+) strand; PAM type: NNNNGHTT; PAM sequence: AGGGGCTT
acctaagctcatcttgagta

SEQ ID NO: 46624 - DNA, 20 bp, Artificial Sequence
  Description of Artificial Sequence: Synthetic oligonucleotide
  Target: LAMA2; (+) strand; PAM type: NNNNGHTT; PAM sequence: AAATGCTT
tgagtaaggggcttagaagt

SEQ ID NO: 46625 - DNA, 20 bp, Artificial Sequence
  Description of Artificial Sequence: Synthetic oligonucleotide
  Target: LAMA2; (+) strand; PAM type: NNNNGHTT; PAM sequence: GGTTGCTT
ttagaagtaaatgctttgtt

SEQ ID NO: 46626 - DNA, 20 bp, Artificial Sequence
  Description of Artificial Sequence: Synthetic oligonucleotide
  Target: LAMA2; (+) strand; PAM type: NNNNGHTT; PAM sequence: AGAGGCTT
tacaaagcaggacgaccacc

SEQ ID NO: 46627 - DNA, 20 bp, Artificial Sequence
  Description of Artificial Sequence: Synthetic oligonucleotide
  Target: LAMA2; (+) strand; PAM type: NNNNGHTT; PAM sequence: TAAGGCTT
attggaactcctaaagcagc

SEQ ID NO: 46628 - DNA, 20 bp, Artificial Sequence
  Description of Artificial Sequence: Synthetic oligonucleotide
  Target: LAMA2; (+) strand; PAM type: NNNNGHTT; PAM sequence: CTTTGCTT
aactcctaaagcagctaagg

SEQ ID NO: 46629 - DNA, 20 bp, Artificial Sequence
  Description of Artificial Sequence: Synthetic oligonucleotide
  Target: LAMA2; (+) strand; PAM type: NNNNGHTT; PAM sequence: TGGTGTTT
ttttaaaaagttagttcttc

SEQ ID NO: 46630 - DNA, 20 bp, Artificial Sequence
  Description of Artificial Sequence: Synthetic oligonucleotide
  Target: LAMA2; (+) strand; PAM type: NNNNGHTT; PAM sequence: ACTAGTTT
aaagctgcacaaacctttta

SEQ ID NO: 46631 - DNA, 20 bp, Artificial Sequence
  Description of Artificial Sequence: Synthetic oligonucleotide
  Target: LAMA2; (+) strand; PAM type: NNNNGHTT; PAM sequence: AACTGATT
agcaaataatctttaaagaa

SEQ ID NO: 46632 - DNA, 20 bp, Artificial Sequence
  Description of Artificial Sequence: Synthetic oligonucleotide
  Target: LAMA2; (+) strand; PAM type: NNNNGHTT; PAM sequence: ATATGTTT
actgttgtgttgactgaaga

SEQ ID NO: 46633 - DNA, 20 bp, Artificial Sequence
  Description of Artificial Sequence: Synthetic oligonucleotide
  Target: LAMA2; (+) strand; PAM type: NNNNGHTT; PAM sequence: CAAAGCTT
tttaaatattttgtggaagg

SEQ ID NO: 46634 - DNA, 20 bp, Artificial Sequence
  Description of Artificial Sequence: Synthetic oligonucleotide
  Target: LAMA2; (+) strand; PAM type: NNNNGHTT; PAM sequence: TAATGATT
ggacaattggaatcaagcag

SEQ ID NO: 46635 - DNA, 20 bp, Artificial Sequence
  Description of Artificial Sequence: Synthetic oligonucleotide
  Target: LAMA2; (+) strand; PAM type: NNNNGHTT; PAM sequence: TACAGCTT
ggaatcaagcagtaatgatt

SEQ ID NO: 46636 - DNA, 20 bp, Artificial Sequence
  Description of Artificial Sequence: Synthetic oligonucleotide
  Target: LAMA2; (+) strand; PAM type: NNNNGHTT; PAM sequence: CTAAGCTT
gaaggaaagacctgttaagt

SEQ ID NO: 46637 - DNA, 20 bp, Artificial Sequence
  Description of Artificial Sequence: Synthetic oligonucleotide
  Target: LAMA2; (+) strand; PAM type: NNNNGHTT; PAM sequence: CATTGATT
tagtatatttaataatcctt

SEQ ID NO: 46638 - DNA, 20 bp, Artificial Sequence
  Description of Artificial Sequence: Synthetic oligonucleotide
  Target: LAMA2; (+) strand; PAM type: NNNNGHTT; PAM sequence: AAATGTTT
acatgcaatgcacaaattgt

SEQ ID NO: 46639 - DNA, 20 bp, Artificial Sequence
  Description of Artificial Sequence: Synthetic oligonucleotide
  Target: LAMA2; (+) strand; PAM type: NNNNGHTT; PAM sequence: GTTTGATT
gcaatgcacaaattgtaaat

SEQ ID NO: 46640 - DNA, 20 bp, Artificial Sequence
  Description of Artificial Sequence: Synthetic oligonucleotide
  Target: LAMA2; (+) strand; PAM type: NNNNGHTT; PAM sequence: GAGGGTTT
aaatcattatgctaaacact

SEQ ID NO: 46641 - DNA, 20 bp, Artificial Sequence
  Description of Artificial Sequence: Synthetic oligonucleotide
  Target: LAMA2; (+) strand; PAM type: NNNNGHTT; PAM sequence: GGGAGTTT
ataaaaatagggggagtcaa

SEQ ID NO: 46642 - DNA, 20 bp, Artificial Sequence
  Description of Artificial Sequence: Synthetic oligonucleotide
  Target: LAMA2; (+) strand; PAM type: NNNNGHTT; PAM sequence: CTGAGATT
ggatggaattggcaacacag

SEQ ID NO: 46643 - DNA, 20 bp, Artificial Sequence
  Description of Artificial Sequence: Synthetic oligonucleotide
  Target: LAMA2; (+) strand; PAM type: NNNNGHTT; PAM sequence: AGGTGTTT
aagcagtgagaacacagaaa

SEQ ID NO: 46644 - DNA, 20 bp, Artificial Sequence
  Description of Artificial Sequence: Synthetic oligonucleotide
  Target: LAMA2; (+) strand; PAM type: NNNNGHTT; PAM sequence: AAATGATT
tgacacagaaaggaaagtaa

SEQ ID NO: 46645 - DNA, 20 bp, Artificial Sequence
  Description of Artificial Sequence: Synthetic oligonucleotide
  Target: LAMA2; (+) strand; PAM type: NNNNGHTT; PAM sequence: AACAGATT
aattggaaataatgcctgga

SEQ ID NO: 46646 - DNA, 20 bp, Artificial Sequence
  Description of Artificial Sequence: Synthetic oligonucleotide
  Target: LAMA2; (+) strand; PAM type: NNNNGHTT; PAM sequence: GGAAGATT
gtatgtgttcattaaggcca

SEQ ID NO: 46647 - DNA, 20 bp, Artificial Sequence
  Description of Artificial Sequence: Synthetic oligonucleotide
  Target: LAMA2; (+) strand; PAM type: NNNNGHTT; PAM sequence: TAAAGATT
aatgtctagtctgaaaggtc

SEQ ID NO: 46648 - DNA, 20 bp, Artificial Sequence
  Description of Artificial Sequence: Synthetic oligonucleotide
  Target: LAMA2; (+) strand; PAM type: NNNNGHTT; PAM sequence: TACTGTTT
tatttgaattacccgtgcat

SEQ ID NO: 46649 - DNA, 20 bp, Artificial Sequence
  Description of Artificial Sequence: Synthetic oligonucleotide
  Target: LAMA2; (+) strand; PAM type: NNNNGHTT; PAM sequence: CATTGATT
ttaaaaatatttcaatattc

SEQ ID NO: 46650 - DNA, 20 bp, Artificial Sequence
  Description of Artificial Sequence: Synthetic oligonucleotide
  Target: LAMA2; (+) strand; PAM type: NNNNGHTT; PAM sequence: ATAAGATT
tcaatattccattgatttga

SEQ ID NO: 46651 - DNA, 20 bp, Artificial Sequence
  Description of Artificial Sequence: Synthetic oligonucleotide
  Target: LAMA2; (+) strand; PAM type: NNNNGHTT; PAM sequence: GAAAGCTT
aagattctttaaattacagt

SEQ ID NO: 46652 - DNA, 20 bp, Artificial Sequence
  Description of Artificial Sequence: Synthetic oligonucleotide
  Target: LAMA2; (+) strand; PAM type: NNNNGHTT; PAM sequence: GTAAGATT
aagctttctgataaggtatg

SEQ ID NO: 46653 - DNA, 20 bp, Artificial Sequence
  Description of Artificial Sequence: Synthetic oligonucleotide
  Target: LAMA2; (+) strand; PAM type: NNNNGHTT; PAM sequence: CTGAGCTT
gataatacacttagtacaaa

SEQ ID NO: 46654 - DNA, 20 bp, Artificial Sequence
  Description of Artificial Sequence: Synthetic oligonucleotide
  Target: LAMA2; (+) strand; PAM type: NNNNGHTT; PAM sequence: ATGGGATT
ttagtacaaactgagcttca

SEQ ID NO: 46655 - DNA, 20 bp, Artificial Sequence
  Description of Artificial Sequence: Synthetic oligonucleotide
  Target: LAMA2; (+) strand; PAM type: NNNNGHTT; PAM sequence: GAAGGATT
ctctattatgagaaagttag

SEQ ID NO: 46656 - DNA, 20 bp, Artificial Sequence
  Description of Artificial Sequence: Synthetic oligonucleotide
  Target: LAMA2; (+) strand; PAM type: NNNNGHTT; PAM sequence: AGGGGATT
aggattaaagttggcactga

SEQ ID NO: 46657 - DNA, 20 bp, Artificial Sequence
  Description of Artificial Sequence: Synthetic oligonucleotide
  Target: LAMA2; (+) strand; PAM type: NNNNGHTT; PAM sequence: AGCAGTTT
acgttggtgactttcccaag

SEQ ID NO: 46658 - DNA, 20 bp, Artificial Sequence
  Description of Artificial Sequence: Synthetic oligonucleotide
  Target: LAMA2; (+) strand; PAM type: NNNNGHTT; PAM sequence: TTGAGCTT
tgttgcattgttccctttcc

SEQ ID NO: 46659 - DNA, 20 bp, Artificial Sequence
  Description of Artificial Sequence: Synthetic oligonucleotide
  Target: LAMA2; (+) strand; PAM type: NNNNGHTT; PAM sequence: CCTCGCTT
cttgagctttctacagctca

SEQ ID NO: 46660 - DNA, 20 bp, Artificial Sequence
  Description of Artificial Sequence: Synthetic oligonucleotide
  Target: LAMA2; (+) strand; PAM type: NNNNGHTT; PAM sequence: TGTGGATT
tacaatcagacctctgaatc

SEQ ID NO: 46661 - DNA, 20 bp, Artificial Sequence
  Description of Artificial Sequence: Synthetic oligonucleotide
  Target: LAMA2; (+) strand; PAM type: NNNNGHTT; PAM sequence: CATGGATT
gaatctgtggattccacatc

SEQ ID NO: 46662 - DNA, 20 bp, Artificial Sequence
  Description of Artificial Sequence: Synthetic oligonucleotide
  Target: LAMA2; (+) strand; PAM type: NNNNGHTT; PAM sequence: ATGTGATT
gggtatttaaagtaatgtag

SEQ ID NO: 46663 - DNA, 20 bp, Artificial Sequence
  Description of Artificial Sequence: Synthetic oligonucleotide
  Target: LAMA2; (+) strand; PAM type: NNNNGHTT; PAM sequence: CTCAGATT
atttcaaggacttgagcatc

SEQ ID NO: 46664 - DNA, 20 bp, Artificial Sequence
  Description of Artificial Sequence: Synthetic oligonucleotide
  Target: LAMA2; (+) strand; PAM type: NNNNGHTT; PAM sequence: AAGAGATT
tttttacacagtcaaaataa

SEQ ID NO: 46665 - DNA, 20 bp, Artificial Sequence
  Description of Artificial Sequence: Synthetic oligonucleotide
  Target: LAMA2; (+) strand; PAM type: NNNNGHTT; PAM sequence: TTAGGCTT
cacagtcaaaataaaagaga

SEQ ID NO: 46666 - DNA, 20 bp, Artificial Sequence
  Description of Artificial Sequence: Synthetic oligonucleotide
  Target: LAMA2; (+) strand; PAM type: NNNNGHTT; PAM sequence: GCTTGTTT
gtcaaaataaaagagattag

SEQ ID NO: 46667 - DNA, 20 bp, Artificial Sequence
  Description of Artificial Sequence: Synthetic oligonucleotide
  Target: LAMA2; (+) strand; PAM type: NNNNGHTT; PAM sequence: ACTGGATT
ataatgccatattgagcatg

SEQ ID NO: 46668 - DNA, 20 bp, Artificial Sequence
  Description of Artificial Sequence: Synthetic oligonucleotide
  Target: LAMA2; (+) strand; PAM type: NNNNGHTT; PAM sequence: TATGGATT
ccttaatctcaagctacaca

SEQ ID NO: 46669 - DNA, 20 bp, Artificial Sequence
  Description of Artificial Sequence: Synthetic oligonucleotide
  Target: LAMA2; (+) strand; PAM type: NNNNGHTT; PAM sequence: GTCAGCTT
ttactgttctgtctcctggt

SEQ ID NO: 46670 - DNA, 20 bp, Artificial Sequence
  Description of Artificial Sequence: Synthetic oligonucleotide
  Target: LAMA2; (+) strand; PAM type: NNNNGHTT; PAM sequence: ATTTGTTT
ctggtgtcagcttactttca

SEQ ID NO: 46671 - DNA, 20 bp, Artificial Sequence
  Description of Artificial Sequence: Synthetic oligonucleotide
  Target: LAMA2; (+) strand; PAM type: NNNNGHTT; PAM sequence: ACCTGTTT
gcttactttcaatttgtttt

SEQ ID NO: 46672 - DNA, 20 bp, Artificial Sequence
  Description of Artificial Sequence: Synthetic oligonucleotide
  Target: LAMA2; (+) strand; PAM type: NNNNGHTT; PAM sequence: TAGAGATT
ctgtttcattggcacacttg

SEQ ID NO: 46673 - DNA, 20 bp, Artificial Sequence
  Description of Artificial Sequence: Synthetic oligonucleotide
  Target: LAMA2; (+) strand; PAM type: NNNNGHTT; PAM sequence: AAATGTTT
tgtagagattgataatacaa

SEQ ID NO: 46674 - DNA, 20 bp, Artificial Sequence
  Description of Artificial Sequence: Synthetic oligonucleotide
  Target: LAMA2; (+) strand; PAM type: NNNNGHTT; PAM sequence: CAAAGTTT
tccacttctgctacttattt

SEQ ID NO: 46675 - DNA, 20 bp, Artificial Sequence
  Description of Artificial Sequence: Synthetic oligonucleotide
  Target: LAMA2; (+) strand; PAM type: NNNNGHTT; PAM sequence: TCAAGCTT
tgtattagaattatagctct

SEQ ID NO: 46676 - DNA, 20 bp, Artificial Sequence
  Description of Artificial Sequence: Synthetic oligonucleotide
  Target: LAMA2; (+) strand; PAM type: NNNNGHTT; PAM sequence: ACATGATT
cttactaatctgtaaagcaa

SEQ ID NO: 46677 - DNA, 20 bp, Artificial Sequence
  Description of Artificial Sequence: Synthetic oligonucleotide
  Target: LAMA2; (+) strand; PAM type: NNNNGHTT; PAM sequence: GTATGCTT
aagcaaacatgatttatata

SEQ ID NO: 46678 - DNA, 20 bp, Artificial Sequence
  Description of Artificial Sequence: Synthetic oligonucleotide
  Target: LAMA2; (+) strand; PAM type: NNNNGHTT; PAM sequence: TCAGGATT
agtatgcttacattagtaaa

SEQ ID NO: 46679 - DNA, 20 bp, Artificial Sequence
  Description of Artificial Sequence: Synthetic oligonucleotide
  Target: LAMA2; (+) strand; PAM type: NNNNGHTT; PAM sequence: AGATGTTT
agttatttggttataaaaag

SEQ ID NO: 46680 - DNA, 20 bp, Artificial Sequence
  Description of Artificial Sequence: Synthetic oligonucleotide
  Target: LAMA2; (+) strand; PAM type: NNNNGHTT; PAM sequence: TAAGGTTT
ataaaaagagatgtttctga

SEQ ID NO: 46681 - DNA, 20 bp, Artificial Sequence
  Description of Artificial Sequence: Synthetic oligonucleotide
  Target: LAMA2; (+) strand; PAM type: NNNNGHTT; PAM sequence: CACAGATT
tggaagacactagaggctgc

SEQ ID NO: 46682 - DNA, 20 bp, Artificial Sequence
  Description of Artificial Sequence: Synthetic oligonucleotide
  Target: LAMA2; (+) strand; PAM type: NNNNGHTT; PAM sequence: TTATGATT
tggaaatatcctatccaaca

SEQ ID NO: 46683 - DNA, 20 bp, Artificial Sequence
  Description of Artificial Sequence: Synthetic oligonucleotide
  Target: LAMA2; (+) strand; PAM type: NNNNGHTT; PAM sequence: GCTGGCTT
gcacacaacatcgccaaaca

SEQ ID NO: 46684 - DNA, 20 bp, Artificial Sequence
  Description of Artificial Sequence: Synthetic oligonucleotide
  Target: LAMA2; (+) strand; PAM type: NNNNGHTT; PAM sequence: GCTTGTTT
acaacatcgccaaacagctg

SEQ ID NO: 46685 - DNA, 20 bp, Artificial Sequence
  Description of Artificial Sequence: Synthetic oligonucleotide
  Target: LAMA2; (+) strand; PAM type: NNNNGHTT; PAM sequence: AACAGCTT
ggcttgttttatatcccaga

SEQ ID NO: 46686 - DNA, 20 bp, Artificial Sequence
  Description of Artificial Sequence: Synthetic oligonucleotide
  Target: LAMA2; (+) strand; PAM type: NNNNGHTT; PAM sequence: AGTAGCTT
ttcacaagatctcttggcag

SEQ ID NO: 46687 - DNA, 20 bp, Artificial Sequence
  Description of Artificial Sequence: Synthetic oligonucleotide
  Target: LAMA2; (+) strand; PAM type: NNNNGHTT; PAM sequence: CACGGTTT
aatccttcatgtagctatca

SEQ ID NO: 46688 - DNA, 20 bp, Artificial Sequence
  Description of Artificial Sequence: Synthetic oligonucleotide
  Target: LAMA2; (+) strand; PAM type: NNNNGHTT; PAM sequence: GTATGTTT
tttttccaaaaaggtccttt

SEQ ID NO: 46689 - DNA, 20 bp, Artificial Sequence
  Description of Artificial Sequence: Synthetic oligonucleotide
  Target: LAMA2; (+) strand; PAM type: NNNNGHTT; PAM sequence: TACTGATT
gtatgtttaagtgagaaact

SEQ ID NO: 46690 - DNA, 20 bp, Artificial Sequence
  Description of Artificial Sequence: Synthetic oligonucleotide
  Target: LAMA2; (+) strand; PAM type: NNNNGHTT; PAM sequence: ACATGATT
tgattcttcatacggcacaa

SEQ ID NO: 46691 - DNA, 20 bp, Artificial Sequence
  Description of Artificial Sequence: Synthetic oligonucleotide
  Target: LAMA2; (+) strand; PAM type: NNNNGHTT; PAM sequence: TAGCGATT
aaactataatcctagacatg

SEQ ID NO: 46692 - DNA, 20 bp, Artificial Sequence
  Description of Artificial Sequence: Synthetic oligonucleotide
  Target: LAMA2; (+) strand; PAM type: NNNNGHTT; PAM sequence: ATTAGTTT
aaggttaatctcagagggaa

SEQ ID NO: 46693 - DNA, 20 bp, Artificial Sequence
  Description of Artificial Sequence: Synthetic oligonucleotide
  Target: LAMA2; (+) strand; PAM type: NNNNGHTT; PAM sequence: AATGGCTT
ctcagagggaaattagtttt

SEQ ID NO: 46694 - DNA, 20 bp, Artificial Sequence
  Description of Artificial Sequence: Synthetic oligonucleotide
  Target: LAMA2; (+) strand; PAM type: NNNNGHTT; PAM sequence: ATCTGCTT
gatcttgaggaatatacaag

SEQ ID NO: 46695 - DNA, 20 bp, Artificial Sequence
  Description of Artificial Sequence: Synthetic oligonucleotide
  Target: LAMA2; (+) strand; PAM type: NNNNGHTT; PAM sequence: AGAGGATT
ttttagaatccctgcattag

SEQ ID NO: 46696 - DNA, 20 bp, Artificial Sequence
  Description of Artificial Sequence: Synthetic oligonucleotide
  Target: LAMA2; (+) strand; PAM type: NNNNGHTT; PAM sequence: TTCAGATT
attagagaggattcagtatt

SEQ ID NO: 46697 - DNA, 20 bp, Artificial Sequence
  Description of Artificial Sequence: Synthetic oligonucleotide
  Target: LAMA2; (+) strand; PAM type: NNNNGHTT; PAM sequence: GGTAGATT
attccttactaagcatccca

SEQ ID NO: 46698 - DNA, 20 bp, Artificial Sequence
  Description of Artificial Sequence: Synthetic oligonucleotide
  Target: LAMA2; (+) strand; PAM type: NNNNGHTT; PAM sequence: ATTAGTTT
ctattctttgtgacaccaga

SEQ ID NO: 46699 - DNA, 20 bp, Artificial Sequence
  Description of Artificial Sequence: Synthetic oligonucleotide
  Target: LAMA2; (+) strand; PAM type: NNNNGHTT; PAM sequence: CAGAGTTT
ccagaattagtttctcatct

SEQ ID NO: 46700 - DNA, 20 bp, Artificial Sequence
  Description of Artificial Sequence: Synthetic oligonucleotide
  Target: LAMA2; (+) strand; PAM type: NNNNGHTT; PAM sequence: AGTAGTTT
tgtatttctctggtgactca

SEQ ID NO: 46701 - DNA, 20 bp, Artificial Sequence
  Description of Artificial Sequence: Synthetic oligonucleotide
  Target: LAMA2; (+) strand; PAM type: NNNNGHTT; PAM sequence: GTCAGTTT
actcaagtagtttattggca

SEQ ID NO: 46702 - DNA, 20 bp, Artificial Sequence
  Description of Artificial Sequence: Synthetic oligonucleotide
  Target: LAMA2; (+) strand; PAM type: NNNNGHTT; PAM sequence: CTGGGATT
gtcagtttgtaaaaggctcc

SEQ ID NO: 46703 - DNA, 20 bp, Artificial Sequence
  Description of Artificial Sequence: Synthetic oligonucleotide
  Target: LAMA2; (+) strand; PAM type: NNNNGHTT; PAM sequence: GCATGTTT
ctgtacctttagcactgtgt

SEQ ID NO: 46704 - DNA, 20 bp, Artificial Sequence
  Description of Artificial Sequence: Synthetic oligonucleotide
  Target: LAMA2; (+) strand; PAM type: NNNNGHTT; PAM sequence: TTTGGTTT
atttcactttctttaacaat

SEQ ID NO: 46705 - DNA, 20 bp, Artificial Sequence
  Description of Artificial Sequence: Synthetic oligonucleotide
  Target: LAMA2; (+) strand; PAM type: NNNNGHTT; PAM sequence: ATGTGCTT
aatacaaaaatagtgtaagt

SEQ ID NO: 46706 - DNA, 20 bp, Artificial Sequence
  Description of Artificial Sequence: Synthetic oligonucleotide
  Target: LAMA2; (+) strand; PAM type: NNNNGHTT; PAM sequence: GAGAGATT
cttcttcctatctgtatgtt

SEQ ID NO: 46707 - DNA, 20 bp, Artificial Sequence
  Description of Artificial Sequence: Synthetic oligonucleotide
  Target: LAMA2; (+) strand; PAM type: NNNNGHTT; PAM sequence: AAAAGATT
cagtcctttgatgtgaccaa

SEQ ID NO: 46708 - DNA, 20 bp, Artificial Sequence
  Description of Artificial Sequence: Synthetic oligonucleotide
  Target: LAMA2; (+) strand; PAM type: NNNNGHTT; PAM sequence: GTCAGTTT
gaaagaataatattgtcttt

SEQ ID NO: 46709 - DNA, 20 bp, Artificial Sequence
  Description of Artificial Sequence: Synthetic oligonucleotide
  Target: LAMA2; (+) strand; PAM type: NNNNGHTT; PAM sequence: TTATGCTT
agatcagggtgtccgcatgg

SEQ ID NO: 46710 - DNA, 20 bp, Artificial Sequence
  Description of Artificial Sequence: Synthetic oligonucleotide
  Target: LAMA2; (+) strand; PAM type: NNNNGHTT; PAM sequence: GACTGTTT
catggttatgctttggtgag

SEQ ID NO: 46711 - DNA, 20 bp, Artificial Sequence
  Description of Artificial Sequence: Synthetic oligonucleotide
  Target: LAMA2; (+) strand; PAM type: NNNNGHTT; PAM sequence: CGGGGCTT
tgctttggtgaggactgttt

SEQ ID NO: 46712 - DNA, 20 bp, Artificial Sequence
  Description of Artificial Sequence: Synthetic oligonucleotide
  Target: LAMA2; (+) strand; PAM type: NNNNGHTT; PAM sequence: TTGGGATT
gcccccaaatatcatcacat

SEQ ID NO: 46713 - DNA, 20 bp, Artificial Sequence
  Description of Artificial Sequence: Synthetic oligonucleotide
  Target: LAMA2; (+) strand; PAM type: NNNNGHTT; PAM sequence: TAGGGTTT
aatatcatcacatttgggat

SEQ ID NO: 46714 - DNA, 20 bp, Artificial Sequence
  Description of Artificial Sequence: Synthetic oligonucleotide
  Target: LAMA2; (+) strand; PAM type: NNNNGHTT; PAM sequence: GTGTGTTT
attgctagctcagaattact

SEQ ID NO: 46715 - DNA, 20 bp, Artificial Sequence
  Description of Artificial Sequence: Synthetic oligonucleotide
  Target: LAMA2; (+) strand; PAM type: NNNNGHTT; PAM sequence: TGGGGTTT
gagagtattaccaatatttg

SEQ ID NO: 46716 - DNA, 20 bp, Artificial Sequence
  Description of Artificial Sequence: Synthetic oligonucleotide
  Target: LAMA2; (+) strand; PAM type: NNNNGHTT; PAM sequence: GGAAGTTT
tttgccaacctgaaaaaatg

SEQ ID NO: 46717 - DNA, 20 bp, Artificial Sequence
  Description of Artificial Sequence: Synthetic oligonucleotide
  Target: LAMA2; (+) strand; PAM type: NNNNGHTT; PAM sequence: GTGTGTTT
aaaaaatgggaagtttatca

SEQ ID NO: 46718 - DNA, 20 bp, Artificial Sequence
  Description of Artificial Sequence: Synthetic oligonucleotide
  Target: LAMA2; (+) strand; PAM type: NNNNGHTT; PAM sequence: TATTGATT
atggtgttggtgcatttctt

SEQ ID NO: 46719 - DNA, 20 bp, Artificial Sequence
  Description of Artificial Sequence: Synthetic oligonucleotide
  Target: LAMA2; (+) strand; PAM type: NNNNGHTT; PAM sequence: CACAGTTT
cagtaccttttattttgtca

SEQ ID NO: 46720 - DNA, 20 bp, Artificial Sequence
  Description of Artificial Sequence: Synthetic oligonucleotide
  Target: LAMA2; (+) strand; PAM type: NNNNGHTT; PAM sequence: GGCAGTTT
agccttctacacctttggag

SEQ ID NO: 46721 - DNA, 20 bp, Artificial Sequence
  Description of Artificial Sequence: Synthetic oligonucleotide
  Target: LAMA2; (+) strand; PAM type: NNNNGHTT; PAM sequence: TCAGGTTT
taaaaaattcaccattccat

SEQ ID NO: 46722 - DNA, 20 bp, Artificial Sequence
  Description of Artificial Sequence: Synthetic oligonucleotide
  Target: LAMA2; (+) strand; PAM type: NNNNGHTT; PAM sequence: GTGTGATT
ggtttaacatattttttaga

SEQ ID NO: 46723 - DNA, 20 bp, Artificial Sequence
  Description of Artificial Sequence: Synthetic oligonucleotide
  Target: LAMA2; (+) strand; PAM type: NNNNGHTT; PAM sequence: GATAGATT
ttgaaatatctcactgtgat

SEQ ID NO: 46724 - DNA, 20 bp, Artificial Sequence
  Description of Artificial Sequence: Synthetic oligonucleotide
  Target: LAMA2; (+) strand; PAM type: NNNNGHTT; PAM sequence: TCTAGTTT
tcactgtgatgatagatttg

SEQ ID NO: 46725 - DNA, 20 bp, Artificial Sequence
  Description of Artificial Sequence: Synthetic oligonucleotide
  Target: LAMA2; (+) strand; PAM type: NNNNGHTT; PAM sequence: TGATGTTT
tattttaaggctatataatg

SEQ ID NO: 46726 - DNA, 20 bp, Artificial Sequence
  Description of Artificial Sequence: Synthetic oligonucleotide
  Target: LAMA2; (+) strand; PAM type: NNNNGHTT; PAM sequence: CCAAGTTT
gatattttataactttttcc

SEQ ID NO: 46727 - DNA, 20 bp, Artificial Sequence
  Description of Artificial Sequence: Synthetic oligonucleotide
  Target: LAMA2; (+) strand; PAM type: NNNNGHTT; PAM sequence: TCTGGTTT
ataactttttccccaagttt

SEQ ID NO: 46728 - DNA, 20 bp, Artificial Sequence
  Description of Artificial Sequence: Synthetic oligonucleotide
  Target: LAMA2; (+) strand; PAM type: NNNNGHTT; PAM sequence: CCCAGATT
tttctggtttcccaccatac

SEQ ID NO: 46729 - DNA, 20 bp, Artificial Sequence
  Description of Artificial Sequence: Synthetic oligonucleotide
  Target: LAMA2; (+) strand; PAM type: NNNNGHTT; PAM sequence: GAATGATT
cacaataattttcagagaaa

SEQ ID NO: 46730 - DNA, 20 bp, Artificial Sequence
  Description of Artificial Sequence: Synthetic oligonucleotide
  Target: LAMA2; (+) strand; PAM type: NNNNGHTT; PAM sequence: TGTAGATT
ttaaattatttttcatattg

SEQ ID NO: 46731 - DNA, 20 bp, Artificial Sequence
  Description of Artificial Sequence: Synthetic oligonucleotide
  Target: LAMA2; (+) strand; PAM type: NNNNGHTT; PAM sequence: CTGAGATT
cctccgctcgctatattcgc

SEQ ID NO: 46732 - DNA, 20 bp, Artificial Sequence
  Description of Artificial Sequence: Synthetic oligonucleotide
  Target: LAMA2; (+) strand; PAM type: NNNNGHTT; PAM sequence: TGATGTTT
cacactgaatgctgacttga

SEQ ID NO: 46733 - DNA, 20 bp, Artificial Sequence
  Description of Artificial Sequence: Synthetic oligonucleotide
  Target: LAMA2; (+) strand; PAM type: NNNNGHTT; PAM sequence: AAATGTTT
ttgtctgttaaatactttaa

SEQ ID NO: 46734 - DNA, 20 bp, Artificial Sequence
  Description of Artificial Sequence: Synthetic oligonucleotide
  Target: LAMA2; (+) strand; PAM type: NNNNGHTT; PAM sequence: CAGTGATT
aaatactttaaaaatgtttt

SEQ ID NO: 46735 - DNA, 20 bp, Artificial Sequence
  Description of Artificial Sequence: Synthetic oligonucleotide
  Target: LAMA2; (+) strand; PAM type: NNNNGHTT; PAM sequence: TGTAGATT
tcaaatttttattttagaat

SEQ ID NO: 46736 - DNA, 20 bp, Artificial Sequence
  Description of Artificial Sequence: Synthetic oligonucleotide
  Target: LAMA2; (+) strand; PAM type: NNNNGHTT; PAM sequence: TGCCGCTT
ctttgttcagatccaagctg

SEQ ID NO: 46737 - DNA, 20 bp, Artificial Sequence
  Description of Artificial Sequence: Synthetic oligonucleotide
  Target: LAMA2; (+) strand; PAM type: NNNNGHTT; PAM sequence: ATTGGCTT
ggatctatactactattata

SEQ ID NO: 46738 - DNA, 20 bp, Artificial Sequence
  Description of Artificial Sequence: Synthetic oligonucleotide
  Target: LAMA2; (+) strand; PAM type: NNNNGHTT; PAM sequence: AGGGGCTT
cgagttactactggaagtgc

SEQ ID NO: 46739 - DNA, 20 bp, Artificial Sequence
  Description of Artificial Sequence: Synthetic oligonucleotide
  Target: LAMA2; (+) strand; PAM type: NNNNGHTT; PAM sequence: ATGGGATT
tgtcttaaaccttaatgtgt

SEQ ID NO: 46740 - DNA, 20 bp, Artificial Sequence
  Description of Artificial Sequence: Synthetic oligonucleotide
  Target: LAMA2; (+) strand; PAM type: NNNNGHTT; PAM sequence: TTATGATT
tgatcttgtggaaatatagg

SEQ ID NO: 46741 - DNA, 20 bp, Artificial Sequence
  Description of Artificial Sequence: Synthetic oligonucleotide
  Target: LAMA2; (+) strand; PAM type: NNNNGHTT; PAM sequence: GCCGGTTT
ttccaggtgatgctgatgtt

SEQ ID NO: 46742 - DNA, 20 bp, Artificial Sequence
  Description of Artificial Sequence: Synthetic oligonucleotide
  Target: LAMA2; (+) strand; PAM type: NNNNGHTT; PAM sequence: TTTGGTTT
gtttgtgggccatcaaataa

SEQ ID NO: 46743 - DNA, 20 bp, Artificial Sequence
  Description of Artificial Sequence: Synthetic oligonucleotide
  Target: LAMA2; (+) strand; PAM type: NNNNGHTT; PAM sequence: TTATGCTT
ggccatcaaataatttggtt

SEQ ID NO: 46744 - DNA, 20 bp, Artificial Sequence
  Description of Artificial Sequence: Synthetic oligonucleotide
  Target: LAMA2; (+) strand; PAM type: NNNNGHTT; PAM sequence: GCTTGATT
atcaaataatttggttttat

SEQ ID NO: 46745 - DNA, 20 bp, Artificial Sequence
  Description of Artificial Sequence: Synthetic oligonucleotide
  Target: LAMA2; (+) strand; PAM type: NNNNGHTT; PAM sequence: CATAGTTT
ttgattaatgaatcacaagc

SEQ ID NO: 46746 - DNA, 20 bp, Artificial Sequence
  Description of Artificial Sequence: Synthetic oligonucleotide
  Target: LAMA2; (+) strand; PAM type: NNNNGHTT; PAM sequence: AACTGATT
aatgcagtgctataggagaa

SEQ ID NO: 46747 - DNA, 20 bp, Artificial Sequence
  Description of Artificial Sequence: Synthetic oligonucleotide
  Target: LAMA2; (+) strand; PAM type: NNNNGHTT; PAM sequence: TACTGTTT
aggagaaaactgattctaca

SEQ ID NO: 46748 - DNA, 20 bp, Artificial Sequence
  Description of Artificial Sequence: Synthetic oligonucleotide
  Target: LAMA2; (+) strand; PAM type: NNNNGHTT; PAM sequence: AAAAGTTT
acaaataaaatattagggga

SEQ ID NO: 46749 - DNA, 20 bp, Artificial Sequence
  Description of Artificial Sequence: Synthetic oligonucleotide
  Target: LAMA2; (+) strand; PAM type: NNNNGHTT; PAM sequence: AAAAGCTT
aaagtttaaagcatcttttc

SEQ ID NO: 46750 - DNA, 20 bp, Artificial Sequence
  Description of Artificial Sequence: Synthetic oligonucleotide
  Target: LAMA2; (+) strand; PAM type: NNNNGHTT; PAM sequence: GTGGGATT
ccagtgttaaacaggaattt

SEQ ID NO: 46751 - DNA, 20 bp, Artificial Sequence
  Description of Artificial Sequence: Synthetic oligonucleotide
  Target: LAMA2; (+) strand; PAM type: NNNNGHTT; PAM sequence: CCCAGATT
attacaagatagatgatcaa

SEQ ID NO: 46752 - DNA, 20 bp, Artificial Sequence
  Description of Artificial Sequence: Synthetic oligonucleotide
  Target: LAMA2; (+) strand; PAM type: NNNNGHTT; PAM sequence: CCGTGCTT
cagattgctatgagtgataa

SEQ ID NO: 46753 - DNA, 20 bp, Artificial Sequence
  Description of Artificial Sequence: Synthetic oligonucleotide
  Target: LAMA2; (+) strand; PAM type: NNNNGHTT; PAM sequence: ACTGGTTT
gtctaccttctaccatattc

SEQ ID NO: 46754 - DNA, 20 bp, Artificial Sequence
  Description of Artificial Sequence: Synthetic oligonucleotide
  Target: LAMA2; (+) strand; PAM type: NNNNGHTT; PAM sequence: ACATGTTT
acagatcctaaatactcctc

SEQ ID NO: 46755 - DNA, 20 bp, Artificial Sequence
  Description of Artificial Sequence: Synthetic oligonucleotide
  Target: LAMA2; (+) strand; PAM type: NNNNGHTT; PAM sequence: TAAGGCTT
catcatcacaagataacttt

SEQ ID NO: 46756 - DNA, 20 bp, Artificial Sequence
  Description of Artificial Sequence: Synthetic oligonucleotide
  Target: LAMA2; (+) strand; PAM type: NNNNGHTT; PAM sequence: AGATGTTT
agtcccatgcaacatatgtc

SEQ ID NO: 46757 - DNA, 20 bp, Artificial Sequence
  Description of Artificial Sequence: Synthetic oligonucleotide
  Target: LAMA2; (+) strand; PAM type: NNNNGHTT; PAM sequence: CAATGTTT
aactaatcattattttatag

SEQ ID NO: 46758 - DNA, 20 bp, Artificial Sequence
  Description of Artificial Sequence: Synthetic oligonucleotide
  Target: LAMA2; (+) strand; PAM type: NNNNGHTT; PAM sequence: TTTGGATT
atcattattttatagcaatg

SEQ ID NO: 46759 - DNA, 20 bp, Artificial Sequence
  Description of Artificial Sequence: Synthetic oligonucleotide
  Target: LAMA2; (+) strand; PAM type: NNNNGHTT; PAM sequence: ACTTGTTT
tagcaatgtttggatttttc

SEQ ID NO: 46760 - DNA, 20 bp, Artificial Sequence
  Description of Artificial Sequence: Synthetic oligonucleotide
  Target: LAMA2; (+) strand; PAM type: NNNNGHTT; PAM sequence: ATATGTTT
cagtataagtcaacatataa

SEQ ID NO: 46761 - DNA, 20 bp, Artificial Sequence
  Description of Artificial Sequence: Synthetic oligonucleotide
  Target: LAMA2; (+) strand; PAM type: NNNNGHTT; PAM sequence: AATAGATT
cattatacatttatatttaa

SEQ ID NO: 46762 - DNA, 20 bp, Artificial Sequence
  Description of Artificial Sequence: Synthetic oligonucleotide
  Target: LAMA2; (+) strand; PAM type: NNNNGHTT; PAM sequence: CCCAGTTT
tttatatttaaaatagattt

SEQ ID NO: 46763 - DNA, 20 bp, Artificial Sequence
  Description of Artificial Sequence: Synthetic oligonucleotide
  Target: LAMA2; (+) strand; PAM type: NNNNGHTT; PAM sequence: ATCAGCTT
gcatttacaaatactactgt

SEQ ID NO: 46764 - DNA, 20 bp, Artificial Sequence
  Description of Artificial Sequence: Synthetic oligonucleotide
  Target: LAMA2; (+) strand; PAM type: NNNNGHTT; PAM sequence: AGGGGATT
caaagaagtaaattggaaaa

SEQ ID NO: 46765 - DNA, 20 bp, Artificial Sequence
  Description of Artificial Sequence: Synthetic oligonucleotide
  Target: LAMA2; (+) strand; PAM type: NNNNGHTT; PAM sequence: ATCTGTTT
cacctacatattctagctaa

SEQ ID NO: 46766 - DNA, 20 bp, Artificial Sequence
  Description of Artificial Sequence: Synthetic oligonucleotide
  Target: LAMA2; (+) strand; PAM type: NNNNGHTT; PAM sequence: AGATGATT
aatagaactatctaacgcta

SEQ ID NO: 46767 - DNA, 20 bp, Artificial Sequence
  Description of Artificial Sequence: Synthetic oligonucleotide
  Target: LAMA2; (+) strand; PAM type: NNNNGHTT; PAM sequence: GGTAGATT
ttatccttaaaaaatagctg

SEQ ID NO: 46768 - DNA, 20 bp, Artificial Sequence
  Description of Artificial Sequence: Synthetic oligonucleotide
  Target: LAMA2; (+) strand; PAM type: NNNNGHTT; PAM sequence: CCCAGATT
tgttatgagcacaatttcta

SEQ ID NO: 46769 - DNA, 20 bp, Artificial Sequence
  Description of Artificial Sequence: Synthetic oligonucleotide
  Target: LAMA2; (+) strand; PAM type: NNNNGHTT; PAM sequence: GTATGATT
catcaagtaaaacagtgtgc

SEQ ID NO: 46770 - DNA, 20 bp, Artificial Sequence
  Description of Artificial Sequence: Synthetic oligonucleotide
  Target: LAMA2; (+) strand; PAM type: NNNNGHTT; PAM sequence: GAGGGTTT
ttgctataatcacaataaaa

SEQ ID NO: 46771 - DNA, 20 bp, Artificial Sequence
  Description of Artificial Sequence: Synthetic oligonucleotide
  Target: LAMA2; (+) strand; PAM type: NNNNGHTT; PAM sequence: ACTAGCTT
agatatttctaaaatgccca

SEQ ID NO: 46772 - DNA, 20 bp, Artificial Sequence
  Description of Artificial Sequence: Synthetic oligonucleotide
  Target: LAMA2; (+) strand; PAM type: NNNNGHTT; PAM sequence: GTCAGTTT
acagtgctaagagttacttt

SEQ ID NO: 46773 - DNA, 20 bp, Artificial Sequence
  Description of Artificial Sequence: Synthetic oligonucleotide
  Target: LAMA2; (+) strand; PAM type: NNNNGHTT; PAM sequence: TAAAGTTT
ctaaggataaaagcagaaaa

SEQ ID NO: 46774 - DNA, 20 bp, Artificial Sequence
  Description of Artificial Sequence: Synthetic oligonucleotide
  Target: LAMA2; (+) strand; PAM type: NNNNGHTT; PAM sequence: ACAGGATT
ttgaccttgcagtcatctta

SEQ ID NO: 46775 - DNA, 20 bp, Artificial Sequence
  Description of Artificial Sequence: Synthetic oligonucleotide
  Target: LAMA2; (+) strand; PAM type: NNNNGHTT; PAM sequence: TCTGGATT
tcatcttaacaggatttctc

SEQ ID NO: 46776 - DNA, 20 bp, Artificial Sequence
  Description of Artificial Sequence: Synthetic oligonucleotide
  Target: LAMA2; (+) strand; PAM type: NNNNGHTT; PAM sequence: GATTGCTT
cttaacaggatttctctctg

SEQ ID NO: 46777 - DNA, 20 bp, Artificial Sequence
  Description of Artificial Sequence: Synthetic oligonucleotide
  Target: LAMA2; (+) strand; PAM type: NNNNGHTT; PAM sequence: CAGGGCTT
tgcatctgctatggtcatgc

SEQ ID NO: 46778 - DNA, 20 bp, Artificial Sequence
  Description of Artificial Sequence: Synthetic oligonucleotide
  Target: LAMA2; (+) strand; PAM type: NNNNGHTT; PAM sequence: GGATGCTT
caaatgtatgtatatttata

SEQ ID NO: 46779 - DNA, 20 bp, Artificial Sequence
  Description of Artificial Sequence: Synthetic oligonucleotide
  Target: LAMA2; (+) strand; PAM type: NNNNGHTT; PAM sequence: AAATGTTT
aaatgaagccctgagctgta

SEQ ID NO: 46780 - DNA, 20 bp, Artificial Sequence
  Description of Artificial Sequence: Synthetic oligonucleotide
  Target: LAMA2; (+) strand; PAM type: NNNNGHTT; PAM sequence: AACAGATT
cagccatcacagtataagaa

SEQ ID NO: 46781 - DNA, 20 bp, Artificial Sequence
  Description of Artificial Sequence: Synthetic oligonucleotide
  Target: LAMA2; (+) strand; PAM type: NNNNGHTT; PAM sequence: ATTAGTTT
atcacagtataagaaaacag

SEQ ID NO: 46782 - DNA, 20 bp, Artificial Sequence
  Description of Artificial Sequence: Synthetic oligonucleotide
  Target: LAMA2; (+) strand; PAM type: NNNNGHTT; PAM sequence: TATAGCTT
tatgacagcctgcctcatga

SEQ ID NO: 46783 - DNA, 20 bp, Artificial Sequence
  Description of Artificial Sequence: Synthetic oligonucleotide
  Target: LAMA2; (+) strand; PAM type: NNNNGHTT; PAM sequence: TAAAGTTT
atcaacctgaccatttcttt

SEQ ID NO: 46784 - DNA, 20 bp, Artificial Sequence
  Description of Artificial Sequence: Synthetic oligonucleotide
  Target: LAMA2; (+) strand; PAM type: NNNNGHTT; PAM sequence: GAATGCTT
tggcaagccggaaaatgcca

SEQ ID NO: 46785 - DNA, 20 bp, Artificial Sequence
  Description of Artificial Sequence: Synthetic oligonucleotide
  Target: LAMA2; (+) strand; PAM type: NNNNGHTT; PAM sequence: CACAGATT
tcagtgaatgtaaatcgggc

SEQ ID NO: 46786 - DNA, 20 bp, Artificial Sequence
  Description of Artificial Sequence: Synthetic oligonucleotide
  Target: LAMA2; (+) strand; PAM type: NNNNGHTT; PAM sequence: GCTAGTTT
caaatgacattatactcaaa

SEQ ID NO: 46787 - DNA, 20 bp, Artificial Sequence
  Description of Artificial Sequence: Synthetic oligonucleotide
  Target: LAMA2; (+) strand; PAM type: NNNNGHTT; PAM sequence: TGATGATT
tatactcaaagctagttttc

SEQ ID NO: 46788 - DNA, 20 bp, Artificial Sequence
  Description of Artificial Sequence: Synthetic oligonucleotide
  Target: LAMA2; (+) strand; PAM type: NNNNGHTT; PAM sequence: ATTGGATT
tcaaagctagttttctgatg

SEQ ID NO: 46789 - DNA, 20 bp, Artificial Sequence
  Description of Artificial Sequence: Synthetic oligonucleotide
  Target: LAMA2; (+) strand; PAM type: NNNNGHTT; PAM sequence: GGAAGATT
gattataatgttatctccta

SEQ ID NO: 46790 - DNA, 20 bp, Artificial Sequence
  Description of Artificial Sequence: Synthetic oligonucleotide
  Target: LAMA2; (+) strand; PAM type: NNNNGHTT; PAM sequence: TGCTGCTT
ttttatgggcaaagctgcag

SEQ ID NO: 46791 - DNA, 20 bp, Artificial Sequence
  Description of Artificial Sequence: Synthetic oligonucleotide
  Target: LAMA2; (+) strand; PAM type: NNNNGHTT; PAM sequence: GGGTGCTT
tgctgctttctgcctggtat

SEQ ID NO: 46792 - DNA, 20 bp, Artificial Sequence
  Description of Artificial Sequence: Synthetic oligonucleotide
  Target: LAMA2; (+) strand; PAM type: NNNNGHTT; PAM sequence: TTTTGTTT
tatgggtgctttcttctttt

SEQ ID NO: 46793 - DNA, 20 bp, Artificial Sequence
  Description of Artificial Sequence: Synthetic oligonucleotide
  Target: LAMA2; (+) strand; PAM type: NNNNGHTT; PAM sequence: GCAGGTTT
tggatactcgtgcacaacat

SEQ ID NO: 46794 - DNA, 20 bp, Artificial Sequence
  Description of Artificial Sequence: Synthetic oligonucleotide
  Target: LAMA2; (+) strand; PAM type: NNNNGHTT; PAM sequence: ACAGGCTT
tcacctaggcataattttcc

SEQ ID NO: 46795 - DNA, 20 bp, Artificial Sequence
  Description of Artificial Sequence: Synthetic oligonucleotide
  Target: LAMA2; (+) strand; PAM type: NNNNGHTT; PAM sequence: ACTGGCTT
ttacagagtccctttgtctc

SEQ ID NO: 46796 - DNA, 20 bp, Artificial Sequence
  Description of Artificial Sequence: Synthetic oligonucleotide
  Target: LAMA2; (+) strand; PAM type: NNNNGHTT; PAM sequence: GGGTGCTT
acagacagctaatgcatgca

SEQ ID NO: 46797 - DNA, 20 bp, Artificial Sequence
  Description of Artificial Sequence: Synthetic oligonucleotide
  Target: LAMA2; (+) strand; PAM type: NNNNGHTT; PAM sequence: CAGTGTTT
ctatcaggtgtacagatgat

SEQ ID NO: 46798 - DNA, 20 bp, Artificial Sequence
  Description of Artificial Sequence: Synthetic oligonucleotide
  Target: LAMA2; (+) strand; PAM type: NNNNGHTT; PAM sequence: CCAGGCTT
gtacagatgatcagtgtttc

SEQ ID NO: 46799 - DNA, 20 bp, Artificial Sequence
  Description of Artificial Sequence: Synthetic oligonucleotide
  Target: LAMA2; (+) strand; PAM type: NNNNGHTT; PAM sequence: ACAGGCTT
aggctttaaaagtccacaag

SEQ ID NO: 46800 - DNA, 20 bp, Artificial Sequence
  Description of Artificial Sequence: Synthetic oligonucleotide
  Target: LAMA2; (+) strand; PAM type: NNNNGHTT; PAM sequence: AGGAGATT
tattcagagcatgcacagac

SEQ ID NO: 46801 - DNA, 20 bp, Artificial Sequence
  Description of Artificial Sequence: Synthetic oligonucleotide
  Target: LAMA2; (+) strand; PAM type: NNNNGHTT; PAM sequence: ATTAGATT
ggagatttagtcctagagac

SEQ ID NO: 46802 - DNA, 20 bp, Artificial Sequence
  Description of Artificial Sequence: Synthetic oligonucleotide
  Target: LAMA2; (+) strand; PAM type: NNNNGHTT; PAM sequence: TCTGGTTT
agtcctagagacattagatt

SEQ ID NO: 46803 - DNA, 20 bp, Artificial Sequence
  Description of Artificial Sequence: Synthetic oligonucleotide
  Target: LAMA2; (+) strand; PAM type: NNNNGHTT; PAM sequence: TCCTGCTT
gaccactcccagctgggcct

SEQ ID NO: 46804 - DNA, 20 bp, Artificial Sequence
  Description of Artificial Sequence: Synthetic oligonucleotide
  Target: LAMA2; (+) strand; PAM type: NNNNGHTT; PAM sequence: CAGTGATT
ctttcttctgagcctaaacc

SEQ ID NO: 46805 - DNA, 20 bp, Artificial Sequence
  Description of Artificial Sequence: Synthetic oligonucleotide
  Target: LAMA2; (+) strand; PAM type: NNNNGHTT; PAM sequence: GCTAGTTT
accactttcttcccaggctg

SEQ ID NO: 46806 - DNA, 20 bp, Artificial Sequence
  Description of Artificial Sequence: Synthetic oligonucleotide
  Target: LAMA2; (+) strand; PAM type: NNNNGHTT; PAM sequence: AGATGTTT
tacattttagtacacagtcc

SEQ ID NO: 46807 - DNA, 20 bp, Artificial Sequence
  Description of Artificial Sequence: Synthetic oligonucleotide
  Target: LAMA2; (+) strand; PAM type: NNNNGHTT; PAM sequence: AGAGGCTT
tcttcatagtacctttagag

SEQ ID NO: 46808 - DNA, 20 bp, Artificial Sequence
  Description of Artificial Sequence: Synthetic oligonucleotide
  Target: LAMA2; (+) strand; PAM type: NNNNGHTT; PAM sequence: TTGTGCTT
gttctaaatgaggctaaaat

SEQ ID NO: 46809 - DNA, 20 bp, Artificial Sequence
  Description of Artificial Sequence: Synthetic oligonucleotide
  Target: LAMA2; (+) strand; PAM type: NNNNGHTT; PAM sequence: CCAGGATT
atagctgtgatcagtgctgt

SEQ ID NO: 46810 - DNA, 20 bp, Artificial Sequence
  Description of Artificial Sequence: Synthetic oligonucleotide
  Target: LAMA2; (+) strand; PAM type: NNNNGHTT; PAM sequence: TCTAGCTT
cttcgaagacaacccatatg

SEQ ID NO: 46811 - DNA, 20 bp, Artificial Sequence
  Description of Artificial Sequence: Synthetic oligonucleotide
  Target: LAMA2; (+) strand; PAM type: NNNNGHTT; PAM sequence: CTGTGTTT
gacaggtatcatggagaaac

SEQ ID NO: 46812 - DNA, 20 bp, Artificial Sequence
  Description of Artificial Sequence: Synthetic oligonucleotide
  Target: LAMA2; (+) strand; PAM type: NNNNGHTT; PAM sequence: TGGAGATT
catggagaaacctgtgtttc

SEQ ID NO: 46813 - DNA, 20 bp, Artificial Sequence
  Description of Artificial Sequence: Synthetic oligonucleotide
  Target: LAMA2; (+) strand; PAM type: NNNNGHTT; PAM sequence: AACAGCTT
aagtatatatggccttcaaa

SEQ ID NO: 46814 - DNA, 20 bp, Artificial Sequence
  Description of Artificial Sequence: Synthetic oligonucleotide
  Target: LAMA2; (+) strand; PAM type: NNNNGHTT; PAM sequence: CATGGTTT
taaagtcggccttccatatc

SEQ ID NO: 46815 - DNA, 20 bp, Artificial Sequence
  Description of Artificial Sequence: Synthetic oligonucleotide
  Target: LAMA2; (+) strand; PAM type: NNNNGHTT; PAM sequence: AAATGTTT
tctaaccaactgcagatcaa

SEQ ID NO: 46816 - DNA, 20 bp, Artificial Sequence
  Description of Artificial Sequence: Synthetic oligonucleotide
  Target: LAMA2; (+) strand; PAM type: NNNNGHTT; PAM sequence: TGGTGTTT
acttgagtatccttgaatct

SEQ ID NO: 46817 - DNA, 20 bp, Artificial Sequence
  Description of Artificial Sequence: Synthetic oligonucleotide
  Target: LAMA2; (+) strand; PAM type: NNNNGHTT; PAM sequence: TTTAGTTT
agggatggctgtattttctt

SEQ ID NO: 46818 - DNA, 20 bp, Artificial Sequence
  Description of Artificial Sequence: Synthetic oligonucleotide
  Target: LAMA2; (+) strand; PAM type: NNNNGHTT; PAM sequence: TTGAGATT
ggctgtattttctttttagt

SEQ ID NO: 46819 - DNA, 20 bp, Artificial Sequence
  Description of Artificial Sequence: Synthetic oligonucleotide
  Target: LAMA2; (+) strand; PAM type: NNNNGHTT; PAM sequence: ATTTGCTT
ttattttctgcactcacttc

SEQ ID NO: 46820 - DNA, 20 bp, Artificial Sequence
  Description of Artificial Sequence: Synthetic oligonucleotide
  Target: LAMA2; (+) strand; PAM type: NNNNGHTT; PAM sequence: TTTGGATT
ctgcactcacttcatttgct

SEQ ID NO: 46821 - DNA, 20 bp, Artificial Sequence
  Description of Artificial Sequence: Synthetic oligonucleotide
  Target: LAMA2; (+) strand; PAM type: NNNNGHTT; PAM sequence: GCCTGTTT
ttgcttttggatttgtgtct

SEQ ID NO: 46822 - DNA, 20 bp, Artificial Sequence
  Description of Artificial Sequence: Synthetic oligonucleotide
  Target: LAMA2; (+) strand; PAM type: NNNNGHTT; PAM sequence: TATGGATT
ctgcctgtttataaagatat

SEQ ID NO: 46823 - DNA, 20 bp, Artificial Sequence
  Description of Artificial Sequence: Synthetic oligonucleotide
  Target: LAMA2; (+) strand; PAM type: NNNNGHTT; PAM sequence: TTTTGTTT
ggaccattggaagcccagcc

SEQ ID NO: 46824 - DNA, 20 bp, Artificial Sequence
  Description of Artificial Sequence: Synthetic oligonucleotide
  Target: LAMA2; (+) strand; PAM type: NNNNGHTT; PAM sequence: CACAGCTT
tggctaatcccttagttctc

SEQ ID NO: 46825 - DNA, 20 bp, Artificial Sequence
  Description of Artificial Sequence: Synthetic oligonucleotide
  Target: LAMA2; (+) strand; PAM type: NNNNGHTT; PAM sequence: GGATGTTT
ttaaatgtaatgccacccag

SEQ ID NO: 46826 - DNA, 20 bp, Artificial Sequence
  Description of Artificial Sequence: Synthetic oligonucleotide
  Target: LAMA2; (+) strand; PAM type: NNNNGHTT; PAM sequence: TTCTGTTT
aaattttaattaaatttctc

SEQ ID NO: 46827 - DNA, 20 bp, Artificial Sequence
  Description of Artificial Sequence: Synthetic oligonucleotide
  Target: LAMA2; (+) strand; PAM type: NNNNGHTT; PAM sequence: TTGTGTTT
aatcctttaccactctttac

SEQ ID NO: 46828 - DNA, 20 bp, Artificial Sequence
  Description of Artificial Sequence: Synthetic oligonucleotide
  Target: LAMA2; (+) strand; PAM type: NNNNGHTT; PAM sequence: CTACGTTT
accactctttacttgtgttt

SEQ ID NO: 46829 - DNA, 20 bp, Artificial Sequence
  Description of Artificial Sequence: Synthetic oligonucleotide
  Target: LAMA2; (+) strand; PAM type: NNNNGHTT; PAM sequence: GAAAGCTT
tcagcaatgagtacattcct

SEQ ID NO: 46830 - DNA, 20 bp, Artificial Sequence
  Description of Artificial Sequence: Synthetic oligonucleotide
  Target: LAMA2; (+) strand; PAM type: NNNNGHTT; PAM sequence: TTGAGTTT
ataatcacattctaattcat

SEQ ID NO: 46831 - DNA, 20 bp, Artificial Sequence
  Description of Artificial Sequence: Synthetic oligonucleotide
  Target: LAMA2; (+) strand; PAM type: NNNNGHTT; PAM sequence: TTTGGATT
tctaattcatttgagtttaa

SEQ ID NO: 46832 - DNA, 20 bp, Artificial Sequence
  Description of Artificial Sequence: Synthetic oligonucleotide
  Target: LAMA2; (+) strand; PAM type: NNNNGHTT; PAM sequence: TCTAGCTT
ttaatttggattttcatcaa

SEQ ID NO: 46833 - DNA, 20 bp, Artificial Sequence
  Description of Artificial Sequence: Synthetic oligonucleotide
  Target: LAMA2; (+) strand; PAM type: NNNNGHTT; PAM sequence: AACAGTTT
ttgctgagcctttactaaac

SEQ ID NO: 46834 - DNA, 20 bp, Artificial Sequence
  Description of Artificial Sequence: Synthetic oligonucleotide
  Target: LAMA2; (+) strand; PAM type: NNNNGHTT; PAM sequence: CATGGCTT
tgctgatgatagagaaaaaa

SEQ ID NO: 46835 - DNA, 20 bp, Artificial Sequence
  Description of Artificial Sequence: Synthetic oligonucleotide
  Target: LAMA2; (+) strand; PAM type: NNNNGHTT; PAM sequence: GACCGTTT
gctgcacagagtgtgtgatg

SEQ ID NO: 46836 - DNA, 20 bp, Artificial Sequence
  Description of Artificial Sequence: Synthetic oligonucleotide
  Target: LAMA2; (+) strand; PAM type: NNNNGHTT; PAM sequence: CAGGGTTT
atggaccgtttatttggcat

SEQ ID NO: 46837 - DNA, 20 bp, Artificial Sequence
  Description of Artificial Sequence: Synthetic oligonucleotide
  Target: LAMA2; (+) strand; PAM type: NNNNGHTT; PAM sequence: TTATGTTT
gagaataagtctatgttact

SEQ ID NO: 46838 - DNA, 20 bp, Artificial Sequence
  Description of Artificial Sequence: Synthetic oligonucleotide
  Target: LAMA2; (+) strand; PAM type: NNNNGHTT; PAM sequence: CTCTGCTT
ctatgttactttatgttttc

SEQ ID NO: 46839 - DNA, 20 bp, Artificial Sequence
  Description of Artificial Sequence: Synthetic oligonucleotide
  Target: LAMA2; (+) strand; PAM type: NNNNGHTT; PAM sequence: AGAAGTTT
cctctgcttatactggcagc

SEQ ID NO: 46840 - DNA, 20 bp, Artificial Sequence
  Description of Artificial Sequence: Synthetic oligonucleotide
  Target: LAMA2; (+) strand; PAM type: NNNNGHTT; PAM sequence: GACTGTTT
atactggcagcagaagtttt

SEQ ID NO: 46841 - DNA, 20 bp, Artificial Sequence
  Description of Artificial Sequence: Synthetic oligonucleotide
  Target: LAMA2; (+) strand; PAM type: NNNNGHTT; PAM sequence: CAAAGCTT
tttgaaatacactattacaa

SEQ ID NO: 46842 - DNA, 20 bp, Artificial Sequence
  Description of Artificial Sequence: Synthetic oligonucleotide
  Target: LAMA2; (+) strand; PAM type: NNNNGHTT; PAM sequence: AGGAGTTT
tgggaggatctcttgagccc

SEQ ID NO: 46843 - DNA, 20 bp, Artificial Sequence
  Description of Artificial Sequence: Synthetic oligonucleotide
  Target: LAMA2; (+) strand; PAM type: NNNNGHTT; PAM sequence: CTCCGTTT
gtgagaccctgtctgtatca

SEQ ID NO: 46844 - DNA, 20 bp, Artificial Sequence
  Description of Artificial Sequence: Synthetic oligonucleotide
  Target: LAMA2; (+) strand; PAM type: NNNNGHTT; PAM sequence: AGAGGTTT
ctgggtaatttataaaggaa

SEQ ID NO: 46845 - DNA, 20 bp, Artificial Sequence
  Description of Artificial Sequence: Synthetic oligonucleotide
  Target: LAMA2; (+) strand; PAM type: NNNNGHTT; PAM sequence: TGGAGATT
ctcctccctccctccatacg

SEQ ID NO: 46846 - DNA, 20 bp, Artificial Sequence
  Description of Artificial Sequence: Synthetic oligonucleotide
  Target: LAMA2; (+) strand; PAM type: NNNNGHTT; PAM sequence: ATGAGATT
cgtggagattacaatttcaa

SEQ ID NO: 46847 - DNA, 20 bp, Artificial Sequence
  Description of Artificial Sequence: Synthetic oligonucleotide
  Target: LAMA2; (+) strand; PAM type: NNNNGHTT; PAM sequence: AACTGCTT
atgttgccctaaagatataa

SEQ ID NO: 46848 - DNA, 20 bp, Artificial Sequence
  Description of Artificial Sequence: Synthetic oligonucleotide
  Target: LAMA2; (+) strand; PAM type: NNNNGHTT; PAM sequence: TAGTGATT
ataaaactgcttacaatgcc

SEQ ID NO: 46849 - DNA, 20 bp, Artificial Sequence
  Description of Artificial Sequence: Synthetic oligonucleotide
  Target: LAMA2; (+) strand; PAM type: NNNNGHTT; PAM sequence: TATTGATT
ttacaatgcctagtgatttg

SEQ ID NO: 46850 - DNA, 20 bp, Artificial Sequence
  Description of Artificial Sequence: Synthetic oligonucleotide
  Target: LAMA2; (+) strand; PAM type: NNNNGHTT; PAM sequence: TAAAGTTT
attgattactatgtgttccc

SEQ ID NO: 46851 - DNA, 20 bp, Artificial Sequence
  Description of Artificial Sequence: Synthetic oligonucleotide
  Target: LAMA2; (+) strand; PAM type: NNNNGHTT; PAM sequence: AAGTGTTT
atattatttttcacctatca

SEQ ID NO: 46852 - DNA, 20 bp, Artificial Sequence
  Description of Artificial Sequence: Synthetic oligonucleotide
  Target: LAMA2; (+) strand; PAM type: NNNNGHTT; PAM sequence: GAATGCTT
cttctactcaacaaatattt

SEQ ID NO: 46853 - DNA, 20 bp, Artificial Sequence
  Description of Artificial Sequence: Synthetic oligonucleotide
  Target: LAMA2; (+) strand; PAM type: NNNNGHTT; PAM sequence: AAGTGTTT
aaggttggtggctatggaga

SEQ ID NO: 46854 - DNA, 20 bp, Artificial Sequence
  Description of Artificial Sequence: Synthetic oligonucleotide
  Target: LAMA2; (+) strand; PAM type: NNNNGHTT; PAM sequence: AAGCGATT
ttcctggaggggaatttttt

SEQ ID NO: 46855 - DNA, 20 bp, Artificial Sequence
  Description of Artificial Sequence: Synthetic oligonucleotide
  Target: LAMA2; (+) strand; PAM type: NNNNGHTT; PAM sequence: TTATGCTT
acatatcctttgactagaaa

SEQ ID NO: 46856 - DNA, 20 bp, Artificial Sequence
  Description of Artificial Sequence: Synthetic oligonucleotide
  Target: LAMA2; (+) strand; PAM type: NNNNGHTT; PAM sequence: GTATGTTT
tttattgagctcagtattta

SEQ ID NO: 46857 - DNA, 20 bp, Artificial Sequence
  Description of Artificial Sequence: Synthetic oligonucleotide
  Target: LAMA2; (+) strand; PAM type: NNNNGHTT; PAM sequence: TCGAGTTT
tactaaagtgatgctaggac

SEQ ID NO: 46858 - DNA, 20 bp, Artificial Sequence
  Description of Artificial Sequence: Synthetic oligonucleotide
  Target: LAMA2; (+) strand; PAM type: NNNNGHTT; PAM sequence: CCATGATT
atgctaatatggaaagggct

SEQ ID NO: 46859 - DNA, 20 bp, Artificial Sequence
  Description of Artificial Sequence: Synthetic oligonucleotide
  Target: LAMA2; (+) strand; PAM type: NNNNGHTT; PAM sequence: AAAAGATT
tcccttttgtagaataaata

SEQ ID NO: 46860 - DNA, 20 bp, Artificial Sequence
  Description of Artificial Sequence: Synthetic oligonucleotide
  Target: LAMA2; (+) strand; PAM type: NNNNGHTT; PAM sequence: AAGTGATT
tacccaatcctttctggaga

SEQ ID NO: 46861 - DNA, 20 bp, Artificial Sequence
  Description of Artificial Sequence: Synthetic oligonucleotide
  Target: LAMA2; (+) strand; PAM type: NNNNGHTT; PAM sequence: TAATGATT
ttctttataagacattacgc

SEQ ID NO: 46862 - DNA, 20 bp, Artificial Sequence
  Description of Artificial Sequence: Synthetic oligonucleotide
  Target: LAMA2; (+) strand; PAM type: NNNNGHTT; PAM sequence: TTGTGCTT
tttcacatgcattatctcac

SEQ ID NO: 46863 - DNA, 20 bp, Artificial Sequence
  Description of Artificial Sequence: Synthetic oligonucleotide
  Target: LAMA2; (+) strand; PAM type: NNNNGHTT; PAM sequence: AGAAGTTT
actgagccttcgtgaaatta

SEQ ID NO: 46864 - DNA, 20 bp, Artificial Sequence
  Description of Artificial Sequence: Synthetic oligonucleotide
  Target: LAMA2; (+) strand; PAM type: NNNNGHTT; PAM sequence: CTCGGTTT
tagccaccagtaaactagct

SEQ ID NO: 46865 - DNA, 20 bp, Artificial Sequence
  Description of Artificial Sequence: Synthetic oligonucleotide
  Target: LAMA2; (+) strand; PAM type: NNNNGHTT; PAM sequence: AAGAGATT
cattcaccgggtaggatgtg

SEQ ID NO: 46866 - DNA, 20 bp, Artificial Sequence
  Description of Artificial Sequence: Synthetic oligonucleotide
  Target: LAMA2; (+) strand; PAM type: NNNNGHTT; PAM sequence: TCTGGCTT
tagcagtgcagactctggag

SEQ ID NO: 46867 - DNA, 20 bp, Artificial Sequence
  Description of Artificial Sequence: Synthetic oligonucleotide
  Target: LAMA2; (+) strand; PAM type: NNNNGHTT; PAM sequence: GTTGGTTT
tctggagtctggcttcagag

SEQ ID NO: 46868 - DNA, 20 bp, Artificial Sequence
  Description of Artificial Sequence: Synthetic oligonucleotide
  Target: LAMA2; (+) strand; PAM type: NNNNGHTT; PAM sequence: TACTGATT
cttcagaggttggtttccaa

SEQ ID NO: 46869 - DNA, 20 bp, Artificial Sequence
  Description of Artificial Sequence: Synthetic oligonucleotide
  Target: LAMA2; (+) strand; PAM type: NNNNGHTT; PAM sequence: TCAGGTTT
gttatttcacttctctggac

SEQ ID NO: 46870 - DNA, 20 bp, Artificial Sequence
  Description of Artificial Sequence: Synthetic oligonucleotide
  Target: LAMA2; (+) strand; PAM type: NNNNGHTT; PAM sequence: TGAGGATT
ctaattcctaaaagcatttt

SEQ ID NO: 46871 - DNA, 20 bp, Artificial Sequence
  Description of Artificial Sequence: Synthetic oligonucleotide
  Target: LAMA2; (+) strand; PAM type: NNNNGHTT; PAM sequence: CTATGTTT
gtgtctggcattgagaaaac

SEQ ID NO: 46872 - DNA, 20 bp, Artificial Sequence
  Description of Artificial Sequence: Synthetic oligonucleotide
  Target: LAMA2; (+) strand; PAM type: NNNNGHTT; PAM sequence: TACAGATT
tccatatggtagtaattcat

SEQ ID NO: 46873 - DNA, 20 bp, Artificial Sequence
  Description of Artificial Sequence: Synthetic oligonucleotide
  Target: LAMA2; (+) strand; PAM type: NNNNGHTT; PAM sequence: ATATGATT
aaccaaatattggcaattgc

SEQ ID NO: 46874 - DNA, 20 bp, Artificial Sequence
  Description of Artificial Sequence: Synthetic oligonucleotide
  Target: LAMA2; (+) strand; PAM type: NNNNGHTT; PAM sequence: TTGAGCTT
atattggcaattgcatatga

SEQ ID NO: 46875 - DNA, 20 bp, Artificial Sequence
  Description of Artificial Sequence: Synthetic oligonucleotide
  Target: LAMA2; (+) strand; PAM type: NNNNGHTT; PAM sequence: ATATGTTT
catatgattgagcttaattt

SEQ ID NO: 46876 - DNA, 20 bp, Artificial Sequence
  Description of Artificial Sequence: Synthetic oligonucleotide
  Target: LAMA2; (+) strand; PAM type: NNNNGHTT; PAM sequence: ATATGTTT
tacatccagatactttctgg

SEQ ID NO: 46877 - DNA, 20 bp, Artificial Sequence
  Description of Artificial Sequence: Synthetic oligonucleotide
  Target: LAMA2; (+) strand; PAM type: NNNNGHTT; PAM sequence: GGAGGATT
ctactcgggaggctgagaca

SEQ ID NO: 46878 - DNA, 20 bp, Artificial Sequence
  Description of Artificial Sequence: Synthetic oligonucleotide
  Target: LAMA2; (+) strand; PAM type: NNNNGHTT; PAM sequence: GATTGCTT
tcgggaggctgagacaggag

SEQ ID NO: 46879 - DNA, 20 bp, Artificial Sequence
  Description of Artificial Sequence: Synthetic oligonucleotide
  Target: LAMA2; (+) strand; PAM type: NNNNGHTT; PAM sequence: AAATGATT
aaatctattatgtataacag

SEQ ID NO: 46880 - DNA, 20 bp, Artificial Sequence
  Description of Artificial Sequence: Synthetic oligonucleotide
  Target: LAMA2; (+) strand; PAM type: NNNNGHTT; PAM sequence: TGATGTTT
aaatgtatctgaaatcaaat

SEQ ID NO: 46881 - DNA, 20 bp, Artificial Sequence
  Description of Artificial Sequence: Synthetic oligonucleotide
  Target: LAMA2; (+) strand; PAM type: NNNNGHTT; PAM sequence: CTGAGTTT
aaaatgttgccagaagaaat

SEQ ID NO: 46882 - DNA, 20 bp, Artificial Sequence
  Description of Artificial Sequence: Synthetic oligonucleotide
  Target: LAMA2; (+) strand; PAM type: NNNNGHTT; PAM sequence: GATGGCTT
taaactgcgagacatgtact

SEQ ID NO: 46883 - DNA, 20 bp, Artificial Sequence
  Description of Artificial Sequence: Synthetic oligonucleotide
  Target: LAMA2; (+) strand; PAM type: NNNNGHTT; PAM sequence: GTATGCTT
ttcagacccaaaggggtaaa

SEQ ID NO: 46884 - DNA, 20 bp, Artificial Sequence
  Description of Artificial Sequence: Synthetic oligonucleotide
  Target: LAMA2; (+) strand; PAM type: NNNNGHTT; PAM sequence: TTTTGCTT
tctttcataaagagttattt

SEQ ID NO: 46885 - DNA, 20 bp, Artificial Sequence
  Description of Artificial Sequence: Synthetic oligonucleotide
  Target: LAMA2; (+) strand; PAM type: NNNNGHTT; PAM sequence: AAATGTTT
ttttttgctttttcatacaa

SEQ ID NO: 46886 - DNA, 20 bp, Artificial Sequence
  Description of Artificial Sequence: Synthetic oligonucleotide
  Target: LAMA2; (+) strand; PAM type: NNNNGHTT; PAM sequence: GAAAGCTT
tacaaaaaaataataatttt

SEQ ID NO: 46887 - DNA, 20 bp, Artificial Sequence
  Description of Artificial Sequence: Synthetic oligonucleotide
  Target: LAMA2; (+) strand; PAM type: NNNNGHTT; PAM sequence: GAAAGTTT
aaaacttttccatcactcca

SEQ ID NO: 46888 - DNA, 20 bp, Artificial Sequence
  Description of Artificial Sequence: Synthetic oligonucleotide
  Target: LAMA2; (+) strand; PAM type: NNNNGHTT; PAM sequence: TTCTGATT
ggacccctaggcaaactctg

SEQ ID NO: 46889 - DNA, 20 bp, Artificial Sequence
  Description of Artificial Sequence: Synthetic oligonucleotide
  Target: LAMA2; (+) strand; PAM type: NNNNGHTT; PAM sequence: TTAAGATT
ttttcactcgacataatatg

SEQ ID NO: 46890 - DNA, 20 bp, Artificial Sequence
  Description of Artificial Sequence: Synthetic oligonucleotide
  Target: LAMA2; (+) strand; PAM type: NNNNGHTT; PAM sequence: TGTTGTTT
aatatgttaagatttatcca

SEQ ID NO: 46891 - DNA, 20 bp, Artificial Sequence
  Description of Artificial Sequence: Synthetic oligonucleotide
  Target: LAMA2; (+) strand; PAM type: NNNNGHTT; PAM sequence: TCCAGTTT
tgatagaaattaggatcatt

SEQ ID NO: 46892 - DNA, 20 bp, Artificial Sequence
  Description of Artificial Sequence: Synthetic oligonucleotide
  Target: LAMA2; (+) strand; PAM type: NNNNGHTT; PAM sequence: TTTAGCTT
aaattaggatcatttccagt

SEQ ID NO: 46893 - DNA, 20 bp, Artificial Sequence
  Description of Artificial Sequence: Synthetic oligonucleotide
  Target: LAMA2; (+) strand; PAM type: NNNNGHTT; PAM sequence: GAAAGCTT
tgtgtaaatacttaggaata

SEQ ID NO: 46894 - DNA, 20 bp, Artificial Sequence
  Description of Artificial Sequence: Synthetic oligonucleotide
  Target: LAMA2; (+) strand; PAM type: NNNNGHTT; PAM sequence: AGATGCTT
gcttttttcataggataggt

SEQ ID NO: 46895 - DNA, 20 bp, Artificial Sequence
  Description of Artificial Sequence: Synthetic oligonucleotide
  Target: LAMA2; (+) strand; PAM type: NNNNGHTT; PAM sequence: ATGAGTTT
aatgttcaccaaaaagttat

SEQ ID NO: 46896 - DNA, 20 bp, Artificial Sequence
  Description of Artificial Sequence: Synthetic oligonucleotide
  Target: LAMA2; (+) strand; PAM type: NNNNGHTT; PAM sequence: TTTGGATT
tatttgatgttgactatctt

SEQ ID NO: 46897 - DNA, 20 bp, Artificial Sequence
  Description of Artificial Sequence: Synthetic oligonucleotide
  Target: LAMA2; (+) strand; PAM type: NNNNGHTT; PAM sequence: ATCTGATT
tctagtgggtgtgaaatggc

SEQ ID NO: 46898 - DNA, 20 bp, Artificial Sequence
  Description of Artificial Sequence: Synthetic oligonucleotide
  Target: LAMA2; (+) strand; PAM type: NNNNGHTT; PAM sequence: TATGGATT
ggtgtgaaatggcatctgat

SEQ ID NO: 46899 - DNA, 20 bp, Artificial Sequence
  Description of Artificial Sequence: Synthetic oligonucleotide
  Target: LAMA2; (+) strand; PAM type: NNNNGHTT; PAM sequence: AAGGGCTT
atggatttaattttaatcgt

SEQ ID NO: 46900 - DNA, 20 bp, Artificial Sequence
  Description of Artificial Sequence: Synthetic oligonucleotide
  Target: LAMA2; (+) strand; PAM type: NNNNGHTT; PAM sequence: AAATGTTT
agctattacccatatcaagt

SEQ ID NO: 46901 - DNA, 20 bp, Artificial Sequence
  Description of Artificial Sequence: Synthetic oligonucleotide
  Target: LAMA2; (+) strand; PAM type: NNNNGHTT; PAM sequence: ACCAGATT
gtgtgtggtgtgaataagta

SEQ ID NO: 46902 - DNA, 20 bp, Artificial Sequence
  Description of Artificial Sequence: Synthetic oligonucleotide
  Target: LAMA2; (+) strand; PAM type: NNNNGHTT; PAM sequence: CATTGCTT
tgctaataccatactatctt

SEQ ID NO: 46903 - DNA, 20 bp, Artificial Sequence
  Description of Artificial Sequence: Synthetic oligonucleotide
  Target: LAMA2; (+) strand; PAM type: NNNNGHTT; PAM sequence: TCAAGATT
accaactttattttttattt

SEQ ID NO: 46904 - DNA, 20 bp, Artificial Sequence
  Description of Artificial Sequence: Synthetic oligonucleotide
  Target: LAMA2; (+) strand; PAM type: NNNNGHTT; PAM sequence: AGGGGCTT
ttttcaagattgtctatagt

SEQ ID NO: 46905 - DNA, 20 bp, Artificial Sequence
  Description of Artificial Sequence: Synthetic oligonucleotide
  Target: LAMA2; (+) strand; PAM type: NNNNGHTT; PAM sequence: GTGTGTTT
tatagtaggggcttttttgt

SEQ ID NO: 46906 - DNA, 20 bp, Artificial Sequence
  Description of Artificial Sequence: Synthetic oligonucleotide
  Target: LAMA2; (+) strand; PAM type: NNNNGHTT; PAM sequence: TTAGGATT
cttgtcaattacagaaaata

SEQ ID NO: 46907 - DNA, 20 bp, Artificial Sequence
  Description of Artificial Sequence: Synthetic oligonucleotide
  Target: LAMA2; (+) strand; PAM type: NNNNGHTT; PAM sequence: TATTGCTT
attacagaaaatattaggat

SEQ ID NO: 46908 - DNA, 20 bp, Artificial Sequence
  Description of Artificial Sequence: Synthetic oligonucleotide
  Target: LAMA2; (+) strand; PAM type: NNNNGHTT; PAM sequence: TGGAGCTT
ctatatacaaatatggaaaa

SEQ ID NO: 46909 - DNA, 20 bp, Artificial Sequence
  Description of Artificial Sequence: Synthetic oligonucleotide
  Target: LAMA2; (+) strand; PAM type: NNNNGHTT; PAM sequence: AGTAGATT
tactcttaaaaaatgctgag

SEQ ID NO: 46910 - DNA, 20 bp, Artificial Sequence
  Description of Artificial Sequence: Synthetic oligonucleotide
  Target: LAMA2; (+) strand; PAM type: NNNNGHTT; PAM sequence: ATTAGCTT
ttatgttaggtaatatgtta

SEQ ID NO: 46911 - DNA, 20 bp, Artificial Sequence
  Description of Artificial Sequence: Synthetic oligonucleotide
  Target: LAMA2; (+) strand; PAM type: NNNNGHTT; PAM sequence: TTTTGCTT
tgttaaattaatctttagaa

SEQ ID NO: 46912 - DNA, 20 bp, Artificial Sequence
  Description of Artificial Sequence: Synthetic oligonucleotide
  Target: LAMA2; (+) strand; PAM type: NNNNGHTT; PAM sequence: AAGTGCTT
caggaattcacttcaataag

SEQ ID NO: 46913 - DNA, 20 bp, Artificial Sequence
  Description of Artificial Sequence: Synthetic oligonucleotide
  Target: LAMA2; (+) strand; PAM type: NNNNGHTT; PAM sequence: GGATGTTT
agaagctccaacttaggaga

SEQ ID NO: 46914 - DNA, 20 bp, Artificial Sequence
  Description of Artificial Sequence: Synthetic oligonucleotide
  Target: LAMA2; (+) strand; PAM type: NNNNGHTT; PAM sequence: AGATGCTT
ggaaaacagtccaaatttac

SEQ ID NO: 46915 - DNA, 20 bp, Artificial Sequence
  Description of Artificial Sequence: Synthetic oligonucleotide
  Target: LAMA2; (+) strand; PAM type: NNNNGHTT; PAM sequence: ATCAGCTT
aaacttcttttggccttggc

SEQ ID NO: 46916 - DNA, 20 bp, Artificial Sequence
  Description of Artificial Sequence: Synthetic oligonucleotide
  Target: LAMA2; (+) strand; PAM type: NNNNGHTT; PAM sequence: AATGGCTT
gctatctcacttgcaaagta

SEQ ID NO: 46917 - DNA, 20 bp, Artificial Sequence
  Description of Artificial Sequence: Synthetic oligonucleotide
  Target: LAMA2; (+) strand; PAM type: NNNNGHTT; PAM sequence: ATGAGATT
ttgcaaagtaaatggcttgt

SEQ ID NO: 46918 - DNA, 20 bp, Artificial Sequence
  Description of Artificial Sequence: Synthetic oligonucleotide
  Target: LAMA2; (+) strand; PAM type: NNNNGHTT; PAM sequence: GGCTGTTT
caaacacatcatcatctata

SEQ ID NO: 46919 - DNA, 20 bp, Artificial Sequence
  Description of Artificial Sequence: Synthetic oligonucleotide
  Target: LAMA2; (+) strand; PAM type: NNNNGHTT; PAM sequence: TAAGGCTT
gctgcactcatttatcttct

SEQ ID NO: 46920 - DNA, 20 bp, Artificial Sequence
  Description of Artificial Sequence: Synthetic oligonucleotide
  Target: LAMA2; (+) strand; PAM type: NNNNGHTT; PAM sequence: CACCGTTT
cttaaggctttcacagaaag

SEQ ID NO: 46921 - DNA, 20 bp, Artificial Sequence
  Description of Artificial Sequence: Synthetic oligonucleotide
  Target: LAMA2; (+) strand; PAM type: NNNNGHTT; PAM sequence: CAGAGCTT
tgaacaggcaattcagtacc

SEQ ID NO: 46922 - DNA, 20 bp, Artificial Sequence
  Description of Artificial Sequence: Synthetic oligonucleotide
  Target: LAMA2; (+) strand; PAM type: NNNNGHTT; PAM sequence: TCAGGATT
agcttgactggagacactaa

SEQ ID NO: 46923 - DNA, 20 bp, Artificial Sequence
  Description of Artificial Sequence: Synthetic oligonucleotide
  Target: LAMA2; (+) strand; PAM type: NNNNGHTT; PAM sequence: AAGTGTTT
ttgtccatatataaagaatg

SEQ ID NO: 46924 - DNA, 20 bp, Artificial Sequence
  Description of Artificial Sequence: Synthetic oligonucleotide
  Target: LAMA2; (+) strand; PAM type: NNNNGHTT; PAM sequence: CCCAGCTT
gaatgaagtgtttagaagtt

SEQ ID NO: 46925 - DNA, 20 bp, Artificial Sequence
  Description of Artificial Sequence: Synthetic oligonucleotide
  Target: LAMA2; (+) strand; PAM type: NNNNGHTT; PAM sequence: AAAGGTTT
gtatcctaataagagtactg

SEQ ID NO: 46926 - DNA, 20 bp, Artificial Sequence
  Description of Artificial Sequence: Synthetic oligonucleotide
  Target: LAMA2; (+) strand; PAM type: NNNNGHTT; PAM sequence: TAGAGTTT
taaaaacagttcttgcagtc

SEQ ID NO: 46927 - DNA, 20 bp, Artificial Sequence
  Description of Artificial Sequence: Synthetic oligonucleotide
  Target: LAMA2; (+) strand; PAM type: NNNNGHTT; PAM sequence: GATGGTTT
cagtctagagtttctcctcc

SEQ ID NO: 46928 - DNA, 20 bp, Artificial Sequence
  Description of Artificial Sequence: Synthetic oligonucleotide
  Target: LAMA2; (+) strand; PAM type: NNNNGHTT; PAM sequence: GTCAGATT
tctcctccgatggtttaacc

SEQ ID NO: 46929 - DNA, 20 bp, Artificial Sequence
  Description of Artificial Sequence: Synthetic oligonucleotide
  Target: LAMA2; (+) strand; PAM type: NNNNGHTT; PAM sequence: TTGGGATT
aaccgtcagatttttacatc

SEQ ID NO: 46930 - DNA, 20 bp, Artificial Sequence
  Description of Artificial Sequence: Synthetic oligonucleotide
  Target: LAMA2; (+) strand; PAM type: NNNNGHTT; PAM sequence: GCTGGATT
tcaacgctgtgagtctgggg

SEQ ID NO: 46931 - DNA, 20 bp, Artificial Sequence
  Description of Artificial Sequence: Synthetic oligonucleotide
  Target: LAMA2; (+) strand; PAM type: NNNNGHTT; PAM sequence: ATTAGCTT
tgtgggcccagcattctgac

SEQ ID NO: 46932 - DNA, 20 bp, Artificial Sequence
  Description of Artificial Sequence: Synthetic oligonucleotide
  Target: LAMA2; (+) strand; PAM type: NNNNGHTT; PAM sequence: CACCGATT
gtagacattcatcactgttc

SEQ ID NO: 46933 - DNA, 20 bp, Artificial Sequence
  Description of Artificial Sequence: Synthetic oligonucleotide
  Target: LAMA2; (+) strand; PAM type: NNNNGHTT; PAM sequence: AAACGTTT
gattagacacaattggccgc

SEQ ID NO: 46934 - DNA, 20 bp, Artificial Sequence
  Description of Artificial Sequence: Synthetic oligonucleotide
  Target: LAMA2; (+) strand; PAM type: NNNNGHTT; PAM sequence: AAATGATT
acaacgacgagccatctccc

SEQ ID NO: 46935 - DNA, 20 bp, Artificial Sequence
  Description of Artificial Sequence: Synthetic oligonucleotide
  Target: LAMA2; (+) strand; PAM type: NNNNGHTT; PAM sequence: AGTGGTTT
agccatgatgtagggctgga

SEQ ID NO: 46936 - DNA, 20 bp, Artificial Sequence
  Description of Artificial Sequence: Synthetic oligonucleotide
  Target: LAMA2; (+) strand; PAM type: NNNNGHTT; PAM sequence: TCAGGCTT
gggctggaagtggtttttgt

SEQ ID NO: 46937 - DNA, 20 bp, Artificial Sequence
  Description of Artificial Sequence: Synthetic oligonucleotide
  Target: LAMA2; (+) strand; PAM type: NNNNGHTT; PAM sequence: TAGCGTTT
ccagcacttctggagccagg

SEQ ID NO: 46938 - DNA, 20 bp, Artificial Sequence
  Description of Artificial Sequence: Synthetic oligonucleotide
  Target: LAMA2; (+) strand; PAM type: NNNNGHTT; PAM sequence: GGATGTTT
actcccatttttcttgatga

SEQ ID NO: 46939 - DNA, 20 bp, Artificial Sequence
  Description of Artificial Sequence: Synthetic oligonucleotide
  Target: LAMA2; (+) strand; PAM type: NNNNGHTT; PAM sequence: GCGGGCTT
ttaggtctcgatgagcaatt

SEQ ID NO: 46940 - DNA, 20 bp, Artificial Sequence
  Description of Artificial Sequence: Synthetic oligonucleotide
  Target: LAMA2; (+) strand; PAM type: NNNNGHTT; PAM sequence: ATACGTTT
gcgggctttccttgggtgcc

SEQ ID NO: 46941 - DNA, 20 bp, Artificial Sequence
  Description of Artificial Sequence: Synthetic oligonucleotide
  Target: LAMA2; (+) strand; PAM type: NNNNGHTT; PAM sequence: GTATGTTT
atctgccgctatgaaaccaa

SEQ ID NO: 46942 - DNA, 20 bp, Artificial Sequence
  Description of Artificial Sequence: Synthetic oligonucleotide
  Target: LAMA2; (+) strand; PAM type: NNNNGHTT; PAM sequence: CACAGTTT
atgttttcatggcgcattag

SEQ ID NO: 46943 - DNA, 20 bp, Artificial Sequence
  Description of Artificial Sequence: Synthetic oligonucleotide
  Target: LAMA2; (+) strand; PAM type: NNNNGHTT; PAM sequence: GGTAGATT
atggcgcattagcacagttt

SEQ ID NO: 46944 - DNA, 20 bp, Artificial Sequence
  Description of Artificial Sequence: Synthetic oligonucleotide
  Target: LAMA2; (+) strand; PAM type: NNNNGHTT; PAM sequence: TTCTGTTT
attagcacagtttggtagat

SEQ ID NO: 46945 - DNA, 20 bp, Artificial Sequence
  Description of Artificial Sequence: Synthetic oligonucleotide
  Target: LAMA2; (+) strand; PAM type: NNNNGHTT; PAM sequence: GCTGGCTT
atttctgtttctcgaaacca

SEQ ID NO: 46946 - DNA, 20 bp, Artificial Sequence
  Description of Artificial Sequence: Synthetic oligonucleotide
  Target: LAMA2; (+) strand; PAM type: NNNNGHTT; PAM sequence: ATCTGTTT
caacttgccggaccatctga

SEQ ID NO: 46947 - DNA, 20 bp, Artificial Sequence
  Description of Artificial Sequence: Synthetic oligonucleotide
  Target: LAMA2; (+) strand; PAM type: NNNNGHTT; PAM sequence: TAGTGATT
gactggtcaataaggtcttt

SEQ ID NO: 46948 - DNA, 20 bp, Artificial Sequence
  Description of Artificial Sequence: Synthetic oligonucleotide
  Target: LAMA2; (+) strand; PAM type: NNNNGHTT; PAM sequence: AAATGCTT
agtgattttccaactggaat

SEQ ID NO: 46949 - DNA, 20 bp, Artificial Sequence
  Description of Artificial Sequence: Synthetic oligonucleotide
  Target: LAMA2; (+) strand; PAM type: NNNNGHTT; PAM sequence: TCACGATT
atgcttcatcctgttccaaa

SEQ ID NO: 46950 - DNA, 20 bp, Artificial Sequence
  Description of Artificial Sequence: Synthetic oligonucleotide
  Target: LAMA2; (+) strand; PAM type: NNNNGHTT; PAM sequence: GTCTGCTT
caaatcacgattgtaacgac

SEQ ID NO: 46951 - DNA, 20 bp, Artificial Sequence
  Description of Artificial Sequence: Synthetic oligonucleotide
  Target: LAMA2; (+) strand; PAM type: NNNNGHTT; PAM sequence: TAATGTTT
tgcttgagatgctcttgcaa

SEQ ID NO: 46952 - DNA, 20 bp, Artificial Sequence
  Description of Artificial Sequence: Synthetic oligonucleotide
  Target: LAMA2; (+) strand; PAM type: NNNNGHTT; PAM sequence: CTGGGCTT
cattctattgtccggcgtag

SEQ ID NO: 46953 - DNA, 20 bp, Artificial Sequence
  Description of Artificial Sequence: Synthetic oligonucleotide
  Target: LAMA2; (+) strand; PAM type: NNNNGHTT; PAM sequence: TGTGGTTT
ttcatacaccctgaagctaa

SEQ ID NO: 46954 - DNA, 20 bp, Artificial Sequence
  Description of Artificial Sequence: Synthetic oligonucleotide
  Target: LAMA2; (+) strand; PAM type: NNNNGHTT; PAM sequence: GTCTGATT
tctgactttttctggtcgga

SEQ ID NO: 46955 - DNA, 20 bp, Artificial Sequence
  Description of Artificial Sequence: Synthetic oligonucleotide
  Target: LAMA2; (+) strand; PAM type: NNNNGHTT; PAM sequence: TCCAGATT
cagtgccgtggagcatacta

SEQ ID NO: 46956 - DNA, 20 bp, Artificial Sequence
  Description of Artificial Sequence: Synthetic oligonucleotide
  Target: LAMA2; (+) strand; PAM type: NNNNGHTT; PAM sequence: TAATGTTT
gctgagtcattgttcaattg

SEQ ID NO: 46957 - DNA, 20 bp, Artificial Sequence
  Description of Artificial Sequence: Synthetic oligonucleotide
  Target: LAMA2; (+) strand; PAM type: NNNNGHTT; PAM sequence: GTGAGATT
atttaaatgactgtcattca

SEQ ID NO: 46958 - DNA, 20 bp, Artificial Sequence
  Description of Artificial Sequence: Synthetic oligonucleotide
  Target: LAMA2; (+) strand; PAM type: NNNNGHTT; PAM sequence: CACTGCTT
ttgacaatgacttcaactcc

SEQ ID NO: 46959 - DNA, 20 bp, Artificial Sequence
  Description of Artificial Sequence: Synthetic oligonucleotide
  Target: LAMA2; (+) strand; PAM type: NNNNGHTT; PAM sequence: TTCCGATT
gtggctagataaaactgtac

SEQ ID NO: 46960 - DNA, 20 bp, Artificial Sequence
  Description of Artificial Sequence: Synthetic oligonucleotide
  Target: LAMA2; (+) strand; PAM type: NNNNGHTT; PAM sequence: AACAGCTT
tgtacttccgattttctcca

SEQ ID NO: 46961 - DNA, 20 bp, Artificial Sequence
  Description of Artificial Sequence: Synthetic oligonucleotide
  Target: LAMA2; (+) strand; PAM type: NNNNGHTT; PAM sequence: CTATGCTT
tttctccaaacagctttgac

SEQ ID NO: 46962 - DNA, 20 bp, Artificial Sequence
  Description of Artificial Sequence: Synthetic oligonucleotide
  Target: LAMA2; (+) strand; PAM type: NNNNGHTT; PAM sequence: AGCGGCTT
cgggaggatctgccggggag

SEQ ID NO: 46963 - DNA, 20 bp, Artificial Sequence
  Description of Artificial Sequence: Synthetic oligonucleotide
  Target: LAMA2; (+) strand; PAM type: NNNNGHTT; PAM sequence: CATCGATT
ccggggagagcggctttcct

SEQ ID NO: 46964 - DNA, 20 bp, Artificial Sequence
  Description of Artificial Sequence: Synthetic oligonucleotide
  Target: LAMA2; (+) strand; PAM type: NNNNGHTT; PAM sequence: CCATGCTT
catcgattcgggagcaccca

SEQ ID NO: 46965 - DNA, 20 bp, Artificial Sequence
  Description of Artificial Sequence: Synthetic oligonucleotide
  Target: LAMA2; (+) strand; PAM type: NNNNGHTT; PAM sequence: AGTAGTTT
ttaatttctttattaattct

SEQ ID NO: 46966 - DNA, 20 bp, Artificial Sequence
  Description of Artificial Sequence: Synthetic oligonucleotide
  Target: LAMA2; (+) strand; PAM type: NNNNGHTT; PAM sequence: ACATGCTT
aattctagtagttttaaact

SEQ ID NO: 46967 - DNA, 20 bp, Artificial Sequence
  Description of Artificial Sequence: Synthetic oligonucleotide
  Target: LAMA2; (+) strand; PAM type: NNNNGHTT; PAM sequence: TCAGGCTT
cattttacctgcaagtacat

SEQ ID NO: 46968 - DNA, 20 bp, Artificial Sequence
  Description of Artificial Sequence: Synthetic oligonucleotide
  Target: LAMA2; (+) strand; PAM type: NNNNGHTT; PAM sequence: ATCAGATT
tttttttatggacacccttt

SEQ ID NO: 46969 - DNA, 20 bp, Artificial Sequence
  Description of Artificial Sequence: Synthetic oligonucleotide
  Target: LAMA2; (+) strand; PAM type: NNNNGHTT; PAM sequence: GAGAGTTT
cctactattcctaagttgca

SEQ ID NO: 46970 - DNA, 20 bp, Artificial Sequence
  Description of Artificial Sequence: Synthetic oligonucleotide
  Target: LAMA2; (+) strand; PAM type: NNNNGHTT; PAM sequence: AATGGTTT
gcagagagtttttataacaa

SEQ ID NO: 46971 - DNA, 20 bp, Artificial Sequence
  Description of Artificial Sequence: Synthetic oligonucleotide
  Target: LAMA2; (+) strand; PAM type: NNNNGHTT; PAM sequence: ATATGCTT
aaatggttttgcattttgtc

SEQ ID NO: 46972 - DNA, 20 bp, Artificial Sequence
  Description of Artificial Sequence: Synthetic oligonucleotide
  Target: LAMA2; (+) strand; PAM type: NNNNGHTT; PAM sequence: TAAGGATT
gaaacctactgaaatgaaca

SEQ ID NO: 46973 - DNA, 20 bp, Artificial Sequence
  Description of Artificial Sequence: Synthetic oligonucleotide
  Target: LAMA2; (+) strand; PAM type: NNNNGHTT; PAM sequence: GGCAGCTT
attgaattttaaaatatgaa

SEQ ID NO: 46974 - DNA, 20 bp, Artificial Sequence
  Description of Artificial Sequence: Synthetic oligonucleotide
  Target: LAMA2; (+) strand; PAM type: NNNNGHTT; PAM sequence: GGATGATT
tattatcatttttatatatt

SEQ ID NO: 46975 - DNA, 20 bp, Artificial Sequence
  Description of Artificial Sequence: Synthetic oligonucleotide
  Target: LAMA2; (+) strand; PAM type: NNNNGHTT; PAM sequence: TAATGTTT
tattggatgattcaattgac

SEQ ID NO: 46976 - DNA, 20 bp, Artificial Sequence
  Description of Artificial Sequence: Synthetic oligonucleotide
  Target: LAMA2; (+) strand; PAM type: NNNNGHTT; PAM sequence: TAATGTTT
tctataattttattttctta

SEQ ID NO: 46977 - DNA, 20 bp, Artificial Sequence
  Description of Artificial Sequence: Synthetic oligonucleotide
  Target: LAMA2; (+) strand; PAM type: NNNNGHTT; PAM sequence: TCAGGTTT
attttcttataatgtttttg

SEQ ID NO: 46978 - DNA, 20 bp, Artificial Sequence
  Description of Artificial Sequence: Synthetic oligonucleotide
  Target: LAMA2; (+) strand; PAM type: NNNNGHTT; PAM sequence: TTCTGTTT
tcggggaaatgcacttcctc

SEQ ID NO: 46979 - DNA, 20 bp, Artificial Sequence
  Description of Artificial Sequence: Synthetic oligonucleotide
  Target: LAMA2; (+) strand; PAM type: NNNNGHTT; PAM sequence: TTCAGATT
cttctgttttctaaagtaac

SEQ ID NO: 46980 - DNA, 20 bp, Artificial Sequence
  Description of Artificial Sequence: Synthetic oligonucleotide
  Target: LAMA2; (+) strand; PAM type: NNNNGHTT; PAM sequence: AAATGCTT
attaaaattaattctcttta

SEQ ID NO: 46981 - DNA, 20 bp, Artificial Sequence
  Description of Artificial Sequence: Synthetic oligonucleotide
  Target: LAMA2; (+) strand; PAM type: NNNNGHTT; PAM sequence: TCTAGTTT
ctagtgaaactatctgagtc

SEQ ID NO: 46982 - DNA, 20 bp, Artificial Sequence
  Description of Artificial Sequence: Synthetic oligonucleotide
  Target: LAMA2; (+) strand; PAM type: NNNNGHTT; PAM sequence: ATAGGTTT
tttattagacatagggttag

SEQ ID NO: 46983 - DNA, 20 bp, Artificial Sequence
  Description of Artificial Sequence: Synthetic oligonucleotide
  Target: LAMA2; (+) strand; PAM type: NNNNGHTT; PAM sequence: GGCAGTTT
ttgtcaaatcattggcaatt

SEQ ID NO: 46984 - DNA, 20 bp, Artificial Sequence
  Description of Artificial Sequence: Synthetic oligonucleotide
  Target: LAMA2; (+) strand; PAM type: NNNNGHTT; PAM sequence: AAATGATT
tatcccctgtgtaattttta

SEQ ID NO: 46985 - DNA, 20 bp, Artificial Sequence
  Description of Artificial Sequence: Synthetic oligonucleotide
  Target: LAMA2; (+) strand; PAM type: NNNNGHTT; PAM sequence: TTGTGCTT
taatttttaaaatgattaag

SEQ ID NO: 46986 - DNA, 20 bp, Artificial Sequence
  Description of Artificial Sequence: Synthetic oligonucleotide
  Target: LAMA2; (+) strand; PAM type: NNNNGHTT; PAM sequence: AGGGGTTT
ttttattgatcacttatgtt

SEQ ID NO: 46987 - DNA, 20 bp, Artificial Sequence
  Description of Artificial Sequence: Synthetic oligonucleotide
  Target: LAMA2; (+) strand; PAM type: NNNNGHTT; PAM sequence: TTGTGTTT
aacttctgcctttttatttt

SEQ ID NO: 46988 - DNA, 20 bp, Artificial Sequence
  Description of Artificial Sequence: Synthetic oligonucleotide
  Target: LAMA2; (+) strand; PAM type: NNNNGHTT; PAM sequence: TATTGATT
ctttttattttttgtgtttt

SEQ ID NO: 46989 - DNA, 20 bp, Artificial Sequence
  Description of Artificial Sequence: Synthetic oligonucleotide
  Target: LAMA2; (+) strand; PAM type: NNNNGHTT; PAM sequence: ACCTGTTT
tttattatattattcatttg

SEQ ID NO: 46990 - DNA, 20 bp, Artificial Sequence
  Description of Artificial Sequence: Synthetic oligonucleotide
  Target: LAMA2; (+) strand; PAM type: NNNNGHTT; PAM sequence: TTTGGTTT
atattattcatttgacctgt

SEQ ID NO: 46991 - DNA, 20 bp, Artificial Sequence
  Description of Artificial Sequence: Synthetic oligonucleotide
  Target: LAMA2; (+) strand; PAM type: NNNNGHTT; PAM sequence: TTATGATT
tatcaatttggaaagttaaa

SEQ ID NO: 46992 - DNA, 20 bp, Artificial Sequence
  Description of Artificial Sequence: Synthetic oligonucleotide
  Target: LAMA2; (+) strand; PAM type: NNNNGHTT; PAM sequence: TATAGATT
ttatcatataaacttttaaa

SEQ ID NO: 46993 - DNA, 20 bp, Artificial Sequence
  Description of Artificial Sequence: Synthetic oligonucleotide
  Target: LAMA2; (+) strand; PAM type: NNNNGHTT; PAM sequence: AGCTGTTT
tttccttctagcagttcttt

SEQ ID NO: 46994 - DNA, 20 bp, Artificial Sequence
  Description of Artificial Sequence: Synthetic oligonucleotide
  Target: LAMA2; (+) strand; PAM type: NNNNGHTT; PAM sequence: GAATGCTT
gctgtttctcatgaattcag

SEQ ID NO: 46995 - DNA, 20 bp, Artificial Sequence
  Description of Artificial Sequence: Synthetic oligonucleotide
  Target: LAMA2; (+) strand; PAM type: NNNNGHTT; PAM sequence: TTGTGATT
aacataacttctaatttctc

SEQ ID NO: 46996 - DNA, 20 bp, Artificial Sequence
  Description of Artificial Sequence: Synthetic oligonucleotide
  Target: LAMA2; (+) strand; PAM type: NNNNGHTT; PAM sequence: TTGAGCTT
ttttgttaatttccaaatat

SEQ ID NO: 46997 - DNA, 20 bp, Artificial Sequence
  Description of Artificial Sequence: Synthetic oligonucleotide
  Target: LAMA2; (+) strand; PAM type: NNNNGHTT; PAM sequence: TTTTGATT
agctttattaaatattatat

SEQ ID NO: 46998 - DNA, 20 bp, Artificial Sequence
  Description of Artificial Sequence: Synthetic oligonucleotide
  Target: LAMA2; (+) strand; PAM type: NNNNGHTT; PAM sequence: GGATGTTT
atatttttgatttctacact

SEQ ID NO: 46999 - DNA, 20 bp, Artificial Sequence
  Description of Artificial Sequence: Synthetic oligonucleotide
  Target: LAMA2; (+) strand; PAM type: NNNNGHTT; PAM sequence: AGAAGTTT
tctctaagatgtcaaacttt

SEQ ID NO: 47000 - DNA, 20 bp, Artificial Sequence
  Description of Artificial Sequence: Synthetic oligonucleotide
  Target: LAMA2; (+) strand; PAM type: NNNNGHTT; PAM sequence: TGTGGATT
tctcttggcaaacaaataaa

SEQ ID NO: 47001 - DNA, 20 bp, Artificial Sequence
  Description of Artificial Sequence: Synthetic oligonucleotide
  Target: LAMA2; (+) strand; PAM type: NNNNGHTT; PAM sequence: CTGCGATT
taaatgtggatttttccaat

SEQ ID NO: 47002 - DNA, 20 bp, Artificial Sequence
  Description of Artificial Sequence: Synthetic oligonucleotide
  Target: LAMA2; (+) strand; PAM type: NNNNGHTT; PAM sequence: TATGGATT
ggatttttccaatctgcgat

SEQ ID NO: 47003 - DNA, 20 bp, Artificial Sequence
  Description of Artificial Sequence: Synthetic oligonucleotide
  Target: LAMA2; (+) strand; PAM type: NNNNGHTT; PAM sequence: TTTAGATT
tatttagaatattttgaatc

SEQ ID NO: 47004 - DNA, 20 bp, Artificial Sequence
  Description of Artificial Sequence: Synthetic oligonucleotide
  Target: LAMA2; (+) strand; PAM type: NNNNGHTT; PAM sequence: AGCAGTTT
ttttttattaacattgccac

SEQ ID NO: 47005 - DNA, 20 bp, Artificial Sequence
  Description of Artificial Sequence: Synthetic oligonucleotide
  Target: LAMA2; (+) strand; PAM type: NNNNGHTT; PAM sequence: ATATGCTT
acattgccacagcagttttc

SEQ ID NO: 47006 - DNA, 20 bp, Artificial Sequence
  Description of Artificial Sequence: Synthetic oligonucleotide
  Target: LAMA2; (+) strand; PAM type: NNNNGHTT; PAM sequence: GTATGTTT
tcatatgcttactctgtatg

SEQ ID NO: 47007 - DNA, 20 bp, Artificial Sequence
  Description of Artificial Sequence: Synthetic oligonucleotide
  Target: LAMA2; (+) strand; PAM type: NNNNGHTT; PAM sequence: TTCTGATT
tactctgtatggtatgtttt

SEQ ID NO: 47008 - DNA, 20 bp, Artificial Sequence
  Description of Artificial Sequence: Synthetic oligonucleotide
  Target: LAMA2; (+) strand; PAM type: NNNNGHTT; PAM sequence: TTTTGTTT
gtatggtatgttttttctga

SEQ ID NO: 47009 - DNA, 20 bp, Artificial Sequence
  Description of Artificial Sequence: Synthetic oligonucleotide
  Target: LAMA2; (+) strand; PAM type: NNNNGHTT; PAM sequence: AAAAGATT
acctatctttattttcattt

SEQ ID NO: 47010 - DNA, 20 bp, Artificial Sequence
  Description of Artificial Sequence: Synthetic oligonucleotide
  Target: LAMA2; (+) strand; PAM type: NNNNGHTT; PAM sequence: GATGGATT
ttcttataaagagtaaaata

SEQ ID NO: 47011 - DNA, 20 bp, Artificial Sequence
  Description of Artificial Sequence: Synthetic oligonucleotide
  Target: LAMA2; (+) strand; PAM type: NNNNGHTT; PAM sequence: GTGTGTTT
tttttatcctgacaattact

SEQ ID NO: 47012 - DNA, 20 bp, Artificial Sequence
  Description of Artificial Sequence: Synthetic oligonucleotide
  Target: LAMA2; (+) strand; PAM type: NNNNGHTT; PAM sequence: ATATGATT
taaatttaatatagttaata

SEQ ID NO: 47013 - DNA, 20 bp, Artificial Sequence
  Description of Artificial Sequence: Synthetic oligonucleotide
  Target: LAMA2; (+) strand; PAM type: NNNNGHTT; PAM sequence: TTGGGTTT
taatatagttaataatatga

SEQ ID NO: 47014 - DNA, 20 bp, Artificial Sequence
  Description of Artificial Sequence: Synthetic oligonucleotide
  Target: LAMA2; (+) strand; PAM type: NNNNGHTT; PAM sequence: ATTTGTTT
taatatgattgggttttgct

SEQ ID NO: 47015 - DNA, 20 bp, Artificial Sequence
  Description of Artificial Sequence: Synthetic oligonucleotide
  Target: LAMA2; (+) strand; PAM type: NNNNGHTT; PAM sequence: ATGGGATT
acatgggtaaattatgtgtc

SEQ ID NO: 47016 - DNA, 20 bp, Artificial Sequence
  Description of Artificial Sequence: Synthetic oligonucleotide
  Target: LAMA2; (+) strand; PAM type: NNNNGHTT; PAM sequence: TACAGATT
atgtgtcatgggatttggtg

SEQ ID NO: 47017 - DNA, 20 bp, Artificial Sequence
  Description of Artificial Sequence: Synthetic oligonucleotide
  Target: LAMA2; (+) strand; PAM type: NNNNGHTT; PAM sequence: CAATGTTT
tctttgtgtccatgtgtact

SEQ ID NO: 47018 - DNA, 20 bp, Artificial Sequence
  Description of Artificial Sequence: Synthetic oligonucleotide
  Target: LAMA2; (+) strand; PAM type: NNNNGHTT; PAM sequence: TCTGGTTT
ataagagagaacatgcagta

SEQ ID NO: 47019 - DNA, 20 bp, Artificial Sequence
  Description of Artificial Sequence: Synthetic oligonucleotide
  Target: LAMA2; (+) strand; PAM type: NNNNGHTT; PAM sequence: TGTTGCTT
atggccttctgctccatcca

SEQ ID NO: 47020 - DNA, 20 bp, Artificial Sequence
  Description of Artificial Sequence: Synthetic oligonucleotide
  Target: LAMA2; (+) strand; PAM type: NNNNGHTT; PAM sequence: ACATGATT
catccatgttgcttcaaagg

SEQ ID NO: 47021 - DNA, 20 bp, Artificial Sequence
  Description of Artificial Sequence: Synthetic oligonucleotide
  Target: LAMA2; (+) strand; PAM type: NNNNGHTT; PAM sequence: GGTTGATT
tccaccaatgatggtaccta

SEQ ID NO: 47022 - DNA, 20 bp, Artificial Sequence
  Description of Artificial Sequence: Synthetic oligonucleotide
  Target: LAMA2; (+) strand; PAM type: NNNNGHTT; PAM sequence: TGTGGCTT
gcaatgaacataggcatgca

SEQ ID NO: 47023 - DNA, 20 bp, Artificial Sequence
  Description of Artificial Sequence: Synthetic oligonucleotide
  Target: LAMA2; (+) strand; PAM type: NNNNGHTT; PAM sequence: ATGGGATT
ctttgggcatatacgcagta

SEQ ID NO: 47024 - DNA, 20 bp, Artificial Sequence
  Description of Artificial Sequence: Synthetic oligonucleotide
  Target: LAMA2; (+) strand; PAM type: NNNNGHTT; PAM sequence: TTCTGTTT
attgctgagttgagtgctag

SEQ ID NO: 47025 - DNA, 20 bp, Artificial Sequence
  Description of Artificial Sequence: Synthetic oligonucleotide
  Target: LAMA2; (+) strand; PAM type: NNNNGHTT; PAM sequence: TTAAGTTT
agttgagtgctagttctgtt

SEQ ID NO: 47026 - DNA, 20 bp, Artificial Sequence
  Description of Artificial Sequence: Synthetic oligonucleotide
  Target: LAMA2; (+) strand; PAM type: NNNNGHTT; PAM sequence: AACGGCTT
agttttttgagaaatctccc

SEQ ID NO: 47027 - DNA, 20 bp, Artificial Sequence
  Description of Artificial Sequence: Synthetic oligonucleotide
  Target: LAMA2; (+) strand; PAM type: NNNNGHTT; PAM sequence: TATTGTTT
tatagtcctatcttttggac

SEQ ID NO: 47028 - DNA, 20 bp, Artificial Sequence
  Description of Artificial Sequence: Synthetic oligonucleotide
  Target: LAMA2; (+) strand; PAM type: NNNNGHTT; PAM sequence: TTTTGTTT
cagcaatacaatgttgtcat

SEQ ID NO: 47029 - DNA, 20 bp, Artificial Sequence
  Description of Artificial Sequence: Synthetic oligonucleotide
  Target: LAMA2; (+) strand; PAM type: NNNNGHTT; PAM sequence: TCTAGCTT
cattttccatactctgtggt

SEQ ID NO: 47030 - DNA, 20 bp, Artificial Sequence
  Description of Artificial Sequence: Synthetic oligonucleotide
  Target: LAMA2; (+) strand; PAM type: NNNNGHTT; PAM sequence: TCCTGCTT
ctagcttatatatattgccc

SEQ ID NO: 47031 - DNA, 20 bp, Artificial Sequence
  Description of Artificial Sequence: Synthetic oligonucleotide
  Target: LAMA2; (+) strand; PAM type: NNNNGHTT; PAM sequence: GTGTGTTT
ttccacatagttacagaggt

SEQ ID NO: 47032 - DNA, 20 bp, Artificial Sequence
  Description of Artificial Sequence: Synthetic oligonucleotide
  Target: LAMA2; (+) strand; PAM type: NNNNGHTT; PAM sequence: CTTTGTTT
acagaggtgtgtgttttctt

SEQ ID NO: 47033 - DNA, 20 bp, Artificial Sequence
  Description of Artificial Sequence: Synthetic oligonucleotide
  Target: LAMA2; (+) strand; PAM type: NNNNGHTT; PAM sequence: TCTGGATT
aagatgtggcaccattattt

SEQ ID NO: 47034 - DNA, 20 bp, Artificial Sequence
  Description of Artificial Sequence: Synthetic oligonucleotide
  Target: LAMA2; (+) strand; PAM type: NNNNGHTT; PAM sequence: ATTTGTTT
cttatgacaacatagccatt

SEQ ID NO: 47035 - DNA, 20 bp, Artificial Sequence
  Description of Artificial Sequence: Synthetic oligonucleotide
  Target: LAMA2; (+) strand; PAM type: NNNNGHTT; PAM sequence: AGATGATT
atatatatctttaattcact

SEQ ID NO: 47036 - DNA, 20 bp, Artificial Sequence
  Description of Artificial Sequence: Synthetic oligonucleotide
  Target: LAMA2; (+) strand; PAM type: NNNNGHTT; PAM sequence: GGATGTTT
ttgtatgatctgtaagcaaa

SEQ ID NO: 47037 - DNA, 20 bp, Artificial Sequence
  Description of Artificial Sequence: Synthetic oligonucleotide
  Target: LAMA2; (+) strand; PAM type: NNNNGHTT; PAM sequence: AAAGGTTT
aaggatgtttttacatttgt

SEQ ID NO: 47038 - DNA, 20 bp, Artificial Sequence
  Description of Artificial Sequence: Synthetic oligonucleotide
  Target: LAMA2; (+) strand; PAM type: NNNNGHTT; PAM sequence: TATGGCTT
aagaatgaagagagtcttta

SEQ ID NO: 47039 - DNA, 20 bp, Artificial Sequence
  Description of Artificial Sequence: Synthetic oligonucleotide
  Target: LAMA2; (+) strand; PAM type: NNNNGHTT; PAM sequence: AAAAGTTT
tactatctggccctttacag

SEQ ID NO: 47040 - DNA, 20 bp, Artificial Sequence
  Description of Artificial Sequence: Synthetic oligonucleotide
  Target: LAMA2; (+) strand; PAM type: NNNNGHTT; PAM sequence: CTATGTTT
ttaaataaactatgatgtgt

SEQ ID NO: 47041 - DNA, 20 bp, Artificial Sequence
  Description of Artificial Sequence: Synthetic oligonucleotide
  Target: LAMA2; (+) strand; PAM type: NNNNGHTT; PAM sequence: TTTGGCTT
taaactatgatgtgtctatg

SEQ ID NO: 47042 - DNA, 20 bp, Artificial Sequence
  Description of Artificial Sequence: Synthetic oligonucleotide
  Target: LAMA2; (+) strand; PAM type: NNNNGHTT; PAM sequence: TCAAGCTT
gatgtgtctatgtttggctt

SEQ ID NO: 47043 - DNA, 20 bp, Artificial Sequence
  Description of Artificial Sequence: Synthetic oligonucleotide
  Target: LAMA2; (+) strand; PAM type: NNNNGHTT; PAM sequence: CCTTGCTT
atgtttggctttcaagctta

SEQ ID NO: 47044 - DNA, 20 bp, Artificial Sequence
  Description of Artificial Sequence: Synthetic oligonucleotide
  Target: LAMA2; (+) strand; PAM type: NNNNGHTT; PAM sequence: GCTTGATT
ttggctttcaagcttacctt

SEQ ID NO: 47045 - DNA, 20 bp, Artificial Sequence
  Description of Artificial Sequence: Synthetic oligonucleotide
  Target: LAMA2; (+) strand; PAM type: NNNNGHTT; PAM sequence: CAAAGCTT
agcttaccttgcttgattca

SEQ ID NO: 47046 - DNA, 20 bp, Artificial Sequence
  Description of Artificial Sequence: Synthetic oligonucleotide
  Target: LAMA2; (+) strand; PAM type: NNNNGHTT; PAM sequence: TTGAGATT
aagcttctaggaactataaa

SEQ ID NO: 47047 - DNA, 20 bp, Artificial Sequence
  Description of Artificial Sequence: Synthetic oligonucleotide
  Target: LAMA2; (+) strand; PAM type: NNNNGHTT; PAM sequence: TTAGGCTT
tttatttttacttatttttt

SEQ ID NO: 47048 - DNA, 20 bp, Artificial Sequence
  Description of Artificial Sequence: Synthetic oligonucleotide
  Target: LAMA2; (+) strand; PAM type: NNNNGHTT; PAM sequence: TTTTGTTT
tttacttattttttttaggc

SEQ ID NO: 47049 - DNA, 20 bp, Artificial Sequence
  Description of Artificial Sequence: Synthetic oligonucleotide
  Target: LAMA2; (+) strand; PAM type: NNNNGHTT; PAM sequence: ACCTGTTT
tttttaggcttttgtttaaa

SEQ ID NO: 47050 - DNA, 20 bp, Artificial Sequence
  Description of Artificial Sequence: Synthetic oligonucleotide
  Target: LAMA2; (+) strand; PAM type: NNNNGHTT; PAM sequence: CAGTGTTT
tttaaaacctgttttttgac

SEQ ID NO: 47051 - DNA, 20 bp, Artificial Sequence
  Description of Artificial Sequence: Synthetic oligonucleotide
  Target: LAMA2; (+) strand; PAM type: NNNNGHTT; PAM sequence: TTTAGATT
ttttttttctttctccgttc

SEQ ID NO: 47052 - DNA, 20 bp, Artificial Sequence
  Description of Artificial Sequence: Synthetic oligonucleotide
  Target: LAMA2; (+) strand; PAM type: NNNNGHTT; PAM sequence: AGCTGATT
taatgtatctttaatttact

SEQ ID NO: 47053 - DNA, 20 bp, Artificial Sequence
  Description of Artificial Sequence: Synthetic oligonucleotide
  Target: LAMA2; (+) strand; PAM type: NNNNGHTT; PAM sequence: AGTCGCTT
ttggaaggccgaagcaggca

SEQ ID NO: 47054 - DNA, 20 bp, Artificial Sequence
  Description of Artificial Sequence: Synthetic oligonucleotide
  Target: LAMA2; (+) strand; PAM type: NNNNGHTT; PAM sequence: AGGAGTTT
caggcaagtcgcttgcggtc

SEQ ID NO: 47055 - DNA, 20 bp, Artificial Sequence
  Description of Artificial Sequence: Synthetic oligonucleotide
  Target: LAMA2; (+) strand; PAM type: NNNNGHTT; PAM sequence: AATAGCTT
tcaggagactgaggcaggag

SEQ ID NO: 47056 - DNA, 20 bp, Artificial Sequence
  Description of Artificial Sequence: Synthetic oligonucleotide
  Target: LAMA2; (+) strand; PAM type: NNNNGHTT; PAM sequence: TCAAGCTT
ggaagtgaggttgcagtggg

SEQ ID NO: 47057 - DNA, 20 bp, Artificial Sequence
  Description of Artificial Sequence: Synthetic oligonucleotide
  Target: LAMA2; (+) strand; PAM type: NNNNGHTT; PAM sequence: TCATGTTT
atttacttttaacaatagta

SEQ ID NO: 47058 - DNA, 20 bp, Artificial Sequence
  Description of Artificial Sequence: Synthetic oligonucleotide
  Target: LAMA2; (+) strand; PAM type: NNNNGHTT; PAM sequence: TTCAGCTT
taaattgaggtattttactt

SEQ ID NO: 47059 - DNA, 20 bp, Artificial Sequence
  Description of Artificial Sequence: Synthetic oligonucleotide
  Target: LAMA2; (+) strand; PAM type: NNNNGHTT; PAM sequence: TACAGCTT
tctggagttcttatgttcct

SEQ ID NO: 47060 - DNA, 20 bp, Artificial Sequence
  Description of Artificial Sequence: Synthetic oligonucleotide
  Target: LAMA2; (+) strand; PAM type: NNNNGHTT; PAM sequence: CATTGTTT
ataccttcactcattataaa

SEQ ID NO: 47061 - DNA, 20 bp, Artificial Sequence
  Description of Artificial Sequence: Synthetic oligonucleotide
  Target: LAMA2; (+) strand; PAM type: NNNNGHTT; PAM sequence: ATCTGCTT
aatatctgggtcacctcagg

SEQ ID NO: 47062 - DNA, 20 bp, Artificial Sequence
  Description of Artificial Sequence: Synthetic oligonucleotide
  Target: LAMA2; (+) strand; PAM type: NNNNGHTT; PAM sequence: TCCTGTTT
ttttaataaggtcaacattt

SEQ ID NO: 47063 - DNA, 20 bp, Artificial Sequence
  Description of Artificial Sequence: Synthetic oligonucleotide
  Target: LAMA2; (+) strand; PAM type: NNNNGHTT; PAM sequence: CTATGTTT
tagtaccaaacctatatata

SEQ ID NO: 47064 - DNA, 20 bp, Artificial Sequence
  Description of Artificial Sequence: Synthetic oligonucleotide
  Target: LAMA2; (+) strand; PAM type: NNNNGHTT; PAM sequence: GGATGATT
catagatatgctggacaagg

SEQ ID NO: 47065 - DNA, 20 bp, Artificial Sequence
  Description of Artificial Sequence: Synthetic oligonucleotide
  Target: LAMA2; (+) strand; PAM type: NNNNGHTT; PAM sequence: CCGAGATT
gtgcgacagagcaagatggc

SEQ ID NO: 47066 - DNA, 20 bp, Artificial Sequence
  Description of Artificial Sequence: Synthetic oligonucleotide
  Target: LAMA2; (+) strand; PAM type: NNNNGHTT; PAM sequence: TGGAGTTT
acttttcaattatttatttc

SEQ ID NO: 47067 - DNA, 20 bp, Artificial Sequence
  Description of Artificial Sequence: Synthetic oligonucleotide
  Target: LAMA2; (+) strand; PAM type: NNNNGHTT; PAM sequence: ACTGGTTT
tcggagaatacaatgcagac

SEQ ID NO: 47068 - DNA, 20 bp, Artificial Sequence
  Description of Artificial Sequence: Synthetic oligonucleotide
  Target: LAMA2; (+) strand; PAM type: NNNNGHTT; PAM sequence: AAGAGTTT
gtttctgttatgttcctctg

SEQ ID NO: 47069 - DNA, 20 bp, Artificial Sequence
  Description of Artificial Sequence: Synthetic oligonucleotide
  Target: LAMA2; (+) strand; PAM type: NNNNGHTT; PAM sequence: GAAAGTTT
agtgatcaccatgaagtcat

SEQ ID NO: 47070 - DNA, 20 bp, Artificial Sequence
  Description of Artificial Sequence: Synthetic oligonucleotide
  Target: LAMA2; (+) strand; PAM type: NNNNGHTT; PAM sequence: GACAGATT
ttactttcatactttgttag

SEQ ID NO: 47071 - DNA, 20 bp, Artificial Sequence
  Description of Artificial Sequence: Synthetic oligonucleotide
  Target: LAMA2; (+) strand; PAM type: NNNNGHTT; PAM sequence: TTCAGTTT
tgaaaactcttctcaccttg

SEQ ID NO: 47072 - DNA, 20 bp, Artificial Sequence
  Description of Artificial Sequence: Synthetic oligonucleotide
  Target: LAMA2; (+) strand; PAM type: NNNNGHTT; PAM sequence: GGTTGCTT
caccttgttcagtttccagc

SEQ ID NO: 47073 - DNA, 20 bp, Artificial Sequence
  Description of Artificial Sequence: Synthetic oligonucleotide
  Target: LAMA2; (+) strand; PAM type: NNNNGHTT; PAM sequence: TGCAGTTT
gttatgcaaattttgtgaat

SEQ ID NO: 47074 - DNA, 20 bp, Artificial Sequence
  Description of Artificial Sequence: Synthetic oligonucleotide
  Target: LAMA2; (+) strand; PAM type: NNNNGHTT; PAM sequence: ATTTGATT
cataaaattattgtcttaaa

SEQ ID NO: 47075 - DNA, 20 bp, Artificial Sequence
  Description of Artificial Sequence: Synthetic oligonucleotide
  Target: LAMA2; (+) strand; PAM type: NNNNGHTT; PAM sequence: TTTAGATT
ttattgtcttaaaatttgat

SEQ ID NO: 47076 - DNA, 20 bp, Artificial Sequence
  Description of Artificial Sequence: Synthetic oligonucleotide
  Target: LAMA2; (+) strand; PAM type: NNNNGHTT; PAM sequence: TGATGATT
atgaatgtatcttaaacaaa

SEQ ID NO: 47077 - DNA, 20 bp, Artificial Sequence
  Description of Artificial Sequence: Synthetic oligonucleotide
  Target: LAMA2; (+) strand; PAM type: NNNNGHTT; PAM sequence: TTGAGATT
tgacctgtgaacttagttaa

SEQ ID NO: 47078 - DNA, 20 bp, Artificial Sequence
  Description of Artificial Sequence: Synthetic oligonucleotide
  Target: LAMA2; (+) strand; PAM type: NNNNGHTT; PAM sequence: CTCTGATT
aaataagtctaattttaaca

SEQ ID NO: 47079 - DNA, 20 bp, Artificial Sequence
  Description of Artificial Sequence: Synthetic oligonucleotide
  Target: LAMA2; (+) strand; PAM type: NNNNGHTT; PAM sequence: ACAAGTTT
actctgatttatagtagcaa

SEQ ID NO: 47080 - DNA, 20 bp, Artificial Sequence
  Description of Artificial Sequence: Synthetic oligonucleotide
  Target: LAMA2; (+) strand; PAM type: NNNNGHTT; PAM sequence: TTTAGTTT
ggcatttcttgggcaaataa

SEQ ID NO: 47081 - DNA, 20 bp, Artificial Sequence
  Description of Artificial Sequence: Synthetic oligonucleotide
  Target: LAMA2; (+) strand; PAM type: NNNNGHTT; PAM sequence: TGTAGTTT
tatacagtatatgaacacag

SEQ ID NO: 47082 - DNA, 20 bp, Artificial Sequence
  Description of Artificial Sequence: Synthetic oligonucleotide
  Target: LAMA2; (+) strand; PAM type: NNNNGHTT; PAM sequence: TTTTGTTT
agtatatgaacacagtgtag

SEQ ID NO: 47083 - DNA, 20 bp, Artificial Sequence
  Description of Artificial Sequence: Synthetic oligonucleotide
  Target: LAMA2; (+) strand; PAM type: NNNNGHTT; PAM sequence: ACTAGCTT
gtgtagttttgtttaagtaa

SEQ ID NO: 47084 - DNA, 20 bp, Artificial Sequence
  Description of Artificial Sequence: Synthetic oligonucleotide
  Target: LAMA2; (+) strand; PAM type: NNNNGHTT; PAM sequence: ACTGGATT
ttgtgtaagcatgtaaaaga

SEQ ID NO: 47085 - DNA, 20 bp, Artificial Sequence
  Description of Artificial Sequence: Synthetic oligonucleotide
  Target: LAMA2; (+) strand; PAM type: NNNNGHTT; PAM sequence: TATAGTTT
catgtattaaaggtaattct

SEQ ID NO: 47086 - DNA, 20 bp, Artificial Sequence
  Description of Artificial Sequence: Synthetic oligonucleotide
  Target: LAMA2; (+) strand; PAM type: NNNNGHTT; PAM sequence: AAAAGTTT
attaaaactactttgtctat

SEQ ID NO: 47087 - DNA, 20 bp, Artificial Sequence
  Description of Artificial Sequence: Synthetic oligonucleotide
  Target: LAMA2; (+) strand; PAM type: NNNNGHTT; PAM sequence: TGCTGTTT
tttgctgaagtgaaaaatat

SEQ ID NO: 47088 - DNA, 20 bp, Artificial Sequence
  Description of Artificial Sequence: Synthetic oligonucleotide
  Target: LAMA2; (+) strand; PAM type: NNNNGHTT; PAM sequence: ATATGATT
aaaggacaactaaaagccaa

SEQ ID NO: 47089 - DNA, 20 bp, Artificial Sequence
  Description of Artificial Sequence: Synthetic oligonucleotide
  Target: LAMA2; (+) strand; PAM type: NNNNGHTT; PAM sequence: AGTAGTTT
tattagcgttccctccagga

SEQ ID NO: 47090 - DNA, 20 bp, Artificial Sequence
  Description of Artificial Sequence: Synthetic oligonucleotide
  Target: LAMA2; (+) strand; PAM type: NNNNGHTT; PAM sequence: TCATGTTT
actcatctcaataattactt

SEQ ID NO: 47091 - DNA, 20 bp, Artificial Sequence
  Description of Artificial Sequence: Synthetic oligonucleotide
  Target: LAMA2; (+) strand; PAM type: NNNNGHTT; PAM sequence: TAATGTTT
attactttcatgtttaatta

SEQ ID NO: 47092 - DNA, 20 bp, Artificial Sequence
  Description of Artificial Sequence: Synthetic oligonucleotide
  Target: LAMA2; (+) strand; PAM type: NNNNGHTT; PAM sequence: ATTAGATT
tttttcatatcgtgttattt

SEQ ID NO: 47093 - DNA, 20 bp, Artificial Sequence
  Description of Artificial Sequence: Synthetic oligonucleotide
  Target: LAMA2; (+) strand; PAM type: NNNNGHTT; PAM sequence: GATTGTTT
tcatatcgtgttatttatta

SEQ ID NO: 47094 - DNA, 20 bp, Artificial Sequence
  Description of Artificial Sequence: Synthetic oligonucleotide
  Target: LAMA2; (+) strand; PAM type: NNNNGHTT; PAM sequence: TGTAGCTT
gtgttatttattagattgtt

SEQ ID NO: 47095 - DNA, 20 bp, Artificial Sequence
  Description of Artificial Sequence: Synthetic oligonucleotide
  Target: LAMA2; (+) strand; PAM type: NNNNGHTT; PAM sequence: AAGCGTTT
aacataactccttgatataa

SEQ ID NO: 47096 - DNA, 20 bp, Artificial Sequence
  Description of Artificial Sequence: Synthetic oligonucleotide
  Target: LAMA2; (+) strand; PAM type: NNNNGHTT; PAM sequence: CCAAGTTT
acttccagggcagttgctcg

SEQ ID NO: 47097 - DNA, 20 bp, Artificial Sequence
  Description of Artificial Sequence: Synthetic oligonucleotide
  Target: LAMA2; (+) strand; PAM type: NNNNGHTT; PAM sequence: GGACGCTT
gaaattcatagaatgcactg

SEQ ID NO: 47098 - DNA, 20 bp, Artificial Sequence
  Description of Artificial Sequence: Synthetic oligonucleotide
  Target: LAMA2; (+) strand; PAM type: NNNNGHTT; PAM sequence: TAGTGTTT
aattaatcaaggctacaatg

SEQ ID NO: 47099 - DNA, 20 bp, Artificial Sequence
  Description of Artificial Sequence: Synthetic oligonucleotide
  Target: LAMA2; (+) strand; PAM type: NNNNGHTT; PAM sequence: CAATGTTT
ctttagcgttaaaagaccag

SEQ ID NO: 47100 - DNA, 20 bp, Artificial Sequence
  Description of Artificial Sequence: Synthetic oligonucleotide
  Target: LAMA2; (+) strand; PAM type: NNNNGHTT; PAM sequence: ACCTGCTT
tcttaggtacaattcttgtt

SEQ ID NO: 47101 - DNA, 20 bp, Artificial Sequence
  Description of Artificial Sequence: Synthetic oligonucleotide
  Target: LAMA2; (+) strand; PAM type: NNNNGHTT; PAM sequence: GTAGGATT
cctgctttctttataaaact

SEQ ID NO: 47102 - DNA, 20 bp, Artificial Sequence
  Description of Artificial Sequence: Synthetic oligonucleotide
  Target: LAMA2; (+) strand; PAM type: NNNNGHTT; PAM sequence: ATACGTTT
tttgaaatattaaaaaacgg

SEQ ID NO: 47103 - DNA, 20 bp, Artificial Sequence
  Description of Artificial Sequence: Synthetic oligonucleotide
  Target: LAMA2; (+) strand; PAM type: NNNNGHTT; PAM sequence: TTTCGTTT
gatgaattactgagctcact

SEQ ID NO: 47104 - DNA, 20 bp, Artificial Sequence
  Description of Artificial Sequence: Synthetic oligonucleotide
  Target: LAMA2; (+) strand; PAM type: NNNNGHTT; PAM sequence: TTGTGTTT
tcgttttaagccttttctct

SEQ ID NO: 47105 - DNA, 20 bp, Artificial Sequence
  Description of Artificial Sequence: Synthetic oligonucleotide
  Target: LAMA2; (+) strand; PAM type: NNNNGHTT; PAM sequence: TGTTGTTT
tgtttacaagtaaatcacaa

SEQ ID NO: 47106 - DNA, 20 bp, Artificial Sequence
  Description of Artificial Sequence: Synthetic oligonucleotide
  Target: LAMA2; (+) strand; PAM type: NNNNGHTT; PAM sequence: ATGAGTTT
gctcctcttaactttatgtg

SEQ ID NO: 47107 - DNA, 20 bp, Artificial Sequence
  Description of Artificial Sequence: Synthetic oligonucleotide
  Target: LAMA2; (+) strand; PAM type: NNNNGHTT; PAM sequence: TCTGGCTT
tatgaaaactttctctgaag

SEQ ID NO: 47108 - DNA, 20 bp, Artificial Sequence
  Description of Artificial Sequence: Synthetic oligonucleotide
  Target: LAMA2; (+) strand; PAM type: NNNNGHTT; PAM sequence: TTAAGATT
ctctcaactttatatggaca

SEQ ID NO: 47109 - DNA, 20 bp, Artificial Sequence
  Description of Artificial Sequence: Synthetic oligonucleotide
  Target: LAMA2; (+) strand; PAM type: NNNNGHTT; PAM sequence: GATTGTTT
caactttatatggacattaa

SEQ ID NO: 47110 - DNA, 20 bp, Artificial Sequence
  Description of Artificial Sequence: Synthetic oligonucleotide
  Target: LAMA2; (+) strand; PAM type: NNNNGHTT; PAM sequence: TTTTGTTT
acattaagattgtttcaaat

SEQ ID NO: 47111 - DNA, 20 bp, Artificial Sequence
  Description of Artificial Sequence: Synthetic oligonucleotide
  Target: LAMA2; (+) strand; PAM type: NNNNGHTT; PAM sequence: TTCCGATT
ttaaaaatattgagcctttt

SEQ ID NO: 47112 - DNA, 20 bp, Artificial Sequence
  Description of Artificial Sequence: Synthetic oligonucleotide
  Target: LAMA2; (+) strand; PAM type: NNNNGHTT; PAM sequence: TTCAGTTT
atattgagccttttttccga

SEQ ID NO: 47113 - DNA, 20 bp, Artificial Sequence
  Description of Artificial Sequence: Synthetic oligonucleotide
  Target: LAMA2; (+) strand; PAM type: NNNNGHTT; PAM sequence: TTAAGTTT
ttattttttttaattatact

SEQ ID NO: 47114 - DNA, 20 bp, Artificial Sequence
  Description of Artificial Sequence: Synthetic oligonucleotide
  Target: LAMA2; (+) strand; PAM type: NNNNGHTT; PAM sequence: TGGTGTTT
cacctatgagtgagaatatg

SEQ ID NO: 47115 - DNA, 20 bp, Artificial Sequence
  Description of Artificial Sequence: Synthetic oligonucleotide
  Target: LAMA2; (+) strand; PAM type: NNNNGHTT; PAM sequence: TTTGGTTT
atgagtgagaatatgtggtg

SEQ ID NO: 47116 - DNA, 20 bp, Artificial Sequence
  Description of Artificial Sequence: Synthetic oligonucleotide
  Target: LAMA2; (+) strand; PAM type: NNNNGHTT; PAM sequence: AATCGTTT
gtttggttttttgttcttgc

SEQ ID NO: 47117 - DNA, 20 bp, Artificial Sequence
  Description of Artificial Sequence: Synthetic oligonucleotide
  Target: LAMA2; (+) strand; PAM type: NNNNGHTT; PAM sequence: TGATGTTT
ttgcaatcgtttactgagaa

SEQ ID NO: 47118 - DNA, 20 bp, Artificial Sequence
  Description of Artificial Sequence: Synthetic oligonucleotide
  Target: LAMA2; (+) strand; PAM type: NNNNGHTT; PAM sequence: GCATGATT
gtgcatgtgtcttcatagca

SEQ ID NO: 47119 - DNA, 20 bp, Artificial Sequence
  Description of Artificial Sequence: Synthetic oligonucleotide
  Target: LAMA2; (+) strand; PAM type: NNNNGHTT; PAM sequence: ACTAGTTT
ctgacttccacaatggttga

SEQ ID NO: 47120 - DNA, 20 bp, Artificial Sequence
  Description of Artificial Sequence: Synthetic oligonucleotide
  Target: LAMA2; (+) strand; PAM type: NNNNGHTT; PAM sequence: TGTTGTTT
tccacatcctctccagcacc

SEQ ID NO: 47121 - DNA, 20 bp, Artificial Sequence
  Description of Artificial Sequence: Synthetic oligonucleotide
  Target: LAMA2; (+) strand; PAM type: NNNNGHTT; PAM sequence: TAATGATT
cctgttgtttcctgactttt

SEQ ID NO: 47122 - DNA, 20 bp, Artificial Sequence
  Description of Artificial Sequence: Synthetic oligonucleotide
  Target: LAMA2; (+) strand; PAM type: NNNNGHTT; PAM sequence: TGTGGTTT
ggtgtgagatggtatctcat

SEQ ID NO: 47123 - DNA, 20 bp, Artificial Sequence
  Description of Artificial Sequence: Synthetic oligonucleotide
  Target: LAMA2; (+) strand; PAM type: NNNNGHTT; PAM sequence: TTTTGATT
gagatggtatctcattgtgg

SEQ ID NO: 47124 - DNA, 20 bp, Artificial Sequence
  Description of Artificial Sequence: Synthetic oligonucleotide
  Target: LAMA2; (+) strand; PAM type: NNNNGHTT; PAM sequence: ATGTGTTT
gtgatgatgagcattttttc

SEQ ID NO: 47125 - DNA, 20 bp, Artificial Sequence
  Description of Artificial Sequence: Synthetic oligonucleotide
  Target: LAMA2; (+) strand; PAM type: NNNNGHTT; PAM sequence: GGTTGTTT
cttcgcccacttgttgatgg

SEQ ID NO: 47126 - DNA, 20 bp, Artificial Sequence
  Description of Artificial Sequence: Synthetic oligonucleotide
  Target: LAMA2; (+) strand; PAM type: NNNNGHTT; PAM sequence: GTTTGTTT
gcccacttgttgatggggtt

SEQ ID NO: 47127 - DNA, 20 bp, Artificial Sequence
  Description of Artificial Sequence: Synthetic oligonucleotide
  Target: LAMA2; (+) strand; PAM type: NNNNGHTT; PAM sequence: ATTTGTTT
tgtttgtttttttcttgtaa

SEQ ID NO: 47128 - DNA, 20 bp, Artificial Sequence
  Description of Artificial Sequence: Synthetic oligonucleotide
  Target: LAMA2; (+) strand; PAM type: NNNNGHTT; PAM sequence: TGTAGATT
gtaaatttgtttgagttcat

SEQ ID NO: 47129 - DNA, 20 bp, Artificial Sequence
  Description of Artificial Sequence: Synthetic oligonucleotide
  Target: LAMA2; (+) strand; PAM type: NNNNGHTT; PAM sequence: GGTAGTTT
ggttgcctgttcactctgat

SEQ ID NO: 47130 - DNA, 20 bp, Artificial Sequence
  Description of Artificial Sequence: Synthetic oligonucleotide
  Target: LAMA2; (+) strand; PAM type: NNNNGHTT; PAM sequence: TTTAGTTT
cttttgctgtgcagaagctc

SEQ ID NO: 47131 - DNA, 20 bp, Artificial Sequence
  Description of Artificial Sequence: Synthetic oligonucleotide
  Target: LAMA2; (+) strand; PAM type: NNNNGHTT; PAM sequence: CATTGCTT
tcaattttgtcttttgttgc

SEQ ID NO: 47132 - DNA, 20 bp, Artificial Sequence
  Description of Artificial Sequence: Synthetic oligonucleotide
  Target: LAMA2; (+) strand; PAM type: NNNNGHTT; PAM sequence: TGGTGTTT
tcttttgttgccattgcttt

SEQ ID NO: 47133 - DNA, 20 bp, Artificial Sequence
  Description of Artificial Sequence: Synthetic oligonucleotide
  Target: LAMA2; (+) strand; PAM type: NNNNGHTT; PAM sequence: CTAGGTTT
tatgtcctgaatggtactgc

SEQ ID NO: 47134 - DNA, 20 bp, Artificial Sequence
  Description of Artificial Sequence: Synthetic oligonucleotide
  Target: LAMA2; (+) strand; PAM type: NNNNGHTT; PAM sequence: TAGGGTTT
gtactgcctaggttttcttc

SEQ ID NO: 47135 - DNA, 20 bp, Artificial Sequence
  Description of Artificial Sequence: Synthetic oligonucleotide
  Target: LAMA2; (+) strand; PAM type: NNNNGHTT; PAM sequence: TATGGTTT
aggttttcttctagggtttt

SEQ ID NO: 47136 - DNA, 20 bp, Artificial Sequence
  Description of Artificial Sequence: Synthetic oligonucleotide
  Target: LAMA2; (+) strand; PAM type: NNNNGHTT; PAM sequence: TAACGTTT
ggtttttatggttttaggtc

SEQ ID NO: 47137 - DNA, 20 bp, Artificial Sequence
  Description of Artificial Sequence: Synthetic oligonucleotide
  Target: LAMA2; (+) strand; PAM type: NNNNGHTT; PAM sequence: AATTGATT
taagtctttaatccatcttg

SEQ ID NO: 47138 - DNA, 20 bp, Artificial Sequence
  Description of Artificial Sequence: Synthetic oligonucleotide
  Target: LAMA2; (+) strand; PAM type: NNNNGHTT; PAM sequence: TCCAGTTT
tataaggtgtaaggaaggga

SEQ ID NO: 47139 - DNA, 20 bp, Artificial Sequence
  Description of Artificial Sequence: Synthetic oligonucleotide
  Target: LAMA2; (+) strand; PAM type: NNNNGHTT; PAM sequence: TTCAGCTT
gtgtaaggaagggatccagt

SEQ ID NO: 47140 - DNA, 20 bp, Artificial Sequence
  Description of Artificial Sequence: Synthetic oligonucleotide
  Target: LAMA2; (+) strand; PAM type: NNNNGHTT; PAM sequence: CATTGCTT
taaacagggaatcctttccc

SEQ ID NO: 47141 - DNA, 20 bp, Artificial Sequence
  Description of Artificial Sequence: Synthetic oligonucleotide
  Target: LAMA2; (+) strand; PAM type: NNNNGHTT; PAM sequence: GCTTGTTT
cagggaatcctttccccatt

SEQ ID NO: 47142 - DNA, 20 bp, Artificial Sequence
  Description of Artificial Sequence: Synthetic oligonucleotide
  Target: LAMA2; (+) strand; PAM type: NNNNGHTT; PAM sequence: TCAGGTTT
ttccccattgcttgtttttc

SEQ ID NO: 47143 - DNA, 20 bp, Artificial Sequence
  Description of Artificial Sequence: Synthetic oligonucleotide
  Target: LAMA2; (+) strand; PAM type: NNNNGHTT; PAM sequence: CTCTGTTT
tctgttccattgatctatat

SEQ ID NO: 47144 - DNA, 20 bp, Artificial Sequence
  Description of Artificial Sequence: Synthetic oligonucleotide
  Target: LAMA2; (+) strand; PAM type: NNNNGHTT; PAM sequence: TGCTGTTT
ctgttttggtaccagtacca

SEQ ID NO: 47145 - DNA, 20 bp, Artificial Sequence
  Description of Artificial Sequence: Synthetic oligonucleotide
  Target: LAMA2; (+) strand; PAM type: NNNNGHTT; PAM sequence: TATAGTTT
tggttactgtagacttgtag

SEQ ID NO: 47146 - DNA, 20 bp, Artificial Sequence
  Description of Artificial Sequence: Synthetic oligonucleotide
  Target: LAMA2; (+) strand; PAM type: NNNNGHTT; PAM sequence: TCCAGCTT
aagtcaggtagtgtgatgcc

SEQ ID NO: 47147 - DNA, 20 bp, Artificial Sequence
  Description of Artificial Sequence: Synthetic oligonucleotide
  Target: LAMA2; (+) strand; PAM type: NNNNGHTT; PAM sequence: TTTGGCTT
gatgcctccagctttgttct

SEQ ID NO: 47148 - DNA, 20 bp, Artificial Sequence
  Description of Artificial Sequence: Synthetic oligonucleotide
  Target: LAMA2; (+) strand; PAM type: NNNNGHTT; PAM sequence: TTAGGATT
tccagctttgttcttttggc

SEQ ID NO: 47149 - DNA, 20 bp, Artificial Sequence
  Description of Artificial Sequence: Synthetic oligonucleotide
  Target: LAMA2; (+) strand; PAM type: NNNNGHTT; PAM sequence: AGTAGTTT
tggttccatatgaactttaa

SEQ ID NO: 47150 - DNA, 20 bp, Artificial Sequence
  Description of Artificial Sequence: Synthetic oligonucleotide
  Target: LAMA2; (+) strand; PAM type: NNNNGHTT; PAM sequence: GGTAGCTT
attctgtgaagaaaggcatt

SEQ ID NO: 47151 - DNA, 20 bp, Artificial Sequence
  Description of Artificial Sequence: Synthetic oligonucleotide
  Target: LAMA2; (+) strand; PAM type: NNNNGHTT; PAM sequence: TATTGATT
cagtatggccattttcacga

SEQ ID NO: 47152 - DNA, 20 bp, Artificial Sequence
  Description of Artificial Sequence: Synthetic oligonucleotide
  Target: LAMA2; (+) strand; PAM type: NNNNGHTT; PAM sequence: ATTTGTTT
tgagcatggaatgttcttcc

SEQ ID NO: 47153 - DNA, 20 bp, Artificial Sequence
  Description of Artificial Sequence: Synthetic oligonucleotide
  Target: LAMA2; (+) strand; PAM type: NNNNGHTT; PAM sequence: AGTGGTTT
cctcttttatttccttgagc

SEQ ID NO: 47154 - DNA, 20 bp, Artificial Sequence
  Description of Artificial Sequence: Synthetic oligonucleotide
  Target: LAMA2; (+) strand; PAM type: NNNNGHTT; PAM sequence: GTTGGATT
gtccttcacatcccttgtaa

SEQ ID NO: 47155 - DNA, 20 bp, Artificial Sequence
  Description of Artificial Sequence: Synthetic oligonucleotide
  Target: LAMA2; (+) strand; PAM type: NNNNGHTT; PAM sequence: TCATGATT
aattgtgaatgggagttcac

SEQ ID NO: 47156 - DNA, 20 bp, Artificial Sequence
  Description of Artificial Sequence: Synthetic oligonucleotide
  Target: LAMA2; (+) strand; PAM type: NNNNGHTT; PAM sequence: CTCTGTTT
agttcactcatgatttggct

SEQ ID NO: 47157 - DNA, 20 bp, Artificial Sequence
  Description of Artificial Sequence: Synthetic oligonucleotide
  Target: LAMA2; (+) strand; PAM type: NNNNGHTT; PAM sequence: GAATGCTT
tgtttgttgttgttgtataa

SEQ ID NO: 47158 - DNA, 20 bp, Artificial Sequence
  Description of Artificial Sequence: Synthetic oligonucleotide
  Target: LAMA2; (+) strand; PAM type: NNNNGHTT; PAM sequence: CATTGATT
gaatgcttgtgacttttgta

SEQ ID NO: 47159 - DNA, 20 bp, Artificial Sequence
  Description of Artificial Sequence: Synthetic oligonucleotide
  Target: LAMA2; (+) strand; PAM type: NNNNGHTT; PAM sequence: AGTTGCTT
gtatcctgagactttgctga

SEQ ID NO: 47160 - DNA, 20 bp, Artificial Sequence
  Description of Artificial Sequence: Synthetic oligonucleotide
  Target: LAMA2; (+) strand; PAM type: NNNNGHTT; PAM sequence: ATCAGCTT
agactttgctgaagttgctt

SEQ ID NO: 47161 - DNA, 20 bp, Artificial Sequence
  Description of Artificial Sequence: Synthetic oligonucleotide
  Target: LAMA2; (+) strand; PAM type: NNNNGHTT; PAM sequence: AGGAGATT
tgaagttgcttatcagctta

SEQ ID NO: 47162 - DNA, 20 bp, Artificial Sequence
  Description of Artificial Sequence: Synthetic oligonucleotide
  Target: LAMA2; (+) strand; PAM type: NNNNGHTT; PAM sequence: TGGGGTTT
gagattttggactgagacaa

SEQ ID NO: 47163 - DNA, 20 bp, Artificial Sequence
  Description of Artificial Sequence: Synthetic oligonucleotide
  Target: LAMA2; (+) strand; PAM type: NNNNGHTT; PAM sequence: GCCAGTTT
agagggcatccctgtcttgt

SEQ ID NO: 47164 - DNA, 20 bp, Artificial Sequence
  Description of Artificial Sequence: Synthetic oligonucleotide
  Target: LAMA2; (+) strand; PAM type: NNNNGHTT; PAM sequence: GAATGCTT
cttgtgccagttttcaaagg

SEQ ID NO: 47165 - DNA, 20 bp, Artificial Sequence
  Description of Artificial Sequence: Synthetic oligonucleotide
  Target: LAMA2; (+) strand; PAM type: NNNNGHTT; PAM sequence: TCCAGTTT
cagttttcaaagggaatgct

SEQ ID NO: 47166 - DNA, 20 bp, Artificial Sequence
  Description of Artificial Sequence: Synthetic oligonucleotide
  Target: LAMA2; (+) strand; PAM type: NNNNGHTT; PAM sequence: GTGGGTTT
cattctgtatgatactggct

SEQ ID NO: 47167 - DNA, 20 bp, Artificial Sequence
  Description of Artificial Sequence: Synthetic oligonucleotide
  Target: LAMA2; (+) strand; PAM type: NNNNGHTT; PAM sequence: GAGAGTTT
ccatcaatacctaatttatt

SEQ ID NO: 47168 - DNA, 20 bp, Artificial Sequence
  Description of Artificial Sequence: Synthetic oligonucleotide
  Target: LAMA2; (+) strand; PAM type: NNNNGHTT; PAM sequence: AAAGGCTT
aagggttgttgaattttgtc

SEQ ID NO: 47169 - DNA, 20 bp, Artificial Sequence
  Description of Artificial Sequence: Synthetic oligonucleotide
  Target: LAMA2; (+) strand; PAM type: NNNNGHTT; PAM sequence: TGTGGTTT
tgcatctattgagataatca

SEQ ID NO: 47170 - DNA, 20 bp, Artificial Sequence
  Description of Artificial Sequence: Synthetic oligonucleotide
  Target: LAMA2; (+) strand; PAM type: NNNNGHTT; PAM sequence: CTCTGTTT
catgtggtttttgtctttgg

SEQ ID NO: 47171 - DNA, 20 bp, Artificial Sequence
  Description of Artificial Sequence: Synthetic oligonucleotide
  Target: LAMA2; (+) strand; PAM type: NNNNGHTT; PAM sequence: GCTGGATT
gtctttggctctgtttatat

SEQ ID NO: 47172 - DNA, 20 bp, Artificial Sequence
  Description of Artificial Sequence: Synthetic oligonucleotide
  Target: LAMA2; (+) strand; PAM type: NNNNGHTT; PAM sequence: TATTGATT
tttatatgctggattacatt

SEQ ID NO: 47173 - DNA, 20 bp, Artificial Sequence
  Description of Artificial Sequence: Synthetic oligonucleotide
  Target: LAMA2; (+) strand; PAM type: NNNNGHTT; PAM sequence: ATAAGCTT
agcctacttgatcatggtgg

SEQ ID NO: 47174 - DNA, 20 bp, Artificial Sequence
  Description of Artificial Sequence: Synthetic oligonucleotide
  Target: LAMA2; (+) strand; PAM type: NNNNGHTT; PAM sequence: GCTGGATT
gataagctttttgatgtgct

SEQ ID NO: 47175 - DNA, 20 bp, Artificial Sequence
  Description of Artificial Sequence: Synthetic oligonucleotide
  Target: LAMA2; (+) strand; PAM type: NNNNGHTT; PAM sequence: ATTCGTTT
gctttttgatgtgctgctgg

SEQ ID NO: 47176 - DNA, 20 bp, Artificial Sequence
  Description of Artificial Sequence: Synthetic oligonucleotide
  Target: LAMA2; (+) strand; PAM type: NNNNGHTT; PAM sequence: TGAGGATT
tcgttttgccagtattttac

SEQ ID NO: 47177 - DNA, 20 bp, Artificial Sequence
  Description of Artificial Sequence: Synthetic oligonucleotide
  Target: LAMA2; (+) strand; PAM type: NNNNGHTT; PAM sequence: CCTGGCTT
cttttttggttgtgtctctg

SEQ ID NO: 47178 - DNA, 20 bp, Artificial Sequence
  Description of Artificial Sequence: Synthetic oligonucleotide
  Target: LAMA2; (+) strand; PAM type: NNNNGHTT; PAM sequence: GGAGGATT
ggcctcataaaatgagttag

SEQ ID NO: 47179 - DNA, 20 bp, Artificial Sequence
  Description of Artificial Sequence: Synthetic oligonucleotide
  Target: LAMA2; (+) strand; PAM type: NNNNGHTT; PAM sequence: TATTGATT
gggaggattccctctttttc

SEQ ID NO: 47180 - DNA, 20 bp, Artificial Sequence
  Description of Artificial Sequence: Synthetic oligonucleotide
  Target: LAMA2; (+) strand; PAM type: NNNNGHTT; PAM sequence: AATAGTTT
cctctttttctattgattgg

SEQ ID NO: 47181 - DNA, 20 bp, Artificial Sequence
  Description of Artificial Sequence: Synthetic oligonucleotide
  Target: LAMA2; (+) strand; PAM type: NNNNGHTT; PAM sequence: TATTGATT
actctttttggttggtaagc

SEQ ID NO: 47182 - DNA, 20 bp, Artificial Sequence
  Description of Artificial Sequence: Synthetic oligonucleotide
  Target: LAMA2; (+) strand; PAM type: NNNNGHTT; PAM sequence: CAGAGATT
gatcctgttattggtctatt

SEQ ID NO: 47183 - DNA, 20 bp, Artificial Sequence
  Description of Artificial Sequence: Synthetic oligonucleotide
  Target: LAMA2; (+) strand; PAM type: NNNNGHTT; PAM sequence: CCTGGTTT
attcagagattcaacttctt

SEQ ID NO: 47184 - DNA, 20 bp, Artificial Sequence
  Description of Artificial Sequence: Synthetic oligonucleotide
  Target: LAMA2; (+) strand; PAM type: NNNNGHTT; PAM sequence: TCTAGATT
cgaggaatttatccatttct

SEQ ID NO: 47185 - DNA, 20 bp, Artificial Sequence
  Description of Artificial Sequence: Synthetic oligonucleotide
  Target: LAMA2; (+) strand; PAM type: NNNNGHTT; PAM sequence: TCTAGTTT
tatccatttcttctagattt

SEQ ID NO: 47186 - DNA, 20 bp, Artificial Sequence
  Description of Artificial Sequence: Synthetic oligonucleotide
  Target: LAMA2; (+) strand; PAM type: NNNNGHTT; PAM sequence: AGGTGTTT
tttctagtttatttgcatag

SEQ ID NO: 47187 - DNA, 20 bp, Artificial Sequence
  Description of Artificial Sequence: Synthetic oligonucleotide
  Target: LAMA2; (+) strand; PAM type: NNNNGHTT; PAM sequence: CTCTGATT
atagaggtgtttgtagtatt

SEQ ID NO: 47188 - DNA, 20 bp, Artificial Sequence
  Description of Artificial Sequence: Synthetic oligonucleotide
  Target: LAMA2; (+) strand; PAM type: NNNNGHTT; PAM sequence: TTTAGTTT
tgtttgtagtattctctgat

SEQ ID NO: 47189 - DNA, 20 bp, Artificial Sequence
  Description of Artificial Sequence: Synthetic oligonucleotide
  Target: LAMA2; (+) strand; PAM type: NNNNGHTT; PAM sequence: ATTAGATT
tatcattttttattgcatct

SEQ ID NO: 47190 - DNA, 20 bp, Artificial Sequence
  Description of Artificial Sequence: Synthetic oligonucleotide
  Target: LAMA2; (+) strand; PAM type: NNNNGHTT; PAM sequence: CCTGGATT
accctttcaaaaaaccagct

SEQ ID NO: 47191 - DNA, 20 bp, Artificial Sequence
  Description of Artificial Sequence: Synthetic oligonucleotide
  Target: LAMA2; (+) strand; PAM type: NNNNGHTT; PAM sequence: AAGGGTTT
ctggattcattaattttttg

SEQ ID NO: 47192 - DNA, 20 bp, Artificial Sequence
  Description of Artificial Sequence: Synthetic oligonucleotide
  Target: LAMA2; (+) strand; PAM type: NNNNGHTT; PAM sequence: CTCTGATT
ctctatttccttcagttctg

SEQ ID NO: 47193 - DNA, 20 bp, Artificial Sequence
  Description of Artificial Sequence: Synthetic oligonucleotide
  Target: LAMA2; (+) strand; PAM type: NNNNGHTT; PAM sequence: GCTAGCTT
ttagttatttcttgccttct

SEQ ID NO: 47194 - DNA, 20 bp, Artificial Sequence
  Description of Artificial Sequence: Synthetic oligonucleotide
  Target: LAMA2; (+) strand; PAM type: NNNNGHTT; PAM sequence: ATGTGTTT
tgccttctgctagcttttga

SEQ ID NO: 47195 - DNA, 20 bp, Artificial Sequence
  Description of Artificial Sequence: Synthetic oligonucleotide
  Target: LAMA2; (+) strand; PAM type: NNNNGHTT; PAM sequence: TCCTGCTT
tagcttttgaatgtgtttgc

SEQ ID NO: 47196 - DNA, 20 bp, Artificial Sequence
  Description of Artificial Sequence: Synthetic oligonucleotide
  Target: LAMA2; (+) strand; PAM type: NNNNGHTT; PAM sequence: TCCTGCTT
gggtgtcaattttggatctt

SEQ ID NO: 47197 - DNA, 20 bp, Artificial Sequence
  Description of Artificial Sequence: Synthetic oligonucleotide
  Target: LAMA2; (+) strand; PAM type: NNNNGHTT; PAM sequence: CACTGCTT
gctataaatttccctctaca

SEQ ID NO: 47198 - DNA, 20 bp, Artificial Sequence
  Description of Artificial Sequence: Synthetic oligonucleotide
  Target: LAMA2; (+) strand; PAM type: NNNNGHTT; PAM sequence: CAGAGATT
acactgctttgaatgcgtcc

SEQ ID NO: 47199 - DNA, 20 bp, Artificial Sequence
  Description of Artificial Sequence: Synthetic oligonucleotide
  Target: LAMA2; (+) strand; PAM type: NNNNGHTT; PAM sequence: ATGGGTTT
tatgttgtgtctttgttctc

SEQ ID NO: 47200 - DNA, 20 bp, Artificial Sequence
  Description of Artificial Sequence: Synthetic oligonucleotide
  Target: LAMA2; (+) strand; PAM type: NNNNGHTT; PAM sequence: TTCAGTTT
agtcattcaggagcaggttg

SEQ ID NO: 47201 - DNA, 20 bp, Artificial Sequence
  Description of Artificial Sequence: Synthetic oligonucleotide
  Target: LAMA2; (+) strand; PAM type: NNNNGHTT; PAM sequence: AGCAGTTT
gttcagtttccatgtagttg

SEQ ID NO: 47202 - DNA, 20 bp, Artificial Sequence
  Description of Artificial Sequence: Synthetic oligonucleotide
  Target: LAMA2; (+) strand; PAM type: NNNNGHTT; PAM sequence: GTGAGATT
atgtagttgagcagttttga

SEQ ID NO: 47203 - DNA, 20 bp, Artificial Sequence
  Description of Artificial Sequence: Synthetic oligonucleotide
  Target: LAMA2; (+) strand; PAM type: NNNNGHTT; PAM sequence: TCTAGTTT
tgagattcttaatcctgagt

SEQ ID NO: 47204 - DNA, 20 bp, Artificial Sequence
  Description of Artificial Sequence: Synthetic oligonucleotide
  Target: LAMA2; (+) strand; PAM type: NNNNGHTT; PAM sequence: GTTTGATT
attcttaatcctgagttcta

SEQ ID NO: 47205 - DNA, 20 bp, Artificial Sequence
  Description of Artificial Sequence: Synthetic oligonucleotide
  Target: LAMA2; (+) strand; PAM type: NNNNGHTT; PAM sequence: GATAGTTT
gattgcactgtggtctgaga

SEQ ID NO: 47206 - DNA, 20 bp, Artificial Sequence
  Description of Artificial Sequence: Synthetic oligonucleotide
  Target: LAMA2; (+) strand; PAM type: NNNNGHTT; PAM sequence: GAGAGCTT
gttcttttacatttgctgag

SEQ ID NO: 47207 - DNA, 20 bp, Artificial Sequence
  Description of Artificial Sequence: Synthetic oligonucleotide
  Target: LAMA2; (+) strand; PAM type: NNNNGHTT; PAM sequence: TGTTGATT
gctgaaaaaaatgtatattc

SEQ ID NO: 47208 - DNA, 20 bp, Artificial Sequence
  Description of Artificial Sequence: Synthetic oligonucleotide
  Target: LAMA2; (+) strand; PAM type: NNNNGHTT; PAM sequence: AGATGTTT
tttggggtggagagttctgt

SEQ ID NO: 47209 - DNA, 20 bp, Artificial Sequence
  Description of Artificial Sequence: Synthetic oligonucleotide
  Target: LAMA2; (+) strand; PAM type: NNNNGHTT; PAM sequence: GTCCGCTT
gttctgtagatgtttattag

SEQ ID NO: 47210 - DNA, 20 bp, Artificial Sequence
  Description of Artificial Sequence: Synthetic oligonucleotide
  Target: LAMA2; (+) strand; PAM type: NNNNGHTT; PAM sequence: ACTTGCTT
ctctttgtaggtcactcagg

SEQ ID NO: 47211 - DNA, 20 bp, Artificial Sequence
  Description of Artificial Sequence: Synthetic oligonucleotide
  Target: LAMA2; (+) strand; PAM type: NNNNGHTT; PAM sequence: TGATGTTT
atggccttctttgtctcttt

SEQ ID NO: 47212 - DNA, 20 bp, Artificial Sequence
  Description of Artificial Sequence: Synthetic oligonucleotide
  Target: LAMA2; (+) strand; PAM type: NNNNGHTT; PAM sequence: GTTGGTTT
ctttgtctcttttgatgttt

SEQ ID NO: 47213 - DNA, 20 bp, Artificial Sequence
  Description of Artificial Sequence: Synthetic oligonucleotide
  Target: LAMA2; (+) strand; PAM type: NNNNGHTT; PAM sequence: GTCTGTTT
ttgatgtttgttggtttaaa

SEQ ID NO: 47214 - DNA, 20 bp, Artificial Sequence
  Description of Artificial Sequence: Synthetic oligonucleotide
  Target: LAMA2; (+) strand; PAM type: NNNNGHTT; PAM sequence: CTAGGATT
aaagtctgttttatcagaga

SEQ ID NO: 47215 - DNA, 20 bp, Artificial Sequence
  Description of Artificial Sequence: Synthetic oligonucleotide
  Target: LAMA2; (+) strand; PAM type: NNNNGHTT; PAM sequence: TTTTGTTT
ggattgcaacccctgccttt

SEQ ID NO: 47216 - DNA, 20 bp, Artificial Sequence
  Description of Artificial Sequence: Synthetic oligonucleotide
  Target: LAMA2; (+) strand; PAM type: NNNNGHTT; PAM sequence: ATTTGCTT
cctgcctttttttgttttcc

SEQ ID NO: 47217 - DNA, 20 bp, Artificial Sequence
  Description of Artificial Sequence: Synthetic oligonucleotide
  Target: LAMA2; (+) strand; PAM type: NNNNGHTT; PAM sequence: ATGGGTTT
tgtgtgtctctgcacatgag

SEQ ID NO: 47218 - DNA, 20 bp, Artificial Sequence
  Description of Artificial Sequence: Synthetic oligonucleotide
  Target: LAMA2; (+) strand; PAM type: NNNNGHTT; PAM sequence: TGCAGTTT
ttattttgctcgttagttga

SEQ ID NO: 47219 - DNA, 20 bp, Artificial Sequence
  Description of Artificial Sequence: Synthetic oligonucleotide
  Target: LAMA2; (+) strand; PAM type: NNNNGHTT; PAM sequence: GCATGCTT
tcgatggtctttacaatttg

SEQ ID NO: 47220 - DNA, 20 bp, Artificial Sequence
  Description of Artificial Sequence: Synthetic oligonucleotide
  Target: LAMA2; (+) strand; PAM type: NNNNGHTT; PAM sequence: CCATGTTT
ctggtactggttgttccttt

SEQ ID NO: 47221 - DNA, 20 bp, Artificial Sequence
  Description of Artificial Sequence: Synthetic oligonucleotide
  Target: LAMA2; (+) strand; PAM type: NNNNGHTT; PAM sequence: TAGTGCTT
tggttgttcctttccatgtt

SEQ ID NO: 47222 - DNA, 20 bp, Artificial Sequence
  Description of Artificial Sequence: Synthetic oligonucleotide
  Target: LAMA2; (+) strand; PAM type: NNNNGHTT; PAM sequence: ATTTGCTT
tggtgacaaaatctctcagc

SEQ ID NO: 47223 - DNA, 20 bp, Artificial Sequence
  Description of Artificial Sequence: Synthetic oligonucleotide
  Target: LAMA2; (+) strand; PAM type: NNNNGHTT; PAM sequence: CTTCGCTT
tgtaaagtattttatttctc

SEQ ID NO: 47224 - DNA, 20 bp, Artificial Sequence
  Description of Artificial Sequence: Synthetic oligonucleotide
  Target: LAMA2; (+) strand; PAM type: NNNNGHTT; PAM sequence: TGAAGCTT
ttttatttctccttcgctta

SEQ ID NO: 47225 - DNA, 20 bp, Artificial Sequence
  Description of Artificial Sequence: Synthetic oligonucleotide
  Target: LAMA2; (+) strand; PAM type: NNNNGHTT; PAM sequence: CTTAGTTT
tttctccttcgcttatgaag

SEQ ID NO: 47226 - DNA, 20 bp, Artificial Sequence
  Description of Artificial Sequence: Synthetic oligonucleotide
  Target: LAMA2; (+) strand; PAM type: NNNNGHTT; PAM sequence: TCCGGCTT
aatattggcccccactctct

SEQ ID NO: 47227 - DNA, 20 bp, Artificial Sequence
  Description of Artificial Sequence: Synthetic oligonucleotide
  Target: LAMA2; (+) strand; PAM type: NNNNGHTT; PAM sequence: TAGAGTTT
ccccactctcttccggcttg

SEQ ID NO: 47228 - DNA, 20 bp, Artificial Sequence
  Description of Artificial Sequence: Synthetic oligonucleotide
  Target: LAMA2; (+) strand; PAM type: NNNNGHTT; PAM sequence: ATGGGCTT
agcgatctgctgttagtctg

SEQ ID NO: 47229 - DNA, 20 bp, Artificial Sequence
  Description of Artificial Sequence: Synthetic oligonucleotide
  Target: LAMA2; (+) strand; PAM type: NNNNGHTT; PAM sequence: TTCAGCTT
cttaacattttttccttcat

SEQ ID NO: 47230 - DNA, 20 bp, Artificial Sequence
  Description of Artificial Sequence: Synthetic oligonucleotide
  Target: LAMA2; (+) strand; PAM type: NNNNGHTT; PAM sequence: GCTAGATT
tctgaacgttggcctgcctt

SEQ ID NO: 47231 - DNA, 20 bp, Artificial Sequence
  Description of Artificial Sequence: Synthetic oligonucleotide
  Target: LAMA2; (+) strand; PAM type: NNNNGHTT; PAM sequence: GAGTGTTT
ctcctggataatatcctgca

SEQ ID NO: 47232 - DNA, 20 bp, Artificial Sequence
  Description of Artificial Sequence: Synthetic oligonucleotide
  Target: LAMA2; (+) strand; PAM type: NNNNGHTT; PAM sequence: CGTAGATT
tttcaggtacaccaatcaga

SEQ ID NO: 47233 - DNA, 20 bp, Artificial Sequence
  Description of Artificial Sequence: Synthetic oligonucleotide
  Target: LAMA2; (+) strand; PAM type: NNNNGHTT; PAM sequence: GGAGGCTT
cacatagtcccatatttctt

SEQ ID NO: 47234 - DNA, 20 bp, Artificial Sequence
  Description of Artificial Sequence: Synthetic oligonucleotide
  Target: LAMA2; (+) strand; PAM type: NNNNGHTT; PAM sequence: TGAGGCTT
cagttgatcgcatcggctcc

SEQ ID NO: 47235 - DNA, 20 bp, Artificial Sequence
  Description of Artificial Sequence: Synthetic oligonucleotide
  Target: LAMA2; (+) strand; PAM type: NNNNGHTT; PAM sequence: CTTGGTTT
tcttcacgtagttctcgagc

SEQ ID NO: 47236 - DNA, 20 bp, Artificial Sequence
  Description of Artificial Sequence: Synthetic oligonucleotide
  Target: LAMA2; (+) strand; PAM type: NNNNGHTT; PAM sequence: CAAAGTTT
acattcttctacattttttt

SEQ ID NO: 47237 - DNA, 20 bp, Artificial Sequence
  Description of Artificial Sequence: Synthetic oligonucleotide
  Target: LAMA2; (+) strand; PAM type: NNNNGHTT; PAM sequence: TTTGGTTT
aagttttcaacttctttgcc

SEQ ID NO: 47238 - DNA, 20 bp, Artificial Sequence
  Description of Artificial Sequence: Synthetic oligonucleotide
  Target: LAMA2; (+) strand; PAM type: NNNNGHTT; PAM sequence: TCCAGCTT
ctcgtcaaagtcgttctcca

SEQ ID NO: 47239 - DNA, 20 bp, Artificial Sequence
  Description of Artificial Sequence: Synthetic oligonucleotide
  Target: LAMA2; (+) strand; PAM type: NNNNGHTT; PAM sequence: CTCTGCTT
cctttggaggaggagaggca

SEQ ID NO: 47240 - DNA, 20 bp, Artificial Sequence
  Description of Artificial Sequence: Synthetic oligonucleotide
  Target: LAMA2; (+) strand; PAM type: NNNNGHTT; PAM sequence: TAGAGTTT
aggagaggcactctgctttt

SEQ ID NO: 47241 - DNA, 20 bp, Artificial Sequence
  Description of Artificial Sequence: Synthetic oligonucleotide
  Target: LAMA2; (+) strand; PAM type: NNNNGHTT; PAM sequence: TCCAGTTT
gcactctgctttttagagtt

SEQ ID NO: 47242 - DNA, 20 bp, Artificial Sequence
  Description of Artificial Sequence: Synthetic oligonucleotide
  Target: LAMA2; (+) strand; PAM type: NNNNGHTT; PAM sequence: TTCTGTTT
tagagtttccagtttttctg

SEQ ID NO: 47243 - DNA, 20 bp, Artificial Sequence
  Description of Artificial Sequence: Synthetic oligonucleotide
  Target: LAMA2; (+) strand; PAM type: NNNNGHTT; PAM sequence: TGTGGTTT
ttctgttttttccccatctt

SEQ ID NO: 47244 - DNA, 20 bp, Artificial Sequence
  Description of Artificial Sequence: Synthetic oligonucleotide
  Target: LAMA2; (+) strand; PAM type: NNNNGHTT; PAM sequence: ATGGGTTT
ttgatgatggtgatgtacag

SEQ ID NO: 47245 - DNA, 20 bp, Artificial Sequence
  Description of Artificial Sequence: Synthetic oligonucleotide
  Target: LAMA2; (+) strand; PAM type: NNNNGHTT; PAM sequence: TTCTGTTT
gtttttcgtgtggatgtcct

SEQ ID NO: 47246 - DNA, 20 bp, Artificial Sequence
  Description of Artificial Sequence: Synthetic oligonucleotide
  Target: LAMA2; (+) strand; PAM type: NNNNGHTT; PAM sequence: GTTAGTTT
tgtggatgtcctttctgttt

SEQ ID NO: 47247 - DNA, 20 bp, Artificial Sequence
  Description of Artificial Sequence: Synthetic oligonucleotide
  Target: LAMA2; (+) strand; PAM type: NNNNGHTT; PAM sequence: TTTTGTTT
tgcagaggttactgctgtct

SEQ ID NO: 47248 - DNA, 20 bp, Artificial Sequence
  Description of Artificial Sequence: Synthetic oligonucleotide
  Target: LAMA2; (+) strand; PAM type: NNNNGHTT; PAM sequence: TGGAGCTT
tgtggtgggctccacccagt

SEQ ID NO: 47249 - DNA, 20 bp, Artificial Sequence
  Description of Artificial Sequence: Synthetic oligonucleotide
  Target: LAMA2; (+) strand; PAM type: NNNNGHTT; PAM sequence: AGCTGCTT
ccacccagttggagcttccc

SEQ ID NO: 47250 - DNA, 20 bp, Artificial Sequence
  Description of Artificial Sequence: Synthetic oligonucleotide
  Target: LAMA2; (+) strand; PAM type: NNNNGHTT; PAM sequence: CTTTGTTT
cagttggagcttcccagctg

SEQ ID NO: 47251 - DNA, 20 bp, Artificial Sequence
  Description of Artificial Sequence: Synthetic oligonucleotide
  Target: LAMA2; (+) strand; PAM type: NNNNGHTT; PAM sequence: TGCAGTTT
ccccagcctcgctgctgcct

SEQ ID NO: 47252 - DNA, 20 bp, Artificial Sequence
  Description of Artificial Sequence: Synthetic oligonucleotide
  Target: LAMA2; (+) strand; PAM type: NNNNGHTT; PAM sequence: CACCGTTT
caggatataatctcatggtt

SEQ ID NO: 47253 - DNA, 20 bp, Artificial Sequence
  Description of Artificial Sequence: Synthetic oligonucleotide
  Target: LAMA2; (+) strand; PAM type: NNNNGHTT; PAM sequence: ACCCGATT
gcagtattccggtgggagtg

SEQ ID NO: 47254 - DNA, 20 bp, Artificial Sequence
  Description of Artificial Sequence: Synthetic oligonucleotide
  Target: LAMA2; (+) strand; PAM type: NNNNGHTT; PAM sequence: TTGCGCTT
aaagggaactccctgacccc

SEQ ID NO: 47255 - DNA, 20 bp, Artificial Sequence
  Description of Artificial Sequence: Synthetic oligonucleotide
  Target: LAMA2; (+) strand; PAM type: NNNNGHTT; PAM sequence: CCCTGCTT
ccaagtgaggcaatgcctcg

SEQ ID NO: 47256 - DNA, 20 bp, Artificial Sequence
  Description of Artificial Sequence: Synthetic oligonucleotide
  Target: LAMA2; (+) strand; PAM type: NNNNGHTT; PAM sequence: CCCCGATT
tgggccatgttggctcctct

SEQ ID NO: 47257 - DNA, 20 bp, Artificial Sequence
  Description of Artificial Sequence: Synthetic oligonucleotide
  Target: LAMA2; (+) strand; PAM type: NNNNGHTT; PAM sequence: TTCAGTTT
atgttggctcctctccccga

SEQ ID NO: 47258 - DNA, 20 bp, Artificial Sequence
  Description of Artificial Sequence: Synthetic oligonucleotide
  Target: LAMA2; (+) strand; PAM type: NNNNGHTT; PAM sequence: ATGTGTTT
accatccatacatttttatt

SEQ ID NO: 47259 - DNA, 20 bp, Artificial Sequence
  Description of Artificial Sequence: Synthetic oligonucleotide
  Target: LAMA2; (+) strand; PAM type: NNNNGHTT; PAM sequence: GAGAGCTT
gatatctttatcatgttcaa

SEQ ID NO: 47260 - DNA, 20 bp, Artificial Sequence
  Description of Artificial Sequence: Synthetic oligonucleotide
  Target: LAMA2; (+) strand; PAM type: NNNNGHTT; PAM sequence: CAAAGATT
acatatctttgaaatctttt

SEQ ID NO: 47261 - DNA, 20 bp, Artificial Sequence
  Description of Artificial Sequence: Synthetic oligonucleotide
  Target: LAMA2; (+) strand; PAM type: NNNNGHTT; PAM sequence: TAATGCTT
ttcagctctggaccaataat

SEQ ID NO: 47262 - DNA, 20 bp, Artificial Sequence
  Description of Artificial Sequence: Synthetic oligonucleotide
  Target: LAMA2; (+) strand; PAM type: NNNNGHTT; PAM sequence: TCAAGATT
caaaaatagaaatataataa

SEQ ID NO: 47263 - DNA, 20 bp, Artificial Sequence
  Description of Artificial Sequence: Synthetic oligonucleotide
  Target: LAMA2; (+) strand; PAM type: NNNNGHTT; PAM sequence: TCATGCTT
tttgtaggtcatttttatct

SEQ ID NO: 47264 - DNA, 20 bp, Artificial Sequence
  Description of Artificial Sequence: Synthetic oligonucleotide
  Target: LAMA2; (+) strand; PAM type: NNNNGHTT; PAM sequence: CATGGTTT
aagagtgtaagatgtggtct

SEQ ID NO: 47265 - DNA, 20 bp, Artificial Sequence
  Description of Artificial Sequence: Synthetic oligonucleotide
  Target: LAMA2; (+) strand; PAM type: NNNNGHTT; PAM sequence: ATCAGATT
ctcatggtttgcacttcttc

SEQ ID NO: 47266 - DNA, 20 bp, Artificial Sequence
  Description of Artificial Sequence: Synthetic oligonucleotide
  Target: LAMA2; (+) strand; PAM type: NNNNGHTT; PAM sequence: ATTTGATT
ttagtgtattactggcattc

SEQ ID NO: 47267 - DNA, 20 bp, Artificial Sequence
  Description of Artificial Sequence: Synthetic oligonucleotide
  Target: LAMA2; (+) strand; PAM type: NNNNGHTT; PAM sequence: CTCTGATT
ggaaatacgatgtatttctt

SEQ ID NO: 47268 - DNA, 20 bp, Artificial Sequence
  Description of Artificial Sequence: Synthetic oligonucleotide
  Target: LAMA2; (+) strand; PAM type: NNNNGHTT; PAM sequence: TTTAGTTT
atttcttctctgatttttct

SEQ ID NO: 47269 - DNA, 20 bp, Artificial Sequence
  Description of Artificial Sequence: Synthetic oligonucleotide
  Target: LAMA2; (+) strand; PAM type: NNNNGHTT; PAM sequence: GGAAGTTT
ttcattttcttttagtagaa

SEQ ID NO: 47270 - DNA, 20 bp, Artificial Sequence
  Description of Artificial Sequence: Synthetic oligonucleotide
  Target: LAMA2; (+) strand; PAM type: NNNNGHTT; PAM sequence: TGTAGATT
tagaaggaagttttctccct

SEQ ID NO: 47271 - DNA, 20 bp, Artificial Sequence
  Description of Artificial Sequence: Synthetic oligonucleotide
  Target: LAMA2; (+) strand; PAM type: NNNNGHTT; PAM sequence: ATCAGTTT
tagtatatcattttttaata

SEQ ID NO: 47272 - DNA, 20 bp, Artificial Sequence
  Description of Artificial Sequence: Synthetic oligonucleotide
  Target: LAMA2; (+) strand; PAM type: NNNNGHTT; PAM sequence: TTCAGATT
tcattttttaataatcagtt

SEQ ID NO: 47273 - DNA, 20 bp, Artificial Sequence
  Description of Artificial Sequence: Synthetic oligonucleotide
  Target: LAMA2; (+) strand; PAM type: NNNNGHTT; PAM sequence: ATTTGCTT
ttttaataatcagttttcag

SEQ ID NO: 47274 - DNA, 20 bp, Artificial Sequence
  Description of Artificial Sequence: Synthetic oligonucleotide
  Target: LAMA2; (+) strand; PAM type: NNNNGHTT; PAM sequence: CCATGATT
cttataataatgataccaac

SEQ ID NO: 47275 - DNA, 20 bp, Artificial Sequence
  Description of Artificial Sequence: Synthetic oligonucleotide
  Target: LAMA2; (+) strand; PAM type: NNNNGHTT; PAM sequence: TTTTGATT
caacccatgattattatata

SEQ ID NO: 47276 - DNA, 20 bp, Artificial Sequence
  Description of Artificial Sequence: Synthetic oligonucleotide
  Target: LAMA2; (+) strand; PAM type: NNNNGHTT; PAM sequence: ACATGCTT
gatttttttgtgtatttctt

SEQ ID NO: 47277 - DNA, 20 bp, Artificial Sequence
  Description of Artificial Sequence: Synthetic oligonucleotide
  Target: LAMA2; (+) strand; PAM type: NNNNGHTT; PAM sequence: CCAAGATT
tcctagaactctcatctatc

SEQ ID NO: 47278 - DNA, 20 bp, Artificial Sequence
  Description of Artificial Sequence: Synthetic oligonucleotide
  Target: LAMA2; (+) strand; PAM type: NNNNGHTT; PAM sequence: ATTTGTTT
tcccaagattagaaaaatgt

SEQ ID NO: 47279 - DNA, 20 bp, Artificial Sequence
  Description of Artificial Sequence: Synthetic oligonucleotide
  Target: LAMA2; (+) strand; PAM type: NNNNGHTT; PAM sequence: GTATGATT
tgtatttgttttcttcattt

SEQ ID NO: 47280 - DNA, 20 bp, Artificial Sequence
  Description of Artificial Sequence: Synthetic oligonucleotide
  Target: LAMA2; (+) strand; PAM type: NNNNGHTT; PAM sequence: TTTTGTTT
aaggaaattttcaaactaca

SEQ ID NO: 47281 - DNA, 20 bp, Artificial Sequence
  Description of Artificial Sequence: Synthetic oligonucleotide
  Target: LAMA2; (+) strand; PAM type: NNNNGHTT; PAM sequence: TTATGTTT
ttcatatggacttcattttc

SEQ ID NO: 47282 - DNA, 20 bp, Artificial Sequence
  Description of Artificial Sequence: Synthetic oligonucleotide
  Target: LAMA2; (+) strand; PAM type: NNNNGHTT; PAM sequence: GTGTGTTT
gtgtgtgtgtgtgtgtatgt

SEQ ID NO: 47283 - DNA, 20 bp, Artificial Sequence
  Description of Artificial Sequence: Synthetic oligonucleotide
  Target: LAMA2; (+) strand; PAM type: NNNNGHTT; PAM sequence: CTTAGTTT
gtatgcgtgcatatgtattt

SEQ ID NO: 47284 - DNA, 20 bp, Artificial Sequence
  Description of Artificial Sequence: Synthetic oligonucleotide
  Target: LAMA2; (+) strand; PAM type: NNNNGHTT; PAM sequence: CATTGTTT
ccagtcaactccaggaaaga

SEQ ID NO: 47285 - DNA, 20 bp, Artificial Sequence
  Description of Artificial Sequence: Synthetic oligonucleotide
  Target: LAMA2; (+) strand; PAM type: NNNNGHTT; PAM sequence: GTAAGCTT
acattgttttaaagaatgac

SEQ ID NO: 47286 - DNA, 20 bp, Artificial Sequence
  Description of Artificial Sequence: Synthetic oligonucleotide
  Target: LAMA2; (+) strand; PAM type: NNNNGHTT; PAM sequence: TGTAGTTT
agctttctagaagtcaattt

SEQ ID NO: 47287 - DNA, 20 bp, Artificial Sequence
  Description of Artificial Sequence: Synthetic oligonucleotide
  Target: LAMA2; (+) strand; PAM type: NNNNGHTT; PAM sequence: AGGGGTTT
tttgtagtttctcatctcca

SEQ ID NO: 47288 - DNA, 20 bp, Artificial Sequence
  Description of Artificial Sequence: Synthetic oligonucleotide
  Target: LAMA2; (+) strand; PAM type: NNNNGHTT; PAM sequence: CAACGATT
ttctttatttcttgccagcg

SEQ ID NO: 47289 - DNA, 20 bp, Artificial Sequence
  Description of Artificial Sequence: Synthetic oligonucleotide
  Target: LAMA2; (+) strand; PAM type: NNNNGHTT; PAM sequence: CTACGTTT
ctacctacctatctattttt

SEQ ID NO: 47290 - DNA, 20 bp, Artificial Sequence
  Description of Artificial Sequence: Synthetic oligonucleotide
  Target: LAMA2; (+) strand; PAM type: NNNNGHTT; PAM sequence: AGGGGTTT
cttcaactgttctgaacagg

SEQ ID NO: 47291 - DNA, 20 bp, Artificial Sequence
  Description of Artificial Sequence: Synthetic oligonucleotide
  Target: LAMA2; (+) strand; PAM type: NNNNGHTT; PAM sequence: CATTGTTT
gaaataaaagttaagataga

SEQ ID NO: 47292 - DNA, 20 bp, Artificial Sequence
  Description of Artificial Sequence: Synthetic oligonucleotide
  Target: LAMA2; (+) strand; PAM type: NNNNGHTT; PAM sequence: ATCAGATT
ttgcaaactttattaaaatt

SEQ ID NO: 47293 - DNA, 20 bp, Artificial Sequence
  Description of Artificial Sequence: Synthetic oligonucleotide
  Target: LAMA2; (+) strand; PAM type: NNNNGHTT; PAM sequence: TTAGGATT
gaggatccttttaatgtact

SEQ ID NO: 47294 - DNA, 20 bp, Artificial Sequence
  Description of Artificial Sequence: Synthetic oligonucleotide
  Target: LAMA2; (+) strand; PAM type: NNNNGHTT; PAM sequence: TTCAGTTT
ccttttaatgtactttagga

SEQ ID NO: 47295 - DNA, 20 bp, Artificial Sequence
  Description of Artificial Sequence: Synthetic oligonucleotide
  Target: LAMA2; (+) strand; PAM type: NNNNGHTT; PAM sequence: TGGTGTTT
atgtactttaggattcagtt

SEQ ID NO: 47296 - DNA, 20 bp, Artificial Sequence
  Description of Artificial Sequence: Synthetic oligonucleotide
  Target: LAMA2; (+) strand; PAM type: NNNNGHTT; PAM sequence: TCTGGATT
tcagtttggtgttttgctca

SEQ ID NO: 47297 - DNA, 20 bp, Artificial Sequence
  Description of Artificial Sequence: Synthetic oligonucleotide
  Target: LAMA2; (+) strand; PAM type: NNNNGHTT; PAM sequence: AGATGTTT
taatagtgtctatctcatat

SEQ ID NO: 47298 - DNA, 20 bp, Artificial Sequence
  Description of Artificial Sequence: Synthetic oligonucleotide
  Target: LAMA2; (+) strand; PAM type: NNNNGHTT; PAM sequence: CTGTGTTT
agtactaactgaattaaccc

SEQ ID NO: 47299 - DNA, 20 bp, Artificial Sequence
  Description of Artificial Sequence: Synthetic oligonucleotide
  Target: LAMA2; (+) strand; PAM type: NNNNGHTT; PAM sequence: AGAAGTTT
ataagtgctatttgagtctt

SEQ ID NO: 47300 - DNA, 20 bp, Artificial Sequence
  Description of Artificial Sequence: Synthetic oligonucleotide
  Target: LAMA2; (+) strand; PAM type: NNNNGHTT; PAM sequence: TTTTGTTT
tgctatttgagtcttagaag

SEQ ID NO: 47301 - DNA, 20 bp, Artificial Sequence
  Description of Artificial Sequence: Synthetic oligonucleotide
  Target: LAMA2; (+) strand; PAM type: NNNNGHTT; PAM sequence: ATTTGCTT
catttgggtatcaagttaga

SEQ ID NO: 47302 - DNA, 20 bp, Artificial Sequence
  Description of Artificial Sequence: Synthetic oligonucleotide
  Target: LAMA2; (+) strand; PAM type: NNNNGHTT; PAM sequence: AAGAGTTT
ctccatttttatatgaccat

SEQ ID NO: 47303 - DNA, 20 bp, Artificial Sequence
  Description of Artificial Sequence: Synthetic oligonucleotide
  Target: LAMA2; (+) strand; PAM type: NNNNGHTT; PAM sequence: TCAAGTTT
tttatatgaccataagagtt

SEQ ID NO: 47304 - DNA, 20 bp, Artificial Sequence
  Description of Artificial Sequence: Synthetic oligonucleotide
  Target: LAMA2; (+) strand; PAM type: NNNNGHTT; PAM sequence: ACATGTTT
aaaaattaactatcattaaa

SEQ ID NO: 47305 - DNA, 20 bp, Artificial Sequence
  Description of Artificial Sequence: Synthetic oligonucleotide
  Target: LAMA2; (+) strand; PAM type: NNNNGHTT; PAM sequence: CCTTGATT
aatttgtcctcttttgatac

SEQ ID NO: 47306 - DNA, 20 bp, Artificial Sequence
  Description of Artificial Sequence: Synthetic oligonucleotide
  Target: LAMA2; (+) strand; PAM type: NNNNGHTT; PAM sequence: ATTAGCTT
gtcctcttttgatacccttg

SEQ ID NO: 47307 - DNA, 20 bp, Artificial Sequence
  Description of Artificial Sequence: Synthetic oligonucleotide
  Target: LAMA2; (+) strand; PAM type: NNNNGHTT; PAM sequence: CTTTGTTT
cttttgatacccttgattag

SEQ ID NO: 47308 - DNA, 20 bp, Artificial Sequence
  Description of Artificial Sequence: Synthetic oligonucleotide
  Target: LAMA2; (+) strand; PAM type: NNNNGHTT; PAM sequence: TACCGTTT
tacccttgattagctttgtt

SEQ ID NO: 47309 - DNA, 20 bp, Artificial Sequence
  Description of Artificial Sequence: Synthetic oligonucleotide
  Target: LAMA2; (+) strand; PAM type: NNNNGHTT; PAM sequence: TTTTGCTT
tagctttgtttaccgtttcc

SEQ ID NO: 47310 - DNA, 20 bp, Artificial Sequence
  Description of Artificial Sequence: Synthetic oligonucleotide
  Target: LAMA2; (+) strand; PAM type: NNNNGHTT; PAM sequence: GCTTGCTT
tttgtttaccgtttcctttt

SEQ ID NO: 47311 - DNA, 20 bp, Artificial Sequence
  Description of Artificial Sequence: Synthetic oligonucleotide
  Target: LAMA2; (+) strand; PAM type: NNNNGHTT; PAM sequence: TGGTGTTT
tcaaatctctttacttcctg

SEQ ID NO: 47312 - DNA, 20 bp, Artificial Sequence
  Description of Artificial Sequence: Synthetic oligonucleotide
  Target: LAMA2; (+) strand; PAM type: NNNNGHTT; PAM sequence: ATAAGTTT
ataatggactatttaagcct

SEQ ID NO: 47313 - DNA, 20 bp, Artificial Sequence
  Description of Artificial Sequence: Synthetic oligonucleotide
  Target: LAMA2; (+) strand; PAM type: NNNNGHTT; PAM sequence: TACAGTTT
cctataagtttacttttggg

SEQ ID NO: 47314 - DNA, 20 bp, Artificial Sequence
  Description of Artificial Sequence: Synthetic oligonucleotide
  Target: LAMA2; (+) strand; PAM type: NNNNGHTT; PAM sequence: TCTTGATT
ctatttatttttaattgaag

SEQ ID NO: 47315 - DNA, 20 bp, Artificial Sequence
  Description of Artificial Sequence: Synthetic oligonucleotide
  Target: LAMA2; (+) strand; PAM type: NNNNGHTT; PAM sequence: TCATGTTT
ttttgcataaaattctctca

SEQ ID NO: 47316 - DNA, 20 bp, Artificial Sequence
  Description of Artificial Sequence: Synthetic oligonucleotide
  Target: LAMA2; (+) strand; PAM type: NNNNGHTT; PAM sequence: TTCTGCTT
gaaaataagccttagataat

SEQ ID NO: 47317 - DNA, 20 bp, Artificial Sequence
  Description of Artificial Sequence: Synthetic oligonucleotide
  Target: LAMA2; (+) strand; PAM type: NNNNGHTT; PAM sequence: ATTAGATT
ataatatgtaatttgatatt

SEQ ID NO: 47318 - DNA, 20 bp, Artificial Sequence
  Description of Artificial Sequence: Synthetic oligonucleotide
  Target: LAMA2; (+) strand; PAM type: NNNNGHTT; PAM sequence: TTCTGTTT
attattagattattcaaatt

SEQ ID NO: 47319 - DNA, 20 bp, Artificial Sequence
  Description of Artificial Sequence: Synthetic oligonucleotide
  Target: LAMA2; (+) strand; PAM type: NNNNGHTT; PAM sequence: TAAAGTTT
cattttcagccattgacttt

SEQ ID NO: 47320 - DNA, 20 bp, Artificial Sequence
  Description of Artificial Sequence: Synthetic oligonucleotide
  Target: LAMA2; (+) strand; PAM type: NNNNGHTT; PAM sequence: TAGTGCTT
catatttttgtactgataat

SEQ ID NO: 47321 - DNA, 20 bp, Artificial Sequence
  Description of Artificial Sequence: Synthetic oligonucleotide
  Target: LAMA2; (+) strand; PAM type: NNNNGHTT; PAM sequence: TCATGTTT
cataaacataataatttaaa

SEQ ID NO: 47322 - DNA, 20 bp, Artificial Sequence
  Description of Artificial Sequence: Synthetic oligonucleotide
  Target: LAMA2; (+) strand; PAM type: NNNNGHTT; PAM sequence: GAGAGCTT
tatttttatcaatgtaaaat

SEQ ID NO: 47323 - DNA, 20 bp, Artificial Sequence
  Description of Artificial Sequence: Synthetic oligonucleotide
  Target: LAMA2; (+) strand; PAM type: NNNNGHTT; PAM sequence: CCTAGTTT
tgagagcttgccttactgaa

SEQ ID NO: 47324 - DNA, 20 bp, Artificial Sequence
  Description of Artificial Sequence: Synthetic oligonucleotide
  Target: LAMA2; (+) strand; PAM type: NNNNGHTT; PAM sequence: ATACGCTT
acaacttttttttcttttcc

SEQ ID NO: 47325 - DNA, 20 bp, Artificial Sequence
  Description of Artificial Sequence: Synthetic oligonucleotide
  Target: LAMA2; (+) strand; PAM type: NNNNGHTT; PAM sequence: TTTTGTTT
atttgcaatattcctgttca

SEQ ID NO: 47326 - DNA, 20 bp, Artificial Sequence
  Description of Artificial Sequence: Synthetic oligonucleotide
  Target: LAMA2; (+) strand; PAM type: NNNNGHTT; PAM sequence: ACATGTTT
gtttatctcttgtgcacatt

SEQ ID NO: 47327 - DNA, 20 bp, Artificial Sequence
  Description of Artificial Sequence: Synthetic oligonucleotide
  Target: LAMA2; (+) strand; PAM type: NNNNGHTT; PAM sequence: TTATGTTT
ctcttgtgcacattacatgt

SEQ ID NO: 47328 - DNA, 20 bp, Artificial Sequence
  Description of Artificial Sequence: Synthetic oligonucleotide
  Target: LAMA2; (+) strand; PAM type: NNNNGHTT; PAM sequence: GACTGCTT
gtttttaataagaacagtaa

SEQ ID NO: 47329 - DNA, 20 bp, Artificial Sequence
  Description of Artificial Sequence: Synthetic oligonucleotide
  Target: LAMA2; (+) strand; PAM type: NNNNGHTT; PAM sequence: TTCTGCTT
ttctgacactaattctgtca

SEQ ID NO: 47330 - DNA, 20 bp, Artificial Sequence
  Description of Artificial Sequence: Synthetic oligonucleotide
  Target: LAMA2; (+) strand; PAM type: NNNNGHTT; PAM sequence: TTTTGCTT
actaattctgtcattctgct

SEQ ID NO: 47331 - DNA, 20 bp, Artificial Sequence
  Description of Artificial Sequence: Synthetic oligonucleotide
  Target: LAMA2; (+) strand; PAM type: NNNNGHTT; PAM sequence: TAATGTTT
tgctttttgctttctctccc

SEQ ID NO: 47332 - DNA, 20 bp, Artificial Sequence
  Description of Artificial Sequence: Synthetic oligonucleotide
  Target: LAMA2; (+) strand; PAM type: NNNNGHTT; PAM sequence: TACTGATT
ttctgatggactatatatat

SEQ ID NO: 47333 - DNA, 20 bp, Artificial Sequence
  Description of Artificial Sequence: Synthetic oligonucleotide
  Target: LAMA2; (+) strand; PAM type: NNNNGHTT; PAM sequence: ATTTGCTT
atggactatatatattactg

SEQ ID NO: 47334 - DNA, 20 bp, Artificial Sequence
  Description of Artificial Sequence: Synthetic oligonucleotide
  Target: LAMA2; (+) strand; PAM type: NNNNGHTT; PAM sequence: TCCAGATT
ctgatttgcttttatctttc

SEQ ID NO: 47335 - DNA, 20 bp, Artificial Sequence
  Description of Artificial Sequence: Synthetic oligonucleotide
  Target: LAMA2; (+) strand; PAM type: NNNNGHTT; PAM sequence: TTGTGTTT
atcaaagacatgaataaaca

SEQ ID NO: 47336 - DNA, 20 bp, Artificial Sequence
  Description of Artificial Sequence: Synthetic oligonucleotide
  Target: LAMA2; (+) strand; PAM type: NNNNGHTT; PAM sequence: TATTGCTT
aacttttcattcccctcatc

SEQ ID NO: 47337 - DNA, 20 bp, Artificial Sequence
  Description of Artificial Sequence: Synthetic oligonucleotide
  Target: LAMA2; (+) strand; PAM type: NNNNGHTT; PAM sequence: GCAGGCTT
acctgtaatagtctggtgga

SEQ ID NO: 47338 - DNA, 20 bp, Artificial Sequence
  Description of Artificial Sequence: Synthetic oligonucleotide
  Target: LAMA2; (+) strand; PAM type: NNNNGHTT; PAM sequence: ACTAGTTT
gcaggcttgttccgtgagcc

SEQ ID NO: 47339 - DNA, 20 bp, Artificial Sequence
  Description of Artificial Sequence: Synthetic oligonucleotide
  Target: LAMA2; (+) strand; PAM type: NNNNGHTT; PAM sequence: TACTGCTT
gccactagttttgcatttgt

SEQ ID NO: 47340 - DNA, 20 bp, Artificial Sequence
  Description of Artificial Sequence: Synthetic oligonucleotide
  Target: LAMA2; (+) strand; PAM type: NNNNGHTT; PAM sequence: TAGCGTTT
caatgtagcatcatcagcat

SEQ ID NO: 47341 - DNA, 20 bp, Artificial Sequence
  Description of Artificial Sequence: Synthetic oligonucleotide
  Target: LAMA2; (+) strand; PAM type: NNNNGHTT; PAM sequence: CATTGTTT
tgtggaaatttctccttggt

SEQ ID NO: 47342 - DNA, 20 bp, Artificial Sequence
  Description of Artificial Sequence: Synthetic oligonucleotide
  Target: LAMA2; (+) strand; PAM type: NNNNGHTT; PAM sequence: CATAGTTT
tggtcattgttttctatagc

SEQ ID NO: 47343 - DNA, 20 bp, Artificial Sequence
  Description of Artificial Sequence: Synthetic oligonucleotide
  Target: LAMA2; (+) strand; PAM type: NNNNGHTT; PAM sequence: AGATGCTT
ttctatagccatagtttggt

SEQ ID NO: 47344 - DNA, 20 bp, Artificial Sequence
  Description of Artificial Sequence: Synthetic oligonucleotide
  Target: LAMA2; (+) strand; PAM type: NNNNGHTT; PAM sequence: TTGAGATT
gccatagtttggtagatgct

SEQ ID NO: 47345 - DNA, 20 bp, Artificial Sequence
  Description of Artificial Sequence: Synthetic oligonucleotide
  Target: LAMA2; (+) strand; PAM type: NNNNGHTT; PAM sequence: TCTTGTTT
atgctttgagatttcatctt

SEQ ID NO: 47346 - DNA, 20 bp, Artificial Sequence
  Description of Artificial Sequence: Synthetic oligonucleotide
  Target: LAMA2; (+) strand; PAM type: NNNNGHTT; PAM sequence: GAAAGCTT
gctatgttcacgtaatcata

SEQ ID NO: 47347 - DNA, 20 bp, Artificial Sequence
  Description of Artificial Sequence: Synthetic oligonucleotide
  Target: LAMA2; (+) strand; PAM type: NNNNGHTT; PAM sequence: TTTGGTTT
tttaattaaaccctctactc

SEQ ID NO: 47348 - DNA, 20 bp, Artificial Sequence
  Description of Artificial Sequence: Synthetic oligonucleotide
  Target: LAMA2; (+) strand; PAM type: NNNNGHTT; PAM sequence: ACTTGTTT
ctttaacaactaaattatgt

SEQ ID NO: 47349 - DNA, 20 bp, Artificial Sequence
  Description of Artificial Sequence: Synthetic oligonucleotide
  Target: LAMA2; (+) strand; PAM type: NNNNGHTT; PAM sequence: TTAGGTTT
gatatgtggctcatctttct

SEQ ID NO: 47350 - DNA, 20 bp, Artificial Sequence
  Description of Artificial Sequence: Synthetic oligonucleotide
  Target: LAMA2; (+) strand; PAM type: NNNNGHTT; PAM sequence: ACTGGTTT
ctggatcctgtcattgcaaa

SEQ ID NO: 47351 - DNA, 20 bp, Artificial Sequence
  Description of Artificial Sequence: Synthetic oligonucleotide
  Target: LAMA2; (+) strand; PAM type: NNNNGHTT; PAM sequence: CCTTGTTT
tagggagcaaaaatgaggat

SEQ ID NO: 47352 - DNA, 20 bp, Artificial Sequence
  Description of Artificial Sequence: Synthetic oligonucleotide
  Target: LAMA2; (+) strand; PAM type: NNNNGHTT; PAM sequence: CATTGTTT
gcccctgtatctgcaaggta

SEQ ID NO: 47353 - DNA, 20 bp, Artificial Sequence
  Description of Artificial Sequence: Synthetic oligonucleotide
  Target: LAMA2; (+) strand; PAM type: NNNNGHTT; PAM sequence: CTTGGCTT
caagacagaaggttattttt

SEQ ID NO: 47354 - DNA, 20 bp, Artificial Sequence
  Description of Artificial Sequence: Synthetic oligonucleotide
  Target: LAMA2; (+) strand; PAM type: NNNNGHTT; PAM sequence: TGTTGATT
gttatttttcttggcttctc

SEQ ID NO: 47355 - DNA, 20 bp, Artificial Sequence
  Description of Artificial Sequence: Synthetic oligonucleotide
  Target: LAMA2; (+) strand; PAM type: NNNNGHTT; PAM sequence: GGATGTTT
ccaccaggttcactgtagca

SEQ ID NO: 47356 - DNA, 20 bp, Artificial Sequence
  Description of Artificial Sequence: Synthetic oligonucleotide
  Target: LAMA2; (+) strand; PAM type: NNNNGHTT; PAM sequence: CCACGTTT
acaaatgcacggaggataaa

SEQ ID NO: 47357 - DNA, 20 bp, Artificial Sequence
  Description of Artificial Sequence: Synthetic oligonucleotide
  Target: LAMA2; (+) strand; PAM type: NNNNGHTT; PAM sequence: AAAGGCTT
acggaggataaaccacgttt

SEQ ID NO: 47358 - DNA, 20 bp, Artificial Sequence
  Description of Artificial Sequence: Synthetic oligonucleotide
  Target: LAMA2; (+) strand; PAM type: NNNNGHTT; PAM sequence: AAGGGTTT
attcagtaatgaattctgtc

SEQ ID NO: 47359 - DNA, 20 bp, Artificial Sequence
  Description of Artificial Sequence: Synthetic oligonucleotide
  Target: LAMA2; (+) strand; PAM type: NNNNGHTT; PAM sequence: TAAAGTTT
tgaatttttaaataatcttc

SEQ ID NO: 47360 - DNA, 20 bp, Artificial Sequence
  Description of Artificial Sequence: Synthetic oligonucleotide
  Target: LAMA2; (+) strand; PAM type: NNNNGHTT; PAM sequence: CCAAGATT
taaaggctcaatattttctt

SEQ ID NO: 47361 - DNA, 20 bp, Artificial Sequence
  Description of Artificial Sequence: Synthetic oligonucleotide
  Target: LAMA2; (+) strand; PAM type: NNNNGHTT; PAM sequence: TGCAGCTT
accaagggatgcattacctc

SEQ ID NO: 47362 - DNA, 20 bp, Artificial Sequence
  Description of Artificial Sequence: Synthetic oligonucleotide
  Target: LAMA2; (+) strand; PAM type: NNNNGHTT; PAM sequence: GACTGATT
gcacaagtgaaaaatgaaaa

SEQ ID NO: 47363 - DNA, 20 bp, Artificial Sequence
  Description of Artificial Sequence: Synthetic oligonucleotide
  Target: LAMA2; (+) strand; PAM type: NNNNGHTT; PAM sequence: ATTAGTTT
ccataatataagtagtaaat

SEQ ID NO: 47364 - DNA, 20 bp, Artificial Sequence
  Description of Artificial Sequence: Synthetic oligonucleotide
  Target: LAMA2; (+) strand; PAM type: NNNNGHTT; PAM sequence: AAGTGTTT
agtaaatattagttttaatg

SEQ ID NO: 47365 - DNA, 20 bp, Artificial Sequence
  Description of Artificial Sequence: Synthetic oligonucleotide
  Target: LAMA2; (+) strand; PAM type: NNNNGHTT; PAM sequence: AATTGCTT
caatattatctgaaatgaaa

SEQ ID NO: 47366 - DNA, 20 bp, Artificial Sequence
  Description of Artificial Sequence: Synthetic oligonucleotide
  Target: LAMA2; (+) strand; PAM type: NNNNGHTT; PAM sequence: CCAAGATT
tgaaaaattgcttgagttga

SEQ ID NO: 47367 - DNA, 20 bp, Artificial Sequence
  Description of Artificial Sequence: Synthetic oligonucleotide
  Target: LAMA2; (+) strand; PAM type: NNNNGHTT; PAM sequence: GAGTGATT
aagattgtgtagcagtgtgt

SEQ ID NO: 47368 - DNA, 20 bp, Artificial Sequence
  Description of Artificial Sequence: Synthetic oligonucleotide
  Target: LAMA2; (+) strand; PAM type: NNNNGHTT; PAM sequence: GATTGCTT
ttgtgtagcagtgtgtgagt

SEQ ID NO: 47369 - DNA, 20 bp, Artificial Sequence
  Description of Artificial Sequence: Synthetic oligonucleotide
  Target: LAMA2; (+) strand; PAM type: NNNNGHTT; PAM sequence: GCTTGCTT
gtagcagtgtgtgagtgatt

SEQ ID NO: 47370 - DNA, 20 bp, Artificial Sequence
  Description of Artificial Sequence: Synthetic oligonucleotide
  Target: LAMA2; (+) strand; PAM type: NNNNGHTT; PAM sequence: GTGTGCTT
tttatcaaaacatgtcttgt

SEQ ID NO: 47371 - DNA, 20 bp, Artificial Sequence
  Description of Artificial Sequence: Synthetic oligonucleotide
  Target: LAMA2; (+) strand; PAM type: NNNNGHTT; PAM sequence: CTAAGCTT
caaataaaggacagtcaaaa

SEQ ID NO: 47372 - DNA, 20 bp, Artificial Sequence
  Description of Artificial Sequence: Synthetic oligonucleotide
  Target: LAMA2; (+) strand; PAM type: NNNNGHTT; PAM sequence: CTGAGTTT
taaaatggaaaagaaacctc

SEQ ID NO: 47373 - DNA, 20 bp, Artificial Sequence
  Description of Artificial Sequence: Synthetic oligonucleotide
  Target: LAMA2; (+) strand; PAM type: NNNNGHTT; PAM sequence: AAGTGCTT
atcaaacagggaagaaaaac

SEQ ID NO: 47374 - DNA, 20 bp, Artificial Sequence
  Description of Artificial Sequence: Synthetic oligonucleotide
  Target: LAMA2; (+) strand; PAM type: NNNNGHTT; PAM sequence: TAGTGATT
aggctggagcaagagagctg

SEQ ID NO: 47375 - DNA, 20 bp, Artificial Sequence
  Description of Artificial Sequence: Synthetic oligonucleotide
  Target: LAMA2; (+) strand; PAM type: NNNNGHTT; PAM sequence: AATTGTTT
ctgtaagttcttataaacta

SEQ ID NO: 47376 - DNA, 20 bp, Artificial Sequence
  Description of Artificial Sequence: Synthetic oligonucleotide
  Target: LAMA2; (+) strand; PAM type: NNNNGHTT; PAM sequence: TCAGGATT
ttcttataaactaaattgtt

SEQ ID NO: 47377 - DNA, 20 bp, Artificial Sequence
  Description of Artificial Sequence: Synthetic oligonucleotide
  Target: LAMA2; (+) strand; PAM type: NNNNGHTT; PAM sequence: GCAAGTTT
ggattaaaaacttgcagaaa

SEQ ID NO: 47378 - DNA, 20 bp, Artificial Sequence
  Description of Artificial Sequence: Synthetic oligonucleotide
  Target: LAMA2; (+) strand; PAM type: NNNNGHTT; PAM sequence: TCTTGTTT
acaattaagtgcctacagtc

SEQ ID NO: 47379 - DNA, 20 bp, Artificial Sequence
  Description of Artificial Sequence: Synthetic oligonucleotide
  Target: LAMA2; (+) strand; PAM type: NNNNGHTT; PAM sequence: TACTGTTT
acacttaatgtaacagttca

SEQ ID NO: 47380 - DNA, 20 bp, Artificial Sequence
  Description of Artificial Sequence: Synthetic oligonucleotide
  Target: LAMA2; (+) strand; PAM type: NNNNGHTT; PAM sequence: ACATGATT
gttcatactgtttcacaaaa

SEQ ID NO: 47381 - DNA, 20 bp, Artificial Sequence
  Description of Artificial Sequence: Synthetic oligonucleotide
  Target: LAMA2; (+) strand; PAM type: NNNNGHTT; PAM sequence: AACTGATT
tgatttgacatagatatgtc

SEQ ID NO: 47382 - DNA, 20 bp, Artificial Sequence
  Description of Artificial Sequence: Synthetic oligonucleotide
  Target: LAMA2; (+) strand; PAM type: NNNNGHTT; PAM sequence: TGCTGCTT
aaaaacagcatggatcaaaa

SEQ ID NO: 47383 - DNA, 20 bp, Artificial Sequence
  Description of Artificial Sequence: Synthetic oligonucleotide
  Target: LAMA2; (+) strand; PAM type: NNNNGHTT; PAM sequence: ACAGGTTT
atataaattcaaattaaatg

SEQ ID NO: 47384 - DNA, 20 bp, Artificial Sequence
  Description of Artificial Sequence: Synthetic oligonucleotide
  Target: LAMA2; (+) strand; PAM type: NNNNGHTT; PAM sequence: AAATGCTT
tatataagtattcatctcca

SEQ ID NO: 47385 - DNA, 20 bp, Artificial Sequence
  Description of Artificial Sequence: Synthetic oligonucleotide
  Target: LAMA2; (+) strand; PAM type: NNNNGHTT; PAM sequence: ATGAGTTT
attctcttatactataacat

SEQ ID NO: 47386 - DNA, 20 bp, Artificial Sequence
  Description of Artificial Sequence: Synthetic oligonucleotide
  Target: LAMA2; (+) strand; PAM type: NNNNGHTT; PAM sequence: AATAGTTT
ctataacatatgagttttta

SEQ ID NO: 47387 - DNA, 20 bp, Artificial Sequence
  Description of Artificial Sequence: Synthetic oligonucleotide
  Target: LAMA2; (+) strand; PAM type: NNNNGHTT; PAM sequence: AAGAGCTT
agtgtgaagacatttttaaa

SEQ ID NO: 47388 - DNA, 20 bp, Artificial Sequence
  Description of Artificial Sequence: Synthetic oligonucleotide
  Target: LAMA2; (+) strand; PAM type: NNNNGHTT; PAM sequence: AATTGTTT
cattaggaagtcttgggcct

SEQ ID NO: 47389 - DNA, 20 bp, Artificial Sequence
  Description of Artificial Sequence: Synthetic oligonucleotide
  Target: LAMA2; (+) strand; PAM type: NNNNGHTT; PAM sequence: TTTTGTTT
aagtcttgggcctaattgtt

SEQ ID NO: 47390 - DNA, 20 bp, Artificial Sequence
  Description of Artificial Sequence: Synthetic oligonucleotide
  Target: LAMA2; (+) strand; PAM type: NNNNGHTT; PAM sequence: AATAGATT
tatgctgcataaacatagca

SEQ ID NO: 47391 - DNA, 20 bp, Artificial Sequence
  Description of Artificial Sequence: Synthetic oligonucleotide
  Target: LAMA2; (+) strand; PAM type: NNNNGHTT; PAM sequence: TTTAGATT
agcaaatagatttataaaca

SEQ ID NO: 47392 - DNA, 20 bp, Artificial Sequence
  Description of Artificial Sequence: Synthetic oligonucleotide
  Target: LAMA2; (+) strand; PAM type: NNNNGHTT; PAM sequence: TAAAGTTT
cttagttctaagatcagggc

SEQ ID NO: 47393 - DNA, 20 bp, Artificial Sequence
  Description of Artificial Sequence: Synthetic oligonucleotide
  Target: LAMA2; (+) strand; PAM type: NNNNGHTT; PAM sequence: TGGAGTTT
ctaagatcagggctaaagtt

SEQ ID NO: 47394 - DNA, 20 bp, Artificial Sequence
  Description of Artificial Sequence: Synthetic oligonucleotide
  Target: LAMA2; (+) strand; PAM type: NNNNGHTT; PAM sequence: CTAGGATT
gccctcactaggacttgaca

SEQ ID NO: 47395 - DNA, 20 bp, Artificial Sequence
  Description of Artificial Sequence: Synthetic oligonucleotide
  Target: LAMA2; (+) strand; PAM type: NNNNGHTT; PAM sequence: AAATGCTT
ccctgaagcagggacactag

SEQ ID NO: 47396 - DNA, 20 bp, Artificial Sequence
  Description of Artificial Sequence: Synthetic oligonucleotide
  Target: LAMA2; (+) strand; PAM type: NNNNGHTT; PAM sequence: ATATGTTT
ttatcacataaatcataaaa

SEQ ID NO: 47397 - DNA, 20 bp, Artificial Sequence
  Description of Artificial Sequence: Synthetic oligonucleotide
  Target: LAMA2; (+) strand; PAM type: NNNNGHTT; PAM sequence: GCATGATT
taaaatgtacaattataaaa

SEQ ID NO: 47398 - DNA, 20 bp, Artificial Sequence
  Description of Artificial Sequence: Synthetic oligonucleotide
  Target: LAMA2; (+) strand; PAM type: NNNNGHTT; PAM sequence: AGAAGATT
acaattataaaagcatgatt

SEQ ID NO: 47399 - DNA, 20 bp, Artificial Sequence
  Description of Artificial Sequence: Synthetic oligonucleotide
  Target: LAMA2; (+) strand; PAM type: NNNNGHTT; PAM sequence: CCAGGTTT
atattaaaattcaaaagtaa

SEQ ID NO: 47400 - DNA, 20 bp, Artificial Sequence
  Description of Artificial Sequence: Synthetic oligonucleotide
  Target: LAMA2; (+) strand; PAM type: NNNNGHTT; PAM sequence: CAATGATT
agtcattgaaattaaaaatt

SEQ ID NO: 47401 - DNA, 20 bp, Artificial Sequence
  Description of Artificial Sequence: Synthetic oligonucleotide
  Target: LAMA2; (+) strand; PAM type: NNNNGHTT; PAM sequence: AGAAGTTT
acagaattgtaaaattgaac

SEQ ID NO: 47402 - DNA, 20 bp, Artificial Sequence
  Description of Artificial Sequence: Synthetic oligonucleotide
  Target: LAMA2; (+) strand; PAM type: NNNNGHTT; PAM sequence: AAGAGATT
tttagcagaagttgccaaag

SEQ ID NO: 47403 - DNA, 20 bp, Artificial Sequence
  Description of Artificial Sequence: Synthetic oligonucleotide
  Target: LAMA2; (+) strand; PAM type: NNNNGHTT; PAM sequence: CTCAGTTT
gttaaaaactattataaatc

SEQ ID NO: 47404 - DNA, 20 bp, Artificial Sequence
  Description of Artificial Sequence: Synthetic oligonucleotide
  Target: LAMA2; (+) strand; PAM type: NNNNGHTT; PAM sequence: GAGTGTTT
ggggcaaatatctttattgt

SEQ ID NO: 47405 - DNA, 20 bp, Artificial Sequence
  Description of Artificial Sequence: Synthetic oligonucleotide
  Target: LAMA2; (+) strand; PAM type: NNNNGHTT; PAM sequence: GACAGTTT
taagaatattgaacccataa

SEQ ID NO: 47406 - DNA, 20 bp, Artificial Sequence
  Description of Artificial Sequence: Synthetic oligonucleotide
  Target: LAMA2; (+) strand; PAM type: NNNNGHTT; PAM sequence: ACTAGATT
tgaacccataagacagtttc

SEQ ID NO: 47407 - DNA, 20 bp, Artificial Sequence
  Description of Artificial Sequence: Synthetic oligonucleotide
  Target: LAMA2; (+) strand; PAM type: NNNNGHTT; PAM sequence: AAGTGTTT
acttcatgatacctaaaaat

SEQ ID NO: 47408 - DNA, 20 bp, Artificial Sequence
  Description of Artificial Sequence: Synthetic oligonucleotide
  Target: LAMA2; (+) strand; PAM type: NNNNGHTT; PAM sequence: AAATGTTT
gtgaaaatctgtgaaatttg

SEQ ID NO: 47409 - DNA, 20 bp, Artificial Sequence
  Description of Artificial Sequence: Synthetic oligonucleotide
  Target: LAMA2; (+) strand; PAM type: NNNNGHTT; PAM sequence: TAGTGTTT
taaatagcaaaaataaattg

SEQ ID NO: 47410 - DNA, 20 bp, Artificial Sequence
  Description of Artificial Sequence: Synthetic oligonucleotide
  Target: LAMA2; (+) strand; PAM type: NNNNGHTT; PAM sequence: CATTGTTT
taaaacataaaacaatgcta

SEQ ID NO: 47411 - DNA, 20 bp, Artificial Sequence
  Description of Artificial Sequence: Synthetic oligonucleotide
  Target: LAMA2; (+) strand; PAM type: NNNNGHTT; PAM sequence: ATGAGATT
gggaataaaacagaagtgaa

SEQ ID NO: 47412 - DNA, 20 bp, Artificial Sequence
  Description of Artificial Sequence: Synthetic oligonucleotide
  Target: LAMA2; (+) strand; PAM type: NNNNGHTT; PAM sequence: CATTGCTT
attcatttgtatctaagtat

SEQ ID NO: 47413 - DNA, 20 bp, Artificial Sequence
  Description of Artificial Sequence: Synthetic oligonucleotide
  Target: LAMA2; (+) strand; PAM type: NNNNGHTT; PAM sequence: ATGTGCTT
gcatgggtaatgcatgttat

SEQ ID NO: 47414 - DNA, 20 bp, Artificial Sequence
  Description of Artificial Sequence: Synthetic oligonucleotide
  Target: LAMA2; (+) strand; PAM type: NNNNGHTT; PAM sequence: TCCAGATT
aattgaatgtaaaaaagaat

SEQ ID NO: 47415 - DNA, 20 bp, Artificial Sequence
  Description of Artificial Sequence: Synthetic oligonucleotide
  Target: LAMA2; (+) strand; PAM type: NNNNGHTT; PAM sequence: ATAAGATT
tacattattacattttacac

SEQ ID NO: 47416 - DNA, 20 bp, Artificial Sequence
  Description of Artificial Sequence: Synthetic oligonucleotide
  Target: LAMA2; (+) strand; PAM type: NNNNGHTT; PAM sequence: AAATGTTT
agtgctagctcaagacactc

SEQ ID NO: 47417 - DNA, 20 bp, Artificial Sequence
  Description of Artificial Sequence: Synthetic oligonucleotide
  Target: LAMA2; (+) strand; PAM type: NNNNGHTT; PAM sequence: ATTTGTTT
agtgctgtctgactctcagt

SEQ ID NO: 47418 - DNA, 20 bp, Artificial Sequence
  Description of Artificial Sequence: Synthetic oligonucleotide
  Target: LAMA2; (+) strand; PAM type: NNNNGHTT; PAM sequence: TGCAGTTT
atgctagaaattggctcttt

SEQ ID NO: 47419 - DNA, 20 bp, Artificial Sequence
  Description of Artificial Sequence: Synthetic oligonucleotide
  Target: LAMA2; (+) strand; PAM type: NNNNGHTT; PAM sequence: ATGTGCTT
acattgatctagttaggaac

SEQ ID NO: 47420 - DNA, 20 bp, Artificial Sequence
  Description of Artificial Sequence: Synthetic oligonucleotide
  Target: LAMA2; (+) strand; PAM type: NNNNGHTT; PAM sequence: TCTTGTTT
aatcaaagtctgtattttca

SEQ ID NO: 47421 - DNA, 20 bp, Artificial Sequence
  Description of Artificial Sequence: Synthetic oligonucleotide
  Target: LAMA2; (+) strand; PAM type: NNNNGHTT; PAM sequence: TTTTGCTT
aagtctgtattttcatcttg

SEQ ID NO: 47422 - DNA, 20 bp, Artificial Sequence
  Description of Artificial Sequence: Synthetic oligonucleotide
  Target: LAMA2; (+) strand; PAM type: NNNNGHTT; PAM sequence: CTTTGTTT
tgtattttcatcttgttttg

SEQ ID NO: 47423 - DNA, 20 bp, Artificial Sequence
  Description of Artificial Sequence: Synthetic oligonucleotide
  Target: LAMA2; (+) strand; PAM type: NNNNGHTT; PAM sequence: CTTGGCTT
acgagactatgtgatctggc

SEQ ID NO: 47424 - DNA, 20 bp, Artificial Sequence
  Description of Artificial Sequence: Synthetic oligonucleotide
  Target: LAMA2; (+) strand; PAM type: NNNNGHTT; PAM sequence: TTGAGTTT
cttacctctccagaatgttc

SEQ ID NO: 47425 - DNA, 20 bp, Artificial Sequence
  Description of Artificial Sequence: Synthetic oligonucleotide
  Target: LAMA2; (+) strand; PAM type: NNNNGHTT; PAM sequence: CACTGTTT
gaatgttcttgagtttcagt

SEQ ID NO: 47426 - DNA, 20 bp, Artificial Sequence
  Description of Artificial Sequence: Synthetic oligonucleotide
  Target: LAMA2; (+) strand; PAM type: NNNNGHTT; PAM sequence: TTCAGCTT
ttgagtttcagtcactgttt

SEQ ID NO: 47427 - DNA, 20 bp, Artificial Sequence
  Description of Artificial Sequence: Synthetic oligonucleotide
  Target: LAMA2; (+) strand; PAM type: NNNNGHTT; PAM sequence: CTTTGCTT
tttcagtcactgtttttcag

SEQ ID NO: 47428 - DNA, 20 bp, Artificial Sequence
  Description of Artificial Sequence: Synthetic oligonucleotide
  Target: LAMA2; (+) strand; PAM type: NNNNGHTT; PAM sequence: AGTTGTTT
ttaaatttcttgagtctctt

SEQ ID NO: 47429 - DNA, 20 bp, Artificial Sequence
  Description of Artificial Sequence: Synthetic oligonucleotide
  Target: LAMA2; (+) strand; PAM type: NNNNGHTT; PAM sequence: TTCAGATT
ctggaattttataagttcta

SEQ ID NO: 47430 - DNA, 20 bp, Artificial Sequence
  Description of Artificial Sequence: Synthetic oligonucleotide
  Target: LAMA2; (+) strand; PAM type: NNNNGHTT; PAM sequence: CTTTGCTT
cctcatttctagccctattc

SEQ ID NO: 47431 - DNA, 20 bp, Artificial Sequence
  Description of Artificial Sequence: Synthetic oligonucleotide
  Target: LAMA2; (+) strand; PAM type: NNNNGHTT; PAM sequence: CTCGGCTT
tagccaggcatttttaatgg

SEQ ID NO: 47432 - DNA, 20 bp, Artificial Sequence
  Description of Artificial Sequence: Synthetic oligonucleotide
  Target: LAMA2; (+) strand; PAM type: NNNNGHTT; PAM sequence: TTCTGTTT
tatgatctcataatgagtaa

SEQ ID NO: 47433 - DNA, 20 bp, Artificial Sequence
  Description of Artificial Sequence: Synthetic oligonucleotide
  Target: LAMA2; (+) strand; PAM type: NNNNGHTT; PAM sequence: TGAAGCTT
ggaagagaactaaaatctcg

SEQ ID NO: 47434 - DNA, 20 bp, Artificial Sequence
  Description of Artificial Sequence: Synthetic oligonucleotide
  Target: LAMA2; (+) strand; PAM type: NNNNGHTT; PAM sequence: TTCCGATT
ctttgacagtcatttagcct

SEQ ID NO: 47435 - DNA, 20 bp, Artificial Sequence
  Description of Artificial Sequence: Synthetic oligonucleotide
  Target: LAMA2; (+) strand; PAM type: NNNNGHTT; PAM sequence: TTCTGTTT
cagtcatttagcctttccga

SEQ ID NO: 47436 - DNA, 20 bp, Artificial Sequence
  Description of Artificial Sequence: Synthetic oligonucleotide
  Target: LAMA2; (+) strand; PAM type: NNNNGHTT; PAM sequence: ACTGGATT
aagtataaccataaatacct

SEQ ID NO: 47437 - DNA, 20 bp, Artificial Sequence
  Description of Artificial Sequence: Synthetic oligonucleotide
  Target: LAMA2; (+) strand; PAM type: NNNNGHTT; PAM sequence: TGTTGTTT
cctactggattactttttgt

SEQ ID NO: 47438 - DNA, 20 bp, Artificial Sequence
  Description of Artificial Sequence: Synthetic oligonucleotide
  Target: LAMA2; (+) strand; PAM type: NNNNGHTT; PAM sequence: TATTGCTT
ttactttttgttgttgttta

SEQ ID NO: 47439 - DNA, 20 bp, Artificial Sequence
  Description of Artificial Sequence: Synthetic oligonucleotide
  Target: LAMA2; (+) strand; PAM type: NNNNGHTT; PAM sequence: ATAAGTTT
attgcttttcccaagtagag

SEQ ID NO: 47440 - DNA, 20 bp, Artificial Sequence
  Description of Artificial Sequence: Synthetic oligonucleotide
  Target: LAMA2; (+) strand; PAM type: NNNNGHTT; PAM sequence: AAAGGATT
gtttctgttctttttccctg

SEQ ID NO: 47441 - DNA, 20 bp, Artificial Sequence
  Description of Artificial Sequence: Synthetic oligonucleotide
  Target: LAMA2; (+) strand; PAM type: NNNNGHTT; PAM sequence: ATTGGTTT
tatggtgtgttaacattttt

SEQ ID NO: 47442 - DNA, 20 bp, Artificial Sequence
  Description of Artificial Sequence: Synthetic oligonucleotide
  Target: LAMA2; (+) strand; PAM type: NNNNGHTT; PAM sequence: TTTGGATT
gtgttaacatttttattggt

SEQ ID NO: 47443 - DNA, 20 bp, Artificial Sequence
  Description of Artificial Sequence: Synthetic oligonucleotide
  Target: LAMA2; (+) strand; PAM type: NNNNGHTT; PAM sequence: ACTTGATT
gtcacttcattaacttgtag

SEQ ID NO: 47444 - DNA, 20 bp, Artificial Sequence
  Description of Artificial Sequence: Synthetic oligonucleotide
  Target: LAMA2; (+) strand; PAM type: NNNNGHTT; PAM sequence: CCTAGCTT
cgttgacccttgtcctcaaa

SEQ ID NO: 47445 - DNA, 20 bp, Artificial Sequence
  Description of Artificial Sequence: Synthetic oligonucleotide
  Target: LAMA2; (+) strand; PAM type: NNNNGHTT; PAM sequence: TTTGGTTT
ttcaacaagaatcctgttaa

SEQ ID NO: 47446 - DNA, 20 bp, Artificial Sequence
  Description of Artificial Sequence: Synthetic oligonucleotide
  Target: LAMA2; (+) strand; PAM type: NNNNGHTT; PAM sequence: TAATGATT
ctacccctgatgtctcctct

SEQ ID NO: 47447 - DNA, 20 bp, Artificial Sequence
  Description of Artificial Sequence: Synthetic oligonucleotide
  Target: LAMA2; (+) strand; PAM type: NNNNGHTT; PAM sequence: GGTTGCTT
ggaggctagttctttactaa

SEQ ID NO: 47448 - DNA, 20 bp, Artificial Sequence
  Description of Artificial Sequence: Synthetic oligonucleotide
  Target: LAMA2; (+) strand; PAM type: NNNNGHTT; PAM sequence: CATAGTTT
ggttgctttttctctattgc

SEQ ID NO: 47449 - DNA, 20 bp, Artificial Sequence
  Description of Artificial Sequence: Synthetic oligonucleotide
  Target: LAMA2; (+) strand; PAM type: NNNNGHTT; PAM sequence: CATCGTTT
ttctcactgaagcctatttt

SEQ ID NO: 47450 - DNA, 20 bp, Artificial Sequence
  Description of Artificial Sequence: Synthetic oligonucleotide
  Target: LAMA2; (+) strand; PAM type: NNNNGHTT; PAM sequence: TAATGTTT
aacttgtgaaaattgagaac

SEQ ID NO: 47451 - DNA, 20 bp, Artificial Sequence
  Description of Artificial Sequence: Synthetic oligonucleotide
  Target: LAMA2; (+) strand; PAM type: NNNNGHTT; PAM sequence: GTGTGTTT
tattatctagccttggaaaa

SEQ ID NO: 47452 - DNA, 20 bp, Artificial Sequence
  Description of Artificial Sequence: Synthetic oligonucleotide
  Target: LAMA2; (+) strand; PAM type: NNNNGHTT; PAM sequence: CCTAGTTT
tatgtactgctgaagttgta

SEQ ID NO: 47453 - DNA, 20 bp, Artificial Sequence
  Description of Artificial Sequence: Synthetic oligonucleotide
  Target: LAMA2; (+) strand; PAM type: NNNNGHTT; PAM sequence: AGTAGCTT
ttgtacctagtttataaagc

SEQ ID NO: 47454 - DNA, 20 bp, Artificial Sequence
  Description of Artificial Sequence: Synthetic oligonucleotide
  Target: LAMA2; (+) strand; PAM type: NNNNGHTT; PAM sequence: CTTTGTTT
gtaaaatttttctaattcaa

SEQ ID NO: 47455 - DNA, 20 bp, Artificial Sequence
  Description of Artificial Sequence: Synthetic oligonucleotide
  Target: LAMA2; (+) strand; PAM type: NNNNGHTT; PAM sequence: CCATGATT
actaaagaaaaaaaagacag

SEQ ID NO: 47456 - DNA, 20 bp, Artificial Sequence
  Description of Artificial Sequence: Synthetic oligonucleotide
  Target: LAMA2; (+) strand; PAM type: NNNNGHTT; PAM sequence: TATTGATT
ctttgggaacaaaaatatca

SEQ ID NO: 47457 - DNA, 20 bp, Artificial Sequence
  Description of Artificial Sequence: Synthetic oligonucleotide
  Target: LAMA2; (+) strand; PAM type: NNNNGHTT; PAM sequence: TAAAGTTT
ataaaatatatctggagtat

SEQ ID NO: 47458 - DNA, 20 bp, Artificial Sequence
  Description of Artificial Sequence: Synthetic oligonucleotide
  Target: LAMA2; (+) strand; PAM type: NNNNGHTT; PAM sequence: GGATGATT
gtattaaagtttcatggtgg

SEQ ID NO: 47459 - DNA, 20 bp, Artificial Sequence
  Description of Artificial Sequence: Synthetic oligonucleotide
  Target: LAMA2; (+) strand; PAM type: NNNNGHTT; PAM sequence: AATAGATT
atagggacatgatgataaaa

SEQ ID NO: 47460 - DNA, 20 bp, Artificial Sequence
  Description of Artificial Sequence: Synthetic oligonucleotide
  Target: LAMA2; (+) strand; PAM type: NNNNGHTT; PAM sequence: AGTAGATT
tgatgataaaaaatagatta

SEQ ID NO: 47461 - DNA, 20 bp, Artificial Sequence
  Description of Artificial Sequence: Synthetic oligonucleotide
  Target: LAMA2; (+) strand; PAM type: NNNNGHTT; PAM sequence: ATGTGTTT
cactagtctaaagtgaagtg

SEQ ID NO: 47462 - DNA, 20 bp, Artificial Sequence
  Description of Artificial Sequence: Synthetic oligonucleotide
  Target: LAMA2; (+) strand; PAM type: NNNNGHTT; PAM sequence: TATGGATT
agaatataaaagtatttacg

SEQ ID NO: 47463 - DNA, 20 bp, Artificial Sequence
  Description of Artificial Sequence: Synthetic oligonucleotide
  Target: LAMA2; (+) strand; PAM type: NNNNGHTT; PAM sequence: AATTGATT
atatttcattttattaatgt

SEQ ID NO: 47464 - DNA, 20 bp, Artificial Sequence
  Description of Artificial Sequence: Synthetic oligonucleotide
  Target: LAMA2; (+) strand; PAM type: NNNNGHTT; PAM sequence: TTTGGTTT
gaaatagcaaaagcagaata

SEQ ID NO: 47465 - DNA, 20 bp, Artificial Sequence
  Description of Artificial Sequence: Synthetic oligonucleotide
  Target: LAMA2; (+) strand; PAM type: NNNNGHTT; PAM sequence: CCGTGTTT
ctgtagcgttctagaaatta

SEQ ID NO: 47466 - DNA, 20 bp, Artificial Sequence
  Description of Artificial Sequence: Synthetic oligonucleotide
  Target: LAMA2; (+) strand; PAM type: NNNNGHTT; PAM sequence: AGGAGCTT
aatgaatttattggatcaat

SEQ ID NO: 47467 - DNA, 20 bp, Artificial Sequence
  Description of Artificial Sequence: Synthetic oligonucleotide
  Target: LAMA2; (+) strand; PAM type: NNNNGHTT; PAM sequence: AGAGGTTT
gcttcccagtaggaatgctg

SEQ ID NO: 47468 - DNA, 20 bp, Artificial Sequence
  Description of Artificial Sequence: Synthetic oligonucleotide
  Target: LAMA2; (+) strand; PAM type: NNNNGHTT; PAM sequence: AATAGATT
gtaggaatgctgagaggttt

SEQ ID NO: 47469 - DNA, 20 bp, Artificial Sequence
  Description of Artificial Sequence: Synthetic oligonucleotide
  Target: LAMA2; (+) strand; PAM type: NNNNGHTT; PAM sequence: TTTTGTTT
gtttaatagattagactcca

SEQ ID NO: 47470 - DNA, 20 bp, Artificial Sequence
  Description of Artificial Sequence: Synthetic oligonucleotide
  Target: LAMA2; (+) strand; PAM type: NNNNGHTT; PAM sequence: TTTAGATT
atagattagactccattttg

SEQ ID NO: 47471 - DNA, 20 bp, Artificial Sequence
  Description of Artificial Sequence: Synthetic oligonucleotide
  Target: LAMA2; (+) strand; PAM type: NNNNGHTT; PAM sequence: TTATGTTT
ctttaaaaatttttattaaa

SEQ ID NO: 47472 - DNA, 20 bp, Artificial Sequence
  Description of Artificial Sequence: Synthetic oligonucleotide
  Target: LAMA2; (+) strand; PAM type: NNNNGHTT; PAM sequence: TGATGATT
aaaggaaaatagaaatctca

SEQ ID NO: 47473 - DNA, 20 bp, Artificial Sequence
  Description of Artificial Sequence: Synthetic oligonucleotide
  Target: LAMA2; (+) strand; PAM type: NNNNGHTT; PAM sequence: CTATGCTT
aggttcaattatattcccat

SEQ ID NO: 47474 - DNA, 20 bp, Artificial Sequence
  Description of Artificial Sequence: Synthetic oligonucleotide
  Target: LAMA2; (+) strand; PAM type: NNNNGHTT; PAM sequence: TATGGTTT
tggcaagaaaagaacaaaat

SEQ ID NO: 47475 - DNA, 20 bp, Artificial Sequence
  Description of Artificial Sequence: Synthetic oligonucleotide
  Target: LAMA2; (+) strand; PAM type: NNNNGHTT; PAM sequence: CCTGGTTT
acatcttttttgctcaactc

SEQ ID NO: 47476 - DNA, 20 bp, Artificial Sequence
  Description of Artificial Sequence: Synthetic oligonucleotide
  Target: LAMA2; (+) strand; PAM type: NNNNGHTT; PAM sequence: CAGTGATT
tgtctgtacccctcttacag

SEQ ID NO: 47477 - DNA, 20 bp, Artificial Sequence
  Description of Artificial Sequence: Synthetic oligonucleotide
  Target: LAMA2; (+) strand; PAM type: NNNNGHTT; PAM sequence: GATGGCTT
aagagctcaaccataaagca

SEQ ID NO: 47478 - DNA, 20 bp, Artificial Sequence
  Description of Artificial Sequence: Synthetic oligonucleotide
  Target: LAMA2; (+) strand; PAM type: NNNNGHTT; PAM sequence: CTGTGTTT
agtcccagaacactatactt

SEQ ID NO: 47479 - DNA, 20 bp, Artificial Sequence
  Description of Artificial Sequence: Synthetic oligonucleotide
  Target: LAMA2; (+) strand; PAM type: NNNNGHTT; PAM sequence: GAAAGATT
atactctataatgtagtaaa

SEQ ID NO: 47480 - DNA, 20 bp, Artificial Sequence
  Description of Artificial Sequence: Synthetic oligonucleotide
  Target: LAMA2; (+) strand; PAM type: NNNNGHTT; PAM sequence: TGTTGATT
aagttactcaagtatagttc

SEQ ID NO: 47481 - DNA, 20 bp, Artificial Sequence
  Description of Artificial Sequence: Synthetic oligonucleotide
  Target: LAMA2; (+) strand; PAM type: NNNNGHTT; PAM sequence: AAATGCTT
ggctgagtatcccttatcca

SEQ ID NO: 47482 - DNA, 20 bp, Artificial Sequence
  Description of Artificial Sequence: Synthetic oligonucleotide
  Target: LAMA2; (+) strand; PAM type: NNNNGHTT; PAM sequence: AAATGTTT
tccaaaatgcttgagaccag

SEQ ID NO: 47483 - DNA, 20 bp, Artificial Sequence
  Description of Artificial Sequence: Synthetic oligonucleotide
  Target: LAMA2; (+) strand; PAM type: NNNNGHTT; PAM sequence: TTCCGATT
atgcttgagaccagaaatgt

SEQ ID NO: 47484 - DNA, 20 bp, Artificial Sequence
  Description of Artificial Sequence: Synthetic oligonucleotide
  Target: LAMA2; (+) strand; PAM type: NNNNGHTT; PAM sequence: TTCGGATT
tgtttccgatttggtatttt

SEQ ID NO: 47485 - DNA, 20 bp, Artificial Sequence
  Description of Artificial Sequence: Synthetic oligonucleotide
  Target: LAMA2; (+) strand; PAM type: NNNNGHTT; PAM sequence: CAAAGTTT
gagcatcatataggtgcccc

SEQ ID NO: 47486 - DNA, 20 bp, Artificial Sequence
  Description of Artificial Sequence: Synthetic oligonucleotide
  Target: LAMA2; (+) strand; PAM type: NNNNGHTT; PAM sequence: TTAAGATT
agtttcaaattttgaaacat

SEQ ID NO: 47487 - DNA, 20 bp, Artificial Sequence
  Description of Artificial Sequence: Synthetic oligonucleotide
  Target: LAMA2; (+) strand; PAM type: NNNNGHTT; PAM sequence: TTTGGATT
aattttgaaacatttaagat

SEQ ID NO: 47488 - DNA, 20 bp, Artificial Sequence
  Description of Artificial Sequence: Synthetic oligonucleotide
  Target: LAMA2; (+) strand; PAM type: NNNNGHTT; PAM sequence: TTCTGATT
aacatttaagattttggatt

SEQ ID NO: 47489 - DNA, 20 bp, Artificial Sequence
  Description of Artificial Sequence: Synthetic oligonucleotide
  Target: LAMA2; (+) strand; PAM type: NNNNGHTT; PAM sequence: CCATGCTT
ccacaagttgaatttttaaa

SEQ ID NO: 47490 - DNA, 20 bp, Artificial Sequence
  Description of Artificial Sequence: Synthetic oligonucleotide
  Target: LAMA2; (+) strand; PAM type: NNNNGHTT; PAM sequence: TAAAGCTT
gtcaaactccactcctgtca

SEQ ID NO: 47491 - DNA, 20 bp, Artificial Sequence
  Description of Artificial Sequence: Synthetic oligonucleotide
  Target: LAMA2; (+) strand; PAM type: NNNNGHTT; PAM sequence: TAGTGCTT
ttaagccttatagcaaaaat

SEQ ID NO: 47492 - DNA, 20 bp, Artificial Sequence
  Description of Artificial Sequence: Synthetic oligonucleotide
  Target: LAMA2; (+) strand; PAM type: NNNNGHTT; PAM sequence: AGTTGATT
catattccaccttgcattat

SEQ ID NO: 47493 - DNA, 20 bp, Artificial Sequence
  Description of Artificial Sequence: Synthetic oligonucleotide
  Target: LAMA2; (+) strand; PAM type: NNNNGHTT; PAM sequence: TGTTGCTT
ctagaattcctaccctaatg

SEQ ID NO: 47494 - DNA, 20 bp, Artificial Sequence
  Description of Artificial Sequence: Synthetic oligonucleotide
  Target: LAMA2; (+) strand; PAM type: NNNNGHTT; PAM sequence: ATAAGCTT
aatctcagaatagtggcatt

SEQ ID NO: 47495 - DNA, 20 bp, Artificial Sequence
  Description of Artificial Sequence: Synthetic oligonucleotide
  Target: LAMA2; (+) strand; PAM type: NNNNGHTT; PAM sequence: AGTAGATT
tcaaattagagtaaatgaaa

SEQ ID NO: 47496 - DNA, 20 bp, Artificial Sequence
  Description of Artificial Sequence: Synthetic oligonucleotide
  Target: LAMA2; (+) strand; PAM type: NNNNGHTT; PAM sequence: ATATGTTT
aaactaaatcataattacag

SEQ ID NO: 47497 - DNA, 20 bp, Artificial Sequence
  Description of Artificial Sequence: Synthetic oligonucleotide
  Target: LAMA2; (+) strand; PAM type: NNNNGHTT; PAM sequence: CAGTGCTT
tttgaagatgctctcaactt

SEQ ID NO: 47498 - DNA, 20 bp, Artificial Sequence
  Description of Artificial Sequence: Synthetic oligonucleotide
  Target: LAMA2; (+) strand; PAM type: NNNNGHTT; PAM sequence: TGGGGATT
tgctctcaacttcagtgctt

SEQ ID NO: 47499 - DNA, 20 bp, Artificial Sequence
  Description of Artificial Sequence: Synthetic oligonucleotide
  Target: LAMA2; (+) strand; PAM type: NNNNGHTT; PAM sequence: ATTAGTTT
tttgtcactgtaagtctgaa

SEQ ID NO: 47500 - DNA, 20 bp, Artificial Sequence
  Description of Artificial Sequence: Synthetic oligonucleotide
  Target: LAMA2; (+) strand; PAM type: NNNNGHTT; PAM sequence: GTTTGATT
tcactgtaagtctgaaatta

SEQ ID NO: 47501 - DNA, 20 bp, Artificial Sequence
  Description of Artificial Sequence: Synthetic oligonucleotide
  Target: LAMA2; (+) strand; PAM type: NNNNGHTT; PAM sequence: ATTAGTTT
gtaagtctgaaattagtttg

SEQ ID NO: 47502 - DNA, 20 bp, Artificial Sequence
  Description of Artificial Sequence: Synthetic oligonucleotide
  Target: LAMA2; (+) strand; PAM type: NNNNGHTT; PAM sequence: CAGTGCTT
agctggcacaaatcttgggg

SEQ ID NO: 47503 - DNA, 20 bp, Artificial Sequence
  Description of Artificial Sequence: Synthetic oligonucleotide
  Target: LAMA2; (+) strand; PAM type: NNNNGHTT; PAM sequence: CTGAGTTT
aggttcccacatagaagtgg

SEQ ID NO: 47504 - DNA, 20 bp, Artificial Sequence
  Description of Artificial Sequence: Synthetic oligonucleotide
  Target: LAMA2; (+) strand; PAM type: NNNNGHTT; PAM sequence: GACTGCTT
attctcttggatataaggag

SEQ ID NO: 47505 - DNA, 20 bp, Artificial Sequence
  Description of Artificial Sequence: Synthetic oligonucleotide
  Target: LAMA2; (+) strand; PAM type: NNNNGHTT; PAM sequence: CTTTGTTT
cttggatataaggaggactg

SEQ ID NO: 47506 - DNA, 20 bp, Artificial Sequence
  Description of Artificial Sequence: Synthetic oligonucleotide
  Target: LAMA2; (+) strand; PAM type: NNNNGHTT; PAM sequence: TTCTGATT
catgctatttttctcttctc

SEQ ID NO: 47507 - DNA, 20 bp, Artificial Sequence
  Description of Artificial Sequence: Synthetic oligonucleotide
  Target: LAMA2; (+) strand; PAM type: NNNNGHTT; PAM sequence: CTCAGATT
tctgattttccttatatgtt

SEQ ID NO: 47508 - DNA, 20 bp, Artificial Sequence
  Description of Artificial Sequence: Synthetic oligonucleotide
  Target: LAMA2; (+) strand; PAM type: NNNNGHTT; PAM sequence: CTGGGTTT
atccctatcttctgctcaat

SEQ ID NO: 47509 - DNA, 20 bp, Artificial Sequence
  Description of Artificial Sequence: Synthetic oligonucleotide
  Target: LAMA2; (+) strand; PAM type: NNNNGHTT; PAM sequence: GTTTGTTT
ctatcttctgctcaatctgg

SEQ ID NO: 47510 - DNA, 20 bp, Artificial Sequence
  Description of Artificial Sequence: Synthetic oligonucleotide
  Target: LAMA2; (+) strand; PAM type: NNNNGHTT; PAM sequence: AAGTGTTT
gctcaatctgggtttgttta

SEQ ID NO: 47511 - DNA, 20 bp, Artificial Sequence
  Description of Artificial Sequence: Synthetic oligonucleotide
  Target: LAMA2; (+) strand; PAM type: NNNNGHTT; PAM sequence: AAGAGATT
gcatgaaaaacatgactgcc

SEQ ID NO: 47512 - DNA, 20 bp, Artificial Sequence
  Description of Artificial Sequence: Synthetic oligonucleotide
  Target: LAMA2; (+) strand; PAM type: NNNNGHTT; PAM sequence: AATAGATT
agacagaatttctacctctg

SEQ ID NO: 47513 - DNA, 20 bp, Artificial Sequence
  Description of Artificial Sequence: Synthetic oligonucleotide
  Target: LAMA2; (+) strand; PAM type: NNNNGHTT; PAM sequence: ATCTGTTT
gtatgtagggaatattacaa

SEQ ID NO: 47514 - DNA, 20 bp, Artificial Sequence
  Description of Artificial Sequence: Synthetic oligonucleotide
  Target: LAMA2; (+) strand; PAM type: NNNNGHTT; PAM sequence: TTAAGATT
ccttcctttagaattattag

SEQ ID NO: 47515 - DNA, 20 bp, Artificial Sequence
  Description of Artificial Sequence: Synthetic oligonucleotide
  Target: LAMA2; (+) strand; PAM type: NNNNGHTT; PAM sequence: GAGAGATT
gattaaccactctttaaatt

SEQ ID NO: 47516 - DNA, 20 bp, Artificial Sequence
  Description of Artificial Sequence: Synthetic oligonucleotide
  Target: LAMA2; (+) strand; PAM type: NNNNGHTT; PAM sequence: CCCTGTTT
aattgagagattatatcctt

SEQ ID NO: 47517 - DNA, 20 bp, Artificial Sequence
  Description of Artificial Sequence: Synthetic oligonucleotide
  Target: LAMA2; (+) strand; PAM type: NNNNGHTT; PAM sequence: GTCAGCTT
tccctgtttttcattatatg

SEQ ID NO: 47518 - DNA, 20 bp, Artificial Sequence
  Description of Artificial Sequence: Synthetic oligonucleotide
  Target: LAMA2; (+) strand; PAM type: NNNNGHTT; PAM sequence: GTAGGATT
aatttttcagtatactgaga

SEQ ID NO: 47519 - DNA, 20 bp, Artificial Sequence
  Description of Artificial Sequence: Synthetic oligonucleotide
  Target: LAMA2; (+) strand; PAM type: NNNNGHTT; PAM sequence: AACTGATT
catagtatcactatgtgact

SEQ ID NO: 47520 - DNA, 20 bp, Artificial Sequence
  Description of Artificial Sequence: Synthetic oligonucleotide
  Target: LAMA2; (+) strand; PAM type: NNNNGHTT; PAM sequence: CTTTGCTT
aaaagttaaccagaggaaaa

SEQ ID NO: 47521 - DNA, 20 bp, Artificial Sequence
  Description of Artificial Sequence: Synthetic oligonucleotide
  Target: LAMA2; (+) strand; PAM type: NNNNGHTT; PAM sequence: CCCAGTTT
ctactttatctgatctttac

SEQ ID NO: 47522 - DNA, 20 bp, Artificial Sequence
  Description of Artificial Sequence: Synthetic oligonucleotide
  Target: LAMA2; (+) strand; PAM type: NNNNGHTT; PAM sequence: CTATGCTT
tttctctacctgtcaaattc

SEQ ID NO: 47523 - DNA, 20 bp, Artificial Sequence
  Description of Artificial Sequence: Synthetic oligonucleotide
  Target: LAMA2; (+) strand; PAM type: NNNNGHTT; PAM sequence: AGTAGATT
aacatagtcacttttacgag

SEQ ID NO: 47524 - DNA, 20 bp, Artificial Sequence
  Description of Artificial Sequence: Synthetic oligonucleotide
  Target: LAMA2; (+) strand; PAM type: NNNNGHTT; PAM sequence: TACAGCTT
accagtgtaattagaaagga

SEQ ID NO: 47525 - DNA, 20 bp, Artificial Sequence
  Description of Artificial Sequence: Synthetic oligonucleotide
  Target: LAMA2; (+) strand; PAM type: NNNNGHTT; PAM sequence: CATAGCTT
agaaaggatacagcttaaca

SEQ ID NO: 47526 - DNA, 20 bp, Artificial Sequence
  Description of Artificial Sequence: Synthetic oligonucleotide
  Target: LAMA2; (+) strand; PAM type: NNNNGHTT; PAM sequence: AGCAGATT
agcttaacacatagcttttg

SEQ ID NO: 47527 - DNA, 20 bp, Artificial Sequence
  Description of Artificial Sequence: Synthetic oligonucleotide
  Target: LAMA2; (+) strand; PAM type: NNNNGHTT; PAM sequence: TCCGGCTT
gagactgtagtcgttgcaaa

SEQ ID NO: 47528 - DNA, 20 bp, Artificial Sequence
  Description of Artificial Sequence: Synthetic oligonucleotide
  Target: LAMA2; (+) strand; PAM type: NNNNGHTT; PAM sequence: GAGTGTTT
ataattggaaaggctgcgat

SEQ ID NO: 47529 - DNA, 20 bp, Artificial Sequence
  Description of Artificial Sequence: Synthetic oligonucleotide
  Target: LAMA2; (+) strand; PAM type: NNNNGHTT; PAM sequence: AGGGGTTT
tgcgatgagtgtttctgttc

SEQ ID NO: 47530 - DNA, 20 bp, Artificial Sequence
  Description of Artificial Sequence: Synthetic oligonucleotide
  Target: LAMA2; (+) strand; PAM type: NNNNGHTT; PAM sequence: TTCTGTTT
agtaagcaagcaccatttgg

SEQ ID NO: 47531 - DNA, 20 bp, Artificial Sequence
  Description of Artificial Sequence: Synthetic oligonucleotide
  Target: LAMA2; (+) strand; PAM type: NNNNGHTT; PAM sequence: TGTTGCTT
gctgccccagcagccttctt

SEQ ID NO: 47532 - DNA, 20 bp, Artificial Sequence
  Description of Artificial Sequence: Synthetic oligonucleotide
  Target: LAMA2; (+) strand; PAM type: NNNNGHTT; PAM sequence: AACAGTTT
catcgttgttcttttgtatg

SEQ ID NO: 47533 - DNA, 20 bp, Artificial Sequence
  Description of Artificial Sequence: Synthetic oligonucleotide
  Target: LAMA2; (+) strand; PAM type: NNNNGHTT; PAM sequence: CCATGATT
agacatagtctttttagtgt

SEQ ID NO: 47534 - DNA, 20 bp, Artificial Sequence
  Description of Artificial Sequence: Synthetic oligonucleotide
  Target: LAMA2; (+) strand; PAM type: NNNNGHTT; PAM sequence: TAAGGTTT
ctatgaaacaataatgcaat

SEQ ID NO: 47535 - DNA, 20 bp, Artificial Sequence
  Description of Artificial Sequence: Synthetic oligonucleotide
  Target: LAMA2; (+) strand; PAM type: NNNNGHTT; PAM sequence: GCATGATT
aaggtttcaactccaagggt

SEQ ID NO: 47536 - DNA, 20 bp, Artificial Sequence
  Description of Artificial Sequence: Synthetic oligonucleotide
  Target: LAMA2; (+) strand; PAM type: NNNNGHTT; PAM sequence: CAACGCTT
acataatacatattatccac

SEQ ID NO: 47537 - DNA, 20 bp, Artificial Sequence
  Description of Artificial Sequence: Synthetic oligonucleotide
  Target: LAMA2; (+) strand; PAM type: NNNNGHTT; PAM sequence: GTTGGTTT
aggcaataccttcattctga

SEQ ID NO: 47538 - DNA, 20 bp, Artificial Sequence
  Description of Artificial Sequence: Synthetic oligonucleotide
  Target: LAMA2; (+) strand; PAM type: NNNNGHTT; PAM sequence: ATGTGTTT
attttctttctttaacgtaa

SEQ ID NO: 47539 - DNA, 20 bp, Artificial Sequence
  Description of Artificial Sequence: Synthetic oligonucleotide
  Target: LAMA2; (+) strand; PAM type: NNNNGHTT; PAM sequence: TTGTGTTT
aaagactgacattatcagag

SEQ ID NO: 47540 - DNA, 20 bp, Artificial Sequence
  Description of Artificial Sequence: Synthetic oligonucleotide
  Target: LAMA2; (+) strand; PAM type: NNNNGHTT; PAM sequence: CAGTGCTT
taaaatattttctctgcctg

SEQ ID NO: 47541 - DNA, 20 bp, Artificial Sequence
  Description of Artificial Sequence: Synthetic oligonucleotide
  Target: LAMA2; (+) strand; PAM type: NNNNGHTT; PAM sequence: TATTGCTT
tatctatacgttatcaactg

SEQ ID NO: 47542 - DNA, 20 bp, Artificial Sequence
  Description of Artificial Sequence: Synthetic oligonucleotide
  Target: LAMA2; (+) strand; PAM type: NNNNGHTT; PAM sequence: TTTTGTTT
acatctagtctaacttcctc

SEQ ID NO: 47543 - DNA, 20 bp, Artificial Sequence
  Description of Artificial Sequence: Synthetic oligonucleotide
  Target: LAMA2; (+) strand; PAM type: NNNNGHTT; PAM sequence: CAAAGTTT
agactgccccactgatagat

SEQ ID NO: 47544 - DNA, 20 bp, Artificial Sequence
  Description of Artificial Sequence: Synthetic oligonucleotide
  Target: LAMA2; (+) strand; PAM type: NNNNGHTT; PAM sequence: TCAAGCTT
ccaaggggcagagctggtac

SEQ ID NO: 47545 - DNA, 20 bp, Artificial Sequence
  Description of Artificial Sequence: Synthetic oligonucleotide
  Target: LAMA2; (+) strand; PAM type: NNNNGHTT; PAM sequence: CCTGGTTT
cagaaagtcaacaggttgta

SEQ ID NO: 47546 - DNA, 20 bp, Artificial Sequence
  Description of Artificial Sequence: Synthetic oligonucleotide
  Target: LAMA2; (+) strand; PAM type: NNNNGHTT; PAM sequence: CAGTGATT
tcatttaactaagggaattg

SEQ ID NO: 47547 - DNA, 20 bp, Artificial Sequence
  Description of Artificial Sequence: Synthetic oligonucleotide
  Target: LAMA2; (+) strand; PAM type: NNNNGHTT; PAM sequence: CACAGCTT
taagggaattgcagtgattc

SEQ ID NO: 47548 - DNA, 20 bp, Artificial Sequence
  Description of Artificial Sequence: Synthetic oligonucleotide
  Target: LAMA2; (+) strand; PAM type: NNNNGHTT; PAM sequence: TTCTGCTT
acatagagtcacccttagca

SEQ ID NO: 47549 - DNA, 20 bp, Artificial Sequence
  Description of Artificial Sequence: Synthetic oligonucleotide
  Target: LAMA2; (+) strand; PAM type: NNNNGHTT; PAM sequence: CAGTGTTT
taccctaagccctcagtaat

SEQ ID NO: 47550 - DNA, 20 bp, Artificial Sequence
  Description of Artificial Sequence: Synthetic oligonucleotide
  Target: LAMA2; (+) strand; PAM type: NNNNGHTT; PAM sequence: GGATGCTT
tgttttgtcctgactaggta

SEQ ID NO: 47551 - DNA, 20 bp, Artificial Sequence
  Description of Artificial Sequence: Synthetic oligonucleotide
  Target: LAMA2; (+) strand; PAM type: NNNNGHTT; PAM sequence: CCCAGATT
aaaacaaatcattatgcatt

SEQ ID NO: 47552 - DNA, 20 bp, Artificial Sequence
  Description of Artificial Sequence: Synthetic oligonucleotide
  Target: LAMA2; (+) strand; PAM type: NNNNGHTT; PAM sequence: CATAGTTT
caccacctttcaggtacttg

SEQ ID NO: 47553 - DNA, 20 bp, Artificial Sequence
  Description of Artificial Sequence: Synthetic oligonucleotide
  Target: LAMA2; (+) strand; PAM type: NNNNGHTT; PAM sequence: GGTTGTTT
acatacgcaatactttttca

SEQ ID NO: 47554 - DNA, 20 bp, Artificial Sequence
  Description of Artificial Sequence: Synthetic oligonucleotide
  Target: LAMA2; (+) strand; PAM type: NNNNGHTT; PAM sequence: AACTGTTT
aaatacggaactgaaagtcc

SEQ ID NO: 47555 - DNA, 20 bp, Artificial Sequence
  Description of Artificial Sequence: Synthetic oligonucleotide
  Target: LAMA2; (+) strand; PAM type: NNNNGHTT; PAM sequence: GTTTGATT
acggaactgaaagtccaact

SEQ ID NO: 47556 - DNA, 20 bp, Artificial Sequence
  Description of Artificial Sequence: Synthetic oligonucleotide
  Target: LAMA2; (+) strand; PAM type: NNNNGHTT; PAM sequence: AACAGATT
aaaagcataggttcaatgaa

SEQ ID NO: 47557 - DNA, 20 bp, Artificial Sequence
  Description of Artificial Sequence: Synthetic oligonucleotide
  Target: LAMA2; (+) strand; PAM type: NNNNGHTT; PAM sequence: TCAGGTTT
tctaatgatattcataatgc

SEQ ID NO: 47558 - DNA, 20 bp, Artificial Sequence
  Description of Artificial Sequence: Synthetic oligonucleotide
  Target: LAMA2; (+) strand; PAM type: NNNNGHTT; PAM sequence: AAATGTTT
taatgctcaggtttttttct

SEQ ID NO: 47559 - DNA, 20 bp, Artificial Sequence
  Description of Artificial Sequence: Synthetic oligonucleotide
  Target: LAMA2; (+) strand; PAM type: NNNNGHTT; PAM sequence: TGTGGTTT
caggtttttttctaaatgtt

SEQ ID NO: 47560 - DNA, 20 bp, Artificial Sequence
  Description of Artificial Sequence: Synthetic oligonucleotide
  Target: LAMA2; (+) strand; PAM type: NNNNGHTT; PAM sequence: TTTGGTTT
ttttttctaaatgtttgtgg

SEQ ID NO: 47561 - DNA, 20 bp, Artificial Sequence
  Description of Artificial Sequence: Synthetic oligonucleotide
  Target: LAMA2; (+) strand; PAM type: NNNNGHTT; PAM sequence: TTTTGTTT
aatgtttgtggtttggtttt

SEQ ID NO: 47562 - DNA, 20 bp, Artificial Sequence
  Description of Artificial Sequence: Synthetic oligonucleotide
  Target: LAMA2; (+) strand; PAM type: NNNNGHTT; PAM sequence: GTGTGTTT
tttaaaaattaatgatgact

SEQ ID NO: 47563 - DNA, 20 bp, Artificial Sequence
  Description of Artificial Sequence: Synthetic oligonucleotide
  Target: LAMA2; (+) strand; PAM type: NNNNGHTT; PAM sequence: CCACGCTT
atctgggaaacaaagtaagt

SEQ ID NO: 47564 - DNA, 20 bp, Artificial Sequence
  Description of Artificial Sequence: Synthetic oligonucleotide
  Target: LAMA2; (+) strand; PAM type: NNNNGHTT; PAM sequence: GCTTGCTT
gggaaacaaagtaagtccac

SEQ ID NO: 47565 - DNA, 20 bp, Artificial Sequence
  Description of Artificial Sequence: Synthetic oligonucleotide
  Target: LAMA2; (+) strand; PAM type: NNNNGHTT; PAM sequence: TTCTGCTT
tccacgcttgcttcccgcta

SEQ ID NO: 47566 - DNA, 20 bp, Artificial Sequence
  Description of Artificial Sequence: Synthetic oligonucleotide
  Target: LAMA2; (+) strand; PAM type: NNNNGHTT; PAM sequence: ATGGGTTT
ttaactgactgatcgtgaga

SEQ ID NO: 47567 - DNA, 20 bp, Artificial Sequence
  Description of Artificial Sequence: Synthetic oligonucleotide
  Target: LAMA2; (+) strand; PAM type: NNNNGHTT; PAM sequence: ATTGGATT
caaaatcaaatacacactga

SEQ ID NO: 47568 - DNA, 20 bp, Artificial Sequence
  Description of Artificial Sequence: Synthetic oligonucleotide
  Target: LAMA2; (+) strand; PAM type: NNNNGHTT; PAM sequence: GGGCGTTT
cagctaaatcacattgagtt

SEQ ID NO: 47569 - DNA, 20 bp, Artificial Sequence
  Description of Artificial Sequence: Synthetic oligonucleotide
  Target: LAMA2; (+) strand; PAM type: NNNNGHTT; PAM sequence: TTGTGTTT
aggtattggaagaaactgtg

SEQ ID NO: 47570 - DNA, 20 bp, Artificial Sequence
  Description of Artificial Sequence: Synthetic oligonucleotide
  Target: LAMA2; (+) strand; PAM type: NNNNGHTT; PAM sequence: AGCTGTTT
tgttgtgtttatgtgaaaag

SEQ ID NO: 47571 - DNA, 20 bp, Artificial Sequence
  Description of Artificial Sequence: Synthetic oligonucleotide
  Target: LAMA2; (+) strand; PAM type: NNNNGHTT; PAM sequence: TAAAGTTT
gtctgtggtgggatacttac

SEQ ID NO: 47572 - DNA, 20 bp, Artificial Sequence
  Description of Artificial Sequence: Synthetic oligonucleotide
  Target: LAMA2; (+) strand; PAM type: NNNNGHTT; PAM sequence: ATCGGTTT
tacttactaaagtttttctc

SEQ ID NO: 47573 - DNA, 20 bp, Artificial Sequence
  Description of Artificial Sequence: Synthetic oligonucleotide
  Target: LAMA2; (+) strand; PAM type: NNNNGHTT; PAM sequence: AGGAGATT
tcatttcaaaactgatactc

SEQ ID NO: 47574 - DNA, 20 bp, Artificial Sequence
  Description of Artificial Sequence: Synthetic oligonucleotide
  Target: LAMA2; (+) strand; PAM type: NNNNGHTT; PAM sequence: AAATGCTT
aatgtattacataactaatt

SEQ ID NO: 47575 - DNA, 20 bp, Artificial Sequence
  Description of Artificial Sequence: Synthetic oligonucleotide
  Target: LAMA2; (+) strand; PAM type: NNNNGHTT; PAM sequence: TGAGGCTT
aactaattaaatgcttgcca

SEQ ID NO: 47576 - DNA, 20 bp, Artificial Sequence
  Description of Artificial Sequence: Synthetic oligonucleotide
  Target: LAMA2; (+) strand; PAM type: NNNNGHTT; PAM sequence: GCCAGATT
gcagaaactaccctaaaagt

SEQ ID NO: 47577 - DNA, 20 bp, Artificial Sequence
  Description of Artificial Sequence: Synthetic oligonucleotide
  Target: LAMA2; (+) strand; PAM type: NNNNGHTT; PAM sequence: GCACGTTT
ctaaaagtgccagattggaa

SEQ ID NO: 47578 - DNA, 20 bp, Artificial Sequence
  Description of Artificial Sequence: Synthetic oligonucleotide
  Target: LAMA2; (+) strand; PAM type: NNNNGHTT; PAM sequence: GTTTGTTT
aagtgccagattggaagcac

SEQ ID NO: 47579 - DNA, 20 bp, Artificial Sequence
  Description of Artificial Sequence: Synthetic oligonucleotide
  Target: LAMA2; (+) strand; PAM type: NNNNGHTT; PAM sequence: ACAGGCTT
aatgtagcagcctcagaaat

SEQ ID NO: 47580 - DNA, 20 bp, Artificial Sequence
  Description of Artificial Sequence: Synthetic oligonucleotide
  Target: LAMA2; (+) strand; PAM type: NNNNGHTT; PAM sequence: TGTGGATT
acaggcttatttttttctgt

SEQ ID NO: 47581 - DNA, 20 bp, Artificial Sequence
  Description of Artificial Sequence: Synthetic oligonucleotide
  Target: LAMA2; (+) strand; PAM type: NNNNGHTT; PAM sequence: TGGGGTTT
ttctatctagatagatatcc

SEQ ID NO: 47582 - DNA, 20 bp, Artificial Sequence
  Description of Artificial Sequence: Synthetic oligonucleotide
  Target: LAMA2; (+) strand; PAM type: NNNNGHTT; PAM sequence: ACTTGCTT
acttatttataaacgtgaat

SEQ ID NO: 47583 - DNA, 20 bp, Artificial Sequence
  Description of Artificial Sequence: Synthetic oligonucleotide
  Target: LAMA2; (+) strand; PAM type: NNNNGHTT; PAM sequence: TGTTGTTT
aaaatcccttcctaaattaa

SEQ ID NO: 47584 - DNA, 20 bp, Artificial Sequence
  Description of Artificial Sequence: Synthetic oligonucleotide
  Target: LAMA2; (+) strand; PAM type: NNNNGHTT; PAM sequence: CCTAGTTT
ctaaattaatgttgtttaag

SEQ ID NO: 47585 - DNA, 20 bp, Artificial Sequence
  Description of Artificial Sequence: Synthetic oligonucleotide
  Target: LAMA2; (+) strand; PAM type: NNNNGHTT; PAM sequence: AATTGATT
attatttatgaagaaatcat

SEQ ID NO: 47586 - DNA, 20 bp, Artificial Sequence
  Description of Artificial Sequence: Synthetic oligonucleotide
  Target: LAMA2; (+) strand; PAM type: NNNNGHTT; PAM sequence: GTATGTTT
aattgattaagcaaataaaa

SEQ ID NO: 47587 - DNA, 20 bp, Artificial Sequence
  Description of Artificial Sequence: Synthetic oligonucleotide
  Target: LAMA2; (+) strand; PAM type: NNNNGHTT; PAM sequence: AGTGGTTT
ataaaagtatgtttatagtc

SEQ ID NO: 47588 - DNA, 20 bp, Artificial Sequence
  Description of Artificial Sequence: Synthetic oligonucleotide
  Target: LAMA2; (+) strand; PAM type: NNNNGHTT; PAM sequence: GCCAGTTT
tgaaacacttttaacttatg

SEQ ID NO: 47589 - DNA, 20 bp, Artificial Sequence
  Description of Artificial Sequence: Synthetic oligonucleotide
  Target: LAMA2; (+) strand; PAM type: NNNNGHTT; PAM sequence: TACTGCTT
gcacataagacttgaatttc

SEQ ID NO: 47590 - DNA, 20 bp, Artificial Sequence
  Description of Artificial Sequence: Synthetic oligonucleotide
  Target: LAMA2; (+) strand; PAM type: NNNNGHTT; PAM sequence: AGTAGCTT
tgatggcaacacttaattaa

SEQ ID NO: 47591 - DNA, 20 bp, Artificial Sequence
  Description of Artificial Sequence: Synthetic oligonucleotide
  Target: LAMA2; (+) strand; PAM type: NNNNGHTT; PAM sequence: ACCAGATT
ttataatagaaatattcttt

SEQ ID NO: 47592 - DNA, 20 bp, Artificial Sequence
  Description of Artificial Sequence: Synthetic oligonucleotide
  Target: LAMA2; (+) strand; PAM type: NNNNGHTT; PAM sequence: TGCCGTTT
aacactgttcttgcctgtac

SEQ ID NO: 47593 - DNA, 20 bp, Artificial Sequence
  Description of Artificial Sequence: Synthetic oligonucleotide
  Target: LAMA2; (+) strand; PAM type: NNNNGHTT; PAM sequence: AATTGTTT
taacattaacagggtgtgca

SEQ ID NO: 47594 - DNA, 20 bp, Artificial Sequence
  Description of Artificial Sequence: Synthetic oligonucleotide
  Target: LAMA2; (+) strand; PAM type: NNNNGHTT; PAM sequence: GGTGGTTT
aatgtaacgtggaagccctt

SEQ ID NO: 47595 - DNA, 20 bp, Artificial Sequence
  Description of Artificial Sequence: Synthetic oligonucleotide
  Target: LAMA2; (+) strand; PAM type: NNNNGHTT; PAM sequence: ACATGCTT
cgtaaattatagtcatgatg

SEQ ID NO: 47596 - DNA, 20 bp, Artificial Sequence
  Description of Artificial Sequence: Synthetic oligonucleotide
  Target: LAMA2; (+) strand; PAM type: NNNNGHTT; PAM sequence: CTTAGCTT
attatagtcatgatgacatg

SEQ ID NO: 47597 - DNA, 20 bp, Artificial Sequence
  Description of Artificial Sequence: Synthetic oligonucleotide
  Target: LAMA2; (+) strand; PAM type: NNNNGHTT; PAM sequence: GGTTGATT
catgatgacatgcttagctt

SEQ ID NO: 47598 - DNA, 20 bp, Artificial Sequence
  Description of Artificial Sequence: Synthetic oligonucleotide
  Target: LAMA2; (+) strand; PAM type: NNNNGHTT; PAM sequence: ATCTGCTT
gcgtatcaagatacaagtgc

SEQ ID NO: 47599 - DNA, 20 bp, Artificial Sequence
  Description of Artificial Sequence: Synthetic oligonucleotide
  Target: LAMA2; (+) strand; PAM type: NNNNGHTT; PAM sequence: CTCTGCTT
tctatggtacataatccttc

SEQ ID NO: 47600 - DNA, 20 bp, Artificial Sequence
  Description of Artificial Sequence: Synthetic oligonucleotide
  Target: LAMA2; (+) strand; PAM type: NNNNGHTT; PAM sequence: ATTAGCTT
ggaaaaaattatgagatgct

SEQ ID NO: 47601 - DNA, 20 bp, Artificial Sequence
  Description of Artificial Sequence: Synthetic oligonucleotide
  Target: LAMA2; (+) strand; PAM type: NNNNGHTT; PAM sequence: AGTTGCTT
agactttcaaacattttcca

SEQ ID NO: 47602 - DNA, 20 bp, Artificial Sequence
  Description of Artificial Sequence: Synthetic oligonucleotide
  Target: LAMA2; (+) strand; PAM type: NNNNGHTT; PAM sequence: TAAGGCTT
ttttccaagttgcttggtta

SEQ ID NO: 47603 - DNA, 20 bp, Artificial Sequence
  Description of Artificial Sequence: Synthetic oligonucleotide
  Target: LAMA2; (+) strand; PAM type: NNNNGHTT; PAM sequence: GAGTGCTT
tactagccaatttagcaaag

SEQ ID NO: 47604 - DNA, 20 bp, Artificial Sequence
  Description of Artificial Sequence: Synthetic oligonucleotide
  Target: LAMA2; (+) strand; PAM type: NNNNGHTT; PAM sequence: TACTGTTT
tgaaacatttttcacatttt

SEQ ID NO: 47605 - DNA, 20 bp, Artificial Sequence
  Description of Artificial Sequence: Synthetic oligonucleotide
  Target: LAMA2; (+) strand; PAM type: NNNNGHTT; PAM sequence: AAGTGATT
tggaataatgaagtataagt

SEQ ID NO: 47606 - DNA, 20 bp, Artificial Sequence
  Description of Artificial Sequence: Synthetic oligonucleotide
  Target: LAMA2; (+) strand; PAM type: NNNNGHTT; PAM sequence: GCACGTTT
atgaggcctaggaaaactta

SEQ ID NO: 47607 - DNA, 20 bp, Artificial Sequence
  Description of Artificial Sequence: Synthetic oligonucleotide
  Target: LAMA2; (+) strand; PAM type: NNNNGHTT; PAM sequence: AAATGCTT
ctaggtgcatttcattttca

SEQ ID NO: 47608 - DNA, 20 bp, Artificial Sequence
  Description of Artificial Sequence: Synthetic oligonucleotide
  Target: LAMA2; (+) strand; PAM type: NNNNGHTT; PAM sequence: TAATGCTT
tcaaaatgcttggcaaatgt

SEQ ID NO: 47609 - DNA, 20 bp, Artificial Sequence
  Description of Artificial Sequence: Synthetic oligonucleotide
  Target: LAMA2; (+) strand; PAM type: NNNNGHTT; PAM sequence: CTTGGTTT
atgcttggcaaatgttaatg

SEQ ID NO: 47610 - DNA, 20 bp, Artificial Sequence
  Description of Artificial Sequence: Synthetic oligonucleotide
  Target: LAMA2; (+) strand; PAM type: NNNNGHTT; PAM sequence: ATTTGTTT
ttaatgcttggttttagggc

SEQ ID NO: 47611 - DNA, 20 bp, Artificial Sequence
  Description of Artificial Sequence: Synthetic oligonucleotide
  Target: LAMA2; (+) strand; PAM type: NNNNGHTT; PAM sequence: GCTGGTTT
gctagaggacaaagaatcct

SEQ ID NO: 47612 - DNA, 20 bp, Artificial Sequence
  Description of Artificial Sequence: Synthetic oligonucleotide
  Target: LAMA2; (+) strand; PAM type: NNNNGHTT; PAM sequence: AACAGTTT
gcaggctacagctattcaga

SEQ ID NO: 47613 - DNA, 20 bp, Artificial Sequence
  Description of Artificial Sequence: Synthetic oligonucleotide
  Target: LAMA2; (+) strand; PAM type: NNNNGHTT; PAM sequence: ATTTGCTT
actggaacattgcaacagtc

SEQ ID NO: 47614 - DNA, 20 bp, Artificial Sequence
  Description of Artificial Sequence: Synthetic oligonucleotide
  Target: LAMA2; (+) strand; PAM type: NNNNGHTT; PAM sequence: GGCAGCTT
tagtggtctgaaatagttga

SEQ ID NO: 47615 - DNA, 20 bp, Artificial Sequence
  Description of Artificial Sequence: Synthetic oligonucleotide
  Target: LAMA2; (+) strand; PAM type: NNNNGHTT; PAM sequence: GCTAGCTT
tctgtaaagttctgggagaa

SEQ ID NO: 47616 - DNA, 20 bp, Artificial Sequence
  Description of Artificial Sequence: Synthetic oligonucleotide
  Target: LAMA2; (+) strand; PAM type: NNNNGHTT; PAM sequence: CTTGGCTT
aaagttctgggagaagctag

SEQ ID NO: 47617 - DNA, 20 bp, Artificial Sequence
  Description of Artificial Sequence: Synthetic oligonucleotide
  Target: LAMA2; (+) strand; PAM type: NNNNGHTT; PAM sequence: TAAGGTTT
tgctgttcctgcattaccat

SEQ ID NO: 47618 - DNA, 20 bp, Artificial Sequence
  Description of Artificial Sequence: Synthetic oligonucleotide
  Target: LAMA2; (+) strand; PAM type: NNNNGHTT; PAM sequence: ATGTGATT
aatattattaaattaatctt

SEQ ID NO: 47619 - DNA, 20 bp, Artificial Sequence
  Description of Artificial Sequence: Synthetic oligonucleotide
  Target: LAMA2; (+) strand; PAM type: NNNNGHTT; PAM sequence: ACCTGCTT
gtgatttgttctttaccaaa

SEQ ID NO: 47620 - DNA, 20 bp, Artificial Sequence
  Description of Artificial Sequence: Synthetic oligonucleotide
  Target: LAMA2; (+) strand; PAM type: NNNNGHTT; PAM sequence: TTCTGTTT
tctacagcattatgctatct

SEQ ID NO: 47621 - DNA, 20 bp, Artificial Sequence
  Description of Artificial Sequence: Synthetic oligonucleotide
  Target: LAMA2; (+) strand; PAM type: NNNNGHTT; PAM sequence: TCTAGCTT
cattatgctatctttctgtt

SEQ ID NO: 47622 - DNA, 20 bp, Artificial Sequence
  Description of Artificial Sequence: Synthetic oligonucleotide
  Target: LAMA2; (+) strand; PAM type: NNNNGHTT; PAM sequence: TCTAGTTT
gttgccaagaatacctatag

SEQ ID NO: 47623 - DNA, 20 bp, Artificial Sequence
  Description of Artificial Sequence: Synthetic oligonucleotide
  Target: LAMA2; (+) strand; PAM type: NNNNGHTT; PAM sequence: TCTGGCTT
agtctgctgacataatagca

SEQ ID NO: 47624 - DNA, 20 bp, Artificial Sequence
  Description of Artificial Sequence: Synthetic oligonucleotide
  Target: LAMA2; (+) strand; PAM type: NNNNGHTT; PAM sequence: TTTTGTTT
aagtaatctctggtaaactc

SEQ ID NO: 47625 - DNA, 20 bp, Artificial Sequence
  Description of Artificial Sequence: Synthetic oligonucleotide
  Target: LAMA2; (+) strand; PAM type: NNNNGHTT; PAM sequence: TCTTGCTT
aaactcttttgttttgttgt

SEQ ID NO: 47626 - DNA, 20 bp, Artificial Sequence
  Description of Artificial Sequence: Synthetic oligonucleotide
  Target: LAMA2; (+) strand; PAM type: NNNNGHTT; PAM sequence: TATAGATT
cacggatctcaaattaaagc

SEQ ID NO: 47627 - DNA, 20 bp, Artificial Sequence
  Description of Artificial Sequence: Synthetic oligonucleotide
  Target: LAMA2; (+) strand; PAM type: NNNNGHTT; PAM sequence: TTGAGATT
ttgaagaaggaaactgatat

SEQ ID NO: 47628 - DNA, 20 bp, Artificial Sequence
  Description of Artificial Sequence: Synthetic oligonucleotide
  Target: LAMA2; (+) strand; PAM type: NNNNGHTT; PAM sequence: ACATGCTT
aataccttgtaattgatgct

SEQ ID NO: 47629 - DNA, 20 bp, Artificial Sequence
  Description of Artificial Sequence: Synthetic oligonucleotide
  Target: LAMA2; (+) strand; PAM type: NNNNGHTT; PAM sequence: AATTGTTT
aaacaaacaaaactctaaga

SEQ ID NO: 47630 - DNA, 20 bp, Artificial Sequence
  Description of Artificial Sequence: Synthetic oligonucleotide
  Target: LAMA2; (+) strand; PAM type: NNNNGHTT; PAM sequence: GTTGGATT
tgctcagaaatgcccattga

SEQ ID NO: 47631 - DNA, 20 bp, Artificial Sequence
  Description of Artificial Sequence: Synthetic oligonucleotide
  Target: LAMA2; (+) strand; PAM type: NNNNGHTT; PAM sequence: TCTTGCTT
gagttgaaagatgaattctg

SEQ ID NO: 47632 - DNA, 20 bp, Artificial Sequence
  Description of Artificial Sequence: Synthetic oligonucleotide
  Target: LAMA2; (+) strand; PAM type: NNNNGHTT; PAM sequence: CTTGGATT
taacttcctcctatttaaat

SEQ ID NO: 47633 - DNA, 20 bp, Artificial Sequence
  Description of Artificial Sequence: Synthetic oligonucleotide
  Target: LAMA2; (+) strand; PAM type: NNNNGHTT; PAM sequence: GGTTGATT
aaataggataaatcaactgt

SEQ ID NO: 47634 - DNA, 20 bp, Artificial Sequence
  Description of Artificial Sequence: Synthetic oligonucleotide
  Target: LAMA2; (+) strand; PAM type: NNNNGHTT; PAM sequence: GAAGGTTT
caatggagtagaaccaggaa

SEQ ID NO: 47635 - DNA, 20 bp, Artificial Sequence
  Description of Artificial Sequence: Synthetic oligonucleotide
  Target: LAMA2; (+) strand; PAM type: NNNNGHTT; PAM sequence: GGACGATT
aacctgaacatcatgggaag

SEQ ID NO: 47636 - DNA, 20 bp, Artificial Sequence
  Description of Artificial Sequence: Synthetic oligonucleotide
  Target: LAMA2; (+) strand; PAM type: NNNNGHTT; PAM sequence: TGGAGTTT
tcattataccctgctccctt

SEQ ID NO: 47637 - DNA, 20 bp, Artificial Sequence
  Description of Artificial Sequence: Synthetic oligonucleotide
  Target: LAMA2; (+) strand; PAM type: NNNNGHTT; PAM sequence: CAGAGATT
gaccaacagtaacattaaaa

SEQ ID NO: 47638 - DNA, 20 bp, Artificial Sequence
  Description of Artificial Sequence: Synthetic oligonucleotide
  Target: LAMA2; (+) strand; PAM type: NNNNGHTT; PAM sequence: TGAGGCTT
gctactttaccctactacct

SEQ ID NO: 47639 - DNA, 20 bp, Artificial Sequence
  Description of Artificial Sequence: Synthetic oligonucleotide
  Target: LAMA2; (+) strand; PAM type: NNNNGHTT; PAM sequence: CGTGGCTT
ttcatctacatgacaagaac

SEQ ID NO: 47640 - DNA, 20 bp, Artificial Sequence
  Description of Artificial Sequence: Synthetic oligonucleotide
  Target: LAMA2; (+) strand; PAM type: NNNNGHTT; PAM sequence: CCTCGCTT
caatgacttggaagccccca

SEQ ID NO: 47641 - DNA, 20 bp, Artificial Sequence
  Description of Artificial Sequence: Synthetic oligonucleotide
  Target: LAMA2; (+) strand; PAM type: NNNNGHTT; PAM sequence: AATTGATT
ccttgccaaataaacctcta

SEQ ID NO: 47642 - DNA, 20 bp, Artificial Sequence
  Description of Artificial Sequence: Synthetic oligonucleotide
  Target: LAMA2; (+) strand; PAM type: NNNNGHTT; PAM sequence: ACCTGTTT
aaacctctaaattgattgag

SEQ ID NO: 47643 - DNA, 20 bp, Artificial Sequence
  Description of Artificial Sequence: Synthetic oligonucleotide
  Target: LAMA2; (+) strand; PAM type: NNNNGHTT; PAM sequence: TTTGGTTT
gagacctgtttctgatactt

SEQ ID NO: 47644 - DNA, 20 bp, Artificial Sequence
  Description of Artificial Sequence: Synthetic oligonucleotide
  Target: LAMA2; (+) strand; PAM type: NNNNGHTT; PAM sequence: TGACGTTT
tatccgtcataacattctct

SEQ ID NO: 47645 - DNA, 20 bp, Artificial Sequence
  Description of Artificial Sequence: Synthetic oligonucleotide
  Target: LAMA2; (+) strand; PAM type: NNNNGHTT; PAM sequence: CAGTGTTT
tattcacatgcatctgtcta

SEQ ID NO: 47646 - DNA, 20 bp, Artificial Sequence
  Description of Artificial Sequence: Synthetic oligonucleotide
  Target: LAMA2; (+) strand; PAM type: NNNNGHTT; PAM sequence: TTTTGTTT
tctgtctacagtgttttaca

SEQ ID NO: 47647 - DNA, 20 bp, Artificial Sequence
  Description of Artificial Sequence: Synthetic oligonucleotide
  Target: LAMA2; (+) strand; PAM type: NNNNGHTT; PAM sequence: AATAGCTT
aaaactcttgagaaaaataa

SEQ ID NO: 47648 - DNA, 20 bp, Artificial Sequence
  Description of Artificial Sequence: Synthetic oligonucleotide
  Target: LAMA2; (+) strand; PAM type: NNNNGHTT; PAM sequence: GTTGGTTT
taacagtaatttcaatgtga

SEQ ID NO: 47649 - DNA, 20 bp, Artificial Sequence
  Description of Artificial Sequence: Synthetic oligonucleotide
  Target: LAMA2; (+) strand; PAM type: NNNNGHTT; PAM sequence: TAGTGTTT
actggtcaggacaaaggagg

SEQ ID NO: 47650 - DNA, 20 bp, Artificial Sequence
  Description of Artificial Sequence: Synthetic oligonucleotide
  Target: LAMA2; (+) strand; PAM type: NNNNGHTT; PAM sequence: TACAGATT
gacaaaggaggtagtgttta

SEQ ID NO: 47651 - DNA, 20 bp, Artificial Sequence
  Description of Artificial Sequence: Synthetic oligonucleotide
  Target: LAMA2; (+) strand; PAM type: NNNNGHTT; PAM sequence: TTTAGCTT
attattaaatattattaata

SEQ ID NO: 47652 - DNA, 20 bp, Artificial Sequence
  Description of Artificial Sequence: Synthetic oligonucleotide
  Target: LAMA2; (+) strand; PAM type: NNNNGHTT; PAM sequence: CCAGGATT
caaattaggaagaaatagag

SEQ ID NO: 47653 - DNA, 20 bp, Artificial Sequence
  Description of Artificial Sequence: Synthetic oligonucleotide
  Target: LAMA2; (+) strand; PAM type: NNNNGHTT; PAM sequence: TTAAGTTT
ttaagcattttttcaatcag

SEQ ID NO: 47654 - DNA, 20 bp, Artificial Sequence
  Description of Artificial Sequence: Synthetic oligonucleotide
  Target: LAMA2; (+) strand; PAM type: NNNNGHTT; PAM sequence: AGCAGCTT
ctttggaatagagatgctga

SEQ ID NO: 47655 - DNA, 20 bp, Artificial Sequence
  Description of Artificial Sequence: Synthetic oligonucleotide
  Target: LAMA2; (+) strand; PAM type: NNNNGHTT; PAM sequence: ACAAGTTT
atagaggggacacaaatcca

SEQ ID NO: 47656 - DNA, 20 bp, Artificial Sequence
  Description of Artificial Sequence: Synthetic oligonucleotide
  Target: LAMA2; (+) strand; PAM type: NNNNGHTT; PAM sequence: AATGGTTT
caaatccaacaagtttttta

SEQ ID NO: 47657 - DNA, 20 bp, Artificial Sequence
  Description of Artificial Sequence: Synthetic oligonucleotide
  Target: LAMA2; (+) strand; PAM type: NNNNGHTT; PAM sequence: GCAAGATT
taaatggtttcaaagctctg

SEQ ID NO: 47658 - DNA, 20 bp, Artificial Sequence
  Description of Artificial Sequence: Synthetic oligonucleotide
  Target: LAMA2; (+) strand; PAM type: NNNNGHTT; PAM sequence: TATTGATT
aatgaagttaactccaagcc

SEQ ID NO: 47659 - DNA, 20 bp, Artificial Sequence
  Description of Artificial Sequence: Synthetic oligonucleotide
  Target: LAMA2; (+) strand; PAM type: NNNNGHTT; PAM sequence: TGTGGCTT
gtactcctcacataatttta

SEQ ID NO: 47660 - DNA, 20 bp, Artificial Sequence
  Description of Artificial Sequence: Synthetic oligonucleotide
  Target: LAMA2; (+) strand; PAM type: NNNNGHTT; PAM sequence: ATCAGTTT
aatattaacaacccaaatcc

SEQ ID NO: 47661 - DNA, 20 bp, Artificial Sequence
  Description of Artificial Sequence: Synthetic oligonucleotide
  Target: LAMA2; (+) strand; PAM type: NNNNGHTT; PAM sequence: AGTGGATT
tagtcaggctaaattggcca

SEQ ID NO: 47662 - DNA, 20 bp, Artificial Sequence
  Description of Artificial Sequence: Synthetic oligonucleotide
  Target: LAMA2; (+) strand; PAM type: NNNNGHTT; PAM sequence: CCGTGTTT
ggccaagtggattttatcat

SEQ ID NO: 47663 - DNA, 20 bp, Artificial Sequence
  Description of Artificial Sequence: Synthetic oligonucleotide
  Target: LAMA2; (+) strand; PAM type: NNNNGHTT; PAM sequence: ACCAGTTT
ggttactttaaaattagaaa

SEQ ID NO: 47664 - DNA, 20 bp, Artificial Sequence
  Description of Artificial Sequence: Synthetic oligonucleotide
  Target: LAMA2; (+) strand; PAM type: NNNNGHTT; PAM sequence: GACTGATT
tttaagtaattgaccatatt

SEQ ID NO: 47665 - DNA, 20 bp, Artificial Sequence
  Description of Artificial Sequence: Synthetic oligonucleotide
  Target: LAMA2; (+) strand; PAM type: NNNNGHTT; PAM sequence: TATTGTTT
ttaatataaaatgttcaaag

SEQ ID NO: 47666 - DNA, 20 bp, Artificial Sequence
  Description of Artificial Sequence: Synthetic oligonucleotide
  Target: LAMA2; (+) strand; PAM type: NNNNGHTT; PAM sequence: ATCTGCTT
cacttatagatgatatactt

SEQ ID NO: 47667 - DNA, 20 bp, Artificial Sequence
  Description of Artificial Sequence: Synthetic oligonucleotide
  Target: LAMA2; (+) strand; PAM type: NNNNGHTT; PAM sequence: TCATGTTT
aattaatatacaaaagtcaa

SEQ ID NO: 47668 - DNA, 20 bp, Artificial Sequence
  Description of Artificial Sequence: Synthetic oligonucleotide
  Target: LAMA2; (+) strand; PAM type: NNNNGHTT; PAM sequence: CAAGGATT
gcaatacatataaatagtac

SEQ ID NO: 47669 - DNA, 20 bp, Artificial Sequence
  Description of Artificial Sequence: Synthetic oligonucleotide
  Target: LAMA2; (+) strand; PAM type: NNNNGHTT; PAM sequence: AATTGCTT
tcgggaggctgatgcaagag

SEQ ID NO: 47670 - DNA, 20 bp, Artificial Sequence
  Description of Artificial Sequence: Synthetic oligonucleotide
  Target: LAMA2; (+) strand; PAM type: NNNNGHTT; PAM sequence: CCAAGATT
gaggcagaggctgcagtgag

SEQ ID NO: 47671 - DNA, 20 bp, Artificial Sequence
  Description of Artificial Sequence: Synthetic oligonucleotide
  Target: LAMA2; (+) strand; PAM type: NNNNGHTT; PAM sequence: TGGGGCTT
gaaattctaaaggaaagaag

SEQ ID NO: 47672 - DNA, 20 bp, Artificial Sequence
  Description of Artificial Sequence: Synthetic oligonucleotide
  Target: LAMA2; (+) strand; PAM type: NNNNGHTT; PAM sequence: AAGGGATT
aagaagtggggctttttgga

SEQ ID NO: 47673 - DNA, 20 bp, Artificial Sequence
  Description of Artificial Sequence: Synthetic oligonucleotide
  Target: LAMA2; (+) strand; PAM type: NNNNGHTT; PAM sequence: CACTGATT
tacagtaaatggtctggtac

SEQ ID NO: 47674 - DNA, 20 bp, Artificial Sequence
  Description of Artificial Sequence: Synthetic oligonucleotide
  Target: LAMA2; (+) strand; PAM type: NNNNGHTT; PAM sequence: TTGAGATT
acctttataaagacaacaca

SEQ ID NO: 47675 - DNA, 20 bp, Artificial Sequence
  Description of Artificial Sequence: Synthetic oligonucleotide
  Target: LAMA2; (+) strand; PAM type: NNNNGHTT; PAM sequence: TCTAGATT
accataattgaataatagta

SEQ ID NO: 47676 - DNA, 20 bp, Artificial Sequence
  Description of Artificial Sequence: Synthetic oligonucleotide
  Target: LAMA2; (+) strand; PAM type: NNNNGHTT; PAM sequence: AACAGTTT
agggggaaaaaatgtggaac

SEQ ID NO: 47677 - DNA, 20 bp, Artificial Sequence
  Description of Artificial Sequence: Synthetic oligonucleotide
  Target: LAMA2; (+) strand; PAM type: NNNNGHTT; PAM sequence: TGAGGTTT
aaaaagagaaacaaatgggg

SEQ ID NO: 47678 - DNA, 20 bp, Artificial Sequence
  Description of Artificial Sequence: Synthetic oligonucleotide
  Target: LAMA2; (+) strand; PAM type: NNNNGHTT; PAM sequence: CCAAGATT
gggtgaggtttacaattgcc

SEQ ID NO: 47679 - DNA, 20 bp, Artificial Sequence
  Description of Artificial Sequence: Synthetic oligonucleotide
  Target: LAMA2; (+) strand; PAM type: NNNNGHTT; PAM sequence: AATAGTTT
tgagctgatacagggctgct

SEQ ID NO: 47680 - DNA, 20 bp, Artificial Sequence
  Description of Artificial Sequence: Synthetic oligonucleotide
  Target: LAMA2; (+) strand; PAM type: NNNNGHTT; PAM sequence: TGATGTTT
actcaacaatgtaaaattca

SEQ ID NO: 47681 - DNA, 20 bp, Artificial Sequence
  Description of Artificial Sequence: Synthetic oligonucleotide
  Target: LAMA2; (+) strand; PAM type: NNNNGHTT; PAM sequence: GATGGTTT
atcacttgaacctgggaggc

SEQ ID NO: 47682 - DNA, 20 bp, Artificial Sequence
  Description of Artificial Sequence: Synthetic oligonucleotide
  Target: LAMA2; (+) strand; PAM type: NNNNGHTT; PAM sequence: AATAGTTT
gaggaacaaagataaggaag

SEQ ID NO: 47683 - DNA, 20 bp, Artificial Sequence
  Description of Artificial Sequence: Synthetic oligonucleotide
  Target: LAMA2; (+) strand; PAM type: NNNNGHTT; PAM sequence: TGGGGCTT
aatgtgatagtatttagagg

SEQ ID NO: 47684 - DNA, 20 bp, Artificial Sequence
  Description of Artificial Sequence: Synthetic oligonucleotide
  Target: LAMA2; (+) strand; PAM type: NNNNGHTT; PAM sequence: GAGTGATT
tagaggtggggcttttgggg

SEQ ID NO: 47685 - DNA, 20 bp, Artificial Sequence
  Description of Artificial Sequence: Synthetic oligonucleotide
  Target: LAMA2; (+) strand; PAM type: NNNNGHTT; PAM sequence: ATGGGATT
gagggctctaatctccatga

SEQ ID NO: 47686 - DNA, 20 bp, Artificial Sequence
  Description of Artificial Sequence: Synthetic oligonucleotide
  Target: LAMA2; (+) strand; PAM type: NNNNGHTT; PAM sequence: CTTGGATT
aaatctgctgatgcctggat

SEQ ID NO: 47687 - DNA, 20 bp, Artificial Sequence
  Description of Artificial Sequence: Synthetic oligonucleotide
  Target: LAMA2; (+) strand; PAM type: NNNNGHTT; PAM sequence: TAATGCTT
cactgtgagcagtatatttt

SEQ ID NO: 47688 - DNA, 20 bp, Artificial Sequence
  Description of Artificial Sequence: Synthetic oligonucleotide
  Target: LAMA2; (+) strand; PAM type: NNNNGHTT; PAM sequence: CAAAGATT
ttccaaaactgaagaaaaaa

SEQ ID NO: 47689 - DNA, 20 bp, Artificial Sequence
  Description of Artificial Sequence: Synthetic oligonucleotide
  Target: LAMA2; (+) strand; PAM type: NNNNGHTT; PAM sequence: GATTGTTT
aaaactgaagaaaaaacaaa

SEQ ID NO: 47690 - DNA, 20 bp, Artificial Sequence
  Description of Artificial Sequence: Synthetic oligonucleotide
  Target: LAMA2; (+) strand; PAM type: NNNNGHTT; PAM sequence: CAATGCTT
tgtatcaaacaggtgaatag

SEQ ID NO: 47691 - DNA, 20 bp, Artificial Sequence
  Description of Artificial Sequence: Synthetic oligonucleotide
  Target: LAMA2; (+) strand; PAM type: NNNNGHTT; PAM sequence: TCATGTTT
gtcacaagacctctagccag

SEQ ID NO: 47692 - DNA, 20 bp, Artificial Sequence
  Description of Artificial Sequence: Synthetic oligonucleotide
  Target: LAMA2; (+) strand; PAM type: NNNNGHTT; PAM sequence: TGAAGTTT
cctgtataaaattttccctc

SEQ ID NO: 47693 - DNA, 20 bp, Artificial Sequence
  Description of Artificial Sequence: Synthetic oligonucleotide
  Target: LAMA2; (+) strand; PAM type: NNNNGHTT; PAM sequence: AAAGGCTT
ggttgtaagaagagtataaa

SEQ ID NO: 47694 - DNA, 20 bp, Artificial Sequence
  Description of Artificial Sequence: Synthetic oligonucleotide
  Target: LAMA2; (+) strand; PAM type: NNNNGHTT; PAM sequence: GCTTGCTT
gtaagaagagtataaaaaag

SEQ ID NO: 47695 - DNA, 20 bp, Artificial Sequence
  Description of Artificial Sequence: Synthetic oligonucleotide
  Target: LAMA2; (+) strand; PAM type: NNNNGHTT; PAM sequence: AAGTGTTT
gaaaaccagcaccaatttga

SEQ ID NO: 47696 - DNA, 20 bp, Artificial Sequence
  Description of Artificial Sequence: Synthetic oligonucleotide
  Target: LAMA2; (+) strand; PAM type: NNNNGHTT; PAM sequence: CGTTGTTT
actctcaatgtaaaacttca

SEQ ID NO: 47697 - DNA, 20 bp, Artificial Sequence
  Description of Artificial Sequence: Synthetic oligonucleotide
  Target: LAMA2; (+) strand; PAM type: NNNNGHTT; PAM sequence: TGTAGCTT
taaaacttcacgttgttttc

SEQ ID NO: 47698 - DNA, 20 bp, Artificial Sequence
  Description of Artificial Sequence: Synthetic oligonucleotide
  Target: LAMA2; (+) strand; PAM type: NNNNGHTT; PAM sequence: AGTGGATT
gtggggaactatctgtatcc

SEQ ID NO: 47699 - DNA, 20 bp, Artificial Sequence
  Description of Artificial Sequence: Synthetic oligonucleotide
  Target: LAMA2; (+) strand; PAM type: NNNNGHTT; PAM sequence: TTTTGTTT
tgtcaattctaaacctggca

SEQ ID NO: 47700 - DNA, 20 bp, Artificial Sequence
  Description of Artificial Sequence: Synthetic oligonucleotide
  Target: LAMA2; (+) strand; PAM type: NNNNGHTT; PAM sequence: AACAGCTT
agctaaggagagagggctgc

SEQ ID NO: 47701 - DNA, 20 bp, Artificial Sequence
  Description of Artificial Sequence: Synthetic oligonucleotide
  Target: LAMA2; (+) strand; PAM type: NNNNGHTT; PAM sequence: GACAGCTT
cataaagaaccaatcctgct

SEQ ID NO: 47702 - DNA, 20 bp, Artificial Sequence
  Description of Artificial Sequence: Synthetic oligonucleotide
  Target: LAMA2; (+) strand; PAM type: NNNNGHTT; PAM sequence: CCTTGATT
aatacatgactttttttcct

SEQ ID NO: 47703 - DNA, 20 bp, Artificial Sequence
  Description of Artificial Sequence: Synthetic oligonucleotide
  Target: LAMA2; (+) strand; PAM type: NNNNGHTT; PAM sequence: ACCTGATT
attactcatataagcggatg

SEQ ID NO: 47704 - DNA, 20 bp, Artificial Sequence
  Description of Artificial Sequence: Synthetic oligonucleotide
  Target: LAMA2; (+) strand; PAM type: NNNNGHTT; PAM sequence: CTTTGATT
tctctcatttttgtggttac

SEQ ID NO: 47705 - DNA, 20 bp, Artificial Sequence
  Description of Artificial Sequence: Synthetic oligonucleotide
  Target: LAMA2; (+) strand; PAM type: NNNNGHTT; PAM sequence: TAGTGTTT
tttttgtggttacctttgat

SEQ ID NO: 47706 - DNA, 20 bp, Artificial Sequence
  Description of Artificial Sequence: Synthetic oligonucleotide
  Target: LAMA2; (+) strand; PAM type: NNNNGHTT; PAM sequence: ATGCGTTT
tgattagtgttttggtcttt

SEQ ID NO: 47707 - DNA, 20 bp, Artificial Sequence
  Description of Artificial Sequence: Synthetic oligonucleotide
  Target: LAMA2; (+) strand; PAM type: NNNNGHTT; PAM sequence: ACCTGATT
ggtctttatgcgtttcacag

SEQ ID NO: 47708 - DNA, 20 bp, Artificial Sequence
  Description of Artificial Sequence: Synthetic oligonucleotide
  Target: LAMA2; (+) strand; PAM type: NNNNGHTT; PAM sequence: CTCTGCTT
acctgattcaaatgctggat

SEQ ID NO: 47709 - DNA, 20 bp, Artificial Sequence
  Description of Artificial Sequence: Synthetic oligonucleotide
  Target: LAMA2; (+) strand; PAM type: NNNNGHTT; PAM sequence: ATTAGCTT
aaatgctggatctctgcttt

SEQ ID NO: 47710 - DNA, 20 bp, Artificial Sequence
  Description of Artificial Sequence: Synthetic oligonucleotide
  Target: LAMA2; (+) strand; PAM type: NNNNGHTT; PAM sequence: GCCAGATT
atatcccttaatctagttga

SEQ ID NO: 47711 - DNA, 20 bp, Artificial Sequence
  Description of Artificial Sequence: Synthetic oligonucleotide
  Target: LAMA2; (+) strand; PAM type: NNNNGHTT; PAM sequence: TGAGGCTT
gattctcattatctgcaaaa

SEQ ID NO: 47712 - DNA, 20 bp, Artificial Sequence
  Description of Artificial Sequence: Synthetic oligonucleotide
  Target: LAMA2; (+) strand; PAM type: NNNNGHTT; PAM sequence: AATTGCTT
gaagctgtccgataaatgcc

SEQ ID NO: 47713 - DNA, 20 bp, Artificial Sequence
  Description of Artificial Sequence: Synthetic oligonucleotide
  Target: LAMA2; (+) strand; PAM type: NNNNGHTT; PAM sequence: AGACGTTT
atcttccttatatcagtaaa

SEQ ID NO: 47714 - DNA, 20 bp, Artificial Sequence
  Description of Artificial Sequence: Synthetic oligonucleotide
  Target: LAMA2; (+) strand; PAM type: NNNNGHTT; PAM sequence: CGTAGATT
agagttaattttagcaagta

SEQ ID NO: 47715 - DNA, 20 bp, Artificial Sequence
  Description of Artificial Sequence: Synthetic oligonucleotide
  Target: LAMA2; (+) strand; PAM type: NNNNGHTT; PAM sequence: GGCAGCTT
gtagattatatgcctttaat

SEQ ID NO: 47716 - DNA, 20 bp, Artificial Sequence
  Description of Artificial Sequence: Synthetic oligonucleotide
  Target: LAMA2; (+) strand; PAM type: NNNNGHTT; PAM sequence: ACCAGATT
aaacataaataaatcagtta

SEQ ID NO: 47717 - DNA, 20 bp, Artificial Sequence
  Description of Artificial Sequence: Synthetic oligonucleotide
  Target: LAMA2; (+) strand; PAM type: NNNNGHTT; PAM sequence: GAGTGTTT
agatttgtgaaatacccgca

SEQ ID NO: 47718 - DNA, 20 bp, Artificial Sequence
  Description of Artificial Sequence: Synthetic oligonucleotide
  Target: LAMA2; (+) strand; PAM type: NNNNGHTT; PAM sequence: CATCGCTT
gccaaattagagctaacatg

SEQ ID NO: 47719 - DNA, 20 bp, Artificial Sequence
  Description of Artificial Sequence: Synthetic oligonucleotide
  Target: LAMA2; (+) strand; PAM type: NNNNGHTT; PAM sequence: CTCTGCTT
attacatgacaaatatctat

SEQ ID NO: 47720 - DNA, 20 bp, Artificial Sequence
  Description of Artificial Sequence: Synthetic oligonucleotide
  Target: LAMA2; (+) strand; PAM type: NNNNGHTT; PAM sequence: AAGGGATT
cactgacaacctggcagtga

SEQ ID NO: 47721 - DNA, 20 bp, Artificial Sequence
  Description of Artificial Sequence: Synthetic oligonucleotide
  Target: LAMA2; (+) strand; PAM type: NNNNGHTT; PAM sequence: TGAGGTTT
acctggcagtgaaagggatt

SEQ ID NO: 47722 - DNA, 20 bp, Artificial Sequence
  Description of Artificial Sequence: Synthetic oligonucleotide
  Target: LAMA2; (+) strand; PAM type: NNNNGHTT; PAM sequence: AACAGATT
agcaaaggagagaggcctgg

SEQ ID NO: 47723 - DNA, 20 bp, Artificial Sequence
  Description of Artificial Sequence: Synthetic oligonucleotide
  Target: LAMA2; (+) strand; PAM type: NNNNGHTT; PAM sequence: CCTTGATT
gggaactaaccctgccgata

SEQ ID NO: 47724 - DNA, 20 bp, Artificial Sequence
  Description of Artificial Sequence: Synthetic oligonucleotide
  Target: LAMA2; (+) strand; PAM type: NNNNGHTT; PAM sequence: AGCAGTTT
cagtccaacagaaatgaatg

SEQ ID NO: 47725 - DNA, 20 bp, Artificial Sequence
  Description of Artificial Sequence: Synthetic oligonucleotide
  Target: LAMA2; (+) strand; PAM type: NNNNGHTT; PAM sequence: TGTGGCTT
tgaataacacatgccattcc

SEQ ID NO: 47726 - DNA, 20 bp, Artificial Sequence
  Description of Artificial Sequence: Synthetic oligonucleotide
  Target: LAMA2; (+) strand; PAM type: NNNNGHTT; PAM sequence: AATCGCTT
ttgagaggctgaggcaggag

SEQ ID NO: 47727 - DNA, 20 bp, Artificial Sequence
  Description of Artificial Sequence: Synthetic oligonucleotide
  Target: LAMA2; (+) strand; PAM type: NNNNGHTT; PAM sequence: AAGGGATT
tccagcctgggtgacagagc

SEQ ID NO: 47728 - DNA, 20 bp, Artificial Sequence
  Description of Artificial Sequence: Synthetic oligonucleotide
  Target: LAMA2; (+) strand; PAM type: NNNNGHTT; PAM sequence: AAGTGATT
tgtgaaatgacatatatgca

SEQ ID NO: 47729 - DNA, 20 bp, Artificial Sequence
  Description of Artificial Sequence: Synthetic oligonucleotide
  Target: LAMA2; (+) strand; PAM type: NNNNGHTT; PAM sequence: AAATGTTT
tgcaaagtgattcattccag

SEQ ID NO: 47730 - DNA, 20 bp, Artificial Sequence
  Description of Artificial Sequence: Synthetic oligonucleotide
  Target: LAMA2; (+) strand; PAM type: NNNNGHTT; PAM sequence: GACTGATT
aaagctgccaatcactgaga

SEQ ID NO: 47731 - DNA, 20 bp, Artificial Sequence
  Description of Artificial Sequence: Synthetic oligonucleotide
  Target: LAMA2; (+) strand; PAM type: NNNNGHTT; PAM sequence: ATGAGTTT
atcactgagagactgattaa

SEQ ID NO: 47732 - DNA, 20 bp, Artificial Sequence
  Description of Artificial Sequence: Synthetic oligonucleotide
  Target: LAMA2; (+) strand; PAM type: NNNNGHTT; PAM sequence: GGAAGATT
taaaattattaaaaaaggaa

SEQ ID NO: 47733 - DNA, 20 bp, Artificial Sequence
  Description of Artificial Sequence: Synthetic oligonucleotide
  Target: LAMA2; (+) strand; PAM type: NNNNGHTT; PAM sequence: CGGAGATT
aatcacctgaactccggagg

SEQ ID NO: 47734 - DNA, 20 bp, Artificial Sequence
  Description of Artificial Sequence: Synthetic oligonucleotide
  Target: LAMA2; (+) strand; PAM type: NNNNGHTT; PAM sequence: AGTAGTTT
gaaattaaacctaggaacaa

SEQ ID NO: 47735 - DNA, 20 bp, Artificial Sequence
  Description of Artificial Sequence: Synthetic oligonucleotide
  Target: LAMA2; (+) strand; PAM type: NNNNGHTT; PAM sequence: GTGAGTTT
catctagcatttgcatcaag

SEQ ID NO: 47736 - DNA, 20 bp, Artificial Sequence
  Description of Artificial Sequence: Synthetic oligonucleotide
  Target: LAMA2; (+) strand; PAM type: NNNNGHTT; PAM sequence: ACTTGATT
agatattttaactggaatag

SEQ ID NO: 47737 - DNA, 20 bp, Artificial Sequence
  Description of Artificial Sequence: Synthetic oligonucleotide
  Target: LAMA2; (+) strand; PAM type: NNNNGHTT; PAM sequence: TGCTGATT
ggaatagacttgatttttat

SEQ ID NO: 47738 - DNA, 20 bp, Artificial Sequence
  Description of Artificial Sequence: Synthetic oligonucleotide
  Target: LAMA2; (+) strand; PAM type: NNNNGHTT; PAM sequence: TATTGCTT
tgatttaatctattacaaac

SEQ ID NO: 47739 - DNA, 20 bp, Artificial Sequence
  Description of Artificial Sequence: Synthetic oligonucleotide
  Target: LAMA2; (+) strand; PAM type: NNNNGHTT; PAM sequence: TATTGCTT
ttctaagctgttgtaaaaat

SEQ ID NO: 47740 - DNA, 20 bp, Artificial Sequence
  Description of Artificial Sequence: Synthetic oligonucleotide
  Target: LAMA2; (+) strand; PAM type: NNNNGHTT; PAM sequence: AATTGTTT
ccccaatcctatctgctaaa

SEQ ID NO: 47741 - DNA, 20 bp, Artificial Sequence
  Description of Artificial Sequence: Synthetic oligonucleotide
  Target: LAMA2; (+) strand; PAM type: NNNNGHTT; PAM sequence: GCATGTTT
tatctgctaaaaattgtttg

SEQ ID NO: 47742 - DNA, 20 bp, Artificial Sequence
  Description of Artificial Sequence: Synthetic oligonucleotide
  Target: LAMA2; (+) strand; PAM type: NNNNGHTT; PAM sequence: CAAGGATT
ttggcatgtttaattgatca

SEQ ID NO: 47743 - DNA, 20 bp, Artificial Sequence
  Description of Artificial Sequence: Synthetic oligonucleotide
  Target: LAMA2; (+) strand; PAM type: NNNNGHTT; PAM sequence: TAAAGCTT
cagggcatgttgaggaaaca

SEQ ID NO: 47744 - DNA, 20 bp, Artificial Sequence
  Description of Artificial Sequence: Synthetic oligonucleotide
  Target: LAMA2; (+) strand; PAM type: NNNNGHTT; PAM sequence: CTGAGATT
tccctctatattagctgtgt

SEQ ID NO: 47745 - DNA, 20 bp, Artificial Sequence
  Description of Artificial Sequence: Synthetic oligonucleotide
  Target: LAMA2; (+) strand; PAM type: NNNNGHTT; PAM sequence: GGTAGTTT
atgtgatgaattattaaaca

SEQ ID NO: 47746 - DNA, 20 bp, Artificial Sequence
  Description of Artificial Sequence: Synthetic oligonucleotide
  Target: LAMA2; (+) strand; PAM type: NNNNGHTT; PAM sequence: GGGTGATT
tattaaacaggtagtttgtt

SEQ ID NO: 47747 - DNA, 20 bp, Artificial Sequence
  Description of Artificial Sequence: Synthetic oligonucleotide
  Target: LAMA2; (+) strand; PAM type: NNNNGHTT; PAM sequence: GAGTGCTT
attgaaaattacctgtgaaa

SEQ ID NO: 47748 - DNA, 20 bp, Artificial Sequence
  Description of Artificial Sequence: Synthetic oligonucleotide
  Target: LAMA2; (+) strand; PAM type: NNNNGHTT; PAM sequence: AATAGCTT
agttgtgacctatcaatggt

SEQ ID NO: 47749 - DNA, 20 bp, Artificial Sequence
  Description of Artificial Sequence: Synthetic oligonucleotide
  Target: LAMA2; (+) strand; PAM type: NNNNGHTT; PAM sequence: AGATGATT
gagcatgcatgactagacac

SEQ ID NO: 47750 - DNA, 20 bp, Artificial Sequence
  Description of Artificial Sequence: Synthetic oligonucleotide
  Target: LAMA2; (+) strand; PAM type: NNNNGHTT; PAM sequence: GATTGTTT
atgcatgactagacacagat

SEQ ID NO: 47751 - DNA, 20 bp, Artificial Sequence
  Description of Artificial Sequence: Synthetic oligonucleotide
  Target: LAMA2; (+) strand; PAM type: NNNNGHTT; PAM sequence: TGACGTTT
tatctgaaatagttaccata

SEQ ID NO: 47752 - DNA, 20 bp, Artificial Sequence
  Description of Artificial Sequence: Synthetic oligonucleotide
  Target: LAMA2; (+) strand; PAM type: NNNNGHTT; PAM sequence: ACTGGATT
ggctgtagcattctgaaata

SEQ ID NO: 47753 - DNA, 20 bp, Artificial Sequence
  Description of Artificial Sequence: Synthetic oligonucleotide
  Target: LAMA2; (+) strand; PAM type: NNNNGHTT; PAM sequence: TTTTGTTT
gtcttttttttttcttcact

SEQ ID NO: 47754 - DNA, 20 bp, Artificial Sequence
  Description of Artificial Sequence: Synthetic oligonucleotide
  Target: LAMA2; (+) strand; PAM type: NNNNGHTT; PAM sequence: TATTGTTT
ttttttcttcactttttgtt

SEQ ID NO: 47755 - DNA, 20 bp, Artificial Sequence
  Description of Artificial Sequence: Synthetic oligonucleotide
  Target: LAMA2; (+) strand; PAM type: NNNNGHTT; PAM sequence: CAATGTTT
cactttttgtttattgttta

SEQ ID NO: 47756 - DNA, 20 bp, Artificial Sequence
  Description of Artificial Sequence: Synthetic oligonucleotide
  Target: LAMA2; (+) strand; PAM type: NNNNGHTT; PAM sequence: TATTGTTT
gtaaaatttcagaataaaaa

SEQ ID NO: 47757 - DNA, 20 bp, Artificial Sequence
  Description of Artificial Sequence: Synthetic oligonucleotide
  Target: LAMA2; (+) strand; PAM type: NNNNGHTT; PAM sequence: AGATGCTT
aaaatattgttttatagtaa

SEQ ID NO: 47758 - DNA, 20 bp, Artificial Sequence
  Description of Artificial Sequence: Synthetic oligonucleotide
  Target: LAMA2; (+) strand; PAM type: NNNNGHTT; PAM sequence: GTATGTTT
tgcttgtaatatcaaaacaa

SEQ ID NO: 47759 - DNA, 20 bp, Artificial Sequence
  Description of Artificial Sequence: Synthetic oligonucleotide
  Target: LAMA2; (+) strand; PAM type: NNNNGHTT; PAM sequence: TAGAGATT
tgtgggttggaggagcccct

SEQ ID NO: 47760 - DNA, 20 bp, Artificial Sequence
  Description of Artificial Sequence: Synthetic oligonucleotide
  Target: LAMA2; (+) strand; PAM type: NNNNGHTT; PAM sequence: AGAAGTTT
agattcttttttctttgtag

SEQ ID NO: 47761 - DNA, 20 bp, Artificial Sequence
  Description of Artificial Sequence: Synthetic oligonucleotide
  Target: LAMA2; (+) strand; PAM type: NNNNGHTT; PAM sequence: AATAGTTT
gtaagaatcatacaagtgta

SEQ ID NO: 47762 - DNA, 20 bp, Artificial Sequence
  Description of Artificial Sequence: Synthetic oligonucleotide
  Target: LAMA2; (+) strand; PAM type: NNNNGHTT; PAM sequence: TTTTGTTT
aatcatacaagtgtaaatag

SEQ ID NO: 47763 - DNA, 20 bp, Artificial Sequence
  Description of Artificial Sequence: Synthetic oligonucleotide
  Target: LAMA2; (+) strand; PAM type: NNNNGHTT; PAM sequence: TTTTGTTT
tgtgctgctatattgataca

SEQ ID NO: 47764 - DNA, 20 bp, Artificial Sequence
  Description of Artificial Sequence: Synthetic oligonucleotide
  Target: LAMA2; (+) strand; PAM type: NNNNGHTT; PAM sequence: ACAGGCTT
agggtcaggggaagatattt

SEQ ID NO: 47765 - DNA, 20 bp, Artificial Sequence
  Description of Artificial Sequence: Synthetic oligonucleotide
  Target: LAMA2; (+) strand; PAM type: NNNNGHTT; PAM sequence: GGTTGATT
caggctttagggaaaaggct

SEQ ID NO: 47766 - DNA, 20 bp, Artificial Sequence
  Description of Artificial Sequence: Synthetic oligonucleotide
  Target: LAMA2; (+) strand; PAM type: NNNNGHTT; PAM sequence: TTGGGATT
cttgagtgagagggaactgg

SEQ ID NO: 47767 - DNA, 20 bp, Artificial Sequence
  Description of Artificial Sequence: Synthetic oligonucleotide
  Target: LAMA2; (+) strand; PAM type: NNNNGHTT; PAM sequence: CAGGGTTT
gggaactggttgggattctg

SEQ ID NO: 47768 - DNA, 20 bp, Artificial Sequence
  Description of Artificial Sequence: Synthetic oligonucleotide
  Target: LAMA2; (+) strand; PAM type: NNNNGHTT; PAM sequence: AATAGTTT
ttctgcagggtttattatat

SEQ ID NO: 47769 - DNA, 20 bp, Artificial Sequence
  Description of Artificial Sequence: Synthetic oligonucleotide
  Target: LAMA2; (+) strand; PAM type: NNNNGHTT; PAM sequence: TTTGGATT
agggtttattatataatagt

SEQ ID NO: 47770 - DNA, 20 bp, Artificial Sequence
  Description of Artificial Sequence: Synthetic oligonucleotide
  Target: LAMA2; (+) strand; PAM type: NNNNGHTT; PAM sequence: GTTAGCTT
tgttatgagtctataaggaa

SEQ ID NO: 47771 - DNA, 20 bp, Artificial Sequence
  Description of Artificial Sequence: Synthetic oligonucleotide
  Target: LAMA2; (+) strand; PAM type: NNNNGHTT; PAM sequence: CAAGGTTT
tagatggatcacagagcaga

SEQ ID NO: 47772 - DNA, 20 bp, Artificial Sequence
  Description of Artificial Sequence: Synthetic oligonucleotide
  Target: LAMA2; (+) strand; PAM type: NNNNGHTT; PAM sequence: TGGAGATT
cagagcagacaaggttttct

SEQ ID NO: 47773 - DNA, 20 bp, Artificial Sequence
  Description of Artificial Sequence: Synthetic oligonucleotide
  Target: LAMA2; (+) strand; PAM type: NNNNGHTT; PAM sequence: TTGTGTTT
tgtgttagcgttagaagaaa

SEQ ID NO: 47774 - DNA, 20 bp, Artificial Sequence
  Description of Artificial Sequence: Synthetic oligonucleotide
  Target: LAMA2; (+) strand; PAM type: NNNNGHTT; PAM sequence: GTTTGCTT
ttagcgttagaagaaattgt

SEQ ID NO: 47775 - DNA, 20 bp, Artificial Sequence
  Description of Artificial Sequence: Synthetic oligonucleotide
  Target: LAMA2; (+) strand; PAM type: NNNNGHTT; PAM sequence: CACTGTTT
atttacttaatcttctgtga

SEQ ID NO: 47776 - DNA, 20 bp, Artificial Sequence
  Description of Artificial Sequence: Synthetic oligonucleotide
  Target: LAMA2; (+) strand; PAM type: NNNNGHTT; PAM sequence: CTGGGCTT
gctattattattaactccaa

SEQ ID NO: 47777 - DNA, 20 bp, Artificial Sequence
  Description of Artificial Sequence: Synthetic oligonucleotide
  Target: LAMA2; (+) strand; PAM type: NNNNGHTT; PAM sequence: AATGGCTT
gatgatctggtaggacagta

SEQ ID NO: 47778 - DNA, 20 bp, Artificial Sequence
  Description of Artificial Sequence: Synthetic oligonucleotide
  Target: LAMA2; (+) strand; PAM type: NNNNGHTT; PAM sequence: TCCAGTTT
gacagtaaatggcttttctt

SEQ ID NO: 47779 - DNA, 20 bp, Artificial Sequence
  Description of Artificial Sequence: Synthetic oligonucleotide
  Target: LAMA2; (+) strand; PAM type: NNNNGHTT; PAM sequence: CTGGGTTT
tttccagttttcatctggga

SEQ ID NO: 47780 - DNA, 20 bp, Artificial Sequence
  Description of Artificial Sequence: Synthetic oligonucleotide
  Target: LAMA2; (+) strand; PAM type: NNNNGHTT; PAM sequence: AAAAGCTT
ctggaaataacccacagaca

SEQ ID NO: 47781 - DNA, 20 bp, Artificial Sequence
  Description of Artificial Sequence: Synthetic oligonucleotide
  Target: LAMA2; (+) strand; PAM type: NNNNGHTT; PAM sequence: GCTCGTTT
taggccatttactgccttaa

SEQ ID NO: 47782 - DNA, 20 bp, Artificial Sequence
  Description of Artificial Sequence: Synthetic oligonucleotide
  Target: LAMA2; (+) strand; PAM type: NNNNGHTT; PAM sequence: GATGGTTT
ataattttaaattaagatgt

SEQ ID NO: 47783 - DNA, 20 bp, Artificial Sequence
  Description of Artificial Sequence: Synthetic oligonucleotide
  Target: LAMA2; (+) strand; PAM type: NNNNGHTT; PAM sequence: AAATGCTT
atggttttatataaaagcaa

SEQ ID NO: 47784 - DNA, 20 bp, Artificial Sequence
  Description of Artificial Sequence: Synthetic oligonucleotide
  Target: LAMA2; (+) strand; PAM type: NNNNGHTT; PAM sequence: TTTTGCTT
ataaaagcaaaaatgcttta

SEQ ID NO: 47785 - DNA, 20 bp, Artificial Sequence
  Description of Artificial Sequence: Synthetic oligonucleotide
  Target: LAMA2; (+) strand; PAM type: NNNNGHTT; PAM sequence: CAGAGATT
taatgtgtctcacaatctag

SEQ ID NO: 47786 - DNA, 20 bp, Artificial Sequence
  Description of Artificial Sequence: Synthetic oligonucleotide
  Target: LAMA2; (+) strand; PAM type: NNNNGHTT; PAM sequence: AAGGGCTT
tggagggtgatggatagaat

SEQ ID NO: 47787 - DNA, 20 bp, Artificial Sequence
  Description of Artificial Sequence: Synthetic oligonucleotide
  Target: LAMA2; (+) strand; PAM type: NNNNGHTT; PAM sequence: ATGAGCTT
atttctgttgtacaaagctc

SEQ ID NO: 47788 - DNA, 20 bp, Artificial Sequence
  Description of Artificial Sequence: Synthetic oligonucleotide
  Target: LAMA2; (+) strand; PAM type: NNNNGHTT; PAM sequence: GACAGCTT
atgcagggaatgaaactcgt

SEQ ID NO: 47789 - DNA, 20 bp, Artificial Sequence
  Description of Artificial Sequence: Synthetic oligonucleotide
  Target: LAMA2; (+) strand; PAM type: NNNNGHTT; PAM sequence: TGAGGTTT
cccataaaactcagcaagga

SEQ ID NO: 47790 - DNA, 20 bp, Artificial Sequence
  Description of Artificial Sequence: Synthetic oligonucleotide
  Target: LAMA2; (+) strand; PAM type: NNNNGHTT; PAM sequence: CCCTGATT
gatgaggtttgactctgcat

SEQ ID NO: 47791 - DNA, 20 bp, Artificial Sequence
  Description of Artificial Sequence: Synthetic oligonucleotide
  Target: LAMA2; (+) strand; PAM type: NNNNGHTT; PAM sequence: GTATGTTT
tccctgatttatatagtaca

SEQ ID NO: 47792 - DNA, 20 bp, Artificial Sequence
  Description of Artificial Sequence: Synthetic oligonucleotide
  Target: LAMA2; (+) strand; PAM type: NNNNGHTT; PAM sequence: TCAGGCTT
aagtctctcaagtgcggtgc

SEQ ID NO: 47793 - DNA, 20 bp, Artificial Sequence
  Description of Artificial Sequence: Synthetic oligonucleotide
  Target: LAMA2; (+) strand; PAM type: NNNNGHTT; PAM sequence: AAATGTTT
tcatctggagtctttattta

SEQ ID NO: 47794 - DNA, 20 bp, Artificial Sequence
  Description of Artificial Sequence: Synthetic oligonucleotide
  Target: LAMA2; (+) strand; PAM type: NNNNGHTT; PAM sequence: TGGAGCTT
aatgacgtgaagccgggagg

SEQ ID NO: 47795 - DNA, 20 bp, Artificial Sequence
  Description of Artificial Sequence: Synthetic oligonucleotide
  Target: LAMA2; (+) strand; PAM type: NNNNGHTT; PAM sequence: TCTGGATT
tttttactattgacccttac

SEQ ID NO: 47796 - DNA, 20 bp, Artificial Sequence
  Description of Artificial Sequence: Synthetic oligonucleotide
  Target: LAMA2; (+) strand; PAM type: NNNNGHTT; PAM sequence: CTACGTTT
tccagaagatctggggaaat

SEQ ID NO: 47797 - DNA, 20 bp, Artificial Sequence
  Description of Artificial Sequence: Synthetic oligonucleotide
  Target: LAMA2; (+) strand; PAM type: NNNNGHTT; PAM sequence: AAGTGATT
acgtttttaatcagctcccc

SEQ ID NO: 47798 - DNA, 20 bp, Artificial Sequence
  Description of Artificial Sequence: Synthetic oligonucleotide
  Target: LAMA2; (+) strand; PAM type: NNNNGHTT; PAM sequence: TGATGATT
tgactacttttttaaattac

SEQ ID NO: 47799 - DNA, 20 bp, Artificial Sequence
  Description of Artificial Sequence: Synthetic oligonucleotide
  Target: LAMA2; (+) strand; PAM type: NNNNGHTT; PAM sequence: CAAGGCTT
ttccctagactttgactttc

SEQ ID NO: 47800 - DNA, 20 bp, Artificial Sequence
  Description of Artificial Sequence: Synthetic oligonucleotide
  Target: LAMA2; (+) strand; PAM type: NNNNGHTT; PAM sequence: GTATGCTT
aacaaacaaaaaaacctgca

SEQ ID NO: 47801 - DNA, 20 bp, Artificial Sequence
  Description of Artificial Sequence: Synthetic oligonucleotide
  Target: LAMA2; (+) strand; PAM type: NNNNGHTT; PAM sequence: CAGGGATT
gtatgcttttagtctgaatt

SEQ ID NO: 47802 - DNA, 20 bp, Artificial Sequence
  Description of Artificial Sequence: Synthetic oligonucleotide
  Target: LAMA2; (+) strand; PAM type: NNNNGHTT; PAM sequence: TGAGGATT
ggcagaaccagaatattgcg

SEQ ID NO: 47803 - DNA, 20 bp, Artificial Sequence
  Description of Artificial Sequence: Synthetic oligonucleotide
  Target: LAMA2; (+) strand; PAM type: NNNNGHTT; PAM sequence: GATAGCTT
aatattgcgtgaggattgaa

SEQ ID NO: 47804 - DNA, 20 bp, Artificial Sequence
  Description of Artificial Sequence: Synthetic oligonucleotide
  Target: LAMA2; (+) strand; PAM type: NNNNGHTT; PAM sequence: TTCAGATT
gcgtgaggattgaagatagc

SEQ ID NO: 47805 - DNA, 20 bp, Artificial Sequence
  Description of Artificial Sequence: Synthetic oligonucleotide
  Target: LAMA2; (+) strand; PAM type: NNNNGHTT; PAM sequence: AAGAGTTT
aagatagcttcagattctag

SEQ ID NO: 47806 - DNA, 20 bp, Artificial Sequence
  Description of Artificial Sequence: Synthetic oligonucleotide
  Target: LAMA2; (+) strand; PAM type: NNNNGHTT; PAM sequence: AACAGTTT
gctctttctgaatatgtgtt

SEQ ID NO: 47807 - DNA, 20 bp, Artificial Sequence
  Description of Artificial Sequence: Synthetic oligonucleotide
  Target: LAMA2; (+) strand; PAM type: NNNNGHTT; PAM sequence: CGCTGTTT
tgaatatgtgttaacagttt

SEQ ID NO: 47808 - DNA, 20 bp, Artificial Sequence
  Description of Artificial Sequence: Synthetic oligonucleotide
  Target: LAMA2; (+) strand; PAM type: NNNNGHTT; PAM sequence: ACCTGTTT
tataattttttagcaacaga

SEQ ID NO: 47809 - DNA, 20 bp, Artificial Sequence
  Description of Artificial Sequence: Synthetic oligonucleotide
  Target: LAMA2; (+) strand; PAM type: NNNNGHTT; PAM sequence: AAAGGATT
cacccaaaaacaaacaaaat

SEQ ID NO: 47810 - DNA, 20 bp, Artificial Sequence
  Description of Artificial Sequence: Synthetic oligonucleotide
  Target: LAMA2; (+) strand; PAM type: NNNNGHTT; PAM sequence: TGGTGCTT
gttcaagcagaaggtagggc

SEQ ID NO: 47811 - DNA, 20 bp, Artificial Sequence
  Description of Artificial Sequence: Synthetic oligonucleotide
  Target: LAMA2; (+) strand; PAM type: NNNNGHTT; PAM sequence: CCTGGTTT
ttgttacagtggccagtagg

SEQ ID NO: 47812 - DNA, 20 bp, Artificial Sequence
  Description of Artificial Sequence: Synthetic oligonucleotide
  Target: LAMA2; (+) strand; PAM type: NNNNGHTT; PAM sequence: TGTGGTTT
tatgtccccacggcctcatc

SEQ ID NO: 47813 - DNA, 20 bp, Artificial Sequence
  Description of Artificial Sequence: Synthetic oligonucleotide
  Target: LAMA2; (+) strand; PAM type: NNNNGHTT; PAM sequence: TGCAGATT
aggtgaattagaaggtctcc

SEQ ID NO: 47814 - DNA, 20 bp, Artificial Sequence
  Description of Artificial Sequence: Synthetic oligonucleotide
  Target: LAMA2; (+) strand; PAM type: NNNNGHTT; PAM sequence: GAATGATT
gtgtcagagcaaagcaacta

SEQ ID NO: 47815 - DNA, 20 bp, Artificial Sequence
  Description of Artificial Sequence: Synthetic oligonucleotide
  Target: LAMA2; (+) strand; PAM type: NNNNGHTT; PAM sequence: ATTTGATT
agaatctttataaaactcaa

SEQ ID NO: 47816 - DNA, 20 bp, Artificial Sequence
  Description of Artificial Sequence: Synthetic oligonucleotide
  Target: LAMA2; (+) strand; PAM type: NNNNGHTT; PAM sequence: CTCTGCTT
caaatttgattaccttagtc

SEQ ID NO: 47817 - DNA, 20 bp, Artificial Sequence
  Description of Artificial Sequence: Synthetic oligonucleotide
  Target: LAMA2; (+) strand; PAM type: NNNNGHTT; PAM sequence: TCATGCTT
ggtaagtgttcaatgctctc

SEQ ID NO: 47818 - DNA, 20 bp, Artificial Sequence
  Description of Artificial Sequence: Synthetic oligonucleotide
  Target: LAMA2; (+) strand; PAM type: NNNNGHTT; PAM sequence: ACGGGATT
tctcacaatgtcccttcagt

SEQ ID NO: 47819 - DNA, 20 bp, Artificial Sequence
  Description of Artificial Sequence: Synthetic oligonucleotide
  Target: LAMA2; (+) strand; PAM type: NNNNGHTT; PAM sequence: AAATGTTT
taagcattgaattctatagg

SEQ ID NO: 47820 - DNA, 20 bp, Artificial Sequence
  Description of Artificial Sequence: Synthetic oligonucleotide
  Target: LAMA2; (+) strand; PAM type: NNNNGHTT; PAM sequence: ACTGGATT
caaattcctggtgagtgaca

SEQ ID NO: 47821 - DNA, 20 bp, Artificial Sequence
  Description of Artificial Sequence: Synthetic oligonucleotide
  Target: LAMA2; (+) strand; PAM type: NNNNGHTT; PAM sequence: AGCAGATT
tcttctaacctctagaacct

SEQ ID NO: 47822 - DNA, 20 bp, Artificial Sequence
  Description of Artificial Sequence: Synthetic oligonucleotide
  Target: LAMA2; (+) strand; PAM type: NNNNGHTT; PAM sequence: GATTGCTT
ctaacctctagaacctagca

SEQ ID NO: 47823 - DNA, 20 bp, Artificial Sequence
  Description of Artificial Sequence: Synthetic oligonucleotide
  Target: LAMA2; (+) strand; PAM type: NNNNGHTT; PAM sequence: GGATGCTT
tctttgttgagtgaataaag

SEQ ID NO: 47824 - DNA, 20 bp, Artificial Sequence
  Description of Artificial Sequence: Synthetic oligonucleotide
  Target: LAMA2; (+) strand; PAM type: NNNNGHTT; PAM sequence: TTCTGTTT
tttttgtggacagcagttat

SEQ ID NO: 47825 - DNA, 20 bp, Artificial Sequence
  Description of Artificial Sequence: Synthetic oligonucleotide
  Target: LAMA2; (+) strand; PAM type: NNNNGHTT; PAM sequence: GTTGGATT
atttgaaacttacaaaaagt

SEQ ID NO: 47826 - DNA, 20 bp, Artificial Sequence
  Description of Artificial Sequence: Synthetic oligonucleotide
  Target: LAMA2; (+) strand; PAM type: NNNNGHTT; PAM sequence: TCTGGATT
gatttaagttcctttgtctg

SEQ ID NO: 47827 - DNA, 20 bp, Artificial Sequence
  Description of Artificial Sequence: Synthetic oligonucleotide
  Target: LAMA2; (+) strand; PAM type: NNNNGHTT; PAM sequence: AAAAGATT
tggatttccgaaatattttt

SEQ ID NO: 47828 - DNA, 20 bp, Artificial Sequence
  Description of Artificial Sequence: Synthetic oligonucleotide
  Target: LAMA2; (+) strand; PAM type: NNNNGHTT; PAM sequence: AGATGTTT
ctgtggatcaggaggaagtt

SEQ ID NO: 47829 - DNA, 20 bp, Artificial Sequence
  Description of Artificial Sequence: Synthetic oligonucleotide
  Target: LAMA2; (+) strand; PAM type: NNNNGHTT; PAM sequence: ATGTGTTT
cttgagcaggactctattaa

SEQ ID NO: 47830 - DNA, 20 bp, Artificial Sequence
  Description of Artificial Sequence: Synthetic oligonucleotide
  Target: LAMA2; (+) strand; PAM type: NNNNGHTT; PAM sequence: GATGGTTT
attaaatgtgttttgtgtga

SEQ ID NO: 47831 - DNA, 20 bp, Artificial Sequence
  Description of Artificial Sequence: Synthetic oligonucleotide
  Target: LAMA2; (+) strand; PAM type: NNNNGHTT; PAM sequence: GGATGTTT
gtctcttttcctcttaaacc

SEQ ID NO: 47832 - DNA, 20 bp, Artificial Sequence
  Description of Artificial Sequence: Synthetic oligonucleotide
  Target: LAMA2; (+) strand; PAM type: NNNNGHTT; PAM sequence: ATCAGTTT
aaccggatgttttttttaaa

SEQ ID NO: 47833 - DNA, 20 bp, Artificial Sequence
  Description of Artificial Sequence: Synthetic oligonucleotide
  Target: LAMA2; (+) strand; PAM type: NNNNGHTT; PAM sequence: GAAAGATT
aatgtggaaactgagaccct

SEQ ID NO: 47834 - DNA, 20 bp, Artificial Sequence
  Description of Artificial Sequence: Synthetic oligonucleotide
  Target: LAMA2; (+) strand; PAM type: NNNNGHTT; PAM sequence: TACAGCTT
aagtcacttgaacaaagata

SEQ ID NO: 47835 - DNA, 20 bp, Artificial Sequence
  Description of Artificial Sequence: Synthetic oligonucleotide
  Target: LAMA2; (+) strand; PAM type: NNNNGHTT; PAM sequence: CTAGGTTT
ctccagagaccaggcagaca

SEQ ID NO: 47836 - DNA, 20 bp, Artificial Sequence
  Description of Artificial Sequence: Synthetic oligonucleotide
  Target: LAMA2; (+) strand; PAM type: NNNNGHTT; PAM sequence: TTATGATT
agaccaggcagacactaggt

SEQ ID NO: 47837 - DNA, 20 bp, Artificial Sequence
  Description of Artificial Sequence: Synthetic oligonucleotide
  Target: LAMA2; (+) strand; PAM type: NNNNGHTT; PAM sequence: ACTTGTTT
aggtgggttaaaatcaagcc

SEQ ID NO: 47838 - DNA, 20 bp, Artificial Sequence
  Description of Artificial Sequence: Synthetic oligonucleotide
  Target: LAMA2; (+) strand; PAM type: NNNNGHTT; PAM sequence: CATCGATT
tcaagccacttgttttcaaa

SEQ ID NO: 47839 - DNA, 20 bp, Artificial Sequence
  Description of Artificial Sequence: Synthetic oligonucleotide
  Target: LAMA2; (+) strand; PAM type: NNNNGHTT; PAM sequence: CTGAGTTT
aaattaaaaaattcacttaa

SEQ ID NO: 47840 - DNA, 20 bp, Artificial Sequence
  Description of Artificial Sequence: Synthetic oligonucleotide
  Target: LAMA2; (+) strand; PAM type: NNNNGHTT; PAM sequence: ATTTGCTT
aattcacttaactgagttta

SEQ ID NO: 47841 - DNA, 20 bp, Artificial Sequence
  Description of Artificial Sequence: Synthetic oligonucleotide
  Target: LAMA2; (+) strand; PAM type: NNNNGHTT; PAM sequence: TGTGGCTT
tacaataatatttggtcagc

SEQ ID NO: 47842 - DNA, 20 bp, Artificial Sequence
  Description of Artificial Sequence: Synthetic oligonucleotide
  Target: LAMA2; (+) strand; PAM type: NNNNGHTT; PAM sequence: AAATGTTT
tcagctgtggcttttaattt

SEQ ID NO: 47843 - DNA, 20 bp, Artificial Sequence
  Description of Artificial Sequence: Synthetic oligonucleotide
  Target: LAMA2; (+) strand; PAM type: NNNNGHTT; PAM sequence: GTTTGATT
ctgtggcttttaatttaaat

SEQ ID NO: 47844 - DNA, 20 bp, Artificial Sequence
  Description of Artificial Sequence: Synthetic oligonucleotide
  Target: LAMA2; (+) strand; PAM type: NNNNGHTT; PAM sequence: TGTTGTTT
aatttaaatgtttgatttaa

SEQ ID NO: 47845 - DNA, 20 bp, Artificial Sequence
  Description of Artificial Sequence: Synthetic oligonucleotide
  Target: LAMA2; (+) strand; PAM type: NNNNGHTT; PAM sequence: TTTAGTTT
aaatgtttgatttaatgttg

SEQ ID NO: 47846 - DNA, 20 bp, Artificial Sequence
  Description of Artificial Sequence: Synthetic oligonucleotide
  Target: LAMA2; (+) strand; PAM type: NNNNGHTT; PAM sequence: GCTGGATT
gatttaatgttgtttagttt

SEQ ID NO: 47847 - DNA, 20 bp, Artificial Sequence
  Description of Artificial Sequence: Synthetic oligonucleotide
  Target: LAMA2; (+) strand; PAM type: NNNNGHTT; PAM sequence: AAATGTTT
tacacattctaaagcatttc

SEQ ID NO: 47848 - DNA, 20 bp, Artificial Sequence
  Description of Artificial Sequence: Synthetic oligonucleotide
  Target: LAMA2; (+) strand; PAM type: NNNNGHTT; PAM sequence: CATTGCTT
cataccctgagcagacttga

SEQ ID NO: 47849 - DNA, 20 bp, Artificial Sequence
  Description of Artificial Sequence: Synthetic oligonucleotide
  Target: LAMA2; (+) strand; PAM type: NNNNGHTT; PAM sequence: CCATGATT
cattttcttcttcgctgtct

SEQ ID NO: 47850 - DNA, 20 bp, Artificial Sequence
  Description of Artificial Sequence: Synthetic oligonucleotide
  Target: LAMA2; (+) strand; PAM type: NNNNGHTT; PAM sequence: TTTTGCTT
cttcttcgctgtctccatga

SEQ ID NO: 47851 - DNA, 20 bp, Artificial Sequence
  Description of Artificial Sequence: Synthetic oligonucleotide
  Target: LAMA2; (+) strand; PAM type: NNNNGHTT; PAM sequence: GTTGGCTT
acaatgtgttgtcttttcag

SEQ ID NO: 47852 - DNA, 20 bp, Artificial Sequence
  Description of Artificial Sequence: Synthetic oligonucleotide
  Target: LAMA2; (+) strand; PAM type: NNNNGHTT; PAM sequence: TCCTGCTT
catttacctcctgaaaaaca

SEQ ID NO: 47853 - DNA, 20 bp, Artificial Sequence
  Description of Artificial Sequence: Synthetic oligonucleotide
  Target: LAMA2; (+) strand; PAM type: NNNNGHTT; PAM sequence: GCTAGTTT
ggatcatatggtcagagcat

SEQ ID NO: 47854 - DNA, 20 bp, Artificial Sequence
  Description of Artificial Sequence: Synthetic oligonucleotide
  Target: LAMA2; (+) strand; PAM type: NNNNGHTT; PAM sequence: TCCTGTTT
caccagcaatgaacaagagt

SEQ ID NO: 47855 - DNA, 20 bp, Artificial Sequence
  Description of Artificial Sequence: Synthetic oligonucleotide
  Target: LAMA2; (+) strand; PAM type: NNNNGHTT; PAM sequence: CAATGTTT
tcaccagcatttcatattgt

SEQ ID NO: 47856 - DNA, 20 bp, Artificial Sequence
  Description of Artificial Sequence: Synthetic oligonucleotide
  Target: LAMA2; (+) strand; PAM type: NNNNGHTT; PAM sequence: CGTTGTTT
atagatatgtagtggtatat

SEQ ID NO: 47857 - DNA, 20 bp, Artificial Sequence
  Description of Artificial Sequence: Synthetic oligonucleotide
  Target: LAMA2; (+) strand; PAM type: NNNNGHTT; PAM sequence: GCATGTTT
ctaatgatgtaagatgatga

SEQ ID NO: 47858 - DNA, 20 bp, Artificial Sequence
  Description of Artificial Sequence: Synthetic oligonucleotide
  Target: LAMA2; (+) strand; PAM type: NNNNGHTT; PAM sequence: ATGTGCTT
aagatgatgagcatgttttc

SEQ ID NO: 47859 - DNA, 20 bp, Artificial Sequence
  Description of Artificial Sequence: Synthetic oligonucleotide
  Target: LAMA2; (+) strand; PAM type: NNNNGHTT; PAM sequence: ATAAGCTT
tgcttattttccatctgtat

SEQ ID NO: 47860 - DNA, 20 bp, Artificial Sequence
  Description of Artificial Sequence: Synthetic oligonucleotide
  Target: LAMA2; (+) strand; PAM type: NNNNGHTT; PAM sequence: ATCTGTTT
tatataagctttgctgaggt

SEQ ID NO: 47861 - DNA, 20 bp, Artificial Sequence
  Description of Artificial Sequence: Synthetic oligonucleotide
  Target: LAMA2; (+) strand; PAM type: NNNNGHTT; PAM sequence: TTTAGATT
aagctttgctgaggtatctg

SEQ ID NO: 47862 - DNA, 20 bp, Artificial Sequence
  Description of Artificial Sequence: Synthetic oligonucleotide
  Target: LAMA2; (+) strand; PAM type: NNNNGHTT; PAM sequence: TTGAGATT
ttaaatttattttcttgttg

SEQ ID NO: 47863 - DNA, 20 bp, Artificial Sequence
  Description of Artificial Sequence: Synthetic oligonucleotide
  Target: LAMA2; (+) strand; PAM type: NNNNGHTT; PAM sequence: GTATGTTT
ttgagatttaagagttcttt

SEQ ID NO: 47864 - DNA, 20 bp, Artificial Sequence
  Description of Artificial Sequence: Synthetic oligonucleotide
  Target: LAMA2; (+) strand; PAM type: NNNNGHTT; PAM sequence: GGTAGTTT
gcaaatattttcttgcaaat

SEQ ID NO: 47865 - DNA, 20 bp, Artificial Sequence
  Description of Artificial Sequence: Synthetic oligonucleotide
  Target: LAMA2; (+) strand; PAM type: NNNNGHTT; PAM sequence: AGATGATT
cacagtgtctttcacagaga

SEQ ID NO: 47866 - DNA, 20 bp, Artificial Sequence
  Description of Artificial Sequence: Synthetic oligonucleotide
  Target: LAMA2; (+) strand; PAM type: NNNNGHTT; PAM sequence: TTTAGATT
ttactgcaaactcagggtta

SEQ ID NO: 47867 - DNA, 20 bp, Artificial Sequence
  Description of Artificial Sequence: Synthetic oligonucleotide
  Target: LAMA2; (+) strand; PAM type: NNNNGHTT; PAM sequence: CATAGTTT
ctatgttatcttccaagagt

SEQ ID NO: 47868 - DNA, 20 bp, Artificial Sequence
  Description of Artificial Sequence: Synthetic oligonucleotide
  Target: LAMA2; (+) strand; PAM type: NNNNGHTT; PAM sequence: TTTAGCTT
ttataaaggagagagttcta

SEQ ID NO: 47869 - DNA, 20 bp, Artificial Sequence
  Description of Artificial Sequence: Synthetic oligonucleotide
  Target: LAMA2; (+) strand; PAM type: NNNNGHTT; PAM sequence: GGGAGCTT
tctatttagcttgtgatcct

SEQ ID NO: 47870 - DNA, 20 bp, Artificial Sequence
  Description of Artificial Sequence: Synthetic oligonucleotide
  Target: LAMA2; (+) strand; PAM type: NNNNGHTT; PAM sequence: TATGGATT
cattaggaaccaaacctcac

SEQ ID NO: 47871 - DNA, 20 bp, Artificial Sequence
  Description of Artificial Sequence: Synthetic oligonucleotide
  Target: LAMA2; (+) strand; PAM type: NNNNGHTT; PAM sequence: TTTTGATT
gaaccaaacctcactatgga

SEQ ID NO: 47872 - DNA, 20 bp, Artificial Sequence
  Description of Artificial Sequence: Synthetic oligonucleotide
  Target: LAMA2; (+) strand; PAM type: NNNNGHTT; PAM sequence: TCCAGTTT
taaccataacacaaatgatg

SEQ ID NO: 47873 - DNA, 20 bp, Artificial Sequence
  Description of Artificial Sequence: Synthetic oligonucleotide
  Target: LAMA2; (+) strand; PAM type: NNNNGHTT; PAM sequence: TATAGTTT
tactatattgtcttgataac

SEQ ID NO: 47874 - DNA, 20 bp, Artificial Sequence
  Description of Artificial Sequence: Synthetic oligonucleotide
  Target: LAMA2; (+) strand; PAM type: NNNNGHTT; PAM sequence: GTTAGCTT
aagtcttgaagttgggtagt

SEQ ID NO: 47875 - DNA, 20 bp, Artificial Sequence
  Description of Artificial Sequence: Synthetic oligonucleotide
  Target: LAMA2; (+) strand; PAM type: NNNNGHTT; PAM sequence: ACAAGTTT
agttgggtagtgttagcttt

SEQ ID NO: 47876 - DNA, 20 bp, Artificial Sequence
  Description of Artificial Sequence: Synthetic oligonucleotide
  Target: LAMA2; (+) strand; PAM type: NNNNGHTT; PAM sequence: CTGGGATT
gatatccaaaaaataacttg

SEQ ID NO: 47877 - DNA, 20 bp, Artificial Sequence
  Description of Artificial Sequence: Synthetic oligonucleotide
  Target: LAMA2; (+) strand; PAM type: NNNNGHTT; PAM sequence: CTGGGATT
ataacttgctgggattttga

SEQ ID NO: 47878 - DNA, 20 bp, Artificial Sequence
  Description of Artificial Sequence: Synthetic oligonucleotide
  Target: LAMA2; (+) strand; PAM type: NNNNGHTT; PAM sequence: CTTTGATT
tctccatttatttaattttt

SEQ ID NO: 47879 - DNA, 20 bp, Artificial Sequence
  Description of Artificial Sequence: Synthetic oligonucleotide
  Target: LAMA2; (+) strand; PAM type: NNNNGHTT; PAM sequence: TGGAGTTT
ttttctttgatttctttcac

SEQ ID NO: 47880 - DNA, 20 bp, Artificial Sequence
  Description of Artificial Sequence: Synthetic oligonucleotide
  Target: LAMA2; (+) strand; PAM type: NNNNGHTT; PAM sequence: TATAGTTT
gatttctttcactggagttt

SEQ ID NO: 47881 - DNA, 20 bp, Artificial Sequence
  Description of Artificial Sequence: Synthetic oligonucleotide
  Target: LAMA2; (+) strand; PAM type: NNNNGHTT; PAM sequence: TATAGATT
gagttttatagttttcctca

SEQ ID NO: 47882 - DNA, 20 bp, Artificial Sequence
  Description of Artificial Sequence: Synthetic oligonucleotide
  Target: LAMA2; (+) strand; PAM type: NNNNGHTT; PAM sequence: GTTAGATT
atagattttgtacataattt

SEQ ID NO: 47883 - DNA, 20 bp, Artificial Sequence
  Description of Artificial Sequence: Synthetic oligonucleotide
  Target: LAMA2; (+) strand; PAM type: NNNNGHTT; PAM sequence: AAGTGTTT
aatttgttagatttatattg

SEQ ID NO: 47884 - DNA, 20 bp, Artificial Sequence
  Description of Artificial Sequence: Synthetic oligonucleotide
  Target: LAMA2; (+) strand; PAM type: NNNNGHTT; PAM sequence: TTGTGTTT
gcatgctagtataaatggtc

SEQ ID NO: 47885 - DNA, 20 bp, Artificial Sequence
  Description of Artificial Sequence: Synthetic oligonucleotide
  Target: LAMA2; (+) strand; PAM type: NNNNGHTT; PAM sequence: ATTGGCTT
tggaatcaagtgacttagaa

SEQ ID NO: 47886 - DNA, 20 bp, Artificial Sequence
  Description of Artificial Sequence: Synthetic oligonucleotide
  Target: LAMA2; (+) strand; PAM type: NNNNGHTT; PAM sequence: TAATGCTT
tgctacctacaaaatccttg

SEQ ID NO: 47887 - DNA, 20 bp, Artificial Sequence
  Description of Artificial Sequence: Synthetic oligonucleotide
  Target: LAMA2; (+) strand; PAM type: NNNNGHTT; PAM sequence: AAGAGATT
aaaagactaaataaggcctc

SEQ ID NO: 47888 - DNA, 20 bp, Artificial Sequence
  Description of Artificial Sequence: Synthetic oligonucleotide
  Target: LAMA2; (+) strand; PAM type: NNNNGHTT; PAM sequence: TGTTGATT
agattattcaaaatcagagt

SEQ ID NO: 47889 - DNA, 20 bp, Artificial Sequence
  Description of Artificial Sequence: Synthetic oligonucleotide
  Target: LAMA2; (+) strand; PAM type: NNNNGHTT; PAM sequence: CAAAGCTT
ctgcaattctaatcctatat

SEQ ID NO: 47890 - DNA, 20 bp, Artificial Sequence
  Description of Artificial Sequence: Synthetic oligonucleotide
  Target: LAMA2; (+) strand; PAM type: NNNNGHTT; PAM sequence: GGAGGTTT
ttccactcccccatatctaa

SEQ ID NO: 47891 - DNA, 20 bp, Artificial Sequence
  Description of Artificial Sequence: Synthetic oligonucleotide
  Target: LAMA2; (+) strand; PAM type: NNNNGHTT; PAM sequence: TACTGCTT
agttgaaaaataactgcaga

SEQ ID NO: 47892 - DNA, 20 bp, Artificial Sequence
  Description of Artificial Sequence: Synthetic oligonucleotide
  Target: LAMA2; (+) strand; PAM type: NNNNGHTT; PAM sequence: ATCTGATT
tttatttatcagtcaaataa

SEQ ID NO: 47893 - DNA, 20 bp, Artificial Sequence
  Description of Artificial Sequence: Synthetic oligonucleotide
  Target: LAMA2; (+) strand; PAM type: NNNNGHTT; PAM sequence: CAGAGATT
ttagtagctgtgagatctta

SEQ ID NO: 47894 - DNA, 20 bp, Artificial Sequence
  Description of Artificial Sequence: Synthetic oligonucleotide
  Target: LAMA2; (+) strand; PAM type: NNNNGHTT; PAM sequence: TCATGATT
aatactacttcttagagtta

SEQ ID NO: 47895 - DNA, 20 bp, Artificial Sequence
  Description of Artificial Sequence: Synthetic oligonucleotide
  Target: LAMA2; (+) strand; PAM type: NNNNGHTT; PAM sequence: CCTTGCTT
aactgaataattcttaaccc

SEQ ID NO: 47896 - DNA, 20 bp, Artificial Sequence
  Description of Artificial Sequence: Synthetic oligonucleotide
  Target: LAMA2; (+) strand; PAM type: NNNNGHTT; PAM sequence: ACTTGATT
tgacatttccagaaaataaa

SEQ ID NO: 47897 - DNA, 20 bp, Artificial Sequence
  Description of Artificial Sequence: Synthetic oligonucleotide
  Target: LAMA2; (+) strand; PAM type: NNNNGHTT; PAM sequence: CTAAGATT
aataaaacttgattgagtat

SEQ ID NO: 47898 - DNA, 20 bp, Artificial Sequence
  Description of Artificial Sequence: Synthetic oligonucleotide
  Target: LAMA2; (+) strand; PAM type: NNNNGHTT; PAM sequence: TTTGGTTT
ttgtcacttttcttctcttc

SEQ ID NO: 47899 - DNA, 20 bp, Artificial Sequence
  Description of Artificial Sequence: Synthetic oligonucleotide
  Target: LAMA2; (+) strand; PAM type: NNNNGHTT; PAM sequence: TTTCGTTT
gtcatgaatcagaaagagaa

SEQ ID NO: 47900 - DNA, 20 bp, Artificial Sequence
  Description of Artificial Sequence: Synthetic oligonucleotide
  Target: LAMA2; (+) strand; PAM type: NNNNGHTT; PAM sequence: CTCTGATT
aaacaactaggacatacaat

SEQ ID NO: 47901 - DNA, 20 bp, Artificial Sequence
  Description of Artificial Sequence: Synthetic oligonucleotide
  Target: LAMA2; (+) strand; PAM type: NNNNGHTT; PAM sequence: TGCAGATT
tgcagtctatagctacattc

SEQ ID NO: 47902 - DNA, 20 bp, Artificial Sequence
  Description of Artificial Sequence: Synthetic oligonucleotide
  Target: LAMA2; (+) strand; PAM type: NNNNGHTT; PAM sequence: TATTGTTT
cacagtagagatggaaactt

SEQ ID NO: 47903 - DNA, 20 bp, Artificial Sequence
  Description of Artificial Sequence: Synthetic oligonucleotide
  Target: LAMA2; (+) strand; PAM type: NNNNGHTT; PAM sequence: TTTTGTTT
attttatgaaaactgttctc

SEQ ID NO: 47904 - DNA, 20 bp, Artificial Sequence
  Description of Artificial Sequence: Synthetic oligonucleotide
  Target: LAMA2; (+) strand; PAM type: NNNNGHTT; PAM sequence: GTCAGTTT
ctgttctcttttgtttttat

SEQ ID NO: 47905 - DNA, 20 bp, Artificial Sequence
  Description of Artificial Sequence: Synthetic oligonucleotide
  Target: LAMA2; (+) strand; PAM type: NNNNGHTT; PAM sequence: GCTAGTTT
agttatctgaattgccttaa

SEQ ID NO: 47906 - DNA, 20 bp, Artificial Sequence
  Description of Artificial Sequence: Synthetic oligonucleotide
  Target: LAMA2; (+) strand; PAM type: NNNNGHTT; PAM sequence: AGTAGATT
cttaagctagttttgcaata

SEQ ID NO: 47907 - DNA, 20 bp, Artificial Sequence
  Description of Artificial Sequence: Synthetic oligonucleotide
  Target: LAMA2; (+) strand; PAM type: NNNNGHTT; PAM sequence: GCATGATT
tgtaatattctatttatgat

SEQ ID NO: 47908 - DNA, 20 bp, Artificial Sequence
  Description of Artificial Sequence: Synthetic oligonucleotide
  Target: LAMA2; (+) strand; PAM type: NNNNGHTT; PAM sequence: CCTTGTTT
tacctaaacatgtattaaga

SEQ ID NO: 47909 - DNA, 20 bp, Artificial Sequence
  Description of Artificial Sequence: Synthetic oligonucleotide
  Target: LAMA2; (+) strand; PAM type: NNNNGHTT; PAM sequence: AATCGCTT
ttgggaggctgaggcaggag

SEQ ID NO: 47910 - DNA, 20 bp, Artificial Sequence
  Description of Artificial Sequence: Synthetic oligonucleotide
  Target: LAMA2; (+) strand; PAM type: NNNNGHTT; PAM sequence: GTGTGTTT
aataagggtaaatacaagga

SEQ ID NO: 47911 - DNA, 20 bp, Artificial Sequence
  Description of Artificial Sequence: Synthetic oligonucleotide
  Target: LAMA2; (+) strand; PAM type: NNNNGHTT; PAM sequence: ACATGTTT
tcttccatatataagtccca

SEQ ID NO: 47912 - DNA, 20 bp, Artificial Sequence
  Description of Artificial Sequence: Synthetic oligonucleotide
  Target: LAMA2; (+) strand; PAM type: NNNNGHTT; PAM sequence: GTTAGATT
aattatatactctcctccag

SEQ ID NO: 47913 - DNA, 20 bp, Artificial Sequence
  Description of Artificial Sequence: Synthetic oligonucleotide
  Target: LAMA2; (+) strand; PAM type: NNNNGHTT; PAM sequence: TTGAGCTT
atactctcctccaggttaga

SEQ ID NO: 47914 - DNA, 20 bp, Artificial Sequence
  Description of Artificial Sequence: Synthetic oligonucleotide
  Target: LAMA2; (+) strand; PAM type: NNNNGHTT; PAM sequence: TAGTGCTT
aaggatatttctcctataaa

SEQ ID NO: 47915 - DNA, 20 bp, Artificial Sequence
  Description of Artificial Sequence: Synthetic oligonucleotide
  Target: LAMA2; (+) strand; PAM type: NNNNGHTT; PAM sequence: AGCTGTTT
tctgttcctattaaaacaag

SEQ ID NO: 47916 - DNA, 20 bp, Artificial Sequence
  Description of Artificial Sequence: Synthetic oligonucleotide
  Target: LAMA2; (+) strand; PAM type: NNNNGHTT; PAM sequence: ATAGGCTT
gacaaagacacctcctattt

SEQ ID NO: 47917 - DNA, 20 bp, Artificial Sequence
  Description of Artificial Sequence: Synthetic oligonucleotide
  Target: LAMA2; (+) strand; PAM type: NNNNGHTT; PAM sequence: TTCAGCTT
tatttataggcttgggacag

SEQ ID NO: 47918 - DNA, 20 bp, Artificial Sequence
  Description of Artificial Sequence: Synthetic oligonucleotide
  Target: LAMA2; (+) strand; PAM type: NNNNGHTT; PAM sequence: GAGAGTTT
ttcagcttctccaacttgaa

SEQ ID NO: 47919 - DNA, 20 bp, Artificial Sequence
  Description of Artificial Sequence: Synthetic oligonucleotide
  Target: LAMA2; (+) strand; PAM type: NNNNGHTT; PAM sequence: TGAAGTTT
tcaaatacaaatgggtcttg

SEQ ID NO: 47920 - DNA, 20 bp, Artificial Sequence
  Description of Artificial Sequence: Synthetic oligonucleotide
  Target: LAMA2; (+) strand; PAM type: NNNNGHTT; PAM sequence: AAATGTTT
gggtcttgtgaagtttcaaa

SEQ ID NO: 47921 - DNA, 20 bp, Artificial Sequence
  Description of Artificial Sequence: Synthetic oligonucleotide
  Target: LAMA2; (+) strand; PAM type: NNNNGHTT; PAM sequence: AATAGTTT
ataaacttgggcctgtagcc

SEQ ID NO: 47922 - DNA, 20 bp, Artificial Sequence
  Description of Artificial Sequence: Synthetic oligonucleotide
  Target: LAMA2; (+) strand; PAM type: NNNNGHTT; PAM sequence: CCAGGCTT
tgtagccaatagtttgtatt

SEQ ID NO: 47923 - DNA, 20 bp, Artificial Sequence
  Description of Artificial Sequence: Synthetic oligonucleotide
  Target: LAMA2; (+) strand; PAM type: NNNNGHTT; PAM sequence: ATCAGATT
aaaaattcaaatacagaaac

SEQ ID NO: 47924 - DNA, 20 bp, Artificial Sequence
  Description of Artificial Sequence: Synthetic oligonucleotide
  Target: LAMA2; (+) strand; PAM type: NNNNGHTT; PAM sequence: ACCAGCTT
ttaaatcagatgacattaag

SEQ ID NO: 47925 - DNA, 20 bp, Artificial Sequence
  Description of Artificial Sequence: Synthetic oligonucleotide
  Target: LAMA2; (+) strand; PAM type: NNNNGHTT; PAM sequence: AAATGATT
aacatctcagtgtattgtga

SEQ ID NO: 47926 - DNA, 20 bp, Artificial Sequence
  Description of Artificial Sequence: Synthetic oligonucleotide
  Target: LAMA2; (+) strand; PAM type: NNNNGHTT; PAM sequence: AAATGTTT
gagacataataactattcaa

SEQ ID NO: 47927 - DNA, 20 bp, Artificial Sequence
  Description of Artificial Sequence: Synthetic oligonucleotide
  Target: LAMA2; (+) strand; PAM type: NNNNGHTT; PAM sequence: CTTGGTTT
ttcaatgaaattatataaat

SEQ ID NO: 47928 - DNA, 20 bp, Artificial Sequence
  Description of Artificial Sequence: Synthetic oligonucleotide
  Target: LAMA2; (+) strand; PAM type: NNNNGHTT; PAM sequence: AAAAGCTT
attatataaatcttggttta

SEQ ID NO: 47929 - DNA, 20 bp, Artificial Sequence
  Description of Artificial Sequence: Synthetic oligonucleotide
  Target: LAMA2; (+) strand; PAM type: NNNNGHTT; PAM sequence: TTGTGCTT
aaattagagaacagctgaaa

SEQ ID NO: 47930 - DNA, 20 bp, Artificial Sequence
  Description of Artificial Sequence: Synthetic oligonucleotide
  Target: LAMA2; (+) strand; PAM type: NNNNGHTT; PAM sequence: TAATGTTT
aaaaaagtaatatggaaatg

SEQ ID NO: 47931 - DNA, 20 bp, Artificial Sequence
  Description of Artificial Sequence: Synthetic oligonucleotide
  Target: LAMA2; (+) strand; PAM type: NNNNGHTT; PAM sequence: AGATGCTT
aatgtaatgttttcatttgc

SEQ ID NO: 47932 - DNA, 20 bp, Artificial Sequence
  Description of Artificial Sequence: Synthetic oligonucleotide
  Target: LAMA2; (+) strand; PAM type: NNNNGHTT; PAM sequence: ACATGTTT
gcagatgcttaaatttagat

SEQ ID NO: 47933 - DNA, 20 bp, Artificial Sequence
  Description of Artificial Sequence: Synthetic oligonucleotide
  Target: LAMA2; (+) strand; PAM type: NNNNGHTT; PAM sequence: CCAAGATT
ataaaagtacccatgtatca

SEQ ID NO: 47934 - DNA, 20 bp, Artificial Sequence
  Description of Artificial Sequence: Synthetic oligonucleotide
  Target: LAMA2; (+) strand; PAM type: NNNNGHTT; PAM sequence: GCTGGTTT
taaagaatatctgacaattt

SEQ ID NO: 47935 - DNA, 20 bp, Artificial Sequence
  Description of Artificial Sequence: Synthetic oligonucleotide
  Target: LAMA2; (+) strand; PAM type: NNNNGHTT; PAM sequence: ATAAGTTT
ctgacaatttgctggtttgt

SEQ ID NO: 47936 - DNA, 20 bp, Artificial Sequence
  Description of Artificial Sequence: Synthetic oligonucleotide
  Target: LAMA2; (+) strand; PAM type: NNNNGHTT; PAM sequence: ACTAGTTT
cactgttggtgggactgtaa

SEQ ID NO: 47937 - DNA, 20 bp, Artificial Sequence
  Description of Artificial Sequence: Synthetic oligonucleotide
  Target: LAMA2; (+) strand; PAM type: NNNNGHTT; PAM sequence: TGGTGATT
aaccattgtggaagtcagtg

SEQ ID NO: 47938 - DNA, 20 bp, Artificial Sequence
  Description of Artificial Sequence: Synthetic oligonucleotide
  Target: LAMA2; (+) strand; PAM type: NNNNGHTT; PAM sequence: GTATGTTT
ctataaagacacatgcacac

SEQ ID NO: 47939 - DNA, 20 bp, Artificial Sequence
  Description of Artificial Sequence: Synthetic oligonucleotide
  Target: LAMA2; (+) strand; PAM type: NNNNGHTT; PAM sequence: ACTGGATT
caaatgtccaacaatgatag

SEQ ID NO: 47940 - DNA, 20 bp, Artificial Sequence
  Description of Artificial Sequence: Synthetic oligonucleotide
  Target: LAMA2; (+) strand; PAM type: NNNNGHTT; PAM sequence: TATGGATT
cattaaaaaaaagttcatcg

SEQ ID NO: 47941 - DNA, 20 bp, Artificial Sequence
  Description of Artificial Sequence: Synthetic oligonucleotide
  Target: LAMA2; (+) strand; PAM type: NNNNGHTT; PAM sequence: AGATGTTT
cctggtggagtaccagctca

SEQ ID NO: 47942 - DNA, 20 bp, Artificial Sequence
  Description of Artificial Sequence: Synthetic oligonucleotide
  Target: LAMA2; (+) strand; PAM type: NNNNGHTT; PAM sequence: GGAGGATT
aaatttgcatttaccaagtg

SEQ ID NO: 47943 - DNA, 20 bp, Artificial Sequence
  Description of Artificial Sequence: Synthetic oligonucleotide
  Target: LAMA2; (+) strand; PAM type: NNNNGHTT; PAM sequence: TGGTGATT
ccaagtgggaggatttatag

SEQ ID NO: 47944 - DNA, 20 bp, Artificial Sequence
  Description of Artificial Sequence: Synthetic oligonucleotide
  Target: LAMA2; (+) strand; PAM type: NNNNGHTT; PAM sequence: CATTGATT
tagtggtgatttcacttgtt

SEQ ID NO: 47945 - DNA, 20 bp, Artificial Sequence
  Description of Artificial Sequence: Synthetic oligonucleotide
  Target: LAMA2; (+) strand; PAM type: NNNNGHTT; PAM sequence: GTTGGCTT
tatattttttgcacaactaa

SEQ ID NO: 47946 - DNA, 20 bp, Artificial Sequence
  Description of Artificial Sequence: Synthetic oligonucleotide
  Target: LAMA2; (+) strand; PAM type: NNNNGHTT; PAM sequence: TTCAGATT
tttgcacaactaagttggct

SEQ ID NO: 47947 - DNA, 20 bp, Artificial Sequence
  Description of Artificial Sequence: Synthetic oligonucleotide
  Target: LAMA2; (+) strand; PAM type: NNNNGHTT; PAM sequence: TGAAGCTT
tgaccatatttttaactaaa

SEQ ID NO: 47948 - DNA, 20 bp, Artificial Sequence
  Description of Artificial Sequence: Synthetic oligonucleotide
  Target: LAMA2; (+) strand; PAM type: NNNNGHTT; PAM sequence: TAGTGCTT
agcaatgagcaaaaaaacac

SEQ ID NO: 47949 - DNA, 20 bp, Artificial Sequence
  Description of Artificial Sequence: Synthetic oligonucleotide
  Target: LAMA2; (+) strand; PAM type: NNNNGHTT; PAM sequence: AAGAGCTT
tgcttaccactgctcttggt

SEQ ID NO: 47950 - DNA, 20 bp, Artificial Sequence
  Description of Artificial Sequence: Synthetic oligonucleotide
  Target: LAMA2; (+) strand; PAM type: NNNNGHTT; PAM sequence: AGCAGTTT
ggaattaactgccttgcaaa

SEQ ID NO: 47951 - DNA, 20 bp, Artificial Sequence
  Description of Artificial Sequence: Synthetic oligonucleotide
  Target: LAMA2; (+) strand; PAM type: NNNNGHTT; PAM sequence: GAAAGTTT
attttgaaagcagttattca

SEQ ID NO: 47952 - DNA, 20 bp, Artificial Sequence
  Description of Artificial Sequence: Synthetic oligonucleotide
  Target: LAMA2; (+) strand; PAM type: NNNNGHTT; PAM sequence: ATATGATT
ttcagaaagtttctatcagt

SEQ ID NO: 47953 - DNA, 20 bp, Artificial Sequence
  Description of Artificial Sequence: Synthetic oligonucleotide
  Target: LAMA2; (+) strand; PAM type: NNNNGHTT; PAM sequence: TGAAGTTT
tttttaaagtcttctaaaca

SEQ ID NO: 47954 - DNA, 20 bp, Artificial Sequence
  Description of Artificial Sequence: Synthetic oligonucleotide
  Target: LAMA2; (+) strand; PAM type: NNNNGHTT; PAM sequence: GTGAGCTT
cttctaaacatgaagtttca

SEQ ID NO: 47955 - DNA, 20 bp, Artificial Sequence
  Description of Artificial Sequence: Synthetic oligonucleotide
  Target: LAMA2; (+) strand; PAM type: NNNNGHTT; PAM sequence: TGAAGCTT
catgaagtttcagtgagctt

SEQ ID NO: 47956 - DNA, 20 bp, Artificial Sequence
  Description of Artificial Sequence: Synthetic oligonucleotide
  Target: LAMA2; (+) strand; PAM type: NNNNGHTT; PAM sequence: AATAGTTT
ttaaaatgtcatactttcca

SEQ ID NO: 47957 - DNA, 20 bp, Artificial Sequence
  Description of Artificial Sequence: Synthetic oligonucleotide
  Target: LAMA2; (+) strand; PAM type: NNNNGHTT; PAM sequence: TAATGCTT
agtatgctcagccactgatg

SEQ ID NO: 47958 - DNA, 20 bp, Artificial Sequence
  Description of Artificial Sequence: Synthetic oligonucleotide
  Target: LAMA2; (+) strand; PAM type: NNNNGHTT; PAM sequence: AATCGCTT
tcgtgaggctgaggcaggag

SEQ ID NO: 47959 - DNA, 20 bp, Artificial Sequence
  Description of Artificial Sequence: Synthetic oligonucleotide
  Target: LAMA2; (+) strand; PAM type: NNNNGHTT; PAM sequence: CCAAGATT
taatatttttaattattaag

SEQ ID NO: 47960 - DNA, 20 bp, Artificial Sequence
  Description of Artificial Sequence: Synthetic oligonucleotide
  Target: LAMA2; (+) strand; PAM type: NNNNGHTT; PAM sequence: AATTGATT
tccaaaaataagaaaagcat

SEQ ID NO: 47961 - DNA, 20 bp, Artificial Sequence
  Description of Artificial Sequence: Synthetic oligonucleotide
  Target: LAMA2; (+) strand; PAM type: NNNNGHTT; PAM sequence: ACTGGTTT
agaaaagcataattgattat

SEQ ID NO: 47962 - DNA, 20 bp, Artificial Sequence
  Description of Artificial Sequence: Synthetic oligonucleotide
  Target: LAMA2; (+) strand; PAM type: NNNNGHTT; PAM sequence: GAAAGCTT
catttggaacatataattga

SEQ ID NO: 47963 - DNA, 20 bp, Artificial Sequence
  Description of Artificial Sequence: Synthetic oligonucleotide
  Target: LAMA2; (+) strand; PAM type: NNNNGHTT; PAM sequence: ACCAGATT
attgaaaagtatttgaatca

SEQ ID NO: 47964 - DNA, 20 bp, Artificial Sequence
  Description of Artificial Sequence: Synthetic oligonucleotide
  Target: LAMA2; (+) strand; PAM type: NNNNGHTT; PAM sequence: TAAAGTTT
aaccacttgacattatcttt

SEQ ID NO: 47965 - DNA, 20 bp, Artificial Sequence
  Description of Artificial Sequence: Synthetic oligonucleotide
  Target: LAMA2; (+) strand; PAM type: NNNNGHTT; PAM sequence: TACTGTTT
cataaaagtgttcataaaag

SEQ ID NO: 47966 - DNA, 20 bp, Artificial Sequence
  Description of Artificial Sequence: Synthetic oligonucleotide
  Target: LAMA2; (+) strand; PAM type: NNNNGHTT; PAM sequence: TGATGCTT
tacaggtatacgtgataata

SEQ ID NO: 47967 - DNA, 20 bp, Artificial Sequence
  Description of Artificial Sequence: Synthetic oligonucleotide
  Target: LAMA2; (+) strand; PAM type: NNNNGHTT; PAM sequence: TGAGGATT
gctgcagggtaacggggtgg

SEQ ID NO: 47968 - DNA, 20 bp, Artificial Sequence
  Description of Artificial Sequence: Synthetic oligonucleotide
  Target: LAMA2; (+) strand; PAM type: NNNNGHTT; PAM sequence: GTTGGCTT
tcaacttcttgggttgggta

SEQ ID NO: 47969 - DNA, 20 bp, Artificial Sequence
  Description of Artificial Sequence: Synthetic oligonucleotide
  Target: LAMA2; (+) strand; PAM type: NNNNGHTT; PAM sequence: TCACGATT
aatgaaaaaataaaatagag

SEQ ID NO: 47970 - DNA, 20 bp, Artificial Sequence
  Description of Artificial Sequence: Synthetic oligonucleotide
  Target: LAMA2; (+) strand; PAM type: NNNNGHTT; PAM sequence: CTTAGCTT
aaatggaattagtaggagta

SEQ ID NO: 47971 - DNA, 20 bp, Artificial Sequence
  Description of Artificial Sequence: Synthetic oligonucleotide
  Target: LAMA2; (+) strand; PAM type: NNNNGHTT; PAM sequence: GCAGGTTT
agggtacatgtgcacaatgt

SEQ ID NO: 47972 - DNA, 20 bp, Artificial Sequence
  Description of Artificial Sequence: Synthetic oligonucleotide
  Target: LAMA2; (+) strand; PAM type: NNNNGHTT; PAM sequence: AAGTGTTT
atgttccccttcctgtgtcc

SEQ ID NO: 47973 - DNA, 20 bp, Artificial Sequence
  Description of Artificial Sequence: Synthetic oligonucleotide
  Target: LAMA2; (+) strand; PAM type: NNNNGHTT; PAM sequence: CGATGTTT
cacctatgagtgagaatatg

SEQ ID NO: 47974 - DNA, 20 bp, Artificial Sequence
  Description of Artificial Sequence: Synthetic oligonucleotide
  Target: LAMA2; (+) strand; PAM type: NNNNGHTT; PAM sequence: TTTAGTTT
atgagtgagaatatgcgatg

SEQ ID NO: 47975 - DNA, 20 bp, Artificial Sequence
  Description of Artificial Sequence: Synthetic oligonucleotide
  Target: LAMA2; (+) strand; PAM type: NNNNGHTT; PAM sequence: GATAGTTT
gtttagtttgttgtccttgt

SEQ ID NO: 47976 - DNA, 20 bp, Artificial Sequence
  Description of Artificial Sequence: Synthetic oligonucleotide
  Target: LAMA2; (+) strand; PAM type: NNNNGHTT; PAM sequence: GATGGTTT
tgtgatagtttgctgagaat

SEQ ID NO: 47977 - DNA, 20 bp, Artificial Sequence
  Description of Artificial Sequence: Synthetic oligonucleotide
  Target: LAMA2; (+) strand; PAM type: NNNNGHTT; PAM sequence: TCTAGCTT
gtttgctgagaatgatggtt

SEQ ID NO: 47978 - DNA, 20 bp, Artificial Sequence
  Description of Artificial Sequence: Synthetic oligonucleotide
  Target: LAMA2; (+) strand; PAM type: NNNNGHTT; PAM sequence: GCATGATT
gtgcatgtgtctttatagca

SEQ ID NO: 47979 - DNA, 20 bp, Artificial Sequence
  Description of Artificial Sequence: Synthetic oligonucleotide
  Target: LAMA2; (+) strand; PAM type: NNNNGHTT; PAM sequence: ACTAGTTT
ctgtcttccacaatggttga

SEQ ID NO: 47980 - DNA, 20 bp, Artificial Sequence
  Description of Artificial Sequence: Synthetic oligonucleotide
  Target: LAMA2; (+) strand; PAM type: NNNNGHTT; PAM sequence: TGTTGTTT
tccacatcctctccagcacc

SEQ ID NO: 47981 - DNA, 20 bp, Artificial Sequence
  Description of Artificial Sequence: Synthetic oligonucleotide
  Target: LAMA2; (+) strand; PAM type: NNNNGHTT; PAM sequence: TGTGGTTT
ggtgtaggatggtatctcat

SEQ ID NO: 47982 - DNA, 20 bp, Artificial Sequence
  Description of Artificial Sequence: Synthetic oligonucleotide
  Target: LAMA2; (+) strand; PAM type: NNNNGHTT; PAM sequence: TTTTGATT
aggatggtatctcattgtgg

SEQ ID NO: 47983 - DNA, 20 bp, Artificial Sequence
  Description of Artificial Sequence: Synthetic oligonucleotide
  Target: LAMA2; (+) strand; PAM type: NNNNGHTT; PAM sequence: ATTTGTTT
tgcccaattttgatggggtt

SEQ ID NO: 47984 - DNA, 20 bp, Artificial Sequence
  Description of Artificial Sequence: Synthetic oligonucleotide
  Target: LAMA2; (+) strand; PAM type: NNNNGHTT; PAM sequence: GTAAGTTT
gggttatttgtttttttctt

SEQ ID NO: 47985 - DNA, 20 bp, Artificial Sequence
  Description of Artificial Sequence: Synthetic oligonucleotide
  Target: LAMA2; (+) strand; PAM type: NNNNGHTT; PAM sequence: GTTTGTTT
tatttgtttttttcttgtaa

SEQ ID NO: 47986 - DNA, 20 bp, Artificial Sequence
  Description of Artificial Sequence: Synthetic oligonucleotide
  Target: LAMA2; (+) strand; PAM type: NNNNGHTT; PAM sequence: TGTAGATT
gtaagtttgtttgagttctt

SEQ ID NO: 47987 - DNA, 20 bp, Artificial Sequence
  Description of Artificial Sequence: Synthetic oligonucleotide
  Target: LAMA2; (+) strand; PAM type: NNNNGHTT; PAM sequence: AGTAGATT
tattagccctttgtcagatg

SEQ ID NO: 47988 - DNA, 20 bp, Artificial Sequence
  Description of Artificial Sequence: Synthetic oligonucleotide
  Target: LAMA2; (+) strand; PAM type: NNNNGHTT; PAM sequence: GGTAGTTT
ggttgcctgttcactctgat

SEQ ID NO: 47989 - DNA, 20 bp, Artificial Sequence
  Description of Artificial Sequence: Synthetic oligonucleotide
  Target: LAMA2; (+) strand; PAM type: NNNNGHTT; PAM sequence: TTTAGTTT
cttttgctgtgcagaagctc

SEQ ID NO: 47990 - DNA, 20 bp, Artificial Sequence
  Description of Artificial Sequence: Synthetic oligonucleotide
  Target: LAMA2; (+) strand; PAM type: NNNNGHTT; PAM sequence: TTTGGCTT
attagatcccatttgtcaac

SEQ ID NO: 47991 - DNA, 20 bp, Artificial Sequence
  Description of Artificial Sequence: Synthetic oligonucleotide
  Target: LAMA2; (+) strand; PAM type: NNNNGHTT; PAM sequence: CCTTGCTT
tcaactttggcttttgttgc

SEQ ID NO: 47992 - DNA, 20 bp, Artificial Sequence
  Description of Artificial Sequence: Synthetic oligonucleotide
  Target: LAMA2; (+) strand; PAM type: NNNNGHTT; PAM sequence: TCGTGTTT
gcttttgttgcccttgcttt

SEQ ID NO: 47993 - DNA, 20 bp, Artificial Sequence
  Description of Artificial Sequence: Synthetic oligonucleotide
  Target: LAMA2; (+) strand; PAM type: NNNNGHTT; PAM sequence: CTAGGTTT
tatgtcctcaatggtattgc

SEQ ID NO: 47994 - DNA, 20 bp, Artificial Sequence
  Description of Artificial Sequence: Synthetic oligonucleotide
  Target: LAMA2; (+) strand; PAM type: NNNNGHTT; PAM sequence: TAGGGTTT
gtattgcctaggttttcttc

SEQ ID NO: 47995 - DNA, 20 bp, Artificial Sequence
  Description of Artificial Sequence: Synthetic oligonucleotide
  Target: LAMA2; (+) strand; PAM type: NNNNGHTT; PAM sequence: TATGGTTT
aggttttcttctagggtttt

SEQ ID NO: 47996 - DNA, 20 bp, Artificial Sequence
  Description of Artificial Sequence: Synthetic oligonucleotide
  Target: LAMA2; (+) strand; PAM type: NNNNGHTT; PAM sequence: TCCAGTTT
tataaggtgtaaggaaggga

SEQ ID NO: 47997 - DNA, 20 bp, Artificial Sequence
  Description of Artificial Sequence: Synthetic oligonucleotide
  Target: LAMA2; (+) strand; PAM type: NNNNGHTT; PAM sequence: TTCAGCTT
gtgtaaggaagggatccagt

SEQ ID NO: 47998 - DNA, 20 bp, Artificial Sequence
  Description of Artificial Sequence: Synthetic oligonucleotide
  Target: LAMA2; (+) strand; PAM type: NNNNGHTT; PAM sequence: GCCAGTTT
cagctttctacatatggcta

SEQ ID NO: 47999 - DNA, 20 bp, Artificial Sequence
  Description of Artificial Sequence: Synthetic oligonucleotide
  Target: LAMA2; (+) strand; PAM type: NNNNGHTT; PAM sequence: CATTGCTT
taaatagggaatccattccc

SEQ ID NO: 48000 - DNA, 20 bp, Artificial Sequence
  Description of Artificial Sequence: Synthetic oligonucleotide
  Target: LAMA2; (+) strand; PAM type: NNNNGHTT; PAM sequence: GCTTGTTT
tagggaatccattccccatt

SEQ ID NO: 48001 - DNA, 20 bp, Artificial Sequence
  Description of Artificial Sequence: Synthetic oligonucleotide
  Target: LAMA2; (+) strand; PAM type: NNNNGHTT; PAM sequence: TCAGGTTT
ttccccattgcttgtttttg

SEQ ID NO: 48002 - DNA, 20 bp, Artificial Sequence
  Description of Artificial Sequence: Synthetic oligonucleotide
  Target: LAMA2; (+) strand; PAM type: NNNNGHTT; PAM sequence: TGCTGTTT
ctcttttggtaccagtacca

SEQ ID NO: 48003 - DNA, 20 bp, Artificial Sequence
  Description of Artificial Sequence: Synthetic oligonucleotide
  Target: LAMA2; (+) strand; PAM type: NNNNGHTT; PAM sequence: TATAGTTT
tggttactgtagccttgtag

SEQ ID NO: 48004 - DNA, 20 bp, Artificial Sequence
  Description of Artificial Sequence: Synthetic oligonucleotide
  Target: LAMA2; (+) strand; PAM type: NNNNGHTT; PAM sequence: TCCAGCTT
aagtcaggtagcatgatgcc

SEQ ID NO: 48005 - DNA, 20 bp, Artificial Sequence
  Description of Artificial Sequence: Synthetic oligonucleotide
  Target: LAMA2; (+) strand; PAM type: NNNNGHTT; PAM sequence: TTTGGCTT
gatgcctccagctttgttct

SEQ ID NO: 48006 - DNA, 20 bp, Artificial Sequence
  Description of Artificial Sequence: Synthetic oligonucleotide
  Target: LAMA2; (+) strand; PAM type: NNNNGHTT; PAM sequence: TTAGGATT
tccagctttgttcttttggc

SEQ ID NO: 48007 - DNA, 20 bp, Artificial Sequence
  Description of Artificial Sequence: Synthetic oligonucleotide
  Target: LAMA2; (+) strand; PAM type: NNNNGHTT; PAM sequence: AGTAGTTT
tggttccatatgaactttaa

SEQ ID NO: 48008 - DNA, 20 bp, Artificial Sequence
  Description of Artificial Sequence: Synthetic oligonucleotide
  Target: LAMA2; (+) strand; PAM type: NNNNGHTT; PAM sequence: GGTAGCTT
attctgtgaagaaagtcact

SEQ ID NO: 48009 - DNA, 20 bp, Artificial Sequence
  Description of Artificial Sequence: Synthetic oligonucleotide
  Target: LAMA2; (+) strand; PAM type: NNNNGHTT; PAM sequence: TATTGATT
cagtatggccattttcacga

SEQ ID NO: 48010 - DNA, 20 bp, Artificial Sequence
  Description of Artificial Sequence: Synthetic oligonucleotide
  Target: LAMA2; (+) strand; PAM type: NNNNGHTT; PAM sequence: ATTTGTTT
taagcatggaatgttcttcc

SEQ ID NO: 48011 - DNA, 20 bp, Artificial Sequence
  Description of Artificial Sequence: Synthetic oligonucleotide
  Target: LAMA2; (+) strand; PAM type: NNNNGHTT; PAM sequence: GTTGGATT
gtccttcacatcccttgtaa

SEQ ID NO: 48012 - DNA, 20 bp, Artificial Sequence
  Description of Artificial Sequence: Synthetic oligonucleotide
  Target: LAMA2; (+) strand; PAM type: NNNNGHTT; PAM sequence: TCATGATT
aattgtgaataggagttcac

SEQ ID NO: 48013 - DNA, 20 bp, Artificial Sequence
  Description of Artificial Sequence: Synthetic oligonucleotide
  Target: LAMA2; (+) strand; PAM type: NNNNGHTT; PAM sequence: CTCTGATT
agttcactcatgatttggct

SEQ ID NO: 48014 - DNA, 20 bp, Artificial Sequence
  Description of Artificial Sequence: Synthetic oligonucleotide
  Target: LAMA2; (+) strand; PAM type: NNNNGHTT; PAM sequence: GAATGCTT
tgtctgttgttagtgtataa

SEQ ID NO: 48015 - DNA, 20 bp, Artificial Sequence
  Description of Artificial Sequence: Synthetic oligonucleotide
  Target: LAMA2; (+) strand; PAM type: NNNNGHTT; PAM sequence: TTGTGATT
ttgttagtgtataagaatgc

SEQ ID NO: 48016 - DNA, 20 bp, Artificial Sequence
  Description of Artificial Sequence: Synthetic oligonucleotide
  Target: LAMA2; (+) strand; PAM type: NNNNGHTT; PAM sequence: CATTGATT
gaatgcttgtgatttttcta

SEQ ID NO: 48017 - DNA, 20 bp, Artificial Sequence
  Description of Artificial Sequence: Synthetic oligonucleotide
  Target: LAMA2; (+) strand; PAM type: NNNNGHTT; PAM sequence: AGTTGCTT
gtatcctgagactttggtga

SEQ ID NO: 48018 - DNA, 20 bp, Artificial Sequence
  Description of Artificial Sequence: Synthetic oligonucleotide
  Target: LAMA2; (+) strand; PAM type: NNNNGHTT; PAM sequence: ATCAGCTT
agactttggtgaagttgctt

SEQ ID NO: 48019 - DNA, 20 bp, Artificial Sequence
  Description of Artificial Sequence: Synthetic oligonucleotide
  Target: LAMA2; (+) strand; PAM type: NNNNGHTT; PAM sequence: AGGAGATT
tgaagttgcttatcagcttt

SEQ ID NO: 48020 - DNA, 20 bp, Artificial Sequence
  Description of Artificial Sequence: Synthetic oligonucleotide
  Target: LAMA2; (+) strand; PAM type: NNNNGHTT; PAM sequence: TGGGGTTT
gagattttgggctgagacaa

SEQ ID NO: 48021 - DNA, 20 bp, Artificial Sequence
  Description of Artificial Sequence: Synthetic oligonucleotide
  Target: LAMA2; (+) strand; PAM type: NNNNGHTT; PAM sequence: GCCTGATT
acccttcattactttctcct

SEQ ID NO: 48022 - DNA, 20 bp, Artificial Sequence
  Description of Artificial Sequence: Synthetic oligonucleotide
  Target: LAMA2; (+) strand; PAM type: NNNNGHTT; PAM sequence: GCCAGTTT
agagggcatccctgtcttgt

SEQ ID NO: 48023 - DNA, 20 bp, Artificial Sequence
  Description of Artificial Sequence: Synthetic oligonucleotide
  Target: LAMA2; (+) strand; PAM type: NNNNGHTT; PAM sequence: GAATGCTT
cttgtgccagttttcaaagg

SEQ ID NO: 48024 - DNA, 20 bp, Artificial Sequence
  Description of Artificial Sequence: Synthetic oligonucleotide
  Target: LAMA2; (+) strand; PAM type: NNNNGHTT; PAM sequence: TCCAGTTT
cagttttcaaagggaatgct

SEQ ID NO: 48025 - DNA, 20 bp, Artificial Sequence
  Description of Artificial Sequence: Synthetic oligonucleotide
  Target: LAMA2; (+) strand; PAM type: NNNNGHTT; PAM sequence: GTGGGTTT
cattcagtatgatattggct

SEQ ID NO: 48026 - DNA, 20 bp, Artificial Sequence
  Description of Artificial Sequence: Synthetic oligonucleotide
  Target: LAMA2; (+) strand; PAM type: NNNNGHTT; PAM sequence: GAGAGTTT
ccatcaatacctaatttatt

SEQ ID NO: 48027 - DNA, 20 bp, Artificial Sequence
  Description of Artificial Sequence: Synthetic oligonucleotide
  Target: LAMA2; (+) strand; PAM type: NNNNGHTT; PAM sequence: TGTGGTTT
tgcatttattgagataatca

SEQ ID NO: 48028 - DNA, 20 bp, Artificial Sequence
  Description of Artificial Sequence: Synthetic oligonucleotide
  Target: LAMA2; (+) strand; PAM type: NNNNGHTT; PAM sequence: TTTTGTTT
tattgagataatcatgtggt

SEQ ID NO: 48029 - DNA, 20 bp, Artificial Sequence
  Description of Artificial Sequence: Synthetic oligonucleotide
  Target: LAMA2; (+) strand; PAM type: NNNNGHTT; PAM sequence: GCTGGATT
catgtggtttttgtttatat

SEQ ID NO: 48030 - DNA, 20 bp, Artificial Sequence
  Description of Artificial Sequence: Synthetic oligonucleotide
  Target: LAMA2; (+) strand; PAM type: NNNNGHTT; PAM sequence: TTACGTTT
gtttttgtttatatgctgga

SEQ ID NO: 48031 - DNA, 20 bp, Artificial Sequence
  Description of Artificial Sequence: Synthetic oligonucleotide
  Target: LAMA2; (+) strand; PAM type: NNNNGHTT; PAM sequence: TATTGATT
tttatatgctggattacgtt

SEQ ID NO: 48032 - DNA, 20 bp, Artificial Sequence
  Description of Artificial Sequence: Synthetic oligonucleotide
  Target: LAMA2; (+) strand; PAM type: NNNNGHTT; PAM sequence: ATAAGCTT
agcccacttgatcgtggtgg

SEQ ID NO: 48033 - DNA, 20 bp, Artificial Sequence
  Description of Artificial Sequence: Synthetic oligonucleotide
  Target: LAMA2; (+) strand; PAM type: NNNNGHTT; PAM sequence: TTCAGTTT
ctttttgatgtgctgctgca

SEQ ID NO: 48034 - DNA, 20 bp, Artificial Sequence
  Description of Artificial Sequence: Synthetic oligonucleotide
  Target: LAMA2; (+) strand; PAM type: NNNNGHTT; PAM sequence: TGAGGATT
tcagtttgccattattttat

SEQ ID NO: 48035 - DNA, 20 bp, Artificial Sequence
  Description of Artificial Sequence: Synthetic oligonucleotide
  Target: LAMA2; (+) strand; PAM type: NNNNGHTT; PAM sequence: CCAGGCTT
tcttttttgttgtgtctctg

SEQ ID NO: 48036 - DNA, 20 bp, Artificial Sequence
  Description of Artificial Sequence: Synthetic oligonucleotide
  Target: LAMA2; (+) strand; PAM type: NNNNGHTT; PAM sequence: AGAGGATT
ggcctcatcaaatgagttag

SEQ ID NO: 48037 - DNA, 20 bp, Artificial Sequence
  Description of Artificial Sequence: Synthetic oligonucleotide
  Target: LAMA2; (+) strand; PAM type: NNNNGHTT; PAM sequence: TATTGATT
gagaggattccctctttttc

SEQ ID NO: 48038 - DNA, 20 bp, Artificial Sequence
  Description of Artificial Sequence: Synthetic oligonucleotide
  Target: LAMA2; (+) strand; PAM type: NNNNGHTT; PAM sequence: AATAGTTT
cctctttttctattgattgg

SEQ ID NO: 48039 - DNA, 20 bp, Artificial Sequence
  Description of Artificial Sequence: Synthetic oligonucleotide
  Target: LAMA2; (+) strand; PAM type: NNNNGHTT; PAM sequence: CAGAGATT
gagcctgttattggtctatt

SEQ ID NO: 48040 - DNA, 20 bp, Artificial Sequence
  Description of Artificial Sequence: Synthetic oligonucleotide
  Target: LAMA2; (+) strand; PAM type: NNNNGHTT; PAM sequence: CCTTGTTT
attcagagattcaacttctt

SEQ ID NO: 48041 - DNA, 20 bp, Artificial Sequence
  Description of Artificial Sequence: Synthetic oligonucleotide
  Target: LAMA2; (+) strand; PAM type: NNNNGHTT; PAM sequence: TCAAGATT
ccaggaatctatccatttct

SEQ ID NO: 48042 - DNA, 20 bp, Artificial Sequence
  Description of Artificial Sequence: Synthetic oligonucleotide
  Target: LAMA2; (+) strand; PAM type: NNNNGHTT; PAM sequence: TCTAGTTT
tatccatttcttcaagattt

SEQ ID NO: 48043 - DNA, 20 bp, Artificial Sequence
  Description of Artificial Sequence: Synthetic oligonucleotide
  Target: LAMA2; (+) strand; PAM type: NNNNGHTT; PAM sequence: AGGTGTTT
tttctagtttatttgcatag

SEQ ID NO: 48044 - DNA, 20 bp, Artificial Sequence
  Description of Artificial Sequence: Synthetic oligonucleotide
  Target: LAMA2; (+) strand; PAM type: NNNNGHTT; PAM sequence: GGTAGTTT
tgtttatagtattctctgat

SEQ ID NO: 48045 - DNA, 20 bp, Artificial Sequence
  Description of Artificial Sequence: Synthetic oligonucleotide
  Target: LAMA2; (+) strand; PAM type: NNNNGHTT; PAM sequence: ATTTGATT
tatcattttttattgcatct

SEQ ID NO: 48046 - DNA, 20 bp, Artificial Sequence
  Description of Artificial Sequence: Synthetic oligonucleotide
  Target: LAMA2; (+) strand; PAM type: NNNNGHTT; PAM sequence: CCTGGATT
atcttttcaaaaaatcatct

SEQ ID NO: 48047 - DNA, 20 bp, Artificial Sequence
  Description of Artificial Sequence: Synthetic oligonucleotide
  Target: LAMA2; (+) strand; PAM type: NNNNGHTT; PAM sequence: CACTGATT
aaaaaatcatctcctggatt

SEQ ID NO: 48048 - DNA, 20 bp, Artificial Sequence
  Description of Artificial Sequence: Synthetic oligonucleotide
  Target: LAMA2; (+) strand; PAM type: NNNNGHTT; PAM sequence: AAGGGTTT
ctggattcactgatttgttg

SEQ ID NO: 48049 - DNA, 20 bp, Artificial Sequence
  Description of Artificial Sequence: Synthetic oligonucleotide
  Target: LAMA2; (+) strand; PAM type: NNNNGHTT; PAM sequence: GCTAGCTT
ttagttatttcttgccttct

SEQ ID NO: 48050 - DNA, 20 bp, Artificial Sequence
  Description of Artificial Sequence: Synthetic oligonucleotide
  Target: LAMA2; (+) strand; PAM type: NNNNGHTT; PAM sequence: GTGTGTTT
tgccttctgctagcttttga

SEQ ID NO: 48051 - DNA, 20 bp, Artificial Sequence
  Description of Artificial Sequence: Synthetic oligonucleotide
  Target: LAMA2; (+) strand; PAM type: NNNNGHTT; PAM sequence: TCTTGCTT
tagcttttgagtgtgtttgc

SEQ ID NO: 48052 - DNA, 20 bp, Artificial Sequence
  Description of Artificial Sequence: Synthetic oligonucleotide
  Target: LAMA2; (+) strand; PAM type: NNNNGHTT; PAM sequence: TCCTGCTT
gggtgtcaattttggatctt

SEQ ID NO: 48053 - DNA, 20 bp, Artificial Sequence
  Description of Artificial Sequence: Synthetic oligonucleotide
  Target: LAMA2; (+) strand; PAM type: NNNNGHTT; PAM sequence: CACTGCTT
gctataaatttccctctaca

SEQ ID NO: 48054 - DNA, 20 bp, Artificial Sequence
  Description of Artificial Sequence: Synthetic oligonucleotide
  Target: LAMA2; (+) strand; PAM type: NNNNGHTT; PAM sequence: CAGAGATT
acactgctttaaatgtgtcc

SEQ ID NO: 48055 - DNA, 20 bp, Artificial Sequence
  Description of Artificial Sequence: Synthetic oligonucleotide
  Target: LAMA2; (+) strand; PAM type: NNNNGHTT; PAM sequence: ATTAGTTT
tatgttgtatctttgttctc

SEQ ID NO: 48056 - DNA, 20 bp, Artificial Sequence
  Description of Artificial Sequence: Synthetic oligonucleotide
  Target: LAMA2; (+) strand; PAM type: NNNNGHTT; PAM sequence: TTCAGTTT
agtcattcaggaacaggttg

SEQ ID NO: 48057 - DNA, 20 bp, Artificial Sequence
  Description of Artificial Sequence: Synthetic oligonucleotide
  Target: LAMA2; (+) strand; PAM type: NNNNGHTT; PAM sequence: AGCCGTTT
gttcagtttccatgtagttg

SEQ ID NO: 48058 - DNA, 20 bp, Artificial Sequence
  Description of Artificial Sequence: Synthetic oligonucleotide
  Target: LAMA2; (+) strand; PAM type: NNNNGHTT; PAM sequence: GTGAGTTT
atgtagttgagccgttttca

SEQ ID NO: 48059 - DNA, 20 bp, Artificial Sequence
  Description of Artificial Sequence: Synthetic oligonucleotide
  Target: LAMA2; (+) strand; PAM type: NNNNGHTT; PAM sequence: TCTAGTTT
tgagtttcttaatcctgagt

SEQ ID NO: 48060 - DNA, 20 bp, Artificial Sequence
  Description of Artificial Sequence: Synthetic oligonucleotide
  Target: LAMA2; (+) strand; PAM type: NNNNGHTT; PAM sequence: GTTTGATT
tttcttaatcctgagttcta

SEQ ID NO: 48061 - DNA, 20 bp, Artificial Sequence
  Description of Artificial Sequence: Synthetic oligonucleotide
  Target: LAMA2; (+) strand; PAM type: NNNNGHTT; PAM sequence: GACAGTTT
gattgcactgtggtctgaga

SEQ ID NO: 48062 - DNA, 20 bp, Artificial Sequence
  Description of Artificial Sequence: Synthetic oligonucleotide
  Target: LAMA2; (+) strand; PAM type: NNNNGHTT; PAM sequence: GAGTGCTT
gatcttttacatttgctgag

SEQ ID NO: 48063 - DNA, 20 bp, Artificial Sequence
  Description of Artificial Sequence: Synthetic oligonucleotide
  Target: LAMA2; (+) strand; PAM type: NNNNGHTT; PAM sequence: TGTTGATT
gctgagcagaatgtatattc

SEQ ID NO: 48064 - DNA, 20 bp, Artificial Sequence
  Description of Artificial Sequence: Synthetic oligonucleotide
  Target: LAMA2; (+) strand; PAM type: NNNNGHTT; PAM sequence: ACTTGCTT
ctctttgtaggtctctaagg

SEQ ID NO: 48065 - DNA, 20 bp, Artificial Sequence
  Description of Artificial Sequence: Synthetic oligonucleotide
  Target: LAMA2; (+) strand; PAM type: NNNNGHTT; PAM sequence: GTTGGTTT
ctttgtctcttttgatcttt

SEQ ID NO: 48066 - DNA, 20 bp, Artificial Sequence
  Description of Artificial Sequence: Synthetic oligonucleotide
  Target: LAMA2; (+) strand; PAM type: NNNNGHTT; PAM sequence: GTCTGTTT
ttgatctttgttggtttaat

SEQ ID NO: 48067 - DNA, 20 bp, Artificial Sequence
  Description of Artificial Sequence: Synthetic oligonucleotide
  Target: LAMA2; (+) strand; PAM type: NNNNGHTT; PAM sequence: CTAGGTTT
aatgtctgttttatcagaga

SEQ ID NO: 48068 - DNA, 20 bp, Artificial Sequence
  Description of Artificial Sequence: Synthetic oligonucleotide
  Target: LAMA2; (+) strand; PAM type: NNNNGHTT; PAM sequence: TTTTGTTT
ggtttgcaacccctgccttt

SEQ ID NO: 48069 - DNA, 20 bp, Artificial Sequence
  Description of Artificial Sequence: Synthetic oligonucleotide
  Target: LAMA2; (+) strand; PAM type: NNNNGHTT; PAM sequence: TTACGTTT
aattagagcatttagcccat

SEQ ID NO: 48070 - DNA, 20 bp, Artificial Sequence
  Description of Artificial Sequence: Synthetic oligonucleotide
  Target: LAMA2; (+) strand; PAM type: NNNNGHTT; PAM sequence: AGTTGTTT
agctggttattttgctcgtt

SEQ ID NO: 48071 - DNA, 20 bp, Artificial Sequence
  Description of Artificial Sequence: Synthetic oligonucleotide
  Target: LAMA2; (+) strand; PAM type: NNNNGHTT; PAM sequence: TTCAGTTT
ttattttgctcgttagttgt

SEQ ID NO: 48072 - DNA, 20 bp, Artificial Sequence
  Description of Artificial Sequence: Synthetic oligonucleotide
  Target: LAMA2; (+) strand; PAM type: NNNNGHTT; PAM sequence: GCATGTTT
tcgatggtctttacaatttg

SEQ ID NO: 48073 - DNA, 20 bp, Artificial Sequence
  Description of Artificial Sequence: Synthetic oligonucleotide
  Target: LAMA2; (+) strand; PAM type: NNNNGHTT; PAM sequence: CCATGTTT
ctggtactggttgttccttt

SEQ ID NO: 48074 - DNA, 20 bp, Artificial Sequence
  Description of Artificial Sequence: Synthetic oligonucleotide
  Target: LAMA2; (+) strand; PAM type: NNNNGHTT; PAM sequence: ATTTGCTT
tggtgacaaaatctctcagc

SEQ ID NO: 48075 - DNA, 20 bp, Artificial Sequence
  Description of Artificial Sequence: Synthetic oligonucleotide
  Target: LAMA2; (+) strand; PAM type: NNNNGHTT; PAM sequence: TGAAGCTT
ttttatttctccttcactta

SEQ ID NO: 48076 - DNA, 20 bp, Artificial Sequence
  Description of Artificial Sequence: Synthetic oligonucleotide
  Target: LAMA2; (+) strand; PAM type: NNNNGHTT; PAM sequence: CTTAGTTT
tttctccttcacttatgaag

SEQ ID NO: 48077 - DNA, 20 bp, Artificial Sequence
  Description of Artificial Sequence: Synthetic oligonucleotide
  Target: LAMA2; (+) strand; PAM type: NNNNGHTT; PAM sequence: TCCGGCTT
aatattggcccccactctct

SEQ ID NO: 48078 - DNA, 20 bp, Artificial Sequence
  Description of Artificial Sequence: Synthetic oligonucleotide
  Target: LAMA2; (+) strand; PAM type: NNNNGHTT; PAM sequence: TAGAGTTT
ccccactctcttccggcttg

SEQ ID NO: 48079 - DNA, 20 bp, Artificial Sequence
  Description of Artificial Sequence: Synthetic oligonucleotide
  Target: LAMA2; (+) strand; PAM type: NNNNGHTT; PAM sequence: ATGGGCTT
agcgatctgctgttagtctg

SEQ ID NO: 48080 - DNA, 20 bp, Artificial Sequence
  Description of Artificial Sequence: Synthetic oligonucleotide
  Target: LAMA2; (+) strand; PAM type: NNNNGHTT; PAM sequence: CTGTGTTT
gagtatctttgtggcattct

SEQ ID NO: 48081 - DNA, 20 bp, Artificial Sequence
  Description of Artificial Sequence: Synthetic oligonucleotide
  Target: LAMA2; (+) strand; PAM type: NNNNGHTT; PAM sequence: GAATGTTT
ctcctggataatatcctgca

SEQ ID NO: 48082 - DNA, 20 bp, Artificial Sequence
  Description of Artificial Sequence: Synthetic oligonucleotide
  Target: LAMA2; (+) strand; PAM type: NNNNGHTT; PAM sequence: CATAGATT
ctttcatgtacccaatcagg

SEQ ID NO: 48083 - DNA, 20 bp, Artificial Sequence
  Description of Artificial Sequence: Synthetic oligonucleotide
  Target: LAMA2; (+) strand; PAM type: NNNNGHTT; PAM sequence: GGAGGCTT
cacatagtcccatatttctt

SEQ ID NO: 48084 - DNA, 20 bp, Artificial Sequence
  Description of Artificial Sequence: Synthetic oligonucleotide
  Target: LAMA2; (+) strand; PAM type: NNNNGHTT; PAM sequence: GTTCGTTT
ccatatttcttggaggcttt

SEQ ID NO: 48085 - DNA, 20 bp, Artificial Sequence
  Description of Artificial Sequence: Synthetic oligonucleotide
  Target: LAMA2; (+) strand; PAM type: NNNNGHTT; PAM sequence: TGAGGCTT
cagttgatcgaatcagctcc

SEQ ID NO: 48086 - DNA, 20 bp, Artificial Sequence
  Description of Artificial Sequence: Synthetic oligonucleotide
  Target: LAMA2; (+) strand; PAM type: NNNNGHTT; PAM sequence: CATAGTTT
ttgtcaggtacttctcgtgc

SEQ ID NO: 48087 - DNA, 20 bp, Artificial Sequence
  Description of Artificial Sequence: Synthetic oligonucleotide
  Target: LAMA2; (+) strand; PAM type: NNNNGHTT; PAM sequence: CAAGGTTT
ccatttgtcctatctttttt

SEQ ID NO: 48088 - DNA, 20 bp, Artificial Sequence
  Description of Artificial Sequence: Synthetic oligonucleotide
  Target: LAMA2; (+) strand; PAM type: NNNNGHTT; PAM sequence: TTTAGCTT
tcctatcttttttcaaggtt

SEQ ID NO: 48089 - DNA, 20 bp, Artificial Sequence
  Description of Artificial Sequence: Synthetic oligonucleotide
  Target: LAMA2; (+) strand; PAM type: NNNNGHTT; PAM sequence: AGAAGTTT
aacttcctcctttagctcag

SEQ ID NO: 48090 - DNA, 20 bp, Artificial Sequence
  Description of Artificial Sequence: Synthetic oligonucleotide
  Target: LAMA2; (+) strand; PAM type: NNNNGHTT; PAM sequence: TCCAGCTT
ctcctcaaagtcattctcca

SEQ ID NO: 48091 - DNA, 20 bp, Artificial Sequence
  Description of Artificial Sequence: Synthetic oligonucleotide
  Target: LAMA2; (+) strand; PAM type: NNNNGHTT; PAM sequence: AGGAGCTT
gctttgttccattgctggca

SEQ ID NO: 48092 - DNA, 20 bp, Artificial Sequence
  Description of Artificial Sequence: Synthetic oligonucleotide
  Target: LAMA2; (+) strand; PAM type: NNNNGHTT; PAM sequence: CTCTGATT
cctttggaggaggagaggcg

SEQ ID NO: 48093 - DNA, 20 bp, Artificial Sequence
  Description of Artificial Sequence: Synthetic oligonucleotide
  Target: LAMA2; (+) strand; PAM type: NNNNGHTT; PAM sequence: TAGAGTTT
aggagaggcgctctgatttt

SEQ ID NO: 48094 - DNA, 20 bp, Artificial Sequence
  Description of Artificial Sequence: Synthetic oligonucleotide
  Target: LAMA2; (+) strand; PAM type: NNNNGHTT; PAM sequence: TTCAGCTT
gcgctctgatttttagagtt

SEQ ID NO: 48095 - DNA, 20 bp, Artificial Sequence
  Description of Artificial Sequence: Synthetic oligonucleotide
  Target: LAMA2; (+) strand; PAM type: NNNNGHTT; PAM sequence: CTCTGTTT
tagagttttcagcttctctg

SEQ ID NO: 48096 - DNA, 20 bp, Artificial Sequence
  Description of Artificial Sequence: Synthetic oligonucleotide
  Target: LAMA2; (+) strand; PAM type: NNNNGHTT; PAM sequence: TGTGGTTT
ctctgttttttccccatctt

SEQ ID NO: 48097 - DNA, 20 bp, Artificial Sequence
  Description of Artificial Sequence: Synthetic oligonucleotide
  Target: LAMA2; (+) strand; PAM type: NNNNGHTT; PAM sequence: TGGGGTTT
ctttgatgatgatgtacgga

SEQ ID NO: 48098 - DNA, 20 bp, Artificial Sequence
  Description of Artificial Sequence: Synthetic oligonucleotide
  Target: LAMA2; (+) strand; PAM type: NNNNGHTT; PAM sequence: GTTAGTTT
tgtgggtgtcctttctattt

SEQ ID NO: 48099 - DNA, 20 bp, Artificial Sequence
  Description of Artificial Sequence: Synthetic oligonucleotide
  Target: LAMA2; (+) strand; PAM type: NNNNGHTT; PAM sequence: TGGAGTTT
accctcagctgcaggtctgt

SEQ ID NO: 48100 - DNA, 20 bp, Artificial Sequence
  Description of Artificial Sequence: Synthetic oligonucleotide
  Target: LAMA2; (+) strand; PAM type: NNNNGHTT; PAM sequence: CCCTGTTT
tgctggaggtccactccaga

SEQ ID NO: 48101 - DNA, 20 bp, Artificial Sequence
  Description of Artificial Sequence: Synthetic oligonucleotide
  Target: LAMA2; (+) strand; PAM type: NNNNGHTT; PAM sequence: GGAAGCTT
tgccgcctgatcgttcctct

SEQ ID NO: 48102 - DNA, 20 bp, Artificial Sequence
  Description of Artificial Sequence: Synthetic oligonucleotide
  Target: LAMA2; (+) strand; PAM type: NNNNGHTT; PAM sequence: AGAGGTTT
acagggacatttaagtctgc

SEQ ID NO: 48103 - DNA, 20 bp, Artificial Sequence
  Description of Artificial Sequence: Synthetic oligonucleotide
  Target: LAMA2; (+) strand; PAM type: NNNNGHTT; PAM sequence: GTGGGCTT
gcaggcatccttgagctgca

SEQ ID NO: 48104 - DNA, 20 bp, Artificial Sequence
  Description of Artificial Sequence: Synthetic oligonucleotide
  Target: LAMA2; (+) strand; PAM type: NNNNGHTT; PAM sequence: TCAAGCTT
tgcagtgggcttcacccagt

SEQ ID NO: 48105 - DNA, 20 bp, Artificial Sequence
  Description of Artificial Sequence: Synthetic oligonucleotide
  Target: LAMA2; (+) strand; PAM type: NNNNGHTT; PAM sequence: CACAGTTT
cccagttcaagcttcccagc

SEQ ID NO: 48106 - DNA, 20 bp, Artificial Sequence
  Description of Artificial Sequence: Synthetic oligonucleotide
  Target: LAMA2; (+) strand; PAM type: NNNNGHTT; PAM sequence: GTTTGTTT
gttcaagcttcccagccaca

SEQ ID NO: 48107 - DNA, 20 bp, Artificial Sequence
  Description of Artificial Sequence: Synthetic oligonucleotide
  Target: LAMA2; (+) strand; PAM type: NNNNGHTT; PAM sequence: TGCCGTTT
tgggatataatctcctggtg

SEQ ID NO: 48108 - DNA, 20 bp, Artificial Sequence
  Description of Artificial Sequence: Synthetic oligonucleotide
  Target: LAMA2; (+) strand; PAM type: NNNNGHTT; PAM sequence: ACCCGATT
gtggtattagggtgggagtg

SEQ ID NO: 48109 - DNA, 20 bp, Artificial Sequence
  Description of Artificial Sequence: Synthetic oligonucleotide
  Target: LAMA2; (+) strand; PAM type: NNNNGHTT; PAM sequence: CACAGCTT
attttccaggtgccgtctgt

SEQ ID NO: 48110 - DNA, 20 bp, Artificial Sequence
  Description of Artificial Sequence: Synthetic oligonucleotide
  Target: LAMA2; (+) strand; PAM type: NNNNGHTT; PAM sequence: TTGTGCTT
aaagggaatttcctgacccc

SEQ ID NO: 48111 - DNA, 20 bp, Artificial Sequence
  Description of Artificial Sequence: Synthetic oligonucleotide
  Target: LAMA2; (+) strand; PAM type: NNNNGHTT; PAM sequence: CCCTGCTT
ccgggtgaggtgatgcctcg

SEQ ID NO: 48112 - DNA, 20 bp, Artificial Sequence
  Description of Artificial Sequence: Synthetic oligonucleotide
  Target: LAMA2; (+) strand; PAM type: NNNNGHTT; PAM sequence: ACTGGTTT
gctgttcctattccaattat

SEQ ID NO: 48113 - DNA, 20 bp, Artificial Sequence
  Description of Artificial Sequence: Synthetic oligonucleotide
  Target: LAMA2; (+) strand; PAM type: NNNNGHTT; PAM sequence: AAAAGATT
ccaattatactggtttctaa

SEQ ID NO: 48114 - DNA, 20 bp, Artificial Sequence
  Description of Artificial Sequence: Synthetic oligonucleotide
  Target: LAMA2; (+) strand; PAM type: NNNNGHTT; PAM sequence: GGGAGTTT
aatatattgttgagagtgaa

SEQ ID NO: 48115 - DNA, 20 bp, Artificial Sequence
  Description of Artificial Sequence: Synthetic oligonucleotide
  Target: LAMA2; (+) strand; PAM type: NNNNGHTT; PAM sequence: TATTGTTT
ataattaaattattttaaaa

SEQ ID NO: 48116 - DNA, 20 bp, Artificial Sequence
  Description of Artificial Sequence: Synthetic oligonucleotide
  Target: LAMA2; (+) strand; PAM type: NNNNGHTT; PAM sequence: AATTGATT
taaagactcctgttctaggt

SEQ ID NO: 48117 - DNA, 20 bp, Artificial Sequence
  Description of Artificial Sequence: Synthetic oligonucleotide
  Target: LAMA2; (+) strand; PAM type: NNNNGHTT; PAM sequence: GATGGATT
gctgtggctctaactgtcct

SEQ ID NO: 48118 - DNA, 20 bp, Artificial Sequence
  Description of Artificial Sequence: Synthetic oligonucleotide
  Target: LAMA2; (+) strand; PAM type: NNNNGHTT; PAM sequence: TATGGTTT
tgctctcagctaatccatta

SEQ ID NO: 48119 - DNA, 20 bp, Artificial Sequence
  Description of Artificial Sequence: Synthetic oligonucleotide
  Target: LAMA2; (+) strand; PAM type: NNNNGHTT; PAM sequence: ATTTGATT
aaagtaattttaagaggagc

SEQ ID NO: 48120 - DNA, 20 bp, Artificial Sequence
  Description of Artificial Sequence: Synthetic oligonucleotide
  Target: LAMA2; (+) strand; PAM type: NNNNGHTT; PAM sequence: TGATGATT
tcattgatcctgcatatact

SEQ ID NO: 48121 - DNA, 20 bp, Artificial Sequence
  Description of Artificial Sequence: Synthetic oligonucleotide
  Target: LAMA2; (+) strand; PAM type: NNNNGHTT; PAM sequence: ATTTGATT
gatcctgcatatacttgatg

SEQ ID NO: 48122 - DNA, 20 bp, Artificial Sequence
  Description of Artificial Sequence: Synthetic oligonucleotide
  Target: LAMA2; (+) strand; PAM type: NNNNGHTT; PAM sequence: GGTGGTTT
atatacttgatgatttgatt

SEQ ID NO: 48123 - DNA, 20 bp, Artificial Sequence
  Description of Artificial Sequence: Synthetic oligonucleotide
  Target: LAMA2; (+) strand; PAM type: NNNNGHTT; PAM sequence: GTTTGATT
acttgatgatttgattggtg

SEQ ID NO: 48124 - DNA, 20 bp, Artificial Sequence
  Description of Artificial Sequence: Synthetic oligonucleotide
  Target: LAMA2; (+) strand; PAM type: NNNNGHTT; PAM sequence: TCTAGTTT
tattaacttgccagaaactt

SEQ ID NO: 48125 - DNA, 20 bp, Artificial Sequence
  Description of Artificial Sequence: Synthetic oligonucleotide
  Target: LAMA2; (+) strand; PAM type: NNNNGHTT; PAM sequence: TGAAGCTT
tgaatacaacttagacctca

SEQ ID NO: 48126 - DNA, 20 bp, Artificial Sequence
  Description of Artificial Sequence: Synthetic oligonucleotide
  Target: LAMA2; (+) strand; PAM type: NNNNGHTT; PAM sequence: TTATGTTT
cagacatgtaatgatctgag

SEQ ID NO: 48127 - DNA, 20 bp, Artificial Sequence
  Description of Artificial Sequence: Synthetic oligonucleotide
  Target: LAMA2; (+) strand; PAM type: NNNNGHTT; PAM sequence: GTATGATT
gttatgttttaatagggtta

SEQ ID NO: 48128 - DNA, 20 bp, Artificial Sequence
  Description of Artificial Sequence: Synthetic oligonucleotide
  Target: LAMA2; (+) strand; PAM type: NNNNGHTT; PAM sequence: TGTGGTTT
taatggtgaaaatgatcaag

SEQ ID NO: 48129 - DNA, 20 bp, Artificial Sequence
  Description of Artificial Sequence: Synthetic oligonucleotide
  Target: LAMA2; (+) strand; PAM type: NNNNGHTT; PAM sequence: GTTTGATT
ggtgaaaatgatcaagtgtg

SEQ ID NO: 48130 - DNA, 20 bp, Artificial Sequence
  Description of Artificial Sequence: Synthetic oligonucleotide
  Target: LAMA2; (+) strand; PAM type: NNNNGHTT; PAM sequence: AATAGTTT
taatgctgaaaagatatgct

SEQ ID NO: 48131 - DNA, 20 bp, Artificial Sequence
  Description of Artificial Sequence: Synthetic oligonucleotide
  Target: LAMA2; (+) strand; PAM type: NNNNGHTT; PAM sequence: TGAGGATT
aacatgaaagaaagaggagt

SEQ ID NO: 48132 - DNA, 20 bp, Artificial Sequence
  Description of Artificial Sequence: Synthetic oligonucleotide
  Target: LAMA2; (+) strand; PAM type: NNNNGHTT; PAM sequence: CATTGATT
tgagcaactaaaagacttgt

SEQ ID NO: 48133 - DNA, 20 bp, Artificial Sequence
  Description of Artificial Sequence: Synthetic oligonucleotide
  Target: LAMA2; (+) strand; PAM type: NNNNGHTT; PAM sequence: CTCAGCTT
tttttacaggagatcatgaa

SEQ ID NO: 48134 - DNA, 20 bp, Artificial Sequence
  Description of Artificial Sequence: Synthetic oligonucleotide
  Target: LAMA2; (+) strand; PAM type: NNNNGHTT; PAM sequence: AAATGTTT
acatctgaactgaagatgta

SEQ ID NO: 48135 - DNA, 20 bp, Artificial Sequence
  Description of Artificial Sequence: Synthetic oligonucleotide
  Target: LAMA2; (+) strand; PAM type: NNNNGHTT; PAM sequence: TAAGGATT
acgagacaaaatatgagatc

SEQ ID NO: 48136 - DNA, 20 bp, Artificial Sequence
  Description of Artificial Sequence: Synthetic oligonucleotide
  Target: LAMA2; (+) strand; PAM type: NNNNGHTT; PAM sequence: AGTGGATT
aagggcaacatggaaactag

SEQ ID NO: 48137 - DNA, 20 bp, Artificial Sequence
  Description of Artificial Sequence: Synthetic oligonucleotide
  Target: LAMA2; (+) strand; PAM type: NNNNGHTT; PAM sequence: TGAAGATT
agaacatgggaggaaaatgc

SEQ ID NO: 48138 - DNA, 20 bp, Artificial Sequence
  Description of Artificial Sequence: Synthetic oligonucleotide
  Target: LAMA2; (+) strand; PAM type: NNNNGHTT; PAM sequence: GTGAGTTT
agacagcattagggatctat

SEQ ID NO: 48139 - DNA, 20 bp, Artificial Sequence
  Description of Artificial Sequence: Synthetic oligonucleotide
  Target: LAMA2; (+) strand; PAM type: NNNNGHTT; PAM sequence: ATGAGTTT
aaggtcagtcaacaggtact

SEQ ID NO: 48140 - DNA, 20 bp, Artificial Sequence
  Description of Artificial Sequence: Synthetic oligonucleotide
  Target: LAMA2; (+) strand; PAM type: NNNNGHTT; PAM sequence: GTTAGATT
caggtacagagaagatagag

SEQ ID NO: 48141 - DNA, 20 bp, Artificial Sequence
  Description of Artificial Sequence: Synthetic oligonucleotide
  Target: LAMA2; (+) strand; PAM type: NNNNGHTT; PAM sequence: TAGAGATT
ccaagtgaatacagtaaaac

SEQ ID NO: 48142 - DNA, 20 bp, Artificial Sequence
  Description of Artificial Sequence: Synthetic oligonucleotide
  Target: LAMA2; (+) strand; PAM type: NNNNGHTT; PAM sequence: CAGCGATT
gatgagaaaccctcaagcta

SEQ ID NO: 48143 - DNA, 20 bp, Artificial Sequence
  Description of Artificial Sequence: Synthetic oligonucleotide
  Target: LAMA2; (+) strand; PAM type: NNNNGHTT; PAM sequence: CAGTGCTT
gaacagtatataatccttga

SEQ ID NO: 48144 - DNA, 20 bp, Artificial Sequence
  Description of Artificial Sequence: Synthetic oligonucleotide
  Target: LAMA2; (+) strand; PAM type: NNNNGHTT; PAM sequence: GCTAGTTT
tatatgttccccaaagcaag

SEQ ID NO: 48145 - DNA, 20 bp, Artificial Sequence
  Description of Artificial Sequence: Synthetic oligonucleotide
  Target: LAMA2; (+) strand; PAM type: NNNNGHTT; PAM sequence: TTATGCTT
cataggttattattttgaaa

SEQ ID NO: 48146 - DNA, 20 bp, Artificial Sequence
  Description of Artificial Sequence: Synthetic oligonucleotide
  Target: LAMA2; (+) strand; PAM type: NNNNGHTT; PAM sequence: AATCGTTT
aacacataggaattgctacc

SEQ ID NO: 48147 - DNA, 20 bp, Artificial Sequence
  Description of Artificial Sequence: Synthetic oligonucleotide
  Target: LAMA2; (+) strand; PAM type: NNNNGHTT; PAM sequence: AATTGTTT
tgtatacctggcgcagagtt

SEQ ID NO: 48148 - DNA, 20 bp, Artificial Sequence
  Description of Artificial Sequence: Synthetic oligonucleotide
  Target: LAMA2; (+) strand; PAM type: NNNNGHTT; PAM sequence: ATCTGATT
ttaattgttttgcctgcatt

SEQ ID NO: 48149 - DNA, 20 bp, Artificial Sequence
  Description of Artificial Sequence: Synthetic oligonucleotide
  Target: LAMA2; (+) strand; PAM type: NNNNGHTT; PAM sequence: ATTTGATT
tgttttgcctgcattatctg

SEQ ID NO: 48150 - DNA, 20 bp, Artificial Sequence
  Description of Artificial Sequence: Synthetic oligonucleotide
  Target: LAMA2; (+) strand; PAM type: NNNNGHTT; PAM sequence: AAATGTTT
ctatgacttggagaatggaa

SEQ ID NO: 48151 - DNA, 20 bp, Artificial Sequence
  Description of Artificial Sequence: Synthetic oligonucleotide
  Target: LAMA2; (+) strand; PAM type: NNNNGHTT; PAM sequence: CCACGTTT
taaggcagcactgtcagaag

SEQ ID NO: 48152 - DNA, 20 bp, Artificial Sequence
  Description of Artificial Sequence: Synthetic oligonucleotide
  Target: LAMA2; (+) strand; PAM type: NNNNGHTT; PAM sequence: TGATGATT
cctcctctttctttttacat

SEQ ID NO: 48153 - DNA, 20 bp, Artificial Sequence
  Description of Artificial Sequence: Synthetic oligonucleotide
  Target: LAMA2; (+) strand; PAM type: NNNNGHTT; PAM sequence: CTAAGTTT
tttttttaaataaaaaccaa

SEQ ID NO: 48154 - DNA, 20 bp, Artificial Sequence
  Description of Artificial Sequence: Synthetic oligonucleotide
  Target: LAMA2; (+) strand; PAM type: NNNNGHTT; PAM sequence: AACTGCTT
tcttagacataaaacaattt

SEQ ID NO: 48155 - DNA, 20 bp, Artificial Sequence
  Description of Artificial Sequence: Synthetic oligonucleotide
  Target: LAMA2; (+) strand; PAM type: NNNNGHTT; PAM sequence: TCCAGCTT
ttaactgcttgaagaaaatg

SEQ ID NO: 48156 - DNA, 20 bp, Artificial Sequence
  Description of Artificial Sequence: Synthetic oligonucleotide
  Target: LAMA2; (+) strand; PAM type: NNNNGHTT; PAM sequence: ATTTGTTT
tgccattagatattagtgac

SEQ ID NO: 48157 - DNA, 20 bp, Artificial Sequence
  Description of Artificial Sequence: Synthetic oligonucleotide
  Target: LAMA2; (+) strand; PAM type: NNNNGHTT; PAM sequence: TTTTGATT
agtagtgatcacttatgtcc

SEQ ID NO: 48158 - DNA, 20 bp, Artificial Sequence
  Description of Artificial Sequence: Synthetic oligonucleotide
  Target: LAMA2; (+) strand; PAM type: NNNNGHTT; PAM sequence: TCTTGTTT
tctatttaaagaagacattt

SEQ ID NO: 48159 - DNA, 20 bp, Artificial Sequence
  Description of Artificial Sequence: Synthetic oligonucleotide
  Target: LAMA2; (+) strand; PAM type: NNNNGHTT; PAM sequence: CTAGGCTT
ctaatttgtgtcgatatgtg

SEQ ID NO: 48160 - DNA, 20 bp, Artificial Sequence
  Description of Artificial Sequence: Synthetic oligonucleotide
  Target: LAMA2; (+) strand; PAM type: NNNNGHTT; PAM sequence: TTAAGTTT
ctaggcttagaaaactcact

SEQ ID NO: 48161 - DNA, 20 bp, Artificial Sequence
  Description of Artificial Sequence: Synthetic oligonucleotide
  Target: LAMA2; (+) strand; PAM type: NNNNGHTT; PAM sequence: TGGAGTTT
aagttttactaaatttattt

SEQ ID NO: 48162 - DNA, 20 bp, Artificial Sequence
  Description of Artificial Sequence: Synthetic oligonucleotide
  Target: LAMA2; (+) strand; PAM type: NNNNGHTT; PAM sequence: ACATGATT
gagtttaactcttacttttg

SEQ ID NO: 48163 - DNA, 20 bp, Artificial Sequence
  Description of Artificial Sequence: Synthetic oligonucleotide
  Target: LAMA2; (+) strand; PAM type: NNNNGHTT; PAM sequence: CTCAGCTT
gatttatattctaaggagat

SEQ ID NO: 48164 - DNA, 20 bp, Artificial Sequence
  Description of Artificial Sequence: Synthetic oligonucleotide
  Target: LAMA2; (+) strand; PAM type: NNNNGHTT; PAM sequence: TCCTGCTT
ctaaggagatctcagcttct

SEQ ID NO: 48165 - DNA, 20 bp, Artificial Sequence
  Description of Artificial Sequence: Synthetic oligonucleotide
  Target: LAMA2; (+) strand; PAM type: NNNNGHTT; PAM sequence: TCCTGATT
caaaatatagatacgtacat

SEQ ID NO: 48166 - DNA, 20 bp, Artificial Sequence
  Description of Artificial Sequence: Synthetic oligonucleotide
  Target: LAMA2; (+) strand; PAM type: NNNNGHTT; PAM sequence: AAATGTTT
ctccatatttaccttccccc

SEQ ID NO: 48167 - DNA, 20 bp, Artificial Sequence
  Description of Artificial Sequence: Synthetic oligonucleotide
  Target: LAMA2; (+) strand; PAM type: NNNNGHTT; PAM sequence: AATGGATT
ttcaaaattataataatagc

SEQ ID NO: 48168 - DNA, 20 bp, Artificial Sequence
  Description of Artificial Sequence: Synthetic oligonucleotide
  Target: LAMA2; (+) strand; PAM type: NNNNGHTT; PAM sequence: GACTGATT
ctcaggtatttctttatatt

SEQ ID NO: 48169 - DNA, 20 bp, Artificial Sequence
  Description of Artificial Sequence: Synthetic oligonucleotide
  Target: LAMA2; (+) strand; PAM type: NNNNGHTT; PAM sequence: CTAAGTTT
aagggactttgcaaatgtga

SEQ ID NO: 48170 - DNA, 20 bp, Artificial Sequence
  Description of Artificial Sequence: Synthetic oligonucleotide
  Target: LAMA2; (+) strand; PAM type: NNNNGHTT; PAM sequence: AGAAGTTT
acaatggaagaagaggaagg

SEQ ID NO: 48171 - DNA, 20 bp, Artificial Sequence
  Description of Artificial Sequence: Synthetic oligonucleotide
  Target: LAMA2; (+) strand; PAM type: NNNNGHTT; PAM sequence: TCTGGCTT
aaaatatttcattcatcatt

SEQ ID NO: 48172 - DNA, 20 bp, Artificial Sequence
  Description of Artificial Sequence: Synthetic oligonucleotide
  Target: LAMA2; (+) strand; PAM type: NNNNGHTT; PAM sequence: GATAGATT
acaacctgaatgaacaagga

SEQ ID NO: 48173 - DNA, 20 bp, Artificial Sequence
  Description of Artificial Sequence: Synthetic oligonucleotide
  Target: LAMA2; (+) strand; PAM type: NNNNGHTT; PAM sequence: TGTTGCTT
accatgagataatatatttg

SEQ ID NO: 48174 - DNA, 20 bp, Artificial Sequence
  Description of Artificial Sequence: Synthetic oligonucleotide
  Target: LAMA2; (+) strand; PAM type: NNNNGHTT; PAM sequence: CTAAGTTT
atttgtgttgctttcaattg

SEQ ID NO: 48175 - DNA, 20 bp, Artificial Sequence
  Description of Artificial Sequence: Synthetic oligonucleotide
  Target: LAMA2; (+) strand; PAM type: NNNNGHTT; PAM sequence: CAGGGATT
cagttgacccttgcacaatg

SEQ ID NO: 48176 - DNA, 20 bp, Artificial Sequence
  Description of Artificial Sequence: Synthetic oligonucleotide
  Target: LAMA2; (+) strand; PAM type: NNNNGHTT; PAM sequence: ATTTGTTT
tgacctctacacagttgaaa

SEQ ID NO: 48177 - DNA, 20 bp, Artificial Sequence
  Description of Artificial Sequence: Synthetic oligonucleotide
  Target: LAMA2; (+) strand; PAM type: NNNNGHTT; PAM sequence: GAAGGCTT
ttcaggtgtcaactgtatat

SEQ ID NO: 48178 - DNA, 20 bp, Artificial Sequence
  Description of Artificial Sequence: Synthetic oligonucleotide
  Target: LAMA2; (+) strand; PAM type: NNNNGHTT; PAM sequence: CCAAGATT
agaaaggaagtattttgtgc

SEQ ID NO: 48179 - DNA, 20 bp, Artificial Sequence
  Description of Artificial Sequence: Synthetic oligonucleotide
  Target: LAMA2; (+) strand; PAM type: NNNNGHTT; PAM sequence: TAGAGATT
gcaatgggataaaaatatca

SEQ ID NO: 48180 - DNA, 20 bp, Artificial Sequence
  Description of Artificial Sequence: Synthetic oligonucleotide
  Target: LAMA2; (+) strand; PAM type: NNNNGHTT; PAM sequence: GCAGGCTT
ttttccgcatctgaccaagg

SEQ ID NO: 48181 - DNA, 20 bp, Artificial Sequence
  Description of Artificial Sequence: Synthetic oligonucleotide
  Target: LAMA2; (+) strand; PAM type: NNNNGHTT; PAM sequence: AGCGGCTT
ttgatatcctgaaggttaag

SEQ ID NO: 48182 - DNA, 20 bp, Artificial Sequence
  Description of Artificial Sequence: Synthetic oligonucleotide
  Target: LAMA2; (+) strand; PAM type: NNNNGHTT; PAM sequence: ATTTGCTT
ttgatgggaggccggaacaa

SEQ ID NO: 48183 - DNA, 20 bp, Artificial Sequence
  Description of Artificial Sequence: Synthetic oligonucleotide
  Target: LAMA2; (+) strand; PAM type: NNNNGHTT; PAM sequence: ATTGGTTT
atgagactttatttctatcc

SEQ ID NO: 48184 - DNA, 20 bp, Artificial Sequence
  Description of Artificial Sequence: Synthetic oligonucleotide
  Target: LAMA2; (+) strand; PAM type: NNNNGHTT; PAM sequence: TTGAGTTT
accccattttgctgaatttc

SEQ ID NO: 48185 - DNA, 20 bp, Artificial Sequence
  Description of Artificial Sequence: Synthetic oligonucleotide
  Target: LAMA2; (+) strand; PAM type: NNNNGHTT; PAM sequence: TACAGTTT
aagaaatccattagcataaa

SEQ ID NO: 48186 - DNA, 20 bp, Artificial Sequence
  Description of Artificial Sequence: Synthetic oligonucleotide
  Target: LAMA2; (+) strand; PAM type: NNNNGHTT; PAM sequence: CGGTGTTT
agaaaatttaattacacgta

SEQ ID NO: 48187 - DNA, 20 bp, Artificial Sequence
  Description of Artificial Sequence: Synthetic oligonucleotide
  Target: LAMA2; (+) strand; PAM type: NNNNGHTT; PAM sequence: GCCAGTTT
aaaaatctgtcaattactca

SEQ ID NO: 48188 - DNA, 20 bp, Artificial Sequence
  Description of Artificial Sequence: Synthetic oligonucleotide
  Target: LAMA2; (+) strand; PAM type: NNNNGHTT; PAM sequence: CTATGTTT
agcctactgtaaattgaggt

SEQ ID NO: 48189 - DNA, 20 bp, Artificial Sequence
  Description of Artificial Sequence: Synthetic oligonucleotide
  Target: LAMA2; (+) strand; PAM type: NNNNGHTT; PAM sequence: TCTAGTTT
ttaagttcaccaggtcttat

SEQ ID NO: 48190 - DNA, 20 bp, Artificial Sequence
  Description of Artificial Sequence: Synthetic oligonucleotide
  Target: LAMA2; (+) strand; PAM type: NNNNGHTT; PAM sequence: GTATGATT
agtttattttagatggaaat

SEQ ID NO: 48191 - DNA, 20 bp, Artificial Sequence
  Description of Artificial Sequence: Synthetic oligonucleotide
  Target: LAMA2; (+) strand; PAM type: NNNNGHTT; PAM sequence: CTTAGTTT
aattcaaacctgtacaagaa

SEQ ID NO: 48192 - DNA, 20 bp, Artificial Sequence
  Description of Artificial Sequence: Synthetic oligonucleotide
  Target: LAMA2; (+) strand; PAM type: NNNNGHTT; PAM sequence: AGGGGCTT
caggaaacttccaggggcca

SEQ ID NO: 48193 - DNA, 20 bp, Artificial Sequence
  Description of Artificial Sequence: Synthetic oligonucleotide
  Target: LAMA2; (+) strand; PAM type: NNNNGHTT; PAM sequence: TAGAGTTT
acattaggtatttcagtacg

SEQ ID NO: 48194 - DNA, 20 bp, Artificial Sequence
  Description of Artificial Sequence: Synthetic oligonucleotide
  Target: LAMA2; (+) strand; PAM type: NNNNGHTT; PAM sequence: TTTTGCTT
tatgctactagaatatccaa

SEQ ID NO: 48195 - DNA, 20 bp, Artificial Sequence
  Description of Artificial Sequence: Synthetic oligonucleotide
  Target: LAMA2; (+) strand; PAM type: NNNNGHTT; PAM sequence: GTGTGTTT
ctttgagagtatgagaaagt

SEQ ID NO: 48196 - DNA, 20 bp, Artificial Sequence
  Description of Artificial Sequence: Synthetic oligonucleotide
  Target: LAMA2; (+) strand; PAM type: NNNNGHTT; PAM sequence: TTGTGATT
gagaaagtgtgtgttttatg

SEQ ID NO: 48197 - DNA, 20 bp, Artificial Sequence
  Description of Artificial Sequence: Synthetic oligonucleotide
  Target: LAMA2; (+) strand; PAM type: NNNNGHTT; PAM sequence: CTCTGTTT
ctgcctttgtatggcaggaa

SEQ ID NO: 48198 - DNA, 20 bp, Artificial Sequence
  Description of Artificial Sequence: Synthetic oligonucleotide
  Target: LAMA2; (+) strand; PAM type: NNNNGHTT; PAM sequence: AACAGTTT
tttcttagaaaatagtaaag

SEQ ID NO: 48199 - DNA, 20 bp, Artificial Sequence
  Description of Artificial Sequence: Synthetic oligonucleotide
  Target: LAMA2; (+) strand; PAM type: NNNNGHTT; PAM sequence: TATAGTTT
cctttgttctaaagggtacc

SEQ ID NO: 48200 - DNA, 20 bp, Artificial Sequence
  Description of Artificial Sequence: Synthetic oligonucleotide
  Target: LAMA2; (+) strand; PAM type: NNNNGHTT; PAM sequence: TCATGTTT
tagaaaaatcaccaacgctc

SEQ ID NO: 48201 - DNA, 20 bp, Artificial Sequence
  Description of Artificial Sequence: Synthetic oligonucleotide
  Target: LAMA2; (+) strand; PAM type: NNNNGHTT; PAM sequence: CTCAGCTT
catgtttctcataaaaaatg

SEQ ID NO: 48202 - DNA, 20 bp, Artificial Sequence
  Description of Artificial Sequence: Synthetic oligonucleotide
  Target: LAMA2; (+) strand; PAM type: NNNNGHTT; PAM sequence: CATTGTTT
ctttatttggaaactttggc

SEQ ID NO: 48203 - DNA, 20 bp, Artificial Sequence
  Description of Artificial Sequence: Synthetic oligonucleotide
  Target: LAMA2; (+) strand; PAM type: NNNNGHTT; PAM sequence: TAATGATT
tctgccaaggctatttattc

SEQ ID NO: 48204 - DNA, 20 bp, Artificial Sequence
  Description of Artificial Sequence: Synthetic oligonucleotide
  Target: LAMA2; (+) strand; PAM type: NNNNGHTT; PAM sequence: ATCTGATT
cacttcattaaagtcatatg

SEQ ID NO: 48205 - DNA, 20 bp, Artificial Sequence
  Description of Artificial Sequence: Synthetic oligonucleotide
  Target: LAMA2; (+) strand; PAM type: NNNNGHTT; PAM sequence: CTCAGCTT
atactcaactgagacataat

SEQ ID NO: 48206 - DNA, 20 bp, Artificial Sequence
  Description of Artificial Sequence: Synthetic oligonucleotide
  Target: LAMA2; (+) strand; PAM type: NNNNGHTT; PAM sequence: TTTGGTTT
ttcactttcatattctatat

SEQ ID NO: 48207 - DNA, 20 bp, Artificial Sequence
  Description of Artificial Sequence: Synthetic oligonucleotide
  Target: LAMA2; (+) strand; PAM type: NNNNGHTT; PAM sequence: TCTGGTTT
agtatttttaaaatgaaaca

SEQ ID NO: 48208 - DNA, 20 bp, Artificial Sequence
  Description of Artificial Sequence: Synthetic oligonucleotide
  Target: LAMA2; (+) strand; PAM type: NNNNGHTT; PAM sequence: CCTTGTTT
taatgctcagaactcccttc

SEQ ID NO: 48209 - DNA, 20 bp, Artificial Sequence
  Description of Artificial Sequence: Synthetic oligonucleotide
  Target: LAMA2; (+) strand; PAM type: NNNNGHTT; PAM sequence: ATACGTTT
aaaaacctctgaatatctga

SEQ ID NO: 48210 - DNA, 20 bp, Artificial Sequence
  Description of Artificial Sequence: Synthetic oligonucleotide
  Target: LAMA2; (+) strand; PAM type: NNNNGHTT; PAM sequence: TTTTGCTT
agcaccccttataaaacact

SEQ ID NO: 48211 - DNA, 20 bp, Artificial Sequence
  Description of Artificial Sequence: Synthetic oligonucleotide
  Target: LAMA2; (+) strand; PAM type: NNNNGHTT; PAM sequence: TTATGTTT
ataaaacactttttgctttg

SEQ ID NO: 48212 - DNA, 20 bp, Artificial Sequence
  Description of Artificial Sequence: Synthetic oligonucleotide
  Target: LAMA2; (+) strand; PAM type: NNNNGHTT; PAM sequence: CCATGTTT
ttttccctatttctattctt

SEQ ID NO: 48213 - DNA, 20 bp, Artificial Sequence
  Description of Artificial Sequence: Synthetic oligonucleotide
  Target: LAMA2; (+) strand; PAM type: NNNNGHTT; PAM sequence: AATAGATT
tttctattcttccatgtttt

SEQ ID NO: 48214 - DNA, 20 bp, Artificial Sequence
  Description of Artificial Sequence: Synthetic oligonucleotide
  Target: LAMA2; (+) strand; PAM type: NNNNGHTT; PAM sequence: GATAGTTT
ttgaagttaattccatattg

SEQ ID NO: 48215 - DNA, 20 bp, Artificial Sequence
  Description of Artificial Sequence: Synthetic oligonucleotide
  Target: LAMA2; (+) strand; PAM type: NNNNGHTT; PAM sequence: CTATGATT
atgtaatatatcatatgtat

SEQ ID NO: 48216 - DNA, 20 bp, Artificial Sequence
  Description of Artificial Sequence: Synthetic oligonucleotide
  Target: LAMA2; (+) strand; PAM type: NNNNGHTT; PAM sequence: TCCTGCTT
ctagactgtgaaggttcaaa

SEQ ID NO: 48217 - DNA, 20 bp, Artificial Sequence
  Description of Artificial Sequence: Synthetic oligonucleotide
  Target: LAMA2; (+) strand; PAM type: NNNNGHTT; PAM sequence: CAATGCTT
gaacaagttatgtaagtact

SEQ ID NO: 48218 - DNA, 20 bp, Artificial Sequence
  Description of Artificial Sequence: Synthetic oligonucleotide
  Target: LAMA2; (+) strand; PAM type: NNNNGHTT; PAM sequence: ATAAGATT
ttaaaatcaatgtaacagtt

SEQ ID NO: 48219 - DNA, 20 bp, Artificial Sequence
  Description of Artificial Sequence: Synthetic oligonucleotide
  Target: LAMA2; (+) strand; PAM type: NNNNGHTT; PAM sequence: TGGTGTTT
ttaccacataaggttgtgtg

SEQ ID NO: 48220 - DNA, 20 bp, Artificial Sequence
  Description of Artificial Sequence: Synthetic oligonucleotide
  Target: LAMA2; (+) strand; PAM type: NNNNGHTT; PAM sequence: GAGTGCTT
atatccaaagccacattgta

SEQ ID NO: 48221 - DNA, 20 bp, Artificial Sequence
  Description of Artificial Sequence: Synthetic oligonucleotide
  Target: LAMA2; (+) strand; PAM type: NNNNGHTT; PAM sequence: ACATGTTT
catttccatcatcattttta

SEQ ID NO: 48222 - DNA, 20 bp, Artificial Sequence
  Description of Artificial Sequence: Synthetic oligonucleotide
  Target: LAMA2; (+) strand; PAM type: NNNNGHTT; PAM sequence: CATTGTTT
ttactacaaacgttgttata

SEQ ID NO: 48223 - DNA, 20 bp, Artificial Sequence
  Description of Artificial Sequence: Synthetic oligonucleotide
  Target: LAMA2; (+) strand; PAM type: NNNNGHTT; PAM sequence: AAGTGATT
aacctccacctcccgggttc

SEQ ID NO: 48224 - DNA, 20 bp, Artificial Sequence
  Description of Artificial Sequence: Synthetic oligonucleotide
  Target: LAMA2; (+) strand; PAM type: NNNNGHTT; PAM sequence: CTGGGATT
tgcctcagcctcccgagtag

SEQ ID NO: 48225 - DNA, 20 bp, Artificial Sequence
  Description of Artificial Sequence: Synthetic oligonucleotide
  Target: LAMA2; (+) strand; PAM type: NNNNGHTT; PAM sequence: AGGTGCTT
tcccgagtagctgggattac

SEQ ID NO: 48226 - DNA, 20 bp, Artificial Sequence
  Description of Artificial Sequence: Synthetic oligonucleotide
  Target: LAMA2; (+) strand; PAM type: NNNNGHTT; PAM sequence: CAGGGTTT
ttttgtatttttagtagaga

SEQ ID NO: 48227 - DNA, 20 bp, Artificial Sequence
  Description of Artificial Sequence: Synthetic oligonucleotide
  Target: LAMA2; (+) strand; PAM type: NNNNGHTT; PAM sequence: CTGGGATT
cttctcagcctcccaaagtg

SEQ ID NO: 48228 - DNA, 20 bp, Artificial Sequence
  Description of Artificial Sequence: Synthetic oligonucleotide
  Target: LAMA2; (+) strand; PAM type: NNNNGHTT; PAM sequence: GCGTGTTT
ccaaagtgctgggattgcaa

SEQ ID NO: 48229 - DNA, 20 bp, Artificial Sequence
  Description of Artificial Sequence: Synthetic oligonucleotide
  Target: LAMA2; (+) strand; PAM type: NNNNGHTT; PAM sequence: AGCTGTTT
cagtgaatagccatgtgccc

SEQ ID NO: 48230 - DNA, 20 bp, Artificial Sequence
  Description of Artificial Sequence: Synthetic oligonucleotide
  Target: LAMA2; (+) strand; PAM type: NNNNGHTT; PAM sequence: ACTTGTTT
taccaccaatgcatgagagt

SEQ ID NO: 48231 - DNA, 20 bp, Artificial Sequence
  Description of Artificial Sequence: Synthetic oligonucleotide
  Target: LAMA2; (+) strand; PAM type: NNNNGHTT; PAM sequence: CTGTGTTT
ctggccaacatggtgaaacc

SEQ ID NO: 48232 - DNA, 20 bp, Artificial Sequence
  Description of Artificial Sequence: Synthetic oligonucleotide
  Target: LAMA2; (+) strand; PAM type: NNNNGHTT; PAM sequence: AATTGCTT
ctgaggcatgagaatcactt

SEQ ID NO: 48233 - DNA, 20 bp, Artificial Sequence
  Description of Artificial Sequence: Synthetic oligonucleotide
  Target: LAMA2; (+) strand; PAM type: NNNNGHTT; PAM sequence: TAATGTTT
aattaggagaggaaaagaaa

SEQ ID NO: 48234 - DNA, 20 bp, Artificial Sequence
  Description of Artificial Sequence: Synthetic oligonucleotide
  Target: LAMA2; (+) strand; PAM type: NNNNGHTT; PAM sequence: GAGAGTTT
gagagagaaagcccaagagt

SEQ ID NO: 48235 - DNA, 20 bp, Artificial Sequence
  Description of Artificial Sequence: Synthetic oligonucleotide
  Target: LAMA2; (+) strand; PAM type: NNNNGHTT; PAM sequence: AAGTGTTT
tgagagtttgtcttgaggag

SEQ ID NO: 48236 - DNA, 20 bp, Artificial Sequence
  Description of Artificial Sequence: Synthetic oligonucleotide
  Target: LAMA2; (+) strand; PAM type: NNNNGHTT; PAM sequence: CCACGATT
aacaatttaacctcttagag

SEQ ID NO: 48237 - DNA, 20 bp, Artificial Sequence
  Description of Artificial Sequence: Synthetic oligonucleotide
  Target: LAMA2; (+) strand; PAM type: NNNNGHTT; PAM sequence: CGGAGATT
aacctacattatacaatttc

SEQ ID NO: 48238 - DNA, 20 bp, Artificial Sequence
  Description of Artificial Sequence: Synthetic oligonucleotide
  Target: LAMA2; (+) strand; PAM type: NNNNGHTT; PAM sequence: GTTAGCTT
ttctaaagttccatgaaaat

SEQ ID NO: 48239 - DNA, 20 bp, Artificial Sequence
  Description of Artificial Sequence: Synthetic oligonucleotide
  Target: LAMA2; (+) strand; PAM type: NNNNGHTT; PAM sequence: CTTTGATT
aagttccatgaaaatgttag

SEQ ID NO: 48240 - DNA, 20 bp, Artificial Sequence
  Description of Artificial Sequence: Synthetic oligonucleotide
  Target: LAMA2; (+) strand; PAM type: NNNNGHTT; PAM sequence: TGTAGCTT
ccttttttttttgtattatc

SEQ ID NO: 48241 - DNA, 20 bp, Artificial Sequence
  Description of Artificial Sequence: Synthetic oligonucleotide
  Target: LAMA2; (+) strand; PAM type: NNNNGHTT; PAM sequence: AGATGTTT
gcttgctaaaataacatacc

SEQ ID NO: 48242 - DNA, 20 bp, Artificial Sequence
  Description of Artificial Sequence: Synthetic oligonucleotide
  Target: LAMA2; (+) strand; PAM type: NNNNGHTT; PAM sequence: TTTTGTTT
taaaataacataccagatgt

SEQ ID NO: 48243 - DNA, 20 bp, Artificial Sequence
  Description of Artificial Sequence: Synthetic oligonucleotide
  Target: LAMA2; (+) strand; PAM type: NNNNGHTT; PAM sequence: TACTGATT
aattttaaaaatccagatca

SEQ ID NO: 48244 - DNA, 20 bp, Artificial Sequence
  Description of Artificial Sequence: Synthetic oligonucleotide
  Target: LAMA2; (+) strand; PAM type: NNNNGHTT; PAM sequence: TGGAGATT
tctgggcagttacaatattt

SEQ ID NO: 48245 - DNA, 20 bp, Artificial Sequence
  Description of Artificial Sequence: Synthetic oligonucleotide
  Target: LAMA2; (+) strand; PAM type: NNNNGHTT; PAM sequence: GATTGTTT
ggcagttacaatattttgga

SEQ ID NO: 48246 - DNA, 20 bp, Artificial Sequence
  Description of Artificial Sequence: Synthetic oligonucleotide
  Target: LAMA2; (+) strand; PAM type: NNNNGHTT; PAM sequence: ACTTGTTT
aggaacaatgataactgcta

SEQ ID NO: 48247 - DNA, 20 bp, Artificial Sequence
  Description of Artificial Sequence: Synthetic oligonucleotide
  Target: LAMA2; (+) strand; PAM type: NNNNGHTT; PAM sequence: TCTAGATT
tacaaaatgtcaaatactat

SEQ ID NO: 48248 - DNA, 20 bp, Artificial Sequence
  Description of Artificial Sequence: Synthetic oligonucleotide
  Target: LAMA2; (+) strand; PAM type: NNNNGHTT; PAM sequence: TATTGTTT
ctatgaggtagttactgtta

SEQ ID NO: 48249 - DNA, 20 bp, Artificial Sequence
  Description of Artificial Sequence: Synthetic oligonucleotide
  Target: LAMA2; (+) strand; PAM type: NNNNGHTT; PAM sequence: TTTTGATT
aggtagttactgttatattg

SEQ ID NO: 48250 - DNA, 20 bp, Artificial Sequence
  Description of Artificial Sequence: Synthetic oligonucleotide
  Target: LAMA2; (+) strand; PAM type: NNNNGHTT; PAM sequence: GAGTGTTT
agctaaaaagtggcagagct

SEQ ID NO: 48251 - DNA, 20 bp, Artificial Sequence
  Description of Artificial Sequence: Synthetic oligonucleotide
  Target: LAMA2; (+) strand; PAM type: NNNNGHTT; PAM sequence: ATAAGCTT
aatgtattgctgtaccctat

SEQ ID NO: 48252 - DNA, 20 bp, Artificial Sequence
  Description of Artificial Sequence: Synthetic oligonucleotide
  Target: LAMA2; (+) strand; PAM type: NNNNGHTT; PAM sequence: GCATGTTT
taaactggcatggtgcaatt

SEQ ID NO: 48253 - DNA, 20 bp, Artificial Sequence
  Description of Artificial Sequence: Synthetic oligonucleotide
  Target: LAMA2; (+) strand; PAM type: NNNNGHTT; PAM sequence: TCCAGATT
tgtgtgccactgcatctagc

SEQ ID NO: 48254 - DNA, 20 bp, Artificial Sequence
  Description of Artificial Sequence: Synthetic oligonucleotide
  Target: LAMA2; (+) strand; PAM type: NNNNGHTT; PAM sequence: CAGGGTTT
tttagaagttaattcttaca

SEQ ID NO: 48255 - DNA, 20 bp, Artificial Sequence
  Description of Artificial Sequence: Synthetic oligonucleotide
  Target: LAMA2; (+) strand; PAM type: NNNNGHTT; PAM sequence: ATAGGATT
tttctggagggacagaacta

SEQ ID NO: 48256 - DNA, 20 bp, Artificial Sequence
  Description of Artificial Sequence: Synthetic oligonucleotide
  Target: LAMA2; (+) strand; PAM type: NNNNGHTT; PAM sequence: GGGAGTTT
ggattgatgtatatatgaag

SEQ ID NO: 48257 - DNA, 20 bp, Artificial Sequence
  Description of Artificial Sequence: Synthetic oligonucleotide
  Target: LAMA2; (+) strand; PAM type: NNNNGHTT; PAM sequence: GTTCGATT
gctgagtagcaagaaagcca

SEQ ID NO: 48258 - DNA, 20 bp, Artificial Sequence
  Description of Artificial Sequence: Synthetic oligonucleotide
  Target: LAMA2; (+) strand; PAM type: NNNNGHTT; PAM sequence: GCCTGCTT
tagaccttccacgttctcct

SEQ ID NO: 48259 - DNA, 20 bp, Artificial Sequence
  Description of Artificial Sequence: Synthetic oligonucleotide
  Target: LAMA2; (+) strand; PAM type: NNNNGHTT; PAM sequence: AGCTGATT
tttatcctagccacgctggc

SEQ ID NO: 48260 - DNA, 20 bp, Artificial Sequence
  Description of Artificial Sequence: Synthetic oligonucleotide
  Target: LAMA2; (+) strand; PAM type: NNNNGHTT; PAM sequence: CAACGCTT
atattaatcaccacattctc

SEQ ID NO: 48261 - DNA, 20 bp, Artificial Sequence
  Description of Artificial Sequence: Synthetic oligonucleotide
  Target: LAMA2; (+) strand; PAM type: NNNNGHTT; PAM sequence: GTGAGATT
ctatttctccactatgaaca

SEQ ID NO: 48262 - DNA, 20 bp, Artificial Sequence
  Description of Artificial Sequence: Synthetic oligonucleotide
  Target: LAMA2; (+) strand; PAM type: NNNNGHTT; PAM sequence: TCATGCTT
caaatgttccaagaaaacaa

SEQ ID NO: 48263 - DNA, 20 bp, Artificial Sequence
  Description of Artificial Sequence: Synthetic oligonucleotide
  Target: LAMA2; (+) strand; PAM type: NNNNGHTT; PAM sequence: CGCCGTTT
agctatgactgctcctggat

SEQ ID NO: 48264 - DNA, 20 bp, Artificial Sequence
  Description of Artificial Sequence: Synthetic oligonucleotide
  Target: LAMA2; (+) strand; PAM type: NNNNGHTT; PAM sequence: TGTTGTTT
tcttcctaatacagagagta

SEQ ID NO: 48265 - DNA, 20 bp, Artificial Sequence
  Description of Artificial Sequence: Synthetic oligonucleotide
  Target: LAMA2; (+) strand; PAM type: NNNNGHTT; PAM sequence: AGTTGATT
tgggaaaagtaatgccatag

SEQ ID NO: 48266 - DNA, 20 bp, Artificial Sequence
  Description of Artificial Sequence: Synthetic oligonucleotide
  Target: LAMA2; (+) strand; PAM type: NNNNGHTT; PAM sequence: TATTGATT
aaatgtctaagtgacttaaa

SEQ ID NO: 48267 - DNA, 20 bp, Artificial Sequence
  Description of Artificial Sequence: Synthetic oligonucleotide
  Target: LAMA2; (+) strand; PAM type: NNNNGHTT; PAM sequence: TAAAGCTT
agatcaaacttcccaaacac

SEQ ID NO: 48268 - DNA, 20 bp, Artificial Sequence
  Description of Artificial Sequence: Synthetic oligonucleotide
  Target: LAMA2; (+) strand; PAM type: NNNNGHTT; PAM sequence: GTAAGCTT
gttcaccagtctgcagtaca

SEQ ID NO: 48269 - DNA, 20 bp, Artificial Sequence
  Description of Artificial Sequence: Synthetic oligonucleotide
  Target: LAMA2; (+) strand; PAM type: NNNNGHTT; PAM sequence: CCCAGTTT
atggggtagtacaaatttat

SEQ ID NO: 48270 - DNA, 20 bp, Artificial Sequence
  Description of Artificial Sequence: Synthetic oligonucleotide
  Target: LAMA2; (+) strand; PAM type: NNNNGHTT; PAM sequence: ATGTGATT
gaagtgatatatggtgttga

SEQ ID NO: 48271 - DNA, 20 bp, Artificial Sequence
  Description of Artificial Sequence: Synthetic oligonucleotide
  Target: LAMA2; (+) strand; PAM type: NNNNGHTT; PAM sequence: AGATGCTT
tgcaagatctactatctata

SEQ ID NO: 48272 - DNA, 20 bp, Artificial Sequence
  Description of Artificial Sequence: Synthetic oligonucleotide
  Target: LAMA2; (+) strand; PAM type: NNNNGHTT; PAM sequence: GTGGGATT
ctatgatctctccccaaaac

SEQ ID NO: 48273 - DNA, 20 bp, Artificial Sequence
  Description of Artificial Sequence: Synthetic oligonucleotide
  Target: LAMA2; (+) strand; PAM type: NNNNGHTT; PAM sequence: CTAGGTTT
tagaattatgaaataaacca

SEQ ID NO: 48274 - DNA, 20 bp, Artificial Sequence
  Description of Artificial Sequence: Synthetic oligonucleotide
  Target: LAMA2; (+) strand; PAM type: NNNNGHTT; PAM sequence: AAATGTTT
accactaggtttttagtgtg

SEQ ID NO: 48275 - DNA, 20 bp, Artificial Sequence
  Description of Artificial Sequence: Synthetic oligonucleotide
  Target: LAMA2; (+) strand; PAM type: NNNNGHTT; PAM sequence: GGGAGTTT
tatgtgctaggtaccaagtg

SEQ ID NO: 48276 - DNA, 20 bp, Artificial Sequence
  Description of Artificial Sequence: Synthetic oligonucleotide
  Target: LAMA2; (+) strand; PAM type: NNNNGHTT; PAM sequence: TTATGTTT
taggtaccaagtggggagtt

SEQ ID NO: 48277 - DNA, 20 bp, Artificial Sequence
  Description of Artificial Sequence: Synthetic oligonucleotide
  Target: LAMA2; (+) strand; PAM type: NNNNGHTT; PAM sequence: GTGTGATT
agagcaaacttcggaggtag

SEQ ID NO: 48278 - DNA, 20 bp, Artificial Sequence
  Description of Artificial Sequence: Synthetic oligonucleotide
  Target: LAMA2; (+) strand; PAM type: NNNNGHTT; PAM sequence: TAGTGCTT
taactttcccaagggccttg

SEQ ID NO: 48279 - DNA, 20 bp, Artificial Sequence
  Description of Artificial Sequence: Synthetic oligonucleotide
  Target: LAMA2; (+) strand; PAM type: NNNNGHTT; PAM sequence: ATGAGCTT
gctctggaaaatctccagaa

SEQ ID NO: 48280 - DNA, 20 bp, Artificial Sequence
  Description of Artificial Sequence: Synthetic oligonucleotide
  Target: LAMA2; (+) strand; PAM type: NNNNGHTT; PAM sequence: GTGTGATT
agaaatgagcttaatttttt

SEQ ID NO: 48281 - DNA, 20 bp, Artificial Sequence
  Description of Artificial Sequence: Synthetic oligonucleotide
  Target: LAMA2; (+) strand; PAM type: NNNNGHTT; PAM sequence: ACCTGTTT
aacaactaacacaacccttt

SEQ ID NO: 48282 - DNA, 20 bp, Artificial Sequence
  Description of Artificial Sequence: Synthetic oligonucleotide
  Target: LAMA2; (+) strand; PAM type: NNNNGHTT; PAM sequence: TGTTGATT
taaaatgtattttattaccc

SEQ ID NO: 48283 - DNA, 20 bp, Artificial Sequence
  Description of Artificial Sequence: Synthetic oligonucleotide
  Target: LAMA2; (+) strand; PAM type: NNNNGHTT; PAM sequence: TTGGGATT
acttagtatccattgcacct

SEQ ID NO: 48284 - DNA, 20 bp, Artificial Sequence
  Description of Artificial Sequence: Synthetic oligonucleotide
  Target: LAMA2; (+) strand; PAM type: NNNNGHTT; PAM sequence: TCTGGCTT
tagtattccaaggttggtgt

SEQ ID NO: 48285 - DNA, 20 bp, Artificial Sequence
  Description of Artificial Sequence: Synthetic oligonucleotide
  Target: LAMA2; (+) strand; PAM type: NNNNGHTT; PAM sequence: TTCTGCTT
tccaaggttggtgttctggc

SEQ ID NO: 48286 - DNA, 20 bp, Artificial Sequence
  Description of Artificial Sequence: Synthetic oligonucleotide
  Target: LAMA2; (+) strand; PAM type: NNNNGHTT; PAM sequence: TGAGGATT
tggaaggtgtacgtaagcaa

SEQ ID NO: 48287 - DNA, 20 bp, Artificial Sequence
  Description of Artificial Sequence: Synthetic oligonucleotide
  Target: LAMA2; (+) strand; PAM type: NNNNGHTT; PAM sequence: CTCTGTTT
cctacaaggcaagatgagaa

SEQ ID NO: 48288 - DNA, 20 bp, Artificial Sequence
  Description of Artificial Sequence: Synthetic oligonucleotide
  Target: LAMA2; (+) strand; PAM type: NNNNGHTT; PAM sequence: CAAGGATT
tttgttacataaattttcca

SEQ ID NO: 48289 - DNA, 20 bp, Artificial Sequence
  Description of Artificial Sequence: Synthetic oligonucleotide
  Target: LAMA2; (+) strand; PAM type: NNNNGHTT; PAM sequence: GCCTGTTT
tatctatttgacaatagcaa

SEQ ID NO: 48290 - DNA, 20 bp, Artificial Sequence
  Description of Artificial Sequence: Synthetic oligonucleotide
  Target: LAMA2; (+) strand; PAM type: NNNNGHTT; PAM sequence: TTTAGCTT
caatagcaagcctgtttctc

SEQ ID NO: 48291 - DNA, 20 bp, Artificial Sequence
  Description of Artificial Sequence: Synthetic oligonucleotide
  Target: LAMA2; (+) strand; PAM type: NNNNGHTT; PAM sequence: CTTGGATT
ttctctttagcttaaaggaa

SEQ ID NO: 48292 - DNA, 20 bp, Artificial Sequence
  Description of Artificial Sequence: Synthetic oligonucleotide
  Target: LAMA2; (+) strand; PAM type: NNNNGHTT; PAM sequence: TGTGGCTT
gatgttgtatattatgagcg

SEQ ID NO: 48293 - DNA, 20 bp, Artificial Sequence
  Description of Artificial Sequence: Synthetic oligonucleotide
  Target: LAMA2; (+) strand; PAM type: NNNNGHTT; PAM sequence: TTTTGTTT
tatattatgagcgtgtggct

SEQ ID NO: 48294 - DNA, 20 bp, Artificial Sequence
  Description of Artificial Sequence: Synthetic oligonucleotide
  Target: LAMA2; (+) strand; PAM type: NNNNGHTT; PAM sequence: TATGGTTT
attaatataaaactataact

SEQ ID NO: 48295 - DNA, 20 bp, Artificial Sequence
  Description of Artificial Sequence: Synthetic oligonucleotide
  Target: LAMA2; (+) strand; PAM type: NNNNGHTT; PAM sequence: ATTTGATT
aaaactataacttatggttt

SEQ ID NO: 48296 - DNA, 20 bp, Artificial Sequence
  Description of Artificial Sequence: Synthetic oligonucleotide
  Target: LAMA2; (+) strand; PAM type: NNNNGHTT; PAM sequence: CAATGTTT
tatggtttatttgattagat

SEQ ID NO: 48297 - DNA, 20 bp, Artificial Sequence
  Description of Artificial Sequence: Synthetic oligonucleotide
  Target: LAMA2; (+) strand; PAM type: NNNNGHTT; PAM sequence: GAATGTTT
ccatagtaaaagtgctaatg

SEQ ID NO: 48298 - DNA, 20 bp, Artificial Sequence
  Description of Artificial Sequence: Synthetic oligonucleotide
  Target: LAMA2; (+) strand; PAM type: NNNNGHTT; PAM sequence: CCCTGTTT
acaaacagctgttgcaaaga

SEQ ID NO: 48299 - DNA, 20 bp, Artificial Sequence
  Description of Artificial Sequence: Synthetic oligonucleotide
  Target: LAMA2; (+) strand; PAM type: NNNNGHTT; PAM sequence: TTGAGATT
ctaccatttactcacatctg

SEQ ID NO: 48300 - DNA, 20 bp, Artificial Sequence
  Description of Artificial Sequence: Synthetic oligonucleotide
  Target: LAMA2; (+) strand; PAM type: NNNNGHTT; PAM sequence: TCAAGATT
tgagattgtactatttcaac

SEQ ID NO: 48301 - DNA, 20 bp, Artificial Sequence
  Description of Artificial Sequence: Synthetic oligonucleotide
  Target: LAMA2; (+) strand; PAM type: NNNNGHTT; PAM sequence: TGATGTTT
gcacatcatcttcttctatg

SEQ ID NO: 48302 - DNA, 20 bp, Artificial Sequence
  Description of Artificial Sequence: Synthetic oligonucleotide
  Target: LAMA2; (+) strand; PAM type: NNNNGHTT; PAM sequence: AGGAGATT
tgttttgcaaatctattcat

SEQ ID NO: 48303 - DNA, 20 bp, Artificial Sequence
  Description of Artificial Sequence: Synthetic oligonucleotide
  Target: LAMA2; (+) strand; PAM type: NNNNGHTT; PAM sequence: ATTTGTTT
aagaaaataaaagctaatcc

SEQ ID NO: 48304 - DNA, 20 bp, Artificial Sequence
  Description of Artificial Sequence: Synthetic oligonucleotide
  Target: LAMA2; (+) strand; PAM type: NNNNGHTT; PAM sequence: TCTGGTTT
tatatgagaactcctaattg

SEQ ID NO: 48305 - DNA, 20 bp, Artificial Sequence
  Description of Artificial Sequence: Synthetic oligonucleotide
  Target: LAMA2; (+) strand; PAM type: NNNNGHTT; PAM sequence: CTGAGCTT
tcctgtgagcagtggacggg

SEQ ID NO: 48306 - DNA, 20 bp, Artificial Sequence
  Description of Artificial Sequence: Synthetic oligonucleotide
  Target: LAMA2; (+) strand; PAM type: NNNNGHTT; PAM sequence: AACTGATT
caggttatcttatcaggtta

SEQ ID NO: 48307 - DNA, 20 bp, Artificial Sequence
  Description of Artificial Sequence: Synthetic oligonucleotide
  Target: LAMA2; (+) strand; PAM type: NNNNGHTT; PAM sequence: GGATGTTT
gaaatgaatgcaggcaggca

SEQ ID NO: 48308 - DNA, 20 bp, Artificial Sequence
  Description of Artificial Sequence: Synthetic oligonucleotide
  Target: LAMA2; (+) strand; PAM type: NNNNGHTT; PAM sequence: CGAGGTTT
ggcaggcaggatgttttcct

SEQ ID NO: 48309 - DNA, 20 bp, Artificial Sequence
  Description of Artificial Sequence: Synthetic oligonucleotide
  Target: LAMA2; (+) strand; PAM type: NNNNGHTT; PAM sequence: CTCAGTTT
atatcccctggactgcataa

SEQ ID NO: 48310 - DNA, 20 bp, Artificial Sequence
  Description of Artificial Sequence: Synthetic oligonucleotide
  Target: LAMA2; (+) strand; PAM type: NNNNGHTT; PAM sequence: GCCTGTTT
aaacctctcatgtaaattct

SEQ ID NO: 48311 - DNA, 20 bp, Artificial Sequence
  Description of Artificial Sequence: Synthetic oligonucleotide
  Target: LAMA2; (+) strand; PAM type: NNNNGHTT; PAM sequence: TCTTGTTT
gttttctaattctacaatcc

SEQ ID NO: 48312 - DNA, 20 bp, Artificial Sequence
  Description of Artificial Sequence: Synthetic oligonucleotide
  Target: LAMA2; (+) strand; PAM type: NNNNGHTT; PAM sequence: TCGAGCTT
atgttctattctaataatta

SEQ ID NO: 48313 - DNA, 20 bp, Artificial Sequence
  Description of Artificial Sequence: Synthetic oligonucleotide
  Target: LAMA2; (+) strand; PAM type: NNNNGHTT; PAM sequence: CACTGTTT
aacaaaaccttgaagtaaaa

SEQ ID NO: 48314 - DNA, 20 bp, Artificial Sequence
  Description of Artificial Sequence: Synthetic oligonucleotide
  Target: LAMA2; (+) strand; PAM type: NNNNGHTT; PAM sequence: CAGAGTTT
ctatgggagggatacctttt

SEQ ID NO: 48315 - DNA, 20 bp, Artificial Sequence
  Description of Artificial Sequence: Synthetic oligonucleotide
  Target: LAMA2; (+) strand; PAM type: NNNNGHTT; PAM sequence: GCGGGCTT
cttttcagagtttaaggctc

SEQ ID NO: 48316 - DNA, 20 bp, Artificial Sequence
  Description of Artificial Sequence: Synthetic oligonucleotide
  Target: LAMA2; (+) strand; PAM type: NNNNGHTT; PAM sequence: AATCGCTT
ctttgggatctaagaagatg

SEQ ID NO: 48317 - DNA, 20 bp, Artificial Sequence
  Description of Artificial Sequence: Synthetic oligonucleotide
  Target: LAMA2; (+) strand; PAM type: NNNNGHTT; PAM sequence: CCCTGTTT
ctaagaagatgaatcgcttg

SEQ ID NO: 48318 - DNA, 20 bp, Artificial Sequence
  Description of Artificial Sequence: Synthetic oligonucleotide
  Target: LAMA2; (+) strand; PAM type: NNNNGHTT; PAM sequence: ATATGTTT
tcctaaatggaaattgacag

SEQ ID NO: 48319 - DNA, 20 bp, Artificial Sequence
  Description of Artificial Sequence: Synthetic oligonucleotide
  Target: LAMA2; (+) strand; PAM type: NNNNGHTT; PAM sequence: ATTTGATT
tattataaagcctttttctc

SEQ ID NO: 48320 - DNA, 20 bp, Artificial Sequence
  Description of Artificial Sequence: Synthetic oligonucleotide
  Target: LAMA2; (+) strand; PAM type: NNNNGHTT; PAM sequence: TTAGGTTT
ctggtaagcaaaagcaaata

SEQ ID NO: 48321 - DNA, 20 bp, Artificial Sequence
  Description of Artificial Sequence: Synthetic oligonucleotide
  Target: LAMA2; (+) strand; PAM type: NNNNGHTT; PAM sequence: CCAGGCTT
acatcagagaaccaaatgtt

SEQ ID NO: 48322 - DNA, 20 bp, Artificial Sequence
  Description of Artificial Sequence: Synthetic oligonucleotide
  Target: LAMA2; (+) strand; PAM type: NNNNGHTT; PAM sequence: AAAGGATT
gttccaggcttatttcatga

SEQ ID NO: 48323 - DNA, 20 bp, Artificial Sequence
  Description of Artificial Sequence: Synthetic oligonucleotide
  Target: LAMA2; (+) strand; PAM type: NNNNGHTT; PAM sequence: TTGAGATT
cattcctcaattcatatttc

SEQ ID NO: 48324 - DNA, 20 bp, Artificial Sequence
  Description of Artificial Sequence: Synthetic oligonucleotide
  Target: LAMA2; (+) strand; PAM type: NNNNGHTT; PAM sequence: TGAAGCTT
cctactgctaaattctttta

SEQ ID NO: 48325 - DNA, 20 bp, Artificial Sequence
  Description of Artificial Sequence: Synthetic oligonucleotide
  Target: LAMA2; (+) strand; PAM type: NNNNGHTT; PAM sequence: CTTAGTTT
tgctaaattcttttatgaag

SEQ ID NO: 48326 - DNA, 20 bp, Artificial Sequence
  Description of Artificial Sequence: Synthetic oligonucleotide
  Target: LAMA2; (+) strand; PAM type: NNNNGHTT; PAM sequence: GCTGGTTT
ataatattacttgcaaacaa

SEQ ID NO: 48327 - DNA, 20 bp, Artificial Sequence
  Description of Artificial Sequence: Synthetic oligonucleotide
  Target: LAMA2; (+) strand; PAM type: NNNNGHTT; PAM sequence: AATGGCTT
agctgaagaacaggaaagtg

SEQ ID NO: 48328 - DNA, 20 bp, Artificial Sequence
  Description of Artificial Sequence: Synthetic oligonucleotide
  Target: LAMA2; (+) strand; PAM type: NNNNGHTT; PAM sequence: GACAGATT
tctctagccaagagaacaat

SEQ ID NO: 48329 - DNA, 20 bp, Artificial Sequence
  Description of Artificial Sequence: Synthetic oligonucleotide
  Target: LAMA2; (+) strand; PAM type: NNNNGHTT; PAM sequence: CCCTGTTT
atttttttatatagagttct

SEQ ID NO: 48330 - DNA, 20 bp, Artificial Sequence
  Description of Artificial Sequence: Synthetic oligonucleotide
  Target: LAMA2; (+) strand; PAM type: NNNNGHTT; PAM sequence: TCAGGCTT
tggttgccactgactctgca

SEQ ID NO: 48331 - DNA, 20 bp, Artificial Sequence
  Description of Artificial Sequence: Synthetic oligonucleotide
  Target: LAMA2; (+) strand; PAM type: NNNNGHTT; PAM sequence: AACTGTTT
ctttggaaatatcactaaaa

SEQ ID NO: 48332 - DNA, 20 bp, Artificial Sequence
  Description of Artificial Sequence: Synthetic oligonucleotide
  Target: LAMA2; (+) strand; PAM type: NNNNGHTT; PAM sequence: AAGTGTTT
gctaaacaaacaaagaaaat

SEQ ID NO: 48333 - DNA, 20 bp, Artificial Sequence
  Description of Artificial Sequence: Synthetic oligonucleotide
  Target: LAMA2; (+) strand; PAM type: NNNNGHTT; PAM sequence: TCATGTTT
ccaaacaacttaataaatat
